United States Patent Application Publication US 2021/0180091 A1 - sequence listing, part 3

SEQ ID NO: 44942 - DNA, 20 bp, Artificial Sequence
  Synthetic oligonucleotide; CAG chr11 5258320 5258339 5258323 -
gactcagctccaggtaaggt

SEQ ID NO: 44943 - DNA, 20 bp, Artificial Sequence
  Synthetic oligonucleotide; TGG chr11 5258305 5258324 5258308 -
aaggtcagaatcttctcctg

SEQ ID NO: 44944 - DNA, 20 bp, Artificial Sequence
  Synthetic oligonucleotide; TAG chr11 5258300 5258319 5258303 -
cagaatcttctcctgtggtc

SEQ ID NO: 44945 - DNA, 20 bp, Artificial Sequence
  Synthetic oligonucleotide; CAG chr11 5258292 5258311 5258295 -
tctcctgtggtctagatctt

SEQ ID NO: 44946 - DNA, 20 bp, Artificial Sequence
  Synthetic oligonucleotide; AGG chr11 5258291 5258310 5258294 -
ctcctgtggtctagatcttc

SEQ ID NO: 44947 - DNA, 20 bp, Artificial Sequence
  Synthetic oligonucleotide; CAG chr11 5258283 5258302 5258286 -
gtctagatcttcaggttccc

SEQ ID NO: 44948 - DNA, 20 bp, Artificial Sequence
  Synthetic oligonucleotide; GAG chr11 5258279 5258298 5258282 -
agatcttcaggttccccagt

SEQ ID NO: 44949 - DNA, 20 bp, Artificial Sequence
  Synthetic oligonucleotide; AGG chr11 5258278 5258297 5258281 -
gatcttcaggttccccagtg

SEQ ID NO: 44950 - DNA, 20 bp, Artificial Sequence
  Synthetic oligonucleotide; TGG chr11 5258266 5258285 5258269 -
ccccagtgaggatgtgtgtt

SEQ ID NO: 44951 - DNA, 20 bp, Artificial Sequence
  Synthetic oligonucleotide; GGG chr11 5258265 5258284 5258268 -
cccagtgaggatgtgtgttt

SEQ ID NO: 44952 - DNA, 20 bp, Artificial Sequence
  Synthetic oligonucleotide; GGG chr11 5258264 5258283 5258267 -
ccagtgaggatgtgtgtttg

SEQ ID NO: 44953 - DNA, 20 bp, Artificial Sequence
  Synthetic oligonucleotide; GGG chr11 5258263 5258282 5258266 -
cagtgaggatgtgtgtttgg

SEQ ID NO: 44954 - DNA, 20 bp, Artificial Sequence
  Synthetic oligonucleotide; TAG chr11 5258260 5258279 5258263 -
tgaggatgtgtgtttggggg

SEQ ID NO: 44955 - DNA, 20 bp, Artificial Sequence
  Synthetic oligonucleotide; CGG chr11 5258256 5258275 5258259 -
gatgtgtgtttgggggtaga

SEQ ID NO: 44956 - DNA, 20 bp, Artificial Sequence
  Synthetic oligonucleotide; CAG chr11 5258234 5258253 5258237 -
gtcccccttttccacttcca

SEQ ID NO: 44957 - DNA, 20 bp, Artificial Sequence
  Synthetic oligonucleotide; TGG chr11 5258229 5258248 5258232 -
ccttttccacttccacagtt

SEQ ID NO: 44958 - DNA, 20 bp, Artificial Sequence
  Synthetic oligonucleotide; GGG chr11 5258228 5258247 5258231 -
cttttccacttccacagttt

SEQ ID NO: 44959 - DNA, 20 bp, Artificial Sequence
  Synthetic oligonucleotide; TGG chr11 5258212 5258231 5258215 -
gtttgggcactcacaatatt

SEQ ID NO: 44960 - DNA, 20 bp, Artificial Sequence
  Synthetic oligonucleotide; GGG chr11 5258211 5258230 5258214 -
tttgggcactcacaatattt

SEQ ID NO: 44961 - DNA, 20 bp, Artificial Sequence
  Synthetic oligonucleotide; GGG chr11 5258210 5258229 5258213 -
ttgggcactcacaatatttg

SEQ ID NO: 44962 - DNA, 20 bp, Artificial Sequence
  Synthetic oligonucleotide; CGG chr11 5258200 5258219 5258203 -
acaatatttggggtgtttcc

SEQ ID NO: 44963 - DNA, 20 bp, Artificial Sequence
  Synthetic oligonucleotide; GGG chr11 5258199 5258218 5258202 -
caatatttggggtgtttccc

SEQ ID NO: 44964 - DNA, 20 bp, Artificial Sequence
  Synthetic oligonucleotide; CAG chr11 5258191 5258210 5258194 -
ggggtgtttcccgggtcctg

SEQ ID NO: 44965 - DNA, 20 bp, Artificial Sequence
  Synthetic oligonucleotide; AGG chr11 5258190 5258209 5258193 -
gggtgtttcccgggtcctgc

SEQ ID NO: 44966 - DNA, 20 bp, Artificial Sequence
  Synthetic oligonucleotide; GAG chr11 5258188 5258207 5258191 -
gtgtttcccgggtcctgcag

SEQ ID NO: 44967 - DNA, 20 bp, Artificial Sequence
  Synthetic oligonucleotide; CAG chr11 5258171 5258190 5258174 -
caggagcaatctgcttcttt

SEQ ID NO: 44968 - DNA, 20 bp, Artificial Sequence
  Synthetic oligonucleotide; GAG chr11 5258169 5258188 5258172 -
ggagcaatctgcttctttca

SEQ ID NO: 44969 - DNA, 20 bp, Artificial Sequence
  Synthetic oligonucleotide; AGG chr11 5258168 5258187 5258171 -
gagcaatctgcttctttcag

SEQ ID NO: 44970 - DNA, 20 bp, Artificial Sequence
  Synthetic oligonucleotide; GGG chr11 5258167 5258186 5258170 -
agcaatctgcttctttcaga

SEQ ID NO: 44971 - DNA, 20 bp, Artificial Sequence
  Synthetic oligonucleotide; CAG chr11 5258150 5258169 5258153 -
agagggtgtgtgcgttctct

SEQ ID NO: 44972 - DNA, 20 bp, Artificial Sequence
  Synthetic oligonucleotide; CAG chr11 5258128 5258147 5258131 -
gctttcttgatttatttctg

SEQ ID NO: 44973 - DNA, 20 bp, Artificial Sequence
  Synthetic oligonucleotide; AGG chr11 5258127 5258146 5258130 -
ctttcttgatttatttctgc

SEQ ID NO: 44974 - DNA, 20 bp, Artificial Sequence
  Synthetic oligonucleotide; TGG chr11 5258124 5258143 5258127 -
tcttgatttatttctgcagg

SEQ ID NO: 44975 - DNA, 20 bp, Artificial Sequence
  Synthetic oligonucleotide; TGG chr11 5258100 5258119 5258103 -
tctgcaaaaaaaattcctga

SEQ ID NO: 44976 - DNA, 20 bp, Artificial Sequence
  Synthetic oligonucleotide; GGG chr11 5258099 5258118 5258102 -
ctgcaaaaaaaattcctgat

SEQ ID NO: 44977 - DNA, 20 bp, Artificial Sequence
  Synthetic oligonucleotide; GAG chr11 5258097 5258116 5258100 -
gcaaaaaaaattcctgatgg

SEQ ID NO: 44978 - DNA, 20 bp, Artificial Sequence
  Synthetic oligonucleotide; GAG chr11 5258069 5258088 5258072 -
acatgctgctctgtgcatcc

SEQ ID NO: 44979 - DNA, 20 bp, Artificial Sequence
  Synthetic oligonucleotide; TGG chr11 5258066 5258085 5258069 -
tgctgctctgtgcatccgag

SEQ ID NO: 44980 - DNA, 20 bp, Artificial Sequence
  Synthetic oligonucleotide; GGG chr11 5258065 5258084 5258068 -
gctgctctgtgcatccgagt

SEQ ID NO: 44981 - DNA, 20 bp, Artificial Sequence
  Synthetic oligonucleotide; GAG chr11 5258063 5258082 5258066 -
tgctctgtgcatccgagtgg

SEQ ID NO: 44982 - DNA, 20 bp, Artificial Sequence
  Synthetic oligonucleotide; CGG chr11 5258011 5258030 5258014 -
gccatcaccctctaatttgt

SEQ ID NO: 44983 - DNA, 20 bp, Artificial Sequence
  Synthetic oligonucleotide; AAG chr11 5257929 5257948 5257932 -
ctatactgccctttgatatc

SEQ ID NO: 44984 - DNA, 20 bp, Artificial Sequence
  Synthetic oligonucleotide; AGG chr11 5257928 5257947 5257931 -
tatactgccctttgatatca

SEQ ID NO: 44985 - DNA, 20 bp, Artificial Sequence
  Synthetic oligonucleotide; AAG chr11 5257921 5257940 5257924 -
ccctttgatatcaaggaatc

SEQ ID NO: 44986 - DNA, 20 bp, Artificial Sequence
  Synthetic oligonucleotide; AGG chr11 5257920 5257939 5257923 -
cctttgatatcaaggaatca

SEQ ID NO: 44987 - DNA, 20 bp, Artificial Sequence
  Synthetic oligonucleotide; GAG chr11 5257907 5257926 5257910 -
ggaatcaaggacgtgatgtt

SEQ ID NO: 44988 - DNA, 20 bp, Artificial Sequence
  Synthetic oligonucleotide; AGG chr11 5257906 5257925 5257909 -
gaatcaaggacgtgatgttg

SEQ ID NO: 44989 - DNA, 20 bp, Artificial Sequence
  Synthetic oligonucleotide; GGG chr11 5257905 5257924 5257908 -
aatcaaggacgtgatgttga

SEQ ID NO: 44990 - DNA, 20 bp, Artificial Sequence
  Synthetic oligonucleotide; GGG chr11 5257904 5257923 5257907 -
atcaaggacgtgatgttgag

SEQ ID NO: 44991 - DNA, 20 bp, Artificial Sequence
  Synthetic oligonucleotide; TGG chr11 5257901 5257920 5257904 -
aaggacgtgatgttgagggg

SEQ ID NO: 44992 - DNA, 20 bp, Artificial Sequence
  Synthetic oligonucleotide; GGG chr11 5257900 5257919 5257903 -
aggacgtgatgttgaggggt

SEQ ID NO: 44993 - DNA, 20 bp, Artificial Sequence
  Synthetic oligonucleotide; CAG chr11 5257897 5257916 5257900 -
acgtgatgttgaggggtggg

SEQ ID NO: 44994 - DNA, 20 bp, Artificial Sequence
  Synthetic oligonucleotide; TGG chr11 5257894 5257913 5257897 -
tgatgttgaggggtgggcag

SEQ ID NO: 44995 - DNA, 20 bp, Artificial Sequence
  Synthetic oligonucleotide; TAG chr11 5257874 5257893 5257877 -
tggatacactctttacccct

SEQ ID NO: 44996 - DNA, 20 bp, Artificial Sequence
  Synthetic oligonucleotide; AGG chr11 5257873 5257892 5257876 -
ggatacactctttacccctt

SEQ ID NO: 44997 - DNA, 20 bp, Artificial Sequence
  Synthetic oligonucleotide; GGG chr11 5257872 5257891 5257875 -
gatacactctttacccctta

SEQ ID NO: 44998 - DNA, 20 bp, Artificial Sequence
  Synthetic oligonucleotide; GAG chr11 5257870 5257889 5257873 -
tacactctttaccccttagg

SEQ ID NO: 44999 - DNA, 20 bp, Artificial Sequence
  Synthetic oligonucleotide; TAG chr11 5257860 5257879 5257863 -
accccttagggagctatatc

SEQ ID NO: 45000 - DNA, 20 bp, Artificial Sequence
  Synthetic oligonucleotide; TAG chr11 5257854 5257873 5257857 -
tagggagctatatctagatt

SEQ ID NO: 45001 - DNA, 20 bp, Artificial Sequence
  Synthetic oligonucleotide; AAG chr11 5257838 5257857 5257841 -
gatttagatattgccaattc

SEQ ID NO: 45002 - DNA, 20 bp, Artificial Sequence
  Synthetic oligonucleotide; AAG chr11 5257822 5257841 5257825 -
attcaagataacttaattga

SEQ ID NO: 45003 - DNA, 20 bp, Artificial Sequence
  Synthetic oligonucleotide; AAG chr11 5257774 5257793 5257777 -
cacacacacatctgcatgac

SEQ ID NO: 45004 - DNA, 20 bp, Artificial Sequence
  Synthetic oligonucleotide; TAG chr11 5257763 5257782 5257766 -
ctgcatgacaagatttttaa

SEQ ID NO: 45005 - DNA, 20 bp, Artificial Sequence
  Synthetic oligonucleotide; AAG chr11 5257756 5257775 5257759 -
acaagatttttaatagttga

SEQ ID NO: 45006 - DNA, 20 bp, Artificial Sequence
  Synthetic oligonucleotide; CAG chr11 5257734 5257753 5257737 -
gaataactaataattgtcca

SEQ ID NO: 45007 - DNA, 20 bp, Artificial Sequence
  Synthetic oligonucleotide; AGG chr11 5257733 5257752 5257736 -
aataactaataattgtccac

SEQ ID NO: 45008 - DNA, 20 bp, Artificial Sequence
  Synthetic oligonucleotide; AAG chr11 5257726 5257745 5257729 -
aataattgtccacaggcaat

SEQ ID NO: 45009 - DNA, 20 bp, Artificial Sequence
  Synthetic oligonucleotide; AGG chr11 5257725 5257744 5257728 -
ataattgtccacaggcaata

SEQ ID NO: 45010 - DNA, 20 bp, Artificial Sequence
  Synthetic oligonucleotide; GGG chr11 5257724 5257743 5257727 -
taattgtccacaggcaataa

SEQ ID NO: 45011 - DNA, 20 bp, Artificial Sequence
  Synthetic oligonucleotide; AAG chr11 5257715 5257734 5257718 -
acaggcaataagggcttttt

SEQ ID NO: 45012 - DNA, 20 bp, Artificial Sequence
  Synthetic oligonucleotide; CAG chr11 5257707 5257726 5257710 -
taagggctttttaagcaaaa

SEQ ID NO: 45013 - DNA, 20 bp, Artificial Sequence
  Synthetic oligonucleotide; CAG chr11 5257694 5257713 5257697 -
agcaaaacagttgtgataaa

SEQ ID NO: 45014 - DNA, 20 bp, Artificial Sequence
  Synthetic oligonucleotide; AGG chr11 5257693 5257712 5257696 -
gcaaaacagttgtgataaac

SEQ ID NO: 45015 - DNA, 20 bp, Artificial Sequence
  Synthetic oligonucleotide; TAG chr11 5257683 5257702 5257686 -
tgtgataaacaggtcattct

SEQ ID NO: 45016 - DNA, 20 bp, Artificial Sequence
  Synthetic oligonucleotide; TAG chr11 5257678 5257697 5257681 -
taaacaggtcattcttagaa

SEQ ID NO: 45017 - DNA, 20 bp, Artificial Sequence
  Synthetic oligonucleotide; CAG chr11 5257670 5257689 5257673 -
tcattcttagaatagtaatc

SEQ ID NO: 45018 - DNA, 20 bp, Artificial Sequence
  Synthetic oligonucleotide; TAG chr11 5257663 5257682 5257666 -
tagaatagtaatccagccaa

SEQ ID NO: 45019 - DNA, 20 bp, Artificial Sequence
  Synthetic oligonucleotide; CAG chr11 5257658 5257677 5257661 -
tagtaatccagccaatagta

SEQ ID NO: 45020 - DNA, 20 bp, Artificial Sequence
  Synthetic oligonucleotide; AGG chr11 5257657 5257676 5257660 -
agtaatccagccaatagtac

SEQ ID NO: 45021 - DNA, 20 bp, Artificial Sequence
  Synthetic oligonucleotide; TAG chr11 5257649 5257668 5257652 -
agccaatagtacaggttgct

SEQ ID NO: 45022 - DNA, 20 bp, Artificial Sequence
  Synthetic oligonucleotide; GAG chr11 5257647 5257666 5257650 -
ccaatagtacaggttgctta

SEQ ID NO: 45023 - DNA, 20 bp, Artificial Sequence
  Synthetic oligonucleotide; CAG chr11 5257631 5257650 5257634 -
cttagagattatgtcattac

SEQ ID NO: 45024 - DNA, 20 bp, Artificial Sequence
  Synthetic oligonucleotide; GAG chr11 5257629 5257648 5257632 -
tagagattatgtcattacca

SEQ ID NO: 45025 - DNA, 20 bp, Artificial Sequence
  Synthetic oligonucleotide; TGG chr11 5257612 5257631 5257615 -
ccagagttaaaattctataa

SEQ ID NO: 45026 - DNA, 20 bp, Artificial Sequence
  Synthetic oligonucleotide; GAG chr11 5257590 5257609 5257593 -
gcttctcactccctaccact

SEQ ID NO: 45027 - DNA, 20 bp, Artificial Sequence
  Synthetic oligonucleotide; AGG chr11 5257589 5257608 5257592 -
cttctcactccctaccactg

SEQ ID NO: 45028 - DNA, 20 bp, Artificial Sequence
  Synthetic oligonucleotide; AAG chr11 5257584 5257603 5257587 -
cactccctaccactgaggac

SEQ ID NO: 45029 - DNA, 20 bp, Artificial Sequence
  Synthetic oligonucleotide; TAG chr11 5257571 5257590 5257574 -
tgaggacaagtttatgtcct

SEQ ID NO: 45030 - DNA, 20 bp, Artificial Sequence
  Synthetic oligonucleotide; AGG chr11 5257570 5257589 5257573 -
gaggacaagtttatgtcctt

SEQ ID NO: 45031 - DNA, 20 bp, Artificial Sequence
  Synthetic oligonucleotide; CGG chr11 5257515 5257534 5257518 -
ttctccactttacatatcaa

SEQ ID NO: 45032 - DNA, 20 bp, Artificial Sequence
  Synthetic oligonucleotide; TGG chr11 5257509 5257528 5257512 -
actttacatatcaacggcac

SEQ ID NO: 45033 - DNA, 20 bp, Artificial Sequence
  Synthetic oligonucleotide; TGG chr11 5257489 5257508 5257492 -
tggttctttatctaactctc

SEQ ID NO: 45034 - DNA, 20 bp, Artificial Sequence
  Synthetic oligonucleotide; CAG chr11 5257484 5257503 5257487 -
ctttatctaactctctggca

SEQ ID NO: 45035 - DNA, 20 bp, Artificial Sequence
  Synthetic oligonucleotide; CAG chr11 5257481 5257500 5257484 -
tatctaactctctggcacag

SEQ ID NO: 45036 - DNA, 20 bp, Artificial Sequence
  Synthetic oligonucleotide; AGG chr11 5257480 5257499 5257483 -
atctaactctctggcacagc

SEQ ID NO: 45037 - DNA, 20 bp, Artificial Sequence
  Synthetic oligonucleotide; GAG chr11 5257478 5257497 5257481 -
ctaactctctggcacagcag

SEQ ID NO: 45038 - DNA, 20 bp, Artificial Sequence
  Synthetic oligonucleotide; CAG chr11 5257458 5257477 5257461 -
gagtttgttttcttctgctt

SEQ ID NO: 45039 - DNA, 20 bp, Artificial Sequence
  Synthetic oligonucleotide; GAG chr11 5257456 5257475 5257459 -
gtttgttttcttctgcttca

SEQ ID NO: 45040 - DNA, 20 bp, Artificial Sequence
  Synthetic oligonucleotide; CAG chr11 5257436 5257455 5257439 -
gagctttgaatttactattt

SEQ ID NO: 45041 - DNA, 20 bp, Artificial Sequence
  Synthetic oligonucleotide; TGG chr11 5257418 5257437 5257421 -
ttcagcttctaaactttatt

SEQ ID NO: 45042 - DNA, 20 bp, Artificial Sequence
  Synthetic oligonucleotide; TGG chr11 5257402 5257421 5257405 -
tatttggcaatgccttccca

SEQ ID NO: 45043 - DNA, 20 bp, Artificial Sequence
  Synthetic oligonucleotide; CAG chr11 5257399 5257418 5257402 -
ttggcaatgccttcccatgg

SEQ ID NO: 45044 - DNA, 20 bp, Artificial Sequence
  Synthetic oligonucleotide; TAG chr11 5257343 5257362 5257346 -
tttctccttaatttcattct

SEQ ID NO: 45045 - DNA, 20 bp, Artificial Sequence
  Synthetic oligonucleotide; TAG chr11 5257278 5257297 5257281 -
aattttatgtatgttctacc

SEQ ID NO: 45046 - DNA, 20 bp, Artificial Sequence
  Synthetic oligonucleotide; CAG chr11 5257264 5257283 5257267 -
tctacctagattataatctt

SEQ ID NO: 45047 - DNA, 20 bp, Artificial Sequence
  Synthetic oligonucleotide; GAG chr11 5257262 5257281 5257265 -
tacctagattataatcttca

SEQ ID NO: 45048 - DNA, 20 bp, Artificial Sequence
  Synthetic oligonucleotide; AGG chr11 5257261 5257280 5257264 -
acctagattataatcttcag

SEQ ID NO: 45049 - DNA, 20 bp, Artificial Sequence
  Synthetic oligonucleotide; AAG chr11 5257257 5257276 5257260 -
agattataatcttcagagga

SEQ ID NO: 45050 - DNA, 20 bp, Artificial Sequence
  Synthetic oligonucleotide; CAG chr11 5257191 5257210 5257194 -
aaattatgacatttatttaa

SEQ ID NO: 45051 - DNA, 20 bp, Artificial Sequence
  Synthetic oligonucleotide; TGG chr11 5257158 5257177 5257161 -
aacaaatgtttgaaaataca

SEQ ID NO: 45052 - DNA, 20 bp, Artificial Sequence
  Synthetic oligonucleotide; GGG chr11 5257157 5257176 5257160 -
acaaatgtttgaaaatacat

SEQ ID NO: 45053 - DNA, 20 bp, Artificial Sequence
  Synthetic oligonucleotide; AAG chr11 5257153 5257172 5257156 -
atgtttgaaaatacatggga

SEQ ID NO: 45054 - DNA, 20 bp, Artificial Sequence
  Synthetic oligonucleotide; AAG chr11 5257118 5257137 5257121 -
cacttgaaattgcttgtgta

SEQ ID NO: 45055 - DNA, 20 bp, Artificial Sequence
  Synthetic oligonucleotide; CAG chr11 5257112 5257131 5257115 -
aaattgcttgtgtaaagaaa

SEQ ID NO: 45056 - DNA, 20 bp, Artificial Sequence
  Synthetic oligonucleotide; CAG chr11 5257103 5257122 5257106 -
gtgtaaagaaacagttttat

SEQ ID NO: 45057 - DNA, 20 bp, Artificial Sequence
  Synthetic oligonucleotide; TAG chr11 5257099 5257118 5257102 -
aaagaaacagttttatcagt

SEQ ID NO: 45058 - DNA, 20 bp, Artificial Sequence
  Synthetic oligonucleotide; AGG chr11 5257098 5257117 5257101 -
aagaaacagttttatcagtt

SEQ ID NO: 45059 - DNA, 20 bp, Artificial Sequence
  Synthetic oligonucleotide; CAG chr11 5257082 5257101 5257085 -
agttaggatttaatcaatgt

SEQ ID NO: 45060 - DNA, 20 bp, Artificial Sequence
  Synthetic oligonucleotide; AAG chr11 5257079 5257098 5257082 -
taggatttaatcaatgtcag

SEQ ID NO: 45061 - DNA, 20 bp, Artificial Sequence
  Synthetic oligonucleotide; TAG chr11 5257068 5257087 5257071 -
caatgtcagaagcaatgata

SEQ ID NO: 45062 - DNA, 20 bp, Artificial Sequence
  Synthetic oligonucleotide; AGG chr11 5257067 5257086 5257070 -
aatgtcagaagcaatgatat

SEQ ID NO: 45063 - DNA, 20 bp, Artificial Sequence
  Synthetic oligonucleotide; GAG chr11 5257057 5257076 5257060 -
gcaatgatataggaaaaatc

SEQ ID NO: 45064 - DNA, 20 bp, Artificial Sequence
  Synthetic oligonucleotide; AGG chr11 5257056 5257075 5257059 -
caatgatataggaaaaatcg

SEQ ID NO: 45065 - DNA, 20 bp, Artificial Sequence
  Synthetic oligonucleotide; AAG chr11 5257050 5257069 5257053 -
tataggaaaaatcgaggaat

SEQ ID NO: 45066 - DNA, 20 bp, Artificial Sequence
  Synthetic oligonucleotide; CAG chr11 5257046 5257065 5257049 -
ggaaaaatcgaggaataaga

SEQ ID NO: 45067 - DNA, 20 bp, Artificial Sequence
  Synthetic oligonucleotide; TGG chr11 5257040 5257059 5257043 -
atcgaggaataagacagtta

SEQ ID NO: 45068 - DNA, 20 bp, Artificial Sequence
  Synthetic oligonucleotide; AAG chr11 5257035 5257054 5257038 -
ggaataagacagttatggat

SEQ ID NO: 45069 - DNA, 20 bp, Artificial Sequence
  Synthetic oligonucleotide; AGG chr11 5257034 5257053 5257037 -
gaataagacagttatggata

SEQ ID NO: 45070 - DNA, 20 bp, Artificial Sequence
  Synthetic oligonucleotide; GAG chr11 5257032 5257051 5257035 -
ataagacagttatggataag

SEQ ID NO: 45071 - DNA, 20 bp, Artificial Sequence
  Synthetic oligonucleotide; AAG chr11 5257011 5257030 5257014 -
agaaatcaacaaactcttaa

SEQ ID NO: 45072 - DNA, 20 bp, Artificial Sequence
  Synthetic oligonucleotide; AAG chr11 5256996 5257015 5256999 -
cttaaaagatattgcctcaa

SEQ ID NO: 45073 - DNA, 20 bp, Artificial Sequence
  Synthetic oligonucleotide; AAG chr11 5256990 5257009 5256993 -
agatattgcctcaaaagcat

SEQ ID NO: 45074 - DNA, 20 bp, Artificial Sequence
  Synthetic oligonucleotide; GAG chr11 5256988 5257007 5256991 -
atattgcctcaaaagcataa

SEQ ID NO: 45075 - DNA, 20 bp, Artificial Sequence
  Synthetic oligonucleotide; AGG chr11 5256987 5257006 5256990 -
tattgcctcaaaagcataag

SEQ ID NO: 45076 - DNA, 20 bp, Artificial Sequence
  Synthetic oligonucleotide; AAG chr11 5256980 5256999 5256983 -
tcaaaagcataagaggaaat

SEQ ID NO: 45077 - DNA, 20 bp, Artificial Sequence
  Synthetic oligonucleotide; AGG chr11 5256979 5256998 5256982 -
caaaagcataagaggaaata

SEQ ID NO: 45078 - DNA, 20 bp, Artificial Sequence
  Synthetic oligonucleotide; GGG chr11 5256978 5256997 5256981 -
aaaagcataagaggaaataa

SEQ ID NO: 45079 - DNA, 20 bp, Artificial Sequence
  Synthetic oligonucleotide; TAG chr11 5256960 5256979 5256963 -
aagggtttatacatgacttt

SEQ ID NO: 45080 - DNA, 20 bp, Artificial Sequence
  Synthetic oligonucleotide; TGG chr11 5256947 5256966 5256950 -
tgacttttagaacactgcct

SEQ ID NO: 45081 - DNA, 20 bp, Artificial Sequence
  Synthetic oligonucleotide; TGG chr11 5256940 5256959 5256943 -
tagaacactgccttggtttt

SEQ ID NO: 45082 - DNA, 20 bp, Artificial Sequence
  Synthetic oligonucleotide; TGG chr11 5256932 5256951 5256935 -
tgccttggtttttggataaa

SEQ ID NO: 45083 - DNA, 20 bp, Artificial Sequence
  Synthetic oligonucleotide; GGG chr11 5256931 5256950 5256934 -
gccttggtttttggataaat

SEQ ID NO: 45084 - DNA, 20 bp, Artificial Sequence
  Synthetic oligonucleotide; GGG chr11 5256930 5256949 5256933 -
ccttggtttttggataaatg

SEQ ID NO: 45085 - DNA, 20 bp, Artificial Sequence
  Synthetic oligonucleotide; AAG chr11 5256927 5256946 5256930 -
tggtttttggataaatgggg

SEQ ID NO: 45086 - DNA, 20 bp, Artificial Sequence
  Synthetic oligonucleotide; CAG chr11 5256913 5256932 5256916 -
atggggaagttgtttgaaaa

SEQ ID NO: 45087 - DNA, 20 bp, Artificial Sequence
  Synthetic oligonucleotide; AGG chr11 5256912 5256931 5256915 -
tggggaagttgtttgaaaac

SEQ ID NO: 45088 - DNA, 20 bp, Artificial Sequence
  Synthetic oligonucleotide; GAG chr11 5256910 5256929 5256913 -
gggaagttgtttgaaaacag

SEQ ID NO: 45089 - DNA, 20 bp, Artificial Sequence
  Synthetic oligonucleotide; AGG chr11 5256909 5256928 5256912 -
ggaagttgtttgaaaacagg

SEQ ID NO: 45090 - DNA, 20 bp, Artificial Sequence
  Synthetic oligonucleotide; GGG chr11 5256908 5256927 5256911 -
gaagttgtttgaaaacagga

SEQ ID NO: 45091 - DNA, 20 bp, Artificial Sequence
  Synthetic oligonucleotide; TAG chr11 5256901 5256920 5256904 -
tttgaaaacaggagggatcc

SEQ ID NO: 45092 - DNA, 20 bp, Artificial Sequence
  Synthetic oligonucleotide; TAG chr11 5256890 5256909 5256893 -
gagggatcctagatattcct

SEQ ID NO: 45093 - DNA, 20 bp, Artificial Sequence
  Synthetic oligonucleotide; GAG chr11 5256884 5256903 5256887 -
tcctagatattccttagtct

SEQ ID NO: 45094 - DNA, 20 bp, Artificial Sequence
  Synthetic oligonucleotide; AGG chr11 5256883 5256902 5256886 -
cctagatattccttagtctg

SEQ ID NO: 45095 - DNA, 20 bp, Artificial Sequence
  Synthetic oligonucleotide; GAG chr11 5256881 5256900 5256884 -
tagatattccttagtctgag

SEQ ID NO: 45096 - DNA, 20 bp, Artificial Sequence
  Synthetic oligonucleotide; AGG chr11 5256880 5256899 5256883 -
agatattccttagtctgagg

SEQ ID NO: 45097 - DNA, 20 bp, Artificial Sequence
  Synthetic oligonucleotide; GAG chr11 5256878 5256897 5256881 -
atattccttagtctgaggag

SEQ ID NO: 45098 - DNA, 20 bp, Artificial Sequence
  Synthetic oligonucleotide; AAG chr11 5256870 5256889 5256873 -
tagtctgaggaggagcaatt

SEQ ID NO: 45099 - DNA, 20 bp, Artificial Sequence
  Synthetic oligonucleotide; TAG chr11 5256856 5256875 5256859 -
gcaattaagattcacttgtt

SEQ ID NO: 45100 - DNA, 20 bp, Artificial Sequence
  Synthetic oligonucleotide; GAG chr11 5256854 5256873 5256857 -
aattaagattcacttgttta

SEQ ID NO: 45101 - DNA, 20 bp, Artificial Sequence
  Synthetic oligonucleotide; AGG chr11 5256853 5256872 5256856 -
attaagattcacttgtttag

SEQ ID NO: 45102 - DNA, 20 bp, Artificial Sequence
  Synthetic oligonucleotide; TGG chr11 5256849 5256868 5256852 -
agattcacttgtttagaggc

SEQ ID NO: 45103 - DNA, 20 bp, Artificial Sequence
  Synthetic oligonucleotide; GGG chr11 5256848 5256867 5256851 -
gattcacttgtttagaggct

SEQ ID NO: 45104 - DNA, 20 bp, Artificial Sequence
  Synthetic oligonucleotide; GAG chr11 5256846 5256865 5256849 -
ttcacttgtttagaggctgg

SEQ ID NO: 45105 - DNA, 20 bp, Artificial Sequence
  Synthetic oligonucleotide; TGG chr11 5256843 5256862 5256846 -
acttgtttagaggctgggag

SEQ ID NO: 45106 - DNA, 20 bp, Artificial Sequence
  Synthetic oligonucleotide; TGG chr11 5256840 5256859 5256843 -
tgtttagaggctgggagtgg

SEQ ID NO: 45107 - DNA, 20 bp, Artificial Sequence
  Synthetic oligonucleotide; CAG chr11 5256821 5256840 5256824 -
gtggctcacgcctgtaatcc

SEQ ID NO: 45108 - DNA, 20 bp, Artificial Sequence
  Synthetic oligonucleotide; TGG chr11 5256813 5256832 5256816 -
cgcctgtaatcccagaattt

SEQ ID NO: 45109 - DNA, 20 bp, Artificial Sequence
  Synthetic oligonucleotide; GGG chr11 5256812 5256831 5256815 -
gcctgtaatcccagaatttt

SEQ ID NO: 45110 - DNA, 20 bp, Artificial Sequence
  Synthetic oligonucleotide; GAG chr11 5256810 5256829 5256813 -
ctgtaatcccagaattttgg

SEQ ID NO: 45111 - DNA, 20 bp, Artificial Sequence
  Synthetic oligonucleotide; AGG chr11 5256809 5256828 5256812 -
tgtaatcccagaattttggg

SEQ ID NO: 45112 - DNA, 20 bp, Artificial Sequence
  Synthetic oligonucleotide; AAG chr11 5256804 5256823 5256807 -
tcccagaattttgggaggcc

SEQ ID NO: 45113 - DNA, 20 bp, Artificial Sequence
  Synthetic oligonucleotide; AGG chr11 5256803 5256822 5256806 -
cccagaattttgggaggcca

SEQ ID NO: 45114 - DNA, 20 bp, Artificial Sequence
  Synthetic oligonucleotide; CAG chr11 5256800 5256819 5256803 -
agaattttgggaggccaagg

SEQ ID NO: 45115 - DNA, 20 bp, Artificial Sequence
  Synthetic oligonucleotide; AGG chr11 5256799 5256818 5256802 -
gaattttgggaggccaaggc

SEQ ID NO: 45116 - DNA, 20 bp, Artificial Sequence
  Synthetic oligonucleotide; CAG chr11 5256796 5256815 5256799 -
ttttgggaggccaaggcagg

SEQ ID NO: 45117 - DNA, 20 bp, Artificial Sequence
  Synthetic oligonucleotide; GAG chr11 5256786 5256805 5256789 -
ccaaggcaggcagatcacct

SEQ ID NO: 45118 - DNA, 20 bp, Artificial Sequence
  Synthetic oligonucleotide; AGG chr11 5256785 5256804 5256788 -
caaggcaggcagatcacctg

SEQ ID NO: 45119 - DNA, 20 bp, Artificial Sequence
  Synthetic oligonucleotide; AAG chr11 5256780 5256799 5256783 -
caggcagatcacctgaggtc

SEQ ID NO: 45120 - DNA, 20 bp, Artificial Sequence
  Synthetic oligonucleotide; GAG chr11 5256778 5256797 5256781 -
ggcagatcacctgaggtcaa

SEQ ID NO: 45121 - DNA, 20 bp, Artificial Sequence
  Synthetic oligonucleotide; AAG chr11 5256772 5256791 5256775 -
tcacctgaggtcaagagttc

SEQ ID NO: 45122 - DNA, 20 bp, Artificial Sequence
  Synthetic oligonucleotide; TGG chr11 5256762 5256781 5256765 -
tcaagagttcaagaccaacc

SEQ ID NO: 45123 - DNA, 20 bp, Artificial Sequence
  Synthetic oligonucleotide; TGG chr11 5256753 5256772 5256756 -
caagaccaacctggccaaca

SEQ ID NO: 45124 - DNA, 20 bp, Artificial Sequence
  Synthetic oligonucleotide; TAG chr11 5256719 5256738 5256722 -
ctctacaaaaatacaaaaat

SEQ ID NO: 45125 - DNA, 20 bp, Artificial Sequence
  Synthetic oligonucleotide; CAG chr11 5256715 5256734 5256718 -
acaaaaatacaaaaattaga

SEQ ID NO: 45126 - DNA, 20 bp, Artificial Sequence
  Synthetic oligonucleotide; AGG chr11 5256714 5256733 5256717 -
caaaaatacaaaaattagac

SEQ ID NO: 45127 - DNA, 20 bp, Artificial Sequence
  Synthetic oligonucleotide; TGG chr11 5256706 5256725 5256709 -
caaaaattagacaggcatga

SEQ ID NO: 45128 - DNA, 20 bp, Artificial Sequence
  Synthetic oligonucleotide; AAG chr11 5256702 5256721 5256705 -
aattagacaggcatgatggc

SEQ ID NO: 45129 - DNA, 20 bp, Artificial Sequence
  Synthetic oligonucleotide; CAG chr11 5256687 5256706 5256690 -
atggcaagtgcctgtaatcc

SEQ ID NO: 45130 - DNA, 20 bp, Artificial Sequence
  Synthetic oligonucleotide; TGG chr11 5256679 5256698 5256682 -
tgcctgtaatcccagctact

SEQ ID NO: 45131 - DNA, 20 bp, Artificial Sequence
  Synthetic oligonucleotide; GGG chr11 5256678 5256697 5256681 -
gcctgtaatcccagctactt

SEQ ID NO: 45132 - DNA, 20 bp, Artificial Sequence
  Synthetic oligonucleotide; GAG chr11 5256676 5256695 5256679 -
ctgtaatcccagctacttgg

SEQ ID NO: 45133 - DNA, 20 bp, Artificial Sequence
  Synthetic oligonucleotide; AGG chr11 5256675 5256694 5256678 -
tgtaatcccagctacttggg

SEQ ID NO: 45134 - DNA, 20 bp, Artificial Sequence
  Synthetic oligonucleotide; GAG chr11 5256670 5256689 5256673 -
tcccagctacttgggaggct

SEQ ID NO: 45135 - DNA, 20 bp, Artificial Sequence
  Synthetic oligonucleotide; AGG chr11 5256669 5256688 5256672 -
cccagctacttgggaggctg

SEQ ID NO: 45136 - DNA, 20 bp, Artificial Sequence
  Synthetic oligonucleotide; AAG chr11 5256666 5256685 5256669 -
agctacttgggaggctgagg

SEQ ID NO: 45137 - DNA, 20 bp, Artificial Sequence
  Synthetic oligonucleotide; AGG chr11 5256665 5256684 5256668 -
gctacttgggaggctgagga

SEQ ID NO: 45138 - DNA, 20 bp, Artificial Sequence
  Synthetic oligonucleotide; GAG chr11 5256663 5256682 5256666 -
tacttgggaggctgaggaag

SEQ ID NO: 45139 - DNA, 20 bp, Artificial Sequence
  Synthetic oligonucleotide; TGG chr11 5256647 5256666 5256650 -
gaaggagaattgcttgaacc

SEQ ID NO: 45140 - DNA, 20 bp, Artificial Sequence
  Synthetic oligonucleotide; AAG chr11 5256644 5256663 5256647 -
ggagaattgcttgaacctgg

SEQ ID NO: 45141 - DNA, 20 bp, Artificial Sequence
  Synthetic oligonucleotide; AGG chr11 5256643 5256662 5256646 -
gagaattgcttgaacctgga

SEQ ID NO: 45142 - DNA, 20 bp, Artificial Sequence
  Synthetic oligonucleotide; CAG chr11 5256640 5256659 5256643 -
aattgcttgaacctggaagg

SEQ ID NO: 45143 - DNA, 20 bp, Artificial Sequence
  Synthetic oligonucleotide; AGG chr11 5256639 5256658 5256642 -
attgcttgaacctggaaggc

SEQ ID NO: 45144 - DNA, 20 bp, Artificial Sequence
  Synthetic oligonucleotide; GAG chr11 5256637 5256656 5256640 -
tgcttgaacctggaaggcag

SEQ ID NO: 45145 - DNA, 20 bp, Artificial Sequence
  Synthetic oligonucleotide; CAG chr11 5256631 5256650 5256634 -
aacctggaaggcaggagttg

SEQ ID NO: 45146 - DNA, 20 bp, Artificial Sequence
  Synthetic oligonucleotide; GAG chr11 5256627 5256646 5256630 -
tggaaggcaggagttgcagt

SEQ ID NO: 45147 - DNA, 20 bp, Artificial Sequence
  Synthetic oligonucleotide; GAG chr11 5256622 5256641 5256625 -
ggcaggagttgcagtgagcc

SEQ ID NO: 45148 - DNA, 20 bp, Artificial Sequence
  Synthetic oligonucleotide; CAG chr11 5256602 5256621 5256605 -
gagatcataccactgcactc

SEQ ID NO: 45149 - DNA, 20 bp, Artificial Sequence
  Synthetic oligonucleotide; TGG chr11 5256597 5256616 5256600 -
cataccactgcactccagcc

SEQ ID NO: 45150 - DNA, 20 bp, Artificial Sequence
  Synthetic oligonucleotide; GGG chr11 5256596 5256615 5256599 -
ataccactgcactccagcct

SEQ ID NO: 45151 - DNA, 20 bp, Artificial Sequence
  Synthetic oligonucleotide; CAG chr11 5256590 5256609 5256593 -
ctgcactccagcctgggtga

SEQ ID NO: 45152 - DNA, 20 bp, Artificial Sequence
  Synthetic oligonucleotide; AAG chr11 5256584 5256603 5256587 -
tccagcctgggtgacagaac

SEQ ID NO: 45153 - DNA, 20 bp, Artificial Sequence
  Synthetic oligonucleotide; AAG chr11 5256561 5256580 5256564 -
actctgtctcaaaaaaaaaa

SEQ ID NO: 45154 - DNA, 20 bp, Artificial Sequence
  Synthetic oligonucleotide; GAG chr11 5256559 5256578 5256562 -
tctgtctcaaaaaaaaaaaa

SEQ ID NO: 45155 - DNA, 20 bp, Artificial Sequence
  Synthetic oligonucleotide; GAG chr11 5256557 5256576 5256560 -
tgtctcaaaaaaaaaaaaga

SEQ ID NO: 45156 - DNA, 20 bp, Artificial Sequence
  Synthetic oligonucleotide; AAG chr11 5256548 5256567 5256551 -
aaaaaaaaagagagattcaa

SEQ ID NO: 45157 - DNA, 20 bp, Artificial Sequence
  Synthetic oligonucleotide; TAG chr11 5256534 5256553 5256537 -
attcaaaagattcacttgtt

SEQ ID NO: 45158 - DNA, 20 bp, Artificial Sequence
  Synthetic oligonucleotide; AGG chr11 5256533 5256552 5256536 -
ttcaaaagattcacttgttt

SEQ ID NO: 45159 - DNA, 20 bp, Artificial Sequence
  Synthetic oligonucleotide; TAG chr11 5256527 5256546 5256530 -
agattcacttgtttaggcct

SEQ ID NO: 45160 - DNA, 20 bp, Artificial Sequence
  Synthetic oligonucleotide; CGG chr11 5256524 5256543 5256527 -
ttcacttgtttaggccttag

SEQ ID NO: 45161 - DNA, 20 bp, Artificial Sequence
  Synthetic oligonucleotide; GGG chr11 5256523 5256542 5256526 -
tcacttgtttaggccttagc

SEQ ID NO: 45162 - DNA, 20 bp, Artificial Sequence
  Synthetic oligonucleotide; TAG chr11 5256518 5256537 5256521 -
tgtttaggccttagcgggct

SEQ ID NO: 45163 - DNA, 20 bp, Artificial Sequence
  Synthetic oligonucleotide; CAG chr11 5256511 5256530 5256514 -
gccttagcgggcttagacac

SEQ ID NO: 45164 - DNA, 20 bp, Artificial Sequence
  Synthetic oligonucleotide; AAG chr11 5256491 5256510 5256494 -
cagtctctgacacattctta

SEQ ID NO: 45165 - DNA, 20 bp, Artificial Sequence
  Synthetic oligonucleotide; AGG chr11 5256490 5256509 5256493 -
agtctctgacacattcttaa

SEQ ID NO: 45166 - DNA, 20 bp, Artificial Sequence
  Synthetic oligonucleotide; CAG chr11 5256486 5256505 5256489 -
tctgacacattcttaaaggt

SEQ ID NO: 45167 - DNA, 20 bp, Artificial Sequence
  Synthetic oligonucleotide; AGG chr11 5256485 5256504 5256488 -
ctgacacattcttaaaggtc

SEQ ID NO: 45168 - DNA, 20 bp, Artificial Sequence
  Synthetic oligonucleotide; TGG chr11 5256473 5256492 5256476 -
taaaggtcaggctctacaaa

SEQ ID NO: 45169 - DNA, 20 bp, Artificial Sequence
  Synthetic oligonucleotide; CAG chr11 5256462 5256481 5256465 -
ctctacaaatggaacccaac

SEQ ID NO: 45170 - DNA, 20 bp, Artificial Sequence
  Synthetic oligonucleotide; CAG chr11 5256454 5256473 5256457 -
atggaacccaaccagactct

SEQ ID NO: 45171 - DNA, 20 bp, Artificial Sequence
  Synthetic oligonucleotide; TGG chr11 5256448 5256467 5256451 -
cccaaccagactctcagata

SEQ ID NO: 45172 - DNA, 20 bp, Artificial Sequence
  Synthetic oligonucleotide; AAG chr11 5256442 5256461 5256445 -
cagactctcagatatggcca

SEQ ID NO: 45173 - DNA, 20 bp, Artificial Sequence
  Synthetic oligonucleotide; CAG chr11 5256419 5256438 5256422 -
atctatacacacccatctca

SEQ ID NO: 45174 - DNA, 20 bp, Artificial Sequence
  Synthetic oligonucleotide; AAG chr11 5256403 5256422 5256406 -
ctcacagatcccctatctta

SEQ ID NO: 45175 - DNA, 20 bp, Artificial Sequence
  Synthetic oligonucleotide; GAG chr11 5256401 5256420 5256404 -
cacagatcccctatcttaaa

SEQ ID NO: 45176 - DNA, 20 bp, Artificial Sequence
  Synthetic oligonucleotide; TGG chr11 5256389 5256408 5256392 -
atcttaaagagaccctaatt

SEQ ID NO: 45177 - DNA, 20 bp, Artificial Sequence
  Synthetic oligonucleotide; GGG chr11 5256388 5256407 5256391 -
tcttaaagagaccctaattt

SEQ ID NO: 45178 - DNA, 20 bp, Artificial Sequence
  Synthetic oligonucleotide; CAG chr11 5256378 5256397 5256381 -
accctaatttgggttcacct

SEQ ID NO: 45179 - DNA, 20 bp, Artificial Sequence
  Synthetic oligonucleotide; CAG chr11 5256359 5256378 5256362 -
tcagtctctataatctgtac

SEQ ID NO: 45180 - DNA, 20 bp, Artificial Sequence
  Synthetic oligonucleotide; TAG chr11 5256325 5256344 5256328 -
aaatctttctcacccatcct

SEQ ID NO: 45181 - DNA, 20 bp, Artificial Sequence
  Synthetic oligonucleotide; GAG chr11 5256319 5256338 5256322 -
ttctcacccatccttagatt

SEQ ID NO: 45182 - DNA, 20 bp, Artificial Sequence
  Synthetic oligonucleotide; GAG chr11 5256317 5256336 5256320 -
ctcacccatccttagattga

SEQ ID NO: 45183 - DNA, 20 bp, Artificial Sequence
  Synthetic oligonucleotide; AAG chr11 5256314 5256333 5256317 -
acccatccttagattgagag

SEQ ID NO: 45184 - DNA, 20 bp, Artificial Sequence
  Synthetic oligonucleotide; GAG chr11 5256295 5256314 5256298 -
gaagtcacttattattatgt

SEQ ID NO: 45185 - DNA, 20 bp, Artificial Sequence
  Synthetic oligonucleotide; TGG chr11 5256288 5256307 5256291 -
cttattattatgtgagtaac

SEQ ID NO: 45186 - DNA, 20 bp, Artificial Sequence
  Synthetic oligonucleotide; AAG chr11 5256285 5256304 5256288 -
attattatgtgagtaactgg

SEQ ID NO: 45187 - DNA, 20 bp, Artificial Sequence
  Synthetic oligonucleotide; AAG chr11 5256274 5256293 5256277 -
agtaactggaagatactgat

SEQ ID NO: 45188 - DNA, 20 bp, Artificial Sequence
  Synthetic oligonucleotide; AAG chr11 5256220 5256239 5256223 -
aacttttattttaacttcca

SEQ ID NO: 45189 - DNA, 20 bp, Artificial Sequence
  Synthetic oligonucleotide; AAG chr11 5256214 5256233 5256217 -
tattttaacttccaaagaac

SEQ ID NO: 45190 - DNA, 20 bp, Artificial Sequence
  Synthetic oligonucleotide; CAG chr11 5256200 5256219 5256203 -
aagaacaagtgcaatatgtg

SEQ ID NO: 45191 - DNA, 20 bp, Artificial Sequence
  Synthetic oligonucleotide; CAG chr11 5256187 5256206 5256190 -
atatgtgcagctttgttgcg

SEQ ID NO: 45192 - DNA, 20 bp, Artificial Sequence
  Synthetic oligonucleotide; AGG chr11 5256186 5256205 5256189 -
tatgtgcagctttgttgcgc

SEQ ID NO: 45193 - DNA, 20 bp, Artificial Sequence
  Synthetic oligonucleotide; TGG chr11 5256167 5256186 5256170 -
caggtcaacatgtatctttc

SEQ ID NO: 45194 - DNA, 20 bp, Artificial Sequence
  Synthetic oligonucleotide; TAG chr11 5256159 5256178 5256162 -
catgtatctttctggtcttt

SEQ ID NO: 45195 - DNA, 20 bp, Artificial Sequence
  Synthetic oligonucleotide; GAG chr11 5256142 5256161 5256145 -
ttttagccgcctaacacttt

SEQ ID NO: 45196 - DNA, 20 bp, Artificial Sequence
  Synthetic oligonucleotide; CAG chr11 5256139 5256158 5256142 -
tagccgcctaacactttgag

SEQ ID NO: 45197 - DNA, 20 bp, Artificial Sequence
  Synthetic oligonucleotide; AAG chr11 5256132 5256151 5256135 -
ctaacactttgagcagatat

SEQ ID NO: 45198 - DNA, 20 bp, Artificial Sequence
  Synthetic oligonucleotide; CAG chr11 5256122 5256141 5256125 -
gagcagatataagccttaca

SEQ ID NO: 45199 - DNA, 20 bp, Artificial Sequence
  Synthetic oligonucleotide; AGG chr11 5256121 5256140 5256124 -
agcagatataagccttacac

SEQ ID NO: 45200 - DNA, 20 bp, Artificial Sequence
  Synthetic oligonucleotide; AAG chr11 5256112 5256131 5256115 -
aagccttacacaggattatg

SEQ ID NO: 45201 - DNA, 20 bp, Artificial Sequence
  Synthetic oligonucleotide; AAG chr11 5256104 5256123 5256107 -
cacaggattatgaagtctga

SEQ ID NO: 45202 - DNA, 20 bp, Artificial Sequence
  Synthetic oligonucleotide; AGG chr11 5256103 5256122 5256106 -
acaggattatgaagtctgaa

SEQ ID NO: 45203 - DNA, 20 bp, Artificial Sequence
  Synthetic oligonucleotide; TAG chr11 5256064 5256083 5256067 -
tataattcctatcaacctga

SEQ ID NO: 45204 - DNA, 20 bp, Artificial Sequence
  Synthetic oligonucleotide; AGG chr11 5256063 5256082 5256066 -
ataattcctatcaacctgat

SEQ ID NO: 45205 - DNA, 20 bp, Artificial Sequence
  Synthetic oligonucleotide; TAG chr11 5256059 5256078 5256062 -
ttcctatcaacctgataggt

SEQ ID NO: 45206 - DNA, 20 bp, Artificial Sequence
  Synthetic oligonucleotide; AGG chr11 5256058 5256077 5256061 -
tcctatcaacctgataggtt

SEQ ID NO: 45207 - DNA, 20 bp, Artificial Sequence
  Synthetic oligonucleotide; GGG chr11 5256057 5256076 5256060 -
cctatcaacctgataggtta

SEQ ID NO: 45208 - DNA, 20 bp, Artificial Sequence
  Synthetic oligonucleotide; GGG chr11 5256056 5256075 5256059 -
ctatcaacctgataggttag

SEQ ID NO: 45209 - DNA, 20 bp, Artificial Sequence
  Synthetic oligonucleotide; AAG chr11 5256053 5256072 5256056 -
tcaacctgataggttagggg

SEQ ID NO: 45210 - DNA, 20 bp, Artificial Sequence
  Synthetic oligonucleotide; AGG chr11 5256052 5256071 5256055 -
caacctgataggttagggga

SEQ ID NO: 45211 - DNA, 20 bp, Artificial Sequence
  Synthetic oligonucleotide; TAG chr11 5256049 5256068 5256052 -
cctgataggttaggggaagg

SEQ ID NO: 45212 - DNA, 20 bp, Artificial Sequence
  Synthetic oligonucleotide; GAG chr11 5256047 5256066 5256050 -
tgataggttaggggaaggta

SEQ ID NO: 45213 - DNA, 20 bp, Artificial Sequence
  Synthetic oligonucleotide; AAG chr11 5256032 5256051 5256035 -
aggtagagctctcctccaat

SEQ ID NO: 45214 - DNA, 20 bp, Artificial Sequence
  Synthetic oligonucleotide; CAG chr11 5256028 5256047 5256031 -
agagctctcctccaataagc

SEQ ID NO: 45215 - DNA, 20 bp, Artificial Sequence
  Synthetic oligonucleotide; CAG chr11 5256020 5256039 5256023 -
cctccaataagccagatttc

SEQ ID NO: 45216 - DNA, 20 bp, Artificial Sequence
  Synthetic oligonucleotide; GAG chr11 5256018 5256037 5256021 -
tccaataagccagatttcca

SEQ ID NO: 45217 - DNA, 20 bp, Artificial Sequence
  Synthetic oligonucleotide; AAG chr11 5255994 5256013 5255997 -
ttctgacgtcataatctacc

SEQ ID NO: 45218 - DNA, 20 bp, Artificial Sequence
  Synthetic oligonucleotide; AGG chr11 5255993 5256012 5255996 -
tctgacgtcataatctacca

SEQ ID NO: 45219 - DNA, 20 bp, Artificial Sequence
  Synthetic oligonucleotide; TGG chr11 5255987 5256006 5255990 -
gtcataatctaccaaggtca

SEQ ID NO: 45220 - DNA, 20 bp, Artificial Sequence
  Synthetic oligonucleotide; GAG chr11 5255981 5256000 5255984 -
atctaccaaggtcatggatc

SEQ ID NO: 45221 - DNA, 20 bp, Artificial Sequence
  Synthetic oligonucleotide; CAG chr11 5255976 5255995 5255979 -
ccaaggtcatggatcgagtt

SEQ ID NO: 45222 - DNA, 20 bp, Artificial Sequence
  Synthetic oligonucleotide; GAG chr11 5255974 5255993 5255977 -
aaggtcatggatcgagttca

SEQ ID NO: 45223 - DNA, 20 bp, Artificial Sequence
  Synthetic oligonucleotide; AAG chr11 5255962 5255981 5255965 -
cgagttcagagaaaaaacaa

SEQ ID NO: 45224 - DNA, 20 bp, Artificial Sequence
  Synthetic oligonucleotide; AAG chr11 5255926 5255945 5255929 -
accaaaaaataaaaatccca

SEQ ID NO: 45225 - DNA, 20 bp, Artificial Sequence
  Synthetic oligonucleotide; AAG chr11 5255915 5255934 5255918 -
aaaatcccaaagaaaaaata

SEQ ID NO: 45226 - DNA, 20 bp, Artificial Sequence
  Synthetic oligonucleotide; CAG chr11 5255905 5255924 5255908 -
agaaaaaataaagaaaaaaa

SEQ ID NO: 45227 - DNA, 20 bp, Artificial Sequence
  Synthetic oligonucleotide; AAG chr11 5255880 5255899 5255883 -
tgaatacttcctgccatgtt

SEQ ID NO: 45228 - DNA, 20 bp, Artificial Sequence
  Synthetic oligonucleotide; TGG chr11 5255877 5255896 5255880 -
atacttcctgccatgttaag

SEQ ID NO: 45229 - DNA, 20 bp, Artificial Sequence
  Synthetic oligonucleotide; CAG chr11 5255865 5255884 5255868 -
atgttaagtggccaatatgt

SEQ ID NO: 45230 - DNA, 20 bp, Artificial Sequence
  Synthetic oligonucleotide; CAG chr11 5255859 5255878 5255862 -
agtggccaatatgtcagaaa

SEQ ID NO: 45231 - DNA, 20 bp, Artificial Sequence
  Synthetic oligonucleotide; GAG chr11 5255852 5255871 5255855 -
aatatgtcagaaacagcact

SEQ ID NO: 45232 - DNA, 20 bp, Artificial Sequence
  Synthetic oligonucleotide; CAG chr11 5255846 5255865 5255849 -
tcagaaacagcactgagtta

SEQ ID NO: 45233 - DNA, 20 bp, Artificial Sequence
  Synthetic oligonucleotide; AAG chr11 5255840 5255859 5255843 -
acagcactgagttacagata

SEQ ID NO: 45234 - DNA, 20 bp, Artificial Sequence
  Synthetic oligonucleotide; CAG chr11 5255825 5255844 5255828 -
agataaagatgtctaaacta

SEQ ID NO: 45235 - DNA, 20 bp, Artificial Sequence
  Synthetic oligonucleotide; CAG chr11 5255814 5255833 5255817 -
tctaaactacagtgacatcc

SEQ ID NO: 45236 - DNA, 20 bp, Artificial Sequence
  Synthetic oligonucleotide; CAG chr11 5255805 5255824 5255808 -
cagtgacatcccagctgtca

SEQ ID NO: 45237 - DNA, 20 bp, Artificial Sequence
  Synthetic oligonucleotide; TGG chr11 5255798 5255817 5255801 -
atcccagctgtcacagtgtg

SEQ ID NO: 45238 - DNA, 20 bp, Artificial Sequence
  Synthetic oligonucleotide; TAG chr11 5255790 5255809 5255793 -
tgtcacagtgtgtggactat

SEQ ID NO: 45239 - DNA, 20 bp, Artificial Sequence
  Synthetic oligonucleotide; CAG chr11 5255778 5255797 5255781 -
tggactattagtcaataaaa

SEQ ID NO: 45240 - DNA, 20 bp, Artificial Sequence
  Synthetic oligonucleotide; AAG chr11 5255763 5255782 5255766 -
taaaacagtccctgcctctt

SEQ ID NO: 45241 - DNA, 20 bp, Artificial Sequence
  Synthetic oligonucleotide; GAG chr11 5255761 5255780 5255764 -
aaacagtccctgcctcttaa

SEQ ID NO: 45242 - DNA, 20 bp, Artificial Sequence
  Synthetic oligonucleotide; TAG chr11 5255726 5255745 5255729 -
caaatacatgtcttatgtct

SEQ ID NO: 45243 - DNA, 20 bp, Artificial Sequence
  Synthetic oligonucleotide; AAG chr11 5255720 5255739 5255723 -
catgtcttatgtcttagaat

SEQ ID NO: 45244 - DNA, 20 bp, Artificial Sequence
  Synthetic oligonucleotide; AAG chr11 5255710 5255729 5255713 -
gtcttagaataagattccct

SEQ ID NO: 45245 - DNA, 20 bp, Artificial Sequence
  Synthetic oligonucleotide; AAG chr11 5255707 5255726 5255710 -
ttagaataagattccctaag

SEQ ID NO: 45246 - DNA, 20 bp, Artificial Sequence
  Synthetic oligonucleotide; TAG chr11 5255698 5255717 5255701 -
gattccctaagaagtgaacc

SEQ ID NO: 45247 - DNA, 20 bp, Artificial Sequence
  Synthetic oligonucleotide; AAG chr11 5255686 5255705 5255689 -
agtgaacctagcatttatac

SEQ ID NO: 45248 - DNA, 20 bp, Artificial Sequence
  Synthetic oligonucleotide; TAG chr11 5255665 5255684 5255668 -
agataattaattctaatcca

SEQ ID NO: 45249 - DNA, 20 bp, Artificial Sequence
  Synthetic oligonucleotide; TGG chr11 5255658 5255677 5255661 -
taattctaatccatagtatc

SEQ ID NO: 45250 - DNA, 20 bp, Artificial Sequence
  Synthetic oligonucleotide; AAG chr11 5255653 5255672 5255656 -
ctaatccatagtatctggta

SEQ ID NO: 45251 - DNA, 20 bp, Artificial Sequence
  Synthetic oligonucleotide; GAG chr11 5255651 5255670 5255654 -
aatccatagtatctggtaaa

SEQ ID NO: 45252 - DNA, 20 bp, Artificial Sequence
  Synthetic oligonucleotide; GAG chr11 5255627 5255646 5255630 -
attctaccatcatctttacc

SEQ ID NO: 45253 - DNA, 20 bp, Artificial Sequence
  Synthetic oligonucleotide; TAG chr11 5255622 5255641 5255625 -
accatcatctttaccgagca

SEQ ID NO: 45254 - DNA, 20 bp, Artificial Sequence
  Synthetic oligonucleotide; AAG chr11 5255619 5255638 5255622 -
atcatctttaccgagcatag

SEQ ID NO: 45255 - DNA, 20 bp, Artificial Sequence
  Synthetic oligonucleotide; GAG chr11 5255617 5255636 5255620 -
catctttaccgagcatagaa

SEQ ID NO: 45256 - DNA, 20 bp, Artificial Sequence
  Synthetic oligonucleotide; TGG chr11 5255600 5255619 5255603 -
gaagagctacaccaaaaccc

SEQ ID NO: 45257 - DNA, 20 bp, Artificial Sequence
  Synthetic oligonucleotide; GGG chr11 5255599 5255618 5255602 -
aagagctacaccaaaaccct

SEQ ID NO: 45258 - DNA, 20 bp, Artificial Sequence
  Synthetic oligonucleotide; CAG chr11 5255592 5255611 5255595 -
acaccaaaaccctgggtcat

SEQ ID NO: 45259 - DNA, 20 bp, Artificial Sequence
  Synthetic oligonucleotide; CAG chr11 5255588 5255607 5255591 -
caaaaccctgggtcatcagc

SEQ ID NO: 45260 - DNA, 20 bp, Artificial Sequence
  Synthetic oligonucleotide; CAG chr11 5255571 5255590 5255574 -
agccagcacatacacttatc

SEQ ID NO: 45261 - DNA, 20 bp, Artificial Sequence
  Synthetic oligonucleotide; CGG chr11 5255551 5255570 5255554 -
cagtgataaatacacatcat

SEQ ID NO: 45262 - DNA, 20 bp, Artificial Sequence
  Synthetic oligonucleotide; GGG chr11 5255550 5255569 5255553 -
agtgataaatacacatcatc

SEQ ID NO: 45263 - DNA, 20 bp, Artificial Sequence
  Synthetic oligonucleotide; GAG chr11 5255506 5255525 5255509 -
ataaaaaaaatacttttgct

SEQ ID NO: 45264 - DNA, 20 bp, Artificial Sequence
  Synthetic oligonucleotide; CAG chr11 5255497 5255516 5255500 -
atacttttgctgagatgaaa

SEQ ID NO: 45265 - DNA, 20 bp, Artificial Sequence
  Synthetic oligonucleotide; AGG chr11 5255496 5255515 5255499 -
tacttttgctgagatgaaac

SEQ ID NO: 45266 - DNA, 20 bp, Artificial Sequence
  Synthetic oligonucleotide; TAG chr11 5255477 5255496 5255480 -
caggcgtgatttatttcaaa

SEQ ID NO: 45267 - DNA, 20 bp, Artificial Sequence
  Synthetic oligonucleotide; AGG chr11 5255476 5255495 5255479 -
aggcgtgatttatttcaaat

SEQ ID NO: 45268 - DNA, 20 bp, Artificial Sequence
  Synthetic oligonucleotide; CGG chr11 5255471 5255490 5255474 -
tgatttatttcaaataggta

SEQ ID NO: 45269 - DNA, 20 bp, Artificial Sequence
  Synthetic oligonucleotide; AAG chr11 5255466 5255485 5255469 -
tatttcaaataggtacggat

SEQ ID NO: 45270 - DNA, 20 bp, Artificial Sequence
  Synthetic oligonucleotide; TAG chr11 5255463 5255482 5255466 -
ttcaaataggtacggataag

SEQ ID NO: 45271 - DNA, 20 bp, Artificial Sequence
  Synthetic oligonucleotide; AAG chr11 5255454 5255473 5255457 -
gtacggataagtagatattg

SEQ ID NO: 45272 - DNA, 20 bp, Artificial Sequence
  Synthetic oligonucleotide; AAG chr11 5255450 5255469 5255453 -
ggataagtagatattgaagt

SEQ ID NO: 45273 - DNA, 20 bp, Artificial Sequence
  Synthetic oligonucleotide; AGG chr11 5255449 5255468 5255452 -
gataagtagatattgaagta

SEQ ID NO: 45274 - DNA, 20 bp, Artificial Sequence
  Synthetic oligonucleotide; CAG chr11 5255443 5255462 5255446 -
tagatattgaagtaaggatt

SEQ ID NO: 45275 - DNA, 20 bp, Artificial Sequence
  Synthetic oligonucleotide; TAG chr11 5255385 5255404 5255388 -
gcactgaaactgttgcttta

SEQ ID NO: 45276 - DNA, 20 bp, Artificial Sequence
  Synthetic oligonucleotide; AGG chr11 5255384 5255403 5255387 -
cactgaaactgttgctttat

SEQ ID NO: 45277 - DNA, 20 bp, Artificial Sequence
  Synthetic oligonucleotide; GAG chr11 5255363 5255382 5255366 -
ggatttttcactacactaat

SEQ ID NO: 45278 - DNA, 20 bp, Artificial Sequence
  Synthetic oligonucleotide; AAG chr11 5255355 5255374 5255358 -
cactacactaatgagaactt

SEQ ID NO: 45279 - DNA, 20 bp, Artificial Sequence
  Synthetic oligonucleotide; GAG chr11 5255353 5255372 5255356 -
ctacactaatgagaacttaa

SEQ ID NO: 45280 - DNA, 20 bp, Artificial Sequence
  Synthetic oligonucleotide; TGG chr11 5255346 5255365 5255349 -
aatgagaacttaagagataa

SEQ ID NO: 45281 - DNA, 20 bp, Artificial Sequence
  Synthetic oligonucleotide; CAG chr11 5255333 5255352 5255336 -
gagataatggcctaaaacca

SEQ ID NO: 45282 - DNA, 20 bp, Artificial Sequence
  Synthetic oligonucleotide; GAG chr11 5255331 5255350 5255334 -
gataatggcctaaaaccaca

SEQ ID NO: 45283 - DNA, 20 bp, Artificial Sequence
  Synthetic oligonucleotide; GAG chr11 5255329 5255348 5255332 -
taatggcctaaaaccacaga

SEQ ID NO: 45284 - DNA, 20 bp, Artificial Sequence
  Synthetic oligonucleotide; AAG chr11 5255318 5255337 5255321 -
aaccacagagagtatattca

SEQ ID NO: 45285 - DNA, 20 bp, Artificial Sequence
  Synthetic oligonucleotide; AAG chr11 5255313 5255332 5255316 -
cagagagtatattcaaagat

SEQ ID NO: 45286 - DNA, 20 bp, Artificial Sequence
  Synthetic oligonucleotide; TAG chr11 5255308 5255327 5255311 -
agtatattcaaagataagta

SEQ ID NO: 45287 - DNA, 20 bp, Artificial Sequence
  Synthetic oligonucleotide; TGG chr11 5255294 5255313 5255297 -
taagtatagcacttcttatt

SEQ ID NO: 45288 - DNA, 20 bp, Artificial Sequence
  Synthetic oligonucleotide; GAG chr11 5255272 5255291 5255275 -
gaaaccaatgcttactaaat

SEQ ID NO: 45289 - DNA, 20 bp, Artificial Sequence
  Synthetic oligonucleotide; AAG chr11 5255266 5255285 5255269 -
aatgcttactaaatgagact

SEQ ID NO: 45290 - DNA, 20 bp, Artificial Sequence
  Synthetic oligonucleotide; TGG chr11 5255243 5255262 5255246 -
acgtgtcccatcaaaaatcc

SEQ ID NO: 45291 - DNA, 20 bp, Artificial Sequence
  Synthetic oligonucleotide; TGG chr11 5255194 5255213 5255197 -
tccctgaacttttcaaaaat

SEQ ID NO: 45292 - DNA, 20 bp, Artificial Sequence
  Synthetic oligonucleotide; CAG chr11 5255169 5255188 5255172 -
catgctttaactttaaacta

SEQ ID NO: 45293 - DNA, 20 bp, Artificial Sequence
  Synthetic oligonucleotide; AGG chr11 5255168 5255187 5255171 -
atgctttaactttaaactac

SEQ ID NO: 45294 - DNA, 20 bp, Artificial Sequence
  Synthetic oligonucleotide; TGG chr11 5255159 5255178 5255162 -
ctttaaactacaggcctcac

SEQ ID NO: 45295 - DNA, 20 bp, Artificial Sequence
  Synthetic oligonucleotide; GAG chr11 5255157 5255176 5255160 -
ttaaactacaggcctcactg

SEQ ID NO: 45296 - DNA, 20 bp, Artificial Sequence
  Synthetic oligonucleotide; CAG chr11 5255151 5255170 5255154 -
tacaggcctcactggagcta

SEQ ID NO: 45297 - DNA, 20 bp, Artificial Sequence
  Synthetic oligonucleotide; AAG chr11 5255146 5255165 5255149 -
gcctcactggagctacagac

SEQ ID NO: 45298 - DNA, 20 bp, Artificial Sequence
  Synthetic oligonucleotide; AAG chr11 5255143 5255162 5255146 -
tcactggagctacagacaag

SEQ ID NO: 45299 - DNA, 20 bp, Artificial Sequence
  Synthetic oligonucleotide; AGG chr11 5255142 5255161 5255145 -
cactggagctacagacaaga

SEQ ID NO: 45300 - DNA, 20 bp, Artificial Sequence
  Synthetic oligonucleotide; CGG chr11 5255132 5255151 5255135 -
acagacaagaaggtgaaaaa

SEQ ID NO: 45301 - DNA, 20 bp, Artificial Sequence
  Synthetic oligonucleotide; AAG chr11 5255122 5255141 5255125 -
aggtgaaaaacggctgacaa

SEQ ID NO: 45302 - DNA, 20 bp, Artificial Sequence
  Synthetic oligonucleotide; AAG chr11 5255119 5255138 5255122 -
tgaaaaacggctgacaaaag

SEQ ID NO: 45303 - DNA, 20 bp, Artificial Sequence
  Synthetic oligonucleotide; TGG chr11 5255113 5255132 5255116 -
acggctgacaaaagaagtcc

SEQ ID NO: 45304 - DNA, 20 bp, Artificial Sequence
  Synthetic oligonucleotide; TGG chr11 5255101 5255120 5255104 -
agaagtcctggtatcttcta

SEQ ID NO: 45305 - DNA, 20 bp, Artificial Sequence
  Synthetic oligonucleotide; TGG chr11 5255098 5255117 5255101 -
agtcctggtatcttctatgg

SEQ ID NO: 45306 - DNA, 20 bp, Artificial Sequence
  Synthetic oligonucleotide; GGG chr11 5255097 5255116 5255100 -
gtcctggtatcttctatggt

SEQ ID NO: 45307 - DNA, 20 bp, Artificial Sequence
  Synthetic oligonucleotide; GAG chr11 5255095 5255114 5255098 -
cctggtatcttctatggtgg

SEQ ID NO: 45308 - DNA, 20 bp, Artificial Sequence
  Synthetic oligonucleotide; AAG chr11 5255092 5255111 5255095 -
ggtatcttctatggtgggag

SEQ ID NO: 45309 - DNA, 20 bp, Artificial Sequence
  Synthetic oligonucleotide; TAG chr11 5255084 5255103 5255087 -
ctatggtgggagaagaaaac

SEQ ID NO: 45310 - DNA, 20 bp, Artificial Sequence
  Synthetic oligonucleotide; AAG chr11 5255078 5255097 5255081 -
tgggagaagaaaactagcta

SEQ ID NO: 45311 - DNA, 20 bp, Artificial Sequence
  Synthetic oligonucleotide; AGG chr11 5255077 5255096 5255080 -
gggagaagaaaactagctaa

SEQ ID NO: 45312 - DNA, 20 bp, Artificial Sequence
  Synthetic oligonucleotide; GGG chr11 5255076 5255095 5255079 -
ggagaagaaaactagctaaa

SEQ ID NO: 45313 - DNA, 20 bp, Artificial Sequence
  Synthetic oligonucleotide; AAG chr11 5255073 5255092 5255076 -
gaagaaaactagctaaaggg

SEQ ID NO: 45314 - DNA, 20 bp, Artificial Sequence
  Synthetic oligonucleotide; TAG chr11 5255063 5255082 5255066 -
agctaaagggaagaataaat

SEQ ID NO: 45315 - DNA, 20 bp, Artificial Sequence
  Synthetic oligonucleotide; GAG chr11 5255061 5255080 5255064 -
ctaaagggaagaataaatta

SEQ ID NO: 45316 - DNA, 20 bp, Artificial Sequence
  Synthetic oligonucleotide; TGG chr11 5255052 5255071 5255055 -
agaataaattagagaaaaat

SEQ ID NO: 45317 - DNA, 20 bp, Artificial Sequence
  Synthetic oligonucleotide; CGG chr11 5255038 5255057 5255041 -
aaaaattggaatgactgaat

SEQ ID NO: 45318 - DNA, 20 bp, Artificial Sequence
  Synthetic oligonucleotide; AAG chr11 5255032 5255051 5255035 -
tggaatgactgaatcggaac

SEQ ID NO: 45319 - DNA, 20 bp, Artificial Sequence
  Synthetic oligonucleotide; AGG chr11 5255031 5255050 5255034 -
ggaatgactgaatcggaaca

SEQ ID NO: 45320 - DNA, 20 bp, Artificial Sequence
  Synthetic oligonucleotide; AAG chr11 5255026 5255045 5255029 -
gactgaatcggaacaaggca

SEQ ID NO: 45321 - DNA, 20 bp, Artificial Sequence
  Synthetic oligonucleotide; AGG chr11 5255025 5255044 5255028 -
actgaatcggaacaaggcaa

SEQ ID NO: 45322 - DNA, 20 bp, Artificial Sequence
  Synthetic oligonucleotide; AAG chr11 5255008 5255027 5255011 -
caaaggctataaaaaaaatt

SEQ ID NO: 45323 - DNA, 20 bp, Artificial Sequence
  Synthetic oligonucleotide; CAG chr11 5255005 5255024 5255008 -
aggctataaaaaaaattaag

SEQ ID NO: 45324 - DNA, 20 bp, Artificial Sequence
  Synthetic oligonucleotide; CAG chr11 5255002 5255021 5255005 -
ctataaaaaaaattaagcag

SEQ ID NO: 45325 - DNA, 20 bp, Artificial Sequence
  Synthetic oligonucleotide; TGG chr11 5254991 5255010 5254994 -
attaagcagcagtatcctct

SEQ ID NO: 45326 - DNA, 20 bp, Artificial Sequence
  Synthetic oligonucleotide; GGG chr11 5254990 5255009 5254993 -
ttaagcagcagtatcctctt

SEQ ID NO: 45327 - DNA, 20 bp, Artificial Sequence
  Synthetic oligonucleotide; GGG chr11 5254989 5255008 5254992 -
taagcagcagtatcctcttg

SEQ ID NO: 45328 - DNA, 20 bp, Artificial Sequence
  Synthetic oligonucleotide; GGG chr11 5254988 5255007 5254991 -
aagcagcagtatcctcttgg

SEQ ID NO: 45329 - DNA, 20 bp, Artificial Sequence
  Synthetic oligonucleotide; CGG chr11 5254944 5254963 5254947 -
atgcaaatatctgtctgaaa

SEQ ID NO: 45330 - DNA, 20 bp, Artificial Sequence
  Synthetic oligonucleotide; TGG chr11 5254937 5254956 5254940 -
tatctgtctgaaacggtccc

SEQ ID NO: 45331 - DNA, 20 bp, Artificial Sequence
  Synthetic oligonucleotide; TGG chr11 5254920 5254939 5254923 -
ccctggctaaactccaccca

SEQ ID NO: 45332 - DNA, 20 bp, Artificial Sequence
  Synthetic oligonucleotide; GGG chr11 5254919 5254938 5254922 -
cctggctaaactccacccat

SEQ ID NO: 45333 - DNA, 20 bp, Artificial Sequence
  Synthetic oligonucleotide; TGG chr11 5254915 5254934 5254918 -
gctaaactccacccatgggt

SEQ ID NO: 45334 - DNA, 20 bp, Artificial Sequence
  Synthetic oligonucleotide; CAG chr11 5254911 5254930 5254914 -
aactccacccatgggttggc

SEQ ID NO: 45335 - DNA, 20 bp, Artificial Sequence
  Synthetic oligonucleotide; TAG chr11 5254893 5254912 5254896 -
gccagccttgccttgaccaa

SEQ ID NO: 45336 - DNA, 20 bp, Artificial Sequence
  Synthetic oligonucleotide; AAG chr11 5254883 5254902 5254886 -
ccttgaccaatagccttgac

SEQ ID NO: 45337 - DNA, 20 bp, Artificial Sequence
  Synthetic oligonucleotide; AGG chr11 5254882 5254901 5254885 -
cttgaccaatagccttgaca

SEQ ID NO: 45338 - DNA, 20 bp, Artificial Sequence
  Synthetic oligonucleotide; TAG chr11 5254866 5254885 5254869 -
gacaaggcaaacttgaccaa

SEQ ID NO: 45339 - DNA, 20 bp, Artificial Sequence
  Synthetic oligonucleotide; TAG chr11 5254860 5254879 5254863 -
gcaaacttgaccaatagtct

SEQ ID NO: 45340 - DNA, 20 bp, Artificial Sequence
  Synthetic oligonucleotide; GAG chr11 5254858 5254877 5254861 -
aaacttgaccaatagtctta

SEQ ID NO: 45341 - DNA, 20 bp, Artificial Sequence
  Synthetic oligonucleotide; CAG chr11 5254851 5254870 5254854 -
accaatagtcttagagtatc

SEQ ID NO: 45342 - DNA, 20 bp, Artificial Sequence
  Synthetic oligonucleotide; GAG chr11 5254847 5254866 5254850 -
atagtcttagagtatccagt

SEQ ID NO: 45343 - DNA, 20 bp, Artificial Sequence
  Synthetic oligonucleotide; AGG chr11 5254846 5254865 5254849 -
tagtcttagagtatccagtg

SEQ ID NO: 45344 - DNA, 20 bp, Artificial Sequence
  Synthetic oligonucleotide; CAG chr11 5254842 5254861 5254845 -
cttagagtatccagtgaggc

SEQ ID NO: 45345 - DNA, 20 bp, Artificial Sequence
  Synthetic oligonucleotide; AGG chr11 5254841 5254860 5254844 -
ttagagtatccagtgaggcc

SEQ ID NO: 45346 - DNA, 20 bp, Artificial Sequence
  Synthetic oligonucleotide; GGG chr11 5254840 5254859 5254843 -
tagagtatccagtgaggcca

SEQ ID NO: 45347 - DNA, 20 bp, Artificial Sequence
  Synthetic oligonucleotide; GGG chr11 5254839 5254858 5254842 -
agagtatccagtgaggccag

SEQ ID NO: 45348 - DNA, 20 bp, Artificial Sequence
  Synthetic oligonucleotide; CGG chr11 5254835 5254854 5254838 -
tatccagtgaggccaggggc

SEQ ID NO: 45349 - DNA, 20 bp, Artificial Sequence
  Synthetic oligonucleotide; CGG chr11 5254832 5254851 5254835 -
ccagtgaggccaggggccgg

SEQ ID NO: 45350 - DNA, 20 bp, Artificial Sequence
  Synthetic oligonucleotide; TGG chr11 5254828 5254847 5254831 -
tgaggccaggggccggcggc

SEQ ID NO: 45351 - DNA, 20 bp, Artificial Sequence
  Synthetic oligonucleotide; TAG chr11 5254824 5254843 5254827 -
gccaggggccggcggctggc

SEQ ID NO: 45352 - DNA, 20 bp, Artificial Sequence
  Synthetic oligonucleotide; AGG chr11 5254823 5254842 5254826 -
ccaggggccggcggctggct

SEQ ID NO: 45353 - DNA, 20 bp, Artificial Sequence
  Synthetic oligonucleotide; GGG chr11 5254822 5254841 5254825 -
caggggccggcggctggcta

SEQ ID NO: 45354 - DNA, 20 bp, Artificial Sequence
  Synthetic oligonucleotide; AAG chr11 5254816 5254835 5254819 -
ccggcggctggctagggatg

SEQ ID NO: 45355 - DNA, 20 bp, Artificial Sequence
  Synthetic oligonucleotide; AAG chr11 5254808 5254827 5254811 -
tggctagggatgaagaataa

SEQ ID NO: 45356 - DNA, 20 bp, Artificial Sequence
  Synthetic oligonucleotide; AGG chr11 5254807 5254826 5254810 -
ggctagggatgaagaataaa

SEQ ID NO: 45357 - DNA, 20 bp, Artificial Sequence
  Synthetic oligonucleotide; AAG chr11 5254804 5254823 5254807 -
tagggatgaagaataaaagg

SEQ ID NO: 45358 - DNA, 20 bp, Artificial Sequence
  Synthetic oligonucleotide; CAG chr11 5254794 5254813 5254797 -
gaataaaaggaagcaccctt

SEQ ID NO: 45359 - DNA, 20 bp, Artificial Sequence
  Synthetic oligonucleotide; CAG chr11 5254791 5254810 5254794 -
taaaaggaagcacccttcag

SEQ ID NO: 45360 - DNA, 20 bp, Artificial Sequence
  Synthetic oligonucleotide; TGG chr11 5254771 5254790 5254774 -
cagttccacacactcgcttc

SEQ ID NO: 45361 - DNA, 20 bp, Artificial Sequence
  Synthetic oligonucleotide; GAG chr11 5254761 5254780 5254764 -
cactcgcttctggaacgtct

SEQ ID NO: 45362 - DNA, 20 bp, Artificial Sequence
  Synthetic oligonucleotide; AGG chr11 5254760 5254779 5254763 -
actcgcttctggaacgtctg

SEQ ID NO: 45363 - DNA, 20 bp, Artificial Sequence
  Synthetic oligonucleotide; AAG chr11 5254749 5254768 5254752 -
gaacgtctgaggttatcaat

SEQ ID NO: 45364 - DNA, 20 bp, Artificial Sequence
  Synthetic oligonucleotide; TAG chr11 5254742 5254761 5254745 -
tgaggttatcaataagctcc

SEQ ID NO: 45365 - DNA, 20 bp, Artificial Sequence
  Synthetic oligonucleotide; CAG chr11 5254737 5254756 5254740 -
ttatcaataagctcctagtc

SEQ ID NO: 45366 - DNA, 20 bp, Artificial Sequence
  Synthetic oligonucleotide; TGG chr11 5254728 5254747 5254731 -
agctcctagtccagacgcca

SEQ ID NO: 45367 - DNA, 20 bp, Artificial Sequence
  Synthetic oligonucleotide; GGG chr11 5254727 5254746 5254730 -
gctcctagtccagacgccat

SEQ ID NO: 45368 - DNA, 20 bp, Artificial Sequence
  Synthetic oligonucleotide; CAG chr11 5254716 5254735 5254719 -
agacgccatgggtcatttca

SEQ ID NO: 45369 - DNA, 20 bp, Artificial Sequence
  Synthetic oligonucleotide; GAG chr11 5254714 5254733 5254717 -
acgccatgggtcatttcaca

SEQ ID NO: 45370 - DNA, 20 bp, Artificial Sequence
  Synthetic oligonucleotide; AGG chr11 5254713 5254732 5254716 -
cgccatgggtcatttcacag

SEQ ID NO: 45371 - DNA, 20 bp, Artificial Sequence
  Synthetic oligonucleotide; GAG chr11 5254711 5254730 5254714 -
ccatgggtcatttcacagag

SEQ ID NO: 45372 - DNA, 20 bp, Artificial Sequence
  Synthetic oligonucleotide; AGG chr11 5254710 5254729 5254713 -
catgggtcatttcacagagg

SEQ ID NO: 45373 - DNA, 20 bp, Artificial Sequence
  Synthetic oligonucleotide; AAG chr11 5254705 5254724 5254708 -
gtcatttcacagaggaggac

SEQ ID NO: 45374 - DNA, 20 bp, Artificial Sequence
  Synthetic oligonucleotide; AGG chr11 5254704 5254723 5254707 -
tcatttcacagaggaggaca

SEQ ID NO: 45375 - DNA, 20 bp, Artificial Sequence
  Synthetic oligonucleotide; AAG chr11 5254691 5254710 5254694 -
gaggacaaggctactatcac

SEQ ID NO: 45376 - DNA, 20 bp, Artificial Sequence
  Synthetic oligonucleotide; TGG chr11 5254684 5254703 5254687 -
aggctactatcacaagcctg

SEQ ID NO: 45377 - DNA, 20 bp, Artificial Sequence
  Synthetic oligonucleotide; GGG chr11 5254683 5254702 5254686 -
ggctactatcacaagcctgt

SEQ ID NO: 45378 - DNA, 20 bp, Artificial Sequence
  Synthetic oligonucleotide; GGG chr11 5254682 5254701 5254685 -
gctactatcacaagcctgtg

SEQ ID NO: 45379 - DNA, 20 bp, Artificial Sequence
  Synthetic oligonucleotide; AAG chr11 5254678 5254697 5254681 -
ctatcacaagcctgtggggc

SEQ ID NO: 45380 - DNA, 20 bp, Artificial Sequence
  Synthetic oligonucleotide; AGG chr11 5254677 5254696 5254680 -
tatcacaagcctgtggggca

SEQ ID NO: 45381 - DNA, 20 bp, Artificial Sequence
  Synthetic oligonucleotide; TGG chr11 5254668 5254687 5254671 -
cctgtggggcaaggtgaatg

SEQ ID NO: 45382 - DNA, 20 bp, Artificial Sequence
  Synthetic oligonucleotide; AAG chr11 5254665 5254684 5254668 -
gtggggcaaggtgaatgtgg

SEQ ID NO: 45383 - DNA, 20 bp, Artificial Sequence
  Synthetic oligonucleotide; TGG chr11 5254658 5254677 5254661 -
aaggtgaatgtggaagatgc

SEQ ID NO: 45384 - DNA, 20 bp, Artificial Sequence
  Synthetic oligonucleotide; GAG chr11 5254656 5254675 5254659 -
ggtgaatgtggaagatgctg

SEQ ID NO: 45385 - DNA, 20 bp, Artificial Sequence
  Synthetic oligonucleotide; AGG chr11 5254655 5254674 5254658 -
gtgaatgtggaagatgctgg

SEQ ID NO: 45386 - DNA, 20 bp, Artificial Sequence
  Synthetic oligonucleotide; GAG chr11 5254653 5254672 5254656 -
gaatgtggaagatgctggag

SEQ ID NO: 45387 - DNA, 20 bp, Artificial Sequence
  Synthetic oligonucleotide; TGG chr11 5254644 5254663 5254647 -
agatgctggaggagaaaccc

SEQ ID NO: 45388 - DNA, 20 bp, Artificial Sequence
  Synthetic oligonucleotide; GGG chr11 5254643 5254662 5254646 -
gatgctggaggagaaaccct

SEQ ID NO: 45389 - DNA, 20 bp, Artificial Sequence
  Synthetic oligonucleotide; AAG chr11 5254640 5254659 5254643 -
gctggaggagaaaccctggg

SEQ ID NO: 45390 - DNA, 20 bp, Artificial Sequence
  Synthetic oligonucleotide; AGG chr11 5254639 5254658 5254642 -
ctggaggagaaaccctggga

SEQ ID NO: 45391 - DNA, 20 bp, Artificial Sequence
  Synthetic oligonucleotide; TAG chr11 5254636 5254655 5254639 -
gaggagaaaccctgggaagg

SEQ ID NO: 45392 - DNA, 20 bp, Artificial Sequence
  Synthetic oligonucleotide; AGG chr11 5254635 5254654 5254638 -
aggagaaaccctgggaaggt

SEQ ID NO: 45393 - DNA, 20 bp, Artificial Sequence
  Synthetic oligonucleotide; TGG chr11 5254629 5254648 5254632 -
aaccctgggaaggtaggctc

SEQ ID NO: 45394 - DNA, 20 bp, Artificial Sequence
  Synthetic oligonucleotide; CAG chr11 5254622 5254641 5254625 -
ggaaggtaggctctggtgac

SEQ ID NO: 45395 - DNA, 20 bp, Artificial Sequence
  Synthetic oligonucleotide; AGG chr11 5254621 5254640 5254624 -
gaaggtaggctctggtgacc

SEQ ID NO: 45396 - DNA, 20 bp, Artificial Sequence
  Synthetic oligonucleotide; AAG chr11 5254616 5254635 5254619 -
taggctctggtgaccaggac

SEQ ID NO: 45397 - DNA, 20 bp, Artificial Sequence
  Synthetic oligonucleotide; AGG chr11 5254615 5254634 5254618 -
aggctctggtgaccaggaca

SEQ ID NO: 45398 - DNA, 20 bp, Artificial Sequence
  Synthetic oligonucleotide; GGG chr11 5254614 5254633 5254617 -
ggctctggtgaccaggacaa

SEQ ID NO: 45399 - DNA, 20 bp, Artificial Sequence
  Synthetic oligonucleotide; GAG chr11 5254612 5254631 5254615 -
ctctggtgaccaggacaagg

SEQ ID NO: 45400 - DNA, 20 bp, Artificial Sequence
  Synthetic oligonucleotide; AGG chr11 5254611 5254630 5254614 -
tctggtgaccaggacaaggg

SEQ ID NO: 45401 - DNA, 20 bp, Artificial Sequence
  Synthetic oligonucleotide; GGG chr11 5254610 5254629 5254613 -
ctggtgaccaggacaaggga

SEQ ID NO: 45402 - DNA, 20 bp, Artificial Sequence
  Synthetic oligonucleotide; AAG chr11 5254607 5254626 5254610 -
gtgaccaggacaagggaggg

SEQ ID NO: 45403 - DNA, 20 bp, Artificial Sequence
  Synthetic oligonucleotide; AGG chr11 5254606 5254625 5254609 -
tgaccaggacaagggaggga

SEQ ID NO: 45404 - DNA, 20 bp, Artificial Sequence
  Synthetic oligonucleotide; AAG chr11 5254603 5254622 5254606 -
ccaggacaagggagggaagg

SEQ ID NO: 45405 - DNA, 20 bp, Artificial Sequence
  Synthetic oligonucleotide; AGG chr11 5254602 5254621 5254605 -
caggacaagggagggaagga

SEQ ID NO: 45406 - DNA, 20 bp, Artificial Sequence
  Synthetic oligonucleotide; TGG chr11 5254589 5254608 5254592 -
ggaaggaaggaccctgtgcc

SEQ ID NO: 45407 - DNA, 20 bp, Artificial Sequence
  Synthetic oligonucleotide; AAG chr11 5254583 5254602 5254586 -
aaggaccctgtgcctggcaa

SEQ ID NO: 45408 - DNA, 20 bp, Artificial Sequence
  Synthetic oligonucleotide; CAG chr11 5254578 5254597 5254581 -
ccctgtgcctggcaaaagtc

SEQ ID NO: 45409 - DNA, 20 bp, Artificial Sequence
  Synthetic oligonucleotide; AGG chr11 5254577 5254596 5254580 -
cctgtgcctggcaaaagtcc

SEQ ID NO: 45410 - DNA, 20 bp, Artificial Sequence
  Synthetic oligonucleotide; CAG chr11 5254566 5254585 5254569 -
caaaagtccaggtcgcttct

SEQ ID NO: 45411 - DNA, 20 bp, Artificial Sequence
  Synthetic oligonucleotide; AGG chr11 5254565 5254584 5254568 -
aaaagtccaggtcgcttctc

SEQ ID NO: 45412 - DNA, 20 bp, Artificial Sequence
  Synthetic oligonucleotide; TGG chr11 5254557 5254576 5254560 -
aggtcgcttctcaggatttg

SEQ ID NO: 45413 - DNA, 20 bp, Artificial Sequence
  Synthetic oligonucleotide; CAG chr11 5254518 5254537 5254521 -
aactgttcttgtcaatctca

SEQ ID NO: 45414 - DNA, 20 bp, Artificial Sequence
  Synthetic oligonucleotide; AGG chr11 5254517 5254536 5254520 -
actgttcttgtcaatctcac

SEQ ID NO: 45415 - DNA, 20 bp, Artificial Sequence
  Synthetic oligonucleotide; TGG chr11 5254510 5254529 5254513 -
ttgtcaatctcacaggctcc

SEQ ID NO: 45416 - DNA, 20 bp, Artificial Sequence
  Synthetic oligonucleotide; TGG chr11 5254496 5254515 5254499 -
ggctcctggttgtctaccca

SEQ ID NO: 45417 - DNA, 20 bp, Artificial Sequence
  Synthetic oligonucleotide; CAG chr11 5254490 5254509 5254493 -
tggttgtctacccatggacc

SEQ ID NO: 45418 - DNA, 20 bp, Artificial Sequence
  Synthetic oligonucleotide; GAG chr11 5254488 5254507 5254491 -
gttgtctacccatggaccca

SEQ ID NO: 45419 - DNA, 20 bp, Artificial Sequence
  Synthetic oligonucleotide; AGG chr11 5254487 5254506 5254490 -
ttgtctacccatggacccag

SEQ ID NO: 45420 - DNA, 20 bp, Artificial Sequence
  Synthetic oligonucleotide; CAG chr11 5254476 5254495 5254479 -
tggacccagaggttctttga

SEQ ID NO: 45421 - DNA, 20 bp, Artificial Sequence
  Synthetic oligonucleotide; TGG chr11 5254470 5254489 5254473 -
cagaggttctttgacagctt

SEQ ID NO: 45422 - DNA, 20 bp, Artificial Sequence
  Synthetic oligonucleotide; TGG chr11 5254441 5254460 5254444 -
gtcctctgcctctgccatca

SEQ ID NO: 45423 - DNA, 20 bp, Artificial Sequence
  Synthetic oligonucleotide; GGG chr11 5254440 5254459 5254443 -
tcctctgcctctgccatcat

SEQ ID NO: 45424 - DNA, 20 bp, Artificial Sequence
  Synthetic oligonucleotide; AAG chr11 5254429 5254448 5254432 -
tgccatcatgggcaacccca

SEQ ID NO: 45425 - DNA, 20 bp, Artificial Sequence
  Synthetic oligonucleotide; AAG chr11 5254424 5254443 5254427 -
tcatgggcaaccccaaagtc

SEQ ID NO: 45426 - DNA, 20 bp, Artificial Sequence
  Synthetic oligonucleotide; AGG chr11 5254423 5254442 5254426 -
catgggcaaccccaaagtca

SEQ ID NO: 45427 - DNA, 20 bp, Artificial Sequence
  Synthetic oligonucleotide; TGG chr11 5254416 5254435 5254419 -
aaccccaaagtcaaggcaca

SEQ ID NO: 45428 - DNA, 20 bp, Artificial Sequence
  Synthetic oligonucleotide; AAG chr11 5254412 5254431 5254415 -
ccaaagtcaaggcacatggc

SEQ ID NO: 45429 - DNA, 20 bp, Artificial Sequence
  Synthetic oligonucleotide; AAG chr11 5254409 5254428 5254412 -
aagtcaaggcacatggcaag

SEQ ID NO: 45430 - DNA, 20 bp, Artificial Sequence
  Synthetic oligonucleotide; AGG chr11 5254408 5254427 5254411 -
agtcaaggcacatggcaaga

SEQ ID NO: 45431 - DNA, 20 bp, Artificial Sequence
  Synthetic oligonucleotide; TGG chr11 5254393 5254412 5254396 -
caagaaggtgctgacttcct

SEQ ID NO: 45432 - DNA, 20 bp, Artificial Sequence
  Synthetic oligonucleotide; GGG chr11 5254392 5254411 5254395 -
aagaaggtgctgacttcctt

SEQ ID NO: 45433 - DNA, 20 bp, Artificial Sequence
  Synthetic oligonucleotide; GAG chr11 5254390 5254409 5254393 -
gaaggtgctgacttccttgg

SEQ ID NO: 45434 - DNA, 20 bp, Artificial Sequence
  Synthetic oligonucleotide; AAG chr11 5254379 5254398 5254382 -
cttccttgggagatgccata

SEQ ID NO: 45435 - DNA, 20 bp, Artificial Sequence
  Synthetic oligonucleotide; TGG chr11 5254372 5254391 5254375 -
gggagatgccataaagcacc

SEQ ID NO: 45436 - DNA, 20 bp, Artificial Sequence
  Synthetic oligonucleotide; AAG chr11 5254361 5254380 5254364 -
taaagcacctggatgatctc

SEQ ID NO: 45437 - DNA, 20 bp, Artificial Sequence
  Synthetic oligonucleotide; AGG chr11 5254360 5254379 5254363 -
aaagcacctggatgatctca

SEQ ID NO: 45438 - DNA, 20 bp, Artificial Sequence
  Synthetic oligonucleotide; GGG chr11 5254359 5254378 5254362 -
aagcacctggatgatctcaa

SEQ ID NO: 45439 - DNA, 20 bp, Artificial Sequence
  Synthetic oligonucleotide; CAG chr11 5254346 5254365 5254349 -
atctcaagggcacctttgcc

SEQ ID NO: 45440 - DNA, 20 bp, Artificial Sequence
  Synthetic oligonucleotide; GAG chr11 5254341 5254360 5254344 -
aagggcacctttgcccagct

SEQ ID NO: 45441 - DNA, 20 bp, Artificial Sequence
  Synthetic oligonucleotide; AAG chr11 5254322 5254341 5254325 -
tgagtgaactgcactgtgac

SEQ ID NO: 45442 - DNA, 20 bp, Artificial Sequence
  Synthetic oligonucleotide; TGG chr11 5254312 5254331 5254315 -
gcactgtgacaagctgcatg

SEQ ID NO: 45443 - DNA, 20 bp, Artificial Sequence
  Synthetic oligonucleotide; GAG chr11 5254304 5254323 5254307 -
acaagctgcatgtggatcct

SEQ ID NO: 45444 - DNA, 20 bp, Artificial Sequence
  Synthetic oligonucleotide; AAG chr11 5254295 5254314 5254298 -
atgtggatcctgagaacttc

SEQ ID NO: 45445 - DNA, 20 bp, Artificial Sequence
  Synthetic oligonucleotide; AGG chr11 5254294 5254313 5254297 -
tgtggatcctgagaacttca

SEQ ID NO: 45446 - DNA, 20 bp, Artificial Sequence
  Synthetic oligonucleotide; GAG chr11 5254290 5254309 5254293 -
gatcctgagaacttcaaggt

SEQ ID NO: 45447 - DNA, 20 bp, Artificial Sequence
  Synthetic oligonucleotide; CAG chr11 5254285 5254304 5254288 -
tgagaacttcaaggtgagtc

SEQ ID NO: 45448 - DNA, 20 bp, Artificial Sequence
  Synthetic oligonucleotide; AGG chr11 5254284 5254303 5254287 -
gagaacttcaaggtgagtcc

SEQ ID NO: 45449 - DNA, 20 bp, Artificial Sequence
  Synthetic oligonucleotide; GAG chr11 5254282 5254301 5254285 -
gaacttcaaggtgagtccag

SEQ ID NO: 45450 - DNA, 20 bp, Artificial Sequence
  Synthetic oligonucleotide; CAG chr11 5254273 5254292 5254276 -
ggtgagtccaggagatgttt

SEQ ID NO: 45451 - DNA, 20 bp, Artificial Sequence
  Synthetic oligonucleotide; TAG chr11 5254258 5254277 5254261 -
tgtttcagcactgttgcctt

SEQ ID NO: 45452 - DNA, 20 bp, Artificial Sequence
  Synthetic oligonucleotide; GAG chr11 5254251 5254270 5254254 -
gcactgttgcctttagtctc

SEQ ID NO: 45453 - DNA, 20 bp, Artificial Sequence
  Synthetic oligonucleotide; AGG chr11 5254250 5254269 5254253 -
cactgttgcctttagtctcg

SEQ ID NO: 45454 - DNA, 20 bp, Artificial Sequence
  Synthetic oligonucleotide; TAG chr11 5254242 5254261 5254245 -
cctttagtctcgaggcaact

SEQ ID NO: 45455 - DNA, 20 bp, Artificial Sequence
  Synthetic oligonucleotide; GAG chr11 5254233 5254252 5254236 -
tcgaggcaacttagacaact

SEQ ID NO: 45456 - DNA, 20 bp, Artificial Sequence
  Synthetic oligonucleotide; GAG chr11 5254221 5254240 5254224 -
agacaactgagtattgatct

SEQ ID NO: 45457 - DNA, 20 bp, Artificial Sequence
  Synthetic oligonucleotide; CAG chr11 5254216 5254235 5254219 -
actgagtattgatctgagca

SEQ ID NO: 45458 - DNA, 20 bp, Artificial Sequence
  Synthetic oligonucleotide; CAG chr11 5254213 5254232 5254216 -
gagtattgatctgagcacag

SEQ ID NO: 45459 - DNA, 20 bp, Artificial Sequence
  Synthetic oligonucleotide; AGG chr11 5254212 5254231 5254215 -
agtattgatctgagcacagc

SEQ ID NO: 45460 - DNA, 20 bp, Artificial Sequence
  Synthetic oligonucleotide; GGG chr11 5254211 5254230 5254214 -
gtattgatctgagcacagca

SEQ ID NO: 45461 - DNA, 20 bp, Artificial Sequence
  Synthetic oligonucleotide; GAG chr11 5254205 5254224 5254208 -
atctgagcacagcagggtgt

SEQ ID NO: 45462 - DNA, 20 bp, Artificial Sequence
  Synthetic oligonucleotide; AAG chr11 5254195 5254214 5254198 -
agcagggtgtgagctgtttg

SEQ ID NO: 45463 - DNA, 20 bp, Artificial Sequence
  Synthetic oligonucleotide; TGG chr11 5254188 5254207 5254191 -
tgtgagctgtttgaagatac

SEQ ID NO: 45464 - DNA, 20 bp, Artificial Sequence
  Synthetic oligonucleotide; GGG chr11 5254187 5254206 5254190 -
gtgagctgtttgaagatact

SEQ ID NO: 45465 - DNA, 20 bp, Artificial Sequence
  Synthetic oligonucleotide; GGG chr11 5254186 5254205 5254189 -
tgagctgtttgaagatactg

SEQ ID NO: 45466 - DNA, 20 bp, Artificial Sequence
  Synthetic oligonucleotide; TGG chr11 5254182 5254201 5254185 -
ctgtttgaagatactggggt

SEQ ID NO: 45467 - DNA, 20 bp, Artificial Sequence
  Synthetic oligonucleotide; GGG chr11 5254181 5254200 5254184 -
tgtttgaagatactggggtt

SEQ ID NO: 45468 - DNA, 20 bp, Artificial Sequence
  Synthetic oligonucleotide; GAG chr11 5254179 5254198 5254182 -
tttgaagatactggggttgg

SEQ ID NO: 45469 - DNA, 20 bp, Artificial Sequence
  Synthetic oligonucleotide; AAG chr11 5254174 5254193 5254177 -
agatactggggttgggagtg

SEQ ID NO: 45470 - DNA, 20 bp, Artificial Sequence
  Synthetic oligonucleotide; CAG chr11 5254165 5254184 5254168 -
ggttgggagtgaagaaactg

SEQ ID NO: 45471 - DNA, 20 bp, Artificial Sequence
  Synthetic oligonucleotide; GAG chr11 5254163 5254182 5254166 -
ttgggagtgaagaaactgca

SEQ ID NO: 45472 - DNA, 20 bp, Artificial Sequence
  Synthetic oligonucleotide; AGG chr11 5254162 5254181 5254165 -
tgggagtgaagaaactgcag

SEQ ID NO: 45473 - DNA, 20 bp, Artificial Sequence
  Synthetic oligonucleotide; TGG chr11 5254153 5254172 5254156 -
agaaactgcagaggactaac

SEQ ID NO: 45474 - DNA, 20 bp, Artificial Sequence
  Synthetic oligonucleotide; GGG chr11 5254152 5254171 5254155 -
gaaactgcagaggactaact

SEQ ID NO: 45475 - DNA, 20 bp, Artificial Sequence
  Synthetic oligonucleotide; GAG chr11 5254147 5254166 5254150 -
tgcagaggactaactgggct

SEQ ID NO: 45476 - DNA, 20 bp, Artificial Sequence
  Synthetic oligonucleotide; CAG chr11 5254141 5254160 5254144 -
ggactaactgggctgagacc

SEQ ID NO: 45477 - DNA, 20 bp, Artificial Sequence
  Synthetic oligonucleotide; TGG chr11 5254138 5254157 5254141 -
ctaactgggctgagacccag

SEQ ID NO: 45478 - DNA, 20 bp, Artificial Sequence
  Synthetic oligonucleotide; TAG chr11 5254127 5254146 5254130 -
gagacccagtggcaatgttt

SEQ ID NO: 45479 - DNA, 20 bp, Artificial Sequence
  Synthetic oligonucleotide; AGG chr11 5254126 5254145 5254129 -
agacccagtggcaatgtttt

SEQ ID NO: 45480 - DNA, 20 bp, Artificial Sequence
  Synthetic oligonucleotide; GGG chr11 5254125 5254144 5254128 -
gacccagtggcaatgtttta

SEQ ID NO: 45481 - DNA, 20 bp, Artificial Sequence
  Synthetic oligonucleotide; AAG chr11 5254119 5254138 5254122 -
gtggcaatgttttagggcct

SEQ ID NO: 45482 - DNA, 20 bp, Artificial Sequence
  Synthetic oligonucleotide; AGG chr11 5254118 5254137 5254121 -
tggcaatgttttagggccta

SEQ ID NO: 45483 - DNA, 20 bp, Artificial Sequence
  Synthetic oligonucleotide; GAG chr11 5254116 5254135 5254119 -
gcaatgttttagggcctaag

SEQ ID NO: 45484 - DNA, 20 bp, Artificial Sequence
  Synthetic oligonucleotide; TAG chr11 5254099 5254118 5254102 -
aaggagtgcctctgaaaatc

SEQ ID NO: 45485 - DNA, 20 bp, Artificial Sequence
  Synthetic oligonucleotide; TGG chr11 5254095 5254114 5254098 -
agtgcctctgaaaatctaga

SEQ ID NO: 45486 - DNA, 20 bp, Artificial Sequence
  Synthetic oligonucleotide; GAG chr11 5254078 5254097 5254081 -
agatggacaactttgacttt

SEQ ID NO: 45487 - DNA, 20 bp, Artificial Sequence
  Synthetic oligonucleotide; AAG chr11 5254073 5254092 5254076 -
gacaactttgactttgagaa

SEQ ID NO: 45488 - DNA, 20 bp, Artificial Sequence
  Synthetic oligonucleotide; GAG chr11 5254071 5254090 5254074 -
caactttgactttgagaaaa

SEQ ID NO: 45489 - DNA, 20 bp, Artificial Sequence
  Synthetic oligonucleotide; GAG chr11 5254069 5254088 5254072 -
actttgactttgagaaaaga

SEQ ID NO: 45490 - DNA, 20 bp, Artificial Sequence
  Synthetic oligonucleotide; AGG chr11 5254068 5254087 5254071 -
ctttgactttgagaaaagag

SEQ ID NO: 45491 - DNA, 20 bp, Artificial Sequence
  Synthetic oligonucleotide; TGG chr11 5254065 5254084 5254068 -
tgactttgagaaaagagagg

SEQ ID NO: 45492 - DNA, 20 bp, Artificial Sequence
  Synthetic oligonucleotide; GAG chr11 5254058 5254077 5254061 -
gagaaaagagaggtggaaat

SEQ ID NO: 45493 - DNA, 20 bp, Artificial Sequence
  Synthetic oligonucleotide; AGG chr11 5254057 5254076 5254060 -
agaaaagagaggtggaaatg

SEQ ID NO: 45494 - DNA, 20 bp, Artificial Sequence
  Synthetic oligonucleotide; TAG chr11 5254036 5254055 5254039 -
ggaaaatgacttttctttat

SEQ ID NO: 45495 - DNA, 20 bp, Artificial Sequence
  Synthetic oligonucleotide; CGG chr11 5254029 5254048 5254032 -
gacttttctttattagattt

SEQ ID NO: 45496 - DNA, 20 bp, Artificial Sequence
  Synthetic oligonucleotide; TAG chr11 5254026 5254045 5254029 -
ttttctttattagatttcgg

SEQ ID NO: 45497 - DNA, 20 bp, Artificial Sequence
  Synthetic oligonucleotide; AAG chr11 5254022 5254041 5254025 -
ctttattagatttcggtaga

SEQ ID NO: 45498 - DNA, 20 bp, Artificial Sequence
  Synthetic oligonucleotide; TGG chr11 5253971 5253990 5253974 -
ttcgttttaaaacatctatc

SEQ ID NO: 45499 - DNA, 20 bp, Artificial Sequence
  Synthetic oligonucleotide; GAG chr11 5253969 5253988 5253972 -
cgttttaaaacatctatctg

SEQ ID NO: 45500 - DNA, 20 bp, Artificial Sequence
  Synthetic oligonucleotide; AGG chr11 5253968 5253987 5253971 -
gttttaaaacatctatctgg

SEQ ID NO: 45501 - DNA, 20 bp, Artificial Sequence
  Synthetic oligonucleotide; CAG chr11 5253965 5253984 5253968 -
ttaaaacatctatctggagg

SEQ ID NO: 45502 - DNA, 20 bp, Artificial Sequence
  Synthetic oligonucleotide; AGG chr11 5253964 5253983 5253967 -
taaaacatctatctggaggc

SEQ ID NO: 45503 - DNA, 20 bp, Artificial Sequence
  Synthetic oligonucleotide; AAG chr11 5253959 5253978 5253962 -
catctatctggaggcaggac

SEQ ID NO: 45504 - DNA, 20 bp, Artificial Sequence
  Synthetic oligonucleotide; TGG chr11 5253954 5253973 5253957 -
atctggaggcaggacaagta

SEQ ID NO: 45505 - DNA, 20 bp, Artificial Sequence
  Synthetic oligonucleotide; AAG chr11 5253943 5253962 5253946 -
ggacaagtatggtcattaaa

SEQ ID NO: 45506 - DNA, 20 bp, Artificial Sequence
  Synthetic oligonucleotide; CAG chr11 5253937 5253956 5253940 -
gtatggtcattaaaaagatg

SEQ ID NO: 45507 - DNA, 20 bp, Artificial Sequence
  Synthetic oligonucleotide; AGG chr11 5253936 5253955 5253939 -
tatggtcattaaaaagatgc

SEQ ID NO: 45508 - DNA, 20 bp, Artificial Sequence
  Synthetic oligonucleotide; CAG chr11 5253933 5253952 5253936 -
ggtcattaaaaagatgcagg

SEQ ID NO: 45509 - DNA, 20 bp, Artificial Sequence
  Synthetic oligonucleotide; AAG chr11 5253930 5253949 5253933 -
cattaaaaagatgcaggcag

SEQ ID NO: 45510 - DNA, 20 bp, Artificial Sequence
  Synthetic oligonucleotide; AGG chr11 5253929 5253948 5253932 -
attaaaaagatgcaggcaga

SEQ ID NO: 45511 - DNA, 20 bp, Artificial Sequence
  Synthetic oligonucleotide; TGG chr11 5253919 5253938 5253922 -
tgcaggcagaaggcatatat

SEQ ID NO: 45512 - DNA, 20 bp, Artificial Sequence
  Synthetic oligonucleotide; CAG chr11 5253914 5253933 5253917 -
gcagaaggcatatattggct

SEQ ID NO: 45513 - DNA, 20 bp, Artificial Sequence
  Synthetic oligonucleotide; AAG chr11 5253908 5253927 5253911 -
ggcatatattggctcagtca

SEQ ID NO: 45514 - DNA, 20 bp, Artificial Sequence
  Synthetic oligonucleotide; TGG chr11 5253905 5253924 5253908 -
atatattggctcagtcaaag

SEQ ID NO: 45515 - DNA, 20 bp, Artificial Sequence
  Synthetic oligonucleotide; GGG chr11 5253904 5253923 5253907 -
tatattggctcagtcaaagt

SEQ ID NO: 45516 - DNA, 20 bp, Artificial Sequence
  Synthetic oligonucleotide; GGG chr11 5253903 5253922 5253906 -
atattggctcagtcaaagtg

SEQ ID NO: 45517 - DNA, 20 bp, Artificial Sequence
  Synthetic oligonucleotide; TGG chr11 5253895 5253914 5253898 -
tcagtcaaagtggggaactt

SEQ ID NO: 45518 - DNA, 20 bp, Artificial Sequence
  Synthetic oligonucleotide; TGG chr11 5253892 5253911 5253895 -
gtcaaagtggggaactttgg

SEQ ID NO: 45519 - DNA, 20 bp, Artificial Sequence
  Synthetic oligonucleotide; AAG chr11 5253873 5253892 5253876 -
gtggccaaacatacattgct

SEQ ID NO: 45520 - DNA, 20 bp, Artificial Sequence
  Synthetic oligonucleotide; AGG chr11 5253872 5253891 5253875 -
tggccaaacatacattgcta

SEQ ID NO: 45521 - DNA, 20 bp, Artificial Sequence
  Synthetic oligonucleotide; CAG chr11 5253857 5253876 5253860 -
tgctaaggctattcctatat

SEQ ID NO: 45522 - DNA, 20 bp, Artificial Sequence
  Synthetic oligonucleotide; TGG chr11 5253853 5253872 5253856 -
aaggctattcctatatcagc

SEQ ID NO: 45523 - DNA, 20 bp, Artificial Sequence
  Synthetic oligonucleotide; CAG chr11 5253798 5253817 5253801 -
aaacttatatcctttaattc

SEQ ID NO: 45524 - DNA, 20 bp, Artificial Sequence
  Synthetic oligonucleotide; TGG chr11 5253794 5253813 5253797 -
ttatatcctttaattccaga

SEQ ID NO: 45525 - DNA, 20 bp, Artificial Sequence
  Synthetic oligonucleotide; GGG chr11 5253793 5253812 5253796 -
tatatcctttaattccagat

SEQ ID NO: 45526 - DNA, 20 bp, Artificial Sequence
  Synthetic oligonucleotide; GGG chr11 5253792 5253811 5253795 -
atatcctttaattccagatg

SEQ ID NO: 45527 - DNA, 20 bp, Artificial Sequence
  Synthetic oligonucleotide; GGG chr11 5253791 5253810 5253794 -
tatcctttaattccagatgg

SEQ ID NO: 45528 - DNA, 20 bp, Artificial Sequence
  Synthetic oligonucleotide; AAG chr11 5253786 5253805 5253789 -
tttaattccagatgggggca

SEQ ID NO: 45529 - DNA, 20 bp, Artificial Sequence
  Synthetic oligonucleotide; CAG chr11 5253777 5253796 5253780 -
agatgggggcaaagtatgtc

SEQ ID NO: 45530 - DNA, 20 bp, Artificial Sequence
  Synthetic oligonucleotide; AGG chr11 5253776 5253795 5253779 -
gatgggggcaaagtatgtcc

SEQ ID NO: 45531 - DNA, 20 bp, Artificial Sequence
  Synthetic oligonucleotide; GGG chr11 5253775 5253794 5253778 -
atgggggcaaagtatgtcca

SEQ ID NO: 45532 - DNA, 20 bp, Artificial Sequence
  Synthetic oligonucleotide; GGG chr11 5253774 5253793 5253777 -
tgggggcaaagtatgtccag

SEQ ID NO: 45533 - DNA, 20 bp, Artificial Sequence
  Synthetic oligonucleotide; GAG chr11 5253770 5253789 5253773 -
ggcaaagtatgtccaggggt

SEQ ID NO: 45534 - DNA, 20 bp, Artificial Sequence
  Synthetic oligonucleotide; AGG chr11 5253769 5253788 5253772 -
gcaaagtatgtccaggggtg

SEQ ID NO: 45535 - DNA, 20 bp, Artificial Sequence
  Synthetic oligonucleotide; TGG chr11 5253751 5253770 5253754 -
tgaggaacaattgaaacatt

SEQ ID NO: 45536 - DNA, 20 bp, Artificial Sequence
  Synthetic oligonucleotide; GGG chr11 5253750 5253769 5253753 -
gaggaacaattgaaacattt

SEQ ID NO: 45537 - DNA, 20 bp, Artificial Sequence
  Synthetic oligonucleotide; TGG chr11 5253746 5253765 5253749 -
aacaattgaaacatttgggc

SEQ ID NO: 45538 - DNA, 20 bp, Artificial Sequence
  Synthetic oligonucleotide; GAG chr11 5253744 5253763 5253747 -
caattgaaacatttgggctg

SEQ ID NO: 45539 - DNA, 20 bp, Artificial Sequence
  Synthetic oligonucleotide; TAG chr11 5253741 5253760 5253744 -
ttgaaacatttgggctggag

SEQ ID NO: 45540 - DNA, 20 bp, Artificial Sequence
  Synthetic oligonucleotide; AAG chr11 5253731 5253750 5253734 -
tgggctggagtagattttga

SEQ ID NO: 45541 - DNA, 20 bp, Artificial Sequence
  Synthetic oligonucleotide; CAG chr11 5253727 5253746 5253730 -
ctggagtagattttgaaagt

SEQ ID NO: 45542 - DNA, 20 bp, Artificial Sequence
  Synthetic oligonucleotide; GAG chr11 5253676 5253695 5253679 -
gcgtgtgtttgtgtgtgtgt

SEQ ID NO: 45543 - DNA, 20 bp, Artificial Sequence
  Synthetic oligonucleotide; GAG chr11 5253674 5253693 5253677 -
gtgtgtttgtgtgtgtgtga

SEQ ID NO: 45544 - DNA, 20 bp, Artificial Sequence
  Synthetic oligonucleotide; CAG chr11 5253649 5253668 5253652 -
tgtgtttcttttaacgtttt

SEQ ID NO: 45545 - DNA, 20 bp, Artificial Sequence
  Synthetic oligonucleotide; CAG chr11 5253642 5253661 5253645 -
cttttaacgttttcagccta

SEQ ID NO: 45546 - DNA, 20 bp, Artificial Sequence
  Synthetic oligonucleotide; CAG chr11 5253635 5253654 5253638 -
cgttttcagcctacagcata

SEQ ID NO: 45547 - DNA, 20 bp, Artificial Sequence
  Synthetic oligonucleotide; AGG chr11 5253634 5253653 5253637 -
gttttcagcctacagcatac

SEQ ID NO: 45548 - DNA, 20 bp, Artificial Sequence
  Synthetic oligonucleotide; GGG chr11 5253633 5253652 5253636 -
ttttcagcctacagcataca

SEQ ID NO: 45549 - DNA, 20 bp, Artificial Sequence
  Synthetic oligonucleotide; TGG chr11 5253626 5253645 5253629 -
cctacagcatacagggttca

SEQ ID NO: 45550 - DNA, 20 bp, Artificial Sequence
  Synthetic oligonucleotide; TGG chr11 5253623 5253642 5253626 -
acagcatacagggttcatgg

SEQ ID NO: 45551 - DNA, 20 bp, Artificial Sequence
  Synthetic oligonucleotide; AAG chr11 5253619 5253638 5253622 -
catacagggttcatggtggc

SEQ ID NO: 45552 - DNA, 20 bp, Artificial Sequence
  Synthetic oligonucleotide; AAG chr11 5253616 5253635 5253619 -
acagggttcatggtggcaag

SEQ ID NO: 45553 - DNA, 20 bp, Artificial Sequence
  Synthetic oligonucleotide; AAG chr11 5253608 5253627 5253611 -
catggtggcaagaagataac

SEQ ID NO: 45554 - DNA, 20 bp, Artificial Sequence
  Synthetic oligonucleotide; TGG chr11 5253595 5253614 5253598 -
agataacaagatttaaatta

SEQ ID NO: 45555 - DNA, 20 bp, Artificial Sequence
  Synthetic oligonucleotide; CAG chr11 5253591 5253610 5253594 -
aacaagatttaaattatggc

SEQ ID NO: 45556 - DNA, 20 bp, Artificial Sequence
  Synthetic oligonucleotide; TAG chr11 5253584 5253603 5253587 -
tttaaattatggccagtgac

SEQ ID NO: 45557 - DNA, 20 bp, Artificial Sequence
  Synthetic oligonucleotide; AAG chr11 5253575 5253594 5253578 -
tggccagtgactagtgctgc

SEQ ID NO: 45558 - DNA, 20 bp, Artificial Sequence
  Synthetic oligonucleotide; AAG chr11 5253572 5253591 5253575 -
ccagtgactagtgctgcaag

SEQ ID NO: 45559 - DNA, 20 bp, Artificial Sequence
  Synthetic oligonucleotide; TGG chr11 5253550 5253569 5253553 -
gaacaactacctgcatttaa

SEQ ID NO: 45560 - DNA, 20 bp, Artificial Sequence
  Synthetic oligonucleotide; GGG chr11 5253549 5253568 5253552 -
aacaactacctgcatttaat

SEQ ID NO: 45561 - DNA, 20 bp, Artificial Sequence
  Synthetic oligonucleotide; AAG chr11 5253545 5253564 5253548 -
actacctgcatttaatggga

SEQ ID NO: 45562 - DNA, 20 bp, Artificial Sequence
  Synthetic oligonucleotide; CAG chr11 5253534 5253553 5253537 -
ttaatgggaaagcaaaatct

SEQ ID NO: 45563 - DNA, 20 bp, Artificial Sequence
  Synthetic oligonucleotide; AGG chr11 5253533 5253552 5253536 -
taatgggaaagcaaaatctc

SEQ ID NO: 45564 - DNA, 20 bp, Artificial Sequence
  Synthetic oligonucleotide; GAG chr11 5253526 5253545 5253529 -
aaagcaaaatctcaggcttt

SEQ ID NO: 45565 - DNA, 20 bp, Artificial Sequence
  Synthetic oligonucleotide; AGG chr11 5253525 5253544 5253528 -
aagcaaaatctcaggctttg

SEQ ID NO: 45566 - DNA, 20 bp, Artificial Sequence
  Synthetic oligonucleotide; GGG chr11 5253524 5253543 5253527 -
agcaaaatctcaggctttga

SEQ ID NO: 45567 - DNA, 20 bp, Artificial Sequence
  Synthetic oligonucleotide; AAG chr11 5253521 5253540 5253524 -
aaaatctcaggctttgaggg

SEQ ID NO: 45568 - DNA, 20 bp, Artificial Sequence
  Synthetic oligonucleotide; TAG chr11 5253512 5253531 5253515 -
ggctttgagggaagttaaca

SEQ ID NO: 45569 - DNA, 20 bp, Artificial Sequence
  Synthetic oligonucleotide; AGG chr11 5253511 5253530 5253514 -
gctttgagggaagttaacat

SEQ ID NO: 45570 - DNA, 20 bp, Artificial Sequence
  Synthetic oligonucleotide; TGG chr11 5253500 5253519 5253503 -
agttaacataggcttgattc

SEQ ID NO: 45571 - DNA, 20 bp, Artificial Sequence
  Synthetic oligonucleotide; GGG chr11 5253499 5253518 5253502 -
gttaacataggcttgattct

SEQ ID NO: 45572 - DNA, 20 bp, Artificial Sequence
  Synthetic oligonucleotide; TGG chr11 5253496 5253515 5253499 -
aacataggcttgattctggg

SEQ ID NO: 45573 - DNA, 20 bp, Artificial Sequence
  Synthetic oligonucleotide; AAG chr11 5253493 5253512 5253496 -
ataggcttgattctgggtgg

SEQ ID NO: 45574 - DNA, 20 bp, Artificial Sequence
  Synthetic oligonucleotide; TGG chr11 5253488 5253507 5253491 -
cttgattctgggtggaagct

SEQ ID NO: 45575 - DNA, 20 bp, Artificial Sequence
  Synthetic oligonucleotide; TAG chr11 5253481 5253500 5253484 -
ctgggtggaagcttggtgtg

SEQ ID NO: 45576 - DNA, 20 bp, Artificial Sequence
  Synthetic oligonucleotide; TGG chr11 5253473 5253492 5253476 -
aagcttggtgtgtagttatc

SEQ ID NO: 45577 - DNA, 20 bp, Artificial Sequence
  Synthetic oligonucleotide; GAG chr11 5253471 5253490 5253474 -
gcttggtgtgtagttatctg

SEQ ID NO: 45578 - DNA, 20 bp, Artificial Sequence
  Synthetic oligonucleotide; AGG chr11 5253470 5253489 5253473 -
cttggtgtgtagttatctgg

SEQ ID NO: 45579 - DNA, 20 bp, Artificial Sequence
  Synthetic oligonucleotide; CAG chr11 5253466 5253485 5253469 -
gtgtgtagttatctggaggc

SEQ ID NO: 45580 - DNA, 20 bp, Artificial Sequence
  Synthetic oligonucleotide; AGG chr11 5253465 5253484 5253468 -
tgtgtagttatctggaggcc

SEQ ID NO: 45581 - DNA, 20 bp, Artificial Sequence
  Synthetic oligonucleotide; TGG chr11 5253461 5253480 5253464 -
tagttatctggaggccaggc

SEQ ID NO: 45582 - DNA, 20 bp, Artificial Sequence
  Synthetic oligonucleotide; GAG chr11 5253459 5253478 5253462 -
gttatctggaggccaggctg

SEQ ID NO: 45583 - DNA, 20 bp, Artificial Sequence
  Synthetic oligonucleotide; CAG chr11 5253452 5253471 5253455 -
ggaggccaggctggagctct

SEQ ID NO: 45584 - DNA, 20 bp, Artificial Sequence
  Synthetic oligonucleotide; TGG chr11 5253442 5253461 5253445 -
ctggagctctcagctcacta

SEQ ID NO: 45585 - DNA, 20 bp, Artificial Sequence
  Synthetic oligonucleotide; GGG chr11 5253441 5253460 5253444 -
tggagctctcagctcactat

SEQ ID NO: 45586 - DNA, 20 bp, Artificial Sequence
  Synthetic oligonucleotide; CAG chr11 5253409 5253428 5253412 -
attgtctcctttcatctcaa

SEQ ID NO: 45587 - DNA, 20 bp, Artificial Sequence
  Synthetic oligonucleotide; TGG chr11 5253402 5253421 5253405 -
cctttcatctcaacagctcc

SEQ ID NO: 45588 - DNA, 20 bp, Artificial Sequence
  Synthetic oligonucleotide; GGG chr11 5253401 5253420 5253404 -
ctttcatctcaacagctcct

SEQ ID NO: 45589 - DNA, 20 bp, Artificial Sequence
  Synthetic oligonucleotide; TGG chr11 5253390 5253409 5253393 -
acagctcctgggaaatgtgc

SEQ ID NO: 45590 - DNA, 20 bp, Artificial Sequence
  Synthetic oligonucleotide; TGG chr11 5253378 5253397 5253381 -
aaatgtgctggtgaccgttt

SEQ ID NO: 45591 - DNA, 20 bp, Artificial Sequence
  Synthetic oligonucleotide; CGG chr11 5253365 5253384 5253368 -
accgttttggcaatccattt

SEQ ID NO: 45592 - DNA, 20 bp, Artificial Sequence
  Synthetic oligonucleotide; AAG chr11 5253360 5253379 5253363 -
tttggcaatccatttcggca

SEQ ID NO: 45593 - DNA, 20 bp, Artificial Sequence
  Synthetic oligonucleotide; GAG chr11 5253346 5253365 5253349 -
tcggcaaagaattcacccct

SEQ ID NO: 45594 - DNA, 20 bp, Artificial Sequence
  Synthetic oligonucleotide; AGG chr11 5253345 5253364 5253348 -
cggcaaagaattcacccctg

SEQ ID NO: 45595 - DNA, 20 bp, Artificial Sequence
  Synthetic oligonucleotide; CAG chr11 5253340 5253359 5253343 -
aagaattcacccctgaggtg

SEQ ID NO: 45596 - DNA, 20 bp, Artificial Sequence
  Synthetic oligonucleotide; AGG chr11 5253339 5253358 5253342 -
agaattcacccctgaggtgc

SEQ ID NO: 45597 - DNA, 20 bp, Artificial Sequence
  Synthetic oligonucleotide; TGG chr11 5253331 5253350 5253334 -
cccctgaggtgcaggcttcc

SEQ ID NO: 45598 - DNA, 20 bp, Artificial Sequence
  Synthetic oligonucleotide; CAG chr11 5253328 5253347 5253331 -
ctgaggtgcaggcttcctgg

SEQ ID NO: 45599 - DNA, 20 bp, Artificial Sequence
  Synthetic oligonucleotide; AAG chr11 5253325 5253344 5253328 -
aggtgcaggcttcctggcag

SEQ ID NO: 45600 - DNA, 20 bp, Artificial Sequence
  Synthetic oligonucleotide; TGG chr11 5253321 5253340 5253324 -
gcaggcttcctggcagaaga

SEQ ID NO: 45601 - DNA, 20 bp, Artificial Sequence
  Synthetic oligonucleotide; TGG chr11 5253314 5253333 5253317 -
tcctggcagaagatggtgac

SEQ ID NO: 45602 - DNA, 20 bp, Artificial Sequence
  Synthetic oligonucleotide; GAG chr11 5253312 5253331 5253315 -
ctggcagaagatggtgactg

SEQ ID NO: 45603 - DNA, 20 bp, Artificial Sequence
  Synthetic oligonucleotide; TGG chr11 5253309 5253328 5253312 -
gcagaagatggtgactggag

SEQ ID NO: 45604 - DNA, 20 bp, Artificial Sequence
  Synthetic oligonucleotide; CAG chr11 5253305 5253324 5253308 -
aagatggtgactggagtggc

SEQ ID NO: 45605 - DNA, 20 bp, Artificial Sequence
  Synthetic oligonucleotide; CAG chr11 5253290 5253309 5253293 -
gtggccagtgccctgtcctc

SEQ ID NO: 45606 - DNA, 20 bp, Artificial Sequence
  Synthetic oligonucleotide; GAG chr11 5253279 5253298 5253282 -
cctgtcctccagataccact

SEQ ID NO: 45607 - DNA, 20 bp, Artificial Sequence
  Synthetic oligonucleotide; CAG chr11 5253260 5253279 5253263 -
tgagctcactgcccatgatg

SEQ ID NO: 45608 - DNA, 20 bp, Artificial Sequence
  Synthetic oligonucleotide; GAG chr11 5253258 5253277 5253261 -
agctcactgcccatgatgca

SEQ ID NO: 45609 - DNA, 20 bp, Artificial Sequence
  Synthetic oligonucleotide; AAG chr11 5253250 5253269 5253253 -
gcccatgatgcagagctttc

SEQ ID NO: 45610 - DNA, 20 bp, Artificial Sequence
  Synthetic oligonucleotide; AGG chr11 5253249 5253268 5253252 -
cccatgatgcagagctttca

SEQ ID NO: 45611 - DNA, 20 bp, Artificial Sequence
  Synthetic oligonucleotide; TAG chr11 5253245 5253264 5253248 -
tgatgcagagctttcaagga

SEQ ID NO: 45612 - DNA, 20 bp, Artificial Sequence
  Synthetic oligonucleotide; AGG chr11 5253244 5253263 5253247 -
gatgcagagctttcaaggat

SEQ ID NO: 45613 - DNA, 20 bp, Artificial Sequence
  Synthetic oligonucleotide; AAG chr11 5253230 5253249 5253233 -
aaggataggctttattctgc

SEQ ID NO: 45614 - DNA, 20 bp, Artificial Sequence
  Synthetic oligonucleotide; AAG chr11 5253201 5253220 5253204 -
aataataaatctattctgct

SEQ ID NO: 45615 - DNA, 20 bp, Artificial Sequence
  Synthetic oligonucleotide; GAG chr11 5253199 5253218 5253202 -
taataaatctattctgctaa

SEQ ID NO: 45616 - DNA, 20 bp, Artificial Sequence
  Synthetic oligonucleotide; TGG chr11 5253188 5253207 5253191 -
ttctgctaagagatcacaca

SEQ ID NO: 45617 - DNA, 20 bp, Artificial Sequence
  Synthetic oligonucleotide; CAG chr11 5253178 5253197 5253181 -
agatcacacatggttgtctt

SEQ ID NO: 45618 - DNA, 20 bp, Artificial Sequence
  Synthetic oligonucleotide; GAG chr11 5253147 5253166 5253150 -
ttatgtctttttaaatatat

SEQ ID NO: 45619 - DNA, 20 bp, Artificial Sequence
  Synthetic oligonucleotide; AAG chr11 5253139 5253158 5253142 -
ttttaaatatatgagccaca

SEQ ID NO: 45620 - DNA, 20 bp, Artificial Sequence
  Synthetic oligonucleotide; AGG chr11 5253138 5253157 5253141 -
tttaaatatatgagccacaa

SEQ ID NO: 45621 - DNA, 20 bp, Artificial Sequence
  Synthetic oligonucleotide; GGG chr11 5253137 5253156 5253140 -
ttaaatatatgagccacaaa

SEQ ID NO: 45622 - DNA, 20 bp, Artificial Sequence
  Synthetic oligonucleotide; GAG chr11 5253125 5253144 5253128 -
gccacaaagggttttatgtt

SEQ ID NO: 45623 - DNA, 20 bp, Artificial Sequence
  Synthetic oligonucleotide; AGG chr11 5253124 5253143 5253127 -
ccacaaagggttttatgttg

SEQ ID NO: 45624 - DNA, 20 bp, Artificial Sequence
  Synthetic oligonucleotide; GGG chr11 5253123 5253142 5253126 -
cacaaagggttttatgttga

SEQ ID NO: 45625 - DNA, 20 bp, Artificial Sequence
  Synthetic oligonucleotide; TGG chr11 5253097 5253116 5253100 -
tgtttatgtgtatttataca

SEQ ID NO: 45626 - DNA, 20 bp, Artificial Sequence
  Synthetic oligonucleotide; TAG chr11 5253046 5253065 5253049 -
ccacacttttttgtttacgt

SEQ ID NO: 45627 - DNA, 20 bp, Artificial Sequence
  Synthetic oligonucleotide; TGG chr11 5253040 5253059 5253043 -
ttttttgtttacgttagatg

SEQ ID NO: 45628 - DNA, 20 bp, Artificial Sequence
  Synthetic oligonucleotide; GGG chr11 5253039 5253058 5253042 -
tttttgtttacgttagatgt

SEQ ID NO: 45629 - DNA, 20 bp, Artificial Sequence
  Synthetic oligonucleotide; GAG chr11 5253029 5253048 5253032 -
cgttagatgtgggttttgat

SEQ ID NO: 45630 - DNA, 20 bp, Artificial Sequence
  Synthetic oligonucleotide; AAG chr11 5253019 5253038 5253022 -
gggttttgatgagcaaataa

SEQ ID NO: 45631 - DNA, 20 bp, Artificial Sequence
  Synthetic oligonucleotide; TAG chr11 5253013 5253032 5253016 -
tgatgagcaaataaaagaac

SEQ ID NO: 45632 - DNA, 20 bp, Artificial Sequence
  Synthetic oligonucleotide; AGG chr11 5253012 5253031 5253015 -
gatgagcaaataaaagaact

SEQ ID NO: 45633 - DNA, 20 bp, Artificial Sequence
  Synthetic oligonucleotide; AAG chr11 5253004 5253023 5253007 -
aataaaagaactaggcaata

SEQ ID NO: 45634 - DNA, 20 bp, Artificial Sequence
  Synthetic oligonucleotide; TGG chr11 5252990 5253009 5252993 -
gcaataaagaaacttgtaca

SEQ ID NO: 45635 - DNA, 20 bp, Artificial Sequence
  Synthetic oligonucleotide; GGG chr11 5252989 5253008 5252992 -
caataaagaaacttgtacat

SEQ ID NO: 45636 - DNA, 20 bp, Artificial Sequence
  Synthetic oligonucleotide; GAG chr11 5252987 5253006 5252990 -
ataaagaaacttgtacatgg

SEQ ID NO: 45637 - DNA, 20 bp, Artificial Sequence
  Synthetic oligonucleotide; AAG chr11 5252978 5252997 5252981 -
cttgtacatgggagttctgc

SEQ ID NO: 45638 - DNA, 20 bp, Artificial Sequence
  Synthetic oligonucleotide; TGG chr11 5252975 5252994 5252978 -
gtacatgggagttctgcaag

SEQ ID NO: 45639 - DNA, 20 bp, Artificial Sequence
  Synthetic oligonucleotide; GGG chr11 5252974 5252993 5252977 -
tacatgggagttctgcaagt

SEQ ID NO: 45640 - DNA, 20 bp, Artificial Sequence
  Synthetic oligonucleotide; GAG chr11 5252972 5252991 5252975 -
catgggagttctgcaagtgg

SEQ ID NO: 45641 - DNA, 20 bp, Artificial Sequence
  Synthetic oligonucleotide; AAG chr11 5252966 5252985 5252969 -
agttctgcaagtgggagtaa

SEQ ID NO: 45642 - DNA, 20 bp, Artificial Sequence
  Synthetic oligonucleotide; AGG chr11 5252965 5252984 5252968 -
gttctgcaagtgggagtaaa

SEQ ID NO: 45643 - DNA, 20 bp, Artificial Sequence
  Synthetic oligonucleotide; CAG chr11 5252960 5252979 5252963 -
gcaagtgggagtaaaaggtg

SEQ ID NO: 45644 - DNA, 20 bp, Artificial Sequence
  Synthetic oligonucleotide; AGG chr11 5252959 5252978 5252962 -
caagtgggagtaaaaggtgc

SEQ ID NO: 45645 - DNA, 20 bp, Artificial Sequence
  Synthetic oligonucleotide; GAG chr11 5252957 5252976 5252960 -
agtgggagtaaaaggtgcag

SEQ ID NO: 45646 - DNA, 20 bp, Artificial Sequence
  Synthetic oligonucleotide; TGG chr11 5252949 5252968 5252952 -
taaaaggtgcaggagaaatc

SEQ ID NO: 45647 - DNA, 20 bp, Artificial Sequence
  Synthetic oligonucleotide; TGG chr11 5252945 5252964 5252948 -
aggtgcaggagaaatctggt

SEQ ID NO: 45648 - DNA, 20 bp, Artificial Sequence
  Synthetic oligonucleotide; AAG chr11 5252942 5252961 5252945 -
tgcaggagaaatctggttgg

SEQ ID NO: 45649 - DNA, 20 bp, Artificial Sequence
  Synthetic oligonucleotide; AAG chr11 5252938 5252957 5252941 -
ggagaaatctggttggaaga

SEQ ID NO: 45650 - DNA, 20 bp, Artificial Sequence
  Synthetic oligonucleotide; TAG chr11 5252928 5252947 5252931 -
ggttggaagaaagacctcta

SEQ ID NO: 45651 - DNA, 20 bp, Artificial Sequence
  Synthetic oligonucleotide; AGG chr11 5252927 5252946 5252930 -
gttggaagaaagacctctat

SEQ ID NO: 45652 - DNA, 20 bp, Artificial Sequence
  Synthetic oligonucleotide; CAG chr11 5252923 5252942 5252926 -
gaagaaagacctctatagga

SEQ ID NO: 45653 - DNA, 20 bp, Artificial Sequence
  Synthetic oligonucleotide; AGG chr11 5252922 5252941 5252925 -
aagaaagacctctataggac

SEQ ID NO: 45654 - DNA, 20 bp, Artificial Sequence
  Synthetic oligonucleotide; CAG chr11 5252913 5252932 5252916 -
ctctataggacaggactcct

SEQ ID NO: 45655 - DNA, 20 bp, Artificial Sequence
  Synthetic oligonucleotide; CAG chr11 5252907 5252926 5252910 -
aggacaggactcctcagaaa

SEQ ID NO: 45656 - DNA, 20 bp, Artificial Sequence
  Synthetic oligonucleotide; TGG chr11 5252898 5252917 5252901 -
ctcctcagaaacagatgttt

SEQ ID NO: 45657 - DNA, 20 bp, Artificial Sequence
  Synthetic oligonucleotide; AAG chr11 5252895 5252914 5252898 -
ctcagaaacagatgttttgg

SEQ ID NO: 45658 - DNA, 20 bp, Artificial Sequence
  Synthetic oligonucleotide; GAG chr11 5252893 5252912 5252896 -
cagaaacagatgttttggaa

SEQ ID NO: 45659 - DNA, 20 bp, Artificial Sequence
  Synthetic oligonucleotide; TGG chr11 5252889 5252908 5252892 -
aacagatgttttggaagaga

SEQ ID NO: 45660 - DNA, 20 bp, Artificial Sequence
  Synthetic oligonucleotide; GGG chr11 5252888 5252907 5252891 -
acagatgttttggaagagat

SEQ ID NO: 45661 - DNA, 20 bp, Artificial Sequence
  Synthetic oligonucleotide; GGG chr11 5252887 5252906 5252890 -
cagatgttttggaagagatg

SEQ ID NO: 45662 - DNA, 20 bp, Artificial Sequence
  Synthetic oligonucleotide; AAG chr11 5252883 5252902 5252886 -
tgttttggaagagatgggga

SEQ ID NO: 45663 - DNA, 20 bp, Artificial Sequence
  Synthetic oligonucleotide; AGG chr11 5252882 5252901 5252885 -
gttttggaagagatggggaa

SEQ ID NO: 45664 - DNA, 20 bp, Artificial Sequence
  Synthetic oligonucleotide; CAG chr11 5252877 5252896 5252880 -
ggaagagatggggaaaggtt

SEQ ID NO: 45665 - DNA, 20 bp, Artificial Sequence
  Synthetic oligonucleotide; AAG chr11 5252872 5252891 5252875 -
agatggggaaaggttcagtg

SEQ ID NO: 45666 - DNA, 20 bp, Artificial Sequence
  Synthetic oligonucleotide; AGG chr11 5252871 5252890 5252874 -
gatggggaaaggttcagtga

SEQ ID NO: 45667 - DNA, 20 bp, Artificial Sequence
  Synthetic oligonucleotide; GGG chr11 5252870 5252889 5252873 -
atggggaaaggttcagtgaa

SEQ ID NO: 45668 - DNA, 20 bp, Artificial Sequence
  Synthetic oligonucleotide; GGG chr11 5252869 5252888 5252872 -
tggggaaaggttcagtgaag

SEQ ID NO: 45669 - DNA, 20 bp, Artificial Sequence
  Synthetic oligonucleotide; GGG chr11 5252868 5252887 5252871 -
ggggaaaggttcagtgaagg

SEQ ID NO: 45670 - DNA, 20 bp, Artificial Sequence
  Synthetic oligonucleotide; TGG chr11 5252850 5252869 5252853 -
gggggctgaacccccttccc

SEQ ID NO: 45671 - DNA, 20 bp, Artificial Sequence
  Synthetic oligonucleotide; CAG chr11 5252843 5252862 5252846 -
gaacccccttccctggattg

SEQ ID NO: 45672 - DNA, 20 bp, Artificial Sequence
  Synthetic oligonucleotide; CAG chr11 5252838 5252857 5252841 -
cccttccctggattgcagca

SEQ ID NO: 45673 - DNA, 20 bp, Artificial Sequence
  Synthetic oligonucleotide; CAG chr11 5252835 5252854 5252838 -
ttccctggattgcagcacag

SEQ ID NO: 45674 - DNA, 20 bp, Artificial Sequence
  Synthetic oligonucleotide; GAG chr11 5252831 5252850 5252834 -
ctggattgcagcacagcagc

SEQ ID NO: 45675 - DNA, 20 bp, Artificial Sequence
  Synthetic oligonucleotide; AGG chr11 5252830 5252849 5252833 -
tggattgcagcacagcagcg

SEQ ID NO: 45676 - DNA, 20 bp, Artificial Sequence
  Synthetic oligonucleotide; AAG chr11 5252827 5252846 5252830 -
attgcagcacagcagcgagg

SEQ ID NO: 45677 - DNA, 20 bp, Artificial Sequence
  Synthetic oligonucleotide; AGG chr11 5252826 5252845 5252829 -
ttgcagcacagcagcgagga

SEQ ID NO: 45678 - DNA, 20 bp, Artificial Sequence
  Synthetic oligonucleotide; GGG chr11 5252825 5252844 5252828 -
tgcagcacagcagcgaggaa

SEQ ID NO: 45679 - DNA, 20 bp, Artificial Sequence
  Synthetic oligonucleotide; GGG chr11 5252824 5252843 5252827 -
gcagcacagcagcgaggaag

SEQ ID NO: 45680 - DNA, 20 bp, Artificial Sequence
  Synthetic oligonucleotide; AAG chr11 5252814 5252833 5252817 -
agcgaggaaggggctcaacg

SEQ ID NO: 45681 - DNA, 20 bp, Artificial Sequence
  Synthetic oligonucleotide; AAG chr11 5252808 5252827 5252811 -
gaaggggctcaacgaagaaa

SEQ ID NO: 45682 - DNA, 20 bp, Artificial Sequence
  Synthetic oligonucleotide; AAG chr11 5252799 5252818 5252802 -
caacgaagaaaaagtgttcc

SEQ ID NO: 45683 - DNA, 20 bp, Artificial Sequence
  Synthetic oligonucleotide; TAG chr11 5252793 5252812 5252796 -
agaaaaagtgttccaagctt

SEQ ID NO: 45684 - DNA, 20 bp, Artificial Sequence
  Synthetic oligonucleotide; AGG chr11 5252792 5252811 5252795 -
gaaaaagtgttccaagcttt

SEQ ID NO: 45685 - DNA, 20 bp, Artificial Sequence
  Synthetic oligonucleotide; AAG chr11 5252789 5252808 5252792 -
aaagtgttccaagctttagg

SEQ ID NO: 45686 - DNA, 20 bp, Artificial Sequence
  Synthetic oligonucleotide; AAG chr11 5252784 5252803 5252787 -
gttccaagctttaggaagtc

SEQ ID NO: 45687 - DNA, 20 bp, Artificial Sequence
  Synthetic oligonucleotide; AGG chr11 5252783 5252802 5252786 -
ttccaagctttaggaagtca

SEQ ID NO: 45688 - DNA, 20 bp, Artificial Sequence
  Synthetic oligonucleotide; TAG chr11 5252778 5252797 5252781 -
agctttaggaagtcaaggtt

SEQ ID NO: 45689 - DNA, 20 bp, Artificial Sequence
  Synthetic oligonucleotide; AGG chr11 5252777 5252796 5252780 -
gctttaggaagtcaaggttt

SEQ ID NO: 45690 - DNA, 20 bp, Artificial Sequence
  Synthetic oligonucleotide; CAG chr11 5252774 5252793 5252777 -
ttaggaagtcaaggtttagg

SEQ ID NO: 45691 - DNA, 20 bp, Artificial Sequence
  Synthetic oligonucleotide; AGG chr11 5252773 5252792 5252776 -
taggaagtcaaggtttaggc

SEQ ID NO: 45692 - DNA, 20 bp, Artificial Sequence
  Synthetic oligonucleotide; GGG chr11 5252772 5252791 5252775 -
aggaagtcaaggtttaggca

SEQ ID NO: 45693 - DNA, 20 bp, Artificial Sequence
  Synthetic oligonucleotide; TAG chr11 5252768 5252787 5252771 -
agtcaaggtttaggcaggga

SEQ ID NO: 45694 - DNA, 20 bp, Artificial Sequence
  Synthetic oligonucleotide; TAG chr11 5252751 5252770 5252754 -
ggatagccattctattttat

SEQ ID NO: 45695 - DNA, 20 bp, Artificial Sequence
  Synthetic oligonucleotide; AGG chr11 5252750 5252769 5252753 -
gatagccattctattttatt

SEQ ID NO: 45696 - DNA, 20 bp, Artificial Sequence
  Synthetic oligonucleotide; GGG chr11 5252749 5252768 5252752 -
atagccattctattttatta

SEQ ID NO: 45697 - DNA, 20 bp, Artificial Sequence
  Synthetic oligonucleotide; GGG chr11 5252748 5252767 5252751 -
tagccattctattttattag

SEQ ID NO: 45698 - DNA, 20 bp, Artificial Sequence
  Synthetic oligonucleotide; CGG chr11 5252730 5252749 5252733 -
aggggcaatactatttccaa

SEQ ID NO: 45699 - DNA, 20 bp, Artificial Sequence
  Synthetic oligonucleotide; TGG chr11 5252723 5252742 5252726 -
atactatttccaacggcatc

SEQ ID NO: 45700 - DNA, 20 bp, Artificial Sequence
  Synthetic oligonucleotide; CAG chr11 5252713 5252732 5252716 -
caacggcatctggcttttct

SEQ ID NO: 45701 - DNA, 20 bp, Artificial Sequence
  Synthetic oligonucleotide; GAG chr11 5252703 5252722 5252706 -
tggcttttctcagcccttgt

SEQ ID NO: 45702 - DNA, 20 bp, Artificial Sequence
  Synthetic oligonucleotide; AGG chr11 5252702 5252721 5252705 -
ggcttttctcagcccttgtg

SEQ ID NO: 45703 - DNA, 20 bp, Artificial Sequence
  Synthetic oligonucleotide; CAG chr11 5252694 5252713 5252697 -
tcagcccttgtgaggctcta

SEQ ID NO: 45704 - DNA, 20 bp, Artificial Sequence
  Synthetic oligonucleotide; AGG chr11 5252693 5252712 5252696 -
cagcccttgtgaggctctac

SEQ ID NO: 45705 - DNA, 20 bp, Artificial Sequence
  Synthetic oligonucleotide; GGG chr11 5252692 5252711 5252695 -
agcccttgtgaggctctaca

SEQ ID NO: 45706 - DNA, 20 bp, Artificial Sequence
  Synthetic oligonucleotide; GAG chr11 5252690 5252709 5252693 -
cccttgtgaggctctacagg

SEQ ID NO: 45707 - DNA, 20 bp, Artificial Sequence
  Synthetic oligonucleotide; AGG chr11 5252689 5252708 5252692 -
ccttgtgaggctctacaggg

SEQ ID NO: 45708 - DNA, 20 bp, Artificial Sequence
  Synthetic oligonucleotide; GAG chr11 5252684 5252703 5252687 -
tgaggctctacagggaggtt

SEQ ID NO: 45709 - DNA, 20 bp, Artificial Sequence
  Synthetic oligonucleotide; AGG chr11 5252683 5252702 5252686 -
gaggctctacagggaggttg

SEQ ID NO: 45710 - DNA, 20 bp, Artificial Sequence
  Synthetic oligonucleotide; TAG chr11 5252677 5252696 5252680 -
ctacagggaggttgaggtgt

SEQ ID NO: 45711 - DNA, 20 bp, Artificial Sequence
  Synthetic oligonucleotide; GAG chr11 5252675 5252694 5252678 -
acagggaggttgaggtgtta

SEQ ID NO: 45712 - DNA, 20 bp, Artificial Sequence
  Synthetic oligonucleotide; CAG chr11 5252670 5252689 5252673 -
gaggttgaggtgttagagat

SEQ ID NO: 45713 - DNA, 20 bp, Artificial Sequence
  Synthetic oligonucleotide; GAG chr11 5252668 5252687 5252671 -
ggttgaggtgttagagatca

SEQ ID NO: 45714 - DNA, 20 bp, Artificial Sequence
  Synthetic oligonucleotide; CAG chr11 5252665 5252684 5252668 -
tgaggtgttagagatcagag

SEQ ID NO: 45715 - DNA, 20 bp, Artificial Sequence
  Synthetic oligonucleotide; AGG chr11 5252664 5252683 5252667 -
gaggtgttagagatcagagc

SEQ ID NO: 45716 - DNA, 20 bp, Artificial Sequence
  Synthetic oligonucleotide; CAG chr11 5252658 5252677 5252661 -
ttagagatcagagcaggaaa

SEQ ID NO: 45717 - DNA, 20 bp, Artificial Sequence
  Synthetic oligonucleotide; AGG chr11 5252657 5252676 5252660 -
tagagatcagagcaggaaac

SEQ ID NO: 45718 - DNA, 20 bp, Artificial Sequence
  Synthetic oligonucleotide; CGG chr11 5252642 5252661 5252645 -
gaaacaggtttttctttcca

SEQ ID NO: 45719 - DNA, 20 bp, Artificial Sequence
  Synthetic oligonucleotide; AAG chr11 5252628 5252647 5252631 -
tttccacggtaactacaatg

SEQ ID NO: 45720 - DNA, 20 bp, Artificial Sequence
  Synthetic oligonucleotide; AAG chr11 5252609 5252628 5252612 -
gaagtgatccttactttact

SEQ ID NO: 45721 - DNA, 20 bp, Artificial Sequence
  Synthetic oligonucleotide; AGG chr11 5252608 5252627 5252611 -
aagtgatccttactttacta

SEQ ID NO: 45722 - DNA, 20 bp, Artificial Sequence
  Synthetic oligonucleotide; AAG chr11 5252592 5252611 5252595 -
actaaggaacttttcatttt

SEQ ID NO: 45723 - DNA, 20 bp, Artificial Sequence
  Synthetic oligonucleotide; AAG chr11 5252573 5252592 5252576 -
taagtgttgacgcatgccta

SEQ ID NO: 45724 - DNA, 20 bp, Artificial Sequence
  Synthetic oligonucleotide; GAG chr11 5252571 5252590 5252574 -
agtgttgacgcatgcctaaa

SEQ ID NO: 45725 - DNA, 20 bp, Artificial Sequence
  Synthetic oligonucleotide; AGG chr11 5252570 5252589 5252573 -
gtgttgacgcatgcctaaag

SEQ ID NO: 45726 - DNA, 20 bp, Artificial Sequence
  Synthetic oligonucleotide; AAG chr11 5252546 5252565 5252549 -
gaaattaatcccataccctt

SEQ ID NO: 45727 - DNA, 20 bp, Artificial Sequence
  Synthetic oligonucleotide; CAG chr11 5252539 5252558 5252542 -
atcccatacccttaagtcta

SEQ ID NO: 45728 - DNA, 20 bp, Artificial Sequence
  Synthetic oligonucleotide; TGG chr11 5252534 5252553 5252537 -
atacccttaagtctacagac

SEQ ID NO: 45729 - DNA, 20 bp, Artificial Sequence
  Synthetic oligonucleotide; CAG chr11 5252528 5252547 5252531 -
ttaagtctacagactggtca

SEQ ID NO: 45730 - DNA, 20 bp, Artificial Sequence
  Synthetic oligonucleotide; AAG chr11 5252519 5252538 5252522 -
cagactggtcacagcatttc

SEQ ID NO: 45731 - DNA, 20 bp, Artificial Sequence
  Synthetic oligonucleotide; AGG chr11 5252518 5252537 5252521 -
agactggtcacagcatttca

SEQ ID NO: 45732 - DNA, 20 bp, Artificial Sequence
  Synthetic oligonucleotide; GAG chr11 5252516 5252535 5252519 -
actggtcacagcatttcaag

SEQ ID NO: 45733 - DNA, 20 bp, Artificial Sequence
  Synthetic oligonucleotide; AGG chr11 5252515 5252534 5252518 -
ctggtcacagcatttcaagg

SEQ ID NO: 45734 - DNA, 20 bp, Artificial Sequence
  Synthetic oligonucleotide; GAG chr11 5252513 5252532 5252516 -
ggtcacagcatttcaaggag

SEQ ID NO: 45735 - DNA, 20 bp, Artificial Sequence
  Synthetic oligonucleotide; AAG chr11 5252500 5252519 5252503 -
caaggaggagacctcattgt

SEQ ID NO: 45736 - DNA, 20 bp, Artificial Sequence
  Synthetic oligonucleotide; TAG chr11 5252493 5252512 5252496 -
gagacctcattgtaagcttc

SEQ ID NO: 45737 - DNA, 20 bp, Artificial Sequence
  Synthetic oligonucleotide; AGG chr11 5252492 5252511 5252495 -
agacctcattgtaagcttct

SEQ ID NO: 45738 - DNA, 20 bp, Artificial Sequence
  Synthetic oligonucleotide; GGG chr11 5252491 5252510 5252494 -
gacctcattgtaagcttcta

SEQ ID NO: 45739 - DNA, 20 bp, Artificial Sequence
  Synthetic oligonucleotide; GAG chr11 5252489 5252508 5252492 -
cctcattgtaagcttctagg

SEQ ID NO: 45740 - DNA, 20 bp, Artificial Sequence
  Synthetic oligonucleotide; AGG chr11 5252488 5252507 5252491 -
ctcattgtaagcttctaggg

SEQ ID NO: 45741 - DNA, 20 bp, Artificial Sequence
  Synthetic oligonucleotide; TGG chr11 5252485 5252504 5252488 -
attgtaagcttctagggagg

SEQ ID NO: 45742 - DNA, 20 bp, Artificial Sequence
  Synthetic oligonucleotide; GGG chr11 5252484 5252503 5252487 -
ttgtaagcttctagggaggt

SEQ ID NO: 45743 - DNA, 20 bp, Artificial Sequence
  Synthetic oligonucleotide; GGG chr11 5252483 5252502 5252486 -
tgtaagcttctagggaggtg

SEQ ID NO: 45744 - DNA, 20 bp, Artificial Sequence
  Synthetic oligonucleotide; TAG chr11 5252477 5252496 5252480 -
cttctagggaggtggggact

SEQ ID NO: 45745 - DNA, 20 bp, Artificial Sequence
  Synthetic oligonucleotide; AGG chr11 5252476 5252495 5252479 -
ttctagggaggtggggactt

SEQ ID NO: 45746 - DNA, 20 bp, Artificial Sequence
  Synthetic oligonucleotide; AAG chr11 5252471 5252490 5252474 -
gggaggtggggacttaggtg

SEQ ID NO: 45747 - DNA, 20 bp, Artificial Sequence
  Synthetic oligonucleotide; AGG chr11 5252470 5252489 5252473 -
ggaggtggggacttaggtga

SEQ ID NO: 45748 - DNA, 20 bp, Artificial Sequence
  Synthetic oligonucleotide; GAG chr11 5252463 5252482 5252466 -
gggacttaggtgaaggaaat

SEQ ID NO: 45749 - DNA, 20 bp, Artificial Sequence
  Synthetic oligonucleotide; CAG chr11 5252459 5252478 5252462 -
cttaggtgaaggaaatgagc

SEQ ID NO: 45750 - DNA, 20 bp, Artificial Sequence
  Synthetic oligonucleotide; CAG chr11 5252456 5252475 5252459 -
aggtgaaggaaatgagccag

SEQ ID NO: 45751 - DNA, 20 bp, Artificial Sequence
  Synthetic oligonucleotide; AAG chr11 5252453 5252472 5252456 -
tgaaggaaatgagccagcag

SEQ ID NO: 45752 - DNA, 20 bp, Artificial Sequence
  Synthetic oligonucleotide; AAG chr11 5252445 5252464 5252448 -
atgagccagcagaagctcac

SEQ ID NO: 45753 - DNA, 20 bp, Artificial Sequence
  Synthetic oligonucleotide; CAG chr11 5252441 5252460 5252444 -
gccagcagaagctcacaagt

SEQ ID NO: 45754 - DNA, 20 bp, Artificial Sequence
  Synthetic oligonucleotide; CAG chr11 5252435 5252454 5252438 -
agaagctcacaagtcagcat

SEQ ID NO: 45755 - DNA, 20 bp, Artificial Sequence
  Synthetic oligonucleotide; CAG chr11 5252420 5252439 5252423 -
agcatcagcgtgtcatgtct

SEQ ID NO: 45756 - DNA, 20 bp, Artificial Sequence
  Synthetic oligonucleotide; CAG chr11 5252417 5252436 5252420 -
atcagcgtgtcatgtctcag

SEQ ID NO: 45757 - DNA, 20 bp, Artificial Sequence
  Synthetic oligonucleotide; CAG chr11 5252414 5252433 5252417 -
agcgtgtcatgtctcagcag

SEQ ID NO: 45758 - DNA, 20 bp, Artificial Sequence
  Synthetic oligonucleotide; CAG chr11 5252409 5252428 5252412 -
gtcatgtctcagcagcagaa

SEQ ID NO: 45759 - DNA, 20 bp, Artificial Sequence
  Synthetic oligonucleotide; CGG chr11 5252404 5252423 5252407 -
gtctcagcagcagaacagca

SEQ ID NO: 45760 - DNA, 20 bp, Artificial Sequence
  Synthetic oligonucleotide; CAG chr11 5252400 5252419 5252403 -
cagcagcagaacagcacggt

SEQ ID NO: 45761 - DNA, 20 bp, Artificial Sequence
  Synthetic oligonucleotide; TAG chr11 5252388 5252407 5252391 -
agcacggtcagatgaaaata

SEQ ID NO: 45762 - DNA, 20 bp, Artificial Sequence
  Synthetic oligonucleotide; AAG chr11 5252381 5252400 5252384 -
tcagatgaaaatatagtgtg

SEQ ID NO: 45763 - DNA, 20 bp, Artificial Sequence
  Synthetic oligonucleotide; GAG chr11 5252359 5252378 5252362 -
gaatttgtataacattaatt

SEQ ID NO: 45764 - DNA, 20 bp, Artificial Sequence
  Synthetic oligonucleotide; AAG chr11 5252356 5252375 5252359 -
tttgtataacattaattgag

SEQ ID NO: 45765 - DNA, 20 bp, Artificial Sequence
  Synthetic oligonucleotide; AGG chr11 5252355 5252374 5252358 -
ttgtataacattaattgaga

SEQ ID NO: 45766 - DNA, 20 bp, Artificial Sequence
  Synthetic oligonucleotide; CAG chr11 5252352 5252371 5252355 -
tataacattaattgagaagg

SEQ ID NO: 45767 - DNA, 20 bp, Artificial Sequence
  Synthetic oligonucleotide; TGG chr11 5252343 5252362 5252346 -
aattgagaaggcagattcac

SEQ ID NO: 45768 - DNA, 20 bp, Artificial Sequence
  Synthetic oligonucleotide; GAG chr11 5252341 5252360 5252344 -
ttgagaaggcagattcactg

SEQ ID NO: 45769 - DNA, 20 bp, Artificial Sequence
  Synthetic oligonucleotide; AAG chr11 5252323 5252342 5252326 -
tggagttcttatataattga

SEQ ID NO: 45770 - DNA, 20 bp, Artificial Sequence
  Synthetic oligonucleotide; AAG chr11 5252305 5252324 5252308 -
gaaagttaatgcacgttaat

SEQ ID NO: 45771 - DNA, 20 bp, Artificial Sequence
  Synthetic oligonucleotide; AAG chr11 5252301 5252320 5252304 -
gttaatgcacgttaataagc

SEQ ID NO: 45772 - DNA, 20 bp, Artificial Sequence
  Synthetic oligonucleotide; GAG chr11 5252299 5252318 5252302 -
taatgcacgttaataagcaa

SEQ ID NO: 45773 - DNA, 20 bp, Artificial Sequence
  Synthetic oligonucleotide; TAG chr11 5252294 5252313 5252297 -
cacgttaataagcaagagtt

SEQ ID NO: 45774 - DNA, 20 bp, Artificial Sequence
  Synthetic oligonucleotide; TGG chr11 5252281 5252300 5252284 -
aagagtttagtttaatgtga

SEQ ID NO: 45775 - DNA, 20 bp, Artificial Sequence
  Synthetic oligonucleotide; CAG chr11 5252252 5252271 5252255 -
gaacttaacgcttgtgtctc

SEQ ID NO: 45776 - DNA, 20 bp, Artificial Sequence
  Synthetic oligonucleotide; TGG chr11 5252217 5252236 5252220 -
ctgaatccccaactcccaat

SEQ ID NO: 45777 - DNA, 20 bp, Artificial Sequence
  Synthetic oligonucleotide; TGG chr11 5252205 5252224 5252208 -
ctcccaattggctccatttg

SEQ ID NO: 45778 - DNA, 20 bp, Artificial Sequence
  Synthetic oligonucleotide; GGG chr11 5252204 5252223 5252207 -
tcccaattggctccatttgt

SEQ ID NO: 45779 - DNA, 20 bp, Artificial Sequence
  Synthetic oligonucleotide; GGG chr11 5252203 5252222 5252206 -
cccaattggctccatttgtg

SEQ ID NO: 45780 - DNA, 20 bp, Artificial Sequence
  Synthetic oligonucleotide; GGG chr11 5252202 5252221 5252205 -
ccaattggctccatttgtgg

SEQ ID NO: 45781 - DNA, 20 bp, Artificial Sequence
  Synthetic oligonucleotide; GAG chr11 5252200 5252219 5252203 -
aattggctccatttgtgggg

SEQ ID NO: 45782 - DNA, 20 bp, Artificial Sequence
  Synthetic oligonucleotide; AGG chr11 5252199 5252218 5252202 -
attggctccatttgtggggg

SEQ ID NO: 45783 - DNA, 20 bp, Artificial Sequence
  Synthetic oligonucleotide; TGG chr11 5252193 5252212 5252196 -
tccatttgtgggggaggctt

SEQ ID NO: 45784 - DNA, 20 bp, Artificial Sequence
  Synthetic oligonucleotide; AAG chr11 5252188 5252207 5252191 -
ttgtgggggaggctttggaa

SEQ ID NO: 45785 - DNA, 20 bp, Artificial Sequence
  Synthetic oligonucleotide; CAG chr11 5252181 5252200 5252184 -
ggaggctttggaaaagtaat

SEQ ID NO: 45786 - DNA, 20 bp, Artificial Sequence
  Synthetic oligonucleotide; AGG chr11 5252180 5252199 5252183 -
gaggctttggaaaagtaatc

SEQ ID NO: 45787 - DNA, 20 bp, Artificial Sequence
  Synthetic oligonucleotide; TAG chr11 5252175 5252194 5252178 -
tttggaaaagtaatcaggtt

SEQ ID NO: 45788 - DNA, 20 bp, Artificial Sequence
  Synthetic oligonucleotide; GAG chr11 5252173 5252192 5252176 -
tggaaaagtaatcaggttta

SEQ ID NO: 45789 - DNA, 20 bp, Artificial Sequence
  Synthetic oligonucleotide; AGG chr11 5252172 5252191 5252175 -
ggaaaagtaatcaggtttag

SEQ ID NO: 45790 - DNA, 20 bp, Artificial Sequence
  Synthetic oligonucleotide; GAG chr11 5252170 5252189 5252173 -
aaaagtaatcaggtttagag

SEQ ID NO: 45791 - DNA, 20 bp, Artificial Sequence
  Synthetic oligonucleotide; GAG chr11 5252162 5252181 5252165 -
tcaggtttagaggagctcat

SEQ ID NO: 45792 - DNA, 20 bp, Artificial Sequence
  Synthetic oligonucleotide; GAG chr11 5252160 5252179 5252163 -
aggtttagaggagctcatga

SEQ ID NO: 45793 - DNA, 20 bp, Artificial Sequence
  Synthetic oligonucleotide; CAG chr11 5252157 5252176 5252160 -
tttagaggagctcatgagag

SEQ ID NO: 45794 - DNA, 20 bp, Artificial Sequence
  Synthetic oligonucleotide; TAG chr11 5252144 5252163 5252147 -
atgagagcagatccccatca

SEQ ID NO: 45795 - DNA, 20 bp, Artificial Sequence
  Synthetic oligonucleotide; CAG chr11 5252126 5252145 5252129 -
catagaattattttcctcat

SEQ ID NO: 45796 - DNA, 20 bp, Artificial Sequence
  Synthetic oligonucleotide; AAG chr11 5252123 5252142 5252126 -
agaattattttcctcatcag

SEQ ID NO: 45797 - DNA, 20 bp, Artificial Sequence
  Synthetic oligonucleotide; CAG chr11 5252120 5252139 5252123 -
attattttcctcatcagaag

SEQ ID NO: 45798 - DNA, 20 bp, Artificial Sequence
  Synthetic oligonucleotide; GAG chr11 5252118 5252137 5252121 -
tattttcctcatcagaagca

SEQ ID NO: 45799 - DNA, 20 bp, Artificial Sequence
  Synthetic oligonucleotide; GAG chr11 5252116 5252135 5252119 -
ttttcctcatcagaagcaga

SEQ ID NO: 45800 - DNA, 20 bp, Artificial Sequence
  Synthetic oligonucleotide; TAG chr11 5252111 5252130 5252114 -
ctcatcagaagcagagagat

SEQ ID NO: 45801 - DNA, 20 bp, Artificial Sequence
  Synthetic oligonucleotide; TGG chr11 5252092 5252111 5252095 -
ttagccatttctcttccttc

SEQ ID NO: 45802 - DNA, 20 bp, Artificial Sequence
  Synthetic oligonucleotide; GAG chr11 5252088 5252107 5252091 -
ccatttctcttccttctggt

SEQ ID NO: 45803 - DNA, 20 bp, Artificial Sequence
  Synthetic oligonucleotide; AGG chr11 5252087 5252106 5252090 -
catttctcttccttctggtg

SEQ ID NO: 45804 - DNA, 20 bp, Artificial Sequence
  Synthetic oligonucleotide; CAG chr11 5252081 5252100 5252084 -
tcttccttctggtgaggaca

SEQ ID NO: 45805 - DNA, 20 bp, Artificial Sequence
  Synthetic oligonucleotide; TGG chr11 5252078 5252097 5252081 -
tccttctggtgaggacacag

SEQ ID NO: 45806 - DNA, 20 bp, Artificial Sequence
  Synthetic oligonucleotide; GGG chr11 5252077 5252096 5252080 -
ccttctggtgaggacacagt

SEQ ID NO: 45807 - DNA, 20 bp, Artificial Sequence
  Synthetic oligonucleotide; AAG chr11 5252074 5252093 5252077 -
tctggtgaggacacagtggg

SEQ ID NO: 45808 - DNA, 20 bp, Artificial Sequence
  Synthetic oligonucleotide; CAG chr11 5252070 5252089 5252073 -
gtgaggacacagtgggaagt

SEQ ID NO: 45809 - DNA, 20 bp, Artificial Sequence
  Synthetic oligonucleotide; CAG chr11 5252055 5252074 5252058 -
gaagtcagccacctgcaacc

SEQ ID NO: 45810 - DNA, 20 bp, Artificial Sequence
  Synthetic oligonucleotide; AGG chr11 5252054 5252073 5252057 -
aagtcagccacctgcaaccc

SEQ ID NO: 45811 - DNA, 20 bp, Artificial Sequence
  Synthetic oligonucleotide; AAG chr11 5252051 5252070 5252054 -
tcagccacctgcaacccagg

SEQ ID NO: 45812 - DNA, 20 bp, Artificial Sequence
  Synthetic oligonucleotide; GAG chr11 5252049 5252068 5252052 -
agccacctgcaacccaggaa

SEQ ID NO: 45813 - DNA, 20 bp, Artificial Sequence
  Synthetic oligonucleotide; GAG chr11 5252047 5252066 5252050 -
ccacctgcaacccaggaaga

SEQ ID NO: 45814 - DNA, 20 bp, Artificial Sequence
  Synthetic oligonucleotide; CAG chr11 5252037 5252056 5252040 -
cccaggaagagagccctgac

SEQ ID NO: 45815 - DNA, 20 bp, Artificial Sequence
  Synthetic oligonucleotide; AGG chr11 5252036 5252055 5252039 -
ccaggaagagagccctgacc

SEQ ID NO: 45816 - DNA, 20 bp, Artificial Sequence
  Synthetic oligonucleotide; CAG chr11 5252030 5252049 5252033 -
agagagccctgaccaggaac

SEQ ID NO: 45817 - DNA, 20 bp, Artificial Sequence
  Synthetic oligonucleotide; CAG chr11 5252027 5252046 5252030 -
gagccctgaccaggaaccag

SEQ ID NO: 45818 - DNA, 20 bp, Artificial Sequence
  Synthetic oligonucleotide; AAG chr11 5252022 5252041 5252025 -
ctgaccaggaaccagcagaa

SEQ ID NO: 45819 - DNA, 20 bp, Artificial Sequence
  Synthetic oligonucleotide; GAG chr11 5252018 5252037 5252021 -
ccaggaaccagcagaaaagt

SEQ ID NO: 45820 - DNA, 20 bp, Artificial Sequence
  Synthetic oligonucleotide; AAG chr11 5251998 5252017 5252001 -
gagaaaaaatcctgttgttg

SEQ ID NO: 45821 - DNA, 20 bp, Artificial Sequence
  Synthetic oligonucleotide; CAG chr11 5251990 5252009 5251993 -
atcctgttgttgaagtcacc

SEQ ID NO: 45822 - DNA, 20 bp, Artificial Sequence
  Synthetic oligonucleotide; TAG chr11 5251970 5251989 5251973 -
cagtctatgctattttgtta

SEQ ID NO: 45823 - DNA, 20 bp, Artificial Sequence
  Synthetic oligonucleotide; AAG chr11 5251956 5251975 5251959 -
ttgttatagcaccttgcact

SEQ ID NO: 45824 - DNA, 20 bp, Artificial Sequence
  Synthetic oligonucleotide; AAG chr11 5251952 5251971 5251955 -
tatagcaccttgcactaagt

SEQ ID NO: 45825 - DNA, 20 bp, Artificial Sequence
  Synthetic oligonucleotide; AGG chr11 5251951 5251970 5251954 -
atagcaccttgcactaagta

SEQ ID NO: 45826 - DNA, 20 bp, Artificial Sequence
  Synthetic oligonucleotide; CAG chr11 5251948 5251967 5251951 -
gcaccttgcactaagtaagg

SEQ ID NO: 45827 - DNA, 20 bp, Artificial Sequence
  Synthetic oligonucleotide; AAG chr11 5251942 5251961 5251945 -
tgcactaagtaaggcagatg

SEQ ID NO: 45828 - DNA, 20 bp, Artificial Sequence
  Synthetic oligonucleotide; AAG chr11 5251938 5251957 5251941 -
ctaagtaaggcagatgaaga

SEQ ID NO: 45829 - DNA, 20 bp, Artificial Sequence
  Synthetic oligonucleotide; GAG chr11 5251936 5251955 5251939 -
aagtaaggcagatgaagaaa

SEQ ID NO: 45830 - DNA, 20 bp, Artificial Sequence
  Synthetic oligonucleotide; AAG chr11 5251925 5251944 5251928 -
atgaagaaagagaaaaaaat

SEQ ID NO: 45831 - DNA, 20 bp, Artificial Sequence
  Synthetic oligonucleotide; CGG chr11 5251919 5251938 5251922 -
aaagagaaaaaaataagctt

SEQ ID NO: 45832 - DNA, 20 bp, Artificial Sequence
  Synthetic oligonucleotide; CAG chr11 5251912 5251931 5251915 -
aaaaaataagcttcggtgtt

SEQ ID NO: 45833 - DNA, 20 bp, Artificial Sequence
  Synthetic oligonucleotide; TGG chr11 5251909 5251928 5251912 -
aaataagcttcggtgttcag

SEQ ID NO: 45834 - DNA, 20 bp, Artificial Sequence
  Synthetic oligonucleotide; TAG chr11 5251904 5251923 5251907 -
agcttcggtgttcagtggat

SEQ ID NO: 45835 - DNA, 20 bp, Artificial Sequence
  Synthetic oligonucleotide; CAG chr11 5251886 5251905 5251889 -
attagaaaccatgtttatct

SEQ ID NO: 45836 - DNA, 20 bp, Artificial Sequence
  Synthetic oligonucleotide; AGG chr11 5251885 5251904 5251888 -
ttagaaaccatgtttatctc

SEQ ID NO: 45837 - DNA, 20 bp, Artificial Sequence
  Synthetic oligonucleotide; CAG chr11 5251852 5251871 5251855 -
tccacttgtcctctgtgttt

SEQ ID NO: 45838 - DNA, 20 bp, Artificial Sequence
  Synthetic oligonucleotide; AAG chr11 5251817 5251836 5251820 -
actctactactctcatctgt

SEQ ID NO: 45839 - DNA, 20 bp, Artificial Sequence
  Synthetic oligonucleotide; TAG chr11 5251807 5251826 5251810 -
tctcatctgtaagatgcaaa

SEQ ID NO: 45840 - DNA, 20 bp, Artificial Sequence
  Synthetic oligonucleotide; AAG chr11 5251803 5251822 5251806 -
atctgtaagatgcaaatagt

SEQ ID NO: 45841 - DNA, 20 bp, Artificial Sequence
  Synthetic oligonucleotide; GAG chr11 5251797 5251816 5251800 -
aagatgcaaatagtaagcct

SEQ ID NO: 45842 - DNA, 20 bp, Artificial Sequence
  Synthetic oligonucleotide; TAG chr11 5251750 5251769 5251753 -
attttttcttcaacgtactt

SEQ ID NO: 45843 - DNA, 20 bp, Artificial Sequence
  Synthetic oligonucleotide; AGG chr11 5251749 5251768 5251752 -
ttttttcttcaacgtacttt

SEQ ID NO: 45844 - DNA, 20 bp, Artificial Sequence
  Synthetic oligonucleotide; CAG chr11 5251727 5251746 5251730 -
gcttgtaatgtgtttatata

SEQ ID NO: 45845 - DNA, 20 bp, Artificial Sequence
  Synthetic oligonucleotide; AAG chr11 5251715 5251734 5251718 -
tttatatacagtgaaatgtc

SEQ ID NO: 45846 - DNA, 20 bp, Artificial Sequence
  Synthetic oligonucleotide; CAG chr11 5251676 5251695 5251679 -
ctttctttcttttttttcct

SEQ ID NO: 45847 - DNA, 20 bp, Artificial Sequence
  Synthetic oligonucleotide; CAG chr11 5251670 5251689 5251673 -
ttcttttttttcctcagcct

SEQ ID NO: 45848 - DNA, 20 bp, Artificial Sequence
  Synthetic oligonucleotide; GAG chr11 5251668 5251687 5251671 -
cttttttttcctcagcctca

SEQ ID NO: 45849 - DNA, 20 bp, Artificial Sequence
  Synthetic oligonucleotide; CAG chr11 5251641 5251660 5251644 -
ccacatgcccttcctacttt

SEQ ID NO: 45850 - DNA, 20 bp, Artificial Sequence
  Synthetic oligonucleotide; AGG chr11 5251640 5251659 5251643 -
cacatgcccttcctactttc

SEQ ID NO: 45851 - DNA, 20 bp, Artificial Sequence
  Synthetic oligonucleotide; TGG chr11 5251610 5251629 5251613 -
ttctccaaacgtcttctgcc

SEQ ID NO: 45852 - DNA, 20 bp, Artificial Sequence
  Synthetic oligonucleotide; AAG chr11 5251592 5251611 5251595 -
cctggctccatcaaatcata

SEQ ID NO: 45853 - DNA, 20 bp, Artificial Sequence
  Synthetic oligonucleotide; AGG chr11 5251591 5251610 5251594 -
ctggctccatcaaatcataa

SEQ ID NO: 45854 - DNA, 20 bp, Artificial Sequence
  Synthetic oligonucleotide; TAG chr11 5251518 5251537 5251521 -
ttctttgtcctttttttttt

SEQ ID NO: 45855 - DNA, 20 bp, Artificial Sequence
  Synthetic oligonucleotide; AAG chr11 5251509 5251528 5251512 -
ctttttttttttagtaaaac

SEQ ID NO: 45856 - DNA, 20 bp, Artificial Sequence
  Synthetic oligonucleotide; AAG chr11 5251492 5251511 5251495 -
aacaagtttataaaaaattg

SEQ ID NO: 45857 - DNA, 20 bp, Artificial Sequence
  Synthetic oligonucleotide; AGG chr11 5251491 5251510 5251494 -
acaagtttataaaaaattga

SEQ ID NO: 45858 - DNA, 20 bp, Artificial Sequence
  Synthetic oligonucleotide; TGG chr11 5251478 5251497 5251481 -
aaattgaaggaataaatgaa

SEQ ID NO: 45859 - DNA, 20 bp, Artificial Sequence
  Synthetic oligonucleotide; TAG chr11 5251467 5251486 5251470 -
ataaatgaatggctacttca

SEQ ID NO: 45860 - DNA, 20 bp, Artificial Sequence
  Synthetic oligonucleotide; AGG chr11 5251466 5251485 5251469 -
taaatgaatggctacttcat

SEQ ID NO: 45861 - DNA, 20 bp, Artificial Sequence
  Synthetic oligonucleotide; CAG chr11 5251463 5251482 5251466 -
atgaatggctacttcatagg

SEQ ID NO: 45862 - DNA, 20 bp, Artificial Sequence
  Synthetic oligonucleotide; GAG chr11 5251461 5251480 5251464 -
gaatggctacttcataggca

SEQ ID NO: 45863 - DNA, 20 bp, Artificial Sequence
  Synthetic oligonucleotide; TAG chr11 5251458 5251477 5251461 -
tggctacttcataggcagag

SEQ ID NO: 45864 - DNA, 20 bp, Artificial Sequence
  Synthetic oligonucleotide; AAG chr11 5251451 5251470 5251454 -
ttcataggcagagtagacgc

SEQ ID NO: 45865 - DNA, 20 bp, Artificial Sequence
  Synthetic oligonucleotide; AGG chr11 5251450 5251469 5251453 -
tcataggcagagtagacgca

SEQ ID NO: 45866 - DNA, 20 bp, Artificial Sequence
  Synthetic oligonucleotide; GGG chr11 5251449 5251468 5251452 -
cataggcagagtagacgcaa

SEQ ID NO: 45867 - DNA, 20 bp, Artificial Sequence
  Synthetic oligonucleotide; TGG chr11 5251442 5251461 5251445 -
agagtagacgcaagggctac

SEQ ID NO: 45868 - DNA, 20 bp, Artificial Sequence
  Synthetic oligonucleotide; TAG chr11 5251412 5251431 5251415 -
tttttattgttatttttcaa

SEQ ID NO: 45869 - DNA, 20 bp, Artificial Sequence
  Synthetic oligonucleotide; AAG chr11 5251399 5251418 5251402 -
ttttcaatagtatgctaaac

SEQ ID NO: 45870 - DNA, 20 bp, Artificial Sequence
  Synthetic oligonucleotide; AGG chr11 5251398 5251417 5251401 -
tttcaatagtatgctaaaca

SEQ ID NO: 45871 - DNA, 20 bp, Artificial Sequence
  Synthetic oligonucleotide; GGG chr11 5251397 5251416 5251400 -
ttcaatagtatgctaaacaa

SEQ ID NO: 45872 - DNA, 20 bp, Artificial Sequence
  Synthetic oligonucleotide; GGG chr11 5251396 5251415 5251399 -
tcaatagtatgctaaacaag

SEQ ID NO: 45873 - DNA, 20 bp, Artificial Sequence
  Synthetic oligonucleotide; TAG chr11 5251393 5251412 5251396 -
atagtatgctaaacaagggg

SEQ ID NO: 45874 - DNA, 20 bp, Artificial Sequence
  Synthetic oligonucleotide; TAG chr11 5251369 5251388 5251372 -
ttatttatgctgcccatttt

SEQ ID NO: 45875 - DNA, 20 bp, Artificial Sequence
  Synthetic oligonucleotide; AAG chr11 5251359 5251378 5251362 -
tgcccatttttagaccataa

SEQ ID NO: 45876 - DNA, 20 bp, Artificial Sequence
  Synthetic oligonucleotide; TGG chr11 5251336 5251355 5251339 -
ataacttcctgatgttgcca

SEQ ID NO: 45877 - DNA, 20 bp, Artificial Sequence
  Synthetic oligonucleotide; AAG chr11 5251290 5251309 5251293 -
ttcatttcattttaatttcg

SEQ ID NO: 45878 - DNA, 20 bp, Artificial Sequence
  Synthetic oligonucleotide; AGG chr11 5251289 5251308 5251292 -
tcatttcattttaatttcga

SEQ ID NO: 45879 - DNA, 20 bp, Artificial Sequence
  Synthetic oligonucleotide; CAG chr11 5251278 5251297 5251281 -
taatttcgaaggtacatgtg

SEQ ID NO: 45880 - DNA, 20 bp, Artificial Sequence
  Synthetic oligonucleotide; AGG chr11 5251277 5251296 5251280 -
aatttcgaaggtacatgtgc

SEQ ID NO: 45881 - DNA, 20 bp, Artificial Sequence
  Synthetic oligonucleotide; CAG chr11 5251269 5251288 5251272 -
aggtacatgtgcaggatgtg

SEQ ID NO: 45882 - DNA, 20 bp, Artificial Sequence
  Synthetic oligonucleotide; AGG chr11 5251268 5251287 5251271 -
ggtacatgtgcaggatgtgc

SEQ ID NO: 45883 - DNA, 20 bp, Artificial Sequence
  Synthetic oligonucleotide; TGG chr11 5251256 5251275 5251259 -
ggatgtgcaggcttgttaca

SEQ ID NO: 45884 - DNA, 20 bp, Artificial Sequence
  Synthetic oligonucleotide; GGG chr11 5251255 5251274 5251258 -
gatgtgcaggcttgttacat

SEQ ID NO: 45885 - DNA, 20 bp, Artificial Sequence
  Synthetic oligonucleotide; TGG chr11 5251236 5251255 5251239 -
tgggtaaatgtgtgtctttc

SEQ ID NO: 45886 - DNA, 20 bp, Artificial Sequence
  Synthetic oligonucleotide; TAG chr11 5251228 5251247 5251231 -
tgtgtgtctttctggccttt

SEQ ID NO: 45887 - DNA, 20 bp, Artificial Sequence
  Synthetic oligonucleotide; GAG chr11 5251211 5251230 5251214 -
ttttagccatctgtatcaat

SEQ ID NO: 45888 - DNA, 20 bp, Artificial Sequence
  Synthetic oligonucleotide; CAG chr11 5251208 5251227 5251211 -
tagccatctgtatcaatgag

SEQ ID NO: 45889 - DNA, 20 bp, Artificial Sequence
  Synthetic oligonucleotide; AAG chr11 5251201 5251220 5251204 -
ctgtatcaatgagcagatat

SEQ ID NO: 45890 - DNA, 20 bp, Artificial Sequence
  Synthetic oligonucleotide; CAG chr11 5251191 5251210 5251194 -
gagcagatataagctttaca

SEQ ID NO: 45891 - DNA, 20 bp, Artificial Sequence
  Synthetic oligonucleotide; AGG chr11 5251190 5251209 5251193 -
agcagatataagctttacac

SEQ ID NO: 45892 - DNA, 20 bp, Artificial Sequence
  Synthetic oligonucleotide; AAG chr11 5251181 5251200 5251184 -
aagctttacacaggatcatg

SEQ ID NO: 45893 - DNA, 20 bp, Artificial Sequence
  Synthetic oligonucleotide; AGG chr11 5251180 5251199 5251183 -
agctttacacaggatcatga

SEQ ID NO: 45894 - DNA, 20 bp, Artificial Sequence
  Synthetic oligonucleotide; AAG chr11 5251173 5251192 5251176 -
cacaggatcatgaaggatga

SEQ ID NO: 45895 - DNA, 20 bp, Artificial Sequence
  Synthetic oligonucleotide; TAG chr11 5251133 5251152 5251136 -
aataatttcaatcaacctga

SEQ ID NO: 45896 - DNA, 20 bp, Artificial Sequence
  Synthetic oligonucleotide; TAG chr11 5251128 5251147 5251131 -
tttcaatcaacctgatagct

SEQ ID NO: 45897 - DNA, 20 bp, Artificial Sequence
  Synthetic oligonucleotide; AGG chr11 5251127 5251146 5251130 -
ttcaatcaacctgatagctt

SEQ ID NO: 45898 - DNA, 20 bp, Artificial Sequence
  Synthetic oligonucleotide; GGG chr11 5251126 5251145 5251129 -
tcaatcaacctgatagctta

SEQ ID NO: 45899 - DNA, 20 bp, Artificial Sequence
  Synthetic oligonucleotide; GGG chr11 5251125 5251144 5251128 -
caatcaacctgatagcttag

SEQ ID NO: 45900 - DNA, 20 bp, Artificial Sequence
  Synthetic oligonucleotide; AAG chr11 5251109 5251128 5251112 -
ttaggggataaactaatttg

SEQ ID NO: 45901 - DNA, 20 bp, Artificial Sequence
  Synthetic oligonucleotide; CAG chr11 5251103 5251122 5251106 -
gataaactaatttgaagata

SEQ ID NO: 45902 - DNA, 20 bp, Artificial Sequence
  Synthetic oligonucleotide; AAG chr11 5251088 5251107 5251091 -
agatacagcttgcctccgat

SEQ ID NO: 45903 - DNA, 20 bp, Artificial Sequence
  Synthetic oligonucleotide; CAG chr11 5251084 5251103 5251087 -
acagcttgcctccgataagc

SEQ ID NO: 45904 - DNA, 20 bp, Artificial Sequence
  Synthetic oligonucleotide; CAG chr11 5251076 5251095 5251079 -
cctccgataagccagaattc

SEQ ID NO: 45905 - DNA, 20 bp, Artificial Sequence
  Synthetic oligonucleotide; GAG chr11 5251074 5251093 5251077 -
tccgataagccagaattcca

SEQ ID NO: 45906 - DNA, 20 bp, Artificial Sequence
  Synthetic oligonucleotide; TGG chr11 5251067 5251086 5251070 -
agccagaattccagagcttc

SEQ ID NO: 45907 - DNA, 20 bp, Artificial Sequence
  Synthetic oligonucleotide; TAG chr11 5251054 5251073 5251057 -
gagcttctggcattataatc

SEQ ID NO: 45908 - DNA, 20 bp, Artificial Sequence
  Synthetic oligonucleotide; AAG chr11 5251050 5251069 5251053 -
ttctggcattataatctagc

SEQ ID NO: 45909 - DNA, 20 bp, Artificial Sequence
  Synthetic oligonucleotide; AGG chr11 5251049 5251068 5251052 -
tctggcattataatctagca

SEQ ID NO: 45910 - DNA, 20 bp, Artificial Sequence
  Synthetic oligonucleotide; TAG chr11 5251045 5251064 5251048 -
gcattataatctagcaaggt

SEQ ID NO: 45911 - DNA, 20 bp, Artificial Sequence
  Synthetic oligonucleotide; GAG chr11 5251043 5251062 5251046 -
attataatctagcaaggtta

SEQ ID NO: 45912 - DNA, 20 bp, Artificial Sequence
  Synthetic oligonucleotide; TGG chr11 5251036 5251055 5251039 -
tctagcaaggttagagatca

SEQ ID NO: 45913 - DNA, 20 bp, Artificial Sequence
  Synthetic oligonucleotide; CAG chr11 5251025 5251044 5251028 -
tagagatcatggatcacttt

SEQ ID NO: 45914 - DNA, 20 bp, Artificial Sequence
  Synthetic oligonucleotide; GAG chr11 5251023 5251042 5251026 -
gagatcatggatcactttca

SEQ ID NO: 45915 - DNA, 20 bp, Artificial Sequence
  Synthetic oligonucleotide; AAG chr11 5250997 5251016 5251000 -
aacaaaaacaaactaaccaa

SEQ ID NO: 45916 - DNA, 20 bp, Artificial Sequence
  Synthetic oligonucleotide; CAG chr11 5250989 5251008 5250992 -
caaactaaccaaaagcaaaa

SEQ ID NO: 45917 - DNA, 20 bp, Artificial Sequence
  Synthetic oligonucleotide; TGG chr11 5250948 5250967 5250951 -
aatacttcctaccctgttaa

SEQ ID NO: 45918 - DNA, 20 bp, Artificial Sequence
  Synthetic oligonucleotide; CAG chr11 5250935 5250954 5250938 -
ctgttaatggtccaatatgt

SEQ ID NO: 45919 - DNA, 20 bp, Artificial Sequence
  Synthetic oligonucleotide; CAG chr11 5250929 5250948 5250932 -
atggtccaatatgtcagaaa

SEQ ID NO: 45920 - DNA, 20 bp, Artificial Sequence
  Synthetic oligonucleotide; TAG chr11 5250918 5250937 5250921 -
tgtcagaaacagcactgtgt

SEQ ID NO: 45921 - DNA, 20 bp, Artificial Sequence
  Synthetic oligonucleotide; AAG chr11 5250910 5250929 5250913 -
acagcactgtgttagaaata

SEQ ID NO: 45922 - DNA, 20 bp, Artificial Sequence
  Synthetic oligonucleotide; AAG chr11 5250900 5250919 5250903 -
gttagaaataaagctgtcta

SEQ ID NO: 45923 - DNA, 20 bp, Artificial Sequence
  Synthetic oligonucleotide; GAG chr11 5250884 5250903 5250887 -
tctaaagtacactaatattc

SEQ ID NO: 45924 - DNA, 20 bp, Artificial Sequence
  Synthetic oligonucleotide; TAG chr11 5250875 5250894 5250878 -
cactaatattcgagttataa

SEQ ID NO: 45925 - DNA, 20 bp, Artificial Sequence
  Synthetic oligonucleotide; TGG chr11 5250868 5250887 5250871 -
attcgagttataatagtgtg

SEQ ID NO: 45926 - DNA, 20 bp, Artificial Sequence
  Synthetic oligonucleotide; TAG chr11 5250860 5250879 5250863 -
tataatagtgtgtggactat

SEQ ID NO: 45927 - DNA, 20 bp, Artificial Sequence
  Synthetic oligonucleotide; TAG chr11 5250832 5250851 5250835 -
aaaaacaacccttgcctctt

SEQ ID NO: 45928 - DNA, 20 bp, Artificial Sequence
  Synthetic oligonucleotide; GAG chr11 5250830 5250849 5250833 -
aaacaacccttgcctcttta

SEQ ID NO: 45929 - DNA, 20 bp, Artificial Sequence
  Synthetic oligonucleotide; TAG chr11 5250795 5250814 5250798 -
tacacgcacatcttatgtct

SEQ ID NO: 45930 - DNA, 20 bp, Artificial Sequence
  Synthetic oligonucleotide; GAG chr11 5250793 5250812 5250796 -
cacgcacatcttatgtctta

SEQ ID NO: 45931 - DNA, 20 bp, Artificial Sequence
  Synthetic oligonucleotide; AAG chr11 5250789 5250808 5250792 -
cacatcttatgtcttagagt

SEQ ID NO: 45932 - DNA, 20 bp, Artificial Sequence
  Synthetic oligonucleotide; GAG chr11 5250779 5250798 5250782 -
gtcttagagtaagattccct

SEQ ID NO: 45933 - DNA, 20 bp, Artificial Sequence
  Synthetic oligonucleotide; AAG chr11 5250776 5250795 5250779 -
ttagagtaagattccctgag

SEQ ID NO: 45934 - DNA, 20 bp, Artificial Sequence
  Synthetic oligonucleotide; TAG chr11 5250767 5250786 5250770 -
gattccctgagaagtgaacc

SEQ ID NO: 45935 - DNA, 20 bp, Artificial Sequence
  Synthetic oligonucleotide; AAG chr11 5250755 5250774 5250758 -
agtgaacctagcatttatac

SEQ ID NO: 45936 - DNA, 20 bp, Artificial Sequence
  Synthetic oligonucleotide; CAG chr11 5250734 5250753 5250737 -
agataattaattctaatcca

SEQ ID NO: 45937 - DNA, 20 bp, Artificial Sequence
  Synthetic oligonucleotide; AAG chr11 5250722 5250741 5250725 -
ctaatccacagtacctgcca

SEQ ID NO: 45938 - DNA, 20 bp, Artificial Sequence
  Synthetic oligonucleotide; GAG chr11 5250696 5250715 5250699 -
attctaccatcatctttact

SEQ ID NO: 45939 - DNA, 20 bp, Artificial Sequence
  Synthetic oligonucleotide; TAG chr11 5250691 5250710 5250694 -
accatcatctttactgagca

SEQ ID NO: 45940 - DNA, 20 bp, Artificial Sequence
  Synthetic oligonucleotide; AAG chr11 5250688 5250707 5250691 -
atcatctttactgagcatag

SEQ ID NO: 45941 - DNA, 20 bp, Artificial Sequence
  Synthetic oligonucleotide; GAG chr11 5250686 5250705 5250689 -
catctttactgagcatagaa

SEQ ID NO: 45942 - DNA, 20 bp, Artificial Sequence
  Synthetic oligonucleotide; TGG chr11 5250669 5250688 5250672 -
gaagagctacgccaaaaccc

SEQ ID NO: 45943 - DNA, 20 bp, Artificial Sequence
  Synthetic oligonucleotide; GGG chr11 5250668 5250687 5250671 -
aagagctacgccaaaaccct

SEQ ID NO: 45944 - DNA, 20 bp, Artificial Sequence
  Synthetic oligonucleotide; CAG chr11 5250661 5250680 5250664 -
acgccaaaaccctgggtcat

SEQ ID NO: 45945 - DNA, 20 bp, Artificial Sequence
  Synthetic oligonucleotide; CAG chr11 5250657 5250676 5250660 -
caaaaccctgggtcatcagc

SEQ ID NO: 45946 - DNA, 20 bp, Artificial Sequence
  Synthetic oligonucleotide; CAG chr11 5250640 5250659 5250643 -
agccagcacacacacttatc

SEQ ID NO: 45947 - DNA, 20 bp, Artificial Sequence
  Synthetic oligonucleotide; TGG chr11 5250637 5250656 5250640 -
cagcacacacacttatccag

SEQ ID NO: 45948 - DNA, 20 bp, Artificial Sequence
  Synthetic oligonucleotide; TGG chr11 5250619 5250638 5250622 -
agtggtaaatacacatcatc

SEQ ID NO: 45949 - DNA, 20 bp, Artificial Sequence
  Synthetic oligonucleotide; TGG chr11 5250594 5250613 5250597 -
tatacatacatacctgaata

SEQ ID NO: 45950 - DNA, 20 bp, Artificial Sequence
  Synthetic oligonucleotide; AAG chr11 5250575 5250594 5250578 -
atggaatcaaatatttttct

SEQ ID NO: 45951 - DNA, 20 bp, Artificial Sequence
  Synthetic oligonucleotide; CAG chr11 5250566 5250585 5250569 -
aatatttttctaagatgaaa

SEQ ID NO: 45952 - DNA, 20 bp, Artificial Sequence
  Synthetic oligonucleotide; TAG chr11 5250546 5250565 5250549 -
cagtcatgatttatttcaaa

SEQ ID NO: 45953 - DNA, 20 bp, Artificial Sequence
  Synthetic oligonucleotide; AGG chr11 5250545 5250564 5250548 -
agtcatgatttatttcaaat

SEQ ID NO: 45954 - DNA, 20 bp, Artificial Sequence
  Synthetic oligonucleotide; CGG chr11 5250540 5250559 5250543 -
tgatttatttcaaataggta

SEQ ID NO: 45955 - DNA, 20 bp, Artificial Sequence
  Synthetic oligonucleotide; AAG chr11 5250535 5250554 5250538 -
tatttcaaataggtacggat

SEQ ID NO: 45956 - DNA, 20 bp, Artificial Sequence
  Synthetic oligonucleotide; TAG chr11 5250532 5250551 5250535 -
ttcaaataggtacggataag

SEQ ID NO: 45957 - DNA, 20 bp, Artificial Sequence
  Synthetic oligonucleotide; GAG chr11 5250524 5250543 5250527 -
ggtacggataagtagatatt

SEQ ID NO: 45958 - DNA, 20 bp, Artificial Sequence
  Synthetic oligonucleotide; AGG chr11 5250523 5250542 5250526 -
gtacggataagtagatattg

SEQ ID NO: 45959 - DNA, 20 bp, Artificial Sequence
  Synthetic oligonucleotide; AAG chr11 5250519 5250538 5250522 -
ggataagtagatattgaggt

SEQ ID NO: 45960 - DNA, 20 bp, Artificial Sequence
  Synthetic oligonucleotide; TAG chr11 5250513 5250532 5250516 -
gtagatattgaggtaagcat

SEQ ID NO: 45961 - DNA, 20 bp, Artificial Sequence
  Synthetic oligonucleotide; AGG chr11 5250512 5250531 5250515 -
tagatattgaggtaagcatt

SEQ ID NO: 45962 - DNA, 20 bp, Artificial Sequence
  Synthetic oligonucleotide; TGG chr11 5250467 5250486 5250470 -
ctattactgcgctgaaactg

SEQ ID NO: 45963 - DNA, 20 bp, Artificial Sequence
  Synthetic oligonucleotide; TAG chr11 5250459 5250478 5250462 -
gcgctgaaactgtggcttta

SEQ ID NO: 45964 - DNA, 20 bp, Artificial Sequence
  Synthetic oligonucleotide; GAG chr11 5250434 5250453 5250437 -
attgttttcactgcactatt

SEQ ID NO: 45965 - DNA, 20 bp, Artificial Sequence
  Synthetic oligonucleotide; AAG chr11 5250426 5250445 5250429 -
cactgcactattgagaaatt

SEQ ID NO: 45966 - DNA, 20 bp, Artificial Sequence
  Synthetic oligonucleotide; GAG chr11 5250424 5250443 5250427 -
ctgcactattgagaaattaa

SEQ ID NO: 45967 - DNA, 20 bp, Artificial Sequence
  Synthetic oligonucleotide; TGG chr11 5250417 5250436 5250420 -
attgagaaattaagagataa

SEQ ID NO: 45968 - DNA, 20 bp, Artificial Sequence
  Synthetic oligonucleotide; AAG chr11 5250411 5250430 5250414 -
aaattaagagataatggcaa

SEQ ID NO: 45969 - DNA, 20 bp, Artificial Sequence
  Synthetic oligonucleotide; AAG chr11 5250403 5250422 5250406 -
agataatggcaaaagtcaca

SEQ ID NO: 45970 - DNA, 20 bp, Artificial Sequence
  Synthetic oligonucleotide; GAG chr11 5250401 5250420 5250404 -
ataatggcaaaagtcacaaa

SEQ ID NO: 45971 - DNA, 20 bp, Artificial Sequence
  Synthetic oligonucleotide; AAG chr11 5250388 5250407 5250391 -
tcacaaagagtatattcaaa

SEQ ID NO: 45972 - DNA, 20 bp, Artificial Sequence
  Synthetic oligonucleotide; AAG chr11 5250385 5250404 5250388 -
caaagagtatattcaaaaag

SEQ ID NO: 45973 - DNA, 20 bp, Artificial Sequence
  Synthetic oligonucleotide; TAG chr11 5250380 5250399 5250383 -
agtatattcaaaaagaagta

SEQ ID NO: 45974 - DNA, 20 bp, Artificial Sequence
  Synthetic oligonucleotide; TAG chr11 5250366 5250385 5250369 -
gaagtatagcactttttcct

SEQ ID NO: 45975 - DNA, 20 bp, Artificial Sequence
  Synthetic oligonucleotide; AAG chr11 5250346 5250365 5250349 -
tagaaaccactgctaactga

SEQ ID NO: 45976 - DNA, 20 bp, Artificial Sequence
  Synthetic oligonucleotide; GAG chr11 5250344 5250363 5250347 -
gaaaccactgctaactgaaa

SEQ ID NO: 45977 - DNA, 20 bp, Artificial Sequence
  Synthetic oligonucleotide; AAG chr11 5250338 5250357 5250341 -
actgctaactgaaagagact

SEQ ID NO: 45978 - DNA, 20 bp, Artificial Sequence
  Synthetic oligonucleotide; TGG chr11 5250315 5250334 5250318 -
atttgtcccgtcaaaaatcc

SEQ ID NO: 45979 - DNA, 20 bp, Artificial Sequence
  Synthetic oligonucleotide; TGG chr11 5250266 5250285 5250269 -
tccctgaacttttcaaaaat

SEQ ID NO: 45980 - DNA, 20 bp, Artificial Sequence
  Synthetic oligonucleotide; TAG chr11 5250254 5250273 5250257 -
tcaaaaattggtacatgctt

SEQ ID NO: 45981 - DNA, 20 bp, Artificial Sequence
  Synthetic oligonucleotide; CAG chr11 5250241 5250260 5250244 -
catgctttagctttaaacta

SEQ ID NO: 45982 - DNA, 20 bp, Artificial Sequence
  Synthetic oligonucleotide; AGG chr11 5250240 5250259 5250243 -
atgctttagctttaaactac

SEQ ID NO: 45983 - DNA, 20 bp, Artificial Sequence
  Synthetic oligonucleotide; TGG chr11 5250231 5250250 5250234 -
ctttaaactacaggcctcac

SEQ ID NO: 45984 - DNA, 20 bp, Artificial Sequence
  Synthetic oligonucleotide; GAG chr11 5250229 5250248 5250232 -
ttaaactacaggcctcactg

SEQ ID NO: 45985 - DNA, 20 bp, Artificial Sequence
  Synthetic oligonucleotide; TAG chr11 5250225 5250244 5250228 -
actacaggcctcactggagc

SEQ ID NO: 45986 - DNA, 20 bp, Artificial Sequence
  Synthetic oligonucleotide; GAG chr11 5250223 5250242 5250226 -
tacaggcctcactggagcta

SEQ ID NO: 45987 - DNA, 20 bp, Artificial Sequence
  Synthetic oligonucleotide; AAG chr11 5250218 5250237 5250221 -
gcctcactggagctagagac

SEQ ID NO: 45988 - DNA, 20 bp, Artificial Sequence
  Synthetic oligonucleotide; AAG chr11 5250215 5250234 5250218 -
tcactggagctagagacaag

SEQ ID NO: 45989 - DNA, 20 bp, Artificial Sequence
  Synthetic oligonucleotide; AGG chr11 5250214 5250233 5250217 -
cactggagctagagacaaga

SEQ ID NO: 45990 - DNA, 20 bp, Artificial Sequence
  Synthetic oligonucleotide; CGG chr11 5250204 5250223 5250207 -
agagacaagaaggtaaaaaa

SEQ ID NO: 45991 - DNA, 20 bp, Artificial Sequence
  Synthetic oligonucleotide; AAG chr11 5250194 5250213 5250197 -
aggtaaaaaacggctgacaa

SEQ ID NO: 45992 - DNA, 20 bp, Artificial Sequence
  Synthetic oligonucleotide; AAG chr11 5250191 5250210 5250194 -
taaaaaacggctgacaaaag

SEQ ID NO: 45993 - DNA, 20 bp, Artificial Sequence
  Synthetic oligonucleotide; TGG chr11 5250185 5250204 5250188 -
acggctgacaaaagaagtcc

SEQ ID NO: 45994 - DNA, 20 bp, Artificial Sequence
  Synthetic oligonucleotide; TGG chr11 5250170 5250189 5250173 -
agtcctggtatcctctatga

SEQ ID NO: 45995 - DNA, 20 bp, Artificial Sequence
  Synthetic oligonucleotide; GGG chr11 5250169 5250188 5250172 -
gtcctggtatcctctatgat

SEQ ID NO: 45996 - DNA, 20 bp, Artificial Sequence
  Synthetic oligonucleotide; GAG chr11 5250167 5250186 5250170 -
cctggtatcctctatgatgg

SEQ ID NO: 45997 - DNA, 20 bp, Artificial Sequence
  Synthetic oligonucleotide; AAG chr11 5250164 5250183 5250167 -
ggtatcctctatgatgggag

SEQ ID NO: 45998 - DNA, 20 bp, Artificial Sequence
  Synthetic oligonucleotide; AGG chr11 5250163 5250182 5250166 -
gtatcctctatgatgggaga

SEQ ID NO: 45999 - DNA, 20 bp, Artificial Sequence
  Synthetic oligonucleotide; TAG chr11 5250156 5250175 5250159 -
ctatgatgggagaaggaaac

SEQ ID NO: 46000 - DNA, 20 bp, Artificial Sequence
  Synthetic oligonucleotide; AAG chr11 5250150 5250169 5250153 -
tgggagaaggaaactagcta

SEQ ID NO: 46001 - DNA, 20 bp, Artificial Sequence
  Synthetic oligonucleotide; AGG chr11 5250149 5250168 5250152 -
gggagaaggaaactagctaa

SEQ ID NO: 46002 - DNA, 20 bp, Artificial Sequence
  Synthetic oligonucleotide; GGG chr11 5250148 5250167 5250151 -
ggagaaggaaactagctaaa

SEQ ID NO: 46003 - DNA, 20 bp, Artificial Sequence
  Synthetic oligonucleotide; AAG chr11 5250145 5250164 5250148 -
gaaggaaactagctaaaggg

SEQ ID NO: 46004 - DNA, 20 bp, Artificial Sequence
  Synthetic oligonucleotide; TAG chr11 5250135 5250154 5250138 -
agctaaagggaagaataaat

SEQ ID NO: 46005 - DNA, 20 bp, Artificial Sequence
  Synthetic oligonucleotide; GAG chr11 5250133 5250152 5250136 -
ctaaagggaagaataaatta

SEQ ID NO: 46006 - DNA, 20 bp, Artificial Sequence
  Synthetic oligonucleotide; TGG chr11 5250124 5250143 5250127 -
agaataaattagagaaaaac

SEQ ID NO: 46007 - DNA, 20 bp, Artificial Sequence
  Synthetic oligonucleotide; CGG chr11 5250110 5250129 5250113 -
aaaaactggaatgactgaat

SEQ ID NO: 46008 - DNA, 20 bp, Artificial Sequence
  Synthetic oligonucleotide; AAG chr11 5250104 5250123 5250107 -
tggaatgactgaatcggaac

SEQ ID NO: 46009 - DNA, 20 bp, Artificial Sequence
  Synthetic oligonucleotide; AGG chr11 5250103 5250122 5250106 -
ggaatgactgaatcggaaca

SEQ ID NO: 46010 - DNA, 20 bp, Artificial Sequence
  Synthetic oligonucleotide; AAG chr11 5250098 5250117 5250101 -
gactgaatcggaacaaggca

SEQ ID NO: 46011 - DNA, 20 bp, Artificial Sequence
  Synthetic oligonucleotide; AGG chr11 5250097 5250116 5250100 -
actgaatcggaacaaggcaa

SEQ ID NO: 46012 - DNA, 20 bp, Artificial Sequence
  Synthetic oligonucleotide; TAG chr11 5250081 5250100 5250084 -
gcaaaggctataaaaaaaat

SEQ ID NO: 46013 - DNA, 20 bp, Artificial Sequence
  Synthetic oligonucleotide; CAG chr11 5250078 5250097 5250081 -
aaggctataaaaaaaattag

SEQ ID NO: 46014 - DNA, 20 bp, Artificial Sequence
  Synthetic oligonucleotide; TGG chr11 5250067 5250086 5250070 -
aaaaattagcagtatcctct

SEQ ID NO: 46015 - DNA, 20 bp, Artificial Sequence
  Synthetic oligonucleotide; GGG chr11 5250066 5250085 5250069 -
aaaattagcagtatcctctt

SEQ ID NO: 46016 - DNA, 20 bp, Artificial Sequence
  Synthetic oligonucleotide; GGG chr11 5250065 5250084 5250068 -
aaattagcagtatcctcttg

SEQ ID NO: 46017 - DNA, 20 bp, Artificial Sequence
  Synthetic oligonucleotide; GGG chr11 5250064 5250083 5250067 -
aattagcagtatcctcttgg

SEQ ID NO: 46018 - DNA, 20 bp, Artificial Sequence
  Synthetic oligonucleotide; CGG chr11 5250020 5250039 5250023 -
atgcaaatatctgtctgaaa

SEQ ID NO: 46019 - DNA, 20 bp, Artificial Sequence
  Synthetic oligonucleotide; TGG chr11 5250013 5250032 5250016 -
tatctgtctgaaacggtccc

SEQ ID NO: 46020 - DNA, 20 bp, Artificial Sequence
  Synthetic oligonucleotide; TGG chr11 5249996 5250015 5249999 -
ccctggctaaactccaccca

SEQ ID NO: 46021 - DNA, 20 bp, Artificial Sequence
  Synthetic oligonucleotide; GGG chr11 5249995 5250014 5249998 -
cctggctaaactccacccat

SEQ ID NO: 46022 - DNA, 20 bp, Artificial Sequence
  Synthetic oligonucleotide; TGG chr11 5249991 5250010 5249994 -
gctaaactccacccatgggt

SEQ ID NO: 46023 - DNA, 20 bp, Artificial Sequence
  Synthetic oligonucleotide; CAG chr11 5249987 5250006 5249990 -
aactccacccatgggttggc

SEQ ID NO: 46024 - DNA, 20 bp, Artificial Sequence
  Synthetic oligonucleotide; TAG chr11 5249969 5249988 5249972 -
gccagccttgccttgaccaa

SEQ ID NO: 46025 - DNA, 20 bp, Artificial Sequence
  Synthetic oligonucleotide; AAG chr11 5249959 5249978 5249962 -
ccttgaccaatagccttgac

SEQ ID NO: 46026 - DNA, 20 bp, Artificial Sequence
  Synthetic oligonucleotide; AGG chr11 5249958 5249977 5249961 -
cttgaccaatagccttgaca

SEQ ID NO: 46027 - DNA, 20 bp, Artificial Sequence
  Synthetic oligonucleotide; TAG chr11 5249942 5249961 5249945 -
gacaaggcaaacttgaccaa

SEQ ID NO: 46028 - DNA, 20 bp, Artificial Sequence
  Synthetic oligonucleotide; TAG chr11 5249936 5249955 5249939 -
gcaaacttgaccaatagtct

SEQ ID NO: 46029 - DNA, 20 bp, Artificial Sequence
  Synthetic oligonucleotide; GAG chr11 5249934 5249953 5249937 -
aaacttgaccaatagtctta

SEQ ID NO: 46030 - DNA, 20 bp, Artificial Sequence
  Synthetic oligonucleotide; CAG chr11 5249927 5249946 5249930 -
accaatagtcttagagtatc

SEQ ID NO: 46031 - DNA, 20 bp, Artificial Sequence
  Synthetic oligonucleotide; GAG chr11 5249923 5249942 5249926 -
atagtcttagagtatccagt

SEQ ID NO: 46032 - DNA, 20 bp, Artificial Sequence
  Synthetic oligonucleotide; AGG chr11 5249922 5249941 5249925 -
tagtcttagagtatccagtg

SEQ ID NO: 46033 - DNA, 20 bp, Artificial Sequence
  Synthetic oligonucleotide; CAG chr11 5249918 5249937 5249921 -
cttagagtatccagtgaggc

SEQ ID NO: 46034 - DNA, 20 bp, Artificial Sequence
  Synthetic oligonucleotide; AGG chr11 5249917 5249936 5249920 -
ttagagtatccagtgaggcc

SEQ ID NO: 46035 - DNA, 20 bp, Artificial Sequence
  Synthetic oligonucleotide; GGG chr11 5249916 5249935 5249919 -
tagagtatccagtgaggcca

SEQ ID NO: 46036 - DNA, 20 bp, Artificial Sequence
  Synthetic oligonucleotide; GGG chr11 5249915 5249934 5249918 -
agagtatccagtgaggccag

SEQ ID NO: 46037 - DNA, 20 bp, Artificial Sequence
  Synthetic oligonucleotide; CGG chr11 5249911 5249930 5249914 -
tatccagtgaggccaggggc

SEQ ID NO: 46038 - DNA, 20 bp, Artificial Sequence
  Synthetic oligonucleotide; CGG chr11 5249908 5249927 5249911 -
ccagtgaggccaggggccgg

SEQ ID NO: 46039 - DNA, 20 bp, Artificial Sequence
  Synthetic oligonucleotide; TGG chr11 5249904 5249923 5249907 -
tgaggccaggggccggcggc

SEQ ID NO: 46040 - DNA, 20 bp, Artificial Sequence
  Synthetic oligonucleotide; TAG chr11 5249900 5249919 5249903 -
gccaggggccggcggctggc

SEQ ID NO: 46041 - DNA, 20 bp, Artificial Sequence
  Synthetic oligonucleotide; AGG chr11 5249899 5249918 5249902 -
ccaggggccggcggctggct

SEQ ID NO: 46042 - DNA, 20 bp, Artificial Sequence
  Synthetic oligonucleotide; GGG chr11 5249898 5249917 5249901 -
caggggccggcggctggcta

SEQ ID NO: 46043 - DNA, 20 bp, Artificial Sequence
  Synthetic oligonucleotide; AAG chr11 5249892 5249911 5249895 -
ccggcggctggctagggatg

SEQ ID NO: 46044 - DNA, 20 bp, Artificial Sequence
  Synthetic oligonucleotide; AAG chr11 5249884 5249903 5249887 -
tggctagggatgaagaataa

SEQ ID NO: 46045 - DNA, 20 bp, Artificial Sequence
  Synthetic oligonucleotide; AGG chr11 5249883 5249902 5249886 -
ggctagggatgaagaataaa

SEQ ID NO: 46046 - DNA, 20 bp, Artificial Sequence
  Synthetic oligonucleotide; AAG chr11 5249880 5249899 5249883 -
tagggatgaagaataaaagg

SEQ ID NO: 46047 - DNA, 20 bp, Artificial Sequence
  Synthetic oligonucleotide; CAG chr11 5249870 5249889 5249873 -
gaataaaaggaagcaccctt

SEQ ID NO: 46048 - DNA, 20 bp, Artificial Sequence
  Synthetic oligonucleotide; CAG chr11 5249867 5249886 5249870 -
taaaaggaagcacccttcag

SEQ ID NO: 46049 - DNA, 20 bp, Artificial Sequence
  Synthetic oligonucleotide; TGG chr11 5249847 5249866 5249850 -
cagttccacacactcgcttc

SEQ ID NO: 46050 - DNA, 20 bp, Artificial Sequence
  Synthetic oligonucleotide; GAG chr11 5249837 5249856 5249840 -
cactcgcttctggaacgtct

SEQ ID NO: 46051 - DNA, 20 bp, Artificial Sequence
  Synthetic oligonucleotide; AGG chr11 5249836 5249855 5249839 -
actcgcttctggaacgtctg

SEQ ID NO: 46052 - DNA, 20 bp, Artificial Sequence
  Synthetic oligonucleotide; AAG chr11 5249825 5249844 5249828 -
gaacgtctgaggttatcaat

SEQ ID NO: 46053 - DNA, 20 bp, Artificial Sequence
  Synthetic oligonucleotide; TAG chr11 5249818 5249837 5249821 -
tgaggttatcaataagctcc

SEQ ID NO: 46054 - DNA, 20 bp, Artificial Sequence
  Synthetic oligonucleotide; CAG chr11 5249813 5249832 5249816 -
ttatcaataagctcctagtc

SEQ ID NO: 46055 - DNA, 20 bp, Artificial Sequence
  Synthetic oligonucleotide; TGG chr11 5249804 5249823 5249807 -
agctcctagtccagacgcca

SEQ ID NO: 46056 - DNA, 20 bp, Artificial Sequence
  Synthetic oligonucleotide; GGG chr11 5249803 5249822 5249806 -
gctcctagtccagacgccat

SEQ ID NO: 46057 - DNA, 20 bp, Artificial Sequence
  Synthetic oligonucleotide; CAG chr11 5249792 5249811 5249795 -
agacgccatgggtcatttca

SEQ ID NO: 46058 - DNA, 20 bp, Artificial Sequence
  Synthetic oligonucleotide; GAG chr11 5249790 5249809 5249793 -
acgccatgggtcatttcaca

SEQ ID NO: 46059 - DNA, 20 bp, Artificial Sequence
  Synthetic oligonucleotide; AGG chr11 5249789 5249808 5249792 -
cgccatgggtcatttcacag

SEQ ID NO: 46060 - DNA, 20 bp, Artificial Sequence
  Synthetic oligonucleotide; GAG chr11 5249787 5249806 5249790 -
ccatgggtcatttcacagag

SEQ ID NO: 46061 - DNA, 20 bp, Artificial Sequence
  Synthetic oligonucleotide; AGG chr11 5249786 5249805 5249789 -
catgggtcatttcacagagg

SEQ ID NO: 46062 - DNA, 20 bp, Artificial Sequence
  Synthetic oligonucleotide; AAG chr11 5249781 5249800 5249784 -
gtcatttcacagaggaggac

SEQ ID NO: 46063 - DNA, 20 bp, Artificial Sequence
  Synthetic oligonucleotide; AGG chr11 5249780 5249799 5249783 -
tcatttcacagaggaggaca

SEQ ID NO: 46064 - DNA, 20 bp, Artificial Sequence
  Synthetic oligonucleotide; AAG chr11 5249767 5249786 5249770 -
gaggacaaggctactatcac

SEQ ID NO: 46065 - DNA, 20 bp, Artificial Sequence
  Synthetic oligonucleotide; TGG chr11 5249760 5249779 5249763 -
aggctactatcacaagcctg

SEQ ID NO: 46066 - DNA, 20 bp, Artificial Sequence
  Synthetic oligonucleotide; GGG chr11 5249759 5249778 5249762 -
ggctactatcacaagcctgt

SEQ ID NO: 46067 - DNA, 20 bp, Artificial Sequence
  Synthetic oligonucleotide; GGG chr11 5249758 5249777 5249761 -
gctactatcacaagcctgtg

SEQ ID NO: 46068 - DNA, 20 bp, Artificial Sequence
  Synthetic oligonucleotide; AAG chr11 5249754 5249773 5249757 -
ctatcacaagcctgtggggc

SEQ ID NO: 46069 - DNA, 20 bp, Artificial Sequence
  Synthetic oligonucleotide; AGG chr11 5249753 5249772 5249756 -
tatcacaagcctgtggggca

SEQ ID NO: 46070 - DNA, 20 bp, Artificial Sequence
  Synthetic oligonucleotide; TGG chr11 5249744 5249763 5249747 -
cctgtggggcaaggtgaatg

SEQ ID NO: 46071 - DNA, 20 bp, Artificial Sequence
  Synthetic oligonucleotide; AAG chr11 5249741 5249760 5249744 -
gtggggcaaggtgaatgtgg

SEQ ID NO: 46072 - DNA, 20 bp, Artificial Sequence
  Synthetic oligonucleotide; TGG chr11 5249734 5249753 5249737 -
aaggtgaatgtggaagatgc

SEQ ID NO: 46073 - DNA, 20 bp, Artificial Sequence
  Synthetic oligonucleotide; GAG chr11 5249732 5249751 5249735 -
ggtgaatgtggaagatgctg

SEQ ID NO: 46074 - DNA, 20 bp, Artificial Sequence
  Synthetic oligonucleotide; AGG chr11 5249731 5249750 5249734 -
gtgaatgtggaagatgctgg

SEQ ID NO: 46075 - DNA, 20 bp, Artificial Sequence
  Synthetic oligonucleotide; GAG chr11 5249729 5249748 5249732 -
gaatgtggaagatgctggag

SEQ ID NO: 46076 - DNA, 20 bp, Artificial Sequence
  Synthetic oligonucleotide; TGG chr11 5249720 5249739 5249723 -
agatgctggaggagaaaccc

SEQ ID NO: 46077 - DNA, 20 bp, Artificial Sequence
  Synthetic oligonucleotide; GGG chr11 5249719 5249738 5249722 -
gatgctggaggagaaaccct

SEQ ID NO: 46078 - DNA, 20 bp, Artificial Sequence
  Synthetic oligonucleotide; AAG chr11 5249716 5249735 5249719 -
gctggaggagaaaccctggg

SEQ ID NO: 46079 - DNA, 20 bp, Artificial Sequence
  Synthetic oligonucleotide; AGG chr11 5249715 5249734 5249718 -
ctggaggagaaaccctggga

SEQ ID NO: 46080 - DNA, 20 bp, Artificial Sequence
  Synthetic oligonucleotide; TAG chr11 5249712 5249731 5249715 -
gaggagaaaccctgggaagg

SEQ ID NO: 46081 - DNA, 20 bp, Artificial Sequence
  Synthetic oligonucleotide; AGG chr11 5249711 5249730 5249714 -
aggagaaaccctgggaaggt

SEQ ID NO: 46082 - DNA, 20 bp, Artificial Sequence
  Synthetic oligonucleotide; TGG chr11 5249705 5249724 5249708 -
aaccctgggaaggtaggctc

SEQ ID NO: 46083 - DNA, 20 bp, Artificial Sequence
  Synthetic oligonucleotide; CAG chr11 5249698 5249717 5249701 -
ggaaggtaggctctggtgac

SEQ ID NO: 46084 - DNA, 20 bp, Artificial Sequence
  Synthetic oligonucleotide; AGG chr11 5249697 5249716 5249700 -
gaaggtaggctctggtgacc

SEQ ID NO: 46085 - DNA, 20 bp, Artificial Sequence
  Synthetic oligonucleotide; AAG chr11 5249692 5249711 5249695 -
taggctctggtgaccaggac

SEQ ID NO: 46086 - DNA, 20 bp, Artificial Sequence
  Synthetic oligonucleotide; AGG chr11 5249691 5249710 5249694 -
aggctctggtgaccaggaca

SEQ ID NO: 46087 - DNA, 20 bp, Artificial Sequence
  Synthetic oligonucleotide; GGG chr11 5249690 5249709 5249693 -
ggctctggtgaccaggacaa

SEQ ID NO: 46088 - DNA, 20 bp, Artificial Sequence
  Synthetic oligonucleotide; GAG chr11 5249688 5249707 5249691 -
ctctggtgaccaggacaagg

SEQ ID NO: 46089 - DNA, 20 bp, Artificial Sequence
  Synthetic oligonucleotide; AGG chr11 5249687 5249706 5249690 -
tctggtgaccaggacaaggg

SEQ ID NO: 46090 - DNA, 20 bp, Artificial Sequence
  Synthetic oligonucleotide; GGG chr11 5249686 5249705 5249689 -
ctggtgaccaggacaaggga

SEQ ID NO: 46091 - DNA, 20 bp, Artificial Sequence
  Synthetic oligonucleotide; AAG chr11 5249683 5249702 5249686 -
gtgaccaggacaagggaggg

SEQ ID NO: 46092 - DNA, 20 bp, Artificial Sequence
  Synthetic oligonucleotide; AGG chr11 5249682 5249701 5249685 -
tgaccaggacaagggaggga

SEQ ID NO: 46093 - DNA, 20 bp, Artificial Sequence
  Synthetic oligonucleotide; AAG chr11 5249679 5249698 5249682 -
ccaggacaagggagggaagg

SEQ ID NO: 46094 - DNA, 20 bp, Artificial Sequence
  Synthetic oligonucleotide; AGG chr11 5249678 5249697 5249681 -
caggacaagggagggaagga

SEQ ID NO: 46095 - DNA, 20 bp, Artificial Sequence
  Synthetic oligonucleotide; TGG chr11 5249665 5249684 5249668 -
ggaaggaaggaccctgtgcc

SEQ ID NO: 46096 - DNA, 20 bp, Artificial Sequence
  Synthetic oligonucleotide; AAG chr11 5249659 5249678 5249662 -
aaggaccctgtgcctggcaa

SEQ ID NO: 46097 - DNA, 20 bp, Artificial Sequence
  Synthetic oligonucleotide; CAG chr11 5249654 5249673 5249657 -
ccctgtgcctggcaaaagtc

SEQ ID NO: 46098 - DNA, 20 bp, Artificial Sequence
  Synthetic oligonucleotide; AGG chr11 5249653 5249672 5249656 -
cctgtgcctggcaaaagtcc

SEQ ID NO: 46099 - DNA, 20 bp, Artificial Sequence
  Synthetic oligonucleotide; CAG chr11 5249642 5249661 5249645 -
caaaagtccaggtcgcttct

SEQ ID NO: 46100 - DNA, 20 bp, Artificial Sequence
  Synthetic oligonucleotide; AGG chr11 5249641 5249660 5249644 -
aaaagtccaggtcgcttctc

SEQ ID NO: 46101 - DNA, 20 bp, Artificial Sequence
  Synthetic oligonucleotide; TGG chr11 5249633 5249652 5249636 -
aggtcgcttctcaggatttg

SEQ ID NO: 46102 - DNA, 20 bp, Artificial Sequence
  Synthetic oligonucleotide; CAG chr11 5249594 5249613 5249597 -
aactgttcttgtcaatctca

SEQ ID NO: 46103 - DNA, 20 bp, Artificial Sequence
  Synthetic oligonucleotide; AGG chr11 5249593 5249612 5249596 -
actgttcttgtcaatctcac

SEQ ID NO: 46104 - DNA, 20 bp, Artificial Sequence
  Synthetic oligonucleotide; TGG chr11 5249586 5249605 5249589 -
ttgtcaatctcacaggctcc

SEQ ID NO: 46105 - DNA, 20 bp, Artificial Sequence
  Synthetic oligonucleotide; TGG chr11 5249572 5249591 5249575 -
ggctcctggttgtctaccca

SEQ ID NO: 46106 - DNA, 20 bp, Artificial Sequence
  Synthetic oligonucleotide; CAG chr11 5249566 5249585 5249569 -
tggttgtctacccatggacc

SEQ ID NO: 46107 - DNA, 20 bp, Artificial Sequence
  Synthetic oligonucleotide; GAG chr11 5249564 5249583 5249567 -
gttgtctacccatggaccca

SEQ ID NO: 46108 - DNA, 20 bp, Artificial Sequence
  Synthetic oligonucleotide; AGG chr11 5249563 5249582 5249566 -
ttgtctacccatggacccag

SEQ ID NO: 46109 - DNA, 20 bp, Artificial Sequence
  Synthetic oligonucleotide; CAG chr11 5249552 5249571 5249555 -
tggacccagaggttctttga

SEQ ID NO: 46110 - DNA, 20 bp, Artificial Sequence
  Synthetic oligonucleotide; TGG chr11 5249546 5249565 5249549 -
cagaggttctttgacagctt

SEQ ID NO: 46111 - DNA, 20 bp, Artificial Sequence
  Synthetic oligonucleotide; TGG chr11 5249517 5249536 5249520 -
gtcctctgcctctgccatca

SEQ ID NO: 46112 - DNA, 20 bp, Artificial Sequence
  Synthetic oligonucleotide; GGG chr11 5249516 5249535 5249519 -
tcctctgcctctgccatcat

SEQ ID NO: 46113 - DNA, 20 bp, Artificial Sequence
  Synthetic oligonucleotide; AAG chr11 5249505 5249524 5249508 -
tgccatcatgggcaacccca

SEQ ID NO: 46114 - DNA, 20 bp, Artificial Sequence
  Synthetic oligonucleotide; AAG chr11 5249500 5249519 5249503 -
tcatgggcaaccccaaagtc

SEQ ID NO: 46115 - DNA, 20 bp, Artificial Sequence
  Synthetic oligonucleotide; AGG chr11 5249499 5249518 5249502 -
catgggcaaccccaaagtca

SEQ ID NO: 46116 - DNA, 20 bp, Artificial Sequence
  Synthetic oligonucleotide; TGG chr11 5249492 5249511 5249495 -
aaccccaaagtcaaggcaca

SEQ ID NO: 46117 - DNA, 20 bp, Artificial Sequence
  Synthetic oligonucleotide; AAG chr11 5249488 5249507 5249491 -
ccaaagtcaaggcacatggc

SEQ ID NO: 46118 - DNA, 20 bp, Artificial Sequence
  Synthetic oligonucleotide; AAG chr11 5249485 5249504 5249488 -
aagtcaaggcacatggcaag

SEQ ID NO: 46119 - DNA, 20 bp, Artificial Sequence
  Synthetic oligonucleotide; AGG chr11 5249484 5249503 5249487 -
agtcaaggcacatggcaaga

SEQ ID NO: 46120 - DNA, 20 bp, Artificial Sequence
  Synthetic oligonucleotide; TGG chr11 5249469 5249488 5249472 -
caagaaggtgctgacttcct

SEQ ID NO: 46121 - DNA, 20 bp, Artificial Sequence
  Synthetic oligonucleotide; GGG chr11 5249468 5249487 5249471 -
aagaaggtgctgacttcctt

SEQ ID NO: 46122 - DNA, 20 bp, Artificial Sequence
  Synthetic oligonucleotide; GAG chr11 5249466 5249485 5249469 -
gaaggtgctgacttccttgg

SEQ ID NO: 46123 - DNA, 20 bp, Artificial Sequence
  Synthetic oligonucleotide; AAG chr11 5249455 5249474 5249458 -
cttccttgggagatgccaca

SEQ ID NO: 46124 - DNA, 20 bp, Artificial Sequence
  Synthetic oligonucleotide; TGG chr11 5249448 5249467 5249451 -
gggagatgccacaaagcacc

SEQ ID NO: 46125 - DNA, 20 bp, Artificial Sequence
  Synthetic oligonucleotide; AAG chr11 5249437 5249456 5249440 -
caaagcacctggatgatctc

SEQ ID NO: 46126 - DNA, 20 bp, Artificial Sequence
  Synthetic oligonucleotide; AGG chr11 5249436 5249455 5249439 -
aaagcacctggatgatctca

SEQ ID NO: 46127 - DNA, 20 bp, Artificial Sequence
  Synthetic oligonucleotide; GGG chr11 5249435 5249454 5249438 -
aagcacctggatgatctcaa

SEQ ID NO: 46128 - DNA, 20 bp, Artificial Sequence
  Synthetic oligonucleotide; CAG chr11 5249422 5249441 5249425 -
atctcaagggcacctttgcc

SEQ ID NO: 46129 - DNA, 20 bp, Artificial Sequence
  Synthetic oligonucleotide; GAG chr11 5249417 5249436 5249420 -
aagggcacctttgcccagct

SEQ ID NO: 46130 - DNA, 20 bp, Artificial Sequence
  Synthetic oligonucleotide; AAG chr11 5249398 5249417 5249401 -
tgagtgaactgcactgtgac

SEQ ID NO: 46131 - DNA, 20 bp, Artificial Sequence
  Synthetic oligonucleotide; TGG chr11 5249388 5249407 5249391 -
gcactgtgacaagctgcatg

SEQ ID NO: 46132 - DNA, 20 bp, Artificial Sequence
  Synthetic oligonucleotide; GAG chr11 5249380 5249399 5249383 -
acaagctgcatgtggatcct

SEQ ID NO: 46133 - DNA, 20 bp, Artificial Sequence
  Synthetic oligonucleotide; AAG chr11 5249371 5249390 5249374 -
atgtggatcctgagaacttc

SEQ ID NO: 46134 - DNA, 20 bp, Artificial Sequence
  Synthetic oligonucleotide; AGG chr11 5249370 5249389 5249373 -
tgtggatcctgagaacttca

SEQ ID NO: 46135 - DNA, 20 bp, Artificial Sequence
  Synthetic oligonucleotide; GAG chr11 5249366 5249385 5249369 -
gatcctgagaacttcaaggt

SEQ ID NO: 46136 - DNA, 20 bp, Artificial Sequence
  Synthetic oligonucleotide; CAG chr11 5249361 5249380 5249364 -
tgagaacttcaaggtgagtc

SEQ ID NO: 46137 - DNA, 20 bp, Artificial Sequence
  Synthetic oligonucleotide; AGG chr11 5249360 5249379 5249363 -
gagaacttcaaggtgagtcc

SEQ ID NO: 46138 - DNA, 20 bp, Artificial Sequence
  Synthetic oligonucleotide; GAG chr11 5249358 5249377 5249361 -
gaacttcaaggtgagtccag

SEQ ID NO: 46139 - DNA, 20 bp, Artificial Sequence
  Synthetic oligonucleotide; CAG chr11 5249349 5249368 5249352 -
ggtgagtccaggagatgttt

SEQ ID NO: 46140 - DNA, 20 bp, Artificial Sequence
  Synthetic oligonucleotide; TAG chr11 5249334 5249353 5249337 -
tgtttcagccctgttgcctt

SEQ ID NO: 46141 - DNA, 20 bp, Artificial Sequence
  Synthetic oligonucleotide; GAG chr11 5249327 5249346 5249330 -
gccctgttgcctttagtctc

SEQ ID NO: 46142 - DNA, 20 bp, Artificial Sequence
  Synthetic oligonucleotide; AGG chr11 5249326 5249345 5249329 -
ccctgttgcctttagtctcg

SEQ ID NO: 46143 - DNA, 20 bp, Artificial Sequence
  Synthetic oligonucleotide; TAG chr11 5249318 5249337 5249321 -
cctttagtctcgaggcaact

SEQ ID NO: 46144 - DNA, 20 bp, Artificial Sequence
  Synthetic oligonucleotide; CGG chr11 5249311 5249330 5249314 -
tctcgaggcaacttagacaa

SEQ ID NO: 46145 - DNA, 20 bp, Artificial Sequence
  Synthetic oligonucleotide; GAG chr11 5249309 5249328 5249312 -
tcgaggcaacttagacaacg

SEQ ID NO: 46146 - DNA, 20 bp, Artificial Sequence
  Synthetic oligonucleotide; GAG chr11 5249297 5249316 5249300 -
agacaacggagtattgatct

SEQ ID NO: 46147 - DNA, 20 bp, Artificial Sequence
  Synthetic oligonucleotide; CAG chr11 5249292 5249311 5249295 -
acggagtattgatctgagca

SEQ ID NO: 46148 - DNA, 20 bp, Artificial Sequence
  Synthetic oligonucleotide; CAG chr11 5249289 5249308 5249292 -
gagtattgatctgagcacag

SEQ ID NO: 46149 - DNA, 20 bp, Artificial Sequence
  Synthetic oligonucleotide; AGG chr11 5249288 5249307 5249291 -
agtattgatctgagcacagc

SEQ ID NO: 46150 - DNA, 20 bp, Artificial Sequence
  Synthetic oligonucleotide; GGG chr11 5249287 5249306 5249290 -
gtattgatctgagcacagca

SEQ ID NO: 46151 - DNA, 20 bp, Artificial Sequence
  Synthetic oligonucleotide; GAG chr11 5249281 5249300 5249284 -
atctgagcacagcagggtgt

SEQ ID NO: 46152 - DNA, 20 bp, Artificial Sequence
  Synthetic oligonucleotide; AAG chr11 5249271 5249290 5249274 -
agcagggtgtgagctgtttg

SEQ ID NO: 46153 - DNA, 20 bp, Artificial Sequence
  Synthetic oligonucleotide; TGG chr11 5249264 5249283 5249267 -
tgtgagctgtttgaagatac

SEQ ID NO: 46154 - DNA, 20 bp, Artificial Sequence
  Synthetic oligonucleotide; GGG chr11 5249263 5249282 5249266 -
gtgagctgtttgaagatact

SEQ ID NO: 46155 - DNA, 20 bp, Artificial Sequence
  Synthetic oligonucleotide; GGG chr11 5249262 5249281 5249265 -
tgagctgtttgaagatactg

SEQ ID NO: 46156 - DNA, 20 bp, Artificial Sequence
  Synthetic oligonucleotide; TGG chr11 5249258 5249277 5249261 -
ctgtttgaagatactggggt

SEQ ID NO: 46157 - DNA, 20 bp, Artificial Sequence
  Synthetic oligonucleotide; GGG chr11 5249257 5249276 5249260 -
tgtttgaagatactggggtt

SEQ ID NO: 46158 - DNA, 20 bp, Artificial Sequence
  Synthetic oligonucleotide; GGG chr11 5249256 5249275 5249259 -
gtttgaagatactggggttg

SEQ ID NO: 46159 - DNA, 20 bp, Artificial Sequence
  Synthetic oligonucleotide; GGG chr11 5249255 5249274 5249258 -
tttgaagatactggggttgg

SEQ ID NO: 46160 - DNA, 20 bp, Artificial Sequence
  Synthetic oligonucleotide; AAG chr11 5249250 5249269 5249253 -
agatactggggttgggggtg

SEQ ID NO: 46161 - DNA, 20 bp, Artificial Sequence
  Synthetic oligonucleotide; CAG chr11 5249241 5249260 5249244 -
ggttgggggtgaagaaactg

SEQ ID NO: 46162 - DNA, 20 bp, Artificial Sequence
  Synthetic oligonucleotide; GAG chr11 5249239 5249258 5249242 -
ttgggggtgaagaaactgca

SEQ ID NO: 46163 - DNA, 20 bp, Artificial Sequence
  Synthetic oligonucleotide; AGG chr11 5249238 5249257 5249241 -
tgggggtgaagaaactgcag

SEQ ID NO: 46164 - DNA, 20 bp, Artificial Sequence
  Synthetic oligonucleotide; TGG chr11 5249229 5249248 5249232 -
agaaactgcagaggactaac

SEQ ID NO: 46165 - DNA, 20 bp, Artificial Sequence
  Synthetic oligonucleotide; GGG chr11 5249228 5249247 5249231 -
gaaactgcagaggactaact

SEQ ID NO: 46166 - DNA, 20 bp, Artificial Sequence
  Synthetic oligonucleotide; GAG chr11 5249223 5249242 5249226 -
tgcagaggactaactgggct

SEQ ID NO: 46167 - DNA, 20 bp, Artificial Sequence
  Synthetic oligonucleotide; CAG chr11 5249217 5249236 5249220 -
ggactaactgggctgagacc

SEQ ID NO: 46168 - DNA, 20 bp, Artificial Sequence
  Synthetic oligonucleotide; TGG chr11 5249214 5249233 5249217 -
ctaactgggctgagacccag

SEQ ID NO: 46169 - DNA, 20 bp, Artificial Sequence
  Synthetic oligonucleotide; TAG chr11 5249203 5249222 5249206 -
gagacccagtggtaatgttt

SEQ ID NO: 46170 - DNA, 20 bp, Artificial Sequence
  Synthetic oligonucleotide; AGG chr11 5249202 5249221 5249205 -
agacccagtggtaatgtttt

SEQ ID NO: 46171 - DNA, 20 bp, Artificial Sequence
  Synthetic oligonucleotide; GGG chr11 5249201 5249220 5249204 -
gacccagtggtaatgtttta

SEQ ID NO: 46172 - DNA, 20 bp, Artificial Sequence
  Synthetic oligonucleotide; AAG chr11 5249195 5249214 5249198 -
gtggtaatgttttagggcct

SEQ ID NO: 46173 - DNA, 20 bp, Artificial Sequence
  Synthetic oligonucleotide; AGG chr11 5249194 5249213 5249197 -
tggtaatgttttagggccta

SEQ ID NO: 46174 - DNA, 20 bp, Artificial Sequence
  Synthetic oligonucleotide; GAG chr11 5249192 5249211 5249195 -
gtaatgttttagggcctaag

SEQ ID NO: 46175 - DNA, 20 bp, Artificial Sequence
  Synthetic oligonucleotide; TAG chr11 5249175 5249194 5249178 -
aaggagtgcctctaaaaatc

SEQ ID NO: 46176 - DNA, 20 bp, Artificial Sequence
  Synthetic oligonucleotide; TGG chr11 5249171 5249190 5249174 -
agtgcctctaaaaatctaga

SEQ ID NO: 46177 - DNA, 20 bp, Artificial Sequence
  Synthetic oligonucleotide; GAG chr11 5249154 5249173 5249157 -
agatggacaattttgacttt

SEQ ID NO: 46178 - DNA, 20 bp, Artificial Sequence
  Synthetic oligonucleotide; AAG chr11 5249149 5249168 5249152 -
gacaattttgactttgagaa

SEQ ID NO: 46179 - DNA, 20 bp, Artificial Sequence
  Synthetic oligonucleotide; GAG chr11 5249147 5249166 5249150 -
caattttgactttgagaaaa

SEQ ID NO: 46180 - DNA, 20 bp, Artificial Sequence
  Synthetic oligonucleotide; GAG chr11 5249145 5249164 5249148 -
attttgactttgagaaaaga

SEQ ID NO: 46181 - DNA, 20 bp, Artificial Sequence
  Synthetic oligonucleotide; AGG chr11 5249144 5249163 5249147 -
ttttgactttgagaaaagag

SEQ ID NO: 46182 - DNA, 20 bp, Artificial Sequence
  Synthetic oligonucleotide; TGG chr11 5249141 5249160 5249144 -
tgactttgagaaaagagagg

SEQ ID NO: 46183 - DNA, 20 bp, Artificial Sequence
  Synthetic oligonucleotide; GAG chr11 5249134 5249153 5249137 -
gagaaaagagaggtggaaat

SEQ ID NO: 46184 - DNA, 20 bp, Artificial Sequence
  Synthetic oligonucleotide; AGG chr11 5249133 5249152 5249136 -
agaaaagagaggtggaaatg

SEQ ID NO: 46185 - DNA, 20 bp, Artificial Sequence
  Synthetic oligonucleotide; TAG chr11 5249112 5249131 5249115 -
ggaaaatgacttttctttat

SEQ ID NO: 46186 - DNA, 20 bp, Artificial Sequence
  Synthetic oligonucleotide; CAG chr11 5249105 5249124 5249108 -
gacttttctttattagattc

SEQ ID NO: 46187 - DNA, 20 bp, Artificial Sequence
  Synthetic oligonucleotide; TAG chr11 5249102 5249121 5249105 -
ttttctttattagattccag

SEQ ID NO: 46188 - DNA, 20 bp, Artificial Sequence
  Synthetic oligonucleotide; AAG chr11 5249098 5249117 5249101 -
ctttattagattccagtaga

SEQ ID NO: 46189 - DNA, 20 bp, Artificial Sequence
  Synthetic oligonucleotide; TGG chr11 5249051 5249070 5249054 -
gttgttttaaaacatctatc

SEQ ID NO: 46190 - DNA, 20 bp, Artificial Sequence
  Synthetic oligonucleotide; GAG chr11 5249049 5249068 5249052 -
tgttttaaaacatctatctg

SEQ ID NO: 46191 - DNA, 20 bp, Artificial Sequence
  Synthetic oligonucleotide; AGG chr11 5249048 5249067 5249051 -
gttttaaaacatctatctgg

SEQ ID NO: 46192 - DNA, 20 bp, Artificial Sequence
  Synthetic oligonucleotide; CAG chr11 5249045 5249064 5249048 -
ttaaaacatctatctggagg

SEQ ID NO: 46193 - DNA, 20 bp, Artificial Sequence
  Synthetic oligonucleotide; AGG chr11 5249044 5249063 5249047 -
taaaacatctatctggaggc

SEQ ID NO: 46194 - DNA, 20 bp, Artificial Sequence
  Synthetic oligonucleotide; AAG chr11 5249039 5249058 5249042 -
catctatctggaggcaggac

SEQ ID NO: 46195 - DNA, 20 bp, Artificial Sequence
  Synthetic oligonucleotide; TGG chr11 5249034 5249053 5249037 -
atctggaggcaggacaagta

SEQ ID NO: 46196 - DNA, 20 bp, Artificial Sequence
  Synthetic oligonucleotide; AAG chr11 5249023 5249042 5249026 -
ggacaagtatggtcgttaaa

SEQ ID NO: 46197 - DNA, 20 bp, Artificial Sequence
  Synthetic oligonucleotide; CAG chr11 5249017 5249036 5249020 -
gtatggtcgttaaaaagatg

SEQ ID NO: 46198 - DNA, 20 bp, Artificial Sequence
  Synthetic oligonucleotide; AGG chr11 5249016 5249035 5249019 -
tatggtcgttaaaaagatgc

SEQ ID NO: 46199 - DNA, 20 bp, Artificial Sequence
  Synthetic oligonucleotide; CAG chr11 5249013 5249032 5249016 -
ggtcgttaaaaagatgcagg

SEQ ID NO: 46200 - DNA, 20 bp, Artificial Sequence
  Synthetic oligonucleotide; AAG chr11 5249010 5249029 5249013 -
cgttaaaaagatgcaggcag

SEQ ID NO: 46201 - DNA, 20 bp, Artificial Sequence
  Synthetic oligonucleotide; AGG chr11 5249009 5249028 5249012 -
gttaaaaagatgcaggcaga

SEQ ID NO: 46202 - DNA, 20 bp, Artificial Sequence
  Synthetic oligonucleotide; TGG chr11 5248999 5249018 5249002 -
tgcaggcagaaggcatatat

SEQ ID NO: 46203 - DNA, 20 bp, Artificial Sequence
  Synthetic oligonucleotide; CAG chr11 5248994 5249013 5248997 -
gcagaaggcatatattggct

SEQ ID NO: 46204 - DNA, 20 bp, Artificial Sequence
  Synthetic oligonucleotide; AAG chr11 5248988 5249007 5248991 -
ggcatatattggctcagtca

SEQ ID NO: 46205 - DNA, 20 bp, Artificial Sequence
  Synthetic oligonucleotide; TGG chr11 5248985 5249004 5248988 -
atatattggctcagtcaaag

SEQ ID NO: 46206 - DNA, 20 bp, Artificial Sequence
  Synthetic oligonucleotide; GGG chr11 5248984 5249003 5248987 -
tatattggctcagtcaaagt

SEQ ID NO: 46207 - DNA, 20 bp, Artificial Sequence
  Synthetic oligonucleotide; GGG chr11 5248983 5249002 5248986 -
atattggctcagtcaaagtg

SEQ ID NO: 46208 - DNA, 20 bp, Artificial Sequence
  Synthetic oligonucleotide; TGG chr11 5248975 5248994 5248978 -
tcagtcaaagtggggaactt

SEQ ID NO: 46209 - DNA, 20 bp, Artificial Sequence
  Synthetic oligonucleotide; TGG chr11 5248972 5248991 5248975 -
gtcaaagtggggaactttgg

SEQ ID NO: 46210 - DNA, 20 bp, Artificial Sequence
  Synthetic oligonucleotide; AAG chr11 5248953 5248972 5248956 -
gtggccaaacatacattgct

SEQ ID NO: 46211 - DNA, 20 bp, Artificial Sequence
  Synthetic oligonucleotide; AGG chr11 5248952 5248971 5248955 -
tggccaaacatacattgcta

SEQ ID NO: 46212 - DNA, 20 bp, Artificial Sequence
  Synthetic oligonucleotide; CAG chr11 5248937 5248956 5248940 -
tgctaaggctattcctatat

SEQ ID NO: 46213 - DNA, 20 bp, Artificial Sequence
  Synthetic oligonucleotide; TGG chr11 5248933 5248952 5248936 -
aaggctattcctatatcagc

SEQ ID NO: 46214 - DNA, 20 bp, Artificial Sequence
  Synthetic oligonucleotide; CAG chr11 5248878 5248897 5248881 -
aaacttatatcctttaattc

SEQ ID NO: 46215 - DNA, 20 bp, Artificial Sequence
  Synthetic oligonucleotide; TGG chr11 5248874 5248893 5248877 -
ttatatcctttaattccaga

SEQ ID NO: 46216 - DNA, 20 bp, Artificial Sequence
  Synthetic oligonucleotide; GGG chr11 5248873 5248892 5248876 -
tatatcctttaattccagat

SEQ ID NO: 46217 - DNA, 20 bp, Artificial Sequence
  Synthetic oligonucleotide; GGG chr11 5248872 5248891 5248875 -
atatcctttaattccagatg

SEQ ID NO: 46218 - DNA, 20 bp, Artificial Sequence
  Synthetic oligonucleotide; GGG chr11 5248871 5248890 5248874 -
tatcctttaattccagatgg

SEQ ID NO: 46219 - DNA, 20 bp, Artificial Sequence
  Synthetic oligonucleotide; AAG chr11 5248866 5248885 5248869 -
tttaattccagatgggggca

SEQ ID NO: 46220 - DNA, 20 bp, Artificial Sequence
  Synthetic oligonucleotide; CAG chr11 5248857 5248876 5248860 -
agatgggggcaaagtatgtc

SEQ ID NO: 46221 - DNA, 20 bp, Artificial Sequence
  Synthetic oligonucleotide; AGG chr11 5248856 5248875 5248859 -
gatgggggcaaagtatgtcc

SEQ ID NO: 46222 - DNA, 20 bp, Artificial Sequence
  Synthetic oligonucleotide; GGG chr11 5248855 5248874 5248858 -
atgggggcaaagtatgtcca

SEQ ID NO: 46223 - DNA, 20 bp, Artificial Sequence
  Synthetic oligonucleotide; GGG chr11 5248854 5248873 5248857 -
tgggggcaaagtatgtccag

SEQ ID NO: 46224 - DNA, 20 bp, Artificial Sequence
  Synthetic oligonucleotide; GAG chr11 5248850 5248869 5248853 -
ggcaaagtatgtccaggggt

SEQ ID NO: 46225 - DNA, 20 bp, Artificial Sequence
  Synthetic oligonucleotide; AGG chr11 5248849 5248868 5248852 -
gcaaagtatgtccaggggtg

SEQ ID NO: 46226 - DNA, 20 bp, Artificial Sequence
  Synthetic oligonucleotide; TGG chr11 5248831 5248850 5248834 -
tgaggaacaattgaaacatt

SEQ ID NO: 46227 - DNA, 20 bp, Artificial Sequence
  Synthetic oligonucleotide; GGG chr11 5248830 5248849 5248833 -
gaggaacaattgaaacattt

SEQ ID NO: 46228 - DNA, 20 bp, Artificial Sequence
  Synthetic oligonucleotide; TGG chr11 5248826 5248845 5248829 -
aacaattgaaacatttgggc

SEQ ID NO: 46229 - DNA, 20 bp, Artificial Sequence
  Synthetic oligonucleotide; GAG chr11 5248824 5248843 5248827 -
caattgaaacatttgggctg

SEQ ID NO: 46230 - DNA, 20 bp, Artificial Sequence
  Synthetic oligonucleotide; TAG chr11 5248821 5248840 5248824 -
ttgaaacatttgggctggag

SEQ ID NO: 46231 - DNA, 20 bp, Artificial Sequence
  Synthetic oligonucleotide; AAG chr11 5248811 5248830 5248814 -
tgggctggagtagattttga

SEQ ID NO: 46232 - DNA, 20 bp, Artificial Sequence
  Synthetic oligonucleotide; CAG chr11 5248807 5248826 5248810 -
ctggagtagattttgaaagt

SEQ ID NO: 46233 - DNA, 20 bp, Artificial Sequence
  Synthetic oligonucleotide; CAG chr11 5248756 5248775 5248759 -
gcgcgtgtgtgtgtgtgtgt

SEQ ID NO: 46234 - DNA, 20 bp, Artificial Sequence
  Synthetic oligonucleotide; CAG chr11 5248731 5248750 5248734 -
tgtgtttcttttaacgtctt

SEQ ID NO: 46235 - DNA, 20 bp, Artificial Sequence
  Synthetic oligonucleotide; CAG chr11 5248717 5248736 5248720 -
cgtcttcagcctacaacata

SEQ ID NO: 46236 - DNA, 20 bp, Artificial Sequence
  Synthetic oligonucleotide; AGG chr11 5248716 5248735 5248719 -
gtcttcagcctacaacatac

SEQ ID NO: 46237 - DNA, 20 bp, Artificial Sequence
  Synthetic oligonucleotide; GGG chr11 5248715 5248734 5248718 -
tcttcagcctacaacataca

SEQ ID NO: 46238 - DNA, 20 bp, Artificial Sequence
  Synthetic oligonucleotide; TGG chr11 5248708 5248727 5248711 -
cctacaacatacagggttca

SEQ ID NO: 46239 - DNA, 20 bp, Artificial Sequence
  Synthetic oligonucleotide; TGG chr11 5248705 5248724 5248708 -
acaacatacagggttcatgg

SEQ ID NO: 46240 - DNA, 20 bp, Artificial Sequence
  Synthetic oligonucleotide; AAG chr11 5248701 5248720 5248704 -
catacagggttcatggtggc

SEQ ID NO: 46241 - DNA, 20 bp, Artificial Sequence
  Synthetic oligonucleotide; AAG chr11 5248698 5248717 5248701 -
acagggttcatggtggcaag

SEQ ID NO: 46242 - DNA, 20 bp, Artificial Sequence
  Synthetic oligonucleotide; TAG chr11 5248694 5248713 5248697 -
ggttcatggtggcaagaaga

SEQ ID NO: 46243 - DNA, 20 bp, Artificial Sequence
  Synthetic oligonucleotide; AAG chr11 5248690 5248709 5248693 -
catggtggcaagaagatagc

SEQ ID NO: 46244 - DNA, 20 bp, Artificial Sequence
  Synthetic oligonucleotide; TGG chr11 5248677 5248696 5248680 -
agatagcaagatttaaatta

SEQ ID NO: 46245 - DNA, 20 bp, Artificial Sequence
  Synthetic oligonucleotide; CAG chr11 5248673 5248692 5248676 -
agcaagatttaaattatggc

SEQ ID NO: 46246 - DNA, 20 bp, Artificial Sequence
  Synthetic oligonucleotide; TAG chr11 5248666 5248685 5248669 -
tttaaattatggccagtgac

SEQ ID NO: 46247 - DNA, 20 bp, Artificial Sequence
  Synthetic oligonucleotide; AAG chr11 5248657 5248676 5248660 -
tggccagtgactagtgcttg

SEQ ID NO: 46248 - DNA, 20 bp, Artificial Sequence
  Synthetic oligonucleotide; AGG chr11 5248656 5248675 5248659 -
ggccagtgactagtgcttga

SEQ ID NO: 46249 - DNA, 20 bp, Artificial Sequence
  Synthetic oligonucleotide; GGG chr11 5248655 5248674 5248658 -
gccagtgactagtgcttgaa

SEQ ID NO: 46250 - DNA, 20 bp, Artificial Sequence
  Synthetic oligonucleotide; GGG chr11 5248654 5248673 5248657 -
ccagtgactagtgcttgaag

SEQ ID NO: 46251 - DNA, 20 bp, Artificial Sequence
  Synthetic oligonucleotide; TGG chr11 5248632 5248651 5248635 -
gaacaactacctgcatttaa

SEQ ID NO: 46252 - DNA, 20 bp, Artificial Sequence
  Synthetic oligonucleotide; GGG chr11 5248631 5248650 5248634 -
aacaactacctgcatttaat

SEQ ID NO: 46253 - DNA, 20 bp, Artificial Sequence
  Synthetic oligonucleotide; AAG chr11 5248628 5248647 5248631 -
aactacctgcatttaatggg

SEQ ID NO: 46254 - DNA, 20 bp, Artificial Sequence
  Synthetic oligonucleotide; AGG chr11 5248627 5248646 5248630 -
actacctgcatttaatggga

SEQ ID NO: 46255 - DNA, 20 bp, Artificial Sequence
  Synthetic oligonucleotide; CAG chr11 5248616 5248635 5248619 -
ttaatgggaaggcaaaatct

SEQ ID NO: 46256 - DNA, 20 bp, Artificial Sequence
  Synthetic oligonucleotide; AGG chr11 5248615 5248634 5248618 -
taatgggaaggcaaaatctc

SEQ ID NO: 46257 - DNA, 20 bp, Artificial Sequence
  Synthetic oligonucleotide; GAG chr11 5248608 5248627 5248611 -
aaggcaaaatctcaggcttt

SEQ ID NO: 46258 - DNA, 20 bp, Artificial Sequence
  Synthetic oligonucleotide; AGG chr11 5248607 5248626 5248610 -
aggcaaaatctcaggctttg

SEQ ID NO: 46259 - DNA, 20 bp, Artificial Sequence
  Synthetic oligonucleotide; GGG chr11 5248606 5248625 5248609 -
ggcaaaatctcaggctttga

SEQ ID NO: 46260 - DNA, 20 bp, Artificial Sequence
  Synthetic oligonucleotide; AAG chr11 5248603 5248622 5248606 -
aaaatctcaggctttgaggg

SEQ ID NO: 46261 - DNA, 20 bp, Artificial Sequence
  Synthetic oligonucleotide; TAG chr11 5248594 5248613 5248597 -
ggctttgagggaagttaaca

SEQ ID NO: 46262 - DNA, 20 bp, Artificial Sequence
  Synthetic oligonucleotide; AGG chr11 5248593 5248612 5248596 -
gctttgagggaagttaacat

SEQ ID NO: 46263 - DNA, 20 bp, Artificial Sequence
  Synthetic oligonucleotide; TGG chr11 5248582 5248601 5248585 -
agttaacataggcttgattc

SEQ ID NO: 46264 - DNA, 20 bp, Artificial Sequence
  Synthetic oligonucleotide; GGG chr11 5248581 5248600 5248584 -
gttaacataggcttgattct

SEQ ID NO: 46265 - DNA, 20 bp, Artificial Sequence
  Synthetic oligonucleotide; TGG chr11 5248578 5248597 5248581 -
aacataggcttgattctggg

SEQ ID NO: 46266 - DNA, 20 bp, Artificial Sequence
  Synthetic oligonucleotide; AAG chr11 5248575 5248594 5248578 -
ataggcttgattctgggtgg

SEQ ID NO: 46267 - DNA, 20 bp, Artificial Sequence
  Synthetic oligonucleotide; TGG chr11 5248570 5248589 5248573 -
cttgattctgggtggaagct

SEQ ID NO: 46268 - DNA, 20 bp, Artificial Sequence
  Synthetic oligonucleotide; TAG chr11 5248563 5248582 5248566 -
ctgggtggaagcttggtgtg

SEQ ID NO: 46269 - DNA, 20 bp, Artificial Sequence
  Synthetic oligonucleotide; TGG chr11 5248555 5248574 5248558 -
aagcttggtgtgtagttatc

SEQ ID NO: 46270 - DNA, 20 bp, Artificial Sequence
  Synthetic oligonucleotide; GAG chr11 5248553 5248572 5248556 -
gcttggtgtgtagttatctg

SEQ ID NO: 46271 - DNA, 20 bp, Artificial Sequence
  Synthetic oligonucleotide; AGG chr11 5248552 5248571 5248555 -
cttggtgtgtagttatctgg

SEQ ID NO: 46272 - DNA, 20 bp, Artificial Sequence
  Synthetic oligonucleotide; CAG chr11 5248548 5248567 5248551 -
gtgtgtagttatctggaggc

SEQ ID NO: 46273 - DNA, 20 bp, Artificial Sequence
  Synthetic oligonucleotide; AGG chr11 5248547 5248566 5248550 -
tgtgtagttatctggaggcc

SEQ ID NO: 46274 - DNA, 20 bp, Artificial Sequence
  Synthetic oligonucleotide; TGG chr11 5248543 5248562 5248546 -
tagttatctggaggccaggc

SEQ ID NO: 46275 - DNA, 20 bp, Artificial Sequence
  Synthetic oligonucleotide; GAG chr11 5248541 5248560 5248544 -
gttatctggaggccaggctg

SEQ ID NO: 46276 - DNA, 20 bp, Artificial Sequence
  Synthetic oligonucleotide; CAG chr11 5248534 5248553 5248537 -
ggaggccaggctggagctct

SEQ ID NO: 46277 - DNA, 20 bp, Artificial Sequence
  Synthetic oligonucleotide; TGG chr11 5248524 5248543 5248527 -
ctggagctctcagctcacta

SEQ ID NO: 46278 - DNA, 20 bp, Artificial Sequence
  Synthetic oligonucleotide; GGG chr11 5248523 5248542 5248526 -
tggagctctcagctcactat

SEQ ID NO: 46279 - DNA, 20 bp, Artificial Sequence
  Synthetic oligonucleotide; CAG chr11 5248491 5248510 5248494 -
attgtctcctttcatctcaa

SEQ ID NO: 46280 - DNA, 20 bp, Artificial Sequence
  Synthetic oligonucleotide; TGG chr11 5248484 5248503 5248487 -
cctttcatctcaacagctcc

SEQ ID NO: 46281 - DNA, 20 bp, Artificial Sequence
  Synthetic oligonucleotide; GGG chr11 5248483 5248502 5248486 -
ctttcatctcaacagctcct

SEQ ID NO: 46282 - DNA, 20 bp, Artificial Sequence
  Synthetic oligonucleotide; TGG chr11 5248472 5248491 5248475 -
acagctcctgggaaatgtgc

SEQ ID NO: 46283 - DNA, 20 bp, Artificial Sequence
  Synthetic oligonucleotide; TGG chr11 5248460 5248479 5248463 -
aaatgtgctggtgaccgttt

SEQ ID NO: 46284 - DNA, 20 bp, Artificial Sequence
  Synthetic oligonucleotide; CGG chr11 5248447 5248466 5248450 -
accgttttggcaatccattt

SEQ ID NO: 46285 - DNA, 20 bp, Artificial Sequence
  Synthetic oligonucleotide; AAG chr11 5248442 5248461 5248445 -
tttggcaatccatttcggca

SEQ ID NO: 46286 - DNA, 20 bp, Artificial Sequence
  Synthetic oligonucleotide; GAG chr11 5248428 5248447 5248431 -
tcggcaaagaattcacccct

SEQ ID NO: 46287 - DNA, 20 bp, Artificial Sequence
  Synthetic oligonucleotide; AGG chr11 5248427 5248446 5248430 -
cggcaaagaattcacccctg

SEQ ID NO: 46288 - DNA, 20 bp, Artificial Sequence
  Synthetic oligonucleotide; CAG chr11 5248422 5248441 5248425 -
aagaattcacccctgaggtg

SEQ ID NO: 46289 - DNA, 20 bp, Artificial Sequence
  Synthetic oligonucleotide; AGG chr11 5248421 5248440 5248424 -
agaattcacccctgaggtgc

SEQ ID NO: 46290 - DNA, 20 bp, Artificial Sequence
  Synthetic oligonucleotide; TGG chr11 5248413 5248432 5248416 -
cccctgaggtgcaggcttcc

SEQ ID NO: 46291 - DNA, 20 bp, Artificial Sequence
  Synthetic oligonucleotide; CAG chr11 5248410 5248429 5248413 -
ctgaggtgcaggcttcctgg

SEQ ID NO: 46292 - DNA, 20 bp, Artificial Sequence
  Synthetic oligonucleotide; AAG chr11 5248407 5248426 5248410 -
aggtgcaggcttcctggcag

SEQ ID NO: 46293 - DNA, 20 bp, Artificial Sequence
  Synthetic oligonucleotide; TGG chr11 5248403 5248422 5248406 -
gcaggcttcctggcagaaga

SEQ ID NO: 46294 - DNA, 20 bp, Artificial Sequence
  Synthetic oligonucleotide; CAG chr11 5248394 5248413 5248397 -
ctggcagaagatggtgactg

SEQ ID NO: 46295 - DNA, 20 bp, Artificial Sequence
  Synthetic oligonucleotide; TGG chr11 5248391 5248410 5248394 -
gcagaagatggtgactgcag

SEQ ID NO: 46296 - DNA, 20 bp, Artificial Sequence
  Synthetic oligonucleotide; CAG chr11 5248387 5248406 5248390 -
aagatggtgactgcagtggc

SEQ ID NO: 46297 - DNA, 20 bp, Artificial Sequence
  Synthetic oligonucleotide; CAG chr11 5248372 5248391 5248375 -
gtggccagtgccctgtcctc

SEQ ID NO: 46298 - DNA, 20 bp, Artificial Sequence
  Synthetic oligonucleotide; GAG chr11 5248361 5248380 5248364 -
cctgtcctccagataccact

SEQ ID NO: 46299 - DNA, 20 bp, Artificial Sequence
  Synthetic oligonucleotide; CAG chr11 5248342 5248361 5248345 -
tgagctcactgcccatgatt

SEQ ID NO: 46300 - DNA, 20 bp, Artificial Sequence
  Synthetic oligonucleotide; GAG chr11 5248340 5248359 5248343 -
agctcactgcccatgattca

SEQ ID NO: 46301 - DNA, 20 bp, Artificial Sequence
  Synthetic oligonucleotide; AAG chr11 5248332 5248351 5248335 -
gcccatgattcagagctttc

SEQ ID NO: 46302 - DNA, 20 bp, Artificial Sequence
  Synthetic oligonucleotide; AGG chr11 5248331 5248350 5248334 -
cccatgattcagagctttca

SEQ ID NO: 46303 - DNA, 20 bp, Artificial Sequence
  Synthetic oligonucleotide; TAG chr11 5248327 5248346 5248330 -
tgattcagagctttcaagga

SEQ ID NO: 46304 - DNA, 20 bp, Artificial Sequence
  Synthetic oligonucleotide; AGG chr11 5248326 5248345 5248329 -
gattcagagctttcaaggat

SEQ ID NO: 46305 - DNA, 20 bp, Artificial Sequence
  Synthetic oligonucleotide; AAG chr11 5248312 5248331 5248315 -
aaggataggctttattctgc

SEQ ID NO: 46306 - DNA, 20 bp, Artificial Sequence
  Synthetic oligonucleotide; GAG chr11 5248282 5248301 5248285 -
aataataaatctattctgct

SEQ ID NO: 46307 - DNA, 20 bp, Artificial Sequence
  Synthetic oligonucleotide; GAG chr11 5248280 5248299 5248283 -
taataaatctattctgctga

SEQ ID NO: 46308 - DNA, 20 bp, Artificial Sequence
  Synthetic oligonucleotide; CAG chr11 5248259 5248278 5248262 -
agatcacacatgattttctt

SEQ ID NO: 46309 - DNA, 20 bp, Artificial Sequence
  Synthetic oligonucleotide; GAG chr11 5248227 5248246 5248230 -
ttacatctttttaaatatat

SEQ ID NO: 46310 - DNA, 20 bp, Artificial Sequence
  Synthetic oligonucleotide; AAG chr11 5248219 5248238 5248222 -
ttttaaatatatgagccaca

SEQ ID NO: 46311 - DNA, 20 bp, Artificial Sequence
  Synthetic oligonucleotide; AGG chr11 5248218 5248237 5248221 -
tttaaatatatgagccacaa

SEQ ID NO: 46312 - DNA, 20 bp, Artificial Sequence
  Synthetic oligonucleotide; GGG chr11 5248217 5248236 5248220 -
ttaaatatatgagccacaaa

SEQ ID NO: 46313 - DNA, 20 bp, Artificial Sequence
  Synthetic oligonucleotide; GAG chr11 5248206 5248225 5248209 -
agccacaaagggtttatatt

SEQ ID NO: 46314 - DNA, 20 bp, Artificial Sequence
  Synthetic oligonucleotide; AGG chr11 5248205 5248224 5248208 -
gccacaaagggtttatattg

SEQ ID NO: 46315 - DNA, 20 bp, Artificial Sequence
  Synthetic oligonucleotide; GGG chr11 5248204 5248223 5248207 -
ccacaaagggtttatattga

SEQ ID NO: 46316 - DNA, 20 bp, Artificial Sequence
  Synthetic oligonucleotide; AAG chr11 5248201 5248220 5248204 -
caaagggtttatattgaggg

SEQ ID NO: 46317 - DNA, 20 bp, Artificial Sequence
  Synthetic oligonucleotide; TGG chr11 5248162 5248181 5248165 -
tgcatgcctgtttgtgtttg

SEQ ID NO: 46318 - DNA, 20 bp, Artificial Sequence
  Synthetic oligonucleotide; GAG chr11 5248129 5248148 5248132 -
ctcctcatttatttttatat

SEQ ID NO: 46319 - DNA, 20 bp, Artificial Sequence
  Synthetic oligonucleotide; GAG chr11 5248112 5248131 5248115 -
tatgagatgtgcattttgat

SEQ ID NO: 46320 - DNA, 20 bp, Artificial Sequence
  Synthetic oligonucleotide; AAG chr11 5248102 5248121 5248105 -
gcattttgatgagcaaataa

SEQ ID NO: 46321 - DNA, 20 bp, Artificial Sequence
  Synthetic oligonucleotide; CAG chr11 5248099 5248118 5248102 -
ttttgatgagcaaataaaag

SEQ ID NO: 46322 - DNA, 20 bp, Artificial Sequence
  Synthetic oligonucleotide; AAG chr11 5248094 5248113 5248097 -
atgagcaaataaaagcagta

SEQ ID NO: 46323 - DNA, 20 bp, Artificial Sequence
  Synthetic oligonucleotide; CGG chr11 5248080 5248099 5248083 -
gcagtaaagacacttgtaca

SEQ ID NO: 46324 - DNA, 20 bp, Artificial Sequence
  Synthetic oligonucleotide; GGG chr11 5248079 5248098 5248082 -
cagtaaagacacttgtacac

SEQ ID NO: 46325 - DNA, 20 bp, Artificial Sequence
  Synthetic oligonucleotide; GAG chr11 5248077 5248096 5248080 -
gtaaagacacttgtacacgg

SEQ ID NO: 46326 - DNA, 20 bp, Artificial Sequence
  Synthetic oligonucleotide; AAG chr11 5248068 5248087 5248071 -
cttgtacacgggagttctgc

SEQ ID NO: 46327 - DNA, 20 bp, Artificial Sequence
  Synthetic oligonucleotide; TGG chr11 5248065 5248084 5248068 -
gtacacgggagttctgcaag

SEQ ID NO: 46328 - DNA, 20 bp, Artificial Sequence
  Synthetic oligonucleotide; GGG chr11 5248064 5248083 5248067 -
tacacgggagttctgcaagt

SEQ ID NO: 46329 - DNA, 20 bp, Artificial Sequence
  Synthetic oligonucleotide; GAG chr11 5248062 5248081 5248065 -
cacgggagttctgcaagtgg

SEQ ID NO: 46330 - DNA, 20 bp, Artificial Sequence
  Synthetic oligonucleotide; TGG chr11 5248055 5248074 5248058 -
gttctgcaagtgggagtaaa

SEQ ID NO: 46331 - DNA, 20 bp, Artificial Sequence
  Synthetic oligonucleotide; TAG chr11 5248050 5248069 5248053 -
gcaagtgggagtaaatggtg

SEQ ID NO: 46332 - DNA, 20 bp, Artificial Sequence
  Synthetic oligonucleotide; AGG chr11 5248049 5248068 5248052 -
caagtgggagtaaatggtgt

SEQ ID NO: 46333 - DNA, 20 bp, Artificial Sequence
  Synthetic oligonucleotide; GAG chr11 5248047 5248066 5248050 -
agtgggagtaaatggtgtag

SEQ ID NO: 46334 - DNA, 20 bp, Artificial Sequence
  Synthetic oligonucleotide; CGG chr11 5248039 5248058 5248042 -
taaatggtgtaggagaaatc

SEQ ID NO: 46335 - DNA, 20 bp, Artificial Sequence
  Synthetic oligonucleotide; TGG chr11 5248036 5248055 5248039 -
atggtgtaggagaaatccgg

SEQ ID NO: 46336 - DNA, 20 bp, Artificial Sequence
  Synthetic oligonucleotide; GGG chr11 5248035 5248054 5248038 -
tggtgtaggagaaatccggt

SEQ ID NO: 46337 - DNA, 20 bp, Artificial Sequence
  Synthetic oligonucleotide; AAG chr11 5248032 5248051 5248035 -
tgtaggagaaatccggtggg

SEQ ID NO: 46338 - DNA, 20 bp, Artificial Sequence
  Synthetic oligonucleotide; AAG chr11 5248028 5248047 5248031 -
ggagaaatccggtgggaaga

SEQ ID NO: 46339 - DNA, 20 bp, Artificial Sequence
  Synthetic oligonucleotide; TAG chr11 5248018 5248037 5248021 -
ggtgggaagaaagacctcta

SEQ ID NO: 46340 - DNA, 20 bp, Artificial Sequence
  Synthetic oligonucleotide; AGG chr11 5248017 5248036 5248020 -
gtgggaagaaagacctctat

SEQ ID NO: 46341 - DNA, 20 bp, Artificial Sequence
  Synthetic oligonucleotide; CAG chr11 5248013 5248032 5248016 -
gaagaaagacctctatagga

SEQ ID NO: 46342 - DNA, 20 bp, Artificial Sequence
  Synthetic oligonucleotide; AGG chr11 5248012 5248031 5248015 -
aagaaagacctctataggac

SEQ ID NO: 46343 - DNA, 20 bp, Artificial Sequence
  Synthetic oligonucleotide; CAG chr11 5248003 5248022 5248006 -
ctctataggacaggacttct

SEQ ID NO: 46344 - DNA, 20 bp, Artificial Sequence
  Synthetic oligonucleotide; CAG chr11 5247997 5248016 5248000 -
aggacaggacttctcagaaa

SEQ ID NO: 46345 - DNA, 20 bp, Artificial Sequence
  Synthetic oligonucleotide; TGG chr11 5247988 5248007 5247991 -
cttctcagaaacagatgttt

SEQ ID NO: 46346 - DNA, 20 bp, Artificial Sequence
  Synthetic oligonucleotide; AAG chr11 5247985 5248004 5247988 -
ctcagaaacagatgttttgg

SEQ ID NO: 46347 - DNA, 20 bp, Artificial Sequence
  Synthetic oligonucleotide; GAG chr11 5247983 5248002 5247986 -
cagaaacagatgttttggaa

SEQ ID NO: 46348 - DNA, 20 bp, Artificial Sequence
  Synthetic oligonucleotide; TGG chr11 5247979 5247998 5247982 -
aacagatgttttggaagaga

SEQ ID NO: 46349 - DNA, 20 bp, Artificial Sequence
  Synthetic oligonucleotide; GGG chr11 5247978 5247997 5247981 -
acagatgttttggaagagat

SEQ ID NO: 46350 - DNA, 20 bp, Artificial Sequence
  Synthetic oligonucleotide; AAG chr11 5247973 5247992 5247976 -
tgttttggaagagatgggaa

SEQ ID NO: 46351 - DNA, 20 bp, Artificial Sequence
  Synthetic oligonucleotide; AGG chr11 5247972 5247991 5247975 -
gttttggaagagatgggaaa

SEQ ID NO: 46352 - DNA, 20 bp, Artificial Sequence
  Synthetic oligonucleotide; CAG chr11 5247967 5247986 5247970 -
ggaagagatgggaaaaggtt

SEQ ID NO: 46353 - DNA, 20 bp, Artificial Sequence
  Synthetic oligonucleotide; AAG chr11 5247962 5247981 5247965 -
agatgggaaaaggttcagtg

SEQ ID NO: 46354 - DNA, 20 bp, Artificial Sequence
  Synthetic oligonucleotide; TGG chr11 5247956 5247975 5247959 -
gaaaaggttcagtgaagacc

SEQ ID NO: 46355 - DNA, 20 bp, Artificial Sequence
  Synthetic oligonucleotide; GGG chr11 5247955 5247974 5247958 -
aaaaggttcagtgaagacct

SEQ ID NO: 46356 - DNA, 20 bp, Artificial Sequence
  Synthetic oligonucleotide; GGG chr11 5247954 5247973 5247957 -
aaaggttcagtgaagacctg

SEQ ID NO: 46357 - DNA, 20 bp, Artificial Sequence
  Synthetic oligonucleotide; GGG chr11 5247953 5247972 5247956 -
aaggttcagtgaagacctgg

SEQ ID NO: 46358 - DNA, 20 bp, Artificial Sequence
  Synthetic oligonucleotide; TGG chr11 5247949 5247968 5247952 -
ttcagtgaagacctgggggc

SEQ ID NO: 46359 - DNA, 20 bp, Artificial Sequence
  Synthetic oligonucleotide; CAG chr11 5247938 5247957 5247941 -
cctgggggctggattgattg

SEQ ID NO: 46360 - DNA, 20 bp, Artificial Sequence
  Synthetic oligonucleotide; GAG chr11 5247933 5247952 5247936 -
gggctggattgattgcagct

SEQ ID NO: 46361 - DNA, 20 bp, Artificial Sequence
  Synthetic oligonucleotide; TAG chr11 5247930 5247949 5247933 -
ctggattgattgcagctgag

SEQ ID NO: 46362 - DNA, 20 bp, Artificial Sequence
  Synthetic oligonucleotide; AAG chr11 5247926 5247945 5247929 -
attgattgcagctgagtagc

SEQ ID NO: 46363 - DNA, 20 bp, Artificial Sequence
  Synthetic oligonucleotide; AGG chr11 5247925 5247944 5247928 -
ttgattgcagctgagtagca

SEQ ID NO: 46364 - DNA, 20 bp, Artificial Sequence
  Synthetic oligonucleotide; TGG chr11 5247921 5247940 5247924 -
ttgcagctgagtagcaagga

SEQ ID NO: 46365 - DNA, 20 bp, Artificial Sequence
  Synthetic oligonucleotide; AAG chr11 5247913 5247932 5247916 -
gagtagcaaggatggttctt

SEQ ID NO: 46366 - DNA, 20 bp, Artificial Sequence
  Synthetic oligonucleotide; AGG chr11 5247912 5247931 5247915 -
agtagcaaggatggttctta

SEQ ID NO: 46367 - DNA, 20 bp, Artificial Sequence
  Synthetic oligonucleotide; AAG chr11 5247909 5247928 5247912 -
agcaaggatggttcttaagg

SEQ ID NO: 46368 - DNA, 20 bp, Artificial Sequence
  Synthetic oligonucleotide; AGG chr11 5247908 5247927 5247911 -
gcaaggatggttcttaagga

SEQ ID NO: 46369 - DNA, 20 bp, Artificial Sequence
  Synthetic oligonucleotide; GGG chr11 5247907 5247926 5247910 -
caaggatggttcttaaggaa

SEQ ID NO: 46370 - DNA, 20 bp, Artificial Sequence
  Synthetic oligonucleotide; AAG chr11 5247903 5247922 5247906 -
gatggttcttaaggaaggga

SEQ ID NO: 46371 - DNA, 20 bp, Artificial Sequence
  Synthetic oligonucleotide; AAG chr11 5247894 5247913 5247897 -
taaggaagggaaagtgttcc

SEQ ID NO: 46372 - DNA, 20 bp, Artificial Sequence
  Synthetic oligonucleotide; TAG chr11 5247888 5247907 5247891 -
agggaaagtgttccaagctt

SEQ ID NO: 46373 - DNA, 20 bp, Artificial Sequence
  Synthetic oligonucleotide; AGG chr11 5247887 5247906 5247890 -
gggaaagtgttccaagcttt

SEQ ID NO: 46374 - DNA, 20 bp, Artificial Sequence
  Synthetic oligonucleotide; AAG chr11 5247879 5247898 5247882 -
gttccaagctttaggaattc

SEQ ID NO: 46375 - DNA, 20 bp, Artificial Sequence
  Synthetic oligonucleotide; AGG chr11 5247878 5247897 5247881 -
ttccaagctttaggaattca

SEQ ID NO: 46376 - DNA, 20 bp, Artificial Sequence
  Synthetic oligonucleotide; TAG chr11 5247873 5247892 5247876 -
agctttaggaattcaaggtt

SEQ ID NO: 46377 - DNA, 20 bp, Artificial Sequence
  Synthetic oligonucleotide; CAG chr11 5247869 5247888 5247872 -
ttaggaattcaaggtttagt

SEQ ID NO: 46378 - DNA, 20 bp, Artificial Sequence
  Synthetic oligonucleotide; AGG chr11 5247868 5247887 5247871 -
taggaattcaaggtttagtc

SEQ ID NO: 46379 - DNA, 20 bp, Artificial Sequence
  Synthetic oligonucleotide; TAG chr11 5247863 5247882 5247866 -
attcaaggtttagtcaggtg

SEQ ID NO: 46380 - DNA, 20 bp, Artificial Sequence
  Synthetic oligonucleotide; TAG chr11 5247846 5247865 5247849 -
gtgtagcaattctattttat

SEQ ID NO: 46381 - DNA, 20 bp, Artificial Sequence
  Synthetic oligonucleotide; AGG chr11 5247845 5247864 5247848 -
tgtagcaattctattttatt

SEQ ID NO: 46382 - DNA, 20 bp, Artificial Sequence
  Synthetic oligonucleotide; GAG chr11 5247843 5247862 5247846 -
tagcaattctattttattag

SEQ ID NO: 46383 - DNA, 20 bp, Artificial Sequence
  Synthetic oligonucleotide; AGG chr11 5247842 5247861 5247845 -
agcaattctattttattagg

SEQ ID NO: 46384 - DNA, 20 bp, Artificial Sequence
  Synthetic oligonucleotide; TGG chr11 5247825 5247844 5247828 -
aggaggaatactatttctaa

SEQ ID NO: 46385 - DNA, 20 bp, Artificial Sequence
  Synthetic oligonucleotide; TAG chr11 5247818 5247837 5247821 -
atactatttctaatggcact

SEQ ID NO: 46386 - DNA, 20 bp, Artificial Sequence
  Synthetic oligonucleotide; CAG chr11 5247808 5247827 5247811 -
taatggcacttagcttttca

SEQ ID NO: 46387 - DNA, 20 bp, Artificial Sequence
  Synthetic oligonucleotide; TGG chr11 5247799 5247818 5247802 -
ttagcttttcacagcccttg

SEQ ID NO: 46388 - DNA, 20 bp, Artificial Sequence
  Synthetic oligonucleotide; AAG chr11 5247790 5247809 5247793 -
cacagcccttgtggatgcct

SEQ ID NO: 46389 - DNA, 20 bp, Artificial Sequence
  Synthetic oligonucleotide; AAG chr11 5247786 5247805 5247789 -
gcccttgtggatgcctaaga

SEQ ID NO: 46390 - DNA, 20 bp, Artificial Sequence
  Synthetic oligonucleotide; AAG chr11 5247762 5247781 5247765 -
gaaattaatcccatgccctc

SEQ ID NO: 46391 - DNA, 20 bp, Artificial Sequence
  Synthetic oligonucleotide; CAG chr11 5247755 5247774 5247758 -
atcccatgccctcaagtgtg

SEQ ID NO: 46392 - DNA, 20 bp, Artificial Sequence
  Synthetic oligonucleotide; TGG chr11 5247750 5247769 5247753 -
atgccctcaagtgtgcagat

SEQ ID NO: 46393 - DNA, 20 bp, Artificial Sequence
  Synthetic oligonucleotide; CAG chr11 5247744 5247763 5247747 -
tcaagtgtgcagattggtca

SEQ ID NO: 46394 - DNA, 20 bp, Artificial Sequence
  Synthetic oligonucleotide; AAG chr11 5247735 5247754 5247738 -
cagattggtcacagcatttc

SEQ ID NO: 46395 - DNA, 20 bp, Artificial Sequence
  Synthetic oligonucleotide; AGG chr11 5247734 5247753 5247737 -
agattggtcacagcatttca

SEQ ID NO: 46396 - DNA, 20 bp, Artificial Sequence
  Synthetic oligonucleotide; GGG chr11 5247733 5247752 5247736 -
gattggtcacagcatttcaa

SEQ ID NO: 46397 - DNA, 20 bp, Artificial Sequence
  Synthetic oligonucleotide; GAG chr11 5247731 5247750 5247734 -
ttggtcacagcatttcaagg

SEQ ID NO: 46398 - DNA, 20 bp, Artificial Sequence
  Synthetic oligonucleotide; GAG chr11 5247729 5247748 5247732 -
ggtcacagcatttcaaggga

SEQ ID NO: 46399 - DNA, 20 bp, Artificial Sequence
  Synthetic oligonucleotide; AAG chr11 5247716 5247735 5247719 -
caagggagagacctcattgt

SEQ ID NO: 46400 - DNA, 20 bp, Artificial Sequence
  Synthetic oligonucleotide; TGG chr11 5247709 5247728 5247712 -
gagacctcattgtaagactc

SEQ ID NO: 46401 - DNA, 20 bp, Artificial Sequence
  Synthetic oligonucleotide; GGG chr11 5247708 5247727 5247711 -
agacctcattgtaagactct

SEQ ID NO: 46402 - DNA, 20 bp, Artificial Sequence
  Synthetic oligonucleotide; GGG chr11 5247707 5247726 5247710 -
gacctcattgtaagactctg

SEQ ID NO: 46403 - DNA, 20 bp, Artificial Sequence
  Synthetic oligonucleotide; GGG chr11 5247706 5247725 5247709 -
acctcattgtaagactctgg

SEQ ID NO: 46404 - DNA, 20 bp, Artificial Sequence
  Synthetic oligonucleotide; GAG chr11 5247704 5247723 5247707 -
ctcattgtaagactctgggg

SEQ ID NO: 46405 - DNA, 20 bp, Artificial Sequence
  Synthetic oligonucleotide; AGG chr11 5247703 5247722 5247706 -
tcattgtaagactctggggg

SEQ ID NO: 46406 - DNA, 20 bp, Artificial Sequence
  Synthetic oligonucleotide; TGG chr11 5247700 5247719 5247703 -
ttgtaagactctgggggagg

SEQ ID NO: 46407 - DNA, 20 bp, Artificial Sequence
  Synthetic oligonucleotide; GGG chr11 5247699 5247718 5247702 -
tgtaagactctgggggaggt

SEQ ID NO: 46408 - DNA, 20 bp, Artificial Sequence
  Synthetic oligonucleotide; GGG chr11 5247698 5247717 5247701 -
gtaagactctgggggaggtg

SEQ ID NO: 46409 - DNA, 20 bp, Artificial Sequence
  Synthetic oligonucleotide; TAG chr11 5247692 5247711 5247695 -
ctctgggggaggtggggact

SEQ ID NO: 46410 - DNA, 20 bp, Artificial Sequence
  Synthetic oligonucleotide; AGG chr11 5247691 5247710 5247694 -
tctgggggaggtggggactt

SEQ ID NO: 46411 - DNA, 20 bp, Artificial Sequence
  Synthetic oligonucleotide; AAG chr11 5247685 5247704 5247688 -
ggaggtggggacttaggtgt

SEQ ID NO: 46412 - DNA, 20 bp, Artificial Sequence
  Synthetic oligonucleotide; CAG chr11 5247674 5247693 5247677 -
cttaggtgtaagaaatgaat

SEQ ID NO: 46413 - DNA, 20 bp, Artificial Sequence
  Synthetic oligonucleotide; CAG chr11 5247671 5247690 5247674 -
aggtgtaagaaatgaatcag

SEQ ID NO: 46414 - DNA, 20 bp, Artificial Sequence
  Synthetic oligonucleotide; GAG chr11 5247669 5247688 5247672 -
gtgtaagaaatgaatcagca

SEQ ID NO: 46415 - DNA, 20 bp, Artificial Sequence
  Synthetic oligonucleotide; AGG chr11 5247668 5247687 5247671 -
tgtaagaaatgaatcagcag

SEQ ID NO: 46416 - DNA, 20 bp, Artificial Sequence
  Synthetic oligonucleotide; AAG chr11 5247660 5247679 5247663 -
atgaatcagcagaggctcac

SEQ ID NO: 46417 - DNA, 20 bp, Artificial Sequence
  Synthetic oligonucleotide; CAG chr11 5247656 5247675 5247659 -
atcagcagaggctcacaagt

SEQ ID NO: 46418 - DNA, 20 bp, Artificial Sequence
  Synthetic oligonucleotide; GAG chr11 5247650 5247669 5247653 -
agaggctcacaagtcagcat

SEQ ID NO: 46419 - DNA, 20 bp, Artificial Sequence
  Synthetic oligonucleotide; GAG chr11 5247635 5247654 5247638 -
agcatgagcatgttatgtct

SEQ ID NO: 46420 - DNA, 20 bp, Artificial Sequence
  Synthetic oligonucleotide; CAG chr11 5247629 5247648 5247632 -
agcatgttatgtctgagaaa

SEQ ID NO: 46421 - DNA, 20 bp, Artificial Sequence
  Synthetic oligonucleotide; CAG chr11 5247624 5247643 5247627 -
gttatgtctgagaaacagac

SEQ ID NO: 46422 - DNA, 20 bp, Artificial Sequence
  Synthetic oligonucleotide; GAG chr11 5247615 5247634 5247618 -
gagaaacagaccagcactgt

SEQ ID NO: 46423 - DNA, 20 bp, Artificial Sequence
  Synthetic oligonucleotide; TAG chr11 5247603 5247622 5247606 -
agcactgtgagatcaaaatg

SEQ ID NO: 46424 - DNA, 20 bp, Artificial Sequence
  Synthetic oligonucleotide; TGG chr11 5247600 5247619 5247603 -
actgtgagatcaaaatgtag

SEQ ID NO: 46425 - DNA, 20 bp, Artificial Sequence
  Synthetic oligonucleotide; GGG chr11 5247599 5247618 5247602 -
ctgtgagatcaaaatgtagt

SEQ ID NO: 46426 - DNA, 20 bp, Artificial Sequence
  Synthetic oligonucleotide; AAG chr11 5247596 5247615 5247599 -
tgagatcaaaatgtagtggg

SEQ ID NO: 46427 - DNA, 20 bp, Artificial Sequence
  Synthetic oligonucleotide; TGG chr11 5247575 5247594 5247578 -
agaatttgtacaacattaat

SEQ ID NO: 46428 - DNA, 20 bp, Artificial Sequence
  Synthetic oligonucleotide; AAG chr11 5247572 5247591 5247575 -
atttgtacaacattaattgg

SEQ ID NO: 46429 - DNA, 20 bp, Artificial Sequence
  Synthetic oligonucleotide; AGG chr11 5247571 5247590 5247574 -
tttgtacaacattaattgga

SEQ ID NO: 46430 - DNA, 20 bp, Artificial Sequence
  Synthetic oligonucleotide; TGG chr11 5247559 5247578 5247562 -
taattggaaggcttacttaa

SEQ ID NO: 46431 - DNA, 20 bp, Artificial Sequence
  Synthetic oligonucleotide; TAG chr11 5247546 5247565 5247549 -
tacttaatggaatttttgta

SEQ ID NO: 46432 - DNA, 20 bp, Artificial Sequence
  Synthetic oligonucleotide; TGG chr11 5247542 5247561 5247545 -
taatggaatttttgtatagt

SEQ ID NO: 46433 - DNA, 20 bp, Artificial Sequence
  Synthetic oligonucleotide; TAG chr11 5247535 5247554 5247538 -
atttttgtatagttggatgt

SEQ ID NO: 46434 - DNA, 20 bp, Artificial Sequence
  Synthetic oligonucleotide; AAG chr11 5247521 5247540 5247524 -
ggatgttagtgcatctctat

SEQ ID NO: 46435 - DNA, 20 bp, Artificial Sequence
  Synthetic oligonucleotide; AAG chr11 5247517 5247536 5247520 -
gttagtgcatctctataagt

SEQ ID NO: 46436 - DNA, 20 bp, Artificial Sequence
  Synthetic oligonucleotide; GAG chr11 5247515 5247534 5247518 -
tagtgcatctctataagtaa

SEQ ID NO: 46437 - DNA, 20 bp, Artificial Sequence
  Synthetic oligonucleotide; TGG chr11 5247502 5247521 5247505 -
taagtaagagtttaatatga

SEQ ID NO: 46438 - DNA, 20 bp, Artificial Sequence
  Synthetic oligonucleotide; CGG chr11 5247494 5247513 5247497 -
agtttaatatgatggtgtta

SEQ ID NO: 46439 - DNA, 20 bp, Artificial Sequence
  Synthetic oligonucleotide; TGG chr11 5247426 5247445 5247429 -
ctcccaactgaccttatctg

SEQ ID NO: 46440 - DNA, 20 bp, Artificial Sequence
  Synthetic oligonucleotide; GGG chr11 5247425 5247444 5247428 -
tcccaactgaccttatctgt

SEQ ID NO: 46441 - DNA, 20 bp, Artificial Sequence
  Synthetic oligonucleotide; GGG chr11 5247424 5247443 5247427 -
cccaactgaccttatctgtg

SEQ ID NO: 46442 - DNA, 20 bp, Artificial Sequence
  Synthetic oligonucleotide; GGG chr11 5247423 5247442 5247426 -
ccaactgaccttatctgtgg

SEQ ID NO: 46443 - DNA, 20 bp, Artificial Sequence
  Synthetic oligonucleotide; GAG chr11 5247421 5247440 5247424 -
aactgaccttatctgtgggg

SEQ ID NO: 46444 - DNA, 20 bp, Artificial Sequence
  Synthetic oligonucleotide; AGG chr11 5247420 5247439 5247423 -
actgaccttatctgtggggg

SEQ ID NO: 46445 - DNA, 20 bp, Artificial Sequence
  Synthetic oligonucleotide; AAG chr11 5247409 5247428 5247412 -
ctgtgggggaggcttttgaa

SEQ ID NO: 46446 - DNA, 20 bp, Artificial Sequence
  Synthetic oligonucleotide; TAG chr11 5247402 5247421 5247405 -
ggaggcttttgaaaagtaat

SEQ ID NO: 46447 - DNA, 20 bp, Artificial Sequence
  Synthetic oligonucleotide; AGG chr11 5247401 5247420 5247404 -
gaggcttttgaaaagtaatt

SEQ ID NO: 46448 - DNA, 20 bp, Artificial Sequence
  Synthetic oligonucleotide; TAG chr11 5247396 5247415 5247399 -
ttttgaaaagtaattaggtt

SEQ ID NO: 46449 - DNA, 20 bp, Artificial Sequence
  Synthetic oligonucleotide; GAG chr11 5247391 5247410 5247394 -
aaaagtaattaggtttagat

SEQ ID NO: 46450 - DNA, 20 bp, Artificial Sequence
  Synthetic oligonucleotide; AAG chr11 5247383 5247402 5247386 -
ttaggtttagatgagctcat

SEQ ID NO: 46451 - DNA, 20 bp, Artificial Sequence
  Synthetic oligonucleotide; GAG chr11 5247381 5247400 5247384 -
aggtttagatgagctcataa

SEQ ID NO: 46452 - DNA, 20 bp, Artificial Sequence
  Synthetic oligonucleotide; CAG chr11 5247378 5247397 5247381 -
tttagatgagctcataagag

SEQ ID NO: 46453 - DNA, 20 bp, Artificial Sequence
  Synthetic oligonucleotide; CAG chr11 5247347 5247366 5247350 -
cataaaattattttccttat

SEQ ID NO: 46454 - DNA, 20 bp, Artificial Sequence
  Synthetic oligonucleotide; AAG chr11 5247344 5247363 5247347 -
aaaattattttccttatcag

SEQ ID NO: 46455 - DNA, 20 bp, Artificial Sequence
  Synthetic oligonucleotide; CAG chr11 5247341 5247360 5247344 -
attattttccttatcagaag

SEQ ID NO: 46456 - DNA, 20 bp, Artificial Sequence
  Synthetic oligonucleotide; GAG chr11 5247339 5247358 5247342 -
tattttccttatcagaagca

SEQ ID NO: 46457 - DNA, 20 bp, Artificial Sequence
  Synthetic oligonucleotide; GAG chr11 5247337 5247356 5247340 -
ttttccttatcagaagcaga

SEQ ID NO: 46458 - DNA, 20 bp, Artificial Sequence
  Synthetic oligonucleotide; AAG chr11 5247332 5247351 5247335 -
cttatcagaagcagagagac

SEQ ID NO: 46459 - DNA, 20 bp, Artificial Sequence
  Synthetic oligonucleotide; CGG chr11 5247312 5247331 5247315 -
aagccatttctctttcctcc

SEQ ID NO: 46460 - DNA, 20 bp, Artificial Sequence
  Synthetic oligonucleotide; GAG chr11 5247308 5247327 5247311 -
catttctctttcctcccggt

SEQ ID NO: 46461 - DNA, 20 bp, Artificial Sequence
  Synthetic oligonucleotide; AGG chr11 5247307 5247326 5247310 -
atttctctttcctcccggtg

SEQ ID NO: 46462 - DNA, 20 bp, Artificial Sequence
  Synthetic oligonucleotide; CAG chr11 5247301 5247320 5247304 -
ctttcctcccggtgaggaca

SEQ ID NO: 46463 - DNA, 20 bp, Artificial Sequence
  Synthetic oligonucleotide; GAG chr11 5247297 5247316 5247300 -
cctcccggtgaggacacagt

SEQ ID NO: 46464 - DNA, 20 bp, Artificial Sequence
  Synthetic oligonucleotide; AAG chr11 5247294 5247313 5247297 -
cccggtgaggacacagtgag

SEQ ID NO: 46465 - DNA, 20 bp, Artificial Sequence
  Synthetic oligonucleotide; CAG chr11 5247275 5247294 5247278 -
gaagtccgccatctgcaatc

SEQ ID NO: 46466 - DNA, 20 bp, Artificial Sequence
  Synthetic oligonucleotide; AGG chr11 5247274 5247293 5247277 -
aagtccgccatctgcaatcc

SEQ ID NO: 46467 - DNA, 20 bp, Artificial Sequence
  Synthetic oligonucleotide; AAG chr11 5247271 5247290 5247274 -
tccgccatctgcaatccagg

SEQ ID NO: 46468 - DNA, 20 bp, Artificial Sequence
  Synthetic oligonucleotide; GAG chr11 5247269 5247288 5247272 -
cgccatctgcaatccaggaa

SEQ ID NO: 46469 - DNA, 20 bp, Artificial Sequence
  Synthetic oligonucleotide; GAG chr11 5247254 5247273 5247257 -
aggaagagaaccctgaccac

SEQ ID NO: 46470 - DNA, 20 bp, Artificial Sequence
  Synthetic oligonucleotide; CAG chr11 5247250 5247269 5247253 -
agagaaccctgaccacgagt

SEQ ID NO: 46471 - DNA, 20 bp, Artificial Sequence
  Synthetic oligonucleotide; CAG chr11 5247243 5247262 5247246 -
cctgaccacgagtcagcctt

SEQ ID NO: 46472 - DNA, 20 bp, Artificial Sequence
  Synthetic oligonucleotide; GAG chr11 5247234 5247253 5247237 -
gagtcagccttcagaaatgt

SEQ ID NO: 46473 - DNA, 20 bp, Artificial Sequence
  Synthetic oligonucleotide; AAG chr11 5247214 5247233 5247217 -
gagaaaaaactctgttgttg

SEQ ID NO: 46474 - DNA, 20 bp, Artificial Sequence
  Synthetic oligonucleotide; CAG chr11 5247206 5247225 5247209 -
actctgttgttgaagccacc

SEQ ID NO: 46475 - DNA, 20 bp, Artificial Sequence
  Synthetic oligonucleotide; TAG chr11 5247186 5247205 5247189 -
cagtcttttgtattttgtta

SEQ ID NO: 46476 - DNA, 20 bp, Artificial Sequence
  Synthetic oligonucleotide; GAG chr11 5247172 5247191 5247175 -
ttgttatagcaccttgcact

SEQ ID NO: 46477 - DNA, 20 bp, Artificial Sequence
  Synthetic oligonucleotide; AAG chr11 5247168 5247187 5247171 -
tatagcaccttgcactgagt

SEQ ID NO: 46478 - DNA, 20 bp, Artificial Sequence
  Synthetic oligonucleotide; AGG chr11 5247167 5247186 5247170 -
atagcaccttgcactgagta

SEQ ID NO: 46479 - DNA, 20 bp, Artificial Sequence
  Synthetic oligonucleotide; CAG chr11 5247164 5247183 5247167 -
gcaccttgcactgagtaagg

SEQ ID NO: 46480 - DNA, 20 bp, Artificial Sequence
  Synthetic oligonucleotide; AAG chr11 5247158 5247177 5247161 -
tgcactgagtaaggcagatg

SEQ ID NO: 46481 - DNA, 20 bp, Artificial Sequence
  Synthetic oligonucleotide; AAG chr11 5247155 5247174 5247158 -
actgagtaaggcagatgaag

SEQ ID NO: 46482 - DNA, 20 bp, Artificial Sequence
  Synthetic oligonucleotide; AGG chr11 5247154 5247173 5247157 -
ctgagtaaggcagatgaaga

SEQ ID NO: 46483 - DNA, 20 bp, Artificial Sequence
  Synthetic oligonucleotide; GAG chr11 5247152 5247171 5247155 -
gagtaaggcagatgaagaag

SEQ ID NO: 46484 - DNA, 20 bp, Artificial Sequence
  Synthetic oligonucleotide; AAG chr11 5247141 5247160 5247144 -
atgaagaaggagaaaaaaat

SEQ ID NO: 46485 - DNA, 20 bp, Artificial Sequence
  Synthetic oligonucleotide; TGG chr11 5247136 5247155 5247139 -
gaaggagaaaaaaataagct

SEQ ID NO: 46486 - DNA, 20 bp, Artificial Sequence
  Synthetic oligonucleotide; GGG chr11 5247135 5247154 5247138 -
aaggagaaaaaaataagctt

SEQ ID NO: 46487 - DNA, 20 bp, Artificial Sequence
  Synthetic oligonucleotide; GAG chr11 5247128 5247147 5247131 -
aaaaaataagcttgggtttt

SEQ ID NO: 46488 - DNA, 20 bp, Artificial Sequence
  Synthetic oligonucleotide; TGG chr11 5247125 5247144 5247128 -
aaataagcttgggttttgag

SEQ ID NO: 46489 - DNA, 20 bp, Artificial Sequence
  Synthetic oligonucleotide; CAG chr11 5247118 5247137 5247121 -
cttgggttttgagtggacta

SEQ ID NO: 46490 - DNA, 20 bp, Artificial Sequence
  Synthetic oligonucleotide; CAG chr11 5247102 5247121 5247105 -
actacagaccatgtttatct

SEQ ID NO: 46491 - DNA, 20 bp, Artificial Sequence
  Synthetic oligonucleotide; AGG chr11 5247101 5247120 5247104 -
ctacagaccatgtttatctc

SEQ ID NO: 46492 - DNA, 20 bp, Artificial Sequence
  Synthetic oligonucleotide; AAG chr11 5247092 5247111 5247095 -
atgtttatctcaggtttgca

SEQ ID NO: 46493 - DNA, 20 bp, Artificial Sequence
  Synthetic oligonucleotide; CAG chr11 5247068 5247087 5247071 -
tcccctcgtcccctatgttt

SEQ ID NO: 46494 - DNA, 20 bp, Artificial Sequence
  Synthetic oligonucleotide; AAG chr11 5247033 5247052 5247036 -
actctactactctcatctat

SEQ ID NO: 46495 - DNA, 20 bp, Artificial Sequence
  Synthetic oligonucleotide; AAG chr11 5247019 5247038 5247022 -
atctataagacccaaataat

SEQ ID NO: 46496 - DNA, 20 bp, Artificial Sequence
  Synthetic oligonucleotide; TAG chr11 5246958 5246977 5246961 -
tacttcaacatgctttactc

SEQ ID NO: 46497 - DNA, 20 bp, Artificial Sequence
  Synthetic oligonucleotide; CAG chr11 5246935 5246954 5246938 -
ccttgtaatgtctttacata

SEQ ID NO: 46498 - DNA, 20 bp, Artificial Sequence
  Synthetic oligonucleotide; AAG chr11 5246923 5246942 5246926 -
tttacatacagtgaaatgta

SEQ ID NO: 46499 - DNA, 20 bp, Artificial Sequence
  Synthetic oligonucleotide; CAG chr11 5246883 5246902 5246886 -
ctttctttcttttttctcct

SEQ ID NO: 46500 - DNA, 20 bp, Artificial Sequence
  Synthetic oligonucleotide; CAG chr11 5246877 5246896 5246880 -
ttcttttttctcctcagcct

SEQ ID NO: 46501 - DNA, 20 bp, Artificial Sequence
  Synthetic oligonucleotide; TGG chr11 5246870 5246889 5246873 -
ttctcctcagcctcagaatt

SEQ ID NO: 46502 - DNA, 20 bp, Artificial Sequence
  Synthetic oligonucleotide; CAG chr11 5246848 5246867 5246851 -
gcacatgcccttccttcttt

SEQ ID NO: 46503 - DNA, 20 bp, Artificial Sequence
  Synthetic oligonucleotide; AGG chr11 5246847 5246866 5246850 -
cacatgcccttccttctttc

SEQ ID NO: 46504 - DNA, 20 bp, Artificial Sequence
  Synthetic oligonucleotide; TGG chr11 5246823 5246842 5246826 -
acttctccaacatctctgcc

SEQ ID NO: 46505 - DNA, 20 bp, Artificial Sequence
  Synthetic oligonucleotide; AAG chr11 5246805 5246824 5246808 -
cctggctccatcatatcata

SEQ ID NO: 46506 - DNA, 20 bp, Artificial Sequence
  Synthetic oligonucleotide; AGG chr11 5246804 5246823 5246807 -
ctggctccatcatatcataa

SEQ ID NO: 46507 - DNA, 20 bp, Artificial Sequence
  Synthetic oligonucleotide; CAG chr11 5246787 5246806 5246790 -
taaaggtcccacttcaaatg

SEQ ID NO: 46508 - DNA, 20 bp, Artificial Sequence
  Synthetic oligonucleotide; CAG chr11 5246772 5246791 5246775 -
aaatgcagtcactaccgttt

SEQ ID NO: 46509 - DNA, 20 bp, Artificial Sequence
  Synthetic oligonucleotide; AAG chr11 5246730 5246749 5246733 -
ttttgttttttgtttttttt

SEQ ID NO: 46510 - DNA, 20 bp, Artificial Sequence
  Synthetic oligonucleotide; AAG chr11 5246724 5246743 5246727 -
tttttgttttttttaagtca

SEQ ID NO: 46511 - DNA, 20 bp, Artificial Sequence
  Synthetic oligonucleotide; GAG chr11 5246711 5246730 5246714 -
taagtcaaagcaaatttctt

SEQ ID NO: 46512 - DNA, 20 bp, Artificial Sequence
  Synthetic oligonucleotide; GAG chr11 5246709 5246728 5246712 -
agtcaaagcaaatttcttga

SEQ ID NO: 46513 - DNA, 20 bp, Artificial Sequence
  Synthetic oligonucleotide; GAG chr11 5246707 5246726 5246710 -
tcaaagcaaatttcttgaga

SEQ ID NO: 46514 - DNA, 20 bp, Artificial Sequence
  Synthetic oligonucleotide; AAG chr11 5246702 5246721 5246705 -
gcaaatttcttgagagagta

SEQ ID NO: 46515 - DNA, 20 bp, Artificial Sequence
  Synthetic oligonucleotide; TAG chr11 5246677 5246696 5246680 -
ataaacgaatgactactgca

SEQ ID NO: 46516 - DNA, 20 bp, Artificial Sequence
  Synthetic oligonucleotide; AGG chr11 5246676 5246695 5246679 -
taaacgaatgactactgcat

SEQ ID NO: 46517 - DNA, 20 bp, Artificial Sequence
  Synthetic oligonucleotide; CAG chr11 5246673 5246692 5246676 -
acgaatgactactgcatagg

SEQ ID NO: 46518 - DNA, 20 bp, Artificial Sequence
  Synthetic oligonucleotide; GAG chr11 5246671 5246690 5246674 -
gaatgactactgcataggca

SEQ ID NO: 46519 - DNA, 20 bp, Artificial Sequence
  Synthetic oligonucleotide; CAG chr11 5246668 5246687 5246671 -
tgactactgcataggcagag

SEQ ID NO: 46520 - DNA, 20 bp, Artificial Sequence
  Synthetic oligonucleotide; GAG chr11 5246661 5246680 5246664 -
tgcataggcagagcagcccc

SEQ ID NO: 46521 - DNA, 20 bp, Artificial Sequence
  Synthetic oligonucleotide; AGG chr11 5246660 5246679 5246663 -
gcataggcagagcagccccg

SEQ ID NO: 46522 - DNA, 20 bp, Artificial Sequence
  Synthetic oligonucleotide; GGG chr11 5246659 5246678 5246662 -
cataggcagagcagccccga

SEQ ID NO: 46523 - DNA, 20 bp, Artificial Sequence
  Synthetic oligonucleotide; TGG chr11 5246652 5246671 5246655 -
agagcagccccgagggccgc

SEQ ID NO: 46524 - DNA, 20 bp, Artificial Sequence
  Synthetic oligonucleotide; TGG chr11 5246637 5246656 5246640 -
gccgctggttgttcctttta

SEQ ID NO: 46525 - DNA, 20 bp, Artificial Sequence
  Synthetic oligonucleotide; AAG chr11 5246610 5246629 5246613 -
ttcttgatgatatgttaaac

SEQ ID NO: 46526 - DNA, 20 bp, Artificial Sequence
  Synthetic oligonucleotide; TGG chr11 5246604 5246623 5246607 -
atgatatgttaaacaagttt

SEQ ID NO: 46527 - DNA, 20 bp, Artificial Sequence
  Synthetic oligonucleotide; TAG chr11 5246580 5246599 5246583 -
ttatttatgccttctctttt

SEQ ID NO: 46528 - DNA, 20 bp, Artificial Sequence
  Synthetic oligonucleotide; AGG chr11 5246579 5246598 5246582 -
tatttatgccttctcttttt

SEQ ID NO: 46529 - DNA, 20 bp, Artificial Sequence
  Synthetic oligonucleotide; TAG chr11 5246571 5246590 5246574 -
ccttctctttttaggccata

SEQ ID NO: 46530 - DNA, 20 bp, Artificial Sequence
  Synthetic oligonucleotide; AGG chr11 5246570 5246589 5246573 -
cttctctttttaggccatat

SEQ ID NO: 46531 - DNA, 20 bp, Artificial Sequence
  Synthetic oligonucleotide; GGG chr11 5246569 5246588 5246572 -
ttctctttttaggccatata

SEQ ID NO: 46532 - DNA, 20 bp, Artificial Sequence
  Synthetic oligonucleotide; TGG chr11 5246547 5246566 5246550 -
gtaactttctgacattgcca

SEQ ID NO: 46533 - DNA, 20 bp, Artificial Sequence
  Synthetic oligonucleotide; CAG chr11 5246506 5246525 5246509 -
atttactgttaccttaaatt

SEQ ID NO: 46534 - DNA, 20 bp, Artificial Sequence
  Synthetic oligonucleotide; AGG chr11 5246505 5246524 5246508 -
tttactgttaccttaaattc

SEQ ID NO: 46535 - DNA, 20 bp, Artificial Sequence
  Synthetic oligonucleotide; GGG chr11 5246504 5246523 5246507 -
ttactgttaccttaaattca

SEQ ID NO: 46536 - DNA, 20 bp, Artificial Sequence
  Synthetic oligonucleotide; GGG chr11 5246503 5246522 5246506 -
tactgttaccttaaattcag

SEQ ID NO: 46537 - DNA, 20 bp, Artificial Sequence
  Synthetic oligonucleotide; CAG chr11 5246492 5246511 5246495 -
taaattcaggggtacacgta

SEQ ID NO: 46538 - DNA, 20 bp, Artificial Sequence
  Synthetic oligonucleotide; AGG chr11 5246491 5246510 5246494 -
aaattcaggggtacacgtac

SEQ ID NO: 46539 - DNA, 20 bp, Artificial Sequence
  Synthetic oligonucleotide; CAG chr11 5246483 5246502 5246486 -
gggtacacgtacaggatatg

SEQ ID NO: 46540 - DNA, 20 bp, Artificial Sequence
  Synthetic oligonucleotide; AGG chr11 5246482 5246501 5246485 -
ggtacacgtacaggatatgc

SEQ ID NO: 46541 - DNA, 20 bp, Artificial Sequence
  Synthetic oligonucleotide; TAG chr11 5246470 5246489 5246473 -
ggatatgcaggtttgtttta

SEQ ID NO: 46542 - DNA, 20 bp, Artificial Sequence
  Synthetic oligonucleotide; AGG chr11 5246469 5246488 5246472 -
gatatgcaggtttgttttat

SEQ ID NO: 46543 - DNA, 20 bp, Artificial Sequence
  Synthetic oligonucleotide; AAG chr11 5246463 5246482 5246466 -
caggtttgttttataggtaa

SEQ ID NO: 46544 - DNA, 20 bp, Artificial Sequence
  Synthetic oligonucleotide; TGG chr11 5246453 5246472 5246456 -
ttataggtaaaagtgtgcca

SEQ ID NO: 46545 - DNA, 20 bp, Artificial Sequence
  Synthetic oligonucleotide; TGG chr11 5246444 5246463 5246447 -
aaagtgtgccatggttttaa

SEQ ID NO: 46546 - DNA, 20 bp, Artificial Sequence
  Synthetic oligonucleotide; GGG chr11 5246443 5246462 5246446 -
aagtgtgccatggttttaat

SEQ ID NO: 46547 - DNA, 20 bp, Artificial Sequence
  Synthetic oligonucleotide; AAG chr11 5246424 5246443 5246427 -
tgggttttttttttcttgta

SEQ ID NO: 46548 - DNA, 20 bp, Artificial Sequence
  Synthetic oligonucleotide; AAG chr11 5246415 5246434 5246418 -
tttttcttgtaaagttgttt

SEQ ID NO: 46549 - DNA, 20 bp, Artificial Sequence
  Synthetic oligonucleotide; TGG chr11 5246398 5246417 5246401 -
tttaagtttcttgtttactc

SEQ ID NO: 46550 - DNA, 20 bp, Artificial Sequence
  Synthetic oligonucleotide; TAG chr11 5246391 5246410 5246394 -
ttcttgtttactctggatat

SEQ ID NO: 46551 - DNA, 20 bp, Artificial Sequence
  Synthetic oligonucleotide; AGG chr11 5246390 5246409 5246393 -
tcttgtttactctggatatt

SEQ ID NO: 46552 - DNA, 20 bp, Artificial Sequence
  Synthetic oligonucleotide; CAG chr11 5246380 5246399 5246383 -
tctggatattaggcctttgt

SEQ ID NO: 46553 - DNA, 20 bp, Artificial Sequence
  Synthetic oligonucleotide; AAG chr11 5246377 5246396 5246380 -
ggatattaggcctttgtcag

SEQ ID NO: 46554 - DNA, 20 bp, Artificial Sequence
  Synthetic oligonucleotide; TAG chr11 5246372 5246391 5246375 -
ttaggcctttgtcagaagaa

SEQ ID NO: 46555 - DNA, 20 bp, Artificial Sequence
  Synthetic oligonucleotide; TGG chr11 5246367 5246386 5246370 -
cctttgtcagaagaatagat

SEQ ID NO: 46556 - DNA, 20 bp, Artificial Sequence
  Synthetic oligonucleotide; TAG chr11 5246344 5246363 5246347 -
aaaatctttttcccattctg

SEQ ID NO: 46557 - DNA, 20 bp, Artificial Sequence
  Synthetic oligonucleotide; TGG chr11 5246324 5246343 5246327 -
tagattgtctttcgctctga

SEQ ID NO: 46558 - DNA, 20 bp, Artificial Sequence
  Synthetic oligonucleotide; TAG chr11 5246321 5246340 5246324 -
attgtctttcgctctgatgg

SEQ ID NO: 46559 - DNA, 20 bp, Artificial Sequence
  Synthetic oligonucleotide; GAG chr11 5246307 5246326 5246310 -
tgatggtagtttcttttgct

SEQ ID NO: 46560 - DNA, 20 bp, Artificial Sequence
  Synthetic oligonucleotide; CAG chr11 5246304 5246323 5246307 -
tggtagtttcttttgctgag

SEQ ID NO: 46561 - DNA, 20 bp, Artificial Sequence
  Synthetic oligonucleotide; AGG chr11 5246303 5246322 5246306 -
ggtagtttcttttgctgagc

SEQ ID NO: 46562 - DNA, 20 bp, Artificial Sequence
  Synthetic oligonucleotide; GAG chr11 5246301 5246320 5246304 -
tagtttcttttgctgagcag

SEQ ID NO: 46563 - DNA, 20 bp, Artificial Sequence
  Synthetic oligonucleotide; TAG chr11 5246293 5246312 5246296 -
tttgctgagcaggagctctt

SEQ ID NO: 46564 - DNA, 20 bp, Artificial Sequence
  Synthetic oligonucleotide; TAG chr11 5246284 5246303 5246287 -
caggagctctttagtttaat

SEQ ID NO: 46565 - DNA, 20 bp, Artificial Sequence
  Synthetic oligonucleotide; TGG chr11 5246274 5246293 5246277 -
ttagtttaattagattccat

SEQ ID NO: 46566 - DNA, 20 bp, Artificial Sequence
  Synthetic oligonucleotide; TAG chr11 5246198 5246217 5246201 -
gcccgtgtttatatcatgaa

SEQ ID NO: 46567 - DNA, 20 bp, Artificial Sequence
  Synthetic oligonucleotide; TAG chr11 5246176 5246195 5246179 -
gtattgccttgatttttttc

SEQ ID NO: 46568 - DNA, 20 bp, Artificial Sequence
  Synthetic oligonucleotide; AGG chr11 5246175 5246194 5246178 -
tattgccttgatttttttct

SEQ ID NO: 46569 - DNA, 20 bp, Artificial Sequence
  Synthetic oligonucleotide; TAG chr11 5246165 5246184 5246168 -
atttttttctaggcttttta

SEQ ID NO: 46570 - DNA, 20 bp, Artificial Sequence
  Synthetic oligonucleotide; TGG chr11 5246160 5246179 5246163 -
tttctaggctttttatagtt

SEQ ID NO: 46571 - DNA, 20 bp, Artificial Sequence
  Synthetic oligonucleotide; GGG chr11 5246159 5246178 5246162 -
ttctaggctttttatagttt

SEQ ID NO: 46572 - DNA, 20 bp, Artificial Sequence
  Synthetic oligonucleotide; GGG chr11 5246158 5246177 5246161 -
tctaggctttttatagtttg

SEQ ID NO: 46573 - DNA, 20 bp, Artificial Sequence
  Synthetic oligonucleotide; AAG chr11 5246145 5246164 5246148 -
tagtttggggtttttcattt

SEQ ID NO: 46574 - DNA, 20 bp, Artificial Sequence
  Synthetic oligonucleotide; TGG chr11 5246129 5246148 5246132 -
atttaagtctctaatccatc

SEQ ID NO: 46575 - DNA, 20 bp, Artificial Sequence
  Synthetic oligonucleotide; GAG chr11 5246127 5246146 5246130 -
ttaagtctctaatccatctg

SEQ ID NO: 46576 - DNA, 20 bp, Artificial Sequence
  Synthetic oligonucleotide; TGG chr11 5246117 5246136 5246120 -
aatccatctggagttaattt

SEQ ID NO: 46577 - DNA, 20 bp, Artificial Sequence
  Synthetic oligonucleotide; AAG chr11 5246112 5246131 5246115 -
atctggagttaattttggat

SEQ ID NO: 46578 - DNA, 20 bp, Artificial Sequence
  Synthetic oligonucleotide; AGG chr11 5246111 5246130 5246114 -
tctggagttaattttggata

SEQ ID NO: 46579 - DNA, 20 bp, Artificial Sequence
  Synthetic oligonucleotide; AAG chr11 5246105 5246124 5246108 -
gttaattttggataaggtat

SEQ ID NO: 46580 - DNA, 20 bp, Artificial Sequence
  Synthetic oligonucleotide; AGG chr11 5246104 5246123 5246107 -
ttaattttggataaggtata

SEQ ID NO: 46581 - DNA, 20 bp, Artificial Sequence
  Synthetic oligonucleotide; AAG chr11 5246101 5246120 5246104 -
attttggataaggtataagg

SEQ ID NO: 46582 - DNA, 20 bp, Artificial Sequence
  Synthetic oligonucleotide; AGG chr11 5246100 5246119 5246103 -
ttttggataaggtataagga

SEQ ID NO: 46583 - DNA, 20 bp, Artificial Sequence
  Synthetic oligonucleotide; GAG chr11 5246098 5246117 5246101 -
ttggataaggtataaggaag

SEQ ID NO: 46584 - DNA, 20 bp, Artificial Sequence
  Synthetic oligonucleotide; CAG chr11 5246093 5246112 5246096 -
taaggtataaggaaggagtc

SEQ ID NO: 46585 - DNA, 20 bp, Artificial Sequence
  Synthetic oligonucleotide; CAG chr11 5246080 5246099 5246083 -
aggagtccagtttcattttt

SEQ ID NO: 46586 - DNA, 20 bp, Artificial Sequence
  Synthetic oligonucleotide; TGG chr11 5246073 5246092 5246076 -
cagtttcatttttcagcata

SEQ ID NO: 46587 - DNA, 20 bp, Artificial Sequence
  Synthetic oligonucleotide; TAG chr11 5246069 5246088 5246072 -
ttcatttttcagcatatggc

SEQ ID NO: 46588 - DNA, 20 bp, Artificial Sequence
  Synthetic oligonucleotide; CAG chr11 5246065 5246084 5246068 -
tttttcagcatatggctagc

SEQ ID NO: 46589 - DNA, 20 bp, Artificial Sequence
  Synthetic oligonucleotide; CAG chr11 5246008 5246027 5246011 -
tccccattgcttgcttttgt

SEQ ID NO: 46590 - DNA, 20 bp, Artificial Sequence
  Synthetic oligonucleotide; AGG chr11 5246007 5246026 5246010 -
ccccattgcttgcttttgtc

SEQ ID NO: 46591 - DNA, 20 bp, Artificial Sequence
  Synthetic oligonucleotide; AAG chr11 5245997 5246016 5246000 -
tgcttttgtcaggtttctaa

SEQ ID NO: 46592 - DNA, 20 bp, Artificial Sequence
  Synthetic oligonucleotide; CAG chr11 5245992 5246011 5245995 -
ttgtcaggtttctaaaagac

SEQ ID NO: 46593 - DNA, 20 bp, Artificial Sequence
  Synthetic oligonucleotide; TGG chr11 5245988 5246007 5245991 -
caggtttctaaaagaccaga

SEQ ID NO: 46594 - DNA, 20 bp, Artificial Sequence
  Synthetic oligonucleotide; TAG chr11 5245982 5246001 5245985 -
tctaaaagaccagatggttg

SEQ ID NO: 46595 - DNA, 20 bp, Artificial Sequence
  Synthetic oligonucleotide; AGG chr11 5245981 5246000 5245984 -
ctaaaagaccagatggttgt

SEQ ID NO: 46596 - DNA, 20 bp, Artificial Sequence
  Synthetic oligonucleotide; CAG chr11 5245969 5245988 5245972 -
atggttgtaggtacaatatg

SEQ ID NO: 46597 - DNA, 20 bp, Artificial Sequence
  Synthetic oligonucleotide; AAG chr11 5245959 5245978 5245962 -
gtacaatatgcagtttcttc

SEQ ID NO: 46598 - DNA, 20 bp, Artificial Sequence
  Synthetic oligonucleotide; TAG chr11 5245914 5245933 5245917 -
tcttattaattcatttcttt

SEQ ID NO: 46599 - DNA, 20 bp, Artificial Sequence
  Synthetic oligonucleotide; TGG chr11 5245902 5245921 5245905 -
atttcttttagtatgtatgc

SEQ ID NO: 46600 - DNA, 20 bp, Artificial Sequence
  Synthetic oligonucleotide; TAG chr11 5245883 5245902 5245886 -
ctggtctcctctgctcacta

SEQ ID NO: 46601 - DNA, 20 bp, Artificial Sequence
  Synthetic oligonucleotide; GAG chr11 5245879 5245898 5245882 -
tctcctctgctcactatagt

SEQ ID NO: 46602 - DNA, 20 bp, Artificial Sequence
  Synthetic oligonucleotide; AGG chr11 5245878 5245897 5245881 -
ctcctctgctcactatagtg

SEQ ID NO: 46603 - DNA, 20 bp, Artificial Sequence
  Synthetic oligonucleotide; GGG chr11 5245877 5245896 5245880 -
tcctctgctcactatagtga

SEQ ID NO: 46604 - DNA, 20 bp, Artificial Sequence
  Synthetic oligonucleotide; TAG chr11 5245868 5245887 5245871 -
cactatagtgagggcaccat

SEQ ID NO: 46605 - DNA, 20 bp, Artificial Sequence
  Synthetic oligonucleotide; CAG chr11 5245864 5245883 5245867 -
atagtgagggcaccattagc

SEQ ID NO: 46606 - DNA, 20 bp, Artificial Sequence
  Synthetic oligonucleotide; GAG chr11 5245862 5245881 5245865 -
agtgagggcaccattagcca

SEQ ID NO: 46607 - DNA, 20 bp, Artificial Sequence
  Synthetic oligonucleotide; TAG chr11 5245847 5245866 5245850 -
agccagagaatctgtctgtc

SEQ ID NO: 46608 - DNA, 20 bp, Artificial Sequence
  Synthetic oligonucleotide; AAG chr11 5245837 5245856 5245840 -
tctgtctgtctagttcatgt

SEQ ID NO: 46609 - DNA, 20 bp, Artificial Sequence
  Synthetic oligonucleotide; CAG chr11 5245829 5245848 5245832 -
tctagttcatgtaagattct

SEQ ID NO: 46610 - DNA, 20 bp, Artificial Sequence
  Synthetic oligonucleotide; AAG chr11 5245822 5245841 5245825 -
catgtaagattctcagaatt

SEQ ID NO: 46611 - DNA, 20 bp, Artificial Sequence
  Synthetic oligonucleotide; TGG chr11 5245814 5245833 5245817 -
attctcagaattaagaaaaa

SEQ ID NO: 46612 - DNA, 20 bp, Artificial Sequence
  Synthetic oligonucleotide; TGG chr11 5245810 5245829 5245813 -
tcagaattaagaaaaatgga

SEQ ID NO: 46613 - DNA, 20 bp, Artificial Sequence
  Synthetic oligonucleotide; TGG chr11 5245789 5245808 5245792 -
ggcatatgaatgaaacttca

SEQ ID NO: 46614 - DNA, 20 bp, Artificial Sequence
  Synthetic oligonucleotide; TGG chr11 5245778 5245797 5245781 -
gaaacttcatggatgacata

SEQ ID NO: 46615 - DNA, 20 bp, Artificial Sequence
  Synthetic oligonucleotide; AAG chr11 5245744 5245763 5245747 -
tatttgttgaattaatgcat

SEQ ID NO: 46616 - DNA, 20 bp, Artificial Sequence
  Synthetic oligonucleotide; CAG chr11 5245735 5245754 5245738 -
aattaatgcataagatgcaa

SEQ ID NO: 46617 - DNA, 20 bp, Artificial Sequence
  Synthetic oligonucleotide; GAG chr11 5245733 5245752 5245736 -
ttaatgcataagatgcaaca

SEQ ID NO: 46618 - DNA, 20 bp, Artificial Sequence
  Synthetic oligonucleotide; GAG chr11 5245731 5245750 5245734 -
aatgcataagatgcaacaga

SEQ ID NO: 46619 - DNA, 20 bp, Artificial Sequence
  Synthetic oligonucleotide; AAG chr11 5245728 5245747 5245731 -
gcataagatgcaacagagag

SEQ ID NO: 46620 - DNA, 20 bp, Artificial Sequence
  Synthetic oligonucleotide; TGG chr11 5245704 5245723 5245707 -
tgacaactgcaatgataacc

SEQ ID NO: 46621 - DNA, 20 bp, Artificial Sequence
  Synthetic oligonucleotide; AAG chr11 5245689 5245708 5245692 -
taacctggtattgatgatat

SEQ ID NO: 46622 - DNA, 20 bp, Artificial Sequence
  Synthetic oligonucleotide; GAG chr11 5245687 5245706 5245690 -
acctggtattgatgatataa

SEQ ID NO: 46623 - DNA, 20 bp, Artificial Sequence
  Synthetic oligonucleotide; TAG chr11 5245680 5245699 5245683 -
attgatgatataagagtcta

SEQ ID NO: 46624 - DNA, 20 bp, Artificial Sequence
  Synthetic oligonucleotide; CAG chr11 5245673 5245692 5245676 -
atataagagtctatagatca

SEQ ID NO: 46625 - DNA, 20 bp, Artificial Sequence
  Synthetic oligonucleotide; TAG chr11 5245670 5245689 5245673 -
taagagtctatagatcacag

SEQ ID NO: 46626 - DNA, 20 bp, Artificial Sequence
  Synthetic oligonucleotide; AAG chr11 5245667 5245686 5245670 -
gagtctatagatcacagtag

SEQ ID NO: 46627 - DNA, 20 bp, Artificial Sequence
  Synthetic oligonucleotide; TGG chr11 5245655 5245674 5245658 -
cacagtagaagcaataatca

SEQ ID NO: 46628 - DNA, 20 bp, Artificial Sequence
  Synthetic oligonucleotide; TGG chr11 5245644 5245663 5245647 -
caataatcatggaaaacaat

SEQ ID NO: 46629 - DNA, 20 bp, Artificial Sequence
  Synthetic oligonucleotide; TGG chr11 5245638 5245657 5245641 -
tcatggaaaacaattggaaa

SEQ ID NO: 46630 - DNA, 20 bp, Artificial Sequence
  Synthetic oligonucleotide; GGG chr11 5245637 5245656 5245640 -
catggaaaacaattggaaat

SEQ ID NO: 46631 - DNA, 20 bp, Artificial Sequence
  Synthetic oligonucleotide; GGG chr11 5245636 5245655 5245639 -
atggaaaacaattggaaatg

SEQ ID NO: 46632 - DNA, 20 bp, Artificial Sequence
  Synthetic oligonucleotide; CAG chr11 5245631 5245650 5245634 -
aaacaattggaaatggggaa

SEQ ID NO: 46633 - DNA, 20 bp, Artificial Sequence
  Synthetic oligonucleotide; AAG chr11 5245620 5245639 5245623 -
aatggggaacagccacaaac

SEQ ID NO: 46634 - DNA, 20 bp, Artificial Sequence
  Synthetic oligonucleotide; AAG chr11 5245616 5245635 5245619 -
gggaacagccacaaacaaga

SEQ ID NO: 46635 - DNA, 20 bp, Artificial Sequence
  Synthetic oligonucleotide; CAG chr11 5245601 5245620 5245604 -
caagaaagaatcaatacttc

SEQ ID NO: 46636 - DNA, 20 bp, Artificial Sequence
  Synthetic oligonucleotide; AGG chr11 5245600 5245619 5245603 -
aagaaagaatcaatacttcc

SEQ ID NO: 46637 - DNA, 20 bp, Artificial Sequence
  Synthetic oligonucleotide; AAG chr11 5245596 5245615 5245599 -
aagaatcaatacttccagga

SEQ ID NO: 46638 - DNA, 20 bp, Artificial Sequence
  Synthetic oligonucleotide; CAG chr11 5245587 5245606 5245590 -
tacttccaggaaagtgactg

SEQ ID NO: 46639 - DNA, 20 bp, Artificial Sequence
  Synthetic oligonucleotide; AGG chr11 5245586 5245605 5245589 -
acttccaggaaagtgactgc

SEQ ID NO: 46640 - DNA, 20 bp, Artificial Sequence
  Synthetic oligonucleotide; TGG chr11 5245573 5245592 5245576 -
tgactgcaggtcacttttcc

SEQ ID NO: 46641 - DNA, 20 bp, Artificial Sequence
  Synthetic oligonucleotide; GAG chr11 5245571 5245590 5245574 -
actgcaggtcacttttcctg

SEQ ID NO: 46642 - DNA, 20 bp, Artificial Sequence
  Synthetic oligonucleotide; CGG chr11 5245568 5245587 5245571 -
gcaggtcacttttcctggag

SEQ ID NO: 46643 - DNA, 20 bp, Artificial Sequence
  Synthetic oligonucleotide; GGG chr11 5245567 5245586 5245570 -
caggtcacttttcctggagc

SEQ ID NO: 46644 - DNA, 20 bp, Artificial Sequence
  Synthetic oligonucleotide; GAG chr11 5245563 5245582 5245566 -
tcacttttcctggagcgggt

SEQ ID NO: 46645 - DNA, 20 bp, Artificial Sequence
  Synthetic oligonucleotide; GAG chr11 5245561 5245580 5245564 -
acttttcctggagcgggtga

SEQ ID NO: 46646 - DNA, 20 bp, Artificial Sequence
  Synthetic oligonucleotide; AAG chr11 5245556 5245575 5245559 -
tcctggagcgggtgagagaa

SEQ ID NO: 46647 - DNA, 20 bp, Artificial Sequence
  Synthetic oligonucleotide; TGG chr11 5245553 5245572 5245556 -
tggagcgggtgagagaaaag

SEQ ID NO: 46648 - DNA, 20 bp, Artificial Sequence
  Synthetic oligonucleotide; AAG chr11 5245550 5245569 5245553 -
agcgggtgagagaaaagtgg

SEQ ID NO: 46649 - DNA, 20 bp, Artificial Sequence
  Synthetic oligonucleotide; TAG chr11 5245546 5245565 5245549 -
ggtgagagaaaagtggaagt

SEQ ID NO: 46650 - DNA, 20 bp, Artificial Sequence
  Synthetic oligonucleotide; CAG chr11 5245543 5245562 5245546 -
gagagaaaagtggaagttag

SEQ ID NO: 46651 - DNA, 20 bp, Artificial Sequence
  Synthetic oligonucleotide; TGG chr11 5245525 5245544 5245528 -
agcagtaactgctgaattcc

SEQ ID NO: 46652 - DNA, 20 bp, Artificial Sequence
  Synthetic oligonucleotide; TGG chr11 5245521 5245540 5245524 -
gtaactgctgaattcctggt

SEQ ID NO: 46653 - DNA, 20 bp, Artificial Sequence
  Synthetic oligonucleotide; TGG chr11 5245514 5245533 5245517 -
ctgaattcctggttggctga

SEQ ID NO: 46654 - DNA, 20 bp, Artificial Sequence
  Synthetic oligonucleotide; AAG chr11 5245510 5245529 5245513 -
attcctggttggctgatgga

SEQ ID NO: 46655 - DNA, 20 bp, Artificial Sequence
  Synthetic oligonucleotide; TGG chr11 5245506 5245525 5245509 -
ctggttggctgatggaaaga

SEQ ID NO: 46656 - DNA, 20 bp, Artificial Sequence
  Synthetic oligonucleotide; GGG chr11 5245505 5245524 5245508 -
tggttggctgatggaaagat

SEQ ID NO: 46657 - DNA, 20 bp, Artificial Sequence
  Synthetic oligonucleotide; GGG chr11 5245504 5245523 5245507 -
ggttggctgatggaaagatg

SEQ ID NO: 46658 - DNA, 20 bp, Artificial Sequence
  Synthetic oligonucleotide; CAG chr11 5245501 5245520 5245504 -
tggctgatggaaagatgggg

SEQ ID NO: 46659 - DNA, 20 bp, Artificial Sequence
  Synthetic oligonucleotide; TGG chr11 5245490 5245509 5245493 -
aagatggggcagctgttcac

SEQ ID NO: 46660 - DNA, 20 bp, Artificial Sequence
  Synthetic oligonucleotide; CAG chr11 5245483 5245502 5245486 -
ggcagctgttcactggtacg

SEQ ID NO: 46661 - DNA, 20 bp, Artificial Sequence
  Synthetic oligonucleotide; AGG chr11 5245482 5245501 5245485 -
gcagctgttcactggtacgc

SEQ ID NO: 46662 - DNA, 20 bp, Artificial Sequence
  Synthetic oligonucleotide; GGG chr11 5245481 5245500 5245484 -
cagctgttcactggtacgca

SEQ ID NO: 46663 - DNA, 20 bp, Artificial Sequence
  Synthetic oligonucleotide; TAG chr11 5245475 5245494 5245478 -
ttcactggtacgcagggttt

SEQ ID NO: 46664 - DNA, 20 bp, Artificial Sequence
  Synthetic oligonucleotide; AAG chr11 5245460 5245479 5245463 -
ggttttagatgtatgtacct

SEQ ID NO: 46665 - DNA, 20 bp, Artificial Sequence
  Synthetic oligonucleotide; AGG chr11 5245459 5245478 5245462 -
gttttagatgtatgtaccta

SEQ ID NO: 46666 - DNA, 20 bp, Artificial Sequence
  Synthetic oligonucleotide; GAG chr11 5245452 5245471 5245455 -
atgtatgtacctaaggatat

SEQ ID NO: 46667 - DNA, 20 bp, Artificial Sequence
  Synthetic oligonucleotide; AGG chr11 5245451 5245470 5245454 -
tgtatgtacctaaggatatg

SEQ ID NO: 46668 - DNA, 20 bp, Artificial Sequence
  Synthetic oligonucleotide; TGG chr11 5245446 5245465 5245449 -
gtacctaaggatatgaggta

SEQ ID NO: 46669 - DNA, 20 bp, Artificial Sequence
  Synthetic oligonucleotide; CAG chr11 5245436 5245455 5245439 -
atatgaggtatggcaatgaa

SEQ ID NO: 46670 - DNA, 20 bp, Artificial Sequence
  Synthetic oligonucleotide; TGG chr11 5245424 5245443 5245427 -
gcaatgaacagaaattcttt

SEQ ID NO: 46671 - DNA, 20 bp, Artificial Sequence
  Synthetic oligonucleotide; GGG chr11 5245423 5245442 5245426 -
caatgaacagaaattctttt

SEQ ID NO: 46672 - DNA, 20 bp, Artificial Sequence
  Synthetic oligonucleotide; GAG chr11 5245417 5245436 5245420 -
acagaaattcttttgggaat

SEQ ID NO: 46673 - DNA, 20 bp, Artificial Sequence
  Synthetic oligonucleotide; TAG chr11 5245411 5245430 5245414 -
attcttttgggaatgagttt

SEQ ID NO: 46674 - DNA, 20 bp, Artificial Sequence
  Synthetic oligonucleotide; AGG chr11 5245410 5245429 5245413 -
ttcttttgggaatgagtttt

SEQ ID NO: 46675 - DNA, 20 bp, Artificial Sequence
  Synthetic oligonucleotide; GGG chr11 5245409 5245428 5245412 -
tcttttgggaatgagtttta

SEQ ID NO: 46676 - DNA, 20 bp, Artificial Sequence
  Synthetic oligonucleotide; AAG chr11 5245400 5245419 5245403 -
aatgagttttagggccatta

SEQ ID NO: 46677 - DNA, 20 bp, Artificial Sequence
  Synthetic oligonucleotide; AGG chr11 5245399 5245418 5245402 -
atgagttttagggccattaa

SEQ ID NO: 46678 - DNA, 20 bp, Artificial Sequence
  Synthetic oligonucleotide; AAG chr11 5245386 5245405 5245389 -
ccattaaaggacatgacctg

SEQ ID NO: 46679 - DNA, 20 bp, Artificial Sequence
  Synthetic oligonucleotide; GAG chr11 5245375 5245394 5245378 -
catgacctgaagtttcctct

SEQ ID NO: 46680 - DNA, 20 bp, Artificial Sequence
  Synthetic oligonucleotide; AGG chr11 5245374 5245393 5245377 -
atgacctgaagtttcctctg

SEQ ID NO: 46681 - DNA, 20 bp, Artificial Sequence
  Synthetic oligonucleotide; CAG chr11 5245370 5245389 5245373 -
cctgaagtttcctctgaggc

SEQ ID NO: 46682 - DNA, 20 bp, Artificial Sequence
  Synthetic oligonucleotide; TAG chr11 5245332 5245351 5245335 -
ataaatgtgtttcctgcata

SEQ ID NO: 46683 - DNA, 20 bp, Artificial Sequence
  Synthetic oligonucleotide; AAG chr11 5245326 5245345 5245329 -
gtgtttcctgcatatagtca

SEQ ID NO: 46684 - DNA, 20 bp, Artificial Sequence
  Synthetic oligonucleotide; AAG chr11 5245282 5245301 5245285 -
atcatcgatctctgctctta

SEQ ID NO: 46685 - DNA, 20 bp, Artificial Sequence
  Synthetic oligonucleotide; TGG chr11 5245272 5245291 5245275 -
tctgctcttaaagataatct

SEQ ID NO: 46686 - DNA, 20 bp, Artificial Sequence
  Synthetic oligonucleotide; AAG chr11 5245224 5245243 5245227 -
caaactttccccatgttcct

SEQ ID NO: 46687 - DNA, 20 bp, Artificial Sequence
  Synthetic oligonucleotide; CAG chr11 5245216 5245235 5245219 -
ccccatgttcctaagtaaaa

SEQ ID NO: 46688 - DNA, 20 bp, Artificial Sequence
  Synthetic oligonucleotide; AGG chr11 5245215 5245234 5245218 -
cccatgttcctaagtaaaac

SEQ ID NO: 46689 - DNA, 20 bp, Artificial Sequence
  Synthetic oligonucleotide; AAG chr11 5245191 5245210 5245194 -
aactgcctctcaactatatc

SEQ ID NO: 46690 - DNA, 20 bp, Artificial Sequence
  Synthetic oligonucleotide; TAG chr11 5245188 5245207 5245191 -
tgcctctcaactatatcaag

SEQ ID NO: 46691 - DNA, 20 bp, Artificial Sequence
  Synthetic oligonucleotide; CAG chr11 5245161 5245180 5245164 -
aaatattgtgtctctaatat

SEQ ID NO: 46692 - DNA, 20 bp, Artificial Sequence
  Synthetic oligonucleotide; CAG chr11 5245153 5245172 5245156 -
tgtctctaatatcagaaatt

SEQ ID NO: 46693 - DNA, 20 bp, Artificial Sequence
  Synthetic oligonucleotide; TGG chr11 5245139 5245158 5245142 -
gaaattcagctttaatatat

SEQ ID NO: 46694 - DNA, 20 bp, Artificial Sequence
  Synthetic oligonucleotide; GGG chr11 5245138 5245157 5245141 -
aaattcagctttaatatatt

SEQ ID NO: 46695 - DNA, 20 bp, Artificial Sequence
  Synthetic oligonucleotide; TAG chr11 5245118 5245137 5245121 -
gggtttaactctttgaaatt

SEQ ID NO: 46696 - DNA, 20 bp, Artificial Sequence
  Synthetic oligonucleotide; GAG chr11 5245116 5245135 5245119 -
gtttaactctttgaaattta

SEQ ID NO: 46697 - DNA, 20 bp, Artificial Sequence
  Synthetic oligonucleotide; TGG chr11 5245096 5245115 5245099 -
gagtctccttgaaatacaca

SEQ ID NO: 46698 - DNA, 20 bp, Artificial Sequence
  Synthetic oligonucleotide; GGG chr11 5245095 5245114 5245098 -
agtctccttgaaatacacat

SEQ ID NO: 46699 - DNA, 20 bp, Artificial Sequence
  Synthetic oligonucleotide; GGG chr11 5245094 5245113 5245097 -
gtctccttgaaatacacatg

SEQ ID NO: 46700 - DNA, 20 bp, Artificial Sequence
  Synthetic oligonucleotide; GGG chr11 5245093 5245112 5245096 -
tctccttgaaatacacatgg

SEQ ID NO: 46701 - DNA, 20 bp, Artificial Sequence
  Synthetic oligonucleotide; AAG chr11 5245065 5245084 5245068 -
tcctaaactttatttcttgt

SEQ ID NO: 46702 - DNA, 20 bp, Artificial Sequence
  Synthetic oligonucleotide; AGG chr11 5245064 5245083 5245067 -
cctaaactttatttcttgta

SEQ ID NO: 46703 - DNA, 20 bp, Artificial Sequence
  Synthetic oligonucleotide; CAG chr11 5245053 5245072 5245056 -
tttcttgtaaggatttatct

SEQ ID NO: 46704 - DNA, 20 bp, Artificial Sequence
  Synthetic oligonucleotide; AGG chr11 5245052 5245071 5245055 -
ttcttgtaaggatttatctc

SEQ ID NO: 46705 - DNA, 20 bp, Artificial Sequence
  Synthetic oligonucleotide; GGG chr11 5245051 5245070 5245054 -
tcttgtaaggatttatctca

SEQ ID NO: 46706 - DNA, 20 bp, Artificial Sequence
  Synthetic oligonucleotide; GGG chr11 5245050 5245069 5245053 -
cttgtaaggatttatctcag

SEQ ID NO: 46707 - DNA, 20 bp, Artificial Sequence
  Synthetic oligonucleotide; CAG chr11 5245035 5245054 5245038 -
ctcaggggtaacacacaaac

SEQ ID NO: 46708 - DNA, 20 bp, Artificial Sequence
  Synthetic oligonucleotide; AAG chr11 5245018 5245037 5245021 -
aaccagcatcctgaacctct

SEQ ID NO: 46709 - DNA, 20 bp, Artificial Sequence
  Synthetic oligonucleotide; GAG chr11 5245012 5245031 5245015 -
catcctgaacctctaagtat

SEQ ID NO: 46710 - DNA, 20 bp, Artificial Sequence
  Synthetic oligonucleotide; AGG chr11 5245011 5245030 5245014 -
atcctgaacctctaagtatg

SEQ ID NO: 46711 - DNA, 20 bp, Artificial Sequence
  Synthetic oligonucleotide; CAG chr11 5245007 5245026 5245010 -
tgaacctctaagtatgagga

SEQ ID NO: 46712 - DNA, 20 bp, Artificial Sequence
  Synthetic oligonucleotide; AAG chr11 5245003 5245022 5245006 -
cctctaagtatgaggacagt

SEQ ID NO: 46713 - DNA, 20 bp, Artificial Sequence
  Synthetic oligonucleotide; AAG chr11 5244996 5245015 5244999 -
gtatgaggacagtaagcctt

SEQ ID NO: 46714 - DNA, 20 bp, Artificial Sequence
  Synthetic oligonucleotide; CGG chr11 5244964 5244983 5244967 -
taaactgttcttctctctgc

SEQ ID NO: 46715 - DNA, 20 bp, Artificial Sequence
  Synthetic oligonucleotide; TGG chr11 5244961 5244980 5244964 -
actgttcttctctctgccgg

SEQ ID NO: 46716 - DNA, 20 bp, Artificial Sequence
  Synthetic oligonucleotide; AAG chr11 5244958 5244977 5244961 -
gttcttctctctgccggtgg

SEQ ID NO: 46717 - DNA, 20 bp, Artificial Sequence
  Synthetic oligonucleotide; GAG chr11 5244923 5244942 5244926 -
attcctgaaattgcttgttt

SEQ ID NO: 46718 - DNA, 20 bp, Artificial Sequence
  Synthetic oligonucleotide; GAG chr11 5244914 5244933 5244917 -
attgcttgtttgagacgcat

SEQ ID NO: 46719 - DNA, 20 bp, Artificial Sequence
  Synthetic oligonucleotide; CAG chr11 5244906 5244925 5244909 -
tttgagacgcatgagacgtg

SEQ ID NO: 46720 - DNA, 20 bp, Artificial Sequence
  Synthetic oligonucleotide; GAG chr11 5244898 5244917 5244901 -
gcatgagacgtgcagcacat

SEQ ID NO: 46721 - DNA, 20 bp, Artificial Sequence
  Synthetic oligonucleotide; CAG chr11 5244888 5244907 5244891 -
tgcagcacatgagacacgtg

SEQ ID NO: 46722 - DNA, 20 bp, Artificial Sequence
  Synthetic oligonucleotide; CAG chr11 5244885 5244904 5244888 -
agcacatgagacacgtgcag

SEQ ID NO: 46723 - DNA, 20 bp, Artificial Sequence
  Synthetic oligonucleotide; TGG chr11 5244878 5244897 5244881 -
gagacacgtgcagcagcctg

SEQ ID NO: 46724 - DNA, 20 bp, Artificial Sequence
  Synthetic oligonucleotide; CAG chr11 5244867 5244886 5244870 -
agcagcctgtggaatattgt

SEQ ID NO: 46725 - DNA, 20 bp, Artificial Sequence
  Synthetic oligonucleotide; AAG chr11 5244862 5244881 5244865 -
cctgtggaatattgtcagtg

SEQ ID NO: 46726 - DNA, 20 bp, Artificial Sequence
  Synthetic oligonucleotide; TAG chr11 5244843 5244862 5244846 -
gaagaatgtctttgcctgat

SEQ ID NO: 46727 - DNA, 20 bp, Artificial Sequence
  Synthetic oligonucleotide; AAG chr11 5244835 5244854 5244838 -
tctttgcctgattagatata

SEQ ID NO: 46728 - DNA, 20 bp, Artificial Sequence
  Synthetic oligonucleotide; AAG chr11 5244830 5244849 5244833 -
gcctgattagatataaagac

SEQ ID NO: 46729 - DNA, 20 bp, Artificial Sequence
  Synthetic oligonucleotide; CAG chr11 5244820 5244839 5244823 -
atataaagacaagttaaaca

SEQ ID NO: 46730 - DNA, 20 bp, Artificial Sequence
  Synthetic oligonucleotide; TAG chr11 5244814 5244833 5244817 -
agacaagttaaacacagcat

SEQ ID NO: 46731 - DNA, 20 bp, Artificial Sequence
  Synthetic oligonucleotide; TAG chr11 5244807 5244826 5244810 -
ttaaacacagcattagacta

SEQ ID NO: 46732 - DNA, 20 bp, Artificial Sequence
  Synthetic oligonucleotide; AAG chr11 5244801 5244820 5244804 -
acagcattagactatagatc

SEQ ID NO: 46733 - DNA, 20 bp, Artificial Sequence
  Synthetic oligonucleotide; CAG chr11 5244791 5244810 5244794 -
actatagatcaagcctgtgc

SEQ ID NO: 46734 - DNA, 20 bp, Artificial Sequence
  Synthetic oligonucleotide; CAG chr11 5244769 5244788 5244772 -
gacacaaatgacctaatgcc

SEQ ID NO: 46735 - DNA, 20 bp, Artificial Sequence
  Synthetic oligonucleotide; CGG chr11 5244764 5244783 5244767 -
aaatgacctaatgcccagca

SEQ ID NO: 46736 - DNA, 20 bp, Artificial Sequence
  Synthetic oligonucleotide; GGG chr11 5244763 5244782 5244766 -
aatgacctaatgcccagcac

SEQ ID NO: 46737 - DNA, 20 bp, Artificial Sequence
  Synthetic oligonucleotide; CGG chr11 5244757 5244776 5244760 -
ctaatgcccagcacgggcca

SEQ ID NO: 46738 - DNA, 20 bp, Artificial Sequence
  Synthetic oligonucleotide; CAG chr11 5244731 5244750 5244734 -
ctcctatcctcttgcttgaa

SEQ ID NO: 46739 - DNA, 20 bp, Artificial Sequence
  Synthetic oligonucleotide; GAG chr11 5244729 5244748 5244732 -
cctatcctcttgcttgaaca

SEQ ID NO: 46740 - DNA, 20 bp, Artificial Sequence
  Synthetic oligonucleotide; CAG chr11 5244726 5244745 5244729 -
atcctcttgcttgaacagag

SEQ ID NO: 46741 - DNA, 20 bp, Artificial Sequence
  Synthetic oligonucleotide; TAG chr11 5244701 5244720 5244704 -
cacttctcccccaacactat

SEQ ID NO: 46742 - DNA, 20 bp, Artificial Sequence
  Synthetic oligonucleotide; TGG chr11 5244692 5244711 5244695 -
cccaacactattagatgttc

SEQ ID NO: 46743 - DNA, 20 bp, Artificial Sequence
  Synthetic oligonucleotide; TAG chr11 5244679 5244698 5244682 -
gatgttctggcataattttg

SEQ ID NO: 46744 - DNA, 20 bp, Artificial Sequence
  Synthetic oligonucleotide; TAG chr11 5244671 5244690 5244674 -
ggcataattttgtagatatg

SEQ ID NO: 46745 - DNA, 20 bp, Artificial Sequence
  Synthetic oligonucleotide; AGG chr11 5244670 5244689 5244673 -
gcataattttgtagatatgt

SEQ ID NO: 46746 - DNA, 20 bp, Artificial Sequence
  Synthetic oligonucleotide; TGG chr11 5244659 5244678 5244662 -
tagatatgtaggatttgaca

SEQ ID NO: 46747 - DNA, 20 bp, Artificial Sequence
  Synthetic oligonucleotide; CAG chr11 5244639 5244658 5244642 -
tggactattgttcaatgatt

SEQ ID NO: 46748 - DNA, 20 bp, Artificial Sequence
  Synthetic oligonucleotide; GAG chr11 5244637 5244656 5244640 -
gactattgttcaatgattca

SEQ ID NO: 46749 - DNA, 20 bp, Artificial Sequence
  Synthetic oligonucleotide; AGG chr11 5244636 5244655 5244639 -
actattgttcaatgattcag

SEQ ID NO: 46750 - DNA, 20 bp, Artificial Sequence
  Synthetic oligonucleotide; CAG chr11 5244619 5244638 5244622 -
cagaggaaatctcctttgtt

SEQ ID NO: 46751 - DNA, 20 bp, Artificial Sequence
  Synthetic oligonucleotide; AAG chr11 5244614 5244633 5244617 -
gaaatctcctttgttcagat

SEQ ID NO: 46752 - DNA, 20 bp, Artificial Sequence
  Synthetic oligonucleotide; TGG chr11 5244595 5244614 5244598 -
taagtacactgactactaaa

SEQ ID NO: 46753 - DNA, 20 bp, Artificial Sequence
  Synthetic oligonucleotide; CAG chr11 5244581 5244600 5244584 -
actaaatggattaaaaaaca

SEQ ID NO: 46754 - DNA, 20 bp, Artificial Sequence
  Synthetic oligonucleotide; CAG chr11 5244568 5244587 5244571 -
aaaaacacagtaataaaacc

SEQ ID NO: 46755 - DNA, 20 bp, Artificial Sequence
  Synthetic oligonucleotide; TAG chr11 5244548 5244567 5244551 -
cagttttccccttacttccc

SEQ ID NO: 46756 - DNA, 20 bp, Artificial Sequence
  Synthetic oligonucleotide; AAG chr11 5244520 5244539 5244523 -
ttcttattctgctttcttcc

SEQ ID NO: 46757 - DNA, 20 bp, Artificial Sequence
  Synthetic oligonucleotide; TGG chr11 5244510 5244529 5244513 -
gctttcttccaagttgatgc

SEQ ID NO: 46758 - DNA, 20 bp, Artificial Sequence
  Synthetic oligonucleotide; TAG chr11 5244506 5244525 5244509 -
tcttccaagttgatgctgga

SEQ ID NO: 46759 - DNA, 20 bp, Artificial Sequence
  Synthetic oligonucleotide; GAG chr11 5244504 5244523 5244507 -
ttccaagttgatgctggata

SEQ ID NO: 46760 - DNA, 20 bp, Artificial Sequence
  Synthetic oligonucleotide; AGG chr11 5244503 5244522 5244506 -
tccaagttgatgctggatag

SEQ ID NO: 46761 - DNA, 20 bp, Artificial Sequence
  Synthetic oligonucleotide; AAG chr11 5244481 5244500 5244484 -
gtgtttatttctattctaaa

SEQ ID NO: 46762 - DNA, 20 bp, Artificial Sequence
  Synthetic oligonucleotide; TGG chr11 5244469 5244488 5244472 -
attctaaaaagtgatgaaat

SEQ ID NO: 46763 - DNA, 20 bp, Artificial Sequence
  Synthetic oligonucleotide; CGG chr11 5244465 5244484 5244468 -
taaaaagtgatgaaattggc

SEQ ID NO: 46764 - DNA, 20 bp, Artificial Sequence
  Synthetic oligonucleotide; GGG chr11 5244464 5244483 5244467 -
aaaaagtgatgaaattggcc

SEQ ID NO: 46765 - DNA, 20 bp, Artificial Sequence
  Synthetic oligonucleotide; CGG chr11 5244459 5244478 5244462 -
gtgatgaaattggccgggcg

SEQ ID NO: 46766 - DNA, 20 bp, Artificial Sequence
  Synthetic oligonucleotide; TGG chr11 5244456 5244475 5244459 -
atgaaattggccgggcgcgg

SEQ ID NO: 46767 - DNA, 20 bp, Artificial Sequence
  Synthetic oligonucleotide; CAG chr11 5244437 5244456 5244440 -
gtggctcacacctgtaatcc

SEQ ID NO: 46768 - DNA, 20 bp, Artificial Sequence
  Synthetic oligonucleotide; TGG chr11 5244429 5244448 5244432 -
cacctgtaatcccagcactt

SEQ ID NO: 46769 - DNA, 20 bp, Artificial Sequence
  Synthetic oligonucleotide; GGG chr11 5244428 5244447 5244431 -
acctgtaatcccagcacttt

SEQ ID NO: 46770 - DNA, 20 bp, Artificial Sequence
  Synthetic oligonucleotide; GAG chr11 5244426 5244445 5244429 -
ctgtaatcccagcactttgg

SEQ ID NO: 46771 - DNA, 20 bp, Artificial Sequence
  Synthetic oligonucleotide; AGG chr11 5244425 5244444 5244428 -
tgtaatcccagcactttggg

SEQ ID NO: 46772 - DNA, 20 bp, Artificial Sequence
  Synthetic oligonucleotide; GAG chr11 5244420 5244439 5244423 -
tcccagcactttgggaggct

SEQ ID NO: 46773 - DNA, 20 bp, Artificial Sequence
  Synthetic oligonucleotide; AGG chr11 5244419 5244438 5244422 -
cccagcactttgggaggctg

SEQ ID NO: 46774 - DNA, 20 bp, Artificial Sequence
  Synthetic oligonucleotide; TGG chr11 5244416 5244435 5244419 -
agcactttgggaggctgagg

SEQ ID NO: 46775 - DNA, 20 bp, Artificial Sequence
  Synthetic oligonucleotide; GGG chr11 5244415 5244434 5244418 -
gcactttgggaggctgaggt

SEQ ID NO: 46776 - DNA, 20 bp, Artificial Sequence
  Synthetic oligonucleotide; CGG chr11 5244412 5244431 5244415 -
ctttgggaggctgaggtggg

SEQ ID NO: 46777 - DNA, 20 bp, Artificial Sequence
  Synthetic oligonucleotide; GAG chr11 5244404 5244423 5244407 -
ggctgaggtgggcggatcac

SEQ ID NO: 46778 - DNA, 20 bp, Artificial Sequence
  Synthetic oligonucleotide; AGG chr11 5244403 5244422 5244406 -
gctgaggtgggcggatcacg

SEQ ID NO: 46779 - DNA, 20 bp, Artificial Sequence
  Synthetic oligonucleotide; CAG chr11 5244399 5244418 5244402 -
aggtgggcggatcacgaggt

SEQ ID NO: 46780 - DNA, 20 bp, Artificial Sequence
  Synthetic oligonucleotide; AGG chr11 5244398 5244417 5244401 -
ggtgggcggatcacgaggtc

SEQ ID NO: 46781 - DNA, 20 bp, Artificial Sequence
  Synthetic oligonucleotide; GAG chr11 5244396 5244415 5244399 -
tgggcggatcacgaggtcag

SEQ ID NO: 46782 - DNA, 20 bp, Artificial Sequence
  Synthetic oligonucleotide; AAG chr11 5244390 5244409 5244393 -
gatcacgaggtcaggagatc

SEQ ID NO: 46783 - DNA, 20 bp, Artificial Sequence
  Synthetic oligonucleotide; TGG chr11 5244380 5244399 5244383 -
tcaggagatcaagaccatcc

SEQ ID NO: 46784 - DNA, 20 bp, Artificial Sequence
  Synthetic oligonucleotide; TGG chr11 5244371 5244390 5244374 -
caagaccatcctggctaaca

SEQ ID NO: 46785 - DNA, 20 bp, Artificial Sequence
  Synthetic oligonucleotide; TAG chr11 5244335 5244354 5244338 -
ctactaaaaatacaaaaaat

SEQ ID NO: 46786 - DNA, 20 bp, Artificial Sequence
  Synthetic oligonucleotide; CAG chr11 5244331 5244350 5244334 -
taaaaatacaaaaaattagc

SEQ ID NO: 46787 - DNA, 20 bp, Artificial Sequence
  Synthetic oligonucleotide; GAG chr11 5244329 5244348 5244332 -
aaaatacaaaaaattagcca

SEQ ID NO: 46788 - DNA, 20 bp, Artificial Sequence
  Synthetic oligonucleotide; CAG chr11 5244325 5244344 5244328 -
tacaaaaaattagccagaga

SEQ ID NO: 46789 - DNA, 20 bp, Artificial Sequence
  Synthetic oligonucleotide; TGG chr11 5244322 5244341 5244325 -
aaaaaattagccagagacag

SEQ ID NO: 46790 - DNA, 20 bp, Artificial Sequence
  Synthetic oligonucleotide; CGG chr11 5244319 5244338 5244322 -
aaattagccagagacagtgg

SEQ ID NO: 46791 - DNA, 20 bp, Artificial Sequence
  Synthetic oligonucleotide; GGG chr11 5244318 5244337 5244321 -
aattagccagagacagtggc

SEQ ID NO: 46792 - DNA, 20 bp, Artificial Sequence
  Synthetic oligonucleotide; TAG chr11 5244309 5244328 5244312 -
gagacagtggcgggtgcctg

SEQ ID NO: 46793 - DNA, 20 bp, Artificial Sequence
  Synthetic oligonucleotide; CAG chr11 5244303 5244322 5244306 -
gtggcgggtgcctgtagtcc

SEQ ID NO: 46794 - DNA, 20 bp, Artificial Sequence
  Synthetic oligonucleotide; CGG chr11 5244295 5244314 5244298 -
tgcctgtagtcccagctact

SEQ ID NO: 46795 - DNA, 20 bp, Artificial Sequence
  Synthetic oligonucleotide; GGG chr11 5244294 5244313 5244297 -
gcctgtagtcccagctactc

SEQ ID NO: 46796 - DNA, 20 bp, Artificial Sequence
  Synthetic oligonucleotide; GAG chr11 5244292 5244311 5244295 -
ctgtagtcccagctactcgg

SEQ ID NO: 46797 - DNA, 20 bp, Artificial Sequence
  Synthetic oligonucleotide; AGG chr11 5244291 5244310 5244294 -
tgtagtcccagctactcggg

SEQ ID NO: 46798 - DNA, 20 bp, Artificial Sequence
  Synthetic oligonucleotide; GAG chr11 5244286 5244305 5244289 -
tcccagctactcgggaggct

SEQ ID NO: 46799 - DNA, 20 bp, Artificial Sequence
  Synthetic oligonucleotide; AGG chr11 5244285 5244304 5244288 -
cccagctactcgggaggctg

SEQ ID NO: 46800 - DNA, 20 bp, Artificial Sequence
  Synthetic oligonucleotide; CAG chr11 5244282 5244301 5244285 -
agctactcgggaggctgagg

SEQ ID NO: 46801 - DNA, 20 bp, Artificial Sequence
  Synthetic oligonucleotide; AGG chr11 5244281 5244300 5244284 -
gctactcgggaggctgaggc

SEQ ID NO: 46802 - DNA, 20 bp, Artificial Sequence
  Synthetic oligonucleotide; GAG chr11 5244279 5244298 5244282 -
tactcgggaggctgaggcag

SEQ ID NO: 46803 - DNA, 20 bp, Artificial Sequence
  Synthetic oligonucleotide; TGG chr11 5244274 5244293 5244277 -
gggaggctgaggcaggagaa

SEQ ID NO: 46804 - DNA, 20 bp, Artificial Sequence
  Synthetic oligonucleotide; TGG chr11 5244263 5244282 5244266 -
gcaggagaatggcgtgaacc

SEQ ID NO: 46805 - DNA, 20 bp, Artificial Sequence
  Synthetic oligonucleotide; GGG chr11 5244262 5244281 5244265 -
caggagaatggcgtgaacct

SEQ ID NO: 46806 - DNA, 20 bp, Artificial Sequence
  Synthetic oligonucleotide; GAG chr11 5244260 5244279 5244263 -
ggagaatggcgtgaacctgg

SEQ ID NO: 46807 - DNA, 20 bp, Artificial Sequence
  Synthetic oligonucleotide; AGG chr11 5244259 5244278 5244262 -
gagaatggcgtgaacctggg

SEQ ID NO: 46808 - DNA, 20 bp, Artificial Sequence
  Synthetic oligonucleotide; CAG chr11 5244256 5244275 5244259 -
aatggcgtgaacctgggagg

SEQ ID NO: 46809 - DNA, 20 bp, Artificial Sequence
  Synthetic oligonucleotide; GAG chr11 5244254 5244273 5244257 -
tggcgtgaacctgggaggca

SEQ ID NO: 46810 - DNA, 20 bp, Artificial Sequence
  Synthetic oligonucleotide; CGG chr11 5244247 5244266 5244250 -
aacctgggaggcagagcttg

SEQ ID NO: 46811 - DNA, 20 bp, Artificial Sequence
  Synthetic oligonucleotide; GAG chr11 5244243 5244262 5244246 -
tgggaggcagagcttgcggt

SEQ ID NO: 46812 - DNA, 20 bp, Artificial Sequence
  Synthetic oligonucleotide; CAG chr11 5244240 5244259 5244243 -
gaggcagagcttgcggtgag

SEQ ID NO: 46813 - DNA, 20 bp, Artificial Sequence
  Synthetic oligonucleotide; GAG chr11 5244238 5244257 5244241 -
ggcagagcttgcggtgagca

SEQ ID NO: 46814 - DNA, 20 bp, Artificial Sequence
  Synthetic oligonucleotide; CAG chr11 5244216 5244235 5244219 -
gatcgcgccactgcacactc

SEQ ID NO: 46815 - DNA, 20 bp, Artificial Sequence
  Synthetic oligonucleotide; TGG chr11 5244211 5244230 5244214 -
cgccactgcacactccagcc

SEQ ID NO: 46816 - DNA, 20 bp, Artificial Sequence
  Synthetic oligonucleotide; GGG chr11 5244210 5244229 5244213 -
gccactgcacactccagcct

SEQ ID NO: 46817 - DNA, 20 bp, Artificial Sequence
  Synthetic oligonucleotide; AAG chr11 5244202 5244221 5244205 -
acactccagcctgggtgaca

SEQ ID NO: 46818 - DNA, 20 bp, Artificial Sequence
  Synthetic oligonucleotide; GAG chr11 5244198 5244217 5244201 -
tccagcctgggtgacaaagc

SEQ ID NO: 46819 - DNA, 20 bp, Artificial Sequence
  Synthetic oligonucleotide; AAG chr11 5244167 5244186 5244170 -
tcaaaaaaaaaaaaaaaaaa

SEQ ID NO: 46820 - DNA, 20 bp, Artificial Sequence
  Synthetic oligonucleotide; AAG chr11 5244161 5244180 5244164 -
aaaaaaaaaaaaaaaagaaa

SEQ ID NO: 46821 - DNA, 20 bp, Artificial Sequence
  Synthetic oligonucleotide; AAG chr11 5244157 5244176 5244160 -
aaaaaaaaaaaagaaaaaga

SEQ ID NO: 46822 - DNA, 20 bp, Artificial Sequence
  Synthetic oligonucleotide; AAG chr11 5244153 5244172 5244156 -
aaaaaaaagaaaaagaaaga

SEQ ID NO: 46823 - DNA, 20 bp, Artificial Sequence
  Synthetic oligonucleotide; AAG chr11 5244149 5244168 5244152 -
aaaagaaaaagaaagaaaga

SEQ ID NO: 46824 - DNA, 20 bp, Artificial Sequence
  Synthetic oligonucleotide; TAG chr11 5244114 5244133 5244117 -
atgaaattgtgtattcaatg

SEQ ID NO: 46825 - DNA, 20 bp, Artificial Sequence
  Synthetic oligonucleotide; AAG chr11 5244107 5244126 5244110 -
tgtgtattcaatgtagtctc

SEQ ID NO: 46826 - DNA, 20 bp, Artificial Sequence
  Synthetic oligonucleotide; GAG chr11 5244105 5244124 5244108 -
tgtattcaatgtagtctcaa

SEQ ID NO: 46827 - DNA, 20 bp, Artificial Sequence
  Synthetic oligonucleotide; AAG chr11 5244091 5244110 5244094 -
tctcaagagaattgaaaacc

SEQ ID NO: 46828 - DNA, 20 bp, Artificial Sequence
  Synthetic oligonucleotide; AAG chr11 5244087 5244106 5244090 -
aagagaattgaaaaccaaga

SEQ ID NO: 46829 - DNA, 20 bp, Artificial Sequence
  Synthetic oligonucleotide; AGG chr11 5244086 5244105 5244089 -
agagaattgaaaaccaagaa

SEQ ID NO: 46830 - DNA, 20 bp, Artificial Sequence
  Synthetic oligonucleotide; TGG chr11 5244080 5244099 5244083 -
ttgaaaaccaagaaaggctg

SEQ ID NO: 46831 - DNA, 20 bp, Artificial Sequence
  Synthetic oligonucleotide; AAG chr11 5244064 5244083 5244067 -
gctgtggcttcttccacata

SEQ ID NO: 46832 - DNA, 20 bp, Artificial Sequence
  Synthetic oligonucleotide; TGG chr11 5244059 5244078 5244062 -
ggcttcttccacataaagcc

SEQ ID NO: 46833 - DNA, 20 bp, Artificial Sequence
  Synthetic oligonucleotide; CAG chr11 5244048 5244067 5244051 -
cataaagcctggatgaataa

SEQ ID NO: 46834 - DNA, 20 bp, Artificial Sequence
  Synthetic oligonucleotide; AGG chr11 5244047 5244066 5244050 -
ataaagcctggatgaataac

SEQ ID NO: 46835 - DNA, 20 bp, Artificial Sequence
  Synthetic oligonucleotide; CAG chr11 5244010 5244029 5244013 -
cattgtcacaactcctgatc

SEQ ID NO: 46836 - DNA, 20 bp, Artificial Sequence
  Synthetic oligonucleotide; AGG chr11 5244009 5244028 5244012 -
attgtcacaactcctgatcc

SEQ ID NO: 46837 - DNA, 20 bp, Artificial Sequence
  Synthetic oligonucleotide; TGG chr11 5244000 5244019 5244003 -
actcctgatccaggaattga

SEQ ID NO: 46838 - DNA, 20 bp, Artificial Sequence
  Synthetic oligonucleotide; AAG chr11 5243995 5244014 5243998 -
tgatccaggaattgatggct

SEQ ID NO: 46839 - DNA, 20 bp, Artificial Sequence
  Synthetic oligonucleotide; CAG chr11 5243969 5243988 5243972 -
ttcgtaattcttatcctttt

SEQ ID NO: 46840 - DNA, 20 bp, Artificial Sequence
  Synthetic oligonucleotide; CAG chr11 5243945 5243964 5243948 -
tgtaacttattcctatttgt

SEQ ID NO: 46841 - DNA, 20 bp, Artificial Sequence
  Synthetic oligonucleotide; CAG chr11 5243938 5243957 5243941 -
tattcctatttgtcagcatt

SEQ ID NO: 46842 - DNA, 20 bp, Artificial Sequence
  Synthetic oligonucleotide; AGG chr11 5243937 5243956 5243940 -
attcctatttgtcagcattc

SEQ ID NO: 46843 - DNA, 20 bp, Artificial Sequence
  Synthetic oligonucleotide; TAG chr11 5243930 5243949 5243933 -
tttgtcagcattcaggttat

SEQ ID NO: 46844 - DNA, 20 bp, Artificial Sequence
  Synthetic oligonucleotide; CGG chr11 5243927 5243946 5243930 -
gtcagcattcaggttattag

SEQ ID NO: 46845 - DNA, 20 bp, Artificial Sequence
  Synthetic oligonucleotide; TGG chr11 5243920 5243939 5243923 -
ttcaggttattagcggctgc

SEQ ID NO: 46846 - DNA, 20 bp, Artificial Sequence
  Synthetic oligonucleotide; AAG chr11 5243915 5243934 5243918 -
gttattagcggctgctggcg

SEQ ID NO: 46847 - DNA, 20 bp, Artificial Sequence
  Synthetic oligonucleotide; GAG chr11 5243907 5243926 5243910 -
cggctgctggcgaagtcctt

SEQ ID NO: 46848 - DNA, 20 bp, Artificial Sequence
  Synthetic oligonucleotide; TGG chr11 5243889 5243908 5243892 -
ttgagaaataaactgcacac

SEQ ID NO: 46849 - DNA, 20 bp, Artificial Sequence
  Synthetic oligonucleotide; TGG chr11 5243885 5243904 5243888 -
gaaataaactgcacactgga

SEQ ID NO: 46850 - DNA, 20 bp, Artificial Sequence
  Synthetic oligonucleotide; TGG chr11 5243882 5243901 5243885 -
ataaactgcacactggatgg

SEQ ID NO: 46851 - DNA, 20 bp, Artificial Sequence
  Synthetic oligonucleotide; GGG chr11 5243881 5243900 5243884 -
taaactgcacactggatggt

SEQ ID NO: 46852 - DNA, 20 bp, Artificial Sequence
  Synthetic oligonucleotide; GGG chr11 5243880 5243899 5243883 -
aaactgcacactggatggtg

SEQ ID NO: 46853 - DNA, 20 bp, Artificial Sequence
  Synthetic oligonucleotide; GGG chr11 5243879 5243898 5243882 -
aactgcacactggatggtgg

SEQ ID NO: 46854 - DNA, 20 bp, Artificial Sequence
  Synthetic oligonucleotide; TAG chr11 5243876 5243895 5243879 -
tgcacactggatggtggggg

SEQ ID NO: 46855 - DNA, 20 bp, Artificial Sequence
  Synthetic oligonucleotide; TAG chr11 5243871 5243890 5243874 -
actggatggtgggggtagtg

SEQ ID NO: 46856 - DNA, 20 bp, Artificial Sequence
  Synthetic oligonucleotide; AGG chr11 5243870 5243889 5243873 -
ctggatggtgggggtagtgt

SEQ ID NO: 46857 - DNA, 20 bp, Artificial Sequence
  Synthetic oligonucleotide; TGG chr11 5243863 5243882 5243866 -
gtgggggtagtgtaggaaaa

SEQ ID NO: 46858 - DNA, 20 bp, Artificial Sequence
  Synthetic oligonucleotide; GAG chr11 5243861 5243880 5243864 -
gggggtagtgtaggaaaatg

SEQ ID NO: 46859 - DNA, 20 bp, Artificial Sequence
  Synthetic oligonucleotide; AGG chr11 5243860 5243879 5243863 -
ggggtagtgtaggaaaatgg

SEQ ID NO: 46860 - DNA, 20 bp, Artificial Sequence
  Synthetic oligonucleotide; GGG chr11 5243859 5243878 5243862 -
gggtagtgtaggaaaatgga

SEQ ID NO: 46861 - DNA, 20 bp, Artificial Sequence
  Synthetic oligonucleotide; GGG chr11 5243858 5243877 5243861 -
ggtagtgtaggaaaatggag

SEQ ID NO: 46862 - DNA, 20 bp, Artificial Sequence
  Synthetic oligonucleotide; AAG chr11 5243855 5243874 5243858 -
agtgtaggaaaatggagggg

SEQ ID NO: 46863 - DNA, 20 bp, Artificial Sequence
  Synthetic oligonucleotide; AGG chr11 5243854 5243873 5243857 -
gtgtaggaaaatggagggga

SEQ ID NO: 46864 - DNA, 20 bp, Artificial Sequence
  Synthetic oligonucleotide; AAG chr11 5243851 5243870 5243854 -
taggaaaatggaggggaagg

SEQ ID NO: 46865 - DNA, 20 bp, Artificial Sequence
  Synthetic oligonucleotide; AAG chr11 5243846 5243865 5243849 -
aaatggaggggaaggaagta

SEQ ID NO: 46866 - DNA, 20 bp, Artificial Sequence
  Synthetic oligonucleotide; AAG chr11 5243834 5243853 5243837 -
aggaagtaaagtttcaaatt

SEQ ID NO: 46867 - DNA, 20 bp, Artificial Sequence
  Synthetic oligonucleotide; CAG chr11 5243825 5243844 5243828 -
agtttcaaattaagcctgaa

SEQ ID NO: 46868 - DNA, 20 bp, Artificial Sequence
  Synthetic oligonucleotide; AAG chr11 5243820 5243839 5243823 -
caaattaagcctgaacagca

SEQ ID NO: 46869 - DNA, 20 bp, Artificial Sequence
  Synthetic oligonucleotide; GAG chr11 5243810 5243829 5243813 -
ctgaacagcaaagttcccct

SEQ ID NO: 46870 - DNA, 20 bp, Artificial Sequence
  Synthetic oligonucleotide; AAG chr11 5243807 5243826 5243810 -
aacagcaaagttcccctgag

SEQ ID NO: 46871 - DNA, 20 bp, Artificial Sequence
  Synthetic oligonucleotide; AGG chr11 5243806 5243825 5243809 -
acagcaaagttcccctgaga

SEQ ID NO: 46872 - DNA, 20 bp, Artificial Sequence
  Synthetic oligonucleotide; TGG chr11 5243798 5243817 5243801 -
gttcccctgagaaggccacc

SEQ ID NO: 46873 - DNA, 20 bp, Artificial Sequence
  Synthetic oligonucleotide; CAG chr11 5243788 5243807 5243791 -
gaaggccacctggattctat

SEQ ID NO: 46874 - DNA, 20 bp, Artificial Sequence
  Synthetic oligonucleotide; TGG chr11 5243737 5243756 5243740 -
ccttgcccaaaccccacccc

SEQ ID NO: 46875 - DNA, 20 bp, Artificial Sequence
  Synthetic oligonucleotide; GAG chr11 5243735 5243754 5243738 -
ttgcccaaaccccacccctg

SEQ ID NO: 46876 - DNA, 20 bp, Artificial Sequence
  Synthetic oligonucleotide; TAG chr11 5243711 5243730 5243714 -
cacaacccacccttgaccaa

SEQ ID NO: 46877 - DNA, 20 bp, Artificial Sequence
  Synthetic oligonucleotide; GAG chr11 5243696 5243715 5243699 -
accaatagattcattttact

SEQ ID NO: 46878 - DNA, 20 bp, Artificial Sequence
  Synthetic oligonucleotide; AGG chr11 5243695 5243714 5243698 -
ccaatagattcattttactg

SEQ ID NO: 46879 - DNA, 20 bp, Artificial Sequence
  Synthetic oligonucleotide; GGG chr11 5243694 5243713 5243697 -
caatagattcattttactga

SEQ ID NO: 46880 - DNA, 20 bp, Artificial Sequence
  Synthetic oligonucleotide; GAG chr11 5243692 5243711 5243695 -
atagattcattttactgagg

SEQ ID NO: 46881 - DNA, 20 bp, Artificial Sequence
  Synthetic oligonucleotide; AGG chr11 5243691 5243710 5243694 -
tagattcattttactgaggg

SEQ ID NO: 46882 - DNA, 20 bp, Artificial Sequence
  Synthetic oligonucleotide; AAG chr11 5243686 5243705 5243689 -
tcattttactgagggaggca

SEQ ID NO: 46883 - DNA, 20 bp, Artificial Sequence
  Synthetic oligonucleotide; AGG chr11 5243685 5243704 5243688 -
cattttactgagggaggcaa

SEQ ID NO: 46884 - DNA, 20 bp, Artificial Sequence
  Synthetic oligonucleotide; GGG chr11 5243684 5243703 5243687 -
attttactgagggaggcaaa

SEQ ID NO: 46885 - DNA, 20 bp, Artificial Sequence
  Synthetic oligonucleotide; TGG chr11 5243680 5243699 5243683 -
tactgagggaggcaaagggc

SEQ ID NO: 46886 - DNA, 20 bp, Artificial Sequence
  Synthetic oligonucleotide; TAG chr11 5243673 5243692 5243676 -
ggaggcaaagggctggtcaa

SEQ ID NO: 46887 - DNA, 20 bp, Artificial Sequence
  Synthetic oligonucleotide; TGG chr11 5243659 5243678 5243662 -
ggtcaatagattcatttcac

SEQ ID NO: 46888 - DNA, 20 bp, Artificial Sequence
  Synthetic oligonucleotide; GGG chr11 5243658 5243677 5243661 -
gtcaatagattcatttcact

SEQ ID NO: 46889 - DNA, 20 bp, Artificial Sequence
  Synthetic oligonucleotide; GAG chr11 5243656 5243675 5243659 -
caatagattcatttcactgg

SEQ ID NO: 46890 - DNA, 20 bp, Artificial Sequence
  Synthetic oligonucleotide; GAG chr11 5243654 5243673 5243657 -
atagattcatttcactggga

SEQ ID NO: 46891 - DNA, 20 bp, Artificial Sequence
  Synthetic oligonucleotide; AGG chr11 5243653 5243672 5243656 -
tagattcatttcactgggag

SEQ ID NO: 46892 - DNA, 20 bp, Artificial Sequence
  Synthetic oligonucleotide; AAG chr11 5243648 5243667 5243651 -
tcatttcactgggagaggca

SEQ ID NO: 46893 - DNA, 20 bp, Artificial Sequence
  Synthetic oligonucleotide; AGG chr11 5243647 5243666 5243650 -
catttcactgggagaggcaa

SEQ ID NO: 46894 - DNA, 20 bp, Artificial Sequence
  Synthetic oligonucleotide; GGG chr11 5243646 5243665 5243649 -
atttcactgggagaggcaaa

SEQ ID NO: 46895 - DNA, 20 bp, Artificial Sequence
  Synthetic oligonucleotide; TGG chr11 5243642 5243661 5243645 -
cactgggagaggcaaagggc

SEQ ID NO: 46896 - DNA, 20 bp, Artificial Sequence
  Synthetic oligonucleotide; GGG chr11 5243641 5243660 5243644 -
actgggagaggcaaagggct

SEQ ID NO: 46897 - DNA, 20 bp, Artificial Sequence
  Synthetic oligonucleotide; GGG chr11 5243640 5243659 5243643 -
ctgggagaggcaaagggctg

SEQ ID NO: 46898 - DNA, 20 bp, Artificial Sequence
  Synthetic oligonucleotide; GGG chr11 5243639 5243658 5243642 -
tgggagaggcaaagggctgg

SEQ ID NO: 46899 - DNA, 20 bp, Artificial Sequence
  Synthetic oligonucleotide; CAG chr11 5243635 5243654 5243638 -
agaggcaaagggctgggggc

SEQ ID NO: 46900 - DNA, 20 bp, Artificial Sequence
  Synthetic oligonucleotide; GAG chr11 5243633 5243652 5243636 -
aggcaaagggctgggggcca

SEQ ID NO: 46901 - DNA, 20 bp, Artificial Sequence
  Synthetic oligonucleotide; GAG chr11 5243631 5243650 5243634 -
gcaaagggctgggggccaga

SEQ ID NO: 46902 - DNA, 20 bp, Artificial Sequence
  Synthetic oligonucleotide; AGG chr11 5243630 5243649 5243633 -
caaagggctgggggccagag

SEQ ID NO: 46903 - DNA, 20 bp, Artificial Sequence
  Synthetic oligonucleotide; GAG chr11 5243628 5243647 5243631 -
aagggctgggggccagagag

SEQ ID NO: 46904 - DNA, 20 bp, Artificial Sequence
  Synthetic oligonucleotide; AAG chr11 5243625 5243644 5243628 -
ggctgggggccagagaggag

SEQ ID NO: 46905 - DNA, 20 bp, Artificial Sequence
  Synthetic oligonucleotide; AAG chr11 5243618 5243637 5243621 -
ggccagagaggagaagtaaa

SEQ ID NO: 46906 - DNA, 20 bp, Artificial Sequence
  Synthetic oligonucleotide; AAG chr11 5243606 5243625 5243609 -
gaagtaaaaagccacacatg

SEQ ID NO: 46907 - DNA, 20 bp, Artificial Sequence
  Synthetic oligonucleotide; CAG chr11 5243603 5243622 5243606 -
gtaaaaagccacacatgaag

SEQ ID NO: 46908 - DNA, 20 bp, Artificial Sequence
  Synthetic oligonucleotide; CAG chr11 5243595 5243614 5243598 -
ccacacatgaagcagcaatg

SEQ ID NO: 46909 - DNA, 20 bp, Artificial Sequence
  Synthetic oligonucleotide; AGG chr11 5243594 5243613 5243597 -
cacacatgaagcagcaatgc

SEQ ID NO: 46910 - DNA, 20 bp, Artificial Sequence
  Synthetic oligonucleotide; TGG chr11 5243583 5243602 5243586 -
cagcaatgcaggcatgcttc

SEQ ID NO: 46911 - DNA, 20 bp, Artificial Sequence
  Synthetic oligonucleotide; CAG chr11 5243565 5243584 5243568 -
tctggctcatctgtgatcac

SEQ ID NO: 46912 - DNA, 20 bp, Artificial Sequence
  Synthetic oligonucleotide; AGG chr11 5243564 5243583 5243567 -
ctggctcatctgtgatcacc

SEQ ID NO: 46913 - DNA, 20 bp, Artificial Sequence
  Synthetic oligonucleotide; CAG chr11 5243554 5243573 5243557 -
tgtgatcaccaggaaactcc

SEQ ID NO: 46914 - DNA, 20 bp, Artificial Sequence
  Synthetic oligonucleotide; TAG chr11 5243540 5243559 5243543 -
aactcccagatctgacactg

SEQ ID NO: 46915 - DNA, 20 bp, Artificial Sequence
  Synthetic oligonucleotide; AAG chr11 5243520 5243539 5243523 -
tagtgcatttcactgctgac

SEQ ID NO: 46916 - DNA, 20 bp, Artificial Sequence
  Synthetic oligonucleotide; AAG chr11 5243517 5243536 5243520 -
tgcatttcactgctgacaag

SEQ ID NO: 46917 - DNA, 20 bp, Artificial Sequence
  Synthetic oligonucleotide; AGG chr11 5243516 5243535 5243519 -
gcatttcactgctgacaaga

SEQ ID NO: 46918 - DNA, 20 bp, Artificial Sequence
  Synthetic oligonucleotide; CAG chr11 5243503 5243522 5243506 -
gacaagaaggctgctgccac

SEQ ID NO: 46919 - DNA, 20 bp, Artificial Sequence
  Synthetic oligonucleotide; AAG chr11 5243494 5243513 5243497 -
gctgctgccaccagcctgtg

SEQ ID NO: 46920 - DNA, 20 bp, Artificial Sequence
  Synthetic oligonucleotide; AAG chr11 5243490 5243509 5243493 -
ctgccaccagcctgtgaagc

SEQ ID NO: 46921 - DNA, 20 bp, Artificial Sequence
  Synthetic oligonucleotide; AGG chr11 5243489 5243508 5243492 -
tgccaccagcctgtgaagca

SEQ ID NO: 46922 - DNA, 20 bp, Artificial Sequence
  Synthetic oligonucleotide; AAG chr11 5243484 5243503 5243487 -
ccagcctgtgaagcaaggtt

SEQ ID NO: 46923 - DNA, 20 bp, Artificial Sequence
  Synthetic oligonucleotide; AGG chr11 5243483 5243502 5243486 -
cagcctgtgaagcaaggtta

SEQ ID NO: 46924 - DNA, 20 bp, Artificial Sequence
  Synthetic oligonucleotide; GAG chr11 5243479 5243498 5243482 -
ctgtgaagcaaggttaaggt

SEQ ID NO: 46925 - DNA, 20 bp, Artificial Sequence
  Synthetic oligonucleotide; AAG chr11 5243476 5243495 5243479 -
tgaagcaaggttaaggtgag

SEQ ID NO: 46926 - DNA, 20 bp, Artificial Sequence
  Synthetic oligonucleotide; AGG chr11 5243475 5243494 5243478 -
gaagcaaggttaaggtgaga

SEQ ID NO: 46927 - DNA, 20 bp, Artificial Sequence
  Synthetic oligonucleotide; TGG chr11 5243471 5243490 5243474 -
caaggttaaggtgagaaggc

SEQ ID NO: 46928 - DNA, 20 bp, Artificial Sequence
  Synthetic oligonucleotide; GAG chr11 5243469 5243488 5243472 -
aggttaaggtgagaaggctg

SEQ ID NO: 46929 - DNA, 20 bp, Artificial Sequence
  Synthetic oligonucleotide; AGG chr11 5243468 5243487 5243471 -
ggttaaggtgagaaggctgg

SEQ ID NO: 46930 - DNA, 20 bp, Artificial Sequence
  Synthetic oligonucleotide; GAG chr11 5243464 5243483 5243467 -
aaggtgagaaggctggaggt

SEQ ID NO: 46931 - DNA, 20 bp, Artificial Sequence
  Synthetic oligonucleotide; TGG chr11 5243457 5243476 5243460 -
gaaggctggaggtgagattc

SEQ ID NO: 46932 - DNA, 20 bp, Artificial Sequence
  Synthetic oligonucleotide; GGG chr11 5243456 5243475 5243459 -
aaggctggaggtgagattct

SEQ ID NO: 46933 - DNA, 20 bp, Artificial Sequence
  Synthetic oligonucleotide; CAG chr11 5243453 5243472 5243456 -
gctggaggtgagattctggg

SEQ ID NO: 46934 - DNA, 20 bp, Artificial Sequence
  Synthetic oligonucleotide; AGG chr11 5243452 5243471 5243455 -
ctggaggtgagattctgggc

SEQ ID NO: 46935 - DNA, 20 bp, Artificial Sequence
  Synthetic oligonucleotide; TAG chr11 5243449 5243468 5243452 -
gaggtgagattctgggcagg

SEQ ID NO: 46936 - DNA, 20 bp, Artificial Sequence
  Synthetic oligonucleotide; AGG chr11 5243448 5243467 5243451 -
aggtgagattctgggcaggt

SEQ ID NO: 46937 - DNA, 20 bp, Artificial Sequence
  Synthetic oligonucleotide; TGG chr11 5243442 5243461 5243445 -
gattctgggcaggtaggtac

SEQ ID NO: 46938 - DNA, 20 bp, Artificial Sequence
  Synthetic oligonucleotide; AAG chr11 5243439 5243458 5243442 -
tctgggcaggtaggtactgg

SEQ ID NO: 46939 - DNA, 20 bp, Artificial Sequence
  Synthetic oligonucleotide; CGG chr11 5243435 5243454 5243438 -
ggcaggtaggtactggaagc

SEQ ID NO: 46940 - DNA, 20 bp, Artificial Sequence
  Synthetic oligonucleotide; GGG chr11 5243434 5243453 5243437 -
gcaggtaggtactggaagcc

SEQ ID NO: 46941 - DNA, 20 bp, Artificial Sequence
  Synthetic oligonucleotide; AAG chr11 5243429 5243448 5243432 -
taggtactggaagccgggac

SEQ ID NO: 46942 - DNA, 20 bp, Artificial Sequence
  Synthetic oligonucleotide; AGG chr11 5243428 5243447 5243431 -
aggtactggaagccgggaca

SEQ ID NO: 46943 - DNA, 20 bp, Artificial Sequence
  Synthetic oligonucleotide; CAG chr11 5243423 5243442 5243426 -
ctggaagccgggacaaggtg

SEQ ID NO: 46944 - DNA, 20 bp, Artificial Sequence
  Synthetic oligonucleotide; AAG chr11 5243419 5243438 5243422 -
aagccgggacaaggtgcaga

SEQ ID NO: 46945 - DNA, 20 bp, Artificial Sequence
  Synthetic oligonucleotide; AGG chr11 5243418 5243437 5243421 -
agccgggacaaggtgcagaa

SEQ ID NO: 46946 - DNA, 20 bp, Artificial Sequence
  Synthetic oligonucleotide; CAG chr11 5243415 5243434 5243418 -
cgggacaaggtgcagaaagg

SEQ ID NO: 46947 - DNA, 20 bp, Artificial Sequence
  Synthetic oligonucleotide; AAG chr11 5243411 5243430 5243414 -
acaaggtgcagaaaggcaga

SEQ ID NO: 46948 - DNA, 20 bp, Artificial Sequence
  Synthetic oligonucleotide; AAG chr11 5243399 5243418 5243402 -
aaggcagaaagtgtttctga

SEQ ID NO: 46949 - DNA, 20 bp, Artificial Sequence
  Synthetic oligonucleotide; GAG chr11 5243397 5243416 5243400 -
ggcagaaagtgtttctgaaa

SEQ ID NO: 46950 - DNA, 20 bp, Artificial Sequence
  Synthetic oligonucleotide; AGG chr11 5243396 5243415 5243399 -
gcagaaagtgtttctgaaag

SEQ ID NO: 46951 - DNA, 20 bp, Artificial Sequence
  Synthetic oligonucleotide; GGG chr11 5243395 5243414 5243398 -
cagaaagtgtttctgaaaga

SEQ ID NO: 46952 - DNA, 20 bp, Artificial Sequence
  Synthetic oligonucleotide; TAG chr11 5243390 5243409 5243393 -
agtgtttctgaaagagggat

SEQ ID NO: 46953 - DNA, 20 bp, Artificial Sequence
  Synthetic oligonucleotide; TAG chr11 5243373 5243392 5243376 -
gattagcccgttgtcttaca

SEQ ID NO: 46954 - DNA, 20 bp, Artificial Sequence
  Synthetic oligonucleotide; CAG chr11 5243332 5243351 5243335 -
ctgtgattatgactatccca

SEQ ID NO: 46955 - DNA, 20 bp, Artificial Sequence
  Synthetic oligonucleotide; TGG chr11 5243324 5243343 5243327 -
atgactatcccacagtctcc

SEQ ID NO: 46956 - DNA, 20 bp, Artificial Sequence
  Synthetic oligonucleotide; TGG chr11 5243310 5243329 5243313 -
gtctcctggttgtctaccca

SEQ ID NO: 46957 - DNA, 20 bp, Artificial Sequence
  Synthetic oligonucleotide; TAG chr11 5243304 5243323 5243307 -
tggttgtctacccatggacc

SEQ ID NO: 46958 - DNA, 20 bp, Artificial Sequence
  Synthetic oligonucleotide; GAG chr11 5243302 5243321 5243305 -
gttgtctacccatggaccta

SEQ ID NO: 46959 - DNA, 20 bp, Artificial Sequence
  Synthetic oligonucleotide; AGG chr11 5243301 5243320 5243304 -
ttgtctacccatggacctag

SEQ ID NO: 46960 - DNA, 20 bp, Artificial Sequence
  Synthetic oligonucleotide; AAG chr11 5243290 5243309 5243293 -
tggacctagaggtactttga

SEQ ID NO: 46961 - DNA, 20 bp, Artificial Sequence
  Synthetic oligonucleotide; TGG chr11 5243284 5243303 5243287 -
tagaggtactttgaaagttt

SEQ ID NO: 46962 - DNA, 20 bp, Artificial Sequence
  Synthetic oligonucleotide; TGG chr11 5243276 5243295 5243279 -
ctttgaaagttttggatatc

SEQ ID NO: 46963 - DNA, 20 bp, Artificial Sequence
  Synthetic oligonucleotide; GGG chr11 5243275 5243294 5243278 -
tttgaaagttttggatatct

SEQ ID NO: 46964 - DNA, 20 bp, Artificial Sequence
  Synthetic oligonucleotide; TGG chr11 5243255 5243274 5243258 -
gggctctgactgtgcaataa

SEQ ID NO: 46965 - DNA, 20 bp, Artificial Sequence
  Synthetic oligonucleotide; GGG chr11 5243254 5243273 5243257 -
ggctctgactgtgcaataat

SEQ ID NO: 46966 - DNA, 20 bp, Artificial Sequence
  Synthetic oligonucleotide; AAG chr11 5243243 5243262 5243246 -
tgcaataatgggcaacccca

SEQ ID NO: 46967 - DNA, 20 bp, Artificial Sequence
  Synthetic oligonucleotide; AAG chr11 5243238 5243257 5243241 -
taatgggcaaccccaaagtc

SEQ ID NO: 46968 - DNA, 20 bp, Artificial Sequence
  Synthetic oligonucleotide; AGG chr11 5243237 5243256 5243240 -
aatgggcaaccccaaagtca

SEQ ID NO: 46969 - DNA, 20 bp, Artificial Sequence
  Synthetic oligonucleotide; TGG chr11 5243230 5243249 5243233 -
aaccccaaagtcaaggcaca

SEQ ID NO: 46970 - DNA, 20 bp, Artificial Sequence
  Synthetic oligonucleotide; AAG chr11 5243226 5243245 5243229 -
ccaaagtcaaggcacatggc

SEQ ID NO: 46971 - DNA, 20 bp, Artificial Sequence
  Synthetic oligonucleotide; AAG chr11 5243223 5243242 5243226 -
aagtcaaggcacatggcaag

SEQ ID NO: 46972 - DNA, 20 bp, Artificial Sequence
  Synthetic oligonucleotide; AGG chr11 5243222 5243241 5243225 -
agtcaaggcacatggcaaga

SEQ ID NO: 46973 - DNA, 20 bp, Artificial Sequence
  Synthetic oligonucleotide; CGG chr11 5243206 5243225 5243209 -
aagaaggtgctgatctcctt

SEQ ID NO: 46974 - DNA, 20 bp, Artificial Sequence
  Synthetic oligonucleotide; AAG chr11 5243201 5243220 5243204 -
ggtgctgatctccttcggaa

SEQ ID NO: 46975 - DNA, 20 bp, Artificial Sequence
  Synthetic oligonucleotide; CGG chr11 5243186 5243205 5243189 -
cggaaaagctgttatgctca

SEQ ID NO: 46976 - DNA, 20 bp, Artificial Sequence
  Synthetic oligonucleotide; AAG chr11 5243174 5243193 5243177 -
tatgctcacggatgacctca

SEQ ID NO: 46977 - DNA, 20 bp, Artificial Sequence
  Synthetic oligonucleotide; AGG chr11 5243173 5243192 5243176 -
atgctcacggatgacctcaa

SEQ ID NO: 46978 - DNA, 20 bp, Artificial Sequence
  Synthetic oligonucleotide; GAG chr11 5243155 5243174 5243158 -
aaaggcacctttgctacact

SEQ ID NO: 46979 - DNA, 20 bp, Artificial Sequence
  Synthetic oligonucleotide; AAG chr11 5243136 5243155 5243139 -
tgagtgacctgcactgtaac

SEQ ID NO: 46980 - DNA, 20 bp, Artificial Sequence
  Synthetic oligonucleotide; TGG chr11 5243126 5243145 5243129 -
gcactgtaacaagctgcacg

SEQ ID NO: 46981 - DNA, 20 bp, Artificial Sequence
  Synthetic oligonucleotide; GAG chr11 5243118 5243137 5243121 -
acaagctgcacgtggaccct

SEQ ID NO: 46982 - DNA, 20 bp, Artificial Sequence
  Synthetic oligonucleotide; TGG chr11 5243108 5243127 5243111 -
cgtggaccctgagaacttcc

SEQ ID NO: 46983 - DNA, 20 bp, Artificial Sequence
  Synthetic oligonucleotide; GAG chr11 5243104 5243123 5243107 -
gaccctgagaacttcctggt

SEQ ID NO: 46984 - DNA, 20 bp, Artificial Sequence
  Synthetic oligonucleotide; TAG chr11 5243101 5243120 5243104 -
cctgagaacttcctggtgag

SEQ ID NO: 46985 - DNA, 20 bp, Artificial Sequence
  Synthetic oligonucleotide; AAG chr11 5243097 5243116 5243100 -
agaacttcctggtgagtagt

SEQ ID NO: 46986 - DNA, 20 bp, Artificial Sequence
  Synthetic oligonucleotide; TAG chr11 5243068 5243087 5243071 -
cacgctttcttctttaccct

SEQ ID NO: 46987 - DNA, 20 bp, Artificial Sequence
  Synthetic oligonucleotide; TGG chr11 5243053 5243072 5243056 -
acccttagatatttgcacta

SEQ ID NO: 46988 - DNA, 20 bp, Artificial Sequence
  Synthetic oligonucleotide; GGG chr11 5243052 5243071 5243055 -
cccttagatatttgcactat

SEQ ID NO: 46989 - DNA, 20 bp, Artificial Sequence
  Synthetic oligonucleotide; AAG chr11 5243040 5243059 5243043 -
tgcactatgggtacttttga

SEQ ID NO: 46990 - DNA, 20 bp, Artificial Sequence
  Synthetic oligonucleotide; CAG chr11 5243037 5243056 5243040 -
actatgggtacttttgaaag

SEQ ID NO: 46991 - DNA, 20 bp, Artificial Sequence
  Synthetic oligonucleotide; GAG chr11 5243035 5243054 5243038 -
tatgggtacttttgaaagca

SEQ ID NO: 46992 - DNA, 20 bp, Artificial Sequence
  Synthetic oligonucleotide; AGG chr11 5243034 5243053 5243037 -
atgggtacttttgaaagcag

SEQ ID NO: 46993 - DNA, 20 bp, Artificial Sequence
  Synthetic oligonucleotide; TGG chr11 5243031 5243050 5243034 -
ggtacttttgaaagcagagg

SEQ ID NO: 46994 - DNA, 20 bp, Artificial Sequence
  Synthetic oligonucleotide; GAG chr11 5243012 5243031 5243015 -
gtggctttctcttgtgttat

SEQ ID NO: 46995 - DNA, 20 bp, Artificial Sequence
  Synthetic oligonucleotide; CAG chr11 5243008 5243027 5243011 -
ctttctcttgtgttatgagt

SEQ ID NO: 46996 - DNA, 20 bp, Artificial Sequence
  Synthetic oligonucleotide; TGG chr11 5243002 5243021 5243005 -
cttgtgttatgagtcagcta

SEQ ID NO: 46997 - DNA, 20 bp, Artificial Sequence
  Synthetic oligonucleotide; GGG chr11 5243001 5243020 5243004 -
ttgtgttatgagtcagctat

SEQ ID NO: 46998 - DNA, 20 bp, Artificial Sequence
  Synthetic oligonucleotide; CAG chr11 5242987 5243006 5242990 -
agctatgggatatgatattt

SEQ ID NO: 46999 - DNA, 20 bp, Artificial Sequence
  Synthetic oligonucleotide; CAG chr11 5242984 5243003 5242987 -
tatgggatatgatatttcag

SEQ ID NO: 47000 - DNA, 20 bp, Artificial Sequence
  Synthetic oligonucleotide; TGG chr11 5242981 5243000 5242984 -
gggatatgatatttcagcag

SEQ ID NO: 47001 - DNA, 20 bp, Artificial Sequence
  Synthetic oligonucleotide; GGG chr11 5242980 5242999 5242983 -
ggatatgatatttcagcagt

SEQ ID NO: 47002 - DNA, 20 bp, Artificial Sequence
  Synthetic oligonucleotide; GAG chr11 5242972 5242991 5242975 -
tatttcagcagtgggatttt

SEQ ID NO: 47003 - DNA, 20 bp, Artificial Sequence
  Synthetic oligonucleotide; GAG chr11 5242970 5242989 5242973 -
tttcagcagtgggattttga

SEQ ID NO: 47004 - DNA, 20 bp, Artificial Sequence
  Synthetic oligonucleotide; TGG chr11 5242936 5242955 5242939 -
taaataacataactaaaatt

SEQ ID NO: 47005 - DNA, 20 bp, Artificial Sequence
  Synthetic oligonucleotide; TAG chr11 5242933 5242952 5242936 -
ataacataactaaaatttgg

SEQ ID NO: 47006 - DNA, 20 bp, Artificial Sequence
  Synthetic oligonucleotide; GAG chr11 5242931 5242950 5242934 -
aacataactaaaatttggta

SEQ ID NO: 47007 - DNA, 20 bp, Artificial Sequence
  Synthetic oligonucleotide; AAG chr11 5242927 5242946 5242930 -
taactaaaatttggtagagc

SEQ ID NO: 47008 - DNA, 20 bp, Artificial Sequence
  Synthetic oligonucleotide; AGG chr11 5242926 5242945 5242929 -
aactaaaatttggtagagca

SEQ ID NO: 47009 - DNA, 20 bp, Artificial Sequence
  Synthetic oligonucleotide; TGG chr11 5242912 5242931 5242915 -
agagcaaggactatgaataa

SEQ ID NO: 47010 - DNA, 20 bp, Artificial Sequence
  Synthetic oligonucleotide; AAG chr11 5242909 5242928 5242912 -
gcaaggactatgaataatgg

SEQ ID NO: 47011 - DNA, 20 bp, Artificial Sequence
  Synthetic oligonucleotide; AGG chr11 5242908 5242927 5242911 -
caaggactatgaataatgga

SEQ ID NO: 47012 - DNA, 20 bp, Artificial Sequence
  Synthetic oligonucleotide; TAG chr11 5242890 5242909 5242893 -
gaaggccacttaccatttga

SEQ ID NO: 47013 - DNA, 20 bp, Artificial Sequence
  Synthetic oligonucleotide; TGG chr11 5242858 5242877 5242861 -
acacatcttataaaaaattc

SEQ ID NO: 47014 - DNA, 20 bp, Artificial Sequence
  Synthetic oligonucleotide; GAG chr11 5242842 5242861 5242845 -
attctggccaaaatcaaact

SEQ ID NO: 47015 - DNA, 20 bp, Artificial Sequence
  Synthetic oligonucleotide; TGG chr11 5242833 5242852 5242836 -
aaaatcaaactgagtgtttt

SEQ ID NO: 47016 - DNA, 20 bp, Artificial Sequence
  Synthetic oligonucleotide; GAG chr11 5242828 5242847 5242831 -
caaactgagtgtttttggat

SEQ ID NO: 47017 - DNA, 20 bp, Artificial Sequence
  Synthetic oligonucleotide; AGG chr11 5242827 5242846 5242830 -
aaactgagtgtttttggatg

SEQ ID NO: 47018 - DNA, 20 bp, Artificial Sequence
  Synthetic oligonucleotide; GGG chr11 5242826 5242845 5242829 -
aactgagtgtttttggatga

SEQ ID NO: 47019 - DNA, 20 bp, Artificial Sequence
  Synthetic oligonucleotide; CAG chr11 5242821 5242840 5242824 -
agtgtttttggatgagggaa

SEQ ID NO: 47020 - DNA, 20 bp, Artificial Sequence
  Synthetic oligonucleotide; AAG chr11 5242818 5242837 5242821 -
gtttttggatgagggaacag

SEQ ID NO: 47021 - DNA, 20 bp, Artificial Sequence
  Synthetic oligonucleotide; GAG chr11 5242813 5242832 5242816 -
tggatgagggaacagaagtt

SEQ ID NO: 47022 - DNA, 20 bp, Artificial Sequence
  Synthetic oligonucleotide; TAG chr11 5242809 5242828 5242812 -
tgagggaacagaagttgaga

SEQ ID NO: 47023 - DNA, 20 bp, Artificial Sequence
  Synthetic oligonucleotide; GAG chr11 5242807 5242826 5242810 -
agggaacagaagttgagata

SEQ ID NO: 47024 - DNA, 20 bp, Artificial Sequence
  Synthetic oligonucleotide; TGG chr11 5242786 5242805 5242789 -
agaaaataacatctttcctt

SEQ ID NO: 47025 - DNA, 20 bp, Artificial Sequence
  Synthetic oligonucleotide; CAG chr11 5242782 5242801 5242785 -
aataacatctttcctttggt

SEQ ID NO: 47026 - DNA, 20 bp, Artificial Sequence
  Synthetic oligonucleotide; TAG chr11 5242757 5242776 5242760 -
aaattttctataaaaattaa

SEQ ID NO: 47027 - DNA, 20 bp, Artificial Sequence
  Synthetic oligonucleotide; TAG chr11 5242741 5242760 5242744 -
ttaatagtcacttttctgca

SEQ ID NO: 47028 - DNA, 20 bp, Artificial Sequence
  Synthetic oligonucleotide; TGG chr11 5242735 5242754 5242738 -
gtcacttttctgcatagtcc

SEQ ID NO: 47029 - DNA, 20 bp, Artificial Sequence
  Synthetic oligonucleotide; GAG chr11 5242733 5242752 5242736 -
cacttttctgcatagtcctg

SEQ ID NO: 47030 - DNA, 20 bp, Artificial Sequence
  Synthetic oligonucleotide; AGG chr11 5242732 5242751 5242735 -
acttttctgcatagtcctgg

SEQ ID NO: 47031 - DNA, 20 bp, Artificial Sequence
  Synthetic oligonucleotide; TAG chr11 5242728 5242747 5242731 -
ttctgcatagtcctggaggt

SEQ ID NO: 47032 - DNA, 20 bp, Artificial Sequence
  Synthetic oligonucleotide; AAG chr11 5242722 5242741 5242725 -
atagtcctggaggttagaaa

SEQ ID NO: 47033 - DNA, 20 bp, Artificial Sequence
  Synthetic oligonucleotide; AAG chr11 5242707 5242726 5242710 -
agaaaaagatcaactgaaca

SEQ ID NO: 47034 - DNA, 20 bp, Artificial Sequence
  Synthetic oligonucleotide; TAG chr11 5242704 5242723 5242707 -
aaaagatcaactgaacaaag

SEQ ID NO: 47035 - DNA, 20 bp, Artificial Sequence
  Synthetic oligonucleotide; TGG chr11 5242701 5242720 5242704 -
agatcaactgaacaaagtag

SEQ ID NO: 47036 - DNA, 20 bp, Artificial Sequence
  Synthetic oligonucleotide; GGG chr11 5242700 5242719 5242703 -
gatcaactgaacaaagtagt

SEQ ID NO: 47037 - DNA, 20 bp, Artificial Sequence
  Synthetic oligonucleotide; AAG chr11 5242697 5242716 5242700 -
caactgaacaaagtagtggg

SEQ ID NO: 47038 - DNA, 20 bp, Artificial Sequence
  Synthetic oligonucleotide; AAG chr11 5242686 5242705 5242689 -
agtagtgggaagctgttaaa

SEQ ID NO: 47039 - DNA, 20 bp, Artificial Sequence
  Synthetic oligonucleotide; GAG chr11 5242684 5242703 5242687 -
tagtgggaagctgttaaaaa

SEQ ID NO: 47040 - DNA, 20 bp, Artificial Sequence
  Synthetic oligonucleotide; AGG chr11 5242683 5242702 5242686 -
agtgggaagctgttaaaaag

SEQ ID NO: 47041 - DNA, 20 bp, Artificial Sequence
  Synthetic oligonucleotide; TGG chr11 5242658 5242677 5242661 -
tgtttccctccgaatgatga

SEQ ID NO: 47042 - DNA, 20 bp, Artificial Sequence
  Synthetic oligonucleotide; TGG chr11 5242639 5242658 5242642 -
atggtatacttttgtacgca

SEQ ID NO: 47043 - DNA, 20 bp, Artificial Sequence
  Synthetic oligonucleotide; CAG chr11 5242634 5242653 5242637 -
atacttttgtacgcatggta

SEQ ID NO: 47044 - DNA, 20 bp, Artificial Sequence
  Synthetic oligonucleotide; AGG chr11 5242633 5242652 5242636 -
tacttttgtacgcatggtac

SEQ ID NO: 47045 - DNA, 20 bp, Artificial Sequence
  Synthetic oligonucleotide; GAG chr11 5242618 5242637 5242621 -
ggtacaggattctttgttat

SEQ ID NO: 47046 - DNA, 20 bp, Artificial Sequence
  Synthetic oligonucleotide; TGG chr11 5242611 5242630 5242614 -
gattctttgttatgagtgtt

SEQ ID NO: 47047 - DNA, 20 bp, Artificial Sequence
  Synthetic oligonucleotide; GGG chr11 5242610 5242629 5242613 -
attctttgttatgagtgttt

SEQ ID NO: 47048 - DNA, 20 bp, Artificial Sequence
  Synthetic oligonucleotide; TGG chr11 5242569 5242588 5242572 -
gtatgtatgtatgtgatgac

SEQ ID NO: 47049 - DNA, 20 bp, Artificial Sequence
  Synthetic oligonucleotide; GGG chr11 5242568 5242587 5242571 -
tatgtatgtatgtgatgact

SEQ ID NO: 47050 - DNA, 20 bp, Artificial Sequence
  Synthetic oligonucleotide; GGG chr11 5242567 5242586 5242570 -
atgtatgtatgtgatgactg

SEQ ID NO: 47051 - DNA, 20 bp, Artificial Sequence
  Synthetic oligonucleotide; AAG chr11 5242537 5242556 5242540 -
ctatccattactgttccttg

SEQ ID NO: 47052 - DNA, 20 bp, Artificial Sequence
  Synthetic oligonucleotide; AAG chr11 5242513 5242532 5242516 -
actattatcctactttttaa

SEQ ID NO: 47053 - DNA, 20 bp, Artificial Sequence
  Synthetic oligonucleotide; AGG chr11 5242512 5242531 5242515 -
ctattatcctactttttaaa

SEQ ID NO: 47054 - DNA, 20 bp, Artificial Sequence
  Synthetic oligonucleotide; AAG chr11 5242506 5242525 5242509 -
tcctactttttaaaaggacg

SEQ ID NO: 47055 - DNA, 20 bp, Artificial Sequence
  Synthetic oligonucleotide; TGG chr11 5242469 5242488 5242472 -
atgaaacaatcacaatatgt

SEQ ID NO: 47056 - DNA, 20 bp, Artificial Sequence
  Synthetic oligonucleotide; GGG chr11 5242468 5242487 5242471 -
tgaaacaatcacaatatgtt

SEQ ID NO: 47057 - DNA, 20 bp, Artificial Sequence
  Synthetic oligonucleotide; GGG chr11 5242467 5242486 5242470 -
gaaacaatcacaatatgttg

SEQ ID NO: 47058 - DNA, 20 bp, Artificial Sequence
  Synthetic oligonucleotide; TAG chr11 5242464 5242483 5242467 -
acaatcacaatatgttgggg

SEQ ID NO: 47059 - DNA, 20 bp, Artificial Sequence
  Synthetic oligonucleotide; GAG chr11 5242460 5242479 5242463 -
tcacaatatgttggggtagt

SEQ ID NO: 47060 - DNA, 20 bp, Artificial Sequence
  Synthetic oligonucleotide; TGG chr11 5242456 5242475 5242459 -
aatatgttggggtagtgagt

SEQ ID NO: 47061 - DNA, 20 bp, Artificial Sequence
  Synthetic oligonucleotide; TAG chr11 5242451 5242470 5242454 -
gttggggtagtgagttggca

SEQ ID NO: 47062 - DNA, 20 bp, Artificial Sequence
  Synthetic oligonucleotide; AAG chr11 5242447 5242466 5242450 -
gggtagtgagttggcatagc

SEQ ID NO: 47063 - DNA, 20 bp, Artificial Sequence
  Synthetic oligonucleotide; AAG chr11 5242443 5242462 5242446 -
agtgagttggcatagcaagt

SEQ ID NO: 47064 - DNA, 20 bp, Artificial Sequence
  Synthetic oligonucleotide; GAG chr11 5242441 5242460 5242444 -
tgagttggcatagcaagtaa

SEQ ID NO: 47065 - DNA, 20 bp, Artificial Sequence
  Synthetic oligonucleotide; AAG chr11 5242438 5242457 5242441 -
gttggcatagcaagtaagag

SEQ ID NO: 47066 - DNA, 20 bp, Artificial Sequence
  Synthetic oligonucleotide; AGG chr11 5242437 5242456 5242440 -
ttggcatagcaagtaagaga

SEQ ID NO: 47067 - DNA, 20 bp, Artificial Sequence
  Synthetic oligonucleotide; TAG chr11 5242433 5242452 5242436 -
catagcaagtaagagaagga

SEQ ID NO: 47068 - DNA, 20 bp, Artificial Sequence
  Synthetic oligonucleotide; AGG chr11 5242432 5242451 5242435 -
atagcaagtaagagaaggat

SEQ ID NO: 47069 - DNA, 20 bp, Artificial Sequence
  Synthetic oligonucleotide; TGG chr11 5242423 5242442 5242426 -
aagagaaggataggacacaa

SEQ ID NO: 47070 - DNA, 20 bp, Artificial Sequence
  Synthetic oligonucleotide; GGG chr11 5242422 5242441 5242425 -
agagaaggataggacacaat

SEQ ID NO: 47071 - DNA, 20 bp, Artificial Sequence
  Synthetic oligonucleotide; GAG chr11 5242420 5242439 5242423 -
agaaggataggacacaatgg

SEQ ID NO: 47072 - DNA, 20 bp, Artificial Sequence
  Synthetic oligonucleotide; AGG chr11 5242419 5242438 5242422 -
gaaggataggacacaatggg

SEQ ID NO: 47073 - DNA, 20 bp, Artificial Sequence
  Synthetic oligonucleotide; CAG chr11 5242414 5242433 5242417 -
ataggacacaatgggaggtg

SEQ ID NO: 47074 - DNA, 20 bp, Artificial Sequence
  Synthetic oligonucleotide; AGG chr11 5242413 5242432 5242416 -
taggacacaatgggaggtgc

SEQ ID NO: 47075 - DNA, 20 bp, Artificial Sequence
  Synthetic oligonucleotide; GGG chr11 5242412 5242431 5242415 -
aggacacaatgggaggtgca

SEQ ID NO: 47076 - DNA, 20 bp, Artificial Sequence
  Synthetic oligonucleotide; CAG chr11 5242405 5242424 5242408 -
aatgggaggtgcagggctgc

SEQ ID NO: 47077 - DNA, 20 bp, Artificial Sequence
  Synthetic oligonucleotide; AAG chr11 5242394 5242413 5242397 -
cagggctgccagtcatattg

SEQ ID NO: 47078 - DNA, 20 bp, Artificial Sequence
  Synthetic oligonucleotide; TAG chr11 5242383 5242402 5242386 -
gtcatattgaagctgatatc

SEQ ID NO: 47079 - DNA, 20 bp, Artificial Sequence
  Synthetic oligonucleotide; TGG chr11 5242373 5242392 5242376 -
agctgatatctagcccataa

SEQ ID NO: 47080 - DNA, 20 bp, Artificial Sequence
  Synthetic oligonucleotide; GAG chr11 5242369 5242388 5242372 -
gatatctagcccataatggt

SEQ ID NO: 47081 - DNA, 20 bp, Artificial Sequence
  Synthetic oligonucleotide; GAG chr11 5242367 5242386 5242370 -
tatctagcccataatggtga

SEQ ID NO: 47082 - DNA, 20 bp, Artificial Sequence
  Synthetic oligonucleotide; TGG chr11 5242352 5242371 5242355 -
ggtgagagttgctcaaactc

SEQ ID NO: 47083 - DNA, 20 bp, Artificial Sequence
  Synthetic oligonucleotide; AAG chr11 5242344 5242363 5242347 -
ttgctcaaactctggtgaaa

SEQ ID NO: 47084 - DNA, 20 bp, Artificial Sequence
  Synthetic oligonucleotide; AGG chr11 5242343 5242362 5242346 -
tgctcaaactctggtgaaaa

SEQ ID NO: 47085 - DNA, 20 bp, Artificial Sequence
  Synthetic oligonucleotide; AAG chr11 5242336 5242355 5242339 -
actctggtgaaaaaggatgt

SEQ ID NO: 47086 - DNA, 20 bp, Artificial Sequence
  Synthetic oligonucleotide; AAG chr11 5242314 5242333 5242317 -
gtgttatatctatttactgc

SEQ ID NO: 47087 - DNA, 20 bp, Artificial Sequence
  Synthetic oligonucleotide; CAG chr11 5242309 5242328 5242312 -
atatctatttactgcaagtc

SEQ ID NO: 47088 - DNA, 20 bp, Artificial Sequence
  Synthetic oligonucleotide; GAG chr11 5242303 5242322 5242306 -
atttactgcaagtccagctt

SEQ ID NO: 47089 - DNA, 20 bp, Artificial Sequence
  Synthetic oligonucleotide; AGG chr11 5242302 5242321 5242305 -
tttactgcaagtccagcttg

SEQ ID NO: 47090 - DNA, 20 bp, Artificial Sequence
  Synthetic oligonucleotide; CAG chr11 5242251 5242270 5242254 -
ttttatcttcactccctccc

SEQ ID NO: 47091 - DNA, 20 bp, Artificial Sequence
  Synthetic oligonucleotide; TAG chr11 5242244 5242263 5242247 -
ttcactccctccccagctct

SEQ ID NO: 47092 - DNA, 20 bp, Artificial Sequence
  Synthetic oligonucleotide; AGG chr11 5242243 5242262 5242246 -
tcactccctccccagctctt

SEQ ID NO: 47093 - DNA, 20 bp, Artificial Sequence
  Synthetic oligonucleotide; TGG chr11 5242220 5242239 5242223 -
caacgtgatattgattgttt

SEQ ID NO: 47094 - DNA, 20 bp, Artificial Sequence
  Synthetic oligonucleotide; CAG chr11 5242207 5242226 5242210 -
attgttttggcaacccactt

SEQ ID NO: 47095 - DNA, 20 bp, Artificial Sequence
  Synthetic oligonucleotide; GAG chr11 5242203 5242222 5242206 -
ttttggcaacccacttcagc

SEQ ID NO: 47096 - DNA, 20 bp, Artificial Sequence
  Synthetic oligonucleotide; AGG chr11 5242202 5242221 5242205 -
tttggcaacccacttcagcg

SEQ ID NO: 47097 - DNA, 20 bp, Artificial Sequence
  Synthetic oligonucleotide; CAG chr11 5242188 5242207 5242191 -
tcagcgaggattttacccta

SEQ ID NO: 47098 - DNA, 20 bp, Artificial Sequence
  Synthetic oligonucleotide; CAG chr11 5242182 5242201 5242185 -
aggattttaccctacagata

SEQ ID NO: 47099 - DNA, 20 bp, Artificial Sequence
  Synthetic oligonucleotide; AGG chr11 5242181 5242200 5242184 -
ggattttaccctacagatac

SEQ ID NO: 47100 - DNA, 20 bp, Artificial Sequence
  Synthetic oligonucleotide; TGG chr11 5242173 5242192 5242176 -
ccctacagatacaggcttct

SEQ ID NO: 47101 - DNA, 20 bp, Artificial Sequence
  Synthetic oligonucleotide; CAG chr11 5242170 5242189 5242173 -
tacagatacaggcttcttgg

SEQ ID NO: 47102 - DNA, 20 bp, Artificial Sequence
  Synthetic oligonucleotide; TGG chr11 5242151 5242170 5242154 -
gcagtaactaacaaatgctg

SEQ ID NO: 47103 - DNA, 20 bp, Artificial Sequence
  Synthetic oligonucleotide; TAG chr11 5242139 5242158 5242142 -
aaatgctgtggttaatgctg

SEQ ID NO: 47104 - DNA, 20 bp, Artificial Sequence
  Synthetic oligonucleotide; AAG chr11 5242131 5242150 5242134 -
tggttaatgctgtagcccac

SEQ ID NO: 47105 - DNA, 20 bp, Artificial Sequence
  Synthetic oligonucleotide; GAG chr11 5242122 5242141 5242125 -
ctgtagcccacaagaccact

SEQ ID NO: 47106 - DNA, 20 bp, Artificial Sequence
  Synthetic oligonucleotide; TGG chr11 5242093 5242112 5242096 -
gtccactatgtttgtaccta

SEQ ID NO: 47107 - DNA, 20 bp, Artificial Sequence
  Synthetic oligonucleotide; TAG chr11 5242049 5242068 5242052 -
tcccaaaatctcatctcctt

SEQ ID NO: 47108 - DNA, 20 bp, Artificial Sequence
  Synthetic oligonucleotide; TGG chr11 5242045 5242064 5242048 -
aaaatctcatctcctttaga

SEQ ID NO: 47109 - DNA, 20 bp, Artificial Sequence
  Synthetic oligonucleotide; GGG chr11 5242044 5242063 5242047 -
aaatctcatctcctttagat

SEQ ID NO: 47110 - DNA, 20 bp, Artificial Sequence
  Synthetic oligonucleotide; GGG chr11 5242043 5242062 5242046 -
aatctcatctcctttagatg

SEQ ID NO: 47111 - DNA, 20 bp, Artificial Sequence
  Synthetic oligonucleotide; GGG chr11 5242042 5242061 5242045 -
atctcatctcctttagatgg

SEQ ID NO: 47112 - DNA, 20 bp, Artificial Sequence
  Synthetic oligonucleotide; GAG chr11 5242040 5242059 5242043 -
ctcatctcctttagatgggg

SEQ ID NO: 47113 - DNA, 20 bp, Artificial Sequence
  Synthetic oligonucleotide; AGG chr11 5242039 5242058 5242042 -
tcatctcctttagatggggg

SEQ ID NO: 47114 - DNA, 20 bp, Artificial Sequence
  Synthetic oligonucleotide; TGG chr11 5242035 5242054 5242038 -
ctcctttagatgggggaggt

SEQ ID NO: 47115 - DNA, 20 bp, Artificial Sequence
  Synthetic oligonucleotide; GGG chr11 5242034 5242053 5242037 -
tcctttagatgggggaggtt

SEQ ID NO: 47116 - DNA, 20 bp, Artificial Sequence
  Synthetic oligonucleotide; GGG chr11 5242033 5242052 5242036 -
cctttagatgggggaggttg

SEQ ID NO: 47117 - DNA, 20 bp, Artificial Sequence
  Synthetic oligonucleotide; GAG chr11 5242031 5242050 5242034 -
tttagatgggggaggttggg

SEQ ID NO: 47118 - DNA, 20 bp, Artificial Sequence
  Synthetic oligonucleotide; AAG chr11 5242028 5242047 5242031 -
agatgggggaggttggggag

SEQ ID NO: 47119 - DNA, 20 bp, Artificial Sequence
  Synthetic oligonucleotide; GAG chr11 5242026 5242045 5242029 -
atgggggaggttggggagaa

SEQ ID NO: 47120 - DNA, 20 bp, Artificial Sequence
  Synthetic oligonucleotide; CAG chr11 5242023 5242042 5242026 -
ggggaggttggggagaagag

SEQ ID NO: 47121 - DNA, 20 bp, Artificial Sequence
  Synthetic oligonucleotide; CAG chr11 5242003 5242022 5242006 -
cagtatcctgcctgctgatt

SEQ ID NO: 47122 - DNA, 20 bp, Artificial Sequence
  Synthetic oligonucleotide; TAG chr11 5241983 5242002 5241986 -
cagttcctgcatgataaaaa

SEQ ID NO: 47123 - DNA, 20 bp, Artificial Sequence
  Synthetic oligonucleotide; AAG chr11 5241976 5241995 5241979 -
tgcatgataaaaatagaata

SEQ ID NO: 47124 - DNA, 20 bp, Artificial Sequence
  Synthetic oligonucleotide; AAG chr11 5241960 5241979 5241963 -
aataaagaaatatgctctct

SEQ ID NO: 47125 - DNA, 20 bp, Artificial Sequence
  Synthetic oligonucleotide; CAG chr11 5241912 5241931 5241915 -
ctttatattttaccctgatt

SEQ ID NO: 47126 - DNA, 20 bp, Artificial Sequence
  Synthetic oligonucleotide; AAG chr11 5241905 5241924 5241908 -
ttttaccctgattcagccaa

SEQ ID NO: 47127 - DNA, 20 bp, Artificial Sequence
  Synthetic oligonucleotide; AGG chr11 5241904 5241923 5241907 -
tttaccctgattcagccaaa

SEQ ID NO: 47128 - DNA, 20 bp, Artificial Sequence
  Synthetic oligonucleotide; TGG chr11 5241886 5241905 5241889 -
aaaggacgcactatttctga

SEQ ID NO: 47129 - DNA, 20 bp, Artificial Sequence
  Synthetic oligonucleotide; GAG chr11 5241879 5241898 5241882 -
gcactatttctgatggaaat

SEQ ID NO: 47130 - DNA, 20 bp, Artificial Sequence
  Synthetic oligonucleotide; TGG chr11 5241871 5241890 5241874 -
tctgatggaaatgagaatgt

SEQ ID NO: 47131 - DNA, 20 bp, Artificial Sequence
  Synthetic oligonucleotide; GAG chr11 5241869 5241888 5241872 -
tgatggaaatgagaatgttg

SEQ ID NO: 47132 - DNA, 20 bp, Artificial Sequence
  Synthetic oligonucleotide; TGG chr11 5241864 5241883 5241867 -
gaaatgagaatgttggagaa

SEQ ID NO: 47133 - DNA, 20 bp, Artificial Sequence
  Synthetic oligonucleotide; GGG chr11 5241863 5241882 5241866 -
aaatgagaatgttggagaat

SEQ ID NO: 47134 - DNA, 20 bp, Artificial Sequence
  Synthetic oligonucleotide; GAG chr11 5241861 5241880 5241864 -
atgagaatgttggagaatgg

SEQ ID NO: 47135 - DNA, 20 bp, Artificial Sequence
  Synthetic oligonucleotide; AAG chr11 5241855 5241874 5241858 -
atgttggagaatgggagttt

SEQ ID NO: 47136 - DNA, 20 bp, Artificial Sequence
  Synthetic oligonucleotide; AGG chr11 5241854 5241873 5241857 -
tgttggagaatgggagttta

SEQ ID NO: 47137 - DNA, 20 bp, Artificial Sequence
  Synthetic oligonucleotide; CAG chr11 5241850 5241869 5241853 -
ggagaatgggagtttaagga

SEQ ID NO: 47138 - DNA, 20 bp, Artificial Sequence
  Synthetic oligonucleotide; GAG chr11 5241848 5241867 5241851 -
agaatgggagtttaaggaca

SEQ ID NO: 47139 - DNA, 20 bp, Artificial Sequence
  Synthetic oligonucleotide; AAG chr11 5241845 5241864 5241848 -
atgggagtttaaggacagag

SEQ ID NO: 47140 - DNA, 20 bp, Artificial Sequence
  Synthetic oligonucleotide; AAG chr11 5241822 5241841 5241825 -
atactttcttgcaatcctgc

SEQ ID NO: 47141 - DNA, 20 bp, Artificial Sequence
  Synthetic oligonucleotide; AAG chr11 5241817 5241836 5241820 -
ttcttgcaatcctgcaagaa

SEQ ID NO: 47142 - DNA, 20 bp, Artificial Sequence
  Synthetic oligonucleotide; GAG chr11 5241815 5241834 5241818 -
cttgcaatcctgcaagaaaa

SEQ ID NO: 47143 - DNA, 20 bp, Artificial Sequence
  Synthetic oligonucleotide; GAG chr11 5241813 5241832 5241816 -
tgcaatcctgcaagaaaaga

SEQ ID NO: 47144 - DNA, 20 bp, Artificial Sequence
  Synthetic oligonucleotide; TGG chr11 5241804 5241823 5241807 -
gcaagaaaagagagaactcg

SEQ ID NO: 47145 - DNA, 20 bp, Artificial Sequence
  Synthetic oligonucleotide; GGG chr11 5241803 5241822 5241806 -
caagaaaagagagaactcgt

SEQ ID NO: 47146 - DNA, 20 bp, Artificial Sequence
  Synthetic oligonucleotide; TGG chr11 5241800 5241819 5241803 -
gaaaagagagaactcgtggg

SEQ ID NO: 47147 - DNA, 20 bp, Artificial Sequence
  Synthetic oligonucleotide; TAG chr11 5241794 5241813 5241797 -
agagaactcgtgggtggatt

SEQ ID NO: 47148 - DNA, 20 bp, Artificial Sequence
  Synthetic oligonucleotide; TGG chr11 5241791 5241810 5241794 -
gaactcgtgggtggatttag

SEQ ID NO: 47149 - DNA, 20 bp, Artificial Sequence
  Synthetic oligonucleotide; GGG chr11 5241790 5241809 5241793 -
aactcgtgggtggatttagt

SEQ ID NO: 47150 - DNA, 20 bp, Artificial Sequence
  Synthetic oligonucleotide; GGG chr11 5241789 5241808 5241792 -
actcgtgggtggatttagtg

SEQ ID NO: 47151 - DNA, 20 bp, Artificial Sequence
  Synthetic oligonucleotide; TAG chr11 5241786 5241805 5241789 -
cgtgggtggatttagtgggg

SEQ ID NO: 47152 - DNA, 20 bp, Artificial Sequence
  Synthetic oligonucleotide; TAG chr11 5241776 5241795 5241779 -
tttagtggggtagttactcc

SEQ ID NO: 47153 - DNA, 20 bp, Artificial Sequence
  Synthetic oligonucleotide; AGG chr11 5241775 5241794 5241778 -
ttagtggggtagttactcct

SEQ ID NO: 47154 - DNA, 20 bp, Artificial Sequence
  Synthetic oligonucleotide; AAG chr11 5241772 5241791 5241775 -
gtggggtagttactcctagg

SEQ ID NO: 47155 - DNA, 20 bp, Artificial Sequence
  Synthetic oligonucleotide; AGG chr11 5241771 5241790 5241774 -
tggggtagttactcctagga

SEQ ID NO: 47156 - DNA, 20 bp, Artificial Sequence
  Synthetic oligonucleotide; GGG chr11 5241770 5241789 5241773 -
ggggtagttactcctaggaa

SEQ ID NO: 47157 - DNA, 20 bp, Artificial Sequence
  Synthetic oligonucleotide; GGG chr11 5241769 5241788 5241772 -
gggtagttactcctaggaag

SEQ ID NO: 47158 - DNA, 20 bp, Artificial Sequence
  Synthetic oligonucleotide; TAG chr11 5241756 5241775 5241759 -
taggaaggggaaatcgtctc

SEQ ID NO: 47159 - DNA, 20 bp, Artificial Sequence
  Synthetic oligonucleotide; AAG chr11 5241750 5241769 5241753 -
ggggaaatcgtctctagaat

SEQ ID NO: 47160 - DNA, 20 bp, Artificial Sequence
  Synthetic oligonucleotide; CAG chr11 5241735 5241754 5241738 -
agaataagacaatgttttta

SEQ ID NO: 47161 - DNA, 20 bp, Artificial Sequence
  Synthetic oligonucleotide; AAG chr11 5241731 5241750 5241734 -
taagacaatgtttttacaga

SEQ ID NO: 47162 - DNA, 20 bp, Artificial Sequence
  Synthetic oligonucleotide; AGG chr11 5241730 5241749 5241733 -
aagacaatgtttttacagaa

SEQ ID NO: 47163 - DNA, 20 bp, Artificial Sequence
  Synthetic oligonucleotide; GGG chr11 5241729 5241748 5241732 -
agacaatgtttttacagaaa

SEQ ID NO: 47164 - DNA, 20 bp, Artificial Sequence
  Synthetic oligonucleotide; GAG chr11 5241727 5241746 5241730 -
acaatgtttttacagaaagg

SEQ ID NO: 47165 - DNA, 20 bp, Artificial Sequence
  Synthetic oligonucleotide; AGG chr11 5241726 5241745 5241729 -
caatgtttttacagaaaggg

SEQ ID NO: 47166 - DNA, 20 bp, Artificial Sequence
  Synthetic oligonucleotide; TGG chr11 5241719 5241738 5241722 -
tttacagaaagggaggtcaa

SEQ ID NO: 47167 - DNA, 20 bp, Artificial Sequence
  Synthetic oligonucleotide; GAG chr11 5241717 5241736 5241720 -
tacagaaagggaggtcaatg

SEQ ID NO: 47168 - DNA, 20 bp, Artificial Sequence
  Synthetic oligonucleotide; AGG chr11 5241716 5241735 5241719 -
acagaaagggaggtcaatgg

SEQ ID NO: 47169 - DNA, 20 bp, Artificial Sequence
  Synthetic oligonucleotide; TGG chr11 5241706 5241725 5241709 -
aggtcaatggaggtactctt

SEQ ID NO: 47170 - DNA, 20 bp, Artificial Sequence
  Synthetic oligonucleotide; GAG chr11 5241704 5241723 5241707 -
gtcaatggaggtactctttg

SEQ ID NO: 47171 - DNA, 20 bp, Artificial Sequence
  Synthetic oligonucleotide; AGG chr11 5241703 5241722 5241706 -
tcaatggaggtactctttgg

SEQ ID NO: 47172 - DNA, 20 bp, Artificial Sequence
  Synthetic oligonucleotide; AAG chr11 5241697 5241716 5241700 -
gaggtactctttggaggtgt

SEQ ID NO: 47173 - DNA, 20 bp, Artificial Sequence
  Synthetic oligonucleotide; GAG chr11 5241695 5241714 5241698 -
ggtactctttggaggtgtaa

SEQ ID NO: 47174 - DNA, 20 bp, Artificial Sequence
  Synthetic oligonucleotide; AGG chr11 5241694 5241713 5241697 -
gtactctttggaggtgtaag

SEQ ID NO: 47175 - DNA, 20 bp, Artificial Sequence
  Synthetic oligonucleotide; TGG chr11 5241686 5241705 5241689 -
tggaggtgtaagaggattgt

SEQ ID NO: 47176 - DNA, 20 bp, Artificial Sequence
  Synthetic oligonucleotide; TAG chr11 5241683 5241702 5241686 -
aggtgtaagaggattgttgg

SEQ ID NO: 47177 - DNA, 20 bp, Artificial Sequence
  Synthetic oligonucleotide; TAG chr11 5241676 5241695 5241679 -
agaggattgttggtagtgtg

SEQ ID NO: 47178 - DNA, 20 bp, Artificial Sequence
  Synthetic oligonucleotide; GAG chr11 5241674 5241693 5241677 -
aggattgttggtagtgtgta

SEQ ID NO: 47179 - DNA, 20 bp, Artificial Sequence
  Synthetic oligonucleotide; AGG chr11 5241673 5241692 5241676 -
ggattgttggtagtgtgtag

SEQ ID NO: 47180 - DNA, 20 bp, Artificial Sequence
  Synthetic oligonucleotide; TAG chr11 5241665 5241684 5241668 -
ggtagtgtgtagaggtatgt

SEQ ID NO: 47181 - DNA, 20 bp, Artificial Sequence
  Synthetic oligonucleotide; AGG chr11 5241664 5241683 5241667 -
gtagtgtgtagaggtatgtt

SEQ ID NO: 47182 - DNA, 20 bp, Artificial Sequence
  Synthetic oligonucleotide; TAG chr11 5241653 5241672 5241656 -
aggtatgttaggactcaaat

SEQ ID NO: 47183 - DNA, 20 bp, Artificial Sequence
  Synthetic oligonucleotide; AAG chr11 5241650 5241669 5241653 -
tatgttaggactcaaattag

SEQ ID NO: 47184 - DNA, 20 bp, Artificial Sequence
  Synthetic oligonucleotide; TAG chr11 5241640 5241659 5241643 -
ctcaaattagaagttctgta

SEQ ID NO: 47185 - DNA, 20 bp, Artificial Sequence
  Synthetic oligonucleotide; AGG chr11 5241639 5241658 5241642 -
tcaaattagaagttctgtat

SEQ ID NO: 47186 - DNA, 20 bp, Artificial Sequence
  Synthetic oligonucleotide; CAG chr11 5241617 5241636 5241620 -
gctattatttgtatgaaact

SEQ ID NO: 47187 - DNA, 20 bp, Artificial Sequence
  Synthetic oligonucleotide; AGG chr11 5241616 5241635 5241619 -
ctattatttgtatgaaactc

SEQ ID NO: 47188 - DNA, 20 bp, Artificial Sequence
  Synthetic oligonucleotide; TAG chr11 5241610 5241629 5241613 -
tttgtatgaaactcaggata

SEQ ID NO: 47189 - DNA, 20 bp, Artificial Sequence
  Synthetic oligonucleotide; TGG chr11 5241601 5241620 5241604 -
aactcaggatatagctcatt

SEQ ID NO: 47190 - DNA, 20 bp, Artificial Sequence
  Synthetic oligonucleotide; CAG chr11 5241592 5241611 5241595 -
tatagctcatttggtgactg

SEQ ID NO: 47191 - DNA, 20 bp, Artificial Sequence
  Synthetic oligonucleotide; AAG chr11 5241542 5241561 5241545 -
attttttattatttataatg

SEQ ID NO: 47192 - DNA, 20 bp, Artificial Sequence
  Synthetic oligonucleotide; TGG chr11 5241539 5241558 5241542 -
ttttattatttataatgaag

SEQ ID NO: 47193 - DNA, 20 bp, Artificial Sequence
  Synthetic oligonucleotide; GGG chr11 5241538 5241557 5241541 -
tttattatttataatgaagt

SEQ ID NO: 47194 - DNA, 20 bp, Artificial Sequence
  Synthetic oligonucleotide; GGG chr11 5241537 5241556 5241540 -
ttattatttataatgaagtg

SEQ ID NO: 47195 - DNA, 20 bp, Artificial Sequence
  Synthetic oligonucleotide; TGG chr11 5241533 5241552 5241536 -
tatttataatgaagtgggga

SEQ ID NO: 47196 - DNA, 20 bp, Artificial Sequence
  Synthetic oligonucleotide; GGG chr11 5241532 5241551 5241535 -
atttataatgaagtggggat

SEQ ID NO: 47197 - DNA, 20 bp, Artificial Sequence
  Synthetic oligonucleotide; GGG chr11 5241531 5241550 5241534 -
tttataatgaagtggggatg

SEQ ID NO: 47198 - DNA, 20 bp, Artificial Sequence
  Synthetic oligonucleotide; TAG chr11 5241523 5241542 5241526 -
gaagtggggatggggcttcc

SEQ ID NO: 47199 - DNA, 20 bp, Artificial Sequence
  Synthetic oligonucleotide; GAG chr11 5241521 5241540 5241524 -
agtggggatggggcttccta

SEQ ID NO: 47200 - DNA, 20 bp, Artificial Sequence
  Synthetic oligonucleotide; AAG chr11 5241511 5241530 5241514 -
gggcttcctagagaccaatc

SEQ ID NO: 47201 - DNA, 20 bp, Artificial Sequence
  Synthetic oligonucleotide; AGG chr11 5241510 5241529 5241513 -
ggcttcctagagaccaatca

SEQ ID NO: 47202 - DNA, 20 bp, Artificial Sequence
  Synthetic oligonucleotide; GGG chr11 5241509 5241528 5241512 -
gcttcctagagaccaatcaa

SEQ ID NO: 47203 - DNA, 20 bp, Artificial Sequence
  Synthetic oligonucleotide; TGG chr11 5241474 5241493 5241477 -
ctttctcttaacgtcttcaa

SEQ ID NO: 47204 - DNA, 20 bp, Artificial Sequence
  Synthetic oligonucleotide; TAG chr11 5241465 5241484 5241468 -
aacgtcttcaatggtattaa

SEQ ID NO: 47205 - DNA, 20 bp, Artificial Sequence
  Synthetic oligonucleotide; GAG chr11 5241463 5241482 5241466 -
cgtcttcaatggtattaata

SEQ ID NO: 47206 - DNA, 20 bp, Artificial Sequence
  Synthetic oligonucleotide; AAG chr11 5241450 5241469 5241453 -
attaatagagaattatctct

SEQ ID NO: 47207 - DNA, 20 bp, Artificial Sequence
  Synthetic oligonucleotide; AGG chr11 5241449 5241468 5241452 -
ttaatagagaattatctcta

SEQ ID NO: 47208 - DNA, 20 bp, Artificial Sequence
  Synthetic oligonucleotide; TGG chr11 5241437 5241456 5241440 -
tatctctaaggcatgtgaac

SEQ ID NO: 47209 - DNA, 20 bp, Artificial Sequence
  Synthetic oligonucleotide; TGG chr11 5241428 5241447 5241431 -
ggcatgtgaactggctgtct

SEQ ID NO: 47210 - DNA, 20 bp, Artificial Sequence
  Synthetic oligonucleotide; AAG chr11 5241367 5241386 5241370 -
aacatatttataattccatt

SEQ ID NO: 47211 - DNA, 20 bp, Artificial Sequence
  Synthetic oligonucleotide; TAG chr11 5241352 5241371 5241355 -
ccattaagctgtgcatatga

SEQ ID NO: 47212 - DNA, 20 bp, Artificial Sequence
  Synthetic oligonucleotide; AAG chr11 5241326 5241345 5241329 -
tatcatatgtattttcctta

SEQ ID NO: 47213 - DNA, 20 bp, Artificial Sequence
  Synthetic oligonucleotide; AGG chr11 5241325 5241344 5241328 -
atcatatgtattttccttaa

SEQ ID NO: 47214 - DNA, 20 bp, Artificial Sequence
  Synthetic oligonucleotide; AAG chr11 5241314 5241333 5241317 -
tttccttaaaggatttttgt

SEQ ID NO: 47215 - DNA, 20 bp, Artificial Sequence
  Synthetic oligonucleotide; AAG chr11 5241288 5241307 5241291 -
taattgaattgatacctgta

SEQ ID NO: 47216 - DNA, 20 bp, Artificial Sequence
  Synthetic oligonucleotide; CAG chr11 5241245 5241264 5241248 -
aaataataaatctctttgtt

SEQ ID NO: 47217 - DNA, 20 bp, Artificial Sequence
  Synthetic oligonucleotide; AAG chr11 5241218 5241237 5241221 -
ctgtttctataaatatgtac

SEQ ID NO: 47218 - DNA, 20 bp, Artificial Sequence
  Synthetic oligonucleotide; TAG chr11 5241203 5241222 5241206 -
tgtacaagttttattgtttt

SEQ ID NO: 47219 - DNA, 20 bp, Artificial Sequence
  Synthetic oligonucleotide; TGG chr11 5241200 5241219 5241203 -
acaagttttattgtttttag

SEQ ID NO: 47220 - DNA, 20 bp, Artificial Sequence
  Synthetic oligonucleotide; TAG chr11 5241197 5241216 5241200 -
agttttattgtttttagtgg

SEQ ID NO: 47221 - DNA, 20 bp, Artificial Sequence
  Synthetic oligonucleotide; TAG chr11 5241113 5241132 5241116 -
ttttatgaataaaaaattat

SEQ ID NO: 47222 - DNA, 20 bp, Artificial Sequence
  Synthetic oligonucleotide; GAG chr11 5241074 5241093 5241077 -
ccactgatttttgtttatgt

SEQ ID NO: 47223 - DNA, 20 bp, Artificial Sequence
  Synthetic oligonucleotide; CAG chr11 5241067 5241086 5241070 -
tttttgtttatgtgagcaaa

SEQ ID NO: 47224 - DNA, 20 bp, Artificial Sequence
  Synthetic oligonucleotide; CAG chr11 5241064 5241083 5241067 -
ttgtttatgtgagcaaacag

SEQ ID NO: 47225 - DNA, 20 bp, Artificial Sequence
  Synthetic oligonucleotide; AAG chr11 5241056 5241075 5241059 -
gtgagcaaacagcagattaa

SEQ ID NO: 47226 - DNA, 20 bp, Artificial Sequence
  Synthetic oligonucleotide; AGG chr11 5241055 5241074 5241058 -
tgagcaaacagcagattaaa

SEQ ID NO: 47227 - DNA, 20 bp, Artificial Sequence
  Synthetic oligonucleotide; GAG chr11 5241050 5241069 5241053 -
aaacagcagattaaaaggct

SEQ ID NO: 47228 - DNA, 20 bp, Artificial Sequence
  Synthetic oligonucleotide; TAG chr11 5241044 5241063 5241047 -
cagattaaaaggctgagatt

SEQ ID NO: 47229 - DNA, 20 bp, Artificial Sequence
  Synthetic oligonucleotide; AGG chr11 5241043 5241062 5241046 -
agattaaaaggctgagattt

SEQ ID NO: 47230 - DNA, 20 bp, Artificial Sequence
  Synthetic oligonucleotide; CAG chr11 5241037 5241056 5241040 -
aaaggctgagatttaggaaa

SEQ ID NO: 47231 - DNA, 20 bp, Artificial Sequence
  Synthetic oligonucleotide; AAG chr11 5241028 5241047 5241031 -
gatttaggaaacagcacgtt

SEQ ID NO: 47232 - DNA, 20 bp, Artificial Sequence
  Synthetic oligonucleotide; AAG chr11 5241023 5241042 5241026 -
aggaaacagcacgttaagtc

SEQ ID NO: 47233 - DNA, 20 bp, Artificial Sequence
  Synthetic oligonucleotide; TAG chr11 5241016 5241035 5241019 -
agcacgttaagtcaagttga

SEQ ID NO: 47234 - DNA, 20 bp, Artificial Sequence
  Synthetic oligonucleotide; GAG chr11 5241014 5241033 5241017 -
cacgttaagtcaagttgata

SEQ ID NO: 47235 - DNA, 20 bp, Artificial Sequence
  Synthetic oligonucleotide; AGG chr11 5241013 5241032 5241016 -
acgttaagtcaagttgatag

SEQ ID NO: 47236 - DNA, 20 bp, Artificial Sequence
  Synthetic oligonucleotide; GAG chr11 5241011 5241030 5241014 -
gttaagtcaagttgatagag

SEQ ID NO: 47237 - DNA, 20 bp, Artificial Sequence
  Synthetic oligonucleotide; TGG chr11 5241004 5241023 5241007 -
caagttgatagaggagaata

SEQ ID NO: 47238 - DNA, 20 bp, Artificial Sequence
  Synthetic oligonucleotide; AAG chr11 5240993 5241012 5240996 -
aggagaatatggacatttaa

SEQ ID NO: 47239 - DNA, 20 bp, Artificial Sequence
  Synthetic oligonucleotide; GAG chr11 5240991 5241010 5240994 -
gagaatatggacatttaaaa

SEQ ID NO: 47240 - DNA, 20 bp, Artificial Sequence
  Synthetic oligonucleotide; AGG chr11 5240990 5241009 5240993 -
agaatatggacatttaaaag

SEQ ID NO: 47241 - DNA, 20 bp, Artificial Sequence
  Synthetic oligonucleotide; CAG chr11 5240987 5241006 5240990 -
atatggacatttaaaagagg

SEQ ID NO: 47242 - DNA, 20 bp, Artificial Sequence
  Synthetic oligonucleotide; AGG chr11 5240986 5241005 5240989 -
tatggacatttaaaagaggc

SEQ ID NO: 47243 - DNA, 20 bp, Artificial Sequence
  Synthetic oligonucleotide; TAG chr11 5240971 5240990 5240974 -
gaggcaggatgatataaaat

SEQ ID NO: 47244 - DNA, 20 bp, Artificial Sequence
  Synthetic oligonucleotide; AGG chr11 5240970 5240989 5240973 -
aggcaggatgatataaaatt

SEQ ID NO: 47245 - DNA, 20 bp, Artificial Sequence
  Synthetic oligonucleotide; GGG chr11 5240969 5240988 5240972 -
ggcaggatgatataaaatta

SEQ ID NO: 47246 - DNA, 20 bp, Artificial Sequence
  Synthetic oligonucleotide; TGG chr11 5240962 5240981 5240965 -
tgatataaaattagggaaac

SEQ ID NO: 47247 - DNA, 20 bp, Artificial Sequence
  Synthetic oligonucleotide; CAG chr11 5240956 5240975 5240959 -
aaaattagggaaactggatg

SEQ ID NO: 47248 - DNA, 20 bp, Artificial Sequence
  Synthetic oligonucleotide; GAG chr11 5240954 5240973 5240957 -
aattagggaaactggatgca

SEQ ID NO: 47249 - DNA, 20 bp, Artificial Sequence
  Synthetic oligonucleotide; CAG chr11 5240949 5240968 5240952 -
gggaaactggatgcagagac

SEQ ID NO: 47250 - DNA, 20 bp, Artificial Sequence
  Synthetic oligonucleotide; AAG chr11 5240943 5240962 5240946 -
ctggatgcagagaccagatg

SEQ ID NO: 47251 - DNA, 20 bp, Artificial Sequence
  Synthetic oligonucleotide; AAG chr11 5240939 5240958 5240942 -
atgcagagaccagatgaagt

SEQ ID NO: 47252 - DNA, 20 bp, Artificial Sequence
  Synthetic oligonucleotide; TAG chr11 5240931 5240950 5240934 -
accagatgaagtaagaaaaa

SEQ ID NO: 47253 - DNA, 20 bp, Artificial Sequence
  Synthetic oligonucleotide; GAG chr11 5240918 5240937 5240921 -
agaaaaatagctatcgtttt

SEQ ID NO: 47254 - DNA, 20 bp, Artificial Sequence
  Synthetic oligonucleotide; AAG chr11 5240903 5240922 5240906 -
gttttgagcaaaaatcactg

SEQ ID NO: 47255 - DNA, 20 bp, Artificial Sequence
  Synthetic oligonucleotide; GAG chr11 5240888 5240907 5240891 -
cactgaagtttcttgcatat

SEQ ID NO: 47256 - DNA, 20 bp, Artificial Sequence
  Synthetic oligonucleotide; GAG chr11 5240886 5240905 5240889 -
ctgaagtttcttgcatatga

SEQ ID NO: 47257 - DNA, 20 bp, Artificial Sequence
  Synthetic oligonucleotide; TAG chr11 5240871 5240890 5240874 -
tatgagagtgacataataaa

SEQ ID NO: 47258 - DNA, 20 bp, Artificial Sequence
  Synthetic oligonucleotide; AGG chr11 5240870 5240889 5240873 -
atgagagtgacataataaat

SEQ ID NO: 47259 - DNA, 20 bp, Artificial Sequence
  Synthetic oligonucleotide; GGG chr11 5240869 5240888 5240872 -
tgagagtgacataataaata

SEQ ID NO: 47260 - DNA, 20 bp, Artificial Sequence
  Synthetic oligonucleotide; TAG chr11 5240861 5240880 5240864 -
acataataaatagggaaacg

SEQ ID NO: 47261 - DNA, 20 bp, Artificial Sequence
  Synthetic oligonucleotide; TAG chr11 5240830 5240849 5240833 -
ttcacatgtatatatatata

SEQ ID NO: 47262 - DNA, 20 bp, Artificial Sequence
  Synthetic oligonucleotide; TAG chr11 5240820 5240839 5240823 -
tatatatatatagaactgat

SEQ ID NO: 47263 - DNA, 20 bp, Artificial Sequence
  Synthetic oligonucleotide; AAG chr11 5240814 5240833 5240817 -
tatatagaactgattagaca

SEQ ID NO: 47264 - DNA, 20 bp, Artificial Sequence
  Synthetic oligonucleotide; TGG chr11 5240804 5240823 5240807 -
tgattagacaaagtctaact

SEQ ID NO: 47265 - DNA, 20 bp, Artificial Sequence
  Synthetic oligonucleotide; GGG chr11 5240803 5240822 5240806 -
gattagacaaagtctaactt

SEQ ID NO: 47266 - DNA, 20 bp, Artificial Sequence
  Synthetic oligonucleotide; TAG chr11 5240798 5240817 5240801 -
gacaaagtctaacttgggta

SEQ ID NO: 47267 - DNA, 20 bp, Artificial Sequence
  Synthetic oligonucleotide; CAG chr11 5240794 5240813 5240797 -
aagtctaacttgggtatagt

SEQ ID NO: 47268 - DNA, 20 bp, Artificial Sequence
  Synthetic oligonucleotide; GAG chr11 5240792 5240811 5240795 -
gtctaacttgggtatagtca

SEQ ID NO: 47269 - DNA, 20 bp, Artificial Sequence
  Synthetic oligonucleotide; AGG chr11 5240791 5240810 5240794 -
tctaacttgggtatagtcag

SEQ ID NO: 47270 - DNA, 20 bp, Artificial Sequence
  Synthetic oligonucleotide; GAG chr11 5240789 5240808 5240792 -
taacttgggtatagtcagag

SEQ ID NO: 47271 - DNA, 20 bp, Artificial Sequence
  Synthetic oligonucleotide; GAG chr11 5240769 5240788 5240772 -
gagcttgctgtaattatatt

SEQ ID NO: 47272 - DNA, 20 bp, Artificial Sequence
  Synthetic oligonucleotide; AGG chr11 5240768 5240787 5240771 -
agcttgctgtaattatattg

SEQ ID NO: 47273 - DNA, 20 bp, Artificial Sequence
  Synthetic oligonucleotide; TGG chr11 5240762 5240781 5240765 -
ctgtaattatattgaggtga

SEQ ID NO: 47274 - DNA, 20 bp, Artificial Sequence
  Synthetic oligonucleotide; AAG chr11 5240756 5240775 5240759 -
ttatattgaggtgatggata

SEQ ID NO: 47275 - DNA, 20 bp, Artificial Sequence
  Synthetic oligonucleotide; AAG chr11 5240748 5240767 5240751 -
aggtgatggataaagaactg

SEQ ID NO: 47276 - DNA, 20 bp, Artificial Sequence
  Synthetic oligonucleotide; TGG chr11 5240741 5240760 5240744 -
ggataaagaactgaagttga

SEQ ID NO: 47277 - DNA, 20 bp, Artificial Sequence
  Synthetic oligonucleotide; AAG chr11 5240730 5240749 5240733 -
tgaagttgatggaaacaatg

SEQ ID NO: 47278 - DNA, 20 bp, Artificial Sequence
  Synthetic oligonucleotide; AAG chr11 5240725 5240744 5240728 -
ttgatggaaacaatgaagtt

SEQ ID NO: 47279 - DNA, 20 bp, Artificial Sequence
  Synthetic oligonucleotide; GAG chr11 5240712 5240731 5240715 -
tgaagttaagaaaaaaaatc

SEQ ID NO: 47280 - DNA, 20 bp, Artificial Sequence
  Synthetic oligonucleotide; AAG chr11 5240708 5240727 5240711 -
gttaagaaaaaaaatcgagt

SEQ ID NO: 47281 - DNA, 20 bp, Artificial Sequence
  Synthetic oligonucleotide; GAG chr11 5240706 5240725 5240709 -
taagaaaaaaaatcgagtaa

SEQ ID NO: 47282 - DNA, 20 bp, Artificial Sequence
  Synthetic oligonucleotide; TGG chr11 5240696 5240715 5240699 -
aatcgagtaagagaccattg

SEQ ID NO: 47283 - DNA, 20 bp, Artificial Sequence
  Synthetic oligonucleotide; CAG chr11 5240693 5240712 5240696 -
cgagtaagagaccattgtgg

SEQ ID NO: 47284 - DNA, 20 bp, Artificial Sequence
  Synthetic oligonucleotide; CAG chr11 5240682 5240701 5240685 -
ccattgtggcagtgattgca

SEQ ID NO: 47285 - DNA, 20 bp, Artificial Sequence
  Synthetic oligonucleotide; TGG chr11 5240676 5240695 5240679 -
tggcagtgattgcacagaac

SEQ ID NO: 47286 - DNA, 20 bp, Artificial Sequence
  Synthetic oligonucleotide; CAG chr11 5240659 5240678 5240662 -
aactggaaaacattgtgaaa

SEQ ID NO: 47287 - DNA, 20 bp, Artificial Sequence
  Synthetic oligonucleotide; GAG chr11 5240657 5240676 5240660 -
ctggaaaacattgtgaaaca

SEQ ID NO: 47288 - DNA, 20 bp, Artificial Sequence
  Synthetic oligonucleotide; GAG chr11 5240655 5240674 5240658 -
ggaaaacattgtgaaacaga

SEQ ID NO: 47289 - DNA, 20 bp, Artificial Sequence
  Synthetic oligonucleotide; CAG chr11 5240651 5240670 5240654 -
aacattgtgaaacagagagt

SEQ ID NO: 47290 - DNA, 20 bp, Artificial Sequence
  Synthetic oligonucleotide; GAG chr11 5240649 5240668 5240652 -
cattgtgaaacagagagtca

SEQ ID NO: 47291 - DNA, 20 bp, Artificial Sequence
  Synthetic oligonucleotide; CAG chr11 5240642 5240661 5240645 -
aaacagagagtcagagatga

SEQ ID NO: 47292 - DNA, 20 bp, Artificial Sequence
  Synthetic oligonucleotide; AAG chr11 5240615 5240634 5240618 -
aatccctgtctgtgaatgaa

SEQ ID NO: 47293 - DNA, 20 bp, Artificial Sequence
  Synthetic oligonucleotide; AAG chr11 5240612 5240631 5240615 -
ccctgtctgtgaatgaaaag

SEQ ID NO: 47294 - DNA, 20 bp, Artificial Sequence
  Synthetic oligonucleotide; AGG chr11 5240611 5240630 5240614 -
cctgtctgtgaatgaaaaga

SEQ ID NO: 47295 - DNA, 20 bp, Artificial Sequence
  Synthetic oligonucleotide; CAG chr11 5240597 5240616 5240600 -
aaaagaaggaaatttattga

SEQ ID NO: 47296 - DNA, 20 bp, Artificial Sequence
  Synthetic oligonucleotide; CAG chr11 5240592 5240611 5240595 -
aaggaaatttattgacagaa

SEQ ID NO: 47297 - DNA, 20 bp, Artificial Sequence
  Synthetic oligonucleotide; AAG chr11 5240578 5240597 5240581 -
acagaacagcaaatgcctac

SEQ ID NO: 47298 - DNA, 20 bp, Artificial Sequence
  Synthetic oligonucleotide; TGG chr11 5240566 5240585 5240569 -
atgcctacaagccccctgtt

SEQ ID NO: 47299 - DNA, 20 bp, Artificial Sequence
  Synthetic oligonucleotide; TGG chr11 5240560 5240579 5240563 -
acaagccccctgtttggatc

SEQ ID NO: 47300 - DNA, 20 bp, Artificial Sequence
  Synthetic oligonucleotide; TAG chr11 5240548 5240567 5240551 -
tttggatctggcaatgaacg

SEQ ID NO: 47301 - DNA, 20 bp, Artificial Sequence
  Synthetic oligonucleotide; TGG chr11 5240537 5240556 5240540 -
caatgaacgtagccattctg

SEQ ID NO: 47302 - DNA, 20 bp, Artificial Sequence
  Synthetic oligonucleotide; AAG chr11 5240510 5240529 5240513 -
cacttcaaactcctgtaccc

SEQ ID NO: 47303 - DNA, 20 bp, Artificial Sequence
  Synthetic oligonucleotide; TAG chr11 5240502 5240521 5240505 -
actcctgtacccaagaccct

SEQ ID NO: 47304 - DNA, 20 bp, Artificial Sequence
  Synthetic oligonucleotide; AGG chr11 5240501 5240520 5240504 -
ctcctgtacccaagaccctt

SEQ ID NO: 47305 - DNA, 20 bp, Artificial Sequence
  Synthetic oligonucleotide; AAG chr11 5240498 5240517 5240501 -
ctgtacccaagacccttagg

SEQ ID NO: 47306 - DNA, 20 bp, Artificial Sequence
  Synthetic oligonucleotide; TAG chr11 5240491 5240510 5240494 -
caagacccttaggaagtatg

SEQ ID NO: 47307 - DNA, 20 bp, Artificial Sequence
  Synthetic oligonucleotide; AAG chr11 5240466 5240485 5240469 -
ccctcaaacctaaaacctca

SEQ ID NO: 47308 - DNA, 20 bp, Artificial Sequence
  Synthetic oligonucleotide; AAG chr11 5240462 5240481 5240465 -
caaacctaaaacctcaaaga

SEQ ID NO: 47309 - DNA, 20 bp, Artificial Sequence
  Synthetic oligonucleotide; GAG chr11 5240460 5240479 5240463 -
aacctaaaacctcaaagaaa

SEQ ID NO: 47310 - DNA, 20 bp, Artificial Sequence
  Synthetic oligonucleotide; AGG chr11 5240459 5240478 5240462 -
acctaaaacctcaaagaaag

SEQ ID NO: 47311 - DNA, 20 bp, Artificial Sequence
  Synthetic oligonucleotide; TAG chr11 5240453 5240472 5240456 -
aacctcaaagaaagaggttt

SEQ ID NO: 47312 - DNA, 20 bp, Artificial Sequence
  Synthetic oligonucleotide; AAG chr11 5240450 5240469 5240453 -
ctcaaagaaagaggttttag

SEQ ID NO: 47313 - DNA, 20 bp, Artificial Sequence
  Synthetic oligonucleotide; CAG chr11 5240427 5240446 5240430 -
atataataccctttcttctc

SEQ ID NO: 47314 - DNA, 20 bp, Artificial Sequence
  Synthetic oligonucleotide; AAG chr11 5240396 5240415 5240399 -
atcccaaaacctctttctca

SEQ ID NO: 47315 - DNA, 20 bp, Artificial Sequence
  Synthetic oligonucleotide; AAG chr11 5240369 5240388 5240372 -
tcctctatgtgtccacccca

SEQ ID NO: 47316 - DNA, 20 bp, Artificial Sequence
  Synthetic oligonucleotide; GAG chr11 5240367 5240386 5240370 -
ctctatgtgtccaccccaaa

SEQ ID NO: 47317 - DNA, 20 bp, Artificial Sequence
  Synthetic oligonucleotide; GAG chr11 5240344 5240363 5240347 -
ctcacctcaccatatctctt

SEQ ID NO: 47318 - DNA, 20 bp, Artificial Sequence
  Synthetic oligonucleotide; TGG chr11 5240341 5240360 5240344 -
acctcaccatatctcttgag

SEQ ID NO: 47319 - DNA, 20 bp, Artificial Sequence
  Synthetic oligonucleotide; GGG chr11 5240340 5240359 5240343 -
cctcaccatatctcttgagt

SEQ ID NO: 47320 - DNA, 20 bp, Artificial Sequence
  Synthetic oligonucleotide; GAG chr11 5240338 5240357 5240341 -
tcaccatatctcttgagtgg

SEQ ID NO: 47321 - DNA, 20 bp, Artificial Sequence
  Synthetic oligonucleotide; TAG chr11 5240331 5240350 5240334 -
atctcttgagtgggagcaca

SEQ ID NO: 47322 - DNA, 20 bp, Artificial Sequence
  Synthetic oligonucleotide; TAG chr11 5240327 5240346 5240330 -
cttgagtgggagcacataga

SEQ ID NO: 47323 - DNA, 20 bp, Artificial Sequence
  Synthetic oligonucleotide; AGG chr11 5240326 5240345 5240329 -
ttgagtgggagcacatagat

SEQ ID NO: 47324 - DNA, 20 bp, Artificial Sequence
  Synthetic oligonucleotide; CGG chr11 5240323 5240342 5240326 -
agtgggagcacatagatagg

SEQ ID NO: 47325 - DNA, 20 bp, Artificial Sequence
  Synthetic oligonucleotide; CAG chr11 5240307 5240326 5240310 -
taggcggtgctaccatctaa

SEQ ID NO: 47326 - DNA, 20 bp, Artificial Sequence
  Synthetic oligonucleotide; GAG chr11 5240277 5240296 5240280 -
aattcctttgtcatattttt

SEQ ID NO: 47327 - DNA, 20 bp, Artificial Sequence
  Synthetic oligonucleotide; AAG chr11 5240255 5240274 5240258 -
gtccccactaataacccaca

SEQ ID NO: 47328 - DNA, 20 bp, Artificial Sequence
  Synthetic oligonucleotide; CAG chr11 5240252 5240271 5240255 -
cccactaataacccacaaag

SEQ ID NO: 47329 - DNA, 20 bp, Artificial Sequence
  Synthetic oligonucleotide; CAG chr11 5240240 5240259 5240243 -
ccacaaagcagaataaatac

SEQ ID NO: 47330 - DNA, 20 bp, Artificial Sequence
  Synthetic oligonucleotide; TAG chr11 5240201 5240220 5240204 -
atcactcaactgctgtcttg

SEQ ID NO: 47331 - DNA, 20 bp, Artificial Sequence
  Synthetic oligonucleotide; AAG chr11 5240186 5240205 5240189 -
tcttgtagcatacattaatt

SEQ ID NO: 47332 - DNA, 20 bp, Artificial Sequence
  Synthetic oligonucleotide; AAG chr11 5240083 5240102 5240086 -
gtcactctgtattttaaatg

SEQ ID NO: 47333 - DNA, 20 bp, Artificial Sequence
  Synthetic oligonucleotide; GAG chr11 5240081 5240100 5240084 -
cactctgtattttaaatgaa

SEQ ID NO: 47334 - DNA, 20 bp, Artificial Sequence
  Synthetic oligonucleotide; GAG chr11 5240076 5240095 5240079 -
tgtattttaaatgaagagat

SEQ ID NO: 47335 - DNA, 20 bp, Artificial Sequence
  Synthetic oligonucleotide; AGG chr11 5240075 5240094 5240078 -
gtattttaaatgaagagatg

SEQ ID NO: 47336 - DNA, 20 bp, Artificial Sequence
  Synthetic oligonucleotide; GGG chr11 5240074 5240093 5240077 -
tattttaaatgaagagatga

SEQ ID NO: 47337 - DNA, 20 bp, Artificial Sequence
  Synthetic oligonucleotide; GAG chr11 5240034 5240053 5240037 -
cttattgttcatttctcgat

SEQ ID NO: 47338 - DNA, 20 bp, Artificial Sequence
  Synthetic oligonucleotide; AGG chr11 5240033 5240052 5240036 -
ttattgttcatttctcgatg

SEQ ID NO: 47339 - DNA, 20 bp, Artificial Sequence
  Synthetic oligonucleotide; GAG chr11 5240031 5240050 5240034 -
attgttcatttctcgatgag

SEQ ID NO: 47340 - DNA, 20 bp, Artificial Sequence
  Synthetic oligonucleotide; TAG chr11 5240012 5240031 5240015 -
ggagttttcacattcacctt

SEQ ID NO: 47341 - DNA, 20 bp, Artificial Sequence
  Synthetic oligonucleotide; TGG chr11 5240009 5240028 5240012 -
gttttcacattcacctttag

SEQ ID NO: 47342 - DNA, 20 bp, Artificial Sequence
  Synthetic oligonucleotide; AAG chr11 5239997 5240016 5240000 -
acctttagtggaaaacacat

SEQ ID NO: 47343 - DNA, 20 bp, Artificial Sequence
  Synthetic oligonucleotide; CAG chr11 5239983 5240002 5239986 -
acacataagtacacatctta

SEQ ID NO: 47344 - DNA, 20 bp, Artificial Sequence
  Synthetic oligonucleotide; AGG chr11 5239982 5240001 5239985 -
cacataagtacacatcttac

SEQ ID NO: 47345 - DNA, 20 bp, Artificial Sequence
  Synthetic oligonucleotide; TAG chr11 5239957 5239976 5239960 -
aaatataccaaactgacatg

SEQ ID NO: 47346 - DNA, 20 bp, Artificial Sequence
  Synthetic oligonucleotide; TAG chr11 5239936 5239955 5239939 -
agcatgaatgcttgtgcatg

SEQ ID NO: 47347 - DNA, 20 bp, Artificial Sequence
  Synthetic oligonucleotide; TAG chr11 5239918 5239937 5239921 -
tgtagtcatataaaatcttg

SEQ ID NO: 47348 - DNA, 20 bp, Artificial Sequence
  Synthetic oligonucleotide; CAG chr11 5239886 5239905 5239889 -
cattctctgatatacacata

SEQ ID NO: 47349 - DNA, 20 bp, Artificial Sequence
  Synthetic oligonucleotide; AAG chr11 5239823 5239842 5239826 -
caaacattccatgcacacat

SEQ ID NO: 47350 - DNA, 20 bp, Artificial Sequence
  Synthetic oligonucleotide; CAG chr11 5239806 5239825 5239809 -
cataagaacacacactgtta

SEQ ID NO: 47351 - DNA, 20 bp, Artificial Sequence
  Synthetic oligonucleotide; GAG chr11 5239793 5239812 5239796 -
actgttacagatgcatactt

SEQ ID NO: 47352 - DNA, 20 bp, Artificial Sequence
  Synthetic oligonucleotide; CAG chr11 5239771 5239790 5239774 -
gtgcattgacaaaattaccc

SEQ ID NO: 47353 - DNA, 20 bp, Artificial Sequence
  Synthetic oligonucleotide; TAG chr11 5239762 5239781 5239765 -
caaaattaccccagtcaatc

SEQ ID NO: 47354 - DNA, 20 bp, Artificial Sequence
  Synthetic oligonucleotide; GAG chr11 5239760 5239779 5239763 -
aaattaccccagtcaatcta

SEQ ID NO: 47355 - DNA, 20 bp, Artificial Sequence
  Synthetic oligonucleotide; TGG chr11 5239753 5239772 5239756 -
cccagtcaatctagagaatt

SEQ ID NO: 47356 - DNA, 20 bp, Artificial Sequence
  Synthetic oligonucleotide; TAG chr11 5239730 5239749 5239733 -
atttctgcatttgactctgt

SEQ ID NO: 47357 - DNA, 20 bp, Artificial Sequence
  Synthetic oligonucleotide; TGG chr11 5239702 5239721 5239705 -
tacatgctgttcatttactc

SEQ ID NO: 47358 - DNA, 20 bp, Artificial Sequence
  Synthetic oligonucleotide; GGG chr11 5239701 5239720 5239704 -
acatgctgttcatttactct

SEQ ID NO: 47359 - DNA, 20 bp, Artificial Sequence
  Synthetic oligonucleotide; AAG chr11 5239651 5239670 5239654 -
ctatcttgtactcatacttt

SEQ ID NO: 47360 - DNA, 20 bp, Artificial Sequence
  Synthetic oligonucleotide; AAG chr11 5239623 5239642 5239626 -
acttatatgttatctcaact

SEQ ID NO: 47361 - DNA, 20 bp, Artificial Sequence
  Synthetic oligonucleotide; AAG chr11 5239620 5239639 5239623 -
tatatgttatctcaactaag

SEQ ID NO: 47362 - DNA, 20 bp, Artificial Sequence
  Synthetic oligonucleotide; TGG chr11 5239596 5239615 5239599 -
tatttttttttaattttaac

SEQ ID NO: 47363 - DNA, 20 bp, Artificial Sequence
  Synthetic oligonucleotide; GGG chr11 5239595 5239614 5239598 -
atttttttttaattttaact

SEQ ID NO: 47364 - DNA, 20 bp, Artificial Sequence
  Synthetic oligonucleotide; AAG chr11 5239588 5239607 5239591 -
tttaattttaactgggctta

SEQ ID NO: 47365 - DNA, 20 bp, Artificial Sequence
  Synthetic oligonucleotide; TGG chr11 5239558 5239577 5239561 -
tataaactctgctacaatta

SEQ ID NO: 47366 - DNA, 20 bp, Artificial Sequence
  Synthetic oligonucleotide; GGG chr11 5239557 5239576 5239560 -
ataaactctgctacaattat

SEQ ID NO: 47367 - DNA, 20 bp, Artificial Sequence
  Synthetic oligonucleotide; TAG chr11 5239537 5239556 5239540 -
gggctctttcttataatatt

SEQ ID NO: 47368 - DNA, 20 bp, Artificial Sequence
  Synthetic oligonucleotide; TGG chr11 5239466 5239485 5239469 -
ctaaattttaacctctttta

SEQ ID NO: 47369 - DNA, 20 bp, Artificial Sequence
  Synthetic oligonucleotide; TAG chr11 5239463 5239482 5239466 -
aattttaacctcttttatgg

SEQ ID NO: 47370 - DNA, 20 bp, Artificial Sequence
  Synthetic oligonucleotide; GAG chr11 5239461 5239480 5239464 -
ttttaacctcttttatggta

SEQ ID NO: 47371 - DNA, 20 bp, Artificial Sequence
  Synthetic oligonucleotide; TAG chr11 5239431 5239450 5239434 -
cttgtaaactcttatttccc

SEQ ID NO: 47372 - DNA, 20 bp, Artificial Sequence
  Synthetic oligonucleotide; TGG chr11 5239424 5239443 5239427 -
actcttatttccctagtatt

SEQ ID NO: 47373 - DNA, 20 bp, Artificial Sequence
  Synthetic oligonucleotide; GAG chr11 5239422 5239441 5239425 -
tcttatttccctagtatttg

SEQ ID NO: 47374 - DNA, 20 bp, Artificial Sequence
  Synthetic oligonucleotide; AAG chr11 5239410 5239429 5239413 -
agtatttggagatgaaaaaa

SEQ ID NO: 47375 - DNA, 20 bp, Artificial Sequence
  Synthetic oligonucleotide; TAG chr11 5239390 5239409 5239393 -
aagattaaattatccaaaat

SEQ ID NO: 47376 - DNA, 20 bp, Artificial Sequence
  Synthetic oligonucleotide; GAG chr11 5239367 5239386 5239370 -
atctctcttttctacattat

SEQ ID NO: 47377 - DNA, 20 bp, Artificial Sequence
  Synthetic oligonucleotide; TAG chr11 5239350 5239369 5239353 -
tatgagtattacactatcca

SEQ ID NO: 47378 - DNA, 20 bp, Artificial Sequence
  Synthetic oligonucleotide; GAG chr11 5239348 5239367 5239351 -
tgagtattacactatccata

SEQ ID NO: 47379 - DNA, 20 bp, Artificial Sequence
  Synthetic oligonucleotide; AAG chr11 5239345 5239364 5239348 -
gtattacactatccatagag

SEQ ID NO: 47380 - DNA, 20 bp, Artificial Sequence
  Synthetic oligonucleotide; GAG chr11 5239335 5239354 5239338 -
atccatagagaagtttgttt

SEQ ID NO: 47381 - DNA, 20 bp, Artificial Sequence
  Synthetic oligonucleotide; GAG chr11 5239323 5239342 5239326 -
gtttgtttgagacctaaact

SEQ ID NO: 47382 - DNA, 20 bp, Artificial Sequence
  Synthetic oligonucleotide; AGG chr11 5239322 5239341 5239325 -
tttgtttgagacctaaactg

SEQ ID NO: 47383 - DNA, 20 bp, Artificial Sequence
  Synthetic oligonucleotide; TGG chr11 5239313 5239332 5239316 -
gacctaaactgaggaacctt

SEQ ID NO: 47384 - DNA, 20 bp, Artificial Sequence
  Synthetic oligonucleotide; TAG chr11 5239286 5239305 5239289 -
aaaatgactatgtgatatct

SEQ ID NO: 47385 - DNA, 20 bp, Artificial Sequence
  Synthetic oligonucleotide; TAG chr11 5239277 5239296 5239280 -
atgtgatatcttagtattta

SEQ ID NO: 47386 - DNA, 20 bp, Artificial Sequence
  Synthetic oligonucleotide; AGG chr11 5239276 5239295 5239279 -
tgtgatatcttagtatttat

SEQ ID NO: 47387 - DNA, 20 bp, Artificial Sequence
  Synthetic oligonucleotide; GAG chr11 5239269 5239288 5239272 -
tcttagtatttataggtcat

SEQ ID NO: 47388 - DNA, 20 bp, Artificial Sequence
  Synthetic oligonucleotide; AGG chr11 5239268 5239287 5239271 -
cttagtatttataggtcatg

SEQ ID NO: 47389 - DNA, 20 bp, Artificial Sequence
  Synthetic oligonucleotide; TAG chr11 5239244 5239263 5239247 -
tccttcctctgcctctgcta

SEQ ID NO: 47390 - DNA, 20 bp, Artificial Sequence
  Synthetic oligonucleotide; TAG chr11 5239235 5239254 5239238 -
tgcctctgctatagtttgat

SEQ ID NO: 47391 - DNA, 20 bp, Artificial Sequence
  Synthetic oligonucleotide; AAG chr11 5239227 5239246 5239230 -
ctatagtttgattagtcaac

SEQ ID NO: 47392 - DNA, 20 bp, Artificial Sequence
  Synthetic oligonucleotide; CAG chr11 5239200 5239219 5239203 -
tgtcatgcatttattcacat

SEQ ID NO: 47393 - DNA, 20 bp, Artificial Sequence
  Synthetic oligonucleotide; AAG chr11 5239181 5239200 5239184 -
tcagaatttcatacactaat

SEQ ID NO: 47394 - DNA, 20 bp, Artificial Sequence
  Synthetic oligonucleotide; TAG chr11 5239175 5239194 5239178 -
tttcatacactaataagaca

SEQ ID NO: 47395 - DNA, 20 bp, Artificial Sequence
  Synthetic oligonucleotide; CAG chr11 5239169 5239188 5239172 -
acactaataagacatagtat

SEQ ID NO: 47396 - DNA, 20 bp, Artificial Sequence
  Synthetic oligonucleotide; AAG chr11 5239166 5239185 5239169 -
ctaataagacatagtatcag

SEQ ID NO: 47397 - DNA, 20 bp, Artificial Sequence
  Synthetic oligonucleotide; CAG chr11 5239162 5239181 5239165 -
taagacatagtatcagaagt

SEQ ID NO: 47398 - DNA, 20 bp, Artificial Sequence
  Synthetic oligonucleotide; TAG chr11 5239154 5239173 5239157 -
agtatcagaagtcagtttat

SEQ ID NO: 47399 - DNA, 20 bp, Artificial Sequence
  Synthetic oligonucleotide; CAG chr11 5239145 5239164 5239148 -
agtcagtttattagttatat

SEQ ID NO: 47400 - DNA, 20 bp, Artificial Sequence
  Synthetic oligonucleotide; TAG chr11 5239141 5239160 5239144 -
agtttattagttatatcagt

SEQ ID NO: 47401 - DNA, 20 bp, Artificial Sequence
  Synthetic oligonucleotide; AGG chr11 5239140 5239159 5239143 -
gtttattagttatatcagtt

SEQ ID NO: 47402 - DNA, 20 bp, Artificial Sequence
  Synthetic oligonucleotide; GGG chr11 5239139 5239158 5239142 -
tttattagttatatcagtta

SEQ ID NO: 47403 - DNA, 20 bp, Artificial Sequence
  Synthetic oligonucleotide; AAG chr11 5239130 5239149 5239133 -
tatatcagttagggtccatc

SEQ ID NO: 47404 - DNA, 20 bp, Artificial Sequence
  Synthetic oligonucleotide; AGG chr11 5239129 5239148 5239132 -
atatcagttagggtccatca

SEQ ID NO: 47405 - DNA, 20 bp, Artificial Sequence
  Synthetic oligonucleotide; AAG chr11 5239125 5239144 5239128 -
cagttagggtccatcaagga

SEQ ID NO: 47406 - DNA, 20 bp, Artificial Sequence
  Synthetic oligonucleotide; AGG chr11 5239124 5239143 5239127 -
agttagggtccatcaaggaa

SEQ ID NO: 47407 - DNA, 20 bp, Artificial Sequence
  Synthetic oligonucleotide; CAG chr11 5239109 5239128 5239112 -
aggaaaggacaaaccattat

SEQ ID NO: 47408 - DNA, 20 bp, Artificial Sequence
  Synthetic oligonucleotide; TAG chr11 5239096 5239115 5239099 -
ccattatcagttactcaacc

SEQ ID NO: 47409 - DNA, 20 bp, Artificial Sequence
  Synthetic oligonucleotide; CAG chr11 5239084 5239103 5239087 -
actcaacctagaattaaata

SEQ ID NO: 47410 - DNA, 20 bp, Artificial Sequence
  Synthetic oligonucleotide; TAG chr11 5239074 5239093 5239077 -
gaattaaatacagctcttaa

SEQ ID NO: 47411 - DNA, 20 bp, Artificial Sequence
  Synthetic oligonucleotide; TGG chr11 5239055 5239074 5239058 -
atagttaattatccttgtat

SEQ ID NO: 47412 - DNA, 20 bp, Artificial Sequence
  Synthetic oligonucleotide; AAG chr11 5239052 5239071 5239055 -
gttaattatccttgtattgg

SEQ ID NO: 47413 - DNA, 20 bp, Artificial Sequence
  Synthetic oligonucleotide; GAG chr11 5239050 5239069 5239053 -
taattatccttgtattggaa

SEQ ID NO: 47414 - DNA, 20 bp, Artificial Sequence
  Synthetic oligonucleotide; AAG chr11 5239032 5239051 5239035 -
aagagctaaaatatcaaata

SEQ ID NO: 47415 - DNA, 20 bp, Artificial Sequence
  Synthetic oligonucleotide; AGG chr11 5239031 5239050 5239034 -
agagctaaaatatcaaataa

SEQ ID NO: 47416 - DNA, 20 bp, Artificial Sequence
  Synthetic oligonucleotide; CAG chr11 5239027 5239046 5239030 -
ctaaaatatcaaataaagga

SEQ ID NO: 47417 - DNA, 20 bp, Artificial Sequence
  Synthetic oligonucleotide; CAG chr11 5239022 5239041 5239025 -
atatcaaataaaggacagtg

SEQ ID NO: 47418 - DNA, 20 bp, Artificial Sequence
  Synthetic oligonucleotide; TAG chr11 5239014 5239033 5239017 -
taaaggacagtgcagaaatc

SEQ ID NO: 47419 - DNA, 20 bp, Artificial Sequence
  Synthetic oligonucleotide; TAG chr11 5239007 5239026 5239010 -
cagtgcagaaatctagatgt

SEQ ID NO: 47420 - DNA, 20 bp, Artificial Sequence
  Synthetic oligonucleotide; CAG chr11 5238998 5239017 5239001 -
aatctagatgttagtaacat

SEQ ID NO: 47421 - DNA, 20 bp, Artificial Sequence
  Synthetic oligonucleotide; TAG chr11 5238978 5238997 5238981 -
cagaaaacctcttccgccat

SEQ ID NO: 47422 - DNA, 20 bp, Artificial Sequence
  Synthetic oligonucleotide; AGG chr11 5238977 5238996 5238980 -
agaaaacctcttccgccatt

SEQ ID NO: 47423 - DNA, 20 bp, Artificial Sequence
  Synthetic oligonucleotide; TAG chr11 5238972 5238991 5238975 -
acctcttccgccattaggcc

SEQ ID NO: 47424 - DNA, 20 bp, Artificial Sequence
  Synthetic oligonucleotide; AAG chr11 5238969 5238988 5238972 -
tcttccgccattaggcctag

SEQ ID NO: 47425 - DNA, 20 bp, Artificial Sequence
  Synthetic oligonucleotide; AGG chr11 5238968 5238987 5238971 -
cttccgccattaggcctaga

SEQ ID NO: 47426 - DNA, 20 bp, Artificial Sequence
  Synthetic oligonucleotide; GGG chr11 5238967 5238986 5238970 -
ttccgccattaggcctagaa

SEQ ID NO: 47427 - DNA, 20 bp, Artificial Sequence
  Synthetic oligonucleotide; CAG chr11 5238964 5238983 5238967 -
cgccattaggcctagaaggg

SEQ ID NO: 47428 - DNA, 20 bp, Artificial Sequence
  Synthetic oligonucleotide; AAG chr11 5238961 5238980 5238964 -
cattaggcctagaagggcag

SEQ ID NO: 47429 - DNA, 20 bp, Artificial Sequence
  Synthetic oligonucleotide; AGG chr11 5238960 5238979 5238963 -
attaggcctagaagggcaga

SEQ ID NO: 47430 - DNA, 20 bp, Artificial Sequence
  Synthetic oligonucleotide; GAG chr11 5238958 5238977 5238961 -
taggcctagaagggcagaag

SEQ ID NO: 47431 - DNA, 20 bp, Artificial Sequence
  Synthetic oligonucleotide; CAG chr11 5238939 5238958 5238942 -
ggagaaaatgtttataccac

SEQ ID NO: 47432 - DNA, 20 bp, Artificial Sequence
  Synthetic oligonucleotide; GAG chr11 5238937 5238956 5238940 -
agaaaatgtttataccacca

SEQ ID NO: 47433 - DNA, 20 bp, Artificial Sequence
  Synthetic oligonucleotide; CAG chr11 5238932 5238951 5238935 -
atgtttataccaccagagtc

SEQ ID NO: 47434 - DNA, 20 bp, Artificial Sequence
  Synthetic oligonucleotide; CAG chr11 5238926 5238945 5238929 -
ataccaccagagtccagaac

SEQ ID NO: 47435 - DNA, 20 bp, Artificial Sequence
  Synthetic oligonucleotide; GAG chr11 5238924 5238943 5238927 -
accaccagagtccagaacca

SEQ ID NO: 47436 - DNA, 20 bp, Artificial Sequence
  Synthetic oligonucleotide; CAG chr11 5238913 5238932 5238916 -
ccagaaccagagcccataac

SEQ ID NO: 47437 - DNA, 20 bp, Artificial Sequence
  Synthetic oligonucleotide; GAG chr11 5238911 5238930 5238914 -
agaaccagagcccataacca

SEQ ID NO: 47438 - DNA, 20 bp, Artificial Sequence
  Synthetic oligonucleotide; AGG chr11 5238910 5238929 5238913 -
gaaccagagcccataaccag

SEQ ID NO: 47439 - DNA, 20 bp, Artificial Sequence
  Synthetic oligonucleotide; TGG chr11 5238902 5238921 5238905 -
gcccataaccagaggtccac

SEQ ID NO: 47440 - DNA, 20 bp, Artificial Sequence
  Synthetic oligonucleotide; CAG chr11 5238896 5238915 5238899 -
aaccagaggtccactggatt

SEQ ID NO: 47441 - DNA, 20 bp, Artificial Sequence
  Synthetic oligonucleotide; GAG chr11 5238892 5238911 5238895 -
agaggtccactggattcagt

SEQ ID NO: 47442 - DNA, 20 bp, Artificial Sequence
  Synthetic oligonucleotide; TAG chr11 5238888 5238907 5238891 -
gtccactggattcagtgagc

SEQ ID NO: 47443 - DNA, 20 bp, Artificial Sequence
  Synthetic oligonucleotide; TGG chr11 5238885 5238904 5238888 -
cactggattcagtgagctag

SEQ ID NO: 47444 - DNA, 20 bp, Artificial Sequence
  Synthetic oligonucleotide; GGG chr11 5238884 5238903 5238887 -
actggattcagtgagctagt

SEQ ID NO: 47445 - DNA, 20 bp, Artificial Sequence
  Synthetic oligonucleotide; TGG chr11 5238874 5238893 5238877 -
gtgagctagtgggtgctcct

SEQ ID NO: 47446 - DNA, 20 bp, Artificial Sequence
  Synthetic oligonucleotide; GAG chr11 5238872 5238891 5238875 -
gagctagtgggtgctccttg

SEQ ID NO: 47447 - DNA, 20 bp, Artificial Sequence
  Synthetic oligonucleotide; GAG chr11 5238870 5238889 5238873 -
gctagtgggtgctccttgga

SEQ ID NO: 47448 - DNA, 20 bp, Artificial Sequence
  Synthetic oligonucleotide; GAG chr11 5238868 5238887 5238871 -
tagtgggtgctccttggaga

SEQ ID NO: 47449 - DNA, 20 bp, Artificial Sequence
  Synthetic oligonucleotide; CAG chr11 5238864 5238883 5238867 -
gggtgctccttggagagagc

SEQ ID NO: 47450 - DNA, 20 bp, Artificial Sequence
  Synthetic oligonucleotide; TGG chr11 5238851 5238870 5238854 -
agagagccagaactgtctaa

SEQ ID NO: 47451 - DNA, 20 bp, Artificial Sequence
  Synthetic oligonucleotide; GGG chr11 5238850 5238869 5238853 -
gagagccagaactgtctaat

SEQ ID NO: 47452 - DNA, 20 bp, Artificial Sequence
  Synthetic oligonucleotide; GGG chr11 5238849 5238868 5238852 -
agagccagaactgtctaatg

SEQ ID NO: 47453 - DNA, 20 bp, Artificial Sequence
  Synthetic oligonucleotide; GGG chr11 5238848 5238867 5238851 -
gagccagaactgtctaatgg

SEQ ID NO: 47454 - DNA, 20 bp, Artificial Sequence
  Synthetic oligonucleotide; AAG chr11 5238840 5238859 5238843 -
actgtctaatgggggcatca

SEQ ID NO: 47455 - DNA, 20 bp, Artificial Sequence
  Synthetic oligonucleotide; CAG chr11 5238834 5238853 5238837 -
taatgggggcatcaaagtat

SEQ ID NO: 47456 - DNA, 20 bp, Artificial Sequence
  Synthetic oligonucleotide; AAG chr11 5238813 5238832 5238816 -
agccataaaaaaccataaaa

SEQ ID NO: 47457 - DNA, 20 bp, Artificial Sequence
  Synthetic oligonucleotide; TAG chr11 5238799 5238818 5238802 -
ataaaaaagactgtctgctg

SEQ ID NO: 47458 - DNA, 20 bp, Artificial Sequence
  Synthetic oligonucleotide; AGG chr11 5238798 5238817 5238801 -
taaaaaagactgtctgctgt

SEQ ID NO: 47459 - DNA, 20 bp, Artificial Sequence
  Synthetic oligonucleotide; GAG chr11 5238796 5238815 5238799 -
aaaaagactgtctgctgtag

SEQ ID NO: 47460 - DNA, 20 bp, Artificial Sequence
  Synthetic oligonucleotide; CAG chr11 5238786 5238805 5238789 -
tctgctgtaggagatccgtt

SEQ ID NO: 47461 - DNA, 20 bp, Artificial Sequence
  Synthetic oligonucleotide; GAG chr11 5238784 5238803 5238787 -
tgctgtaggagatccgttca

SEQ ID NO: 47462 - DNA, 20 bp, Artificial Sequence
  Synthetic oligonucleotide; GAG chr11 5238782 5238801 5238785 -
ctgtaggagatccgttcaga

SEQ ID NO: 47463 - DNA, 20 bp, Artificial Sequence
  Synthetic oligonucleotide; GAG chr11 5238780 5238799 5238783 -
gtaggagatccgttcagaga

SEQ ID NO: 47464 - DNA, 20 bp, Artificial Sequence
  Synthetic oligonucleotide; GAG chr11 5238778 5238797 5238781 -
aggagatccgttcagagaga

SEQ ID NO: 47465 - DNA, 20 bp, Artificial Sequence
  Synthetic oligonucleotide; GAG chr11 5238776 5238795 5238779 -
gagatccgttcagagagaga

SEQ ID NO: 47466 - DNA, 20 bp, Artificial Sequence
  Synthetic oligonucleotide; GAG chr11 5238774 5238793 5238777 -
gatccgttcagagagagaga

SEQ ID NO: 47467 - DNA, 20 bp, Artificial Sequence
  Synthetic oligonucleotide; CAG chr11 5238769 5238788 5238772 -
gttcagagagagagagagac

SEQ ID NO: 47468 - DNA, 20 bp, Artificial Sequence
  Synthetic oligonucleotide; CAG chr11 5238741 5238760 5238744 -
atcttgcttatgctttccct

SEQ ID NO: 47469 - DNA, 20 bp, Artificial Sequence
  Synthetic oligonucleotide; CAG chr11 5238737 5238756 5238740 -
tgcttatgctttccctcagc

SEQ ID NO: 47470 - DNA, 20 bp, Artificial Sequence
  Synthetic oligonucleotide; CAG chr11 5238722 5238741 5238725 -
tcagccagtgtttaccattg

SEQ ID NO: 47471 - DNA, 20 bp, Artificial Sequence
  Synthetic oligonucleotide; AAG chr11 5238702 5238721 5238705 -
cagaatgtacatgcgactga

SEQ ID NO: 47472 - DNA, 20 bp, Artificial Sequence
  Synthetic oligonucleotide; AGG chr11 5238701 5238720 5238704 -
agaatgtacatgcgactgaa

SEQ ID NO: 47473 - DNA, 20 bp, Artificial Sequence
  Synthetic oligonucleotide; GGG chr11 5238700 5238719 5238703 -
gaatgtacatgcgactgaaa

SEQ ID NO: 47474 - DNA, 20 bp, Artificial Sequence
  Synthetic oligonucleotide; GAG chr11 5238696 5238715 5238699 -
gtacatgcgactgaaagggt

SEQ ID NO: 47475 - DNA, 20 bp, Artificial Sequence
  Synthetic oligonucleotide; AGG chr11 5238695 5238714 5238698 -
tacatgcgactgaaagggtg

SEQ ID NO: 47476 - DNA, 20 bp, Artificial Sequence
  Synthetic oligonucleotide; TGG chr11 5238687 5238706 5238690 -
actgaaagggtgaggaaacc

SEQ ID NO: 47477 - DNA, 20 bp, Artificial Sequence
  Synthetic oligonucleotide; GGG chr11 5238686 5238705 5238689 -
ctgaaagggtgaggaaacct

SEQ ID NO: 47478 - DNA, 20 bp, Artificial Sequence
  Synthetic oligonucleotide; CAG chr11 5238677 5238696 5238680 -
tgaggaaacctgggaaatgt

SEQ ID NO: 47479 - DNA, 20 bp, Artificial Sequence
  Synthetic oligonucleotide; CAG chr11 5238663 5238682 5238666 -
aaatgtcagttcctcaaata

SEQ ID NO: 47480 - DNA, 20 bp, Artificial Sequence
  Synthetic oligonucleotide; GAG chr11 5238661 5238680 5238664 -
atgtcagttcctcaaataca

SEQ ID NO: 47481 - DNA, 20 bp, Artificial Sequence
  Synthetic oligonucleotide; GAG chr11 5238652 5238671 5238655 -
cctcaaatacagagaacact

SEQ ID NO: 47482 - DNA, 20 bp, Artificial Sequence
  Synthetic oligonucleotide; AGG chr11 5238651 5238670 5238654 -
ctcaaatacagagaacactg

SEQ ID NO: 47483 - DNA, 20 bp, Artificial Sequence
  Synthetic oligonucleotide; GGG chr11 5238650 5238669 5238653 -
tcaaatacagagaacactga

SEQ ID NO: 47484 - DNA, 20 bp, Artificial Sequence
  Synthetic oligonucleotide; AAG chr11 5238647 5238666 5238650 -
aatacagagaacactgaggg

SEQ ID NO: 47485 - DNA, 20 bp, Artificial Sequence
  Synthetic oligonucleotide; AGG chr11 5238646 5238665 5238649 -
atacagagaacactgaggga

SEQ ID NO: 47486 - DNA, 20 bp, Artificial Sequence
  Synthetic oligonucleotide; GAG chr11 5238641 5238660 5238644 -
gagaacactgagggaaggat

SEQ ID NO: 47487 - DNA, 20 bp, Artificial Sequence
  Synthetic oligonucleotide; AAG chr11 5238626 5238645 5238629 -
aggatgagaaataaatgtga

SEQ ID NO: 47488 - DNA, 20 bp, Artificial Sequence
  Synthetic oligonucleotide; CAG chr11 5238623 5238642 5238626 -
atgagaaataaatgtgaaag

SEQ ID NO: 47489 - DNA, 20 bp, Artificial Sequence
  Synthetic oligonucleotide; TGG chr11 5238613 5238632 5238616 -
aatgtgaaagcagacatgaa

SEQ ID NO: 47490 - DNA, 20 bp, Artificial Sequence
  Synthetic oligonucleotide; CAG chr11 5238603 5238622 5238606 -
cagacatgaatggtaattga

SEQ ID NO: 47491 - DNA, 20 bp, Artificial Sequence
  Synthetic oligonucleotide; AAG chr11 5238600 5238619 5238603 -
acatgaatggtaattgacag

SEQ ID NO: 47492 - DNA, 20 bp, Artificial Sequence
  Synthetic oligonucleotide; AGG chr11 5238599 5238618 5238602 -
catgaatggtaattgacaga

SEQ ID NO: 47493 - DNA, 20 bp, Artificial Sequence
  Synthetic oligonucleotide; TAG chr11 5238592 5238611 5238595 -
ggtaattgacagaaggaaac

SEQ ID NO: 47494 - DNA, 20 bp, Artificial Sequence
  Synthetic oligonucleotide; AGG chr11 5238591 5238610 5238594 -
gtaattgacagaaggaaact

SEQ ID NO: 47495 - DNA, 20 bp, Artificial Sequence
  Synthetic oligonucleotide; CAG chr11 5238581 5238600 5238584 -
gaaggaaactaggatgtgtc

SEQ ID NO: 47496 - DNA, 20 bp, Artificial Sequence
  Synthetic oligonucleotide; CAG chr11 5238564 5238583 5238567 -
gtccagtaaatgaataatta

SEQ ID NO: 47497 - DNA, 20 bp, Artificial Sequence
  Synthetic oligonucleotide; CAG chr11 5238557 5238576 5238560 -
aaatgaataattacagtgtg

SEQ ID NO: 47498 - DNA, 20 bp, Artificial Sequence
  Synthetic oligonucleotide; AAG chr11 5238526 5238545 5238529 -
gcaatgattaatgtattgat

SEQ ID NO: 47499 - DNA, 20 bp, Artificial Sequence
  Synthetic oligonucleotide; CAG chr11 5238509 5238528 5238512 -
gataagataatatgaaaaca

SEQ ID NO: 47500 - DNA, 20 bp, Artificial Sequence
  Synthetic oligonucleotide; CAG chr11 5238498 5238517 5238501 -
atgaaaacacagaattcaaa

SEQ ID NO: 47501 - DNA, 20 bp, Artificial Sequence
  Synthetic oligonucleotide; CAG chr11 5238495 5238514 5238498 -
aaaacacagaattcaaacag

SEQ ID NO: 47502 - DNA, 20 bp, Artificial Sequence
  Synthetic oligonucleotide; GAG chr11 5238486 5238505 5238489 -
aattcaaacagcagtgaact

SEQ ID NO: 47503 - DNA, 20 bp, Artificial Sequence
  Synthetic oligonucleotide; TAG chr11 5238481 5238500 5238484 -
aaacagcagtgaactgagat

SEQ ID NO: 47504 - DNA, 20 bp, Artificial Sequence
  Synthetic oligonucleotide; TGG chr11 5238473 5238492 5238476 -
gtgaactgagattagaattg

SEQ ID NO: 47505 - DNA, 20 bp, Artificial Sequence
  Synthetic oligonucleotide; GAG chr11 5238471 5238490 5238474 -
gaactgagattagaattgtg

SEQ ID NO: 47506 - DNA, 20 bp, Artificial Sequence
  Synthetic oligonucleotide; GAG chr11 5238469 5238488 5238472 -
actgagattagaattgtgga

SEQ ID NO: 47507 - DNA, 20 bp, Artificial Sequence
  Synthetic oligonucleotide; TGG chr11 5238463 5238482 5238466 -
attagaattgtggagagcac

SEQ ID NO: 47508 - DNA, 20 bp, Artificial Sequence
  Synthetic oligonucleotide; AAG chr11 5238455 5238474 5238458 -
tgtggagagcactggcattt

SEQ ID NO: 47509 - DNA, 20 bp, Artificial Sequence
  Synthetic oligonucleotide; TAG chr11 5238441 5238460 5238444 -
gcatttaagaatgtcacact

SEQ ID NO: 47510 - DNA, 20 bp, Artificial Sequence
  Synthetic oligonucleotide; TAG chr11 5238428 5238447 5238431 -
tcacacttagaatgtgtctc

SEQ ID NO: 47511 - DNA, 20 bp, Artificial Sequence
  Synthetic oligonucleotide; AGG chr11 5238427 5238446 5238430 -
cacacttagaatgtgtctct

SEQ ID NO: 47512 - DNA, 20 bp, Artificial Sequence
  Synthetic oligonucleotide; TAG chr11 5238372 5238391 5238375 -
attatctgaaaattatgaat

SEQ ID NO: 47513 - DNA, 20 bp, Artificial Sequence
  Synthetic oligonucleotide; AGG chr11 5238371 5238390 5238374 -
ttatctgaaaattatgaatt

SEQ ID NO: 47514 - DNA, 20 bp, Artificial Sequence
  Synthetic oligonucleotide; AAG chr11 5238364 5238383 5238367 -
aaaattatgaattaggtaca

SEQ ID NO: 47515 - DNA, 20 bp, Artificial Sequence
  Synthetic oligonucleotide; CAG chr11 5238342 5238361 5238345 -
gctcaaataatttatttttt

SEQ ID NO: 47516 - DNA, 20 bp, Artificial Sequence
  Synthetic oligonucleotide; AGG chr11 5238341 5238360 5238344 -
ctcaaataatttattttttc

SEQ ID NO: 47517 - DNA, 20 bp, Artificial Sequence
  Synthetic oligonucleotide; TAG chr11 5238337 5238356 5238340 -
aataatttattttttcaggt

SEQ ID NO: 47518 - DNA, 20 bp, Artificial Sequence
  Synthetic oligonucleotide; AAG chr11 5238333 5238352 5238336 -
atttattttttcaggttagc

SEQ ID NO: 47519 - DNA, 20 bp, Artificial Sequence
  Synthetic oligonucleotide; GAG chr11 5238310 5238329 5238313 -
aactttttttttttttttct

SEQ ID NO: 47520 - DNA, 20 bp, Artificial Sequence
  Synthetic oligonucleotide; TAG chr11 5238306 5238325 5238309 -
ttttttttttttttctgaga

SEQ ID NO: 47521 - DNA, 20 bp, Artificial Sequence
  Synthetic oligonucleotide; GAG chr11 5238304 5238323 5238307 -
ttttttttttttctgagata

SEQ ID NO: 47522 - DNA, 20 bp, Artificial Sequence
  Synthetic oligonucleotide; TGG chr11 5238293 5238312 5238296 -
tctgagatagagcattgcta

SEQ ID NO: 47523 - DNA, 20 bp, Artificial Sequence
  Synthetic oligonucleotide; CAG chr11 5238285 5238304 5238288 -
agagcattgctatggttgcc

SEQ ID NO: 47524 - DNA, 20 bp, Artificial Sequence
  Synthetic oligonucleotide; AGG chr11 5238284 5238303 5238287 -
gagcattgctatggttgccc

SEQ ID NO: 47525 - DNA, 20 bp, Artificial Sequence
  Synthetic oligonucleotide; TGG chr11 5238280 5238299 5238283 -
attgctatggttgcccaggc

SEQ ID NO: 47526 - DNA, 20 bp, Artificial Sequence
  Synthetic oligonucleotide; GAG chr11 5238278 5238297 5238281 -
tgctatggttgcccaggctg

SEQ ID NO: 47527 - DNA, 20 bp, Artificial Sequence
  Synthetic oligonucleotide; TGG chr11 5238270 5238289 5238273 -
ttgcccaggctggagtgcaa

SEQ ID NO: 47528 - DNA, 20 bp, Artificial Sequence
  Synthetic oligonucleotide; CAG chr11 5238260 5238279 5238263 -
tggagtgcaatggcatgatc

SEQ ID NO: 47529 - DNA, 20 bp, Artificial Sequence
  Synthetic oligonucleotide; AGG chr11 5238259 5238278 5238262 -
ggagtgcaatggcatgatcc

SEQ ID NO: 47530 - DNA, 20 bp, Artificial Sequence
  Synthetic oligonucleotide; CAG chr11 5238235 5238254 5238238 -
tcactgcaacatctgcctcc

SEQ ID NO: 47531 - DNA, 20 bp, Artificial Sequence
  Synthetic oligonucleotide; AGG chr11 5238234 5238253 5238237 -
cactgcaacatctgcctccc

SEQ ID NO: 47532 - DNA, 20 bp, Artificial Sequence
  Synthetic oligonucleotide; AAG chr11 5238228 5238247 5238231 -
aacatctgcctcccaggttc

SEQ ID NO: 47533 - DNA, 20 bp, Artificial Sequence
  Synthetic oligonucleotide; CAG chr11 5238211 5238230 5238214 -
ttcaagcgattctcctgcct

SEQ ID NO: 47534 - DNA, 20 bp, Artificial Sequence
  Synthetic oligonucleotide; AAG chr11 5238202 5238221 5238205 -
ttctcctgcctcagcctccc

SEQ ID NO: 47535 - DNA, 20 bp, Artificial Sequence
  Synthetic oligonucleotide; TAG chr11 5238199 5238218 5238202 -
tcctgcctcagcctcccaag

SEQ ID NO: 47536 - DNA, 20 bp, Artificial Sequence
  Synthetic oligonucleotide; TGG chr11 5238195 5238214 5238198 -
gcctcagcctcccaagtagc

SEQ ID NO: 47537 - DNA, 20 bp, Artificial Sequence
  Synthetic oligonucleotide; CAG chr11 5238187 5238206 5238190 -
ctcccaagtagctggcacta

SEQ ID NO: 47538 - DNA, 20 bp, Artificial Sequence
  Synthetic oligonucleotide; AGG chr11 5238186 5238205 5238189 -
tcccaagtagctggcactac

SEQ ID NO: 47539 - DNA, 20 bp, Artificial Sequence
  Synthetic oligonucleotide; TGG chr11 5238164 5238183 5238167 -
gcatgtgccaccaccatgcc

SEQ ID NO: 47540 - DNA, 20 bp, Artificial Sequence
  Synthetic oligonucleotide; TAG chr11 5238146 5238165 5238149 -
cctggctaattttctatttt

SEQ ID NO: 47541 - DNA, 20 bp, Artificial Sequence
  Synthetic oligonucleotide; TAG chr11 5238143 5238162 5238146 -
ggctaattttctatttttag

SEQ ID NO: 47542 - DNA, 20 bp, Artificial Sequence
  Synthetic oligonucleotide; TAG chr11 5238139 5238158 5238142 -
aattttctatttttagtaga

SEQ ID NO: 47543 - DNA, 20 bp, Artificial Sequence
  Synthetic oligonucleotide; AGG chr11 5238138 5238157 5238141 -
attttctatttttagtagat

SEQ ID NO: 47544 - DNA, 20 bp, Artificial Sequence
  Synthetic oligonucleotide; GGG chr11 5238137 5238156 5238140 -
ttttctatttttagtagata

SEQ ID NO: 47545 - DNA, 20 bp, Artificial Sequence
  Synthetic oligonucleotide; GGG chr11 5238136 5238155 5238139 -
tttctatttttagtagatag

SEQ ID NO: 47546 - DNA, 20 bp, Artificial Sequence
  Synthetic oligonucleotide; GGG chr11 5238135 5238154 5238138 -
ttctatttttagtagatagg

SEQ ID NO: 47547 - DNA, 20 bp, Artificial Sequence
  Synthetic oligonucleotide; TGG chr11 5238121 5238140 5238124 -
gatagggggtttcaccatgt

SEQ ID NO: 47548 - DNA, 20 bp, Artificial Sequence
  Synthetic oligonucleotide; CAG chr11 5238117 5238136 5238120 -
gggggtttcaccatgttggt

SEQ ID NO: 47549 - DNA, 20 bp, Artificial Sequence
  Synthetic oligonucleotide; AGG chr11 5238116 5238135 5238119 -
ggggtttcaccatgttggtc

SEQ ID NO: 47550 - DNA, 20 bp, Artificial Sequence
  Synthetic oligonucleotide; CAG chr11 5238092 5238111 5238095 -
tgatctcgaactcctaacat

SEQ ID NO: 47551 - DNA, 20 bp, Artificial Sequence
  Synthetic oligonucleotide; AGG chr11 5238091 5238110 5238094 -
gatctcgaactcctaacatc

SEQ ID NO: 47552 - DNA, 20 bp, Artificial Sequence
  Synthetic oligonucleotide; CGG chr11 5238074 5238093 5238077 -
atcaggtgatccaccctcct

SEQ ID NO: 47553 - DNA, 20 bp, Artificial Sequence
  Synthetic oligonucleotide; AAG chr11 5238064 5238083 5238067 -
ccaccctcctcggcctctga

SEQ ID NO: 47554 - DNA, 20 bp, Artificial Sequence
  Synthetic oligonucleotide; TGG chr11 5238058 5238077 5238061 -
tcctcggcctctgaaagtgc

SEQ ID NO: 47555 - DNA, 20 bp, Artificial Sequence
  Synthetic oligonucleotide; GGG chr11 5238057 5238076 5238060 -
cctcggcctctgaaagtgct

SEQ ID NO: 47556 - DNA, 20 bp, Artificial Sequence
  Synthetic oligonucleotide; CAG chr11 5238050 5238069 5238053 -
ctctgaaagtgctgggatca

SEQ ID NO: 47557 - DNA, 20 bp, Artificial Sequence
  Synthetic oligonucleotide; AGG chr11 5238049 5238068 5238052 -
tctgaaagtgctgggatcac

SEQ ID NO: 47558 - DNA, 20 bp, Artificial Sequence
  Synthetic oligonucleotide; GAG chr11 5238043 5238062 5238046 -
agtgctgggatcacaggcgt

SEQ ID NO: 47559 - DNA, 20 bp, Artificial Sequence
  Synthetic oligonucleotide; CAG chr11 5238030 5238049 5238033 -
caggcgtgagccaccacacc

SEQ ID NO: 47560 - DNA, 20 bp, Artificial Sequence
  Synthetic oligonucleotide; AAG chr11 5238025 5238044 5238028 -
gtgagccaccacacccagcc

SEQ ID NO: 47561 - DNA, 20 bp, Artificial Sequence
  Synthetic oligonucleotide; TAG chr11 5238009 5238028 5238012 -
agccaagaatgtgaattttg

SEQ ID NO: 47562 - DNA, 20 bp, Artificial Sequence
  Synthetic oligonucleotide; AAG chr11 5238006 5238025 5238009 -
caagaatgtgaattttgtag

SEQ ID NO: 47563 - DNA, 20 bp, Artificial Sequence
  Synthetic oligonucleotide; AGG chr11 5238005 5238024 5238008 -
aagaatgtgaattttgtaga

SEQ ID NO: 47564 - DNA, 20 bp, Artificial Sequence
  Synthetic oligonucleotide; TAG chr11 5237978 5237997 5237981 -
aacccatatttctctgaccc

SEQ ID NO: 47565 - DNA, 20 bp, Artificial Sequence
  Synthetic oligonucleotide; GAG chr11 5237976 5237995 5237979 -
cccatatttctctgacccta

SEQ ID NO: 47566 - DNA, 20 bp, Artificial Sequence
  Synthetic oligonucleotide; TAG chr11 5237969 5237988 5237972 -
ttctctgaccctagagtcct

SEQ ID NO: 47567 - DNA, 20 bp, Artificial Sequence
  Synthetic oligonucleotide; TGG chr11 5237948 5237967 5237951 -
agtatacctcccataccatg

SEQ ID NO: 47568 - DNA, 20 bp, Artificial Sequence
  Synthetic oligonucleotide; CAG chr11 5237890 5237909 5237893 -
ctaccttttcctttttgttt

SEQ ID NO: 47569 - DNA, 20 bp, Artificial Sequence
  Synthetic oligonucleotide; TAG chr11 5237867 5237886 5237870 -
cttttcactgtgtcaaaatc

SEQ ID NO: 47570 - DNA, 20 bp, Artificial Sequence
  Synthetic oligonucleotide; CAG chr11 5237834 5237853 5237837 -
cctacctgctctgaaaccaa

SEQ ID NO: 47571 - DNA, 20 bp, Artificial Sequence
  Synthetic oligonucleotide; AAG chr11 5237830 5237849 5237833 -
cctgctctgaaaccaacagc

SEQ ID NO: 47572 - DNA, 20 bp, Artificial Sequence
  Synthetic oligonucleotide; TGG chr11 5237804 5237823 5237807 -
acttccattctaacccacat

SEQ ID NO: 47573 - DNA, 20 bp, Artificial Sequence
  Synthetic oligonucleotide; GAG chr11 5237776 5237795 5237779 -
cactaattaaaatcgatact

SEQ ID NO: 47574 - DNA, 20 bp, Artificial Sequence
  Synthetic oligonucleotide; CGG chr11 5237761 5237780 5237764 -
atactgagttctaaaatcat

SEQ ID NO: 47575 - DNA, 20 bp, Artificial Sequence
  Synthetic oligonucleotide; GGG chr11 5237760 5237779 5237763 -
tactgagttctaaaatcatc

SEQ ID NO: 47576 - DNA, 20 bp, Artificial Sequence
  Synthetic oligonucleotide; GGG chr11 5237759 5237778 5237762 -
actgagttctaaaatcatcg

SEQ ID NO: 47577 - DNA, 20 bp, Artificial Sequence
  Synthetic oligonucleotide; TGG chr11 5237752 5237771 5237755 -
tctaaaatcatcggggattt

SEQ ID NO: 47578 - DNA, 20 bp, Artificial Sequence
  Synthetic oligonucleotide; GGG chr11 5237751 5237770 5237754 -
ctaaaatcatcggggatttt

SEQ ID NO: 47579 - DNA, 20 bp, Artificial Sequence
  Synthetic oligonucleotide; GGG chr11 5237750 5237769 5237753 -
taaaatcatcggggattttg

SEQ ID NO: 47580 - DNA, 20 bp, Artificial Sequence
  Synthetic oligonucleotide; GAG chr11 5237722 5237741 5237725 -
gtcttacttcatacttcctt

SEQ ID NO: 47581 - DNA, 20 bp, Artificial Sequence
  Synthetic oligonucleotide; TGG chr11 5237703 5237722 5237706 -
tgagatttcacattaaatgt

SEQ ID NO: 47582 - DNA, 20 bp, Artificial Sequence
  Synthetic oligonucleotide; AAG chr11 5237691 5237710 5237694 -
ttaaatgttggtgttcatta

SEQ ID NO: 47583 - DNA, 20 bp, Artificial Sequence
  Synthetic oligonucleotide; AGG chr11 5237690 5237709 5237693 -
taaatgttggtgttcattaa

SEQ ID NO: 47584 - DNA, 20 bp, Artificial Sequence
  Synthetic oligonucleotide; TGG chr11 5237655 5237674 5237658 -
ctttgtattcatcacactct

SEQ ID NO: 47585 - DNA, 20 bp, Artificial Sequence
  Synthetic oligonucleotide; CAG chr11 5237647 5237666 5237650 -
tcatcacactcttggattca

SEQ ID NO: 47586 - DNA, 20 bp, Artificial Sequence
  Synthetic oligonucleotide; CAG chr11 5237623 5237642 5237626 -
tatatctaaactcttaaata

SEQ ID NO: 47587 - DNA, 20 bp, Artificial Sequence
  Synthetic oligonucleotide; CAG chr11 5237568 5237587 5237571 -
taacctctgacctccaacct

SEQ ID NO: 47588 - DNA, 20 bp, Artificial Sequence
  Synthetic oligonucleotide; TGG chr11 5237537 5237556 5237540 -
ccatatatcaaacaatgtac

SEQ ID NO: 47589 - DNA, 20 bp, Artificial Sequence
  Synthetic oligonucleotide; GGG chr11 5237536 5237555 5237539 -
catatatcaaacaatgtact

SEQ ID NO: 47590 - DNA, 20 bp, Artificial Sequence
  Synthetic oligonucleotide; TAG chr11 5237523 5237542 5237526 -
atgtactgggcttatttata

SEQ ID NO: 47591 - DNA, 20 bp, Artificial Sequence
  Synthetic oligonucleotide; TAG chr11 5237512 5237531 5237515 -
ttatttatatagatgtccta

SEQ ID NO: 47592 - DNA, 20 bp, Artificial Sequence
  Synthetic oligonucleotide; AGG chr11 5237511 5237530 5237514 -
tatttatatagatgtcctat

SEQ ID NO: 47593 - DNA, 20 bp, Artificial Sequence
  Synthetic oligonucleotide; CAG chr11 5237503 5237522 5237506 -
tagatgtcctataggcacct

SEQ ID NO: 47594 - DNA, 20 bp, Artificial Sequence
  Synthetic oligonucleotide; CAG chr11 5237497 5237516 5237500 -
tcctataggcacctcagact

SEQ ID NO: 47595 - DNA, 20 bp, Artificial Sequence
  Synthetic oligonucleotide; TGG chr11 5237492 5237511 5237495 -
taggcacctcagactcagca

SEQ ID NO: 47596 - DNA, 20 bp, Artificial Sequence
  Synthetic oligonucleotide; GGG chr11 5237491 5237510 5237494 -
aggcacctcagactcagcat

SEQ ID NO: 47597 - DNA, 20 bp, Artificial Sequence
  Synthetic oligonucleotide; CAG chr11 5237454 5237473 5237457 -
tactaaaactgtttctcttc

SEQ ID NO: 47598 - DNA, 20 bp, Artificial Sequence
  Synthetic oligonucleotide; TAG chr11 5237439 5237458 5237442 -
tcttccagtgttttccattt

SEQ ID NO: 47599 - DNA, 20 bp, Artificial Sequence
  Synthetic oligonucleotide; TAG chr11 5237432 5237451 5237435 -
gtgttttccattttagtcat

SEQ ID NO: 47600 - DNA, 20 bp, Artificial Sequence
  Synthetic oligonucleotide; TAG chr11 5237428 5237447 5237431 -
tttccattttagtcattaga

SEQ ID NO: 47601 - DNA, 20 bp, Artificial Sequence
  Synthetic oligonucleotide; AAG chr11 5237408 5237427 5237411 -
tagctacttgcccattcacc

SEQ ID NO: 47602 - DNA, 20 bp, Artificial Sequence
  Synthetic oligonucleotide; AGG chr11 5237407 5237426 5237410 -
agctacttgcccattcacca

SEQ ID NO: 47603 - DNA, 20 bp, Artificial Sequence
  Synthetic oligonucleotide; CAG chr11 5237401 5237420 5237404 -
ttgcccattcaccaaggtca

SEQ ID NO: 47604 - DNA, 20 bp, Artificial Sequence
  Synthetic oligonucleotide; CAG chr11 5237369 5237388 5237372 -
atttccctacctctaatcaa

SEQ ID NO: 47605 - DNA, 20 bp, Artificial Sequence
  Synthetic oligonucleotide; CAG chr11 5237315 5237334 5237318 -
taatcaccactcttactgcc

SEQ ID NO: 47606 - DNA, 20 bp, Artificial Sequence
  Synthetic oligonucleotide; CAG chr11 5237311 5237330 5237314 -
caccactcttactgcccagt

SEQ ID NO: 47607 - DNA, 20 bp, Artificial Sequence
  Synthetic oligonucleotide; AGG chr11 5237310 5237329 5237313 -
accactcttactgcccagtc

SEQ ID NO: 47608 - DNA, 20 bp, Artificial Sequence
  Synthetic oligonucleotide; AAG chr11 5237288 5237307 5237291 -
gtcctcattgtttcctgaac

SEQ ID NO: 47609 - DNA, 20 bp, Artificial Sequence
  Synthetic oligonucleotide; GAG chr11 5237286 5237305 5237289 -
cctcattgtttcctgaacaa

SEQ ID NO: 47610 - DNA, 20 bp, Artificial Sequence
  Synthetic oligonucleotide; TAG chr11 5237283 5237302 5237286 -
cattgtttcctgaacaagag

SEQ ID NO: 47611 - DNA, 20 bp, Artificial Sequence
  Synthetic oligonucleotide; TAG chr11 5237261 5237280 5237264 -
gatgctattctttccacttt

SEQ ID NO: 47612 - DNA, 20 bp, Artificial Sequence
  Synthetic oligonucleotide; TGG chr11 5237249 5237268 5237252 -
tccacttttagaccttatcc

SEQ ID NO: 47613 - DNA, 20 bp, Artificial Sequence
  Synthetic oligonucleotide; TGG chr11 5237245 5237264 5237248 -
cttttagaccttatcctggc

SEQ ID NO: 47614 - DNA, 20 bp, Artificial Sequence
  Synthetic oligonucleotide; CGG chr11 5237239 5237258 5237242 -
gaccttatcctggctggatg

SEQ ID NO: 47615 - DNA, 20 bp, Artificial Sequence
  Synthetic oligonucleotide; TGG chr11 5237236 5237255 5237239 -
cttatcctggctggatgcgg

SEQ ID NO: 47616 - DNA, 20 bp, Artificial Sequence
  Synthetic oligonucleotide; CAG chr11 5237231 5237250 5237234 -
cctggctggatgcggtggct

SEQ ID NO: 47617 - DNA, 20 bp, Artificial Sequence
  Synthetic oligonucleotide; AGG chr11 5237230 5237249 5237233 -
ctggctggatgcggtggctc

SEQ ID NO: 47618 - DNA, 20 bp, Artificial Sequence
  Synthetic oligonucleotide; CAG chr11 5237217 5237236 5237220 -
gtggctcaggcttgtaaacc

SEQ ID NO: 47619 - DNA, 20 bp, Artificial Sequence
  Synthetic oligonucleotide; TGG chr11 5237209 5237228 5237212 -
ggcttgtaaacccagcactt

SEQ ID NO: 47620 - DNA, 20 bp, Artificial Sequence
  Synthetic oligonucleotide; GGG chr11 5237208 5237227 5237211 -
gcttgtaaacccagcacttt

SEQ ID NO: 47621 - DNA, 20 bp, Artificial Sequence
  Synthetic oligonucleotide; GAG chr11 5237206 5237225 5237209 -
ttgtaaacccagcactttgg

SEQ ID NO: 47622 - DNA, 20 bp, Artificial Sequence
  Synthetic oligonucleotide; AGG chr11 5237205 5237224 5237208 -
tgtaaacccagcactttggg

SEQ ID NO: 47623 - DNA, 20 bp, Artificial Sequence
  Synthetic oligonucleotide; AAG chr11 5237200 5237219 5237203 -
acccagcactttgggaggcc

SEQ ID NO: 47624 - DNA, 20 bp, Artificial Sequence
  Synthetic oligonucleotide; AGG chr11 5237199 5237218 5237202 -
cccagcactttgggaggcca

SEQ ID NO: 47625 - DNA, 20 bp, Artificial Sequence
  Synthetic oligonucleotide; CAG chr11 5237196 5237215 5237199 -
agcactttgggaggccaagg

SEQ ID NO: 47626 - DNA, 20 bp, Artificial Sequence
  Synthetic oligonucleotide; AGG chr11 5237195 5237214 5237198 -
gcactttgggaggccaaggc

SEQ ID NO: 47627 - DNA, 20 bp, Artificial Sequence
  Synthetic oligonucleotide; CAG chr11 5237192 5237211 5237195 -
ctttgggaggccaaggcagg

SEQ ID NO: 47628 - DNA, 20 bp, Artificial Sequence
  Synthetic oligonucleotide; GAG chr11 5237182 5237201 5237185 -
ccaaggcaggcagatcactt

SEQ ID NO: 47629 - DNA, 20 bp, Artificial Sequence
  Synthetic oligonucleotide; AGG chr11 5237181 5237200 5237184 -
caaggcaggcagatcacttg

SEQ ID NO: 47630 - DNA, 20 bp, Artificial Sequence
  Synthetic oligonucleotide; CAG chr11 5237177 5237196 5237180 -
gcaggcagatcacttgaggt

SEQ ID NO: 47631 - DNA, 20 bp, Artificial Sequence
  Synthetic oligonucleotide; AGG chr11 5237176 5237195 5237179 -
caggcagatcacttgaggtc

SEQ ID NO: 47632 - DNA, 20 bp, Artificial Sequence
  Synthetic oligonucleotide; GAG chr11 5237174 5237193 5237177 -
ggcagatcacttgaggtcag

SEQ ID NO: 47633 - DNA, 20 bp, Artificial Sequence
  Synthetic oligonucleotide; AAG chr11 5237168 5237187 5237171 -
tcacttgaggtcaggagttc

SEQ ID NO: 47634 - DNA, 20 bp, Artificial Sequence
  Synthetic oligonucleotide; CAG chr11 5237163 5237182 5237166 -
tgaggtcaggagttcaagac

SEQ ID NO: 47635 - DNA, 20 bp, Artificial Sequence
  Synthetic oligonucleotide; TGG chr11 5237149 5237168 5237152 -
caagaccagcctgaccaaca

SEQ ID NO: 47636 - DNA, 20 bp, Artificial Sequence
  Synthetic oligonucleotide; CAG chr11 5237115 5237134 5237118 -
ctctactaaaaatacaaaat

SEQ ID NO: 47637 - DNA, 20 bp, Artificial Sequence
  Synthetic oligonucleotide; CGG chr11 5237111 5237130 5237114 -
actaaaaatacaaaatcagc

SEQ ID NO: 47638 - DNA, 20 bp, Artificial Sequence
  Synthetic oligonucleotide; GGG chr11 5237110 5237129 5237113 -
ctaaaaatacaaaatcagcc

SEQ ID NO: 47639 - DNA, 20 bp, Artificial Sequence
  Synthetic oligonucleotide; TGG chr11 5237103 5237122 5237106 -
tacaaaatcagccgggcgtg

SEQ ID NO: 47640 - DNA, 20 bp, Artificial Sequence
  Synthetic oligonucleotide; CAG chr11 5237090 5237109 5237093 -
gggcgtgtggtgcatgcctg

SEQ ID NO: 47641 - DNA, 20 bp, Artificial Sequence
  Synthetic oligonucleotide; CAG chr11 5237084 5237103 5237087 -
gtggtgcatgcctgcagtcc

SEQ ID NO: 47642 - DNA, 20 bp, Artificial Sequence
  Synthetic oligonucleotide; CAG chr11 5237076 5237095 5237079 -
tgcctgcagtcccagctatt

SEQ ID NO: 47643 - DNA, 20 bp, Artificial Sequence
  Synthetic oligonucleotide; AGG chr11 5237075 5237094 5237078 -
gcctgcagtcccagctattc

SEQ ID NO: 47644 - DNA, 20 bp, Artificial Sequence
  Synthetic oligonucleotide; TGG chr11 5237072 5237091 5237075 -
tgcagtcccagctattcagg

SEQ ID NO: 47645 - DNA, 20 bp, Artificial Sequence
  Synthetic oligonucleotide; GAG chr11 5237067 5237086 5237070 -
tcccagctattcaggtggct

SEQ ID NO: 47646 - DNA, 20 bp, Artificial Sequence
  Synthetic oligonucleotide; AGG chr11 5237066 5237085 5237069 -
cccagctattcaggtggctg

SEQ ID NO: 47647 - DNA, 20 bp, Artificial Sequence
  Synthetic oligonucleotide; CAG chr11 5237063 5237082 5237066 -
agctattcaggtggctgagg

SEQ ID NO: 47648 - DNA, 20 bp, Artificial Sequence
  Synthetic oligonucleotide; AGG chr11 5237062 5237081 5237065 -
gctattcaggtggctgaggc

SEQ ID NO: 47649 - DNA, 20 bp, Artificial Sequence
  Synthetic oligonucleotide; GAG chr11 5237060 5237079 5237063 -
tattcaggtggctgaggcag

SEQ ID NO: 47650 - DNA, 20 bp, Artificial Sequence
  Synthetic oligonucleotide; CAG chr11 5237044 5237063 5237047 -
gcaggagaattgcttgaacc

SEQ ID NO: 47651 - DNA, 20 bp, Artificial Sequence
  Synthetic oligonucleotide; AGG chr11 5237043 5237062 5237046 -
caggagaattgcttgaaccc

SEQ ID NO: 47652 - DNA, 20 bp, Artificial Sequence
  Synthetic oligonucleotide; GAG chr11 5237041 5237060 5237044 -
ggagaattgcttgaacccag

SEQ ID NO: 47653 - DNA, 20 bp, Artificial Sequence
  Synthetic oligonucleotide; AGG chr11 5237040 5237059 5237043 -
gagaattgcttgaacccagg

SEQ ID NO: 47654 - DNA, 20 bp, Artificial Sequence
  Synthetic oligonucleotide; CAG chr11 5237037 5237056 5237040 -
aattgcttgaacccaggagg

SEQ ID NO: 47655 - DNA, 20 bp, Artificial Sequence
  Synthetic oligonucleotide; GAG chr11 5237035 5237054 5237038 -
ttgcttgaacccaggaggca

SEQ ID NO: 47656 - DNA, 20 bp, Artificial Sequence
  Synthetic oligonucleotide; AGG chr11 5237034 5237053 5237037 -
tgcttgaacccaggaggcag

SEQ ID NO: 47657 - DNA, 20 bp, Artificial Sequence
  Synthetic oligonucleotide; CGG chr11 5237028 5237047 5237031 -
aacccaggaggcagaggttg

SEQ ID NO: 47658 - DNA, 20 bp, Artificial Sequence
  Synthetic oligonucleotide; GAG chr11 5237024 5237043 5237027 -
caggaggcagaggttgcggt

SEQ ID NO: 47659 - DNA, 20 bp, Artificial Sequence
  Synthetic oligonucleotide; TAG chr11 5237019 5237038 5237022 -
ggcagaggttgcggtgagcc

SEQ ID NO: 47660 - DNA, 20 bp, Artificial Sequence
  Synthetic oligonucleotide; TAG chr11 5236999 5237018 5237002 -
tagattgcaccattgcactc

SEQ ID NO: 47661 - DNA, 20 bp, Artificial Sequence
  Synthetic oligonucleotide; TGG chr11 5236994 5237013 5236997 -
tgcaccattgcactctagct

SEQ ID NO: 47662 - DNA, 20 bp, Artificial Sequence
  Synthetic oligonucleotide; GGG chr11 5236993 5237012 5236996 -
gcaccattgcactctagctt

SEQ ID NO: 47663 - DNA, 20 bp, Artificial Sequence
  Synthetic oligonucleotide; TAG chr11 5236987 5237006 5236990 -
ttgcactctagcttgggcaa

SEQ ID NO: 47664 - DNA, 20 bp, Artificial Sequence
  Synthetic oligonucleotide; AGG chr11 5236986 5237005 5236989 -
tgcactctagcttgggcaat

SEQ ID NO: 47665 - DNA, 20 bp, Artificial Sequence
  Synthetic oligonucleotide; GGG chr11 5236985 5237004 5236988 -
gcactctagcttgggcaata

SEQ ID NO: 47666 - DNA, 20 bp, Artificial Sequence
  Synthetic oligonucleotide; CAG chr11 5236968 5236987 5236971 -
atagggatgaaactccatct

SEQ ID NO: 47667 - DNA, 20 bp, Artificial Sequence
  Synthetic oligonucleotide; AAG chr11 5236965 5236984 5236968 -
gggatgaaactccatctcag

SEQ ID NO: 47668 - DNA, 20 bp, Artificial Sequence
  Synthetic oligonucleotide; GAG chr11 5236963 5236982 5236966 -
gatgaaactccatctcagaa

SEQ ID NO: 47669 - DNA, 20 bp, Artificial Sequence
  Synthetic oligonucleotide; AAG chr11 5236958 5236977 5236961 -
aactccatctcagaagagaa

SEQ ID NO: 47670 - DNA, 20 bp, Artificial Sequence
  Synthetic oligonucleotide; AAG chr11 5236950 5236969 5236953 -
ctcagaagagaaaagaaaaa

SEQ ID NO: 47671 - DNA, 20 bp, Artificial Sequence
  Synthetic oligonucleotide; TAG chr11 5236907 5236926 5236910 -
tcctctcaatgcaatccata

SEQ ID NO: 47672 - DNA, 20 bp, Artificial Sequence
  Synthetic oligonucleotide; CAG chr11 5236890 5236909 5236893 -
atatagaataaacatgtaac

SEQ ID NO: 47673 - DNA, 20 bp, Artificial Sequence
  Synthetic oligonucleotide; CAG chr11 5236863 5236882 5236866 -
cccaatgtgtaaaatcattt

SEQ ID NO: 47674 - DNA, 20 bp, Artificial Sequence
  Synthetic oligonucleotide; AGG chr11 5236862 5236881 5236865 -
ccaatgtgtaaaatcatttc

SEQ ID NO: 47675 - DNA, 20 bp, Artificial Sequence
  Synthetic oligonucleotide; TAG chr11 5236859 5236878 5236862 -
atgtgtaaaatcatttcagg

SEQ ID NO: 47676 - DNA, 20 bp, Artificial Sequence
  Synthetic oligonucleotide; CAG chr11 5236854 5236873 5236857 -
taaaatcatttcaggtagaa

SEQ ID NO: 47677 - DNA, 20 bp, Artificial Sequence
  Synthetic oligonucleotide; AAG chr11 5236846 5236865 5236849 -
tttcaggtagaacagaatta

SEQ ID NO: 47678 - DNA, 20 bp, Artificial Sequence
  Synthetic oligonucleotide; AAG chr11 5236839 5236858 5236842 -
tagaacagaattaaagtgaa

SEQ ID NO: 47679 - DNA, 20 bp, Artificial Sequence
  Synthetic oligonucleotide; AAG chr11 5236834 5236853 5236837 -
cagaattaaagtgaaaagcc

SEQ ID NO: 47680 - DNA, 20 bp, Artificial Sequence
  Synthetic oligonucleotide; TGG chr11 5236827 5236846 5236830 -
aaagtgaaaagccaagtctt

SEQ ID NO: 47681 - DNA, 20 bp, Artificial Sequence
  Synthetic oligonucleotide; CAG chr11 5236818 5236837 5236821 -
agccaagtctttggaattaa

SEQ ID NO: 47682 - DNA, 20 bp, Artificial Sequence
  Synthetic oligonucleotide; AAG chr11 5236812 5236831 5236815 -
gtctttggaattaacagaca

SEQ ID NO: 47683 - DNA, 20 bp, Artificial Sequence
  Synthetic oligonucleotide; CAG chr11 5236800 5236819 5236803 -
aacagacaaagatcaaataa

SEQ ID NO: 47684 - DNA, 20 bp, Artificial Sequence
  Synthetic oligonucleotide; TGG chr11 5236791 5236810 5236794 -
agatcaaataacagtcctca

SEQ ID NO: 47685 - DNA, 20 bp, Artificial Sequence
  Synthetic oligonucleotide; AAG chr11 5236784 5236803 5236787 -
ataacagtcctcatggcctt

SEQ ID NO: 47686 - DNA, 20 bp, Artificial Sequence
  Synthetic oligonucleotide; TAG chr11 5236761 5236780 5236764 -
aatttacctaacattttttt

SEQ ID NO: 47687 - DNA, 20 bp, Artificial Sequence
  Synthetic oligonucleotide; TGG chr11 5236735 5236754 5236738 -
caattttcttatatatgaat

SEQ ID NO: 47688 - DNA, 20 bp, Artificial Sequence
  Synthetic oligonucleotide; AAG chr11 5236701 5236720 5236704 -
ctccctcacaaacacattct

SEQ ID NO: 47689 - DNA, 20 bp, Artificial Sequence
  Synthetic oligonucleotide; AAG chr11 5236693 5236712 5236696 -
caaacacattctaagatttt

SEQ ID NO: 47690 - DNA, 20 bp, Artificial Sequence
  Synthetic oligonucleotide; AGG chr11 5236692 5236711 5236695 -
aaacacattctaagatttta

SEQ ID NO: 47691 - DNA, 20 bp, Artificial Sequence
  Synthetic oligonucleotide; GAG chr11 5236690 5236709 5236693 -
acacattctaagattttaag

SEQ ID NO: 47692 - DNA, 20 bp, Artificial Sequence
  Synthetic oligonucleotide; AAG chr11 5236678 5236697 5236681 -
attttaaggagatattgatg

SEQ ID NO: 47693 - DNA, 20 bp, Artificial Sequence
  Synthetic oligonucleotide; CAG chr11 5236654 5236673 5236657 -
acatcatctgtcatttttaa

SEQ ID NO: 47694 - DNA, 20 bp, Artificial Sequence
  Synthetic oligonucleotide; AGG chr11 5236653 5236672 5236656 -
catcatctgtcatttttaac

SEQ ID NO: 47695 - DNA, 20 bp, Artificial Sequence
  Synthetic oligonucleotide; TAG chr11 5236650 5236669 5236653 -
catctgtcatttttaacagg

SEQ ID NO: 47696 - DNA, 20 bp, Artificial Sequence
  Synthetic oligonucleotide; TGG chr11 5236647 5236666 5236650 -
ctgtcatttttaacaggtag

SEQ ID NO: 47697 - DNA, 20 bp, Artificial Sequence
  Synthetic oligonucleotide; TAG chr11 5236644 5236663 5236647 -
tcatttttaacaggtagtgg

SEQ ID NO: 47698 - DNA, 20 bp, Artificial Sequence
  Synthetic oligonucleotide; CAG chr11 5236632 5236651 5236635 -
ggtagtggtagtgattcaca

SEQ ID NO: 47699 - DNA, 20 bp, Artificial Sequence
  Synthetic oligonucleotide; TGG chr11 5236579 5236598 5236582 -
tccattctgtattcttgacc

SEQ ID NO: 47700 - DNA, 20 bp, Artificial Sequence
  Synthetic oligonucleotide; GAG chr11 5236563 5236582 5236566 -
gacctggttgtattctttct

SEQ ID NO: 47701 - DNA, 20 bp, Artificial Sequence
  Synthetic oligonucleotide; CAG chr11 5236557 5236576 5236560 -
gttgtattctttctgagctc

SEQ ID NO: 47702 - DNA, 20 bp, Artificial Sequence
  Synthetic oligonucleotide; AAG chr11 5236542 5236561 5236545 -
agctccagatccacatatct

SEQ ID NO: 47703 - DNA, 20 bp, Artificial Sequence
  Synthetic oligonucleotide; AAG chr11 5236519 5236538 5236522 -
tacatctttttgcattttac

SEQ ID NO: 47704 - DNA, 20 bp, Artificial Sequence
  Synthetic oligonucleotide; GAG chr11 5236517 5236536 5236520 -
catctttttgcattttacaa

SEQ ID NO: 47705 - DNA, 20 bp, Artificial Sequence
  Synthetic oligonucleotide; AAG chr11 5236493 5236512 5236496 -
gcatacaatacaatgtatcc

SEQ ID NO: 47706 - DNA, 20 bp, Artificial Sequence
  Synthetic oligonucleotide; TGG chr11 5236449 5236468 5236452 -
taccactaaactcacaaatg

SEQ ID NO: 47707 - DNA, 20 bp, Artificial Sequence
  Synthetic oligonucleotide; TGG chr11 5236411 5236430 5236414 -
cacgactgacatcaccgtca

SEQ ID NO: 47708 - DNA, 20 bp, Artificial Sequence
  Synthetic oligonucleotide; AAG chr11 5236405 5236424 5236408 -
tgacatcaccgtcatggtcc

SEQ ID NO: 47709 - DNA, 20 bp, Artificial Sequence
  Synthetic oligonucleotide; TAG chr11 5236394 5236413 5236397 -
tcatggtccaagtctgataa

SEQ ID NO: 47710 - DNA, 20 bp, Artificial Sequence
  Synthetic oligonucleotide; TGG chr11 5236388 5236407 5236391 -
tccaagtctgataatagaaa

SEQ ID NO: 47711 - DNA, 20 bp, Artificial Sequence
  Synthetic oligonucleotide; CAG chr11 5236359 5236378 5236362 -
cactttcttccctactgcaa

SEQ ID NO: 47712 - DNA, 20 bp, Artificial Sequence
  Synthetic oligonucleotide; AAG chr11 5236356 5236375 5236359 -
tttcttccctactgcaacag

SEQ ID NO: 47713 - DNA, 20 bp, Artificial Sequence
  Synthetic oligonucleotide; CAG chr11 5236351 5236370 5236354 -
tccctactgcaacagaagcc

SEQ ID NO: 47714 - DNA, 20 bp, Artificial Sequence
  Synthetic oligonucleotide; AAG chr11 5236302 5236321 5236305 -
ctaaaatacatttcttcact

SEQ ID NO: 47715 - DNA, 20 bp, Artificial Sequence
  Synthetic oligonucleotide; GAG chr11 5236298 5236317 5236301 -
aatacatttcttcactaagt

SEQ ID NO: 47716 - DNA, 20 bp, Artificial Sequence
  Synthetic oligonucleotide; AAG chr11 5236283 5236302 5236286 -
taagtgagaataatctttta

SEQ ID NO: 47717 - DNA, 20 bp, Artificial Sequence
  Synthetic oligonucleotide; TGG chr11 5236228 5236247 5236231 -
aattattcaatatctttcgt

SEQ ID NO: 47718 - DNA, 20 bp, Artificial Sequence
  Synthetic oligonucleotide; CAG chr11 5236221 5236240 5236224 -
caatatctttcgttggcttc

SEQ ID NO: 47719 - DNA, 20 bp, Artificial Sequence
  Synthetic oligonucleotide; AGG chr11 5236220 5236239 5236223 -
aatatctttcgttggcttcc

SEQ ID NO: 47720 - DNA, 20 bp, Artificial Sequence
  Synthetic oligonucleotide; CAG chr11 5236214 5236233 5236217 -
tttcgttggcttccaggtta

SEQ ID NO: 47721 - DNA, 20 bp, Artificial Sequence
  Synthetic oligonucleotide; AAG chr11 5236194 5236213 5236197 -
cagaaaaataacttgtaaca

SEQ ID NO: 47722 - DNA, 20 bp, Artificial Sequence
  Synthetic oligonucleotide; AAG chr11 5236187 5236206 5236190 -
ataacttgtaacaaagttta

SEQ ID NO: 47723 - DNA, 20 bp, Artificial Sequence
  Synthetic oligonucleotide; AGG chr11 5236186 5236205 5236189 -
taacttgtaacaaagtttaa

SEQ ID NO: 47724 - DNA, 20 bp, Artificial Sequence
  Synthetic oligonucleotide; TGG chr11 5236176 5236195 5236179 -
caaagtttaaaggtcattca

SEQ ID NO: 47725 - DNA, 20 bp, Artificial Sequence
  Synthetic oligonucleotide; CAG chr11 5236134 5236153 5236137 -
ataacatttccccttgtgat

SEQ ID NO: 47726 - DNA, 20 bp, Artificial Sequence
  Synthetic oligonucleotide; CAG chr11 5236126 5236145 5236129 -
tccccttgtgatcagaatct

SEQ ID NO: 47727 - DNA, 20 bp, Artificial Sequence
  Synthetic oligonucleotide; AGG chr11 5236125 5236144 5236128 -
ccccttgtgatcagaatctc

SEQ ID NO: 47728 - DNA, 20 bp, Artificial Sequence
  Synthetic oligonucleotide; AAG chr11 5236093 5236112 5236096 -
catctttctatatacaaata

SEQ ID NO: 47729 - DNA, 20 bp, Artificial Sequence
  Synthetic oligonucleotide; TAG chr11 5236085 5236104 5236088 -
tatatacaaataaagtcata

SEQ ID NO: 47730 - DNA, 20 bp, Artificial Sequence
  Synthetic oligonucleotide; TGG chr11 5236068 5236087 5236071 -
atatagtttgaactcacctc

SEQ ID NO: 47731 - DNA, 20 bp, Artificial Sequence
  Synthetic oligonucleotide; AAG chr11 5236014 5236033 5236017 -
catttgtatcgctacgtgtt

SEQ ID NO: 47732 - DNA, 20 bp, Artificial Sequence
  Synthetic oligonucleotide; CAG chr11 5236011 5236030 5236014 -
ttgtatcgctacgtgttaag

SEQ ID NO: 47733 - DNA, 20 bp, Artificial Sequence
  Synthetic oligonucleotide; TAG chr11 5236008 5236027 5236011 -
tatcgctacgtgttaagcag

SEQ ID NO: 47734 - DNA, 20 bp, Artificial Sequence
  Synthetic oligonucleotide; TGG chr11 5235938 5235957 5235941 -
taatttatcaattctactgt

SEQ ID NO: 47735 - DNA, 20 bp, Artificial Sequence
  Synthetic oligonucleotide; AAG chr11 5235934 5235953 5235937 -
ttatcaattctactgttggt

SEQ ID NO: 47736 - DNA, 20 bp, Artificial Sequence
  Synthetic oligonucleotide; AAG chr11 5235926 5235945 5235929 -
tctactgttggtaagcattt

SEQ ID NO: 47737 - DNA, 20 bp, Artificial Sequence
  Synthetic oligonucleotide; TGG chr11 5235923 5235942 5235926 -
actgttggtaagcatttaag

SEQ ID NO: 47738 - DNA, 20 bp, Artificial Sequence
  Synthetic oligonucleotide; CGG chr11 5235916 5235935 5235919 -
gtaagcatttaagtggctac

SEQ ID NO: 47739 - DNA, 20 bp, Artificial Sequence
  Synthetic oligonucleotide; GAG chr11 5235910 5235929 5235913 -
atttaagtggctaccggttt

SEQ ID NO: 47740 - DNA, 20 bp, Artificial Sequence
  Synthetic oligonucleotide; AGG chr11 5235909 5235928 5235912 -
tttaagtggctaccggtttg

SEQ ID NO: 47741 - DNA, 20 bp, Artificial Sequence
  Synthetic oligonucleotide; AAG chr11 5235884 5235903 5235887 -
tttatgattattgctgtcat

SEQ ID NO: 47742 - DNA, 20 bp, Artificial Sequence
  Synthetic oligonucleotide; TGG chr11 5235863 5235882 5235866 -
agcatttctatacatgtctt

SEQ ID NO: 47743 - DNA, 20 bp, Artificial Sequence
  Synthetic oligonucleotide; TAG chr11 5235816 5235835 5235819 -
atatctaaaaatgtaattgc

SEQ ID NO: 47744 - DNA, 20 bp, Artificial Sequence
  Synthetic oligonucleotide; AGG chr11 5235815 5235834 5235818 -
tatctaaaaatgtaattgct

SEQ ID NO: 47745 - DNA, 20 bp, Artificial Sequence
  Synthetic oligonucleotide; TAG chr11 5235809 5235828 5235812 -
aaaatgtaattgctaggtaa

SEQ ID NO: 47746 - DNA, 20 bp, Artificial Sequence
  Synthetic oligonucleotide; AAG chr11 5235799 5235818 5235802 -
tgctaggtaatagacttatc

SEQ ID NO: 47747 - DNA, 20 bp, Artificial Sequence
  Synthetic oligonucleotide; CAG chr11 5235792 5235811 5235795 -
taatagacttatcaagcatc

SEQ ID NO: 47748 - DNA, 20 bp, Artificial Sequence
  Synthetic oligonucleotide; TGG chr11 5235783 5235802 5235786 -
tatcaagcatccagcatttg

SEQ ID NO: 47749 - DNA, 20 bp, Artificial Sequence
  Synthetic oligonucleotide; AAG chr11 5235771 5235790 5235774 -
agcatttgtggatactatta

SEQ ID NO: 47750 - DNA, 20 bp, Artificial Sequence
  Synthetic oligonucleotide; AGG chr11 5235770 5235789 5235773 -
gcatttgtggatactattaa

SEQ ID NO: 47751 - DNA, 20 bp, Artificial Sequence
  Synthetic oligonucleotide; AAG chr11 5235760 5235779 5235763 -
atactattaaaggttttcca

SEQ ID NO: 47752 - DNA, 20 bp, Artificial Sequence
  Synthetic oligonucleotide; AGG chr11 5235759 5235778 5235762 -
tactattaaaggttttccaa

SEQ ID NO: 47753 - DNA, 20 bp, Artificial Sequence
  Synthetic oligonucleotide; GGG chr11 5235758 5235777 5235761 -
actattaaaggttttccaaa

SEQ ID NO: 47754 - DNA, 20 bp, Artificial Sequence
  Synthetic oligonucleotide; GGG chr11 5235757 5235776 5235760 -
ctattaaaggttttccaaag

SEQ ID NO: 47755 - DNA, 20 bp, Artificial Sequence
  Synthetic oligonucleotide; CAG chr11 5235741 5235760 5235744 -
aaaggggttatactattgta

SEQ ID NO: 47756 - DNA, 20 bp, Artificial Sequence
  Synthetic oligonucleotide; CAG chr11 5235729 5235748 5235732 -
ctattgtacagtgtcaccaa

SEQ ID NO: 47757 - DNA, 20 bp, Artificial Sequence
  Synthetic oligonucleotide; GAG chr11 5235727 5235746 5235730 -
attgtacagtgtcaccaaca

SEQ ID NO: 47758 - DNA, 20 bp, Artificial Sequence
  Synthetic oligonucleotide; GAG chr11 5235721 5235740 5235724 -
cagtgtcaccaacagagttt

SEQ ID NO: 47759 - DNA, 20 bp, Artificial Sequence
  Synthetic oligonucleotide; CAG chr11 5235680 5235699 5235683 -
accaccaaaatttgaactgt

SEQ ID NO: 47760 - DNA, 20 bp, Artificial Sequence
  Synthetic oligonucleotide; TGG chr11 5235403 5235422 5235406 -
tttccttcaatccttccttt

SEQ ID NO: 47761 - DNA, 20 bp, Artificial Sequence
  Synthetic oligonucleotide; TGG chr11 5235391 5235410 5235394 -
cttccttttggatatgctca

SEQ ID NO: 47762 - DNA, 20 bp, Artificial Sequence
  Synthetic oligonucleotide; GGG chr11 5235390 5235409 5235393 -
ttccttttggatatgctcat

SEQ ID NO: 47763 - DNA, 20 bp, Artificial Sequence
  Synthetic oligonucleotide; TGG chr11 5235367 5235386 5235370 -
tgtgtatttgtctgccattg

SEQ ID NO: 47764 - DNA, 20 bp, Artificial Sequence
  Synthetic oligonucleotide; CAG chr11 5235351 5235370 5235354 -
attgtggcattatttgaatt

SEQ ID NO: 47765 - DNA, 20 bp, Artificial Sequence
  Synthetic oligonucleotide; AAG chr11 5235346 5235365 5235349 -
ggcattatttgaattcagaa

SEQ ID NO: 47766 - DNA, 20 bp, Artificial Sequence
  Synthetic oligonucleotide; GAG chr11 5235344 5235363 5235347 -
cattatttgaattcagaaaa

SEQ ID NO: 47767 - DNA, 20 bp, Artificial Sequence
  Synthetic oligonucleotide; TGG chr11 5235330 5235349 5235333 -
agaaaagagtgaaaaactac

SEQ ID NO: 47768 - DNA, 20 bp, Artificial Sequence
  Synthetic oligonucleotide; GGG chr11 5235329 5235348 5235332 -
gaaaagagtgaaaaactact

SEQ ID NO: 47769 - DNA, 20 bp, Artificial Sequence
  Synthetic oligonucleotide; TGG chr11 5235315 5235334 5235318 -
actactgggatcttcattcc

SEQ ID NO: 47770 - DNA, 20 bp, Artificial Sequence
  Synthetic oligonucleotide; GGG chr11 5235314 5235333 5235317 -
ctactgggatcttcattcct

SEQ ID NO: 47771 - DNA, 20 bp, Artificial Sequence
  Synthetic oligonucleotide; AAG chr11 5235290 5235309 5235293 -
ctaattccacattttttttt

SEQ ID NO: 47772 - DNA, 20 bp, Artificial Sequence
  Synthetic oligonucleotide; TAG chr11 5235261 5235280 5235264 -
tctgtaaaaatgttctgtac

SEQ ID NO: 47773 - DNA, 20 bp, Artificial Sequence
  Synthetic oligonucleotide; CAG chr11 5235250 5235269 5235253 -
gttctgtactagcatattcc

SEQ ID NO: 47774 - DNA, 20 bp, Artificial Sequence
  Synthetic oligonucleotide; AGG chr11 5235249 5235268 5235252 -
ttctgtactagcatattccc

SEQ ID NO: 47775 - DNA, 20 bp, Artificial Sequence
  Synthetic oligonucleotide; TGG chr11 5235227 5235246 5235230 -
gaacttcgttaaatttaatc

SEQ ID NO: 47776 - DNA, 20 bp, Artificial Sequence
  Synthetic oligonucleotide; TGG chr11 5235217 5235236 5235220 -
aaatttaatctggctgaata

SEQ ID NO: 47777 - DNA, 20 bp, Artificial Sequence
  Synthetic oligonucleotide; TAG chr11 5235183 5235202 5235186 -
ttcactttgcattctttctt

SEQ ID NO: 47778 - DNA, 20 bp, Artificial Sequence
  Synthetic oligonucleotide; CAG chr11 5235091 5235110 5235094 -
aaccttaaaattcatgtttc

SEQ ID NO: 47779 - DNA, 20 bp, Artificial Sequence
  Synthetic oligonucleotide; TGG chr11 5235072 5235091 5235075 -
ccagaacctatttcaataac

SEQ ID NO: 47780 - DNA, 20 bp, Artificial Sequence
  Synthetic oligonucleotide; TGG chr11 5235032 5235051 5235035 -
ttttttaaatattcttttaa

SEQ ID NO: 47781 - DNA, 20 bp, Artificial Sequence
  Synthetic oligonucleotide; TAG chr11 5235003 5235022 5235006 -
atttcaatataataaaaaat

SEQ ID NO: 47782 - DNA, 20 bp, Artificial Sequence
  Synthetic oligonucleotide; GAG chr11 5235001 5235020 5235004 -
ttcaatataataaaaaatta

SEQ ID NO: 47783 - DNA, 20 bp, Artificial Sequence
  Synthetic oligonucleotide; TAG chr11 5234990 5235009 5234993 -
aaaaaattagagttttatta

SEQ ID NO: 47784 - DNA, 20 bp, Artificial Sequence
  Synthetic oligonucleotide; AGG chr11 5234989 5235008 5234992 -
aaaaattagagttttattat

SEQ ID NO: 47785 - DNA, 20 bp, Artificial Sequence
  Synthetic oligonucleotide; AAG chr11 5234986 5235005 5234989 -
aattagagttttattatagg

SEQ ID NO: 47786 - DNA, 20 bp, Artificial Sequence
  Synthetic oligonucleotide; AAG chr11 5234973 5234992 5234976 -
ttataggaagaatttaccaa

SEQ ID NO: 47787 - DNA, 20 bp, Artificial Sequence
  Synthetic oligonucleotide; AAG chr11 5234970 5234989 5234973 -
taggaagaatttaccaaaag

SEQ ID NO: 47788 - DNA, 20 bp, Artificial Sequence
  Synthetic oligonucleotide; AGG chr11 5234969 5234988 5234972 -
aggaagaatttaccaaaaga

SEQ ID NO: 47789 - DNA, 20 bp, Artificial Sequence
  Synthetic oligonucleotide; GAG chr11 5234967 5234986 5234970 -
gaagaatttaccaaaagaag

SEQ ID NO: 47790 - DNA, 20 bp, Artificial Sequence
  Synthetic oligonucleotide; AGG chr11 5234966 5234985 5234969 -
aagaatttaccaaaagaagg

SEQ ID NO: 47791 - DNA, 20 bp, Artificial Sequence
  Synthetic oligonucleotide; AAG chr11 5234963 5234982 5234966 -
aatttaccaaaagaaggagg

SEQ ID NO: 47792 - DNA, 20 bp, Artificial Sequence
  Synthetic oligonucleotide; AAG chr11 5234959 5234978 5234962 -
taccaaaagaaggaggaagc

SEQ ID NO: 47793 - DNA, 20 bp, Artificial Sequence
  Synthetic oligonucleotide; AAG chr11 5234955 5234974 5234958 -
aaaagaaggaggaagcaagc

SEQ ID NO: 47794 - DNA, 20 bp, Artificial Sequence
  Synthetic oligonucleotide; CAG chr11 5234943 5234962 5234946 -
aagcaagcaagtttaaactg

SEQ ID NO: 47795 - DNA, 20 bp, Artificial Sequence
  Synthetic oligonucleotide; TAG chr11 5234937 5234956 5234940 -
gcaagtttaaactgcagcaa

SEQ ID NO: 47796 - DNA, 20 bp, Artificial Sequence
  Synthetic oligonucleotide; TGG chr11 5234903 5234922 5234906 -
ccaacctctcaaaattccct

SEQ ID NO: 47797 - DNA, 20 bp, Artificial Sequence
  Synthetic oligonucleotide; GAG chr11 5234901 5234920 5234904 -
aacctctcaaaattcccttg

SEQ ID NO: 47798 - DNA, 20 bp, Artificial Sequence
  Synthetic oligonucleotide; TAG chr11 5234887 5234906 5234890 -
cccttggagacaaaaatctc

SEQ ID NO: 47799 - DNA, 20 bp, Artificial Sequence
  Synthetic oligonucleotide; GAG chr11 5234885 5234904 5234888 -
cttggagacaaaaatctcta

SEQ ID NO: 47800 - DNA, 20 bp, Artificial Sequence
  Synthetic oligonucleotide; AGG chr11 5234884 5234903 5234887 -
ttggagacaaaaatctctag

SEQ ID NO: 47801 - DNA, 20 bp, Artificial Sequence
  Synthetic oligonucleotide; AAG chr11 5234879 5234898 5234882 -
gacaaaaatctctagaggca

SEQ ID NO: 47802 - DNA, 20 bp, Artificial Sequence
  Synthetic oligonucleotide; AAG chr11 5234876 5234895 5234879 -
aaaaatctctagaggcaaag

SEQ ID NO: 47803 - DNA, 20 bp, Artificial Sequence
  Synthetic oligonucleotide; GAG chr11 5234862 5234881 5234865 -
gcaaagaagaactttatatt

SEQ ID NO: 47804 - DNA, 20 bp, Artificial Sequence
  Synthetic oligonucleotide; TAG chr11 5234835 5234854 5234838 -
cttgttaaaacatctgcttt

SEQ ID NO: 47805 - DNA, 20 bp, Artificial Sequence
  Synthetic oligonucleotide; AAG chr11 5234830 5234849 5234833 -
taaaacatctgcttttagat

SEQ ID NO: 47806 - DNA, 20 bp, Artificial Sequence
  Synthetic oligonucleotide; TAG chr11 5234821 5234840 5234824 -
tgcttttagataagttttct

SEQ ID NO: 47807 - DNA, 20 bp, Artificial Sequence
  Synthetic oligonucleotide; AAG chr11 5234814 5234833 5234817 -
agataagttttcttagtata

SEQ ID NO: 47808 - DNA, 20 bp, Artificial Sequence
  Synthetic oligonucleotide; CAG chr11 5234808 5234827 5234811 -
gttttcttagtataaagtga

SEQ ID NO: 47809 - DNA, 20 bp, Artificial Sequence
  Synthetic oligonucleotide; AAG chr11 5234797 5234816 5234800 -
ataaagtgacagaaacaaat

SEQ ID NO: 47810 - DNA, 20 bp, Artificial Sequence
  Synthetic oligonucleotide; AAG chr11 5234785 5234804 5234788 -
aaacaaataagttaaactct

SEQ ID NO: 47811 - DNA, 20 bp, Artificial Sequence
  Synthetic oligonucleotide; TAG chr11 5234766 5234785 5234769 -
taagatacattccactatat

SEQ ID NO: 47812 - DNA, 20 bp, Artificial Sequence
  Synthetic oligonucleotide; TAG chr11 5234736 5234755 5234739 -
cacttctgcaaaaatgaaac

SEQ ID NO: 47813 - DNA, 20 bp, Artificial Sequence
  Synthetic oligonucleotide; AGG chr11 5234735 5234754 5234738 -
acttctgcaaaaatgaaact

SEQ ID NO: 47814 - DNA, 20 bp, Artificial Sequence
  Synthetic oligonucleotide; GAG chr11 5234733 5234752 5234736 -
ttctgcaaaaatgaaactag

SEQ ID NO: 47815 - DNA, 20 bp, Artificial Sequence
  Synthetic oligonucleotide; AGG chr11 5234732 5234751 5234735 -
tctgcaaaaatgaaactagg

SEQ ID NO: 47816 - DNA, 20 bp, Artificial Sequence
  Synthetic oligonucleotide; TAG chr11 5234722 5234741 5234725 -
tgaaactaggaggatatttt

SEQ ID NO: 47817 - DNA, 20 bp, Artificial Sequence
  Synthetic oligonucleotide; AAG chr11 5234706 5234725 5234709 -
tttttagaaacaactgctga

SEQ ID NO: 47818 - DNA, 20 bp, Artificial Sequence
  Synthetic oligonucleotide; GAG chr11 5234704 5234723 5234707 -
tttagaaacaactgctgaaa

SEQ ID NO: 47819 - DNA, 20 bp, Artificial Sequence
  Synthetic oligonucleotide; CGG chr11 5234698 5234717 5234701 -
aacaactgctgaaagagatg

SEQ ID NO: 47820 - DNA, 20 bp, Artificial Sequence
  Synthetic oligonucleotide; TGG chr11 5234695 5234714 5234698 -
aactgctgaaagagatgcgg

SEQ ID NO: 47821 - DNA, 20 bp, Artificial Sequence
  Synthetic oligonucleotide; GGG chr11 5234694 5234713 5234697 -
actgctgaaagagatgcggt

SEQ ID NO: 47822 - DNA, 20 bp, Artificial Sequence
  Synthetic oligonucleotide; GGG chr11 5234693 5234712 5234696 -
ctgctgaaagagatgcggtg

SEQ ID NO: 47823 - DNA, 20 bp, Artificial Sequence
  Synthetic oligonucleotide; GAG chr11 5234691 5234710 5234694 -
gctgaaagagatgcggtggg

SEQ ID NO: 47824 - DNA, 20 bp, Artificial Sequence
  Synthetic oligonucleotide; TAG chr11 5234683 5234702 5234686 -
agatgcggtggggagatatg

SEQ ID NO: 47825 - DNA, 20 bp, Artificial Sequence
  Synthetic oligonucleotide; GAG chr11 5234681 5234700 5234684 -
atgcggtggggagatatgta

SEQ ID NO: 47826 - DNA, 20 bp, Artificial Sequence
  Synthetic oligonucleotide; AGG chr11 5234680 5234699 5234683 -
tgcggtggggagatatgtag

SEQ ID NO: 47827 - DNA, 20 bp, Artificial Sequence
  Synthetic oligonucleotide; GAG chr11 5234678 5234697 5234681 -
cggtggggagatatgtagag

SEQ ID NO: 47828 - DNA, 20 bp, Artificial Sequence
  Synthetic oligonucleotide; CAG chr11 5234673 5234692 5234676 -
gggagatatgtagaggagaa

SEQ ID NO: 47829 - DNA, 20 bp, Artificial Sequence
  Synthetic oligonucleotide; AGG chr11 5234672 5234691 5234675 -
ggagatatgtagaggagaac

SEQ ID NO: 47830 - DNA, 20 bp, Artificial Sequence
  Synthetic oligonucleotide; GGG chr11 5234671 5234690 5234674 -
gagatatgtagaggagaaca

SEQ ID NO: 47831 - DNA, 20 bp, Artificial Sequence
  Synthetic oligonucleotide; GAG chr11 5234663 5234682 5234666 -
tagaggagaacagggtttct

SEQ ID NO: 47832 - DNA, 20 bp, Artificial Sequence
  Synthetic oligonucleotide; AAG chr11 5234658 5234677 5234661 -
gagaacagggtttctgagtc

SEQ ID NO: 47833 - DNA, 20 bp, Artificial Sequence
  Synthetic oligonucleotide; CAG chr11 5234645 5234664 5234648 -
ctgagtcaagacacacatga

SEQ ID NO: 47834 - DNA, 20 bp, Artificial Sequence
  Synthetic oligonucleotide; CAG chr11 5234640 5234659 5234643 -
tcaagacacacatgacagaa

SEQ ID NO: 47835 - DNA, 20 bp, Artificial Sequence
  Synthetic oligonucleotide; CAG chr11 5234630 5234649 5234633 -
catgacagaacagccaatct

SEQ ID NO: 47836 - DNA, 20 bp, Artificial Sequence
  Synthetic oligonucleotide; AGG chr11 5234629 5234648 5234632 -
atgacagaacagccaatctc

SEQ ID NO: 47837 - DNA, 20 bp, Artificial Sequence
  Synthetic oligonucleotide; GGG chr11 5234628 5234647 5234631 -
tgacagaacagccaatctca

SEQ ID NO: 47838 - DNA, 20 bp, Artificial Sequence
  Synthetic oligonucleotide; AAG chr11 5234624 5234643 5234627 -
agaacagccaatctcagggc

SEQ ID NO: 47839 - DNA, 20 bp, Artificial Sequence
  Synthetic oligonucleotide; AAG chr11 5234619 5234638 5234622 -
agccaatctcagggcaagtt

SEQ ID NO: 47840 - DNA, 20 bp, Artificial Sequence
  Synthetic oligonucleotide; AGG chr11 5234618 5234637 5234621 -
gccaatctcagggcaagtta

SEQ ID NO: 47841 - DNA, 20 bp, Artificial Sequence
  Synthetic oligonucleotide; GGG chr11 5234617 5234636 5234620 -
ccaatctcagggcaagttaa

SEQ ID NO: 47842 - DNA, 20 bp, Artificial Sequence
  Synthetic oligonucleotide; TAG chr11 5234612 5234631 5234615 -
ctcagggcaagttaagggaa

SEQ ID NO: 47843 - DNA, 20 bp, Artificial Sequence
  Synthetic oligonucleotide; TGG chr11 5234609 5234628 5234612 -
agggcaagttaagggaatag

SEQ ID NO: 47844 - DNA, 20 bp, Artificial Sequence
  Synthetic oligonucleotide; AAG chr11 5234602 5234621 5234605 -
gttaagggaatagtggaatg

SEQ ID NO: 47845 - DNA, 20 bp, Artificial Sequence
  Synthetic oligonucleotide; AGG chr11 5234601 5234620 5234604 -
ttaagggaatagtggaatga

SEQ ID NO: 47846 - DNA, 20 bp, Artificial Sequence
  Synthetic oligonucleotide; TGG chr11 5234539 5234558 5234542 -
tcttaaaccaacctgctcac

SEQ ID NO: 47847 - DNA, 20 bp, Artificial Sequence
  Synthetic oligonucleotide; GAG chr11 5234537 5234556 5234540 -
ttaaaccaacctgctcactg

SEQ ID NO: 47848 - DNA, 20 bp, Artificial Sequence
  Synthetic oligonucleotide; CAG chr11 5234534 5234553 5234537 -
aaccaacctgctcactggag

SEQ ID NO: 47849 - DNA, 20 bp, Artificial Sequence
  Synthetic oligonucleotide; AGG chr11 5234533 5234552 5234536 -
accaacctgctcactggagc

SEQ ID NO: 47850 - DNA, 20 bp, Artificial Sequence
  Synthetic oligonucleotide; GGG chr11 5234532 5234551 5234535 -
ccaacctgctcactggagca

SEQ ID NO: 47851 - DNA, 20 bp, Artificial Sequence
  Synthetic oligonucleotide; GAG chr11 5234530 5234549 5234533 -
aacctgctcactggagcagg

SEQ ID NO: 47852 - DNA, 20 bp, Artificial Sequence
  Synthetic oligonucleotide; AGG chr11 5234529 5234548 5234532 -
acctgctcactggagcaggg

SEQ ID NO: 47853 - DNA, 20 bp, Artificial Sequence
  Synthetic oligonucleotide; CAG chr11 5234525 5234544 5234528 -
gctcactggagcagggagga

SEQ ID NO: 47854 - DNA, 20 bp, Artificial Sequence
  Synthetic oligonucleotide; AGG chr11 5234524 5234543 5234527 -
ctcactggagcagggaggac

SEQ ID NO: 47855 - DNA, 20 bp, Artificial Sequence
  Synthetic oligonucleotide; CAG chr11 5234519 5234538 5234522 -
tggagcagggaggacaggac

SEQ ID NO: 47856 - DNA, 20 bp, Artificial Sequence
  Synthetic oligonucleotide; AAG chr11 5234511 5234530 5234514 -
ggaggacaggaccagcataa

SEQ ID NO: 47857 - DNA, 20 bp, Artificial Sequence
  Synthetic oligonucleotide; AGG chr11 5234510 5234529 5234513 -
gaggacaggaccagcataaa

SEQ ID NO: 47858 - DNA, 20 bp, Artificial Sequence
  Synthetic oligonucleotide; CAG chr11 5234507 5234526 5234510 -
gacaggaccagcataaaagg

SEQ ID NO: 47859 - DNA, 20 bp, Artificial Sequence
  Synthetic oligonucleotide; AGG chr11 5234506 5234525 5234509 -
acaggaccagcataaaaggc

SEQ ID NO: 47860 - DNA, 20 bp, Artificial Sequence
  Synthetic oligonucleotide; GGG chr11 5234505 5234524 5234508 -
caggaccagcataaaaggca

SEQ ID NO: 47861 - DNA, 20 bp, Artificial Sequence
  Synthetic oligonucleotide; CAG chr11 5234502 5234521 5234505 -
gaccagcataaaaggcaggg

SEQ ID NO: 47862 - DNA, 20 bp, Artificial Sequence
  Synthetic oligonucleotide; GAG chr11 5234500 5234519 5234503 -
ccagcataaaaggcagggca

SEQ ID NO: 47863 - DNA, 20 bp, Artificial Sequence
  Synthetic oligonucleotide; CAG chr11 5234465 5234484 5234468 -
tacactttcttctgacataa

SEQ ID NO: 47864 - DNA, 20 bp, Artificial Sequence
  Synthetic oligonucleotide; TAG chr11 5234455 5234474 5234458 -
tctgacataacagtgttcac

SEQ ID NO: 47865 - DNA, 20 bp, Artificial Sequence
  Synthetic oligonucleotide; CAG chr11 5234442 5234461 5234445 -
tgttcactagcaacctcaaa

SEQ ID NO: 47866 - DNA, 20 bp, Artificial Sequence
  Synthetic oligonucleotide; TGG chr11 5234433 5234452 5234436 -
gcaacctcaaacagacacca

SEQ ID NO: 47867 - DNA, 20 bp, Artificial Sequence
  Synthetic oligonucleotide; GAG chr11 5234416 5234435 5234419 -
ccatggtgcatctgactcct

SEQ ID NO: 47868 - DNA, 20 bp, Artificial Sequence
  Synthetic oligonucleotide; AGG chr11 5234415 5234434 5234418 -
catggtgcatctgactcctg

SEQ ID NO: 47869 - DNA, 20 bp, Artificial Sequence
  Synthetic oligonucleotide; GAG chr11 5234413 5234432 5234416 -
tggtgcatctgactcctgag

SEQ ID NO: 47870 - DNA, 20 bp, Artificial Sequence
  Synthetic oligonucleotide; AAG chr11 5234410 5234429 5234413 -
tgcatctgactcctgaggag

SEQ ID NO: 47871 - DNA, 20 bp, Artificial Sequence
  Synthetic oligonucleotide; TGG chr11 5234389 5234408 5234392 -
agactgctgtcaatgccctg

SEQ ID NO: 47872 - DNA, 20 bp, Artificial Sequence
  Synthetic oligonucleotide; GGG chr11 5234388 5234407 5234391 -
gactgctgtcaatgccctgt

SEQ ID NO: 47873 - DNA, 20 bp, Artificial Sequence
  Synthetic oligonucleotide; GGG chr11 5234387 5234406 5234390 -
actgctgtcaatgccctgtg

SEQ ID NO: 47874 - DNA, 20 bp, Artificial Sequence
  Synthetic oligonucleotide; AAG chr11 5234382 5234401 5234385 -
tgtcaatgccctgtggggca

SEQ ID NO: 47875 - DNA, 20 bp, Artificial Sequence
  Synthetic oligonucleotide; TGG chr11 5234373 5234392 5234376 -
cctgtggggcaaagtgaacg

SEQ ID NO: 47876 - DNA, 20 bp, Artificial Sequence
  Synthetic oligonucleotide; CAG chr11 5234367 5234386 5234370 -
gggcaaagtgaacgtggatg

SEQ ID NO: 47877 - DNA, 20 bp, Artificial Sequence
  Synthetic oligonucleotide; TGG chr11 5234363 5234382 5234366 -
aaagtgaacgtggatgcagt

SEQ ID NO: 47878 - DNA, 20 bp, Artificial Sequence
  Synthetic oligonucleotide; TGG chr11 5234360 5234379 5234363 -
gtgaacgtggatgcagttgg

SEQ ID NO: 47879 - DNA, 20 bp, Artificial Sequence
  Synthetic oligonucleotide; GAG chr11 5234356 5234375 5234359 -
acgtggatgcagttggtggt

SEQ ID NO: 47880 - DNA, 20 bp, Artificial Sequence
  Synthetic oligonucleotide; AGG chr11 5234355 5234374 5234358 -
cgtggatgcagttggtggtg

SEQ ID NO: 47881 - DNA, 20 bp, Artificial Sequence
  Synthetic oligonucleotide; TGG chr11 5234349 5234368 5234352 -
tgcagttggtggtgaggccc

SEQ ID NO: 47882 - DNA, 20 bp, Artificial Sequence
  Synthetic oligonucleotide; GGG chr11 5234348 5234367 5234351 -
gcagttggtggtgaggccct

SEQ ID NO: 47883 - DNA, 20 bp, Artificial Sequence
  Synthetic oligonucleotide; CAG chr11 5234345 5234364 5234348 -
gttggtggtgaggccctggg

SEQ ID NO: 47884 - DNA, 20 bp, Artificial Sequence
  Synthetic oligonucleotide; AGG chr11 5234344 5234363 5234347 -
ttggtggtgaggccctgggc

SEQ ID NO: 47885 - DNA, 20 bp, Artificial Sequence
  Synthetic oligonucleotide; TGG chr11 5234340 5234359 5234343 -
tggtgaggccctgggcaggt

SEQ ID NO: 47886 - DNA, 20 bp, Artificial Sequence
  Synthetic oligonucleotide; AAG chr11 5234333 5234352 5234336 -
gccctgggcaggttggtatc

SEQ ID NO: 47887 - DNA, 20 bp, Artificial Sequence
  Synthetic oligonucleotide; AGG chr11 5234332 5234351 5234335 -
ccctgggcaggttggtatca

SEQ ID NO: 47888 - DNA, 20 bp, Artificial Sequence
  Synthetic oligonucleotide; AAG chr11 5234325 5234344 5234328 -
caggttggtatcaaggttat

SEQ ID NO: 47889 - DNA, 20 bp, Artificial Sequence
  Synthetic oligonucleotide; GAG chr11 5234323 5234342 5234326 -
ggttggtatcaaggttataa

SEQ ID NO: 47890 - DNA, 20 bp, Artificial Sequence
  Synthetic oligonucleotide; GAG chr11 5234321 5234340 5234324 -
ttggtatcaaggttataaga

SEQ ID NO: 47891 - DNA, 20 bp, Artificial Sequence
  Synthetic oligonucleotide; AGG chr11 5234320 5234339 5234323 -
tggtatcaaggttataagag

SEQ ID NO: 47892 - DNA, 20 bp, Artificial Sequence
  Synthetic oligonucleotide; AAG chr11 5234314 5234333 5234317 -
caaggttataagagaggctc

SEQ ID NO: 47893 - DNA, 20 bp, Artificial Sequence
  Synthetic oligonucleotide; AGG chr11 5234313 5234332 5234316 -
aaggttataagagaggctca

SEQ ID NO: 47894 - DNA, 20 bp, Artificial Sequence
  Synthetic oligonucleotide; GAG chr11 5234311 5234330 5234314 -
ggttataagagaggctcaag

SEQ ID NO: 47895 - DNA, 20 bp, Artificial Sequence
  Synthetic oligonucleotide; AGG chr11 5234310 5234329 5234313 -
gttataagagaggctcaagg

SEQ ID NO: 47896 - DNA, 20 bp, Artificial Sequence
  Synthetic oligonucleotide; TGG chr11 5234303 5234322 5234306 -
gagaggctcaaggaggcaaa

SEQ ID NO: 47897 - DNA, 20 bp, Artificial Sequence
  Synthetic oligonucleotide; TGG chr11 5234296 5234315 5234299 -
tcaaggaggcaaatggaaac

SEQ ID NO: 47898 - DNA, 20 bp, Artificial Sequence
  Synthetic oligonucleotide; GGG chr11 5234295 5234314 5234298 -
caaggaggcaaatggaaact

SEQ ID NO: 47899 - DNA, 20 bp, Artificial Sequence
  Synthetic oligonucleotide; TAG chr11 5234286 5234305 5234289 -
aaatggaaactgggcatgtg

SEQ ID NO: 47900 - DNA, 20 bp, Artificial Sequence
  Synthetic oligonucleotide; CAG chr11 5234282 5234301 5234285 -
ggaaactgggcatgtgtaga

SEQ ID NO: 47901 - DNA, 20 bp, Artificial Sequence
  Synthetic oligonucleotide; GAG chr11 5234280 5234299 5234283 -
aaactgggcatgtgtagaca

SEQ ID NO: 47902 - DNA, 20 bp, Artificial Sequence
  Synthetic oligonucleotide; AAG chr11 5234277 5234296 5234280 -
ctgggcatgtgtagacagag

SEQ ID NO: 47903 - DNA, 20 bp, Artificial Sequence
  Synthetic oligonucleotide; TGG chr11 5234269 5234288 5234272 -
gtgtagacagagaagactct

SEQ ID NO: 47904 - DNA, 20 bp, Artificial Sequence
  Synthetic oligonucleotide; GGG chr11 5234268 5234287 5234271 -
tgtagacagagaagactctt

SEQ ID NO: 47905 - DNA, 20 bp, Artificial Sequence
  Synthetic oligonucleotide; TAG chr11 5234258 5234277 5234261 -
gaagactcttgggtttctga

SEQ ID NO: 47906 - DNA, 20 bp, Artificial Sequence
  Synthetic oligonucleotide; AGG chr11 5234257 5234276 5234260 -
aagactcttgggtttctgat

SEQ ID NO: 47907 - DNA, 20 bp, Artificial Sequence
  Synthetic oligonucleotide; TGG chr11 5234236 5234255 5234239 -
ggcactgactctctgtccct

SEQ ID NO: 47908 - DNA, 20 bp, Artificial Sequence
  Synthetic oligonucleotide; GGG chr11 5234235 5234254 5234238 -
gcactgactctctgtccctt

SEQ ID NO: 47909 - DNA, 20 bp, Artificial Sequence
  Synthetic oligonucleotide; CAG chr11 5234217 5234236 5234220 -
ttgggctgttttcctaccct

SEQ ID NO: 47910 - DNA, 20 bp, Artificial Sequence
  Synthetic oligonucleotide; TGG chr11 5234209 5234228 5234212 -
ttttcctaccctcagattac

SEQ ID NO: 47911 - DNA, 20 bp, Artificial Sequence
  Synthetic oligonucleotide; TGG chr11 5234206 5234225 5234209 -
tcctaccctcagattactgg

SEQ ID NO: 47912 - DNA, 20 bp, Artificial Sequence
  Synthetic oligonucleotide; TGG chr11 5234195 5234214 5234198 -
gattactggtggtctaccct

SEQ ID NO: 47913 - DNA, 20 bp, Artificial Sequence
  Synthetic oligonucleotide; CAG chr11 5234189 5234208 5234192 -
tggtggtctacccttggacc

SEQ ID NO: 47914 - DNA, 20 bp, Artificial Sequence
  Synthetic oligonucleotide; GAG chr11 5234187 5234206 5234190 -
gtggtctacccttggaccca

SEQ ID NO: 47915 - DNA, 20 bp, Artificial Sequence
  Synthetic oligonucleotide; AGG chr11 5234186 5234205 5234189 -
tggtctacccttggacccag

SEQ ID NO: 47916 - DNA, 20 bp, Artificial Sequence
  Synthetic oligonucleotide; GAG chr11 5234177 5234196 5234180 -
cttggacccagaggttcttt

SEQ ID NO: 47917 - DNA, 20 bp, Artificial Sequence
  Synthetic oligonucleotide; TGG chr11 5234169 5234188 5234172 -
cagaggttctttgagtcctt

SEQ ID NO: 47918 - DNA, 20 bp, Artificial Sequence
  Synthetic oligonucleotide; GGG chr11 5234168 5234187 5234171 -
agaggttctttgagtccttt

SEQ ID NO: 47919 - DNA, 20 bp, Artificial Sequence
  Synthetic oligonucleotide; GGG chr11 5234167 5234186 5234170 -
gaggttctttgagtcctttg

SEQ ID NO: 47920 - DNA, 20 bp, Artificial Sequence
  Synthetic oligonucleotide; TGG chr11 5234140 5234159 5234143 -
gtcctctcctgatgctgtta

SEQ ID NO: 47921 - DNA, 20 bp, Artificial Sequence
  Synthetic oligonucleotide; GGG chr11 5234139 5234158 5234142 -
tcctctcctgatgctgttat

SEQ ID NO: 47922 - DNA, 20 bp, Artificial Sequence
  Synthetic oligonucleotide; AAG chr11 5234129 5234148 5234132 -
atgctgttatgggcaaccct

SEQ ID NO: 47923 - DNA, 20 bp, Artificial Sequence
  Synthetic oligonucleotide; AGG chr11 5234128 5234147 5234131 -
tgctgttatgggcaacccta

SEQ ID NO: 47924 - DNA, 20 bp, Artificial Sequence
  Synthetic oligonucleotide; AAG chr11 5234123 5234142 5234126 -
ttatgggcaaccctaaggtg

SEQ ID NO: 47925 - DNA, 20 bp, Artificial Sequence
  Synthetic oligonucleotide; AGG chr11 5234122 5234141 5234125 -
tatgggcaaccctaaggtga

SEQ ID NO: 47926 - DNA, 20 bp, Artificial Sequence
  Synthetic oligonucleotide; TGG chr11 5234115 5234134 5234118 -
aaccctaaggtgaaggctca

SEQ ID NO: 47927 - DNA, 20 bp, Artificial Sequence
  Synthetic oligonucleotide; AAG chr11 5234111 5234130 5234114 -
ctaaggtgaaggctcatggc

SEQ ID NO: 47928 - DNA, 20 bp, Artificial Sequence
  Synthetic oligonucleotide; AAG chr11 5234108 5234127 5234111 -
aggtgaaggctcatggcaag

SEQ ID NO: 47929 - DNA, 20 bp, Artificial Sequence
  Synthetic oligonucleotide; AGG chr11 5234107 5234126 5234110 -
ggtgaaggctcatggcaaga

SEQ ID NO: 47930 - DNA, 20 bp, Artificial Sequence
  Synthetic oligonucleotide; TAG chr11 5234101 5234120 5234104 -
ggctcatggcaagaaggtgc

SEQ ID NO: 47931 - DNA, 20 bp, Artificial Sequence
  Synthetic oligonucleotide; AGG chr11 5234100 5234119 5234103 -
gctcatggcaagaaggtgct

SEQ ID NO: 47932 - DNA, 20 bp, Artificial Sequence
  Synthetic oligonucleotide; TAG chr11 5234091 5234110 5234094 -
aagaaggtgctaggtgcctt

SEQ ID NO: 47933 - DNA, 20 bp, Artificial Sequence
  Synthetic oligonucleotide; TGG chr11 5234085 5234104 5234088 -
gtgctaggtgcctttagtga

SEQ ID NO: 47934 - DNA, 20 bp, Artificial Sequence
  Synthetic oligonucleotide; TGG chr11 5234080 5234099 5234083 -
aggtgcctttagtgatggcc

SEQ ID NO: 47935 - DNA, 20 bp, Artificial Sequence
  Synthetic oligonucleotide; TGG chr11 5234071 5234090 5234074 -
tagtgatggcctggctcacc

SEQ ID NO: 47936 - DNA, 20 bp, Artificial Sequence
  Synthetic oligonucleotide; AAG chr11 5234060 5234079 5234063 -
tggctcacctggacaacctc

SEQ ID NO: 47937 - DNA, 20 bp, Artificial Sequence
  Synthetic oligonucleotide; AGG chr11 5234059 5234078 5234062 -
ggctcacctggacaacctca

SEQ ID NO: 47938 - DNA, 20 bp, Artificial Sequence
  Synthetic oligonucleotide; GGG chr11 5234058 5234077 5234061 -
gctcacctggacaacctcaa

SEQ ID NO: 47939 - DNA, 20 bp, Artificial Sequence
  Synthetic oligonucleotide; CAG chr11 5234045 5234064 5234048 -
acctcaagggcactttttct

SEQ ID NO: 47940 - DNA, 20 bp, Artificial Sequence
  Synthetic oligonucleotide; GAG chr11 5234040 5234059 5234043 -
aagggcactttttctcagct

SEQ ID NO: 47941 - DNA, 20 bp, Artificial Sequence
  Synthetic oligonucleotide; GAG chr11 5234036 5234055 5234039 -
gcactttttctcagctgagt

SEQ ID NO: 47942 - DNA, 20 bp, Artificial Sequence
  Synthetic oligonucleotide; AAG chr11 5234021 5234040 5234024 -
tgagtgagctgcactgtgac

SEQ ID NO: 47943 - DNA, 20 bp, Artificial Sequence
  Synthetic oligonucleotide; TGG chr11 5234011 5234030 5234014 -
gcactgtgacaagctgcacg

SEQ ID NO: 47944 - DNA, 20 bp, Artificial Sequence
  Synthetic oligonucleotide; GAG chr11 5234003 5234022 5234006 -
acaagctgcacgtggatcct

SEQ ID NO: 47945 - DNA, 20 bp, Artificial Sequence
  Synthetic oligonucleotide; CAG chr11 5233995 5234014 5233998 -
cacgtggatcctgagaactt

SEQ ID NO: 47946 - DNA, 20 bp, Artificial Sequence
  Synthetic oligonucleotide; AGG chr11 5233994 5234013 5233997 -
acgtggatcctgagaacttc

SEQ ID NO: 47947 - DNA, 20 bp, Artificial Sequence
  Synthetic oligonucleotide; GGG chr11 5233993 5234012 5233996 -
cgtggatcctgagaacttca

SEQ ID NO: 47948 - DNA, 20 bp, Artificial Sequence
  Synthetic oligonucleotide; GAG chr11 5233989 5234008 5233992 -
gatcctgagaacttcagggt

SEQ ID NO: 47949 - DNA, 20 bp, Artificial Sequence
  Synthetic oligonucleotide; CAG chr11 5233984 5234003 5233987 -
tgagaacttcagggtgagtc

SEQ ID NO: 47950 - DNA, 20 bp, Artificial Sequence
  Synthetic oligonucleotide; AGG chr11 5233983 5234002 5233986 -
gagaacttcagggtgagtcc

SEQ ID NO: 47951 - DNA, 20 bp, Artificial Sequence
  Synthetic oligonucleotide; GAG chr11 5233981 5234000 5233984 -
gaacttcagggtgagtccag

SEQ ID NO: 47952 - DNA, 20 bp, Artificial Sequence
  Synthetic oligonucleotide; TGG chr11 5233938 5233957 5233941 -
tactttctaatcttacattt

SEQ ID NO: 47953 - DNA, 20 bp, Artificial Sequence
  Synthetic oligonucleotide; CAG chr11 5233720 5233739 5233723 -
acaactcaaattatgcatac

SEQ ID NO: 47954 - DNA, 20 bp, Artificial Sequence
  Synthetic oligonucleotide; TAG chr11 5233694 5233713 5233697 -
tcacctgctaattctgcact

SEQ ID NO: 47955 - DNA, 20 bp, Artificial Sequence
  Synthetic oligonucleotide; TGG chr11 5233668 5233687 5233671 -
aatccttttgtctctccaca

SEQ ID NO: 47956 - DNA, 20 bp, Artificial Sequence
  Synthetic oligonucleotide; GGG chr11 5233667 5233686 5233670 -
atccttttgtctctccacat

SEQ ID NO: 47957 - DNA, 20 bp, Artificial Sequence
  Synthetic oligonucleotide; TGG chr11 5233662 5233681 5233665 -
tttgtctctccacatgggta

SEQ ID NO: 47958 - DNA, 20 bp, Artificial Sequence
  Synthetic oligonucleotide; GGG chr11 5233661 5233680 5233664 -
ttgtctctccacatgggtat

SEQ ID NO: 47959 - DNA, 20 bp, Artificial Sequence
  Synthetic oligonucleotide; GAG chr11 5233659 5233678 5233662 -
gtctctccacatgggtatgg

SEQ ID NO: 47960 - DNA, 20 bp, Artificial Sequence
  Synthetic oligonucleotide; GAG chr11 5233657 5233676 5233660 -
ctctccacatgggtatggga

SEQ ID NO: 47961 - DNA, 20 bp, Artificial Sequence
  Synthetic oligonucleotide; AGG chr11 5233656 5233675 5233659 -
tctccacatgggtatgggag

SEQ ID NO: 47962 - DNA, 20 bp, Artificial Sequence
  Synthetic oligonucleotide; AAG chr11 5233643 5233662 5233646 -
atgggagaggctccaactca

SEQ ID NO: 47963 - DNA, 20 bp, Artificial Sequence
  Synthetic oligonucleotide; GAG chr11 5233638 5233657 5233641 -
agaggctccaactcaaagat

SEQ ID NO: 47964 - DNA, 20 bp, Artificial Sequence
  Synthetic oligonucleotide; GAG chr11 5233636 5233655 5233639 -
aggctccaactcaaagatga

SEQ ID NO: 47965 - DNA, 20 bp, Artificial Sequence
  Synthetic oligonucleotide; AGG chr11 5233635 5233654 5233638 -
ggctccaactcaaagatgag

SEQ ID NO: 47966 - DNA, 20 bp, Artificial Sequence
  Synthetic oligonucleotide; TAG chr11 5233630 5233649 5233633 -
caactcaaagatgagaggca

SEQ ID NO: 47967 - DNA, 20 bp, Artificial Sequence
  Synthetic oligonucleotide; TAG chr11 5233617 5233636 5233620 -
agaggcatagaatactgttt

SEQ ID NO: 47968 - DNA, 20 bp, Artificial Sequence
  Synthetic oligonucleotide; GAG chr11 5233615 5233634 5233618 -
aggcatagaatactgtttta

SEQ ID NO: 47969 - DNA, 20 bp, Artificial Sequence
  Synthetic oligonucleotide; AGG chr11 5233614 5233633 5233617 -
ggcatagaatactgttttag

SEQ ID NO: 47970 - DNA, 20 bp, Artificial Sequence
  Synthetic oligonucleotide; AAG chr11 5233592 5233611 5233595 -
gctataaatcattttacaat

SEQ ID NO: 47971 - DNA, 20 bp, Artificial Sequence
  Synthetic oligonucleotide; AGG chr11 5233591 5233610 5233594 -
ctataaatcattttacaata

SEQ ID NO: 47972 - DNA, 20 bp, Artificial Sequence
  Synthetic oligonucleotide; TGG chr11 5233582 5233601 5233585 -
attttacaataaggaataat

SEQ ID NO: 47973 - DNA, 20 bp, Artificial Sequence
  Synthetic oligonucleotide; TAG chr11 5233563 5233582 5233566 -
ttggaattttataaattctg

SEQ ID NO: 47974 - DNA, 20 bp, Artificial Sequence
  Synthetic oligonucleotide; TGG chr11 5233556 5233575 5233559 -
tttataaattctgtagtaaa

SEQ ID NO: 47975 - DNA, 20 bp, Artificial Sequence
  Synthetic oligonucleotide; TGG chr11 5233551 5233570 5233554 -
aaattctgtagtaaatggaa

SEQ ID NO: 47976 - DNA, 20 bp, Artificial Sequence
  Synthetic oligonucleotide; AAG chr11 5233547 5233566 5233550 -
tctgtagtaaatggaatgga

SEQ ID NO: 47977 - DNA, 20 bp, Artificial Sequence
  Synthetic oligonucleotide; AGG chr11 5233546 5233565 5233549 -
ctgtagtaaatggaatggaa

SEQ ID NO: 47978 - DNA, 20 bp, Artificial Sequence
  Synthetic oligonucleotide; AAG chr11 5233542 5233561 5233545 -
agtaaatggaatggaaagga

SEQ ID NO: 47979 - DNA, 20 bp, Artificial Sequence
  Synthetic oligonucleotide; AAG chr11 5233522 5233541 5233525 -
aagtgaatatttgattatga

SEQ ID NO: 47980 - DNA, 20 bp, Artificial Sequence
  Synthetic oligonucleotide; TAG chr11 5233517 5233536 5233520 -
aatatttgattatgaaagac

SEQ ID NO: 47981 - DNA, 20 bp, Artificial Sequence
  Synthetic oligonucleotide; AGG chr11 5233516 5233535 5233519 -
atatttgattatgaaagact

SEQ ID NO: 47982 - DNA, 20 bp, Artificial Sequence
  Synthetic oligonucleotide; CAG chr11 5233513 5233532 5233516 -
tttgattatgaaagactagg

SEQ ID NO: 47983 - DNA, 20 bp, Artificial Sequence
  Synthetic oligonucleotide; TGG chr11 5233504 5233523 5233507 -
gaaagactaggcagttacac

SEQ ID NO: 47984 - DNA, 20 bp, Artificial Sequence
  Synthetic oligonucleotide; GAG chr11 5233502 5233521 5233505 -
aagactaggcagttacactg

SEQ ID NO: 47985 - DNA, 20 bp, Artificial Sequence
  Synthetic oligonucleotide; AGG chr11 5233501 5233520 5233504 -
agactaggcagttacactgg

SEQ ID NO: 47986 - DNA, 20 bp, Artificial Sequence
  Synthetic oligonucleotide; TGG chr11 5233498 5233517 5233501 -
ctaggcagttacactggagg

SEQ ID NO: 47987 - DNA, 20 bp, Artificial Sequence
  Synthetic oligonucleotide; GGG chr11 5233497 5233516 5233500 -
taggcagttacactggaggt

SEQ ID NO: 47988 - DNA, 20 bp, Artificial Sequence
  Synthetic oligonucleotide; GGG chr11 5233496 5233515 5233499 -
aggcagttacactggaggtg

SEQ ID NO: 47989 - DNA, 20 bp, Artificial Sequence
  Synthetic oligonucleotide; CAG chr11 5233493 5233512 5233496 -
cagttacactggaggtgggg

SEQ ID NO: 47990 - DNA, 20 bp, Artificial Sequence
  Synthetic oligonucleotide; AAG chr11 5233490 5233509 5233493 -
ttacactggaggtggggcag

SEQ ID NO: 47991 - DNA, 20 bp, Artificial Sequence
  Synthetic oligonucleotide; TAG chr11 5233480 5233499 5233483 -
ggtggggcagaagtcgttgc

SEQ ID NO: 47992 - DNA, 20 bp, Artificial Sequence
  Synthetic oligonucleotide; AGG chr11 5233479 5233498 5233482 -
gtggggcagaagtcgttgct

SEQ ID NO: 47993 - DNA, 20 bp, Artificial Sequence
  Synthetic oligonucleotide; GAG chr11 5233477 5233496 5233480 -
ggggcagaagtcgttgctag

SEQ ID NO: 47994 - DNA, 20 bp, Artificial Sequence
  Synthetic oligonucleotide; CAG chr11 5233473 5233492 5233476 -
cagaagtcgttgctaggaga

SEQ ID NO: 47995 - DNA, 20 bp, Artificial Sequence
  Synthetic oligonucleotide; TAG chr11 5233420 5233439 5233423 -
tgtatctattaatctgttta

SEQ ID NO: 47996 - DNA, 20 bp, Artificial Sequence
  Synthetic oligonucleotide; TGG chr11 5233370 5233389 5233373 -
atacaaaattaaaactaatt

SEQ ID NO: 47997 - DNA, 20 bp, Artificial Sequence
  Synthetic oligonucleotide; TAG chr11 5233353 5233372 5233356 -
atttggaattaatttgtata

SEQ ID NO: 47998 - DNA, 20 bp, Artificial Sequence
  Synthetic oligonucleotide; CAG chr11 5233343 5233362 5233346 -
aatttgtatatagtattata

SEQ ID NO: 47999 - DNA, 20 bp, Artificial Sequence
  Synthetic oligonucleotide; TAG chr11 5233334 5233353 5233337 -
atagtattatacagcatata

SEQ ID NO: 48000 - DNA, 20 bp, Artificial Sequence
  Synthetic oligonucleotide; TAG chr11 5233315 5233334 5233318 -
atagcatatatgtacatata

SEQ ID NO: 48001 - DNA, 20 bp, Artificial Sequence
  Synthetic oligonucleotide; TAG chr11 5233303 5233322 5233306 -
tacatatatagactacatgc

SEQ ID NO: 48002 - DNA, 20 bp, Artificial Sequence
  Synthetic oligonucleotide; AAG chr11 5233298 5233317 5233301 -
atatagactacatgctagtt

SEQ ID NO: 48003 - DNA, 20 bp, Artificial Sequence
  Synthetic oligonucleotide; TAG chr11 5233291 5233310 5233294 -
ctacatgctagttaagtaca

SEQ ID NO: 48004 - DNA, 20 bp, Artificial Sequence
  Synthetic oligonucleotide; GAG chr11 5233289 5233308 5233292 -
acatgctagttaagtacata

SEQ ID NO: 48005 - DNA, 20 bp, Artificial Sequence
  Synthetic oligonucleotide; AGG chr11 5233288 5233307 5233291 -
catgctagttaagtacatag

SEQ ID NO: 48006 - DNA, 20 bp, Artificial Sequence
  Synthetic oligonucleotide; TAG chr11 5233274 5233293 5233277 -
acatagaggatgtgtgtgta

SEQ ID NO: 48007 - DNA, 20 bp, Artificial Sequence
  Synthetic oligonucleotide; TGG chr11 5233225 5233244 5233228 -
tatgtacttatttatgctga

SEQ ID NO: 48008 - DNA, 20 bp, Artificial Sequence
  Synthetic oligonucleotide; GGG chr11 5233224 5233243 5233227 -
atgtacttatttatgctgat

SEQ ID NO: 48009 - DNA, 20 bp, Artificial Sequence
  Synthetic oligonucleotide; TGG chr11 5233214 5233233 5233217 -
ttatgctgatgggaataacc

SEQ ID NO: 48010 - DNA, 20 bp, Artificial Sequence
  Synthetic oligonucleotide; GGG chr11 5233213 5233232 5233216 -
tatgctgatgggaataacct

SEQ ID NO: 48011 - DNA, 20 bp, Artificial Sequence
  Synthetic oligonucleotide; GGG chr11 5233212 5233231 5233215 -
atgctgatgggaataacctg

SEQ ID NO: 48012 - DNA, 20 bp, Artificial Sequence
  Synthetic oligonucleotide; CAG chr11 5233207 5233226 5233210 -
gatgggaataacctggggat

SEQ ID NO: 48013 - DNA, 20 bp, Artificial Sequence
  Synthetic oligonucleotide; AAG chr11 5233196 5233215 5233199 -
cctggggatcagttttgtct

SEQ ID NO: 48014 - DNA, 20 bp, Artificial Sequence
  Synthetic oligonucleotide; TGG chr11 5233190 5233209 5233193 -
gatcagttttgtctaagatt

SEQ ID NO: 48015 - DNA, 20 bp, Artificial Sequence
  Synthetic oligonucleotide; GGG chr11 5233189 5233208 5233192 -
atcagttttgtctaagattt

SEQ ID NO: 48016 - DNA, 20 bp, Artificial Sequence
  Synthetic oligonucleotide; CAG chr11 5233186 5233205 5233189 -
agttttgtctaagatttggg

SEQ ID NO: 48017 - DNA, 20 bp, Artificial Sequence
  Synthetic oligonucleotide; TGG chr11 5233176 5233195 5233179 -
aagatttgggcagaaaaaaa

SEQ ID NO: 48018 - DNA, 20 bp, Artificial Sequence
  Synthetic oligonucleotide; GGG chr11 5233175 5233194 5233178 -
agatttgggcagaaaaaaat

SEQ ID NO: 48019 - DNA, 20 bp, Artificial Sequence
  Synthetic oligonucleotide; TGG chr11 5233169 5233188 5233172 -
gggcagaaaaaaatgggtgt

SEQ ID NO: 48020 - DNA, 20 bp, Artificial Sequence
  Synthetic oligonucleotide; CAG chr11 5233164 5233183 5233167 -
gaaaaaaatgggtgttggct

SEQ ID NO: 48021 - DNA, 20 bp, Artificial Sequence
  Synthetic oligonucleotide; CAG chr11 5233156 5233175 5233159 -
tgggtgttggctcagtttct

SEQ ID NO: 48022 - DNA, 20 bp, Artificial Sequence
  Synthetic oligonucleotide; AAG chr11 5233153 5233172 5233156 -
gtgttggctcagtttctcag

SEQ ID NO: 48023 - DNA, 20 bp, Artificial Sequence
  Synthetic oligonucleotide; CAG chr11 5233149 5233168 5233152 -
tggctcagtttctcagaagc

SEQ ID NO: 48024 - DNA, 20 bp, Artificial Sequence
  Synthetic oligonucleotide; CAG chr11 5233096 5233115 5233099 -
atctgcctacctcttctccg

SEQ ID NO: 48025 - DNA, 20 bp, Artificial Sequence
  Synthetic oligonucleotide; TGG chr11 5233089 5233108 5233092 -
tacctcttctccgcagctct

SEQ ID NO: 48026 - DNA, 20 bp, Artificial Sequence
  Synthetic oligonucleotide; GGG chr11 5233088 5233107 5233091 -
acctcttctccgcagctctt

SEQ ID NO: 48027 - DNA, 20 bp, Artificial Sequence
  Synthetic oligonucleotide; TGG chr11 5233077 5233096 5233080 -
gcagctcttgggcaatgtgc

SEQ ID NO: 48028 - DNA, 20 bp, Artificial Sequence
  Synthetic oligonucleotide; TGG chr11 5233065 5233084 5233068 -
caatgtgctggtgtgtgtgc

SEQ ID NO: 48029 - DNA, 20 bp, Artificial Sequence
  Synthetic oligonucleotide; TGG chr11 5233052 5233071 5233055 -
tgtgtgctggcccgcaactt

SEQ ID NO: 48030 - DNA, 20 bp, Artificial Sequence
  Synthetic oligonucleotide; AAG chr11 5233048 5233067 5233051 -
tgctggcccgcaactttggc

SEQ ID NO: 48031 - DNA, 20 bp, Artificial Sequence
  Synthetic oligonucleotide; AGG chr11 5233047 5233066 5233050 -
gctggcccgcaactttggca

SEQ ID NO: 48032 - DNA, 20 bp, Artificial Sequence
  Synthetic oligonucleotide; CAG chr11 5233027 5233046 5233030 -
aggaattcaccccacaaatg

SEQ ID NO: 48033 - DNA, 20 bp, Artificial Sequence
  Synthetic oligonucleotide; AGG chr11 5233026 5233045 5233029 -
ggaattcaccccacaaatgc

SEQ ID NO: 48034 - DNA, 20 bp, Artificial Sequence
  Synthetic oligonucleotide; CAG chr11 5233015 5233034 5233018 -
cacaaatgcaggctgcctat

SEQ ID NO: 48035 - DNA, 20 bp, Artificial Sequence
  Synthetic oligonucleotide; AAG chr11 5233012 5233031 5233015 -
aaatgcaggctgcctatcag

SEQ ID NO: 48036 - DNA, 20 bp, Artificial Sequence
  Synthetic oligonucleotide; AGG chr11 5233011 5233030 5233014 -
aatgcaggctgcctatcaga

SEQ ID NO: 48037 - DNA, 20 bp, Artificial Sequence
  Synthetic oligonucleotide; TGG chr11 5233008 5233027 5233011 -
gcaggctgcctatcagaagg

SEQ ID NO: 48038 - DNA, 20 bp, Artificial Sequence
  Synthetic oligonucleotide; TGG chr11 5233005 5233024 5233008 -
ggctgcctatcagaaggtgg

SEQ ID NO: 48039 - DNA, 20 bp, Artificial Sequence
  Synthetic oligonucleotide; TGG chr11 5233001 5233020 5233004 -
gcctatcagaaggtggtggc

SEQ ID NO: 48040 - DNA, 20 bp, Artificial Sequence
  Synthetic oligonucleotide; TGG chr11 5232996 5233015 5232999 -
tcagaaggtggtggctggtg

SEQ ID NO: 48041 - DNA, 20 bp, Artificial Sequence
  Synthetic oligonucleotide; TGG chr11 5232984 5233003 5232987 -
ggctggtgtggctaatgccc

SEQ ID NO: 48042 - DNA, 20 bp, Artificial Sequence
  Synthetic oligonucleotide; AAG chr11 5232976 5232995 5232979 -
tggctaatgccctggctcac

SEQ ID NO: 48043 - DNA, 20 bp, Artificial Sequence
  Synthetic oligonucleotide; GAG chr11 5232966 5232985 5232969 -
cctggctcacaagtaccatt

SEQ ID NO: 48044 - DNA, 20 bp, Artificial Sequence
  Synthetic oligonucleotide; TGG chr11 5232959 5232978 5232962 -
cacaagtaccattgagatcc

SEQ ID NO: 48045 - DNA, 20 bp, Artificial Sequence
  Synthetic oligonucleotide; AAG chr11 5232937 5232956 5232940 -
gactgtttcctgataaccat

SEQ ID NO: 48046 - DNA, 20 bp, Artificial Sequence
  Synthetic oligonucleotide; AAG chr11 5232934 5232953 5232937 -
tgtttcctgataaccataag

SEQ ID NO: 48047 - DNA, 20 bp, Artificial Sequence
  Synthetic oligonucleotide; TAG chr11 5232919 5232938 5232922 -
ataagaagaccctatttccc

SEQ ID NO: 48048 - DNA, 20 bp, Artificial Sequence
  Synthetic oligonucleotide; TGG chr11 5232899 5232918 5232902 -
tagattctattttctgaact

SEQ ID NO: 48049 - DNA, 20 bp, Artificial Sequence
  Synthetic oligonucleotide; GGG chr11 5232898 5232917 5232901 -
agattctattttctgaactt

SEQ ID NO: 48050 - DNA, 20 bp, Artificial Sequence
  Synthetic oligonucleotide; AAG chr11 5232878 5232897 5232881 -
gggaacacaatgcctacttc

SEQ ID NO: 48051 - DNA, 20 bp, Artificial Sequence
  Synthetic oligonucleotide; AGG chr11 5232877 5232896 5232880 -
ggaacacaatgcctacttca

SEQ ID NO: 48052 - DNA, 20 bp, Artificial Sequence
  Synthetic oligonucleotide; GGG chr11 5232876 5232895 5232879 -
gaacacaatgcctacttcaa

SEQ ID NO: 48053 - DNA, 20 bp, Artificial Sequence
  Synthetic oligonucleotide; TGG chr11 5232871 5232890 5232874 -
caatgcctacttcaagggta

SEQ ID NO: 48054 - DNA, 20 bp, Artificial Sequence
  Synthetic oligonucleotide; AAG chr11 5232855 5232874 5232858 -
ggtatggcttctgcctaata

SEQ ID NO: 48055 - DNA, 20 bp, Artificial Sequence
  Synthetic oligonucleotide; CAG chr11 5232846 5232865 5232849 -
tctgcctaataaagaatgtt

SEQ ID NO: 48056 - DNA, 20 bp, Artificial Sequence
  Synthetic oligonucleotide; CAG chr11 5232802 5232821 5232805 -
acttatttcatttttttgtc

SEQ ID NO: 48057 - DNA, 20 bp, Artificial Sequence
  Synthetic oligonucleotide; AGG chr11 5232801 5232820 5232804 -
cttatttcatttttttgtcc

SEQ ID NO: 48058 - DNA, 20 bp, Artificial Sequence
  Synthetic oligonucleotide; AAG chr11 5232793 5232812 5232796 -
atttttttgtccaggtgtgt

SEQ ID NO: 48059 - DNA, 20 bp, Artificial Sequence
  Synthetic oligonucleotide; AAG chr11 5232790 5232809 5232793 -
tttttgtccaggtgtgtaag

SEQ ID NO: 48060 - DNA, 20 bp, Artificial Sequence
  Synthetic oligonucleotide; AGG chr11 5232789 5232808 5232792 -
ttttgtccaggtgtgtaaga

SEQ ID NO: 48061 - DNA, 20 bp, Artificial Sequence
  Synthetic oligonucleotide; GAG chr11 5232781 5232800 5232784 -
aggtgtgtaagaaggttcct

SEQ ID NO: 48062 - DNA, 20 bp, Artificial Sequence
  Synthetic oligonucleotide; AGG chr11 5232780 5232799 5232783 -
ggtgtgtaagaaggttcctg

SEQ ID NO: 48063 - DNA, 20 bp, Artificial Sequence
  Synthetic oligonucleotide; CAG chr11 5232772 5232791 5232775 -
agaaggttcctgaggctcta

SEQ ID NO: 48064 - DNA, 20 bp, Artificial Sequence
  Synthetic oligonucleotide; TAG chr11 5232768 5232787 5232771 -
ggttcctgaggctctacaga

SEQ ID NO: 48065 - DNA, 20 bp, Artificial Sequence
  Synthetic oligonucleotide; AGG chr11 5232767 5232786 5232770 -
gttcctgaggctctacagat

SEQ ID NO: 48066 - DNA, 20 bp, Artificial Sequence
  Synthetic oligonucleotide; GGG chr11 5232766 5232785 5232769 -
ttcctgaggctctacagata

SEQ ID NO: 48067 - DNA, 20 bp, Artificial Sequence
  Synthetic oligonucleotide; GAG chr11 5232764 5232783 5232767 -
cctgaggctctacagatagg

SEQ ID NO: 48068 - DNA, 20 bp, Artificial Sequence
  Synthetic oligonucleotide; AAG chr11 5232744 5232763 5232747 -
gagcacttgtttattttaca

SEQ ID NO: 48069 - DNA, 20 bp, Artificial Sequence
  Synthetic oligonucleotide; GAG chr11 5232742 5232761 5232745 -
gcacttgtttattttacaaa

SEQ ID NO: 48070 - DNA, 20 bp, Artificial Sequence
  Synthetic oligonucleotide; TGG chr11 5232735 5232754 5232738 -
tttattttacaaagagtaca

SEQ ID NO: 48071 - DNA, 20 bp, Artificial Sequence
  Synthetic oligonucleotide; GGG chr11 5232734 5232753 5232737 -
ttattttacaaagagtacat

SEQ ID NO: 48072 - DNA, 20 bp, Artificial Sequence
  Synthetic oligonucleotide; AAG chr11 5232729 5232748 5232732 -
ttacaaagagtacatgggaa

SEQ ID NO: 48073 - DNA, 20 bp, Artificial Sequence
  Synthetic oligonucleotide; GAG chr11 5232727 5232746 5232730 -
acaaagagtacatgggaaaa

SEQ ID NO: 48074 - DNA, 20 bp, Artificial Sequence
  Synthetic oligonucleotide; AAG chr11 5232722 5232741 5232725 -
gagtacatgggaaaagagaa

SEQ ID NO: 48075 - DNA, 20 bp, Artificial Sequence
  Synthetic oligonucleotide; AAG chr11 5232718 5232737 5232721 -
acatgggaaaagagaaaagc

SEQ ID NO: 48076 - DNA, 20 bp, Artificial Sequence
  Synthetic oligonucleotide; AGG chr11 5232717 5232736 5232720 -
catgggaaaagagaaaagca

SEQ ID NO: 48077 - DNA, 20 bp, Artificial Sequence
  Synthetic oligonucleotide; GGG chr11 5232716 5232735 5232719 -
atgggaaaagagaaaagcaa

SEQ ID NO: 48078 - DNA, 20 bp, Artificial Sequence
  Synthetic oligonucleotide; AAG chr11 5232705 5232724 5232708 -
gaaaagcaagggaaccgtac

SEQ ID NO: 48079 - DNA, 20 bp, Artificial Sequence
  Synthetic oligonucleotide; AGG chr11 5232704 5232723 5232707 -
aaaagcaagggaaccgtaca

SEQ ID NO: 48080 - DNA, 20 bp, Artificial Sequence
  Synthetic oligonucleotide; TGG chr11 5232695 5232714 5232698 -
ggaaccgtacaaggcattaa

SEQ ID NO: 48081 - DNA, 20 bp, Artificial Sequence
  Synthetic oligonucleotide; GGG chr11 5232694 5232713 5232697 -
gaaccgtacaaggcattaat

SEQ ID NO: 48082 - DNA, 20 bp, Artificial Sequence
  Synthetic oligonucleotide; AAG chr11 5232674 5232693 5232677 -
gggtgacacttctacctcca

SEQ ID NO: 48083 - DNA, 20 bp, Artificial Sequence
  Synthetic oligonucleotide; GAG chr11 5232672 5232691 5232675 -
gtgacacttctacctccaaa

SEQ ID NO: 48084 - DNA, 20 bp, Artificial Sequence
  Synthetic oligonucleotide; CAG chr11 5232669 5232688 5232672 -
acacttctacctccaaagag

SEQ ID NO: 48085 - DNA, 20 bp, Artificial Sequence
  Synthetic oligonucleotide; AAG chr11 5232658 5232677 5232661 -
tccaaagagcagaaattatc

SEQ ID NO: 48086 - DNA, 20 bp, Artificial Sequence
  Synthetic oligonucleotide; AAG chr11 5232642 5232661 5232645 -
tatcaagaactcttgataca

SEQ ID NO: 48087 - DNA, 20 bp, Artificial Sequence
  Synthetic oligonucleotide; TGG chr11 5232632 5232651 5232635 -
tcttgatacaaagataatac

SEQ ID NO: 48088 - DNA, 20 bp, Artificial Sequence
  Synthetic oligonucleotide; CAG chr11 5232624 5232643 5232627 -
caaagataatactggcactg

SEQ ID NO: 48089 - DNA, 20 bp, Artificial Sequence
  Synthetic oligonucleotide; GAG chr11 5232622 5232641 5232625 -
aagataatactggcactgca

SEQ ID NO: 48090 - DNA, 20 bp, Artificial Sequence
  Synthetic oligonucleotide; AGG chr11 5232621 5232640 5232624 -
agataatactggcactgcag

SEQ ID NO: 48091 - DNA, 20 bp, Artificial Sequence
  Synthetic oligonucleotide; TAG chr11 5232615 5232634 5232618 -
tactggcactgcagaggttc

SEQ ID NO: 48092 - DNA, 20 bp, Artificial Sequence
  Synthetic oligonucleotide; AGG chr11 5232614 5232633 5232617 -
actggcactgcagaggttct

SEQ ID NO: 48093 - DNA, 20 bp, Artificial Sequence
  Synthetic oligonucleotide; GGG chr11 5232613 5232632 5232616 -
ctggcactgcagaggttcta

SEQ ID NO: 48094 - DNA, 20 bp, Artificial Sequence
  Synthetic oligonucleotide; AAG chr11 5232610 5232629 5232613 -
gcactgcagaggttctaggg

SEQ ID NO: 48095 - DNA, 20 bp, Artificial Sequence
  Synthetic oligonucleotide; AAG chr11 5232596 5232615 5232599 -
ctagggaagacctcaaccct

SEQ ID NO: 48096 - DNA, 20 bp, Artificial Sequence
  Synthetic oligonucleotide; TAG chr11 5232590 5232609 5232593 -
aagacctcaaccctaagaca

SEQ ID NO: 48097 - DNA, 20 bp, Artificial Sequence
  Synthetic oligonucleotide; AAG chr11 5232583 5232602 5232586 -
caaccctaagacatagcctc

SEQ ID NO: 48098 - DNA, 20 bp, Artificial Sequence
  Synthetic oligonucleotide; AGG chr11 5232582 5232601 5232585 -
aaccctaagacatagcctca

SEQ ID NO: 48099 - DNA, 20 bp, Artificial Sequence
  Synthetic oligonucleotide; GGG chr11 5232581 5232600 5232584 -
accctaagacatagcctcaa

SEQ ID NO: 48100 - DNA, 20 bp, Artificial Sequence
  Synthetic oligonucleotide; GAG chr11 5232548 5232567 5232551 -
attaaactccaacaattact

SEQ ID NO: 48101 - DNA, 20 bp, Artificial Sequence
  Synthetic oligonucleotide; AAG chr11 5232526 5232545 5232529 -
gaaaataatgtgctcaatta

SEQ ID NO: 48102 - DNA, 20 bp, Artificial Sequence
  Synthetic oligonucleotide; AGG chr11 5232525 5232544 5232528 -
aaaataatgtgctcaattaa

SEQ ID NO: 48103 - DNA, 20 bp, Artificial Sequence
  Synthetic oligonucleotide; AAG chr11 5232508 5232527 5232511 -
taaaggcataatgattactc

SEQ ID NO: 48104 - DNA, 20 bp, Artificial Sequence
  Synthetic oligonucleotide; TAG chr11 5232459 5232478 5232462 -
cttcctttgcctgcacattg

SEQ ID NO: 48105 - DNA, 20 bp, Artificial Sequence
  Synthetic oligonucleotide; AAG chr11 5232435 5232454 5232438 -
ccataatactataccccatc

SEQ ID NO: 48106 - DNA, 20 bp, Artificial Sequence
  Synthetic oligonucleotide; AAG chr11 5232420 5232439 5232423 -
ccatcaagtgttcctgctcc

SEQ ID NO: 48107 - DNA, 20 bp, Artificial Sequence
  Synthetic oligonucleotide; TAG chr11 5232414 5232433 5232417 -
agtgttcctgctccaagaaa

SEQ ID NO: 48108 - DNA, 20 bp, Artificial Sequence
  Synthetic oligonucleotide; CAG chr11 5232391 5232410 5232394 -
cttcctcctcttacttgccc

SEQ ID NO: 48109 - DNA, 20 bp, Artificial Sequence
  Synthetic oligonucleotide; AAG chr11 5232376 5232395 5232379 -
tgccccagaacatctctgta

SEQ ID NO: 48110 - DNA, 20 bp, Artificial Sequence
  Synthetic oligonucleotide; CAG chr11 5232348 5232367 5232351 -
cctcttatcttcccatattt

SEQ ID NO: 48111 - DNA, 20 bp, Artificial Sequence
  Synthetic oligonucleotide; AAG chr11 5232343 5232362 5232346 -
tatcttcccatatttcagtc

SEQ ID NO: 48112 - DNA, 20 bp, Artificial Sequence
  Synthetic oligonucleotide; CAG chr11 5232301 5232320 5232304 -
cttgtgacctctcttgaccc

SEQ ID NO: 48113 - DNA, 20 bp, Artificial Sequence
  Synthetic oligonucleotide; AAG chr11 5232179 5232198 5232182 -
acacacactccgtgctttat

SEQ ID NO: 48114 - DNA, 20 bp, Artificial Sequence
  Synthetic oligonucleotide; TGG chr11 5232116 5232135 5232119 -
cctcatattaaattcatcaa

SEQ ID NO: 48115 - DNA, 20 bp, Artificial Sequence
  Synthetic oligonucleotide; GGG chr11 5232115 5232134 5232118 -
ctcatattaaattcatcaat

SEQ ID NO: 48116 - DNA, 20 bp, Artificial Sequence
  Synthetic oligonucleotide; CAG chr11 5232112 5232131 5232115 -
atattaaattcatcaatggg

SEQ ID NO: 48117 - DNA, 20 bp, Artificial Sequence
  Synthetic oligonucleotide; AAG chr11 5232108 5232127 5232111 -
taaattcatcaatgggcaga

SEQ ID NO: 48118 - DNA, 20 bp, Artificial Sequence
  Synthetic oligonucleotide; AAG chr11 5232092 5232111 5232095 -
cagaaagaaaatatttattc

SEQ ID NO: 48119 - DNA, 20 bp, Artificial Sequence
  Synthetic oligonucleotide; CAG chr11 5232085 5232104 5232088 -
aaaatatttattcaagaaaa

SEQ ID NO: 48120 - DNA, 20 bp, Artificial Sequence
  Synthetic oligonucleotide; GAG chr11 5232065 5232084 5232068 -
cagtgaatgaatgaacgaat

SEQ ID NO: 48121 - DNA, 20 bp, Artificial Sequence
  Synthetic oligonucleotide; GAG chr11 5232057 5232076 5232060 -
gaatgaacgaatgagtaaat

SEQ ID NO: 48122 - DNA, 20 bp, Artificial Sequence
  Synthetic oligonucleotide; AAG chr11 5232048 5232067 5232051 -
aatgagtaaatgagtaaatg

SEQ ID NO: 48123 - DNA, 20 bp, Artificial Sequence
  Synthetic oligonucleotide; AGG chr11 5232047 5232066 5232050 -
atgagtaaatgagtaaatga

SEQ ID NO: 48124 - DNA, 20 bp, Artificial Sequence
  Synthetic oligonucleotide; TAG chr11 5232026 5232045 5232029 -
ggaatgattattccttgctt

SEQ ID NO: 48125 - DNA, 20 bp, Artificial Sequence
  Synthetic oligonucleotide; TGG chr11 5232017 5232036 5232020 -
attccttgctttagaacttc

SEQ ID NO: 48126 - DNA, 20 bp, Artificial Sequence
  Synthetic oligonucleotide; TAG chr11 5232011 5232030 5232014 -
tgctttagaacttctggaat

SEQ ID NO: 48127 - DNA, 20 bp, Artificial Sequence
  Synthetic oligonucleotide; GAG chr11 5232009 5232028 5232012 -
ctttagaacttctggaatta

SEQ ID NO: 48128 - DNA, 20 bp, Artificial Sequence
  Synthetic oligonucleotide; AGG chr11 5232008 5232027 5232011 -
tttagaacttctggaattag

SEQ ID NO: 48129 - DNA, 20 bp, Artificial Sequence
  Synthetic oligonucleotide; CAG chr11 5231982 5232001 5231985 -
atattaataataccatcgca

SEQ ID NO: 48130 - DNA, 20 bp, Artificial Sequence
  Synthetic oligonucleotide; AAG chr11 5231948 5231967 5231951 -
tgttaatgctacaacataca

SEQ ID NO: 48131 - DNA, 20 bp, Artificial Sequence
  Synthetic oligonucleotide; GAG chr11 5231946 5231965 5231949 -
ttaatgctacaacatacaaa

SEQ ID NO: 48132 - DNA, 20 bp, Artificial Sequence
  Synthetic oligonucleotide; AGG chr11 5231945 5231964 5231948 -
taatgctacaacatacaaag

SEQ ID NO: 48133 - DNA, 20 bp, Artificial Sequence
  Synthetic oligonucleotide; AAG chr11 5231942 5231961 5231945 -
tgctacaacatacaaagagg

SEQ ID NO: 48134 - DNA, 20 bp, Artificial Sequence
  Synthetic oligonucleotide; CAG chr11 5231935 5231954 5231938 -
acatacaaagaggaagcatg

SEQ ID NO: 48135 - DNA, 20 bp, Artificial Sequence
  Synthetic oligonucleotide; CAG chr11 5231920 5231939 5231923 -
gcatgcagtaaacaaccgaa

SEQ ID NO: 48136 - DNA, 20 bp, Artificial Sequence
  Synthetic oligonucleotide; TAG chr11 5231899 5231918 5231902 -
agttatttcctttctgatca

SEQ ID NO: 48137 - DNA, 20 bp, Artificial Sequence
  Synthetic oligonucleotide; AGG chr11 5231898 5231917 5231901 -
gttatttcctttctgatcat

SEQ ID NO: 48138 - DNA, 20 bp, Artificial Sequence
  Synthetic oligonucleotide; GAG chr11 5231896 5231915 5231899 -
tatttcctttctgatcatag

SEQ ID NO: 48139 - DNA, 20 bp, Artificial Sequence
  Synthetic oligonucleotide; GAG chr11 5231877 5231896 5231880 -
ggagtaatatttttttcctt

SEQ ID NO: 48140 - DNA, 20 bp, Artificial Sequence
  Synthetic oligonucleotide; TAG chr11 5231860 5231879 5231863 -
cttgagcaccatttttgcca

SEQ ID NO: 48141 - DNA, 20 bp, Artificial Sequence
  Synthetic oligonucleotide; AGG chr11 5231859 5231878 5231862 -
ttgagcaccatttttgccat

SEQ ID NO: 48142 - DNA, 20 bp, Artificial Sequence
  Synthetic oligonucleotide; TAG chr11 5231850 5231869 5231853 -
atttttgccataggtaaaat

SEQ ID NO: 48143 - DNA, 20 bp, Artificial Sequence
  Synthetic oligonucleotide; AAG chr11 5231847 5231866 5231850 -
tttgccataggtaaaattag

SEQ ID NO: 48144 - DNA, 20 bp, Artificial Sequence
  Synthetic oligonucleotide; AGG chr11 5231846 5231865 5231849 -
ttgccataggtaaaattaga

SEQ ID NO: 48145 - DNA, 20 bp, Artificial Sequence
  Synthetic oligonucleotide; TAG chr11 5231838 5231857 5231841 -
ggtaaaattagaaggatttt

SEQ ID NO: 48146 - DNA, 20 bp, Artificial Sequence
  Synthetic oligonucleotide; CAG chr11 5231827 5231846 5231830 -
aaggatttttagaactttct

SEQ ID NO: 48147 - DNA, 20 bp, Artificial Sequence
  Synthetic oligonucleotide; CAG chr11 5231755 5231774 5231758 -
aacttacttgaatacctaaa

SEQ ID NO: 48148 - DNA, 20 bp, Artificial Sequence
  Synthetic oligonucleotide; AAG chr11 5231728 5231747 5231731 -
tgttgtttccttgtgtttga

SEQ ID NO: 48149 - DNA, 20 bp, Artificial Sequence
  Synthetic oligonucleotide; CAG chr11 5231717 5231736 5231720 -
tgtgtttgaaagtgctttca

SEQ ID NO: 48150 - DNA, 20 bp, Artificial Sequence
  Synthetic oligonucleotide; CAG chr11 5231696 5231715 5231699 -
agtaactctgtctgtactgc

SEQ ID NO: 48151 - DNA, 20 bp, Artificial Sequence
  Synthetic oligonucleotide; TAG chr11 5231673 5231692 5231676 -
aatatactgacaatgtgtta

SEQ ID NO: 48152 - DNA, 20 bp, Artificial Sequence
  Synthetic oligonucleotide; TGG chr11 5231637 5231656 5231640 -
tcacaacattttgaattgac

SEQ ID NO: 48153 - DNA, 20 bp, Artificial Sequence
  Synthetic oligonucleotide; CAG chr11 5231634 5231653 5231637 -
caacattttgaattgactgg

SEQ ID NO: 48154 - DNA, 20 bp, Artificial Sequence
  Synthetic oligonucleotide; CAG chr11 5231631 5231650 5231634 -
cattttgaattgactggcag

SEQ ID NO: 48155 - DNA, 20 bp, Artificial Sequence
  Synthetic oligonucleotide; AAG chr11 5231628 5231647 5231631 -
tttgaattgactggcagcag

SEQ ID NO: 48156 - DNA, 20 bp, Artificial Sequence
  Synthetic oligonucleotide; AAG chr11 5231599 5231618 5231602 -
tatatccatgtgttttcctt

SEQ ID NO: 48157 - DNA, 20 bp, Artificial Sequence
  Synthetic oligonucleotide; TAG chr11 5231586 5231605 5231589 -
tttccttaagtcattataca

SEQ ID NO: 48158 - DNA, 20 bp, Artificial Sequence
  Synthetic oligonucleotide; TAG chr11 5231583 5231602 5231586 -
ccttaagtcattatacatag

SEQ ID NO: 48159 - DNA, 20 bp, Artificial Sequence
  Synthetic oligonucleotide; AGG chr11 5231582 5231601 5231585 -
cttaagtcattatacatagt

SEQ ID NO: 48160 - DNA, 20 bp, Artificial Sequence
  Synthetic oligonucleotide; GAG chr11 5231575 5231594 5231578 -
cattatacatagtaggcact

SEQ ID NO: 48161 - DNA, 20 bp, Artificial Sequence
  Synthetic oligonucleotide; AAG chr11 5231554 5231573 5231557 -
agaactctttatatctgaat

SEQ ID NO: 48162 - DNA, 20 bp, Artificial Sequence
  Synthetic oligonucleotide; TAG chr11 5231546 5231565 5231549 -
ttatatctgaataagatatt

SEQ ID NO: 48163 - DNA, 20 bp, Artificial Sequence
  Synthetic oligonucleotide; AGG chr11 5231545 5231564 5231548 -
tatatctgaataagatattt

SEQ ID NO: 48164 - DNA, 20 bp, Artificial Sequence
  Synthetic oligonucleotide; TGG chr11 5231536 5231555 5231539 -
ataagatatttaggaaccac

SEQ ID NO: 48165 - DNA, 20 bp, Artificial Sequence
  Synthetic oligonucleotide; CAG chr11 5231524 5231543 5231527 -
ggaaccactggtttacatat

SEQ ID NO: 48166 - DNA, 20 bp, Artificial Sequence
  Synthetic oligonucleotide; AAG chr11 5231521 5231540 5231524 -
accactggtttacatatcag

SEQ ID NO: 48167 - DNA, 20 bp, Artificial Sequence
  Synthetic oligonucleotide; CAG chr11 5231518 5231537 5231521 -
actggtttacatatcagaag

SEQ ID NO: 48168 - DNA, 20 bp, Artificial Sequence
  Synthetic oligonucleotide; GAG chr11 5231516 5231535 5231519 -
tggtttacatatcagaagca

SEQ ID NO: 48169 - DNA, 20 bp, Artificial Sequence
  Synthetic oligonucleotide; CAG chr11 5231508 5231527 5231511 -
atatcagaagcagagctact

SEQ ID NO: 48170 - DNA, 20 bp, Artificial Sequence
  Synthetic oligonucleotide; AGG chr11 5231507 5231526 5231510 -
tatcagaagcagagctactc

SEQ ID NO: 48171 - DNA, 20 bp, Artificial Sequence
  Synthetic oligonucleotide; GGG chr11 5231506 5231525 5231509 -
atcagaagcagagctactca

SEQ ID NO: 48172 - DNA, 20 bp, Artificial Sequence
  Synthetic oligonucleotide; TGG chr11 5231498 5231517 5231501 -
cagagctactcagggcattt

SEQ ID NO: 48173 - DNA, 20 bp, Artificial Sequence
  Synthetic oligonucleotide; GGG chr11 5231497 5231516 5231500 -
agagctactcagggcatttt

SEQ ID NO: 48174 - DNA, 20 bp, Artificial Sequence
  Synthetic oligonucleotide; GGG chr11 5231496 5231515 5231499 -
gagctactcagggcattttg

SEQ ID NO: 48175 - DNA, 20 bp, Artificial Sequence
  Synthetic oligonucleotide; AAG chr11 5231493 5231512 5231496 -
ctactcagggcattttgggg

SEQ ID NO: 48176 - DNA, 20 bp, Artificial Sequence
  Synthetic oligonucleotide; GAG chr11 5231473 5231492 5231476 -
aagatcactttcacattcct

SEQ ID NO: 48177 - DNA, 20 bp, Artificial Sequence
  Synthetic oligonucleotide; TAG chr11 5231468 5231487 5231471 -
cactttcacattcctgagca

SEQ ID NO: 48178 - DNA, 20 bp, Artificial Sequence
  Synthetic oligonucleotide; AGG chr11 5231467 5231486 5231470 -
actttcacattcctgagcat

SEQ ID NO: 48179 - DNA, 20 bp, Artificial Sequence
  Synthetic oligonucleotide; GGG chr11 5231466 5231485 5231469 -
ctttcacattcctgagcata

SEQ ID NO: 48180 - DNA, 20 bp, Artificial Sequence
  Synthetic oligonucleotide; AAG chr11 5231463 5231482 5231466 -
tcacattcctgagcataggg

SEQ ID NO: 48181 - DNA, 20 bp, Artificial Sequence
  Synthetic oligonucleotide; AAG chr11 5231453 5231472 5231456 -
gagcatagggaagttctcat

SEQ ID NO: 48182 - DNA, 20 bp, Artificial Sequence
  Synthetic oligonucleotide; GAG chr11 5231451 5231470 5231454 -
gcatagggaagttctcataa

SEQ ID NO: 48183 - DNA, 20 bp, Artificial Sequence
  Synthetic oligonucleotide; AAG chr11 5231447 5231466 5231450 -
agggaagttctcataagagt

SEQ ID NO: 48184 - DNA, 20 bp, Artificial Sequence
  Synthetic oligonucleotide; AAG chr11 5231437 5231456 5231440 -
tcataagagtaagatattaa

SEQ ID NO: 48185 - DNA, 20 bp, Artificial Sequence
  Synthetic oligonucleotide; AGG chr11 5231436 5231455 5231439 -
cataagagtaagatattaaa

SEQ ID NO: 48186 - DNA, 20 bp, Artificial Sequence
  Synthetic oligonucleotide; GAG chr11 5231434 5231453 5231437 -
taagagtaagatattaaaag

SEQ ID NO: 48187 - DNA, 20 bp, Artificial Sequence
  Synthetic oligonucleotide; TGG chr11 5231422 5231441 5231425 -
attaaaaggagatacttgtg

SEQ ID NO: 48188 - DNA, 20 bp, Artificial Sequence
  Synthetic oligonucleotide; AAG chr11 5231412 5231431 5231415 -
gatacttgtgtggtattcga

SEQ ID NO: 48189 - DNA, 20 bp, Artificial Sequence
  Synthetic oligonucleotide; CAG chr11 5231408 5231427 5231411 -
cttgtgtggtattcgaaaga

SEQ ID NO: 48190 - DNA, 20 bp, Artificial Sequence
  Synthetic oligonucleotide; AAG chr11 5231404 5231423 5231407 -
tgtggtattcgaaagacagt

SEQ ID NO: 48191 - DNA, 20 bp, Artificial Sequence
  Synthetic oligonucleotide; GAG chr11 5231402 5231421 5231405 -
tggtattcgaaagacagtaa

SEQ ID NO: 48192 - DNA, 20 bp, Artificial Sequence
  Synthetic oligonucleotide; GAG chr11 5231400 5231419 5231403 -
gtattcgaaagacagtaaga

SEQ ID NO: 48193 - DNA, 20 bp, Artificial Sequence
  Synthetic oligonucleotide; TAG chr11 5231393 5231412 5231396 -
aaagacagtaagagagattg

SEQ ID NO: 48194 - DNA, 20 bp, Artificial Sequence
  Synthetic oligonucleotide; TAG chr11 5231375 5231394 5231378 -
tgtagaccttatgatcttga

SEQ ID NO: 48195 - DNA, 20 bp, Artificial Sequence
  Synthetic oligonucleotide; AGG chr11 5231374 5231393 5231377 -
gtagaccttatgatcttgat

SEQ ID NO: 48196 - DNA, 20 bp, Artificial Sequence
  Synthetic oligonucleotide; GGG chr11 5231373 5231392 5231376 -
tagaccttatgatcttgata

SEQ ID NO: 48197 - DNA, 20 bp, Artificial Sequence
  Synthetic oligonucleotide; AAG chr11 5231344 5231363 5231347 -
aactacattcctttctccaa

SEQ ID NO: 48198 - DNA, 20 bp, Artificial Sequence
  Synthetic oligonucleotide; AAG chr11 5231332 5231351 5231335 -
ttctccaaaagtcaaaaaaa

SEQ ID NO: 48199 - DNA, 20 bp, Artificial Sequence
  Synthetic oligonucleotide; GAG chr11 5231330 5231349 5231333 -
ctccaaaagtcaaaaaaaaa

SEQ ID NO: 48200 - DNA, 20 bp, Artificial Sequence
  Synthetic oligonucleotide; TAG chr11 5231321 5231340 5231324 -
tcaaaaaaaaagagcaaata

SEQ ID NO: 48201 - DNA, 20 bp, Artificial Sequence
  Synthetic oligonucleotide; TAG chr11 5231290 5231309 5231293 -
accttctattcctacaccat

SEQ ID NO: 48202 - DNA, 20 bp, Artificial Sequence
  Synthetic oligonucleotide; AAG chr11 5231287 5231306 5231290 -
ttctattcctacaccattag

SEQ ID NO: 48203 - DNA, 20 bp, Artificial Sequence
  Synthetic oligonucleotide; TAG chr11 5231284 5231303 5231287 -
tattcctacaccattagaag

SEQ ID NO: 48204 - DNA, 20 bp, Artificial Sequence
  Synthetic oligonucleotide; CAG chr11 5231280 5231299 5231283 -
cctacaccattagaagtagt

SEQ ID NO: 48205 - DNA, 20 bp, Artificial Sequence
  Synthetic oligonucleotide; GAG chr11 5231276 5231295 5231279 -
caccattagaagtagtcagt

SEQ ID NO: 48206 - DNA, 20 bp, Artificial Sequence
  Synthetic oligonucleotide; TAG chr11 5231271 5231290 5231274 -
ttagaagtagtcagtgagtc

SEQ ID NO: 48207 - DNA, 20 bp, Artificial Sequence
  Synthetic oligonucleotide; AGG chr11 5231270 5231289 5231273 -
tagaagtagtcagtgagtct

SEQ ID NO: 48208 - DNA, 20 bp, Artificial Sequence
  Synthetic oligonucleotide; AAG chr11 5231266 5231285 5231269 -
agtagtcagtgagtctaggc

SEQ ID NO: 48209 - DNA, 20 bp, Artificial Sequence
  Synthetic oligonucleotide; TGG chr11 5231259 5231278 5231262 -
agtgagtctaggcaagatgt

SEQ ID NO: 48210 - DNA, 20 bp, Artificial Sequence
  Synthetic oligonucleotide; CAG chr11 5231238 5231257 5231241 -
ggccctaaaaatccaaatac

SEQ ID NO: 48211 - DNA, 20 bp, Artificial Sequence
  Synthetic oligonucleotide; GAG chr11 5231236 5231255 5231239 -
ccctaaaaatccaaatacca

SEQ ID NO: 48212 - DNA, 20 bp, Artificial Sequence
  Synthetic oligonucleotide; GAG chr11 5231226 5231245 5231229 -
ccaaataccagagaattcat

SEQ ID NO: 48213 - DNA, 20 bp, Artificial Sequence
  Synthetic oligonucleotide; TGG chr11 5231214 5231233 5231217 -
gaattcatgagaacatcacc

SEQ ID NO: 48214 - DNA, 20 bp, Artificial Sequence
  Synthetic oligonucleotide; TGG chr11 5231210 5231229 5231213 -
tcatgagaacatcacctgga

SEQ ID NO: 48215 - DNA, 20 bp, Artificial Sequence
  Synthetic oligonucleotide; GGG chr11 5231209 5231228 5231212 -
catgagaacatcacctggat

SEQ ID NO: 48216 - DNA, 20 bp, Artificial Sequence
  Synthetic oligonucleotide; GAG chr11 5231197 5231216 5231200 -
acctggatgggacatgtgcc

SEQ ID NO: 48217 - DNA, 20 bp, Artificial Sequence
  Synthetic oligonucleotide; TAG chr11 5231174 5231193 5231177 -
cacacacaattactatatgc

SEQ ID NO: 48218 - DNA, 20 bp, Artificial Sequence
  Synthetic oligonucleotide; AGG chr11 5231173 5231192 5231176 -
acacacaattactatatgct

SEQ ID NO: 48219 - DNA, 20 bp, Artificial Sequence
  Synthetic oligonucleotide; AAG chr11 5231151 5231170 5231154 -
gcattgctatcttcatattg

SEQ ID NO: 48220 - DNA, 20 bp, Artificial Sequence
  Synthetic oligonucleotide; GAG chr11 5231146 5231165 5231149 -
gctatcttcatattgaagat

SEQ ID NO: 48221 - DNA, 20 bp, Artificial Sequence
  Synthetic oligonucleotide; AGG chr11 5231145 5231164 5231148 -
ctatcttcatattgaagatg

SEQ ID NO: 48222 - DNA, 20 bp, Artificial Sequence
  Synthetic oligonucleotide; GAG chr11 5231143 5231162 5231146 -
atcttcatattgaagatgag

SEQ ID NO: 48223 - DNA, 20 bp, Artificial Sequence
  Synthetic oligonucleotide; AGG chr11 5231142 5231161 5231145 -
tcttcatattgaagatgagg

SEQ ID NO: 48224 - DNA, 20 bp, Artificial Sequence
  Synthetic oligonucleotide; AAG chr11 5231137 5231156 5231140 -
atattgaagatgaggaggtc

SEQ ID NO: 48225 - DNA, 20 bp, Artificial Sequence
  Synthetic oligonucleotide; GAG chr11 5231135 5231154 5231138 -
attgaagatgaggaggtcaa

SEQ ID NO: 48226 - DNA, 20 bp, Artificial Sequence
  Synthetic oligonucleotide; AAG chr11 5231125 5231144 5231128 -
aggaggtcaagagatgaaaa

SEQ ID NO: 48227 - DNA, 20 bp, Artificial Sequence
  Synthetic oligonucleotide; TGG chr11 5231119 5231138 5231122 -
tcaagagatgaaaaaagact

SEQ ID NO: 48228 - DNA, 20 bp, Artificial Sequence
  Synthetic oligonucleotide; TAG chr11 5231087 5231106 5231090 -
gttatattaaaattatttgt

SEQ ID NO: 48229 - DNA, 20 bp, Artificial Sequence
  Synthetic oligonucleotide; GAG chr11 5231085 5231104 5231088 -
tatattaaaattatttgtta

SEQ ID NO: 48230 - DNA, 20 bp, Artificial Sequence
  Synthetic oligonucleotide; TAG chr11 5231082 5231101 5231085 -
attaaaattatttgttagag

SEQ ID NO: 48231 - DNA, 20 bp, Artificial Sequence
  Synthetic oligonucleotide; GAG chr11 5231080 5231099 5231083 -
taaaattatttgttagagta

SEQ ID NO: 48232 - DNA, 20 bp, Artificial Sequence
  Synthetic oligonucleotide; AAG chr11 5231070 5231089 5231073 -
tgttagagtagagcttttgt

SEQ ID NO: 48233 - DNA, 20 bp, Artificial Sequence
  Synthetic oligonucleotide; GAG chr11 5231068 5231087 5231071 -
ttagagtagagcttttgtaa

SEQ ID NO: 48234 - DNA, 20 bp, Artificial Sequence
  Synthetic oligonucleotide; TAG chr11 5231063 5231082 5231066 -
gtagagcttttgtaagagtc

SEQ ID NO: 48235 - DNA, 20 bp, Artificial Sequence
  Synthetic oligonucleotide; AGG chr11 5231062 5231081 5231065 -
tagagcttttgtaagagtct

SEQ ID NO: 48236 - DNA, 20 bp, Artificial Sequence
  Synthetic oligonucleotide; GAG chr11 5231060 5231079 5231063 -
gagcttttgtaagagtctag

SEQ ID NO: 48237 - DNA, 20 bp, Artificial Sequence
  Synthetic oligonucleotide; TGG chr11 5231055 5231074 5231058 -
tttgtaagagtctaggagtg

SEQ ID NO: 48238 - DNA, 20 bp, Artificial Sequence
  Synthetic oligonucleotide; GGG chr11 5231054 5231073 5231057 -
ttgtaagagtctaggagtgt

SEQ ID NO: 48239 - DNA, 20 bp, Artificial Sequence
  Synthetic oligonucleotide; GAG chr11 5231052 5231071 5231055 -
gtaagagtctaggagtgtgg

SEQ ID NO: 48240 - DNA, 20 bp, Artificial Sequence
  Synthetic oligonucleotide; TGG chr11 5231032 5231051 5231035 -
gagctaaatgatgatacaca

SEQ ID NO: 48241 - DNA, 20 bp, Artificial Sequence
  Synthetic oligonucleotide; TAG chr11 5231019 5231038 5231022 -
atacacatggacacaaaaaa

SEQ ID NO: 48242 - DNA, 20 bp, Artificial Sequence
  Synthetic oligonucleotide; CAG chr11 5231011 5231030 5231014 -
ggacacaaaaaatagatcaa

SEQ ID NO: 48243 - DNA, 20 bp, Artificial Sequence
  Synthetic oligonucleotide; CAG chr11 5231003 5231022 5231006 -
aaaatagatcaacagacacc

SEQ ID NO: 48244 - DNA, 20 bp, Artificial Sequence
  Synthetic oligonucleotide; AGG chr11 5231002 5231021 5231005 -
aaatagatcaacagacaccc

SEQ ID NO: 48245 - DNA, 20 bp, Artificial Sequence
  Synthetic oligonucleotide; GAG chr11 5230992 5231011 5230995 -
acagacacccaggcctactt

SEQ ID NO: 48246 - DNA, 20 bp, Artificial Sequence
  Synthetic oligonucleotide; AGG chr11 5230991 5231010 5230994 -
cagacacccaggcctacttg

SEQ ID NO: 48247 - DNA, 20 bp, Artificial Sequence
  Synthetic oligonucleotide; GGG chr11 5230990 5231009 5230993 -
agacacccaggcctacttga

SEQ ID NO: 48248 - DNA, 20 bp, Artificial Sequence
  Synthetic oligonucleotide; GAG chr11 5230985 5231004 5230988 -
cccaggcctacttgagggtt

SEQ ID NO: 48249 - DNA, 20 bp, Artificial Sequence
  Synthetic oligonucleotide; AGG chr11 5230984 5231003 5230987 -
ccaggcctacttgagggttg

SEQ ID NO: 48250 - DNA, 20 bp, Artificial Sequence
  Synthetic oligonucleotide; GGG chr11 5230983 5231002 5230986 -
caggcctacttgagggttga

SEQ ID NO: 48251 - DNA, 20 bp, Artificial Sequence
  Synthetic oligonucleotide; TGG chr11 5230980 5230999 5230983 -
gcctacttgagggttgaggg

SEQ ID NO: 48252 - DNA, 20 bp, Artificial Sequence
  Synthetic oligonucleotide; GGG chr11 5230979 5230998 5230982 -
cctacttgagggttgagggt

SEQ ID NO: 48253 - DNA, 20 bp, Artificial Sequence
  Synthetic oligonucleotide; AAG chr11 5230976 5230995 5230979 -
acttgagggttgagggtggg

SEQ ID NO: 48254 - DNA, 20 bp, Artificial Sequence
  Synthetic oligonucleotide; GAG chr11 5230974 5230993 5230977 -
ttgagggttgagggtgggaa

SEQ ID NO: 48255 - DNA, 20 bp, Artificial Sequence
  Synthetic oligonucleotide; AGG chr11 5230973 5230992 5230976 -
tgagggttgagggtgggaag

SEQ ID NO: 48256 - DNA, 20 bp, Artificial Sequence
  Synthetic oligonucleotide; GGG chr11 5230972 5230991 5230975 -
gagggttgagggtgggaaga

SEQ ID NO: 48257 - DNA, 20 bp, Artificial Sequence
  Synthetic oligonucleotide; GAG chr11 5230970 5230989 5230973 -
gggttgagggtgggaagagg

SEQ ID NO: 48258 - DNA, 20 bp, Artificial Sequence
  Synthetic oligonucleotide; AAG chr11 5230958 5230977 5230961 -
ggaagagggagacgatgaaa

SEQ ID NO: 48259 - DNA, 20 bp, Artificial Sequence
  Synthetic oligonucleotide; TGG chr11 5230948 5230967 5230951 -
gacgatgaaaaagaacctat

SEQ ID NO: 48260 - DNA, 20 bp, Artificial Sequence
  Synthetic oligonucleotide; GGG chr11 5230947 5230966 5230950 -
acgatgaaaaagaacctatt

SEQ ID NO: 48261 - DNA, 20 bp, Artificial Sequence
  Synthetic oligonucleotide; AAG chr11 5230940 5230959 5230943 -
aaaagaacctattgggtatt

SEQ ID NO: 48262 - DNA, 20 bp, Artificial Sequence
  Synthetic oligonucleotide; GAG chr11 5230928 5230947 5230931 -
tgggtattaagttcatcact

SEQ ID NO: 48263 - DNA, 20 bp, Artificial Sequence
  Synthetic oligonucleotide; AAG chr11 5230904 5230923 5230907 -
gatgaaataatctgtacatc

SEQ ID NO: 48264 - DNA, 20 bp, Artificial Sequence
  Synthetic oligonucleotide; CAG chr11 5230898 5230917 5230901 -
ataatctgtacatcaagacc

SEQ ID NO: 48265 - DNA, 20 bp, Artificial Sequence
  Synthetic oligonucleotide; AAG chr11 5230842 5230861 5230845 -
tacccccaaatttaaaatga

SEQ ID NO: 48266 - DNA, 20 bp, Artificial Sequence
  Synthetic oligonucleotide; AAG chr11 5230831 5230850 5230834 -
ttaaaatgaaagttaaaaca

SEQ ID NO: 48267 - DNA, 20 bp, Artificial Sequence
  Synthetic oligonucleotide; TAG chr11 5230826 5230845 5230829 -
atgaaagttaaaacaaagta

SEQ ID NO: 48268 - DNA, 20 bp, Artificial Sequence
  Synthetic oligonucleotide; AGG chr11 5230825 5230844 5230828 -
tgaaagttaaaacaaagtat

SEQ ID NO: 48269 - DNA, 20 bp, Artificial Sequence
  Synthetic oligonucleotide; TGG chr11 5230820 5230839 5230823 -
gttaaaacaaagtataggaa

SEQ ID NO: 48270 - DNA, 20 bp, Artificial Sequence
  Synthetic oligonucleotide; AAG chr11 5230805 5230824 5230808 -
aggaatggaattaattcctc

SEQ ID NO: 48271 - DNA, 20 bp, Artificial Sequence
  Synthetic oligonucleotide; TGG chr11 5230799 5230818 5230802 -
ggaattaattcctcaagatt

SEQ ID NO: 48272 - DNA, 20 bp, Artificial Sequence
  Synthetic oligonucleotide; TGG chr11 5230768 5230787 5230771 -
ttatttgataatttatcaaa

SEQ ID NO: 48273 - DNA, 20 bp, Artificial Sequence
  Synthetic oligonucleotide; TGG chr11 5230745 5230764 5230748 -
ttgtttttcttttctcacta

SEQ ID NO: 48274 - DNA, 20 bp, Artificial Sequence
  Synthetic oligonucleotide; CAG chr11 5230721 5230740 5230724 -
gttgctttataaactatgtt

SEQ ID NO: 48275 - DNA, 20 bp, Artificial Sequence
  Synthetic oligonucleotide; AAG chr11 5230705 5230724 5230708 -
tgttcagtatgtctgaatga

SEQ ID NO: 48276 - DNA, 20 bp, Artificial Sequence
  Synthetic oligonucleotide; AGG chr11 5230704 5230723 5230707 -
gttcagtatgtctgaatgaa

SEQ ID NO: 48277 - DNA, 20 bp, Artificial Sequence
  Synthetic oligonucleotide; GGG chr11 5230703 5230722 5230706 -
ttcagtatgtctgaatgaaa

SEQ ID NO: 48278 - DNA, 20 bp, Artificial Sequence
  Synthetic oligonucleotide; AAG chr11 5230685 5230704 5230688 -
aagggtgtgtgtgtgtgtga

SEQ ID NO: 48279 - DNA, 20 bp, Artificial Sequence
  Synthetic oligonucleotide; GAG chr11 5230683 5230702 5230686 -
gggtgtgtgtgtgtgtgaaa

SEQ ID NO: 48280 - DNA, 20 bp, Artificial Sequence
  Synthetic oligonucleotide; GAG chr11 5230681 5230700 5230684 -
gtgtgtgtgtgtgtgaaaga

SEQ ID NO: 48281 - DNA, 20 bp, Artificial Sequence
  Synthetic oligonucleotide; AGG chr11 5230680 5230699 5230683 -
tgtgtgtgtgtgtgaaagag

SEQ ID NO: 48282 - DNA, 20 bp, Artificial Sequence
  Synthetic oligonucleotide; GGG chr11 5230679 5230698 5230682 -
gtgtgtgtgtgtgaaagaga

SEQ ID NO: 48283 - DNA, 20 bp, Artificial Sequence
  Synthetic oligonucleotide; GAG chr11 5230677 5230696 5230680 -
gtgtgtgtgtgaaagagagg

SEQ ID NO: 48284 - DNA, 20 bp, Artificial Sequence
  Synthetic oligonucleotide; GAG chr11 5230675 5230694 5230678 -
gtgtgtgtgaaagagaggga

SEQ ID NO: 48285 - DNA, 20 bp, Artificial Sequence
  Synthetic oligonucleotide; GAG chr11 5230673 5230692 5230676 -
gtgtgtgaaagagagggaga

SEQ ID NO: 48286 - DNA, 20 bp, Artificial Sequence
  Synthetic oligonucleotide; AGG chr11 5230672 5230691 5230675 -
tgtgtgaaagagagggagag

SEQ ID NO: 48287 - DNA, 20 bp, Artificial Sequence
  Synthetic oligonucleotide; AAG chr11 5230669 5230688 5230672 -
gtgaaagagagggagagagg

SEQ ID NO: 48288 - DNA, 20 bp, Artificial Sequence
  Synthetic oligonucleotide; AGG chr11 5230668 5230687 5230671 -
tgaaagagagggagagagga

SEQ ID NO: 48289 - DNA, 20 bp, Artificial Sequence
  Synthetic oligonucleotide; GGG chr11 5230667 5230686 5230670 -
gaaagagagggagagaggaa

SEQ ID NO: 48290 - DNA, 20 bp, Artificial Sequence
  Synthetic oligonucleotide; AAG chr11 5230664 5230683 5230667 -
agagagggagagaggaaggg

SEQ ID NO: 48291 - DNA, 20 bp, Artificial Sequence
  Synthetic oligonucleotide; GAG chr11 5230662 5230681 5230665 -
agagggagagaggaagggaa

SEQ ID NO: 48292 - DNA, 20 bp, Artificial Sequence
  Synthetic oligonucleotide; GAG chr11 5230660 5230679 5230663 -
agggagagaggaagggaaga

SEQ ID NO: 48293 - DNA, 20 bp, Artificial Sequence
  Synthetic oligonucleotide; AGG chr11 5230659 5230678 5230662 -
gggagagaggaagggaagag

SEQ ID NO: 48294 - DNA, 20 bp, Artificial Sequence
  Synthetic oligonucleotide; GAG chr11 5230638 5230657 5230641 -
ggacgtaataatgtgaattt

SEQ ID NO: 48295 - DNA, 20 bp, Artificial Sequence
  Synthetic oligonucleotide; CAG chr11 5230601 5230620 5230604 -
tcaataaaataatttaatgt

SEQ ID NO: 48296 - DNA, 20 bp, Artificial Sequence
  Synthetic oligonucleotide; AGG chr11 5230600 5230619 5230603 -
caataaaataatttaatgtc

SEQ ID NO: 48297 - DNA, 20 bp, Artificial Sequence
  Synthetic oligonucleotide; GAG chr11 5230598 5230617 5230601 -
ataaaataatttaatgtcag

SEQ ID NO: 48298 - DNA, 20 bp, Artificial Sequence
  Synthetic oligonucleotide; AAG chr11 5230591 5230610 5230594 -
aatttaatgtcaggagaatt

SEQ ID NO: 48299 - DNA, 20 bp, Artificial Sequence
  Synthetic oligonucleotide; TAG chr11 5230583 5230602 5230586 -
gtcaggagaattaagcctaa

SEQ ID NO: 48300 - DNA, 20 bp, Artificial Sequence
  Synthetic oligonucleotide; GAG chr11 5230558 5230577 5230561 -
tcctaaatcatccatctctt

SEQ ID NO: 48301 - DNA, 20 bp, Artificial Sequence
  Synthetic oligonucleotide; CAG chr11 5230552 5230571 5230555 -
atcatccatctcttgagctt

SEQ ID NO: 48302 - DNA, 20 bp, Artificial Sequence
  Synthetic oligonucleotide; GAG chr11 5230550 5230569 5230553 -
catccatctcttgagcttca

SEQ ID NO: 48303 - DNA, 20 bp, Artificial Sequence
  Synthetic oligonucleotide; CAG chr11 5230547 5230566 5230550 -
ccatctcttgagcttcagag

SEQ ID NO: 48304 - DNA, 20 bp, Artificial Sequence
  Synthetic oligonucleotide; AAG chr11 5230515 5230534 5230518 -
ttaatgcctacatgtttgta

SEQ ID NO: 48305 - DNA, 20 bp, Artificial Sequence
  Synthetic oligonucleotide; AGG chr11 5230514 5230533 5230517 -
taatgcctacatgtttgtaa

SEQ ID NO: 48306 - DNA, 20 bp, Artificial Sequence
  Synthetic oligonucleotide; GGG chr11 5230513 5230532 5230516 -
aatgcctacatgtttgtaaa

SEQ ID NO: 48307 - DNA, 20 bp, Artificial Sequence
  Synthetic oligonucleotide; CAG chr11 5230506 5230525 5230509 -
acatgtttgtaaagggtgtt

SEQ ID NO: 48308 - DNA, 20 bp, Artificial Sequence
  Synthetic oligonucleotide; AAG chr11 5230499 5230518 5230502 -
tgtaaagggtgttcagactg

SEQ ID NO: 48309 - DNA, 20 bp, Artificial Sequence
  Synthetic oligonucleotide; AAG chr11 5230494 5230513 5230497 -
agggtgttcagactgaagcc

SEQ ID NO: 48310 - DNA, 20 bp, Artificial Sequence
  Synthetic oligonucleotide; AAG chr11 5230479 5230498 5230482 -
aagccaagattctacctcta

SEQ ID NO: 48311 - DNA, 20 bp, Artificial Sequence
  Synthetic oligonucleotide; GAG chr11 5230477 5230496 5230480 -
gccaagattctacctctaaa

SEQ ID NO: 48312 - DNA, 20 bp, Artificial Sequence
  Synthetic oligonucleotide; AAG chr11 5230453 5230472 5230456 -
tgcaatctcaaatttatctg

SEQ ID NO: 48313 - DNA, 20 bp, Artificial Sequence
  Synthetic oligonucleotide; TGG chr11 5230418 5230437 5230421 -
ctctccataaattgacacca

SEQ ID NO: 48314 - DNA, 20 bp, Artificial Sequence
  Synthetic oligonucleotide; GAG chr11 5230405 5230424 5230408 -
gacaccatggcccacttaat

SEQ ID NO: 48315 - DNA, 20 bp, Artificial Sequence
  Synthetic oligonucleotide; AGG chr11 5230404 5230423 5230407 -
acaccatggcccacttaatg

SEQ ID NO: 48316 - DNA, 20 bp, Artificial Sequence
  Synthetic oligonucleotide; AAG chr11 5230393 5230412 5230396 -
cacttaatgaggttaaaaaa

SEQ ID NO: 48317 - DNA, 20 bp, Artificial Sequence
  Synthetic oligonucleotide; GAG chr11 5230370 5230389 5230373 -
ctaattctgaatgaaaatct

SEQ ID NO: 48318 - DNA, 20 bp, Artificial Sequence
  Synthetic oligonucleotide; CAG chr11 5230365 5230384 5230368 -
tctgaatgaaaatctgagcc

SEQ ID NO: 48319 - DNA, 20 bp, Artificial Sequence
  Synthetic oligonucleotide; TGG chr11 5230362 5230381 5230365 -
gaatgaaaatctgagcccag

SEQ ID NO: 48320 - DNA, 20 bp, Artificial Sequence
  Synthetic oligonucleotide; GAG chr11 5230360 5230379 5230363 -
atgaaaatctgagcccagtg

SEQ ID NO: 48321 - DNA, 20 bp, Artificial Sequence
  Synthetic oligonucleotide; AGG chr11 5230359 5230378 5230362 -
tgaaaatctgagcccagtgg

SEQ ID NO: 48322 - DNA, 20 bp, Artificial Sequence
  Synthetic oligonucleotide; AAG chr11 5230342 5230361 5230345 -
tggaggaaatattaatgaac

SEQ ID NO: 48323 - DNA, 20 bp, Artificial Sequence
  Synthetic oligonucleotide; AGG chr11 5230341 5230360 5230344 -
ggaggaaatattaatgaaca

SEQ ID NO: 48324 - DNA, 20 bp, Artificial Sequence
  Synthetic oligonucleotide; CAG chr11 5230336 5230355 5230339 -
aaatattaatgaacaaggtg

SEQ ID NO: 48325 - DNA, 20 bp, Artificial Sequence
  Synthetic oligonucleotide; TAG chr11 5230292 5230311 5230295 -
taataattatgcatatactt

SEQ ID NO: 48326 - DNA, 20 bp, Artificial Sequence
  Synthetic oligonucleotide; AAG chr11 5230287 5230306 5230290 -
attatgcatatactttagca

SEQ ID NO: 48327 - DNA, 20 bp, Artificial Sequence
  Synthetic oligonucleotide; TGG chr11 5230256 5230275 5230259 -
atgttgactttattgctttt

SEQ ID NO: 48328 - DNA, 20 bp, Artificial Sequence
  Synthetic oligonucleotide; AAG chr11 5230252 5230271 5230255 -
tgactttattgctttttggt

SEQ ID NO: 48329 - DNA, 20 bp, Artificial Sequence
  Synthetic oligonucleotide; AAG chr11 5230234 5230253 5230237 -
gtaagaaatacaacttttta

SEQ ID NO: 48330 - DNA, 20 bp, Artificial Sequence
  Synthetic oligonucleotide; CGG chr11 5230190 5230209 5230193 -
caaactattttgtgtgtgtg

SEQ ID NO: 48331 - DNA, 20 bp, Artificial Sequence
  Synthetic oligonucleotide; TGG chr11 5230177 5230196 5230180 -
gtgtgtgcggtttgtttcta

SEQ ID NO: 48332 - DNA, 20 bp, Artificial Sequence
  Synthetic oligonucleotide; GGG chr11 5230176 5230195 5230179 -
tgtgtgcggtttgtttctat

SEQ ID NO: 48333 - DNA, 20 bp, Artificial Sequence
  Synthetic oligonucleotide; TGG chr11 5230170 5230189 5230173 -
cggtttgtttctatgggttc

SEQ ID NO: 48334 - DNA, 20 bp, Artificial Sequence
  Synthetic oligonucleotide; TGG chr11 5230161 5230180 5230164 -
tctatgggttctggttttct

SEQ ID NO: 48335 - DNA, 20 bp, Artificial Sequence
  Synthetic oligonucleotide; GAG chr11 5230159 5230178 5230162 -
tatgggttctggttttcttg

SEQ ID NO: 48336 - DNA, 20 bp, Artificial Sequence
  Synthetic oligonucleotide; GAG chr11 5230125 5230144 5230128 -
cattttaattaattaattct

SEQ ID NO: 48337 - DNA, 20 bp, Artificial Sequence
  Synthetic oligonucleotide; GAG chr11 5230123 5230142 5230126 -
ttttaattaattaattctga

SEQ ID NO: 48338 - DNA, 20 bp, Artificial Sequence
  Synthetic oligonucleotide; GAG chr11 5230115 5230134 5230118 -
aattaattctgagagctgct

SEQ ID NO: 48339 - DNA, 20 bp, Artificial Sequence
  Synthetic oligonucleotide; GAG chr11 5230101 5230120 5230104 -
gctgctgagttgtgtttact

SEQ ID NO: 48340 - DNA, 20 bp, Artificial Sequence
  Synthetic oligonucleotide; GAG chr11 5230099 5230118 5230102 -
tgctgagttgtgtttactga

SEQ ID NO: 48341 - DNA, 20 bp, Artificial Sequence
  Synthetic oligonucleotide; GAG chr11 5230083 5230102 5230086 -
ctgagagattgtgtatctgc

SEQ ID NO: 48342 - DNA, 20 bp, Artificial Sequence
  Synthetic oligonucleotide; GAG chr11 5230081 5230100 5230084 -
gagagattgtgtatctgcga

SEQ ID NO: 48343 - DNA, 20 bp, Artificial Sequence
  Synthetic oligonucleotide; AAG chr11 5230078 5230097 5230081 -
agattgtgtatctgcgagag

SEQ ID NO: 48344 - DNA, 20 bp, Artificial Sequence
  Synthetic oligonucleotide; TAG chr11 5230071 5230090 5230074 -
gtatctgcgagagaagtctg

SEQ ID NO: 48345 - DNA, 20 bp, Artificial Sequence
  Synthetic oligonucleotide; AAG chr11 5230067 5230086 5230070 -
ctgcgagagaagtctgtagc

SEQ ID NO: 48346 - DNA, 20 bp, Artificial Sequence
  Synthetic oligonucleotide; TAG chr11 5230064 5230083 5230067 -
cgagagaagtctgtagcaag

SEQ ID NO: 48347 - DNA, 20 bp, Artificial Sequence
  Synthetic oligonucleotide; TAG chr11 5230060 5230079 5230063 -
agaagtctgtagcaagtagc

SEQ ID NO: 48348 - DNA, 20 bp, Artificial Sequence
  Synthetic oligonucleotide; TAG chr11 5230044 5230063 5230047 -
tagctagactgtgcttgacc

SEQ ID NO: 48349 - DNA, 20 bp, Artificial Sequence
  Synthetic oligonucleotide; AGG chr11 5230043 5230062 5230046 -
agctagactgtgcttgacct

SEQ ID NO: 48350 - DNA, 20 bp, Artificial Sequence
  Synthetic oligonucleotide; CAG chr11 5230032 5230051 5230035 -
gcttgacctaggaacatata

SEQ ID NO: 48351 - DNA, 20 bp, Artificial Sequence
  Synthetic oligonucleotide; TAG chr11 5230029 5230048 5230032 -
tgacctaggaacatatacag

SEQ ID NO: 48352 - DNA, 20 bp, Artificial Sequence
  Synthetic oligonucleotide; TGG chr11 5230007 5230026 5230010 -
gattgctaaaatgtctcact

SEQ ID NO: 48353 - DNA, 20 bp, Artificial Sequence
  Synthetic oligonucleotide; GGG chr11 5230006 5230025 5230009 -
attgctaaaatgtctcactt

SEQ ID NO: 48354 - DNA, 20 bp, Artificial Sequence
  Synthetic oligonucleotide; GGG chr11 5230005 5230024 5230008 -
ttgctaaaatgtctcacttg

SEQ ID NO: 48355 - DNA, 20 bp, Artificial Sequence
  Synthetic oligonucleotide; TAG chr11 5229997 5230016 5230000 -
atgtctcacttggggaattt

SEQ ID NO: 48356 - DNA, 20 bp, Artificial Sequence
  Synthetic oligonucleotide; CAG chr11 5229988 5230007 5229991 -
ttggggaattttagactaaa

SEQ ID NO: 48357 - DNA, 20 bp, Artificial Sequence
  Synthetic oligonucleotide; TAG chr11 5229985 5230004 5229988 -
gggaattttagactaaacag

SEQ ID NO: 48358 - DNA, 20 bp, Artificial Sequence
  Synthetic oligonucleotide; GAG chr11 5229983 5230002 5229986 -
gaattttagactaaacagta

SEQ ID NO: 48359 - DNA, 20 bp, Artificial Sequence
  Synthetic oligonucleotide; TAG chr11 5229963 5229982 5229966 -
gagcatgtataaaaatactc

SEQ ID NO: 48360 - DNA, 20 bp, Artificial Sequence
  Synthetic oligonucleotide; AAG chr11 5229958 5229977 5229961 -
tgtataaaaatactctagtc

SEQ ID NO: 48361 - DNA, 20 bp, Artificial Sequence
  Synthetic oligonucleotide; TAG chr11 5229918 5229937 5229921 -
atgataaaaccacactccca

SEQ ID NO: 48362 - DNA, 20 bp, Artificial Sequence
  Synthetic oligonucleotide; GAG chr11 5229913 5229932 5229916 -
aaaaccacactcccatagat

SEQ ID NO: 48363 - DNA, 20 bp, Artificial Sequence
  Synthetic oligonucleotide; TGG chr11 5229896 5229915 5229899 -
gatgagtgtcatgattttca

SEQ ID NO: 48364 - DNA, 20 bp, Artificial Sequence
  Synthetic oligonucleotide; GAG chr11 5229894 5229913 5229897 -
tgagtgtcatgattttcatg

SEQ ID NO: 48365 - DNA, 20 bp, Artificial Sequence
  Synthetic oligonucleotide; AGG chr11 5229893 5229912 5229896 -
gagtgtcatgattttcatgg

SEQ ID NO: 48366 - DNA, 20 bp, Artificial Sequence
  Synthetic oligonucleotide; AAG chr11 5229890 5229909 5229893 -
tgtcatgattttcatggagg

SEQ ID NO: 48367 - DNA, 20 bp, Artificial Sequence
  Synthetic oligonucleotide; AAG chr11 5229871 5229890 5229874 -
gaagttaatattcatcctct

SEQ ID NO: 48368 - DNA, 20 bp, Artificial Sequence
  Synthetic oligonucleotide; CAG chr11 5229862 5229881 5229865 -
attcatcctctaagtatacc

SEQ ID NO: 48369 - DNA, 20 bp, Artificial Sequence
  Synthetic oligonucleotide; TAG chr11 5229857 5229876 5229860 -
tcctctaagtatacccagac

SEQ ID NO: 48370 - DNA, 20 bp, Artificial Sequence
  Synthetic oligonucleotide; AGG chr11 5229856 5229875 5229859 -
cctctaagtatacccagact

SEQ ID NO: 48371 - DNA, 20 bp, Artificial Sequence
  Synthetic oligonucleotide; GGG chr11 5229855 5229874 5229858 -
ctctaagtatacccagacta

SEQ ID NO: 48372 - DNA, 20 bp, Artificial Sequence
  Synthetic oligonucleotide; TAG chr11 5229833 5229852 5229836 -
gccattctgatataaaacat

SEQ ID NO: 48373 - DNA, 20 bp, Artificial Sequence
  Synthetic oligonucleotide; AGG chr11 5229832 5229851 5229835 -
ccattctgatataaaacatt

SEQ ID NO: 48374 - DNA, 20 bp, Artificial Sequence
  Synthetic oligonucleotide; AAG chr11 5229825 5229844 5229828 -
gatataaaacattaggactt

SEQ ID NO: 48375 - DNA, 20 bp, Artificial Sequence
  Synthetic oligonucleotide; AAG chr11 5229821 5229840 5229824 -
taaaacattaggacttaaga

SEQ ID NO: 48376 - DNA, 20 bp, Artificial Sequence
  Synthetic oligonucleotide; TAG chr11 5229813 5229832 5229816 -
taggacttaagaaagattaa

SEQ ID NO: 48377 - DNA, 20 bp, Artificial Sequence
  Synthetic oligonucleotide; TGG chr11 5229808 5229827 5229811 -
cttaagaaagattaatagac

SEQ ID NO: 48378 - DNA, 20 bp, Artificial Sequence
  Synthetic oligonucleotide; GAG chr11 5229806 5229825 5229809 -
taagaaagattaatagactg

SEQ ID NO: 48379 - DNA, 20 bp, Artificial Sequence
  Synthetic oligonucleotide; AAG chr11 5229801 5229820 5229804 -
aagattaatagactggagta

SEQ ID NO: 48380 - DNA, 20 bp, Artificial Sequence
  Synthetic oligonucleotide; AGG chr11 5229800 5229819 5229803 -
agattaatagactggagtaa

SEQ ID NO: 48381 - DNA, 20 bp, Artificial Sequence
  Synthetic oligonucleotide; TGG chr11 5229794 5229813 5229797 -
atagactggagtaaaggaaa

SEQ ID NO: 48382 - DNA, 20 bp, Artificial Sequence
  Synthetic oligonucleotide; GAG chr11 5229762 5229781 5229765 -
tctctcgctgtctctttttt

SEQ ID NO: 48383 - DNA, 20 bp, Artificial Sequence
  Synthetic oligonucleotide; AGG chr11 5229761 5229780 5229764 -
ctctcgctgtctcttttttg

SEQ ID NO: 48384 - DNA, 20 bp, Artificial Sequence
  Synthetic oligonucleotide; TGG chr11 5229718 5229737 5229721 -
gtgtgtgtgtgtgtgtgttg

SEQ ID NO: 48385 - DNA, 20 bp, Artificial Sequence
  Synthetic oligonucleotide; CAG chr11 5229714 5229733 5229717 -
gtgtgtgtgtgtgttgtggt

SEQ ID NO: 48386 - DNA, 20 bp, Artificial Sequence
  Synthetic oligonucleotide; TGG chr11 5229711 5229730 5229714 -
tgtgtgtgtgttgtggtcag

SEQ ID NO: 48387 - DNA, 20 bp, Artificial Sequence
  Synthetic oligonucleotide; GGG chr11 5229710 5229729 5229713 -
gtgtgtgtgttgtggtcagt

SEQ ID NO: 48388 - DNA, 20 bp, Artificial Sequence
  Synthetic oligonucleotide; GGG chr11 5229709 5229728 5229712 -
tgtgtgtgttgtggtcagtg

SEQ ID NO: 48389 - DNA, 20 bp, Artificial Sequence
  Synthetic oligonucleotide; TGG chr11 5229705 5229724 5229708 -
tgtgttgtggtcagtggggc

SEQ ID NO: 48390 - DNA, 20 bp, Artificial Sequence
  Synthetic oligonucleotide; AAG chr11 5229697 5229716 5229700 -
ggtcagtggggctggaataa

SEQ ID NO: 48391 - DNA, 20 bp, Artificial Sequence
  Synthetic oligonucleotide; TAG chr11 5229694 5229713 5229697 -
cagtggggctggaataaaag

SEQ ID NO: 48392 - DNA, 20 bp, Artificial Sequence
  Synthetic oligonucleotide; TAG chr11 5229689 5229708 5229692 -
gggctggaataaaagtagaa

SEQ ID NO: 48393 - DNA, 20 bp, Artificial Sequence
  Synthetic oligonucleotide; TGG chr11 5229672 5229691 5229675 -
gaatagacctgcacctgctg

SEQ ID NO: 48394 - DNA, 20 bp, Artificial Sequence
  Synthetic oligonucleotide; CAG chr11 5229659 5229678 5229662 -
cctgctgtggcatccattca

SEQ ID NO: 48395 - DNA, 20 bp, Artificial Sequence
  Synthetic oligonucleotide; GAG chr11 5229657 5229676 5229660 -
tgctgtggcatccattcaca

SEQ ID NO: 48396 - DNA, 20 bp, Artificial Sequence
  Synthetic oligonucleotide; TAG chr11 5229654 5229673 5229657 -
tgtggcatccattcacagag

SEQ ID NO: 48397 - DNA, 20 bp, Artificial Sequence
  Synthetic oligonucleotide; AAG chr11 5229651 5229670 5229654 -
ggcatccattcacagagtag

SEQ ID NO: 48398 - DNA, 20 bp, Artificial Sequence
  Synthetic oligonucleotide; AAG chr11 5229647 5229666 5229650 -
tccattcacagagtagaagc

SEQ ID NO: 48399 - DNA, 20 bp, Artificial Sequence
  Synthetic oligonucleotide; TAG chr11 5229637 5229656 5229640 -
gagtagaagcaagctcacaa

SEQ ID NO: 48400 - DNA, 20 bp, Artificial Sequence
  Synthetic oligonucleotide; AAG chr11 5229632 5229651 5229635 -
gaagcaagctcacaatagtg

SEQ ID NO: 48401 - DNA, 20 bp, Artificial Sequence
  Synthetic oligonucleotide; CAG chr11 5229625 5229644 5229628 -
gctcacaatagtgaagatgt

SEQ ID NO: 48402 - DNA, 20 bp, Artificial Sequence
  Synthetic oligonucleotide; AAG chr11 5229621 5229640 5229624 -
acaatagtgaagatgtcagt

SEQ ID NO: 48403 - DNA, 20 bp, Artificial Sequence
  Synthetic oligonucleotide; TAG chr11 5229612 5229631 5229615 -
aagatgtcagtaagcttgaa

SEQ ID NO: 48404 - DNA, 20 bp, Artificial Sequence
  Synthetic oligonucleotide; CAG chr11 5229604 5229623 5229607 -
agtaagcttgaatagttttt

SEQ ID NO: 48405 - DNA, 20 bp, Artificial Sequence
  Synthetic oligonucleotide; AGG chr11 5229603 5229622 5229606 -
gtaagcttgaatagtttttc

SEQ ID NO: 48406 - DNA, 20 bp, Artificial Sequence
  Synthetic oligonucleotide; TAG chr11 5229583 5229602 5229586 -
aggaactttgaatgctgatt

SEQ ID NO: 48407 - DNA, 20 bp, Artificial Sequence
  Synthetic oligonucleotide; GAG chr11 5229570 5229589 5229573 -
gctgatttagatttgaaact

SEQ ID NO: 48408 - DNA, 20 bp, Artificial Sequence
  Synthetic oligonucleotide; AGG chr11 5229569 5229588 5229572 -
ctgatttagatttgaaactg

SEQ ID NO: 48409 - DNA, 20 bp, Artificial Sequence
  Synthetic oligonucleotide; TGG chr11 5229513 5229532 5229516 -
cttcttgaaacttatttgcc

SEQ ID NO: 48410 - DNA, 20 bp, Artificial Sequence
  Synthetic oligonucleotide; TGG chr11 5229504 5229523 5229507 -
acttatttgcctggtatgcc

SEQ ID NO: 48411 - DNA, 20 bp, Artificial Sequence
  Synthetic oligonucleotide; GGG chr11 5229503 5229522 5229506 -
cttatttgcctggtatgcct

SEQ ID NO: 48412 - DNA, 20 bp, Artificial Sequence
  Synthetic oligonucleotide; TGG chr11 5229493 5229512 5229496 -
tggtatgcctgggcttttga

SEQ ID NO: 48413 - DNA, 20 bp, Artificial Sequence
  Synthetic oligonucleotide; TAG chr11 5229487 5229506 5229490 -
gcctgggcttttgatggtct

SEQ ID NO: 48414 - DNA, 20 bp, Artificial Sequence
  Synthetic oligonucleotide; TAG chr11 5229482 5229501 5229485 -
ggcttttgatggtcttagta

SEQ ID NO: 48415 - DNA, 20 bp, Artificial Sequence
  Synthetic oligonucleotide; CAG chr11 5229475 5229494 5229478 -
gatggtcttagtatagcttg

SEQ ID NO: 48416 - DNA, 20 bp, Artificial Sequence
  Synthetic oligonucleotide; CAG chr11 5229461 5229480 5229464 -
agcttgcagccttgtccctg

SEQ ID NO: 48417 - DNA, 20 bp, Artificial Sequence
  Synthetic oligonucleotide; AGG chr11 5229460 5229479 5229463 -
gcttgcagccttgtccctgc

SEQ ID NO: 48418 - DNA, 20 bp, Artificial Sequence
  Synthetic oligonucleotide; GGG chr11 5229459 5229478 5229462 -
cttgcagccttgtccctgca

SEQ ID NO: 48419 - DNA, 20 bp, Artificial Sequence
  Synthetic oligonucleotide; TGG chr11 5229451 5229470 5229454 -
cttgtccctgcagggtatta

SEQ ID NO: 48420 - DNA, 20 bp, Artificial Sequence
  Synthetic oligonucleotide; GGG chr11 5229450 5229469 5229453 -
ttgtccctgcagggtattat

SEQ ID NO: 48421 - DNA, 20 bp, Artificial Sequence
  Synthetic oligonucleotide; TAG chr11 5229444 5229463 5229447 -
ctgcagggtattatgggtaa

SEQ ID NO: 48422 - DNA, 20 bp, Artificial Sequence
  Synthetic oligonucleotide; AAG chr11 5229440 5229459 5229443 -
agggtattatgggtaataga

SEQ ID NO: 48423 - DNA, 20 bp, Artificial Sequence
  Synthetic oligonucleotide; AAG chr11 5229435 5229454 5229438 -
attatgggtaatagaaagaa

SEQ ID NO: 48424 - DNA, 20 bp, Artificial Sequence
  Synthetic oligonucleotide; TAG chr11 5229418 5229437 5229421 -
gaaaagtctgcgttacactc

SEQ ID NO: 48425 - DNA, 20 bp, Artificial Sequence
  Synthetic oligonucleotide; AAG chr11 5229408 5229427 5229411 -
cgttacactctagtcacact

SEQ ID NO: 48426 - DNA, 20 bp, Artificial Sequence
  Synthetic oligonucleotide; TGG chr11 5229395 5229414 5229398 -
tcacactaagtaactaccat

SEQ ID NO: 48427 - DNA, 20 bp, Artificial Sequence
  Synthetic oligonucleotide; AAG chr11 5229390 5229409 5229393 -
ctaagtaactaccattggaa

SEQ ID NO: 48428 - DNA, 20 bp, Artificial Sequence
  Synthetic oligonucleotide; AAG chr11 5229373 5229392 5229376 -
gaaaagcaacccctgccttg

SEQ ID NO: 48429 - DNA, 20 bp, Artificial Sequence
  Synthetic oligonucleotide; CAG chr11 5229369 5229388 5229372 -
agcaacccctgccttgaagc

SEQ ID NO: 48430 - DNA, 20 bp, Artificial Sequence
  Synthetic oligonucleotide; AGG chr11 5229368 5229387 5229371 -
gcaacccctgccttgaagcc

SEQ ID NO: 48431 - DNA, 20 bp, Artificial Sequence
  Synthetic oligonucleotide; TGG chr11 5229361 5229380 5229364 -
ctgccttgaagccaggatga

SEQ ID NO: 48432 - DNA, 20 bp, Artificial Sequence
  Synthetic oligonucleotide; CAG chr11 5229352 5229371 5229355 -
agccaggatgatggtatctg

SEQ ID NO: 48433 - DNA, 20 bp, Artificial Sequence
  Synthetic oligonucleotide; CAG chr11 5229349 5229368 5229352 -
caggatgatggtatctgcag

SEQ ID NO: 48434 - DNA, 20 bp, Artificial Sequence
  Synthetic oligonucleotide; AAG chr11 5229336 5229355 5229339 -
tctgcagcagttgccaacac

SEQ ID NO: 48435 - DNA, 20 bp, Artificial Sequence
  Synthetic oligonucleotide; GAG chr11 5229334 5229353 5229337 -
tgcagcagttgccaacacaa

SEQ ID NO: 48436 - DNA, 20 bp, Artificial Sequence
  Synthetic oligonucleotide; AAG chr11 5229331 5229350 5229334 -
agcagttgccaacacaagag

SEQ ID NO: 48437 - DNA, 20 bp, Artificial Sequence
  Synthetic oligonucleotide; AGG chr11 5229330 5229349 5229333 -
gcagttgccaacacaagaga

SEQ ID NO: 48438 - DNA, 20 bp, Artificial Sequence
  Synthetic oligonucleotide; TAG chr11 5229322 5229341 5229325 -
caacacaagagaaggatcca

SEQ ID NO: 48439 - DNA, 20 bp, Artificial Sequence
  Synthetic oligonucleotide; AAG chr11 5229305 5229324 5229308 -
ccatagttcatcatttaaaa

SEQ ID NO: 48440 - DNA, 20 bp, Artificial Sequence
  Synthetic oligonucleotide; TAG chr11 5229293 5229312 5229296 -
atttaaaaaagaaaacaaaa

SEQ ID NO: 48441 - DNA, 20 bp, Artificial Sequence
  Synthetic oligonucleotide; AAG chr11 5229287 5229306 5229290 -
aaaagaaaacaaaatagaaa

SEQ ID NO: 48442 - DNA, 20 bp, Artificial Sequence
  Synthetic oligonucleotide; AGG chr11 5229286 5229305 5229289 -
aaagaaaacaaaatagaaaa

SEQ ID NO: 48443 - DNA, 20 bp, Artificial Sequence
  Synthetic oligonucleotide; GAG chr11 5229271 5229290 5229274 -
gaaaaaggaaaactatttct

SEQ ID NO: 48444 - DNA, 20 bp, Artificial Sequence
  Synthetic oligonucleotide; AAG chr11 5229265 5229284 5229268 -
ggaaaactatttctgagcat

SEQ ID NO: 48445 - DNA, 20 bp, Artificial Sequence
  Synthetic oligonucleotide; AAG chr11 5229262 5229281 5229265 -
aaactatttctgagcataag

SEQ ID NO: 48446 - DNA, 20 bp, Artificial Sequence
  Synthetic oligonucleotide; TAG chr11 5229256 5229275 5229259 -
tttctgagcataagaagttg

SEQ ID NO: 48447 - DNA, 20 bp, Artificial Sequence
  Synthetic oligonucleotide; AGG chr11 5229255 5229274 5229258 -
ttctgagcataagaagttgt

SEQ ID NO: 48448 - DNA, 20 bp, Artificial Sequence
  Synthetic oligonucleotide; GGG chr11 5229254 5229273 5229257 -
tctgagcataagaagttgta

SEQ ID NO: 48449 - DNA, 20 bp, Artificial Sequence
  Synthetic oligonucleotide; AAG chr11 5229250 5229269 5229253 -
agcataagaagttgtagggt

SEQ ID NO: 48450 - DNA, 20 bp, Artificial Sequence
  Synthetic oligonucleotide; AAG chr11 5229242 5229261 5229245 -
aagttgtagggtaagtcttt

SEQ ID NO: 48451 - DNA, 20 bp, Artificial Sequence
  Synthetic oligonucleotide; AAG chr11 5229239 5229258 5229242 -
ttgtagggtaagtctttaag

SEQ ID NO: 48452 - DNA, 20 bp, Artificial Sequence
  Synthetic oligonucleotide; AGG chr11 5229238 5229257 5229241 -
tgtagggtaagtctttaaga

SEQ ID NO: 48453 - DNA, 20 bp, Artificial Sequence
  Synthetic oligonucleotide; CAG chr11 5229218 5229237 5229221 -
aggtgacaatttctgccaat

SEQ ID NO: 48454 - DNA, 20 bp, Artificial Sequence
  Synthetic oligonucleotide; AGG chr11 5229217 5229236 5229220 -
ggtgacaatttctgccaatc

SEQ ID NO: 48455 - DNA, 20 bp, Artificial Sequence
  Synthetic oligonucleotide; AAG chr11 5229208 5229227 5229211 -
ttctgccaatcaggatttca

SEQ ID NO: 48456 - DNA, 20 bp, Artificial Sequence
  Synthetic oligonucleotide; TGG chr11 5229187 5229206 5229190 -
agctcttgctttgacaattt

SEQ ID NO: 48457 - DNA, 20 bp, Artificial Sequence
  Synthetic oligonucleotide; CAG chr11 5229179 5229198 5229182 -
ctttgacaattttggtcttt

SEQ ID NO: 48458 - DNA, 20 bp, Artificial Sequence
  Synthetic oligonucleotide; AAG chr11 5229141 5229160 5229144 -
acctatattataatttcata

SEQ ID NO: 48459 - DNA, 20 bp, Artificial Sequence
  Synthetic oligonucleotide; CAG chr11 5229118 5229137 5229121 -
tctgtgcattttctttgacc

SEQ ID NO: 48460 - DNA, 20 bp, Artificial Sequence
  Synthetic oligonucleotide; AGG chr11 5229117 5229136 5229120 -
ctgtgcattttctttgaccc

SEQ ID NO: 48461 - DNA, 20 bp, Artificial Sequence
  Synthetic oligonucleotide; AAG chr11 5229104 5229123 5229107 -
ttgacccaggatatttgcaa

SEQ ID NO: 48462 - DNA, 20 bp, Artificial Sequence
  Synthetic oligonucleotide; CAG chr11 5229084 5229103 5229087 -
aagacatattcaaacttccg

SEQ ID NO: 48463 - DNA, 20 bp, Artificial Sequence
  Synthetic oligonucleotide; CAG chr11 5229047 5229066 5229050 -
catatacatgcctcttatat

SEQ ID NO: 48464 - DNA, 20 bp, Artificial Sequence
  Synthetic oligonucleotide; AGG chr11 5229046 5229065 5229049 -
atatacatgcctcttatatc

SEQ ID NO: 48465 - DNA, 20 bp, Artificial Sequence
  Synthetic oligonucleotide; GGG chr11 5229045 5229064 5229048 -
tatacatgcctcttatatca

SEQ ID NO: 48466 - DNA, 20 bp, Artificial Sequence
  Synthetic oligonucleotide; CAG chr11 5229034 5229053 5229037 -
cttatatcagggatgtgaaa

SEQ ID NO: 48467 - DNA, 20 bp, Artificial Sequence
  Synthetic oligonucleotide; AGG chr11 5229033 5229052 5229036 -
ttatatcagggatgtgaaac

SEQ ID NO: 48468 - DNA, 20 bp, Artificial Sequence
  Synthetic oligonucleotide; GGG chr11 5229032 5229051 5229035 -
tatatcagggatgtgaaaca

SEQ ID NO: 48469 - DNA, 20 bp, Artificial Sequence
  Synthetic oligonucleotide; CAG chr11 5228993 5229012 5228996 -
aatctaaaacaatgctaatg

SEQ ID NO: 48470 - DNA, 20 bp, Artificial Sequence
  Synthetic oligonucleotide; AGG chr11 5228992 5229011 5228995 -
atctaaaacaatgctaatgc

SEQ ID NO: 48471 - DNA, 20 bp, Artificial Sequence
  Synthetic oligonucleotide; CAG chr11 5228956 5228975 5228959 -
aaataaaatccaaaatctaa

SEQ ID NO: 48472 - DNA, 20 bp, Artificial Sequence
  Synthetic oligonucleotide; AAG chr11 5228951 5228970 5228954 -
aaatccaaaatctaacagcc

SEQ ID NO: 48473 - DNA, 20 bp, Artificial Sequence
  Synthetic oligonucleotide; AAG chr11 5228913 5228932 5228916 -
ttaacatttaaaatatttta

SEQ ID NO: 48474 - DNA, 20 bp, Artificial Sequence
  Synthetic oligonucleotide; CAG chr11 5228899 5228918 5228902 -
attttaaagacgtcttttcc

SEQ ID NO: 48475 - DNA, 20 bp, Artificial Sequence
  Synthetic oligonucleotide; AGG chr11 5228898 5228917 5228901 -
ttttaaagacgtcttttccc

SEQ ID NO: 48476 - DNA, 20 bp, Artificial Sequence
  Synthetic oligonucleotide; CAG chr11 5228872 5228891 5228875 -
caacatgtgaaatcttttct

SEQ ID NO: 48477 - DNA, 20 bp, Artificial Sequence
  Synthetic oligonucleotide; AGG chr11 5228871 5228890 5228874 -
aacatgtgaaatcttttctc

SEQ ID NO: 48478 - DNA, 20 bp, Artificial Sequence
  Synthetic oligonucleotide; GGG chr11 5228870 5228889 5228873 -
acatgtgaaatcttttctca

SEQ ID NO: 48479 - DNA, 20 bp, Artificial Sequence
  Synthetic oligonucleotide; TAG chr11 5228854 5228873 5228857 -
ctcagggatacacgtgtgcc

SEQ ID NO: 48480 - DNA, 20 bp, Artificial Sequence
  Synthetic oligonucleotide; TAG chr11 5228838 5228857 5228841 -
tgcctagatcctcattgctt

SEQ ID NO: 48481 - DNA, 20 bp, Artificial Sequence
  Synthetic oligonucleotide; CAG chr11 5228828 5228847 5228831 -
ctcattgctttagtttttta

SEQ ID NO: 48482 - DNA, 20 bp, Artificial Sequence
  Synthetic oligonucleotide; GAG chr11 5228826 5228845 5228829 -
cattgctttagttttttaca

SEQ ID NO: 48483 - DNA, 20 bp, Artificial Sequence
  Synthetic oligonucleotide; AGG chr11 5228825 5228844 5228828 -
attgctttagttttttacag

SEQ ID NO: 48484 - DNA, 20 bp, Artificial Sequence
  Synthetic oligonucleotide; AAG chr11 5228810 5228829 5228813 -
tacagaggaatgaatataaa

SEQ ID NO: 48485 - DNA, 20 bp, Artificial Sequence
  Synthetic oligonucleotide; TAG chr11 5228765 5228784 5228768 -
cttacctctataatcataca

SEQ ID NO: 48486 - DNA, 20 bp, Artificial Sequence
  Synthetic oligonucleotide; AGG chr11 5228764 5228783 5228767 -
ttacctctataatcatacat

SEQ ID NO: 48487 - DNA, 20 bp, Artificial Sequence
  Synthetic oligonucleotide; TAG chr11 5228746 5228765 5228749 -
ataggcataattttttaacc

SEQ ID NO: 48488 - DNA, 20 bp, Artificial Sequence
  Synthetic oligonucleotide; AGG chr11 5228745 5228764 5228748 -
taggcataattttttaacct

SEQ ID NO: 48489 - DNA, 20 bp, Artificial Sequence
  Synthetic oligonucleotide; CAG chr11 5228739 5228758 5228742 -
taattttttaacctaggctc

SEQ ID NO: 48490 - DNA, 20 bp, Artificial Sequence
  Synthetic oligonucleotide; TAG chr11 5228735 5228754 5228738 -
tttttaacctaggctccaga

SEQ ID NO: 48491 - DNA, 20 bp, Artificial Sequence
  Synthetic oligonucleotide; TAG chr11 5228729 5228748 5228732 -
acctaggctccagatagcca

SEQ ID NO: 48492 - DNA, 20 bp, Artificial Sequence
  Synthetic oligonucleotide; AAG chr11 5228726 5228745 5228729 -
taggctccagatagccatag

SEQ ID NO: 48493 - DNA, 20 bp, Artificial Sequence
  Synthetic oligonucleotide; GAG chr11 5228700 5228719 5228703 -
caaacactttctgcgtgtgt

SEQ ID NO: 48494 - DNA, 20 bp, Artificial Sequence
  Synthetic oligonucleotide; CAG chr11 5228691 5228710 5228694 -
tctgcgtgtgtgagaataat

SEQ ID NO: 48495 - DNA, 20 bp, Artificial Sequence
  Synthetic oligonucleotide; GAG chr11 5228689 5228708 5228692 -
tgcgtgtgtgagaataatca

SEQ ID NO: 48496 - DNA, 20 bp, Artificial Sequence
  Synthetic oligonucleotide; GAG chr11 5228685 5228704 5228688 -
tgtgtgagaataatcagagt

SEQ ID NO: 48497 - DNA, 20 bp, Artificial Sequence
  Synthetic oligonucleotide; AAG chr11 5228672 5228691 5228675 -
tcagagtgagattttttcac

SEQ ID NO: 48498 - DNA, 20 bp, Artificial Sequence
  Synthetic oligonucleotide; GAG chr11 5228661 5228680 5228664 -
ttttttcacaagtacctgat

SEQ ID NO: 48499 - DNA, 20 bp, Artificial Sequence
  Synthetic oligonucleotide; AGG chr11 5228660 5228679 5228663 -
tttttcacaagtacctgatg

SEQ ID NO: 48500 - DNA, 20 bp, Artificial Sequence
  Synthetic oligonucleotide; GGG chr11 5228659 5228678 5228662 -
ttttcacaagtacctgatga

SEQ ID NO: 48501 - DNA, 20 bp, Artificial Sequence
  Synthetic oligonucleotide; GAG chr11 5228654 5228673 5228657 -
acaagtacctgatgagggtt

SEQ ID NO: 48502 - DNA, 20 bp, Artificial Sequence
  Synthetic oligonucleotide; CAG chr11 5228650 5228669 5228653 -
gtacctgatgagggttgaga

SEQ ID NO: 48503 - DNA, 20 bp, Artificial Sequence
  Synthetic oligonucleotide; AGG chr11 5228649 5228668 5228652 -
tacctgatgagggttgagac

SEQ ID NO: 48504 - DNA, 20 bp, Artificial Sequence
  Synthetic oligonucleotide; TAG chr11 5228646 5228665 5228649 -
ctgatgagggttgagacagg

SEQ ID NO: 48505 - DNA, 20 bp, Artificial Sequence
  Synthetic oligonucleotide; AAG chr11 5228640 5228659 5228643 -
agggttgagacaggtagaaa

SEQ ID NO: 48506 - DNA, 20 bp, Artificial Sequence
  Synthetic oligonucleotide; GAG chr11 5228636 5228655 5228639 -
ttgagacaggtagaaaaagt

SEQ ID NO: 48507 - DNA, 20 bp, Artificial Sequence
  Synthetic oligonucleotide; GAG chr11 5228634 5228653 5228637 -
gagacaggtagaaaaagtga

SEQ ID NO: 48508 - DNA, 20 bp, Artificial Sequence
  Synthetic oligonucleotide; TAG chr11 5228618 5228637 5228621 -
gtgagagatctctatttatt

SEQ ID NO: 48509 - DNA, 20 bp, Artificial Sequence
  Synthetic oligonucleotide; TAG chr11 5228609 5228628 5228612 -
ctctatttatttagcaataa

SEQ ID NO: 48510 - DNA, 20 bp, Artificial Sequence
  Synthetic oligonucleotide; GAG chr11 5228607 5228626 5228610 -
ctatttatttagcaataata

SEQ ID NO: 48511 - DNA, 20 bp, Artificial Sequence
  Synthetic oligonucleotide; AAG chr11 5228603 5228622 5228606 -
ttatttagcaataatagaga

SEQ ID NO: 48512 - DNA, 20 bp, Artificial Sequence
  Synthetic oligonucleotide; AAG chr11 5228595 5228614 5228598 -
caataatagagaaagcattt

SEQ ID NO: 48513 - DNA, 20 bp, Artificial Sequence
  Synthetic oligonucleotide; GAG chr11 5228593 5228612 5228596 -
ataatagagaaagcatttaa

SEQ ID NO: 48514 - DNA, 20 bp, Artificial Sequence
  Synthetic oligonucleotide; AAG chr11 5228586 5228605 5228589 -
agaaagcatttaagagaata

SEQ ID NO: 48515 - DNA, 20 bp, Artificial Sequence
  Synthetic oligonucleotide; TGG chr11 5228580 5228599 5228583 -
catttaagagaataaagcaa

SEQ ID NO: 48516 - DNA, 20 bp, Artificial Sequence
  Synthetic oligonucleotide; AAG chr11 5228573 5228592 5228576 -
gagaataaagcaatggaaat

SEQ ID NO: 48517 - DNA, 20 bp, Artificial Sequence
  Synthetic oligonucleotide; TAG chr11 5228544 5228563 5228547 -
gtaaatttccttctgataac

SEQ ID NO: 48518 - DNA, 20 bp, Artificial Sequence
  Synthetic oligonucleotide; TAG chr11 5228538 5228557 5228541 -
ttccttctgataactagaaa

SEQ ID NO: 48519 - DNA, 20 bp, Artificial Sequence
  Synthetic oligonucleotide; GAG chr11 5228536 5228555 5228539 -
ccttctgataactagaaata

SEQ ID NO: 48520 - DNA, 20 bp, Artificial Sequence
  Synthetic oligonucleotide; AGG chr11 5228535 5228554 5228538 -
cttctgataactagaaatag

SEQ ID NO: 48521 - DNA, 20 bp, Artificial Sequence
  Synthetic oligonucleotide; CAG chr11 5228529 5228548 5228532 -
ataactagaaatagaggatc

SEQ ID NO: 48522 - DNA, 20 bp, Artificial Sequence
  Synthetic oligonucleotide; TGG chr11 5228519 5228538 5228522 -
atagaggatccagtttcttt

SEQ ID NO: 48523 - DNA, 20 bp, Artificial Sequence
  Synthetic oligonucleotide; TAG chr11 5228450 5228469 5228453 -
tattttattttgtgtaatcg

SEQ ID NO: 48524 - DNA, 20 bp, Artificial Sequence
  Synthetic oligonucleotide; CAG chr11 5228444 5228463 5228447 -
attttgtgtaatcgtagttt

SEQ ID NO: 48525 - DNA, 20 bp, Artificial Sequence
  Synthetic oligonucleotide; GAG chr11 5228442 5228461 5228445 -
tttgtgtaatcgtagtttca

SEQ ID NO: 48526 - DNA, 20 bp, Artificial Sequence
  Synthetic oligonucleotide; TAG chr11 5228436 5228455 5228439 -
taatcgtagtttcagagtgt

SEQ ID NO: 48527 - DNA, 20 bp, Artificial Sequence
  Synthetic oligonucleotide; GAG chr11 5228434 5228453 5228437 -
atcgtagtttcagagtgtta

SEQ ID NO: 48528 - DNA, 20 bp, Artificial Sequence
  Synthetic oligonucleotide; AAG chr11 5228427 5228446 5228430 -
tttcagagtgttagagctga

SEQ ID NO: 48529 - DNA, 20 bp, Artificial Sequence
  Synthetic oligonucleotide; AGG chr11 5228426 5228445 5228429 -
ttcagagtgttagagctgaa

SEQ ID NO: 48530 - DNA, 20 bp, Artificial Sequence
  Synthetic oligonucleotide; AAG chr11 5228423 5228442 5228426 -
agagtgttagagctgaaagg

SEQ ID NO: 48531 - DNA, 20 bp, Artificial Sequence
  Synthetic oligonucleotide; AAG chr11 5228420 5228439 5228423 -
gtgttagagctgaaaggaag

SEQ ID NO: 48532 - DNA, 20 bp, Artificial Sequence
  Synthetic oligonucleotide; TAG chr11 5228417 5228436 5228420 -
ttagagctgaaaggaagaag

SEQ ID NO: 48533 - DNA, 20 bp, Artificial Sequence
  Synthetic oligonucleotide; AGG chr11 5228416 5228435 5228419 -
tagagctgaaaggaagaagt

SEQ ID NO: 48534 - DNA, 20 bp, Artificial Sequence
  Synthetic oligonucleotide; GAG chr11 5228414 5228433 5228417 -
gagctgaaaggaagaagtag

SEQ ID NO: 48535 - DNA, 20 bp, Artificial Sequence
  Synthetic oligonucleotide; AAG chr11 5228402 5228421 5228405 -
agaagtaggagaaacatgca

SEQ ID NO: 48536 - DNA, 20 bp, Artificial Sequence
  Synthetic oligonucleotide; AAG chr11 5228396 5228415 5228399 -
aggagaaacatgcaaagtaa

SEQ ID NO: 48537 - DNA, 20 bp, Artificial Sequence
  Synthetic oligonucleotide; TGG chr11 5228366 5228385 5228369 -
ctttccttactaaaccgaca

SEQ ID NO: 48538 - DNA, 20 bp, Artificial Sequence
  Synthetic oligonucleotide; GGG chr11 5228365 5228384 5228368 -
tttccttactaaaccgacat

SEQ ID NO: 48539 - DNA, 20 bp, Artificial Sequence
  Synthetic oligonucleotide; CAG chr11 5228358 5228377 5228361 -
actaaaccgacatgggtttc

SEQ ID NO: 48540 - DNA, 20 bp, Artificial Sequence
  Synthetic oligonucleotide; AGG chr11 5228357 5228376 5228360 -
ctaaaccgacatgggtttcc

SEQ ID NO: 48541 - DNA, 20 bp, Artificial Sequence
  Synthetic oligonucleotide; TAG chr11 5228354 5228373 5228357 -
aaccgacatgggtttccagg

SEQ ID NO: 48542 - DNA, 20 bp, Artificial Sequence
  Synthetic oligonucleotide; AGG chr11 5228353 5228372 5228356 -
accgacatgggtttccaggt

SEQ ID NO: 48543 - DNA, 20 bp, Artificial Sequence
  Synthetic oligonucleotide; GGG chr11 5228352 5228371 5228355 -
ccgacatgggtttccaggta

SEQ ID NO: 48544 - DNA, 20 bp, Artificial Sequence
  Synthetic oligonucleotide; GGG chr11 5228351 5228370 5228354 -
cgacatgggtttccaggtag

SEQ ID NO: 48545 - DNA, 20 bp, Artificial Sequence
  Synthetic oligonucleotide; CAG chr11 5228348 5228367 5228351 -
catgggtttccaggtagggg

SEQ ID NO: 48546 - DNA, 20 bp, Artificial Sequence
  Synthetic oligonucleotide; AGG chr11 5228347 5228366 5228350 -
atgggtttccaggtaggggc

SEQ ID NO: 48547 - DNA, 20 bp, Artificial Sequence
  Synthetic oligonucleotide; CAG chr11 5228341 5228360 5228344 -
ttccaggtaggggcaggatt

SEQ ID NO: 48548 - DNA, 20 bp, Artificial Sequence
  Synthetic oligonucleotide; AGG chr11 5228340 5228359 5228343 -
tccaggtaggggcaggattc

SEQ ID NO: 48549 - DNA, 20 bp, Artificial Sequence
  Synthetic oligonucleotide; CAG chr11 5228329 5228348 5228332 -
gcaggattcaggatgactga

SEQ ID NO: 48550 - DNA, 20 bp, Artificial Sequence
  Synthetic oligonucleotide; AGG chr11 5228328 5228347 5228331 -
caggattcaggatgactgac

SEQ ID NO: 48551 - DNA, 20 bp, Artificial Sequence
  Synthetic oligonucleotide; GGG chr11 5228327 5228346 5228330 -
aggattcaggatgactgaca

SEQ ID NO: 48552 - DNA, 20 bp, Artificial Sequence
  Synthetic oligonucleotide; TAG chr11 5228320 5228339 5228323 -
aggatgactgacagggccct

SEQ ID NO: 48553 - DNA, 20 bp, Artificial Sequence
  Synthetic oligonucleotide; AGG chr11 5228319 5228338 5228322 -
ggatgactgacagggccctt

SEQ ID NO: 48554 - DNA, 20 bp, Artificial Sequence
  Synthetic oligonucleotide; GGG chr11 5228318 5228337 5228321 -
gatgactgacagggccctta

SEQ ID NO: 48555 - DNA, 20 bp, Artificial Sequence
  Synthetic oligonucleotide; GAG chr11 5228309 5228328 5228312 -
cagggcccttagggaacact

SEQ ID NO: 48556 - DNA, 20 bp, Artificial Sequence
  Synthetic oligonucleotide; TAG chr11 5228248 5228267 5228251 -
gttttaattacatcttttaa

SEQ ID NO: 48557 - DNA, 20 bp, Artificial Sequence
  Synthetic oligonucleotide; CAG chr11 5228245 5228264 5228248 -
ttaattacatcttttaatag

SEQ ID NO: 48558 - DNA, 20 bp, Artificial Sequence
  Synthetic oligonucleotide; AGG chr11 5228244 5228263 5228247 -
taattacatcttttaatagc

SEQ ID NO: 48559 - DNA, 20 bp, Artificial Sequence
  Synthetic oligonucleotide; AAG chr11 5228241 5228260 5228244 -
ttacatcttttaatagcagg

SEQ ID NO: 48560 - DNA, 20 bp, Artificial Sequence
  Synthetic oligonucleotide; CAG chr11 5228238 5228257 5228241 -
catcttttaatagcaggaag

SEQ ID NO: 48561 - DNA, 20 bp, Artificial Sequence
  Synthetic oligonucleotide; AAG chr11 5228220 5228239 5228223 -
agcagaactctgcacttcaa

SEQ ID NO: 48562 - DNA, 20 bp, Artificial Sequence
  Synthetic oligonucleotide; GAG chr11 5228204 5228223 5228207 -
tcaaaagtttttcctcacct

SEQ ID NO: 48563 - DNA, 20 bp, Artificial Sequence
  Synthetic oligonucleotide; AGG chr11 5228203 5228222 5228206 -
caaaagtttttcctcacctg

SEQ ID NO: 48564 - DNA, 20 bp, Artificial Sequence
  Synthetic oligonucleotide; GAG chr11 5228201 5228220 5228204 -
aaagtttttcctcacctgag

SEQ ID NO: 48565 - DNA, 20 bp, Artificial Sequence
  Synthetic oligonucleotide; TAG chr11 5228192 5228211 5228195 -
cctcacctgaggagttaatt

SEQ ID NO: 48566 - DNA, 20 bp, Artificial Sequence
  Synthetic oligonucleotide; AAG chr11 5228186 5228205 5228189 -
ctgaggagttaatttagtac

SEQ ID NO: 48567 - DNA, 20 bp, Artificial Sequence
  Synthetic oligonucleotide; AGG chr11 5228185 5228204 5228188 -
tgaggagttaatttagtaca

SEQ ID NO: 48568 - DNA, 20 bp, Artificial Sequence
  Synthetic oligonucleotide; GGG chr11 5228184 5228203 5228187 -
gaggagttaatttagtacaa

SEQ ID NO: 48569 - DNA, 20 bp, Artificial Sequence
  Synthetic oligonucleotide; GGG chr11 5228183 5228202 5228186 -
aggagttaatttagtacaag

SEQ ID NO: 48570 - DNA, 20 bp, Artificial Sequence
  Synthetic oligonucleotide; AAG chr11 5228177 5228196 5228180 -
taatttagtacaaggggaaa

SEQ ID NO: 48571 - DNA, 20 bp, Artificial Sequence
  Synthetic oligonucleotide; CAG chr11 5228172 5228191 5228175 -
tagtacaaggggaaaaagta

SEQ ID NO: 48572 - DNA, 20 bp, Artificial Sequence
  Synthetic oligonucleotide; AGG chr11 5228171 5228190 5228174 -
agtacaaggggaaaaagtac

SEQ ID NO: 48573 - DNA, 20 bp, Artificial Sequence
  Synthetic oligonucleotide; GGG chr11 5228170 5228189 5228173 -
gtacaaggggaaaaagtaca

SEQ ID NO: 48574 - DNA, 20 bp, Artificial Sequence
  Synthetic oligonucleotide; GGG chr11 5228169 5228188 5228172 -
tacaaggggaaaaagtacag

SEQ ID NO: 48575 - DNA, 20 bp, Artificial Sequence
  Synthetic oligonucleotide; GGG chr11 5228168 5228187 5228171 -
acaaggggaaaaagtacagg

SEQ ID NO: 48576 - DNA, 20 bp, Artificial Sequence
  Synthetic oligonucleotide; TGG chr11 5228164 5228183 5228167 -
ggggaaaaagtacaggggga

SEQ ID NO: 48577 - DNA, 20 bp, Artificial Sequence
  Synthetic oligonucleotide; GGG chr11 5228163 5228182 5228166 -
gggaaaaagtacagggggat

SEQ ID NO: 48578 - DNA, 20 bp, Artificial Sequence
  Synthetic oligonucleotide; GAG chr11 5228161 5228180 5228164 -
gaaaaagtacagggggatgg

SEQ ID NO: 48579 - DNA, 20 bp, Artificial Sequence
  Synthetic oligonucleotide; AAG chr11 5228157 5228176 5228160 -
aagtacagggggatgggaga

SEQ ID NO: 48580 - DNA, 20 bp, Artificial Sequence
  Synthetic oligonucleotide; AGG chr11 5228156 5228175 5228159 -
agtacagggggatgggagaa

SEQ ID NO: 48581 - DNA, 20 bp, Artificial Sequence
  Synthetic oligonucleotide; TGG chr11 5228144 5228163 5228147 -
tgggagaaaggcgatcacgt

SEQ ID NO: 48582 - DNA, 20 bp, Artificial Sequence
  Synthetic oligonucleotide; GGG chr11 5228143 5228162 5228146 -
gggagaaaggcgatcacgtt

SEQ ID NO: 48583 - DNA, 20 bp, Artificial Sequence
  Synthetic oligonucleotide; AAG chr11 5228140 5228159 5228143 -
agaaaggcgatcacgttggg

SEQ ID NO: 48584 - DNA, 20 bp, Artificial Sequence
  Synthetic oligonucleotide; TAG chr11 5228134 5228153 5228137 -
gcgatcacgttgggaagcta

SEQ ID NO: 48585 - DNA, 20 bp, Artificial Sequence
  Synthetic oligonucleotide; GAG chr11 5228132 5228151 5228135 -
gatcacgttgggaagctata

SEQ ID NO: 48586 - DNA, 20 bp, Artificial Sequence
  Synthetic oligonucleotide; AAG chr11 5228128 5228147 5228131 -
acgttgggaagctatagaga

SEQ ID NO: 48587 - DNA, 20 bp, Artificial Sequence
  Synthetic oligonucleotide; AAG chr11 5228125 5228144 5228128 -
ttgggaagctatagagaaag

SEQ ID NO: 48588 - DNA, 20 bp, Artificial Sequence
  Synthetic oligonucleotide; GAG chr11 5228123 5228142 5228126 -
gggaagctatagagaaagaa

SEQ ID NO: 48589 - DNA, 20 bp, Artificial Sequence
  Synthetic oligonucleotide; TAG chr11 5228113 5228132 5228116 -
agagaaagaagagtaaattt

SEQ ID NO: 48590 - DNA, 20 bp, Artificial Sequence
  Synthetic oligonucleotide; AAG chr11 5228108 5228127 5228111 -
aagaagagtaaattttagta

SEQ ID NO: 48591 - DNA, 20 bp, Artificial Sequence
  Synthetic oligonucleotide; AGG chr11 5228107 5228126 5228110 -
agaagagtaaattttagtaa

SEQ ID NO: 48592 - DNA, 20 bp, Artificial Sequence
  Synthetic oligonucleotide; GAG chr11 5228105 5228124 5228108 -
aagagtaaattttagtaaag

SEQ ID NO: 48593 - DNA, 20 bp, Artificial Sequence
  Synthetic oligonucleotide; AGG chr11 5228104 5228123 5228107 -
agagtaaattttagtaaagg

SEQ ID NO: 48594 - DNA, 20 bp, Artificial Sequence
  Synthetic oligonucleotide; AAG chr11 5228082 5228101 5228085 -
gtttaaacaaacaaaatata

SEQ ID NO: 48595 - DNA, 20 bp, Artificial Sequence
  Synthetic oligonucleotide; GAG chr11 5228080 5228099 5228083 -
ttaaacaaacaaaatataaa

SEQ ID NO: 48596 - DNA, 20 bp, Artificial Sequence
  Synthetic oligonucleotide; TAG chr11 5228074 5228093 5228077 -
aaacaaaatataaagagaaa

SEQ ID NO: 48597 - DNA, 20 bp, Artificial Sequence
  Synthetic oligonucleotide; AGG chr11 5228073 5228092 5228076 -
aacaaaatataaagagaaat

SEQ ID NO: 48598 - DNA, 20 bp, Artificial Sequence
  Synthetic oligonucleotide; AAG chr11 5228060 5228079 5228063 -
gagaaataggaacttgaatc

SEQ ID NO: 48599 - DNA, 20 bp, Artificial Sequence
  Synthetic oligonucleotide; AGG chr11 5228059 5228078 5228062 -
agaaataggaacttgaatca

SEQ ID NO: 48600 - DNA, 20 bp, Artificial Sequence
  Synthetic oligonucleotide; CAG chr11 5228040 5228059 5228043 -
aaggaaatgattttaaaacg

SEQ ID NO: 48601 - DNA, 20 bp, Artificial Sequence
  Synthetic oligonucleotide; TAG chr11 5228031 5228050 5228034 -
attttaaaacgcagtattct

SEQ ID NO: 48602 - DNA, 20 bp, Artificial Sequence
  Synthetic oligonucleotide; TGG chr11 5228028 5228047 5228031 -
ttaaaacgcagtattcttag

SEQ ID NO: 48603 - DNA, 20 bp, Artificial Sequence
  Synthetic oligonucleotide; TAG chr11 5228023 5228042 5228026 -
acgcagtattcttagtggac

SEQ ID NO: 48604 - DNA, 20 bp, Artificial Sequence
  Synthetic oligonucleotide; GAG chr11 5228021 5228040 5228024 -
gcagtattcttagtggacta

SEQ ID NO: 48605 - DNA, 20 bp, Artificial Sequence
  Synthetic oligonucleotide; AGG chr11 5228020 5228039 5228023 -
cagtattcttagtggactag

SEQ ID NO: 48606 - DNA, 20 bp, Artificial Sequence
  Synthetic oligonucleotide; GAG chr11 5228004 5228023 5228007 -
ctagaggaaaaaaataatct

SEQ ID NO: 48607 - DNA, 20 bp, Artificial Sequence
  Synthetic oligonucleotide; AAG chr11 5227999 5228018 5228002 -
ggaaaaaaataatctgagcc

SEQ ID NO: 48608 - DNA, 20 bp, Artificial Sequence
  Synthetic oligonucleotide; TAG chr11 5227996 5228015 5227999 -
aaaaaataatctgagccaag

SEQ ID NO: 48609 - DNA, 20 bp, Artificial Sequence
  Synthetic oligonucleotide; AAG chr11 5227993 5228012 5227996 -
aaataatctgagccaagtag

SEQ ID NO: 48610 - DNA, 20 bp, Artificial Sequence
  Synthetic oligonucleotide; AAG chr11 5227962 5227981 5227965 -
ccctcctacccctactttct

SEQ ID NO: 48611 - DNA, 20 bp, Artificial Sequence
  Synthetic oligonucleotide; CAG chr11 5227956 5227975 5227959 -
tacccctactttctaagtca

SEQ ID NO: 48612 - DNA, 20 bp, Artificial Sequence
  Synthetic oligonucleotide; GAG chr11 5227954 5227973 5227957 -
cccctactttctaagtcaca

SEQ ID NO: 48613 - DNA, 20 bp, Artificial Sequence
  Synthetic oligonucleotide; AGG chr11 5227953 5227972 5227956 -
ccctactttctaagtcacag

SEQ ID NO: 48614 - DNA, 20 bp, Artificial Sequence
  Synthetic oligonucleotide; CAG chr11 5227937 5227956 5227940 -
acagaggctttttgttcccc

SEQ ID NO: 48615 - DNA, 20 bp, Artificial Sequence
  Synthetic oligonucleotide; CAG chr11 5227925 5227944 5227928 -
tgttcccccagacactcttg

SEQ ID NO: 48616 - DNA, 20 bp, Artificial Sequence
  Synthetic oligonucleotide; TAG chr11 5227920 5227939 5227923 -
ccccagacactcttgcagat

SEQ ID NO: 48617 - DNA, 20 bp, Artificial Sequence
  Synthetic oligonucleotide; CAG chr11 5227915 5227934 5227918 -
gacactcttgcagattagtc

SEQ ID NO: 48618 - DNA, 20 bp, Artificial Sequence
  Synthetic oligonucleotide; AGG chr11 5227914 5227933 5227917 -
acactcttgcagattagtcc

SEQ ID NO: 48619 - DNA, 20 bp, Artificial Sequence
  Synthetic oligonucleotide; CAG chr11 5227911 5227930 5227914 -
ctcttgcagattagtccagg

SEQ ID NO: 48620 - DNA, 20 bp, Artificial Sequence
  Synthetic oligonucleotide; CAG chr11 5227905 5227924 5227908 -
cagattagtccaggcagaaa

SEQ ID NO: 48621 - DNA, 20 bp, Artificial Sequence
  Synthetic oligonucleotide; TAG chr11 5227901 5227920 5227904 -
ttagtccaggcagaaacagt

SEQ ID NO: 48622 - DNA, 20 bp, Artificial Sequence
  Synthetic oligonucleotide; CAG chr11 5227891 5227910 5227894 -
cagaaacagttagatgtccc

SEQ ID NO: 48623 - DNA, 20 bp, Artificial Sequence
  Synthetic oligonucleotide; TAG chr11 5227851 5227870 5227854 -
accactgattaccccattga

SEQ ID NO: 48624 - DNA, 20 bp, Artificial Sequence
  Synthetic oligonucleotide; TGG chr11 5227840 5227859 5227843 -
ccccattgatagtcacactt

SEQ ID NO: 48625 - DNA, 20 bp, Artificial Sequence
  Synthetic oligonucleotide; GGG chr11 5227839 5227858 5227842 -
cccattgatagtcacacttt

SEQ ID NO: 48626 - DNA, 20 bp, Artificial Sequence
  Synthetic oligonucleotide; AAG chr11 5227832 5227851 5227835 -
atagtcacactttgggttgt

SEQ ID NO: 48627 - DNA, 20 bp, Artificial Sequence
  Synthetic oligonucleotide; AAG chr11 5227795 5227814 5227798 -
tttgtatttttgactgcatt

SEQ ID NO: 48628 - DNA, 20 bp, Artificial Sequence
  Synthetic oligonucleotide; GAG chr11 5227793 5227812 5227796 -
tgtatttttgactgcattaa

SEQ ID NO: 48629 - DNA, 20 bp, Artificial Sequence
  Synthetic oligonucleotide; AGG chr11 5227792 5227811 5227795 -
gtatttttgactgcattaag

SEQ ID NO: 48630 - DNA, 20 bp, Artificial Sequence
  Synthetic oligonucleotide; TAG chr11 5227785 5227804 5227788 -
tgactgcattaagaggtctc

SEQ ID NO: 48631 - DNA, 20 bp, Artificial Sequence
  Synthetic oligonucleotide; AAG chr11 5227752 5227771 5227755 -
cttgtttcccaaaacctaat

SEQ ID NO: 48632 - DNA, 20 bp, Artificial Sequence
  Synthetic oligonucleotide; CAG chr11 5227738 5227757 5227741 -
cctaataagtaactaatgca

SEQ ID NO: 48633 - DNA, 20 bp, Artificial Sequence
  Synthetic oligonucleotide; GAG chr11 5227736 5227755 5227739 -
taataagtaactaatgcaca

SEQ ID NO: 48634 - DNA, 20 bp, Artificial Sequence
  Synthetic oligonucleotide; TAG chr11 5227706 5227725 5227709 -
atttgtatttattctatttt

SEQ ID NO: 48635 - DNA, 20 bp, Artificial Sequence
  Synthetic oligonucleotide; TAG chr11 5227692 5227711 5227695 -
tatttttagacataatttat

SEQ ID NO: 48636 - DNA, 20 bp, Artificial Sequence
  Synthetic oligonucleotide; GAG chr11 5227682 5227701 5227685 -
cataatttattagcatgcat

SEQ ID NO: 48637 - DNA, 20 bp, Artificial Sequence
  Synthetic oligonucleotide; AAG chr11 5227673 5227692 5227676 -
ttagcatgcatgagcaaatt

SEQ ID NO: 48638 - DNA, 20 bp, Artificial Sequence
  Synthetic oligonucleotide; CAG chr11 5227583 5227602 5227586 -
tatattttttcttttcttac

SEQ ID NO: 48639 - DNA, 20 bp, Artificial Sequence
  Synthetic oligonucleotide; AAG chr11 5227580 5227599 5227583 -
attttttcttttcttaccag

SEQ ID NO: 48640 - DNA, 20 bp, Artificial Sequence
  Synthetic oligonucleotide; AGG chr11 5227579 5227598 5227582 -
ttttttcttttcttaccaga

SEQ ID NO: 48641 - DNA, 20 bp, Artificial Sequence
  Synthetic oligonucleotide; AAG chr11 5227563 5227582 5227566 -
cagaaggttttaatccaaat

SEQ ID NO: 48642 - DNA, 20 bp, Artificial Sequence
  Synthetic oligonucleotide; AGG chr11 5227562 5227581 5227565 -
agaaggttttaatccaaata

SEQ ID NO: 48643 - DNA, 20 bp, Artificial Sequence
  Synthetic oligonucleotide; GAG chr11 5227560 5227579 5227563 -
aaggttttaatccaaataag

SEQ ID NO: 48644 - DNA, 20 bp, Artificial Sequence
  Synthetic oligonucleotide; AAG chr11 5227557 5227576 5227560 -
gttttaatccaaataaggag

SEQ ID NO: 48645 - DNA, 20 bp, Artificial Sequence
  Synthetic oligonucleotide; TAG chr11 5227547 5227566 5227550 -
aaataaggagaagatatgct

SEQ ID NO: 48646 - DNA, 20 bp, Artificial Sequence
  Synthetic oligonucleotide; GAG chr11 5227540 5227559 5227543 -
gagaagatatgcttagaacc

SEQ ID NO: 48647 - DNA, 20 bp, Artificial Sequence
  Synthetic oligonucleotide; AGG chr11 5227539 5227558 5227542 -
agaagatatgcttagaaccg

SEQ ID NO: 48648 - DNA, 20 bp, Artificial Sequence
  Synthetic oligonucleotide; TAG chr11 5227536 5227555 5227539 -
agatatgcttagaaccgagg

SEQ ID NO: 48649 - DNA, 20 bp, Artificial Sequence
  Synthetic oligonucleotide; GAG chr11 5227534 5227553 5227537 -
atatgcttagaaccgaggta

SEQ ID NO: 48650 - DNA, 20 bp, Artificial Sequence
  Synthetic oligonucleotide; AAG chr11 5227510 5227529 5227513 -
tttcatccattctgtcctgt

SEQ ID NO: 48651 - DNA, 20 bp, Artificial Sequence
  Synthetic oligonucleotide; TGG chr11 5227493 5227512 5227496 -
tgtaagtattttgcatattc

SEQ ID NO: 48652 - DNA, 20 bp, Artificial Sequence
  Synthetic oligonucleotide; GAG chr11 5227491 5227510 5227494 -
taagtattttgcatattctg

SEQ ID NO: 48653 - DNA, 20 bp, Artificial Sequence
  Synthetic oligonucleotide; CAG chr11 5227485 5227504 5227488 -
ttttgcatattctggagacg

SEQ ID NO: 48654 - DNA, 20 bp, Artificial Sequence
  Synthetic oligonucleotide; AGG chr11 5227484 5227503 5227487 -
tttgcatattctggagacgc

SEQ ID NO: 48655 - DNA, 20 bp, Artificial Sequence
  Synthetic oligonucleotide; AAG chr11 5227481 5227500 5227484 -
gcatattctggagacgcagg

SEQ ID NO: 48656 - DNA, 20 bp, Artificial Sequence
  Synthetic oligonucleotide; GAG chr11 5227479 5227498 5227482 -
atattctggagacgcaggaa

SEQ ID NO: 48657 - DNA, 20 bp, Artificial Sequence
  Synthetic oligonucleotide; AAG chr11 5227458 5227477 5227461 -
agatccatctacatatccca

SEQ ID NO: 48658 - DNA, 20 bp, Artificial Sequence
  Synthetic oligonucleotide; TGG chr11 5227447 5227466 5227450 -
catatcccaaagctgaatta

SEQ ID NO: 48659 - DNA, 20 bp, Artificial Sequence
  Synthetic oligonucleotide; TAG chr11 5227444 5227463 5227447 -
atcccaaagctgaattatgg

SEQ ID NO: 48660 - DNA, 20 bp, Artificial Sequence
  Synthetic oligonucleotide; TAG chr11 5227423 5227442 5227426 -
agacaaaactcttccacttt

SEQ ID NO: 48661 - DNA, 20 bp, Artificial Sequence
  Synthetic oligonucleotide; AAG chr11 5227395 5227414 5227398 -
caacttcttatttgtgtaat

SEQ ID NO: 48662 - DNA, 20 bp, Artificial Sequence
  Synthetic oligonucleotide; TGG chr11 5227387 5227406 5227390 -
tatttgtgtaataagaaaat

SEQ ID NO: 48663 - DNA, 20 bp, Artificial Sequence
  Synthetic oligonucleotide; GGG chr11 5227386 5227405 5227389 -
atttgtgtaataagaaaatt

SEQ ID NO: 48664 - DNA, 20 bp, Artificial Sequence
  Synthetic oligonucleotide; AAG chr11 5227359 5227378 5227362 -
cgatcttcaatatgcttacc

SEQ ID NO: 48665 - DNA, 20 bp, Artificial Sequence
  Synthetic oligonucleotide; AAG chr11 5227322 5227341 5227325 -
attacgtaaatacacttgca

SEQ ID NO: 48666 - DNA, 20 bp, Artificial Sequence
  Synthetic oligonucleotide; AGG chr11 5227321 5227340 5227324 -
ttacgtaaatacacttgcaa

SEQ ID NO: 48667 - DNA, 20 bp, Artificial Sequence
  Synthetic oligonucleotide; GAG chr11 5227319 5227338 5227322 -
acgtaaatacacttgcaaag

SEQ ID NO: 48668 - DNA, 20 bp, Artificial Sequence
  Synthetic oligonucleotide; AGG chr11 5227318 5227337 5227321 -
cgtaaatacacttgcaaagg

SEQ ID NO: 48669 - DNA, 20 bp, Artificial Sequence
  Synthetic oligonucleotide; TAG chr11 5227308 5227327 5227311 -
cttgcaaaggaggatgtttt

SEQ ID NO: 48670 - DNA, 20 bp, Artificial Sequence
  Synthetic oligonucleotide; TAG chr11 5227305 5227324 5227308 -
gcaaaggaggatgtttttag

SEQ ID NO: 48671 - DNA, 20 bp, Artificial Sequence
  Synthetic oligonucleotide; TGG chr11 5227289 5227308 5227292 -
ttagtagcaatttgtactga

SEQ ID NO: 48672 - DNA, 20 bp, Artificial Sequence
  Synthetic oligonucleotide; TGG chr11 5227284 5227303 5227287 -
agcaatttgtactgatggta

SEQ ID NO: 48673 - DNA, 20 bp, Artificial Sequence
  Synthetic oligonucleotide; GGG chr11 5227283 5227302 5227286 -
gcaatttgtactgatggtat

SEQ ID NO: 48674 - DNA, 20 bp, Artificial Sequence
  Synthetic oligonucleotide; GGG chr11 5227282 5227301 5227285 -
caatttgtactgatggtatg

SEQ ID NO: 48675 - DNA, 20 bp, Artificial Sequence
  Synthetic oligonucleotide; AAG chr11 5227277 5227296 5227280 -
tgtactgatggtatggggcc

SEQ ID NO: 48676 - DNA, 20 bp, Artificial Sequence
  Synthetic oligonucleotide; GAG chr11 5227275 5227294 5227278 -
tactgatggtatggggccaa

SEQ ID NO: 48677 - DNA, 20 bp, Artificial Sequence
  Synthetic oligonucleotide; TAG chr11 5227264 5227283 5227267 -
tggggccaagagatatatct

SEQ ID NO: 48678 - DNA, 20 bp, Artificial Sequence
  Synthetic oligonucleotide; GAG chr11 5227262 5227281 5227265 -
gggccaagagatatatctta

SEQ ID NO: 48679 - DNA, 20 bp, Artificial Sequence
  Synthetic oligonucleotide; AGG chr11 5227261 5227280 5227264 -
ggccaagagatatatcttag

SEQ ID NO: 48680 - DNA, 20 bp, Artificial Sequence
  Synthetic oligonucleotide; GGG chr11 5227260 5227279 5227263 -
gccaagagatatatcttaga

SEQ ID NO: 48681 - DNA, 20 bp, Artificial Sequence
  Synthetic oligonucleotide; GAG chr11 5227258 5227277 5227261 -
caagagatatatcttagagg

SEQ ID NO: 48682 - DNA, 20 bp, Artificial Sequence
  Synthetic oligonucleotide; AGG chr11 5227257 5227276 5227260 -
aagagatatatcttagaggg

SEQ ID NO: 48683 - DNA, 20 bp, Artificial Sequence
  Synthetic oligonucleotide; GGG chr11 5227256 5227275 5227259 -
agagatatatcttagaggga

SEQ ID NO: 48684 - DNA, 20 bp, Artificial Sequence
  Synthetic oligonucleotide; GAG chr11 5227251 5227270 5227254 -
tatatcttagagggagggct

SEQ ID NO: 48685 - DNA, 20 bp, Artificial Sequence
  Synthetic oligonucleotide; AGG chr11 5227250 5227269 5227253 -
atatcttagagggagggctg

SEQ ID NO: 48686 - DNA, 20 bp, Artificial Sequence
  Synthetic oligonucleotide; GGG chr11 5227249 5227268 5227252 -
tatcttagagggagggctga

SEQ ID NO: 48687 - DNA, 20 bp, Artificial Sequence
  Synthetic oligonucleotide; AAG chr11 5227242 5227261 5227245 -
gagggagggctgagggtttg

SEQ ID NO: 48688 - DNA, 20 bp, Artificial Sequence
  Synthetic oligonucleotide; AAG chr11 5227229 5227248 5227232 -
gggtttgaagtccaactcct

SEQ ID NO: 48689 - DNA, 20 bp, Artificial Sequence
  Synthetic oligonucleotide; CAG chr11 5227225 5227244 5227228 -
ttgaagtccaactcctaagc

SEQ ID NO: 48690 - DNA, 20 bp, Artificial Sequence
  Synthetic oligonucleotide; CAG chr11 5227219 5227238 5227222 -
tccaactcctaagccagtgc

SEQ ID NO: 48691 - DNA, 20 bp, Artificial Sequence
  Synthetic oligonucleotide; AAG chr11 5227216 5227235 5227219 -
aactcctaagccagtgccag

SEQ ID NO: 48692 - DNA, 20 bp, Artificial Sequence
  Synthetic oligonucleotide; GAG chr11 5227214 5227233 5227217 -
ctcctaagccagtgccagaa

SEQ ID NO: 48693 - DNA, 20 bp, Artificial Sequence
  Synthetic oligonucleotide; AAG chr11 5227209 5227228 5227212 -
aagccagtgccagaagagcc

SEQ ID NO: 48694 - DNA, 20 bp, Artificial Sequence
  Synthetic oligonucleotide; AGG chr11 5227208 5227227 5227211 -
agccagtgccagaagagcca

SEQ ID NO: 48695 - DNA, 20 bp, Artificial Sequence
  Synthetic oligonucleotide; CAG chr11 5227204 5227223 5227207 -
agtgccagaagagccaagga

SEQ ID NO: 48696 - DNA, 20 bp, Artificial Sequence
  Synthetic oligonucleotide; AGG chr11 5227203 5227222 5227206 -
gtgccagaagagccaaggac

SEQ ID NO: 48697 - DNA, 20 bp, Artificial Sequence
  Synthetic oligonucleotide; CGG chr11 5227198 5227217 5227201 -
agaagagccaaggacaggta

SEQ ID NO: 48698 - DNA, 20 bp, Artificial Sequence
  Synthetic oligonucleotide; TAG chr11 5227184 5227203 5227187 -
caggtacggctgtcatcact

SEQ ID NO: 48699 - DNA, 20 bp, Artificial Sequence
  Synthetic oligonucleotide; TGG chr11 5227170 5227189 5227173 -
atcacttagacctcaccctg

SEQ ID NO: 48700 - DNA, 20 bp, Artificial Sequence
  Synthetic oligonucleotide; GAG chr11 5227168 5227187 5227171 -
cacttagacctcaccctgtg

SEQ ID NO: 48701 - DNA, 20 bp, Artificial Sequence
  Synthetic oligonucleotide; TAG chr11 5227157 5227176 5227160 -
caccctgtggagccacaccc

SEQ ID NO: 48702 - DNA, 20 bp, Artificial Sequence
  Synthetic oligonucleotide; AGG chr11 5227156 5227175 5227159 -
accctgtggagccacaccct

SEQ ID NO: 48703 - DNA, 20 bp, Artificial Sequence
  Synthetic oligonucleotide; GGG chr11 5227155 5227174 5227158 -
ccctgtggagccacacccta

SEQ ID NO: 48704 - DNA, 20 bp, Artificial Sequence
  Synthetic oligonucleotide; TGG chr11 5227151 5227170 5227154 -
gtggagccacaccctagggt

SEQ ID NO: 48705 - DNA, 20 bp, Artificial Sequence
  Synthetic oligonucleotide; CAG chr11 5227136 5227155 5227139 -
agggttggccaatctactcc

SEQ ID NO: 48706 - DNA, 20 bp, Artificial Sequence
  Synthetic oligonucleotide; AGG chr11 5227135 5227154 5227138 -
gggttggccaatctactccc

SEQ ID NO: 48707 - DNA, 20 bp, Artificial Sequence
  Synthetic oligonucleotide; GAG chr11 5227133 5227152 5227136 -
gttggccaatctactcccag

SEQ ID NO: 48708 - DNA, 20 bp, Artificial Sequence
  Synthetic oligonucleotide; CAG chr11 5227130 5227149 5227133 -
ggccaatctactcccaggag

SEQ ID NO: 48709 - DNA, 20 bp, Artificial Sequence
  Synthetic oligonucleotide; AGG chr11 5227129 5227148 5227132 -
gccaatctactcccaggagc

SEQ ID NO: 48710 - DNA, 20 bp, Artificial Sequence
  Synthetic oligonucleotide; GGG chr11 5227128 5227147 5227131 -
ccaatctactcccaggagca

SEQ ID NO: 48711 - DNA, 20 bp, Artificial Sequence
  Synthetic oligonucleotide; GAG chr11 5227126 5227145 5227129 -
aatctactcccaggagcagg

SEQ ID NO: 48712 - DNA, 20 bp, Artificial Sequence
  Synthetic oligonucleotide; AGG chr11 5227125 5227144 5227128 -
atctactcccaggagcaggg

SEQ ID NO: 48713 - DNA, 20 bp, Artificial Sequence
  Synthetic oligonucleotide; GGG chr11 5227124 5227143 5227127 -
tctactcccaggagcaggga

SEQ ID NO: 48714 - DNA, 20 bp, Artificial Sequence
  Synthetic oligonucleotide; CAG chr11 5227121 5227140 5227124 -
actcccaggagcagggaggg

SEQ ID NO: 48715 - DNA, 20 bp, Artificial Sequence
  Synthetic oligonucleotide; AGG chr11 5227120 5227139 5227123 -
ctcccaggagcagggagggc

SEQ ID NO: 48716 - DNA, 20 bp, Artificial Sequence
  Synthetic oligonucleotide; GAG chr11 5227118 5227137 5227121 -
cccaggagcagggagggcag

SEQ ID NO: 48717 - DNA, 20 bp, Artificial Sequence
  Synthetic oligonucleotide; CAG chr11 5227114 5227133 5227117 -
ggagcagggagggcaggagc

SEQ ID NO: 48718 - DNA, 20 bp, Artificial Sequence
  Synthetic oligonucleotide; AGG chr11 5227113 5227132 5227116 -
gagcagggagggcaggagcc

SEQ ID NO: 48719 - DNA, 20 bp, Artificial Sequence
  Synthetic oligonucleotide; GGG chr11 5227112 5227131 5227115 -
agcagggagggcaggagcca

SEQ ID NO: 48720 - DNA, 20 bp, Artificial Sequence
  Synthetic oligonucleotide; TGG chr11 5227108 5227127 5227111 -
gggagggcaggagccagggc

SEQ ID NO: 48721 - DNA, 20 bp, Artificial Sequence
  Synthetic oligonucleotide; GGG chr11 5227107 5227126 5227110 -
ggagggcaggagccagggct

SEQ ID NO: 48722 - DNA, 20 bp, Artificial Sequence
  Synthetic oligonucleotide; AAG chr11 5227099 5227118 5227102 -
ggagccagggctgggcataa

SEQ ID NO: 48723 - DNA, 20 bp, Artificial Sequence
  Synthetic oligonucleotide; CAG chr11 5227095 5227114 5227098 -
ccagggctgggcataaaagt

SEQ ID NO: 48724 - DNA, 20 bp, Artificial Sequence
  Synthetic oligonucleotide; AGG chr11 5227094 5227113 5227097 -
cagggctgggcataaaagtc

SEQ ID NO: 48725 - DNA, 20 bp, Artificial Sequence
  Synthetic oligonucleotide; GGG chr11 5227093 5227112 5227096 -
agggctgggcataaaagtca

SEQ ID NO: 48726 - DNA, 20 bp, Artificial Sequence
  Synthetic oligonucleotide; CAG chr11 5227090 5227109 5227093 -
gctgggcataaaagtcaggg

SEQ ID NO: 48727 - DNA, 20 bp, Artificial Sequence
  Synthetic oligonucleotide; GAG chr11 5227088 5227107 5227091 -
tgggcataaaagtcagggca

SEQ ID NO: 48728 - DNA, 20 bp, Artificial Sequence
  Synthetic oligonucleotide; TAG chr11 5227043 5227062 5227046 -
tctgacacaactgtgttcac

SEQ ID NO: 48729 - DNA, 20 bp, Artificial Sequence
  Synthetic oligonucleotide; CAG chr11 5227030 5227049 5227033 -
tgttcactagcaacctcaaa

SEQ ID NO: 48730 - DNA, 20 bp, Artificial Sequence
  Synthetic oligonucleotide; TGG chr11 5227021 5227040 5227024 -
gcaacctcaaacagacacca

SEQ ID NO: 48731 - DNA, 20 bp, Artificial Sequence
  Synthetic oligonucleotide; GAG chr11 5227004 5227023 5227007 -
ccatggtgcatctgactcct

SEQ ID NO: 48732 - DNA, 20 bp, Artificial Sequence
  Synthetic oligonucleotide; AGG chr11 5227003 5227022 5227006 -
catggtgcatctgactcctg

SEQ ID NO: 48733 - DNA, 20 bp, Artificial Sequence
  Synthetic oligonucleotide; GAG chr11 5227001 5227020 5227004 -
tggtgcatctgactcctgag

SEQ ID NO: 48734 - DNA, 20 bp, Artificial Sequence
  Synthetic oligonucleotide; AAG chr11 5226998 5227017 5227001 -
tgcatctgactcctgaggag

SEQ ID NO: 48735 - DNA, 20 bp, Artificial Sequence
  Synthetic oligonucleotide; TGG chr11 5226977 5226996 5226980 -
agtctgccgttactgccctg

SEQ ID NO: 48736 - DNA, 20 bp, Artificial Sequence
  Synthetic oligonucleotide; GGG chr11 5226976 5226995 5226979 -
gtctgccgttactgccctgt

SEQ ID NO: 48737 - DNA, 20 bp, Artificial Sequence
  Synthetic oligonucleotide; GGG chr11 5226975 5226994 5226978 -
tctgccgttactgccctgtg

SEQ ID NO: 48738 - DNA, 20 bp, Artificial Sequence
  Synthetic oligonucleotide; AAG chr11 5226971 5226990 5226974 -
ccgttactgccctgtggggc

SEQ ID NO: 48739 - DNA, 20 bp, Artificial Sequence
  Synthetic oligonucleotide; AGG chr11 5226970 5226989 5226973 -
cgttactgccctgtggggca

SEQ ID NO: 48740 - DNA, 20 bp, Artificial Sequence
  Synthetic oligonucleotide; TGG chr11 5226961 5226980 5226964 -
cctgtggggcaaggtgaacg

SEQ ID NO: 48741 - DNA, 20 bp, Artificial Sequence
  Synthetic oligonucleotide; AAG chr11 5226955 5226974 5226958 -
gggcaaggtgaacgtggatg

SEQ ID NO: 48742 - DNA, 20 bp, Artificial Sequence
  Synthetic oligonucleotide; TGG chr11 5226951 5226970 5226954 -
aaggtgaacgtggatgaagt

SEQ ID NO: 48743 - DNA, 20 bp, Artificial Sequence
  Synthetic oligonucleotide; TGG chr11 5226948 5226967 5226951 -
gtgaacgtggatgaagttgg

SEQ ID NO: 48744 - DNA, 20 bp, Artificial Sequence
  Synthetic oligonucleotide; GAG chr11 5226944 5226963 5226947 -
acgtggatgaagttggtggt

SEQ ID NO: 48745 - DNA, 20 bp, Artificial Sequence
  Synthetic oligonucleotide; AGG chr11 5226943 5226962 5226946 -
cgtggatgaagttggtggtg

SEQ ID NO: 48746 - DNA, 20 bp, Artificial Sequence
  Synthetic oligonucleotide; TGG chr11 5226937 5226956 5226940 -
tgaagttggtggtgaggccc

SEQ ID NO: 48747 - DNA, 20 bp, Artificial Sequence
  Synthetic oligonucleotide; GGG chr11 5226936 5226955 5226939 -
gaagttggtggtgaggccct

SEQ ID NO: 48748 - DNA, 20 bp, Artificial Sequence
  Synthetic oligonucleotide; CAG chr11 5226933 5226952 5226936 -
gttggtggtgaggccctggg

SEQ ID NO: 48749 - DNA, 20 bp, Artificial Sequence
  Synthetic oligonucleotide; AGG chr11 5226932 5226951 5226935 -
ttggtggtgaggccctgggc

SEQ ID NO: 48750 - DNA, 20 bp, Artificial Sequence
  Synthetic oligonucleotide; TGG chr11 5226928 5226947 5226931 -
tggtgaggccctgggcaggt

SEQ ID NO: 48751 - DNA, 20 bp, Artificial Sequence
  Synthetic oligonucleotide; AAG chr11 5226921 5226940 5226924 -
gccctgggcaggttggtatc

SEQ ID NO: 48752 - DNA, 20 bp, Artificial Sequence
  Synthetic oligonucleotide; AGG chr11 5226920 5226939 5226923 -
ccctgggcaggttggtatca

SEQ ID NO: 48753 - DNA, 20 bp, Artificial Sequence
  Synthetic oligonucleotide; AAG chr11 5226913 5226932 5226916 -
caggttggtatcaaggttac

SEQ ID NO: 48754 - DNA, 20 bp, Artificial Sequence
  Synthetic oligonucleotide; CAG chr11 5226909 5226928 5226912 -
ttggtatcaaggttacaaga

SEQ ID NO: 48755 - DNA, 20 bp, Artificial Sequence
  Synthetic oligonucleotide; AGG chr11 5226908 5226927 5226911 -
tggtatcaaggttacaagac

SEQ ID NO: 48756 - DNA, 20 bp, Artificial Sequence
  Synthetic oligonucleotide; AAG chr11 5226902 5226921 5226905 -
caaggttacaagacaggttt

SEQ ID NO: 48757 - DNA, 20 bp, Artificial Sequence
  Synthetic oligonucleotide; AGG chr11 5226901 5226920 5226904 -
aaggttacaagacaggttta

SEQ ID NO: 48758 - DNA, 20 bp, Artificial Sequence
  Synthetic oligonucleotide; GAG chr11 5226899 5226918 5226902 -
ggttacaagacaggtttaag

SEQ ID NO: 48759 - DNA, 20 bp, Artificial Sequence
  Synthetic oligonucleotide; TAG chr11 5226891 5226910 5226894 -
gacaggtttaaggagaccaa

SEQ ID NO: 48760 - DNA, 20 bp, Artificial Sequence
  Synthetic oligonucleotide; TGG chr11 5226884 5226903 5226887 -
ttaaggagaccaatagaaac

SEQ ID NO: 48761 - DNA, 20 bp, Artificial Sequence
  Synthetic oligonucleotide; GGG chr11 5226883 5226902 5226886 -
taaggagaccaatagaaact

SEQ ID NO: 48762 - DNA, 20 bp, Artificial Sequence
  Synthetic oligonucleotide; TGG chr11 5226876 5226895 5226879 -
accaatagaaactgggcatg

SEQ ID NO: 48763 - DNA, 20 bp, Artificial Sequence
  Synthetic oligonucleotide; GAG chr11 5226874 5226893 5226877 -
caatagaaactgggcatgtg

SEQ ID NO: 48764 - DNA, 20 bp, Artificial Sequence
  Synthetic oligonucleotide; CAG chr11 5226870 5226889 5226873 -
agaaactgggcatgtggaga

SEQ ID NO: 48765 - DNA, 20 bp, Artificial Sequence
  Synthetic oligonucleotide; GAG chr11 5226868 5226887 5226871 -
aaactgggcatgtggagaca

SEQ ID NO: 48766 - DNA, 20 bp, Artificial Sequence
  Synthetic oligonucleotide; AAG chr11 5226865 5226884 5226868 -
ctgggcatgtggagacagag

SEQ ID NO: 48767 - DNA, 20 bp, Artificial Sequence
  Synthetic oligonucleotide; TGG chr11 5226857 5226876 5226860 -
gtggagacagagaagactct

SEQ ID NO: 48768 - DNA, 20 bp, Artificial Sequence
  Synthetic oligonucleotide; GGG chr11 5226856 5226875 5226859 -
tggagacagagaagactctt

SEQ ID NO: 48769 - DNA, 20 bp, Artificial Sequence
  Synthetic oligonucleotide; TAG chr11 5226846 5226865 5226849 -
gaagactcttgggtttctga

SEQ ID NO: 48770 - DNA, 20 bp, Artificial Sequence
  Synthetic oligonucleotide; AGG chr11 5226845 5226864 5226848 -
aagactcttgggtttctgat

SEQ ID NO: 48771 - DNA, 20 bp, Artificial Sequence
  Synthetic oligonucleotide; TGG chr11 5226822 5226841 5226825 -
cactgactctctctgcctat

SEQ ID NO: 48772 - DNA, 20 bp, Artificial Sequence
  Synthetic oligonucleotide; TAG chr11 5226803 5226822 5226806 -
ttggtctattttcccaccct

SEQ ID NO: 48773 - DNA, 20 bp, Artificial Sequence
  Synthetic oligonucleotide; AGG chr11 5226802 5226821 5226805 -
tggtctattttcccaccctt

SEQ ID NO: 48774 - DNA, 20 bp, Artificial Sequence
  Synthetic oligonucleotide; TGG chr11 5226795 5226814 5226798 -
ttttcccacccttaggctgc

SEQ ID NO: 48775 - DNA, 20 bp, Artificial Sequence
  Synthetic oligonucleotide; TGG chr11 5226792 5226811 5226795 -
tcccacccttaggctgctgg

SEQ ID NO: 48776 - DNA, 20 bp, Artificial Sequence
  Synthetic oligonucleotide; TGG chr11 5226781 5226800 5226784 -
ggctgctggtggtctaccct

SEQ ID NO: 48777 - DNA, 20 bp, Artificial Sequence
  Synthetic oligonucleotide; CAG chr11 5226775 5226794 5226778 -
tggtggtctacccttggacc

SEQ ID NO: 48778 - DNA, 20 bp, Artificial Sequence
  Synthetic oligonucleotide; GAG chr11 5226773 5226792 5226776 -
gtggtctacccttggaccca

SEQ ID NO: 48779 - DNA, 20 bp, Artificial Sequence
  Synthetic oligonucleotide; AGG chr11 5226772 5226791 5226775 -
tggtctacccttggacccag

SEQ ID NO: 48780 - DNA, 20 bp, Artificial Sequence
  Synthetic oligonucleotide; GAG chr11 5226763 5226782 5226766 -
cttggacccagaggttcttt

SEQ ID NO: 48781 - DNA, 20 bp, Artificial Sequence
  Synthetic oligonucleotide; TGG chr11 5226755 5226774 5226758 -
cagaggttctttgagtcctt

SEQ ID NO: 48782 - DNA, 20 bp, Artificial Sequence
  Synthetic oligonucleotide; GGG chr11 5226754 5226773 5226757 -
agaggttctttgagtccttt

SEQ ID NO: 48783 - DNA, 20 bp, Artificial Sequence
  Synthetic oligonucleotide; GGG chr11 5226753 5226772 5226756 -
gaggttctttgagtcctttg

SEQ ID NO: 48784 - DNA, 20 bp, Artificial Sequence
  Synthetic oligonucleotide; TGG chr11 5226726 5226745 5226729 -
gtccactcctgatgctgtta

SEQ ID NO: 48785 - DNA, 20 bp, Artificial Sequence
  Synthetic oligonucleotide; GGG chr11 5226725 5226744 5226728 -
tccactcctgatgctgttat

SEQ ID NO: 48786 - DNA, 20 bp, Artificial Sequence
  Synthetic oligonucleotide; AAG chr11 5226715 5226734 5226718 -
atgctgttatgggcaaccct

SEQ ID NO: 48787 - DNA, 20 bp, Artificial Sequence
  Synthetic oligonucleotide; AGG chr11 5226714 5226733 5226717 -
tgctgttatgggcaacccta

SEQ ID NO: 48788 - DNA, 20 bp, Artificial Sequence
  Synthetic oligonucleotide; AAG chr11 5226709 5226728 5226712 -
ttatgggcaaccctaaggtg

SEQ ID NO: 48789 - DNA, 20 bp, Artificial Sequence
  Synthetic oligonucleotide; AGG chr11 5226708 5226727 5226711 -
tatgggcaaccctaaggtga

SEQ ID NO: 48790 - DNA, 20 bp, Artificial Sequence
  Synthetic oligonucleotide; TGG chr11 5226701 5226720 5226704 -
aaccctaaggtgaaggctca

SEQ ID NO: 48791 - DNA, 20 bp, Artificial Sequence
  Synthetic oligonucleotide; AAG chr11 5226697 5226716 5226700 -
ctaaggtgaaggctcatggc

SEQ ID NO: 48792 - DNA, 20 bp, Artificial Sequence
  Synthetic oligonucleotide; AAG chr11 5226693 5226712 5226696 -
ggtgaaggctcatggcaaga

SEQ ID NO: 48793 - DNA, 20 bp, Artificial Sequence
  Synthetic oligonucleotide; CGG chr11 5226686 5226705 5226689 -
gctcatggcaagaaagtgct

SEQ ID NO: 48794 - DNA, 20 bp, Artificial Sequence
  Synthetic oligonucleotide; TAG chr11 5226677 5226696 5226680 -
aagaaagtgctcggtgcctt

SEQ ID NO: 48795 - DNA, 20 bp, Artificial Sequence
  Synthetic oligonucleotide; TGG chr11 5226671 5226690 5226674 -
gtgctcggtgcctttagtga

SEQ ID NO: 48796 - DNA, 20 bp, Artificial Sequence
  Synthetic oligonucleotide; TGG chr11 5226666 5226685 5226669 -
cggtgcctttagtgatggcc

SEQ ID NO: 48797 - DNA, 20 bp, Artificial Sequence
  Synthetic oligonucleotide; TGG chr11 5226657 5226676 5226660 -
tagtgatggcctggctcacc

SEQ ID NO: 48798 - DNA, 20 bp, Artificial Sequence
  Synthetic oligonucleotide; AAG chr11 5226646 5226665 5226649 -
tggctcacctggacaacctc

SEQ ID NO: 48799 - DNA, 20 bp, Artificial Sequence
  Synthetic oligonucleotide; AGG chr11 5226645 5226664 5226648 -
ggctcacctggacaacctca

SEQ ID NO: 48800 - DNA, 20 bp, Artificial Sequence
  Synthetic oligonucleotide; GGG chr11 5226644 5226663 5226647 -
gctcacctggacaacctcaa

SEQ ID NO: 48801 - DNA, 20 bp, Artificial Sequence
  Synthetic oligonucleotide; GAG chr11 5226626 5226645 5226629 -
aagggcacctttgccacact

SEQ ID NO: 48802 - DNA, 20 bp, Artificial Sequence
  Synthetic oligonucleotide; GAG chr11 5226622 5226641 5226625 -
gcacctttgccacactgagt

SEQ ID NO: 48803 - DNA, 20 bp, Artificial Sequence
  Synthetic oligonucleotide; AAG chr11 5226607 5226626 5226610 -
tgagtgagctgcactgtgac

SEQ ID NO: 48804 - DNA, 20 bp, Artificial Sequence
  Synthetic oligonucleotide; TGG chr11 5226597 5226616 5226600 -
gcactgtgacaagctgcacg

SEQ ID NO: 48805 - DNA, 20 bp, Artificial Sequence
  Synthetic oligonucleotide; GAG chr11 5226589 5226608 5226592 -
acaagctgcacgtggatcct

SEQ ID NO: 48806 - DNA, 20 bp, Artificial Sequence
  Synthetic oligonucleotide; CAG chr11 5226581 5226600 5226584 -
cacgtggatcctgagaactt

SEQ ID NO: 48807 - DNA, 20 bp, Artificial Sequence
  Synthetic oligonucleotide; AGG chr11 5226580 5226599 5226583 -
acgtggatcctgagaacttc

SEQ ID NO: 48808 - DNA, 20 bp, Artificial Sequence
  Synthetic oligonucleotide; GGG chr11 5226579 5226598 5226582 -
cgtggatcctgagaacttca

SEQ ID NO: 48809 - DNA, 20 bp, Artificial Sequence
  Synthetic oligonucleotide; GAG chr11 5226575 5226594 5226578 -
gatcctgagaacttcagggt

SEQ ID NO: 48810 - DNA, 20 bp, Artificial Sequence
  Synthetic oligonucleotide; TGG chr11 5226568 5226587 5226571 -
agaacttcagggtgagtcta

SEQ ID NO: 48811 - DNA, 20 bp, Artificial Sequence
  Synthetic oligonucleotide; GGG chr11 5226567 5226586 5226570 -
gaacttcagggtgagtctat

SEQ ID NO: 48812 - DNA, 20 bp, Artificial Sequence
  Synthetic oligonucleotide; TGG chr11 5226532 5226551 5226535 -
ttctttccccttcttttcta

SEQ ID NO: 48813 - DNA, 20 bp, Artificial Sequence
  Synthetic oligonucleotide; AAG chr11 5226527 5226546 5226530 -
tccccttcttttctatggtt

SEQ ID NO: 48814 - DNA, 20 bp, Artificial Sequence
  Synthetic oligonucleotide; TAG chr11 5226515 5226534 5226518 -
ctatggttaagttcatgtca

SEQ ID NO: 48815 - DNA, 20 bp, Artificial Sequence
  Synthetic oligonucleotide; AGG chr11 5226514 5226533 5226517 -
tatggttaagttcatgtcat

SEQ ID NO: 48816 - DNA, 20 bp, Artificial Sequence
  Synthetic oligonucleotide; AAG chr11 5226511 5226530 5226514 -
ggttaagttcatgtcatagg

SEQ ID NO: 48817 - DNA, 20 bp, Artificial Sequence
  Synthetic oligonucleotide; AGG chr11 5226510 5226529 5226513 -
gttaagttcatgtcatagga

SEQ ID NO: 48818 - DNA, 20 bp, Artificial Sequence
  Synthetic oligonucleotide; GGG chr11 5226509 5226528 5226512 -
ttaagttcatgtcataggaa

SEQ ID NO: 48819 - DNA, 20 bp, Artificial Sequence
  Synthetic oligonucleotide; GGG chr11 5226508 5226527 5226511 -
taagttcatgtcataggaag

SEQ ID NO: 48820 - DNA, 20 bp, Artificial Sequence
  Synthetic oligonucleotide; AAG chr11 5226503 5226522 5226506 -
tcatgtcataggaaggggat

SEQ ID NO: 48821 - DNA, 20 bp, Artificial Sequence
  Synthetic oligonucleotide; CAG chr11 5226497 5226516 5226500 -
cataggaaggggataagtaa

SEQ ID NO: 48822 - DNA, 20 bp, Artificial Sequence
  Synthetic oligonucleotide; AGG chr11 5226496 5226515 5226499 -
ataggaaggggataagtaac

SEQ ID NO: 48823 - DNA, 20 bp, Artificial Sequence
  Synthetic oligonucleotide; GGG chr11 5226495 5226514 5226498 -
taggaaggggataagtaaca

SEQ ID NO: 48824 - DNA, 20 bp, Artificial Sequence
  Synthetic oligonucleotide; CAG chr11 5226490 5226509 5226493 -
aggggataagtaacagggta

SEQ ID NO: 48825 - DNA, 20 bp, Artificial Sequence
  Synthetic oligonucleotide; TAG chr11 5226485 5226504 5226488 -
ataagtaacagggtacagtt

SEQ ID NO: 48826 - DNA, 20 bp, Artificial Sequence
  Synthetic oligonucleotide; TGG chr11 5226480 5226499 5226483 -
taacagggtacagtttagaa

SEQ ID NO: 48827 - DNA, 20 bp, Artificial Sequence
  Synthetic oligonucleotide; GGG chr11 5226479 5226498 5226482 -
aacagggtacagtttagaat

SEQ ID NO: 48828 - DNA, 20 bp, Artificial Sequence
  Synthetic oligonucleotide; CAG chr11 5226473 5226492 5226476 -
gtacagtttagaatgggaaa

SEQ ID NO: 48829 - DNA, 20 bp, Artificial Sequence
  Synthetic oligonucleotide; CAG chr11 5226456 5226475 5226459 -
aaacagacgaatgattgcat

SEQ ID NO: 48830 - DNA, 20 bp, Artificial Sequence
  Synthetic oligonucleotide; TGG chr11 5226451 5226470 5226454 -
gacgaatgattgcatcagtg

SEQ ID NO: 48831 - DNA, 20 bp, Artificial Sequence
  Synthetic oligonucleotide; AAG chr11 5226448 5226467 5226451 -
gaatgattgcatcagtgtgg

SEQ ID NO: 48832 - DNA, 20 bp, Artificial Sequence
  Synthetic oligonucleotide; CAG chr11 5226442 5226461 5226445 -
ttgcatcagtgtggaagtct

SEQ ID NO: 48833 - DNA, 20 bp, Artificial Sequence
  Synthetic oligonucleotide; AGG chr11 5226441 5226460 5226444 -
tgcatcagtgtggaagtctc

SEQ ID NO: 48834 - DNA, 20 bp, Artificial Sequence
  Synthetic oligonucleotide; TAG chr11 5226431 5226450 5226434 -
tggaagtctcaggatcgttt

SEQ ID NO: 48835 - DNA, 20 bp, Artificial Sequence
  Synthetic oligonucleotide; AAG chr11 5226311 5226330 5226314 -
cttaacattgtgtataacaa

SEQ ID NO: 48836 - DNA, 20 bp, Artificial Sequence
  Synthetic oligonucleotide; AGG chr11 5226310 5226329 5226313 -
ttaacattgtgtataacaaa

SEQ ID NO: 48837 - DNA, 20 bp, Artificial Sequence
  Synthetic oligonucleotide; GAG chr11 5226297 5226316 5226300 -
taacaaaaggaaatatctct

SEQ ID NO: 48838 - DNA, 20 bp, Artificial Sequence
  Synthetic oligonucleotide; AAG chr11 5226287 5226306 5226290 -
aaatatctctgagatacatt

SEQ ID NO: 48839 - DNA, 20 bp, Artificial Sequence
  Synthetic oligonucleotide; CAG chr11 5226262 5226281 5226265 -
acttaaaaaaaaactttaca

SEQ ID NO: 48840 - DNA, 20 bp, Artificial Sequence
  Synthetic oligonucleotide; TAG chr11 5226253 5226272 5226256 -
aaaactttacacagtctgcc

SEQ ID NO: 48841 - DNA, 20 bp, Artificial Sequence
  Synthetic oligonucleotide; TGG chr11 5226238 5226257 5226241 -
ctgcctagtacattactatt

SEQ ID NO: 48842 - DNA, 20 bp, Artificial Sequence
  Synthetic oligonucleotide; TGG chr11 5226147 5226166 5226150 -
ataatcattatacatattta

SEQ ID NO: 48843 - DNA, 20 bp, Artificial Sequence
  Synthetic oligonucleotide; GGG chr11 5226146 5226165 5226149 -
taatcattatacatatttat

SEQ ID NO: 48844 - DNA, 20 bp, Artificial Sequence
  Synthetic oligonucleotide; AAG chr11 5226140 5226159 5226143 -
ttatacatatttatgggtta

SEQ ID NO: 48845 - DNA, 20 bp, Artificial Sequence
  Synthetic oligonucleotide; CAG chr11 5226100 5226119 5226103 -
tgtacacatattgaccaaat

SEQ ID NO: 48846 - DNA, 20 bp, Artificial Sequence
  Synthetic oligonucleotide; AGG chr11 5226099 5226118 5226102 -
gtacacatattgaccaaatc

SEQ ID NO: 48847 - DNA, 20 bp, Artificial Sequence
  Synthetic oligonucleotide; GGG chr11 5226098 5226117 5226101 -
tacacatattgaccaaatca

SEQ ID NO: 48848 - DNA, 20 bp, Artificial Sequence
  Synthetic oligonucleotide; CAG chr11 5226001 5226020 5226004 -
tttccctaatctctttcttt

SEQ ID NO: 48849 - DNA, 20 bp, Artificial Sequence
  Synthetic oligonucleotide; AGG chr11 5226000 5226019 5226003 -
ttccctaatctctttctttc

SEQ ID NO: 48850 - DNA, 20 bp, Artificial Sequence
  Synthetic oligonucleotide; GGG chr11 5225999 5226018 5226002 -
tccctaatctctttctttca

SEQ ID NO: 48851 - DNA, 20 bp, Artificial Sequence
  Synthetic oligonucleotide; AAG chr11 5225955 5225974 5225958 -
tgcctctttgcaccattcta

SEQ ID NO: 48852 - DNA, 20 bp, Artificial Sequence
  Synthetic oligonucleotide; CAG chr11 5225947 5225966 5225950 -
tgcaccattctaaagaataa

SEQ ID NO: 48853 - DNA, 20 bp, Artificial Sequence
  Synthetic oligonucleotide; TGG chr11 5225934 5225953 5225937 -
agaataacagtgataatttc

SEQ ID NO: 48854 - DNA, 20 bp, Artificial Sequence
  Synthetic oligonucleotide; GGG chr11 5225933 5225952 5225936 -
gaataacagtgataatttct

SEQ ID NO: 48855 - DNA, 20 bp, Artificial Sequence
  Synthetic oligonucleotide; AAG chr11 5225928 5225947 5225931 -
acagtgataatttctgggtt

SEQ ID NO: 48856 - DNA, 20 bp, Artificial Sequence
  Synthetic oligonucleotide; AGG chr11 5225927 5225946 5225930 -
cagtgataatttctgggtta

SEQ ID NO: 48857 - DNA, 20 bp, Artificial Sequence
  Synthetic oligonucleotide; TAG chr11 5225921 5225940 5225924 -
taatttctgggttaaggcaa

SEQ ID NO: 48858 - DNA, 20 bp, Artificial Sequence
  Synthetic oligonucleotide; AAG chr11 5225870 5225889 5225873 -
atataaattgtaactgatgt

SEQ ID NO: 48859 - DNA, 20 bp, Artificial Sequence
  Synthetic oligonucleotide; GAG chr11 5225868 5225887 5225871 -
ataaattgtaactgatgtaa

SEQ ID NO: 48860 - DNA, 20 bp, Artificial Sequence
  Synthetic oligonucleotide; AGG chr11 5225867 5225886 5225870 -
taaattgtaactgatgtaag

SEQ ID NO: 48861 - DNA, 20 bp, Artificial Sequence
  Synthetic oligonucleotide; TAG chr11 5225850 5225869 5225853 -
aagaggtttcatattgctaa

SEQ ID NO: 48862 - DNA, 20 bp, Artificial Sequence
  Synthetic oligonucleotide; CAG chr11 5225847 5225866 5225850 -
aggtttcatattgctaatag

SEQ ID NO: 48863 - DNA, 20 bp, Artificial Sequence
  Synthetic oligonucleotide; CAG chr11 5225836 5225855 5225839 -
tgctaatagcagctacaatc

SEQ ID NO: 48864 - DNA, 20 bp, Artificial Sequence
  Synthetic oligonucleotide; TGG chr11 5225811 5225830 5225814 -
accattctgcttttatttta

SEQ ID NO: 48865 - DNA, 20 bp, Artificial Sequence
  Synthetic oligonucleotide; TGG chr11 5225807 5225826 5225810 -
ttctgcttttattttatggt

SEQ ID NO: 48866 - DNA, 20 bp, Artificial Sequence
  Synthetic oligonucleotide; GGG chr11 5225806 5225825 5225809 -
tctgcttttattttatggtt

SEQ ID NO: 48867 - DNA, 20 bp, Artificial Sequence
  Synthetic oligonucleotide; AAG chr11 5225801 5225820 5225804 -
ttttattttatggttgggat

SEQ ID NO: 48868 - DNA, 20 bp, Artificial Sequence
  Synthetic oligonucleotide; AGG chr11 5225800 5225819 5225803 -
tttattttatggttgggata

SEQ ID NO: 48869 - DNA, 20 bp, Artificial Sequence
  Synthetic oligonucleotide; TGG chr11 5225796 5225815 5225799 -
ttttatggttgggataaggc

SEQ ID NO: 48870 - DNA, 20 bp, Artificial Sequence
  Synthetic oligonucleotide; GAG chr11 5225785 5225804 5225788 -
ggataaggctggattattct

SEQ ID NO: 48871 - DNA, 20 bp, Artificial Sequence
  Synthetic oligonucleotide; AAG chr11 5225779 5225798 5225782 -
ggctggattattctgagtcc

SEQ ID NO: 48872 - DNA, 20 bp, Artificial Sequence
  Synthetic oligonucleotide; TAG chr11 5225775 5225794 5225778 -
ggattattctgagtccaagc

SEQ ID NO: 48873 - DNA, 20 bp, Artificial Sequence
  Synthetic oligonucleotide; AGG chr11 5225774 5225793 5225777 -
gattattctgagtccaagct

SEQ ID NO: 48874 - DNA, 20 bp, Artificial Sequence
  Synthetic oligonucleotide; CAG chr11 5225730 5225749 5225733 -
tacctcttatcttcctccca

SEQ ID NO: 48875 - DNA, 20 bp, Artificial Sequence
  Synthetic oligonucleotide; TGG chr11 5225723 5225742 5225726 -
tatcttcctcccacagctcc

SEQ ID NO: 48876 - DNA, 20 bp, Artificial Sequence
  Synthetic oligonucleotide; GGG chr11 5225722 5225741 5225725 -
atcttcctcccacagctcct

SEQ ID NO: 48877 - DNA, 20 bp, Artificial Sequence
  Synthetic oligonucleotide; TGG chr11 5225711 5225730 5225714 -
acagctcctgggcaacgtgc

SEQ ID NO: 48878 - DNA, 20 bp, Artificial Sequence
  Synthetic oligonucleotide; TGG chr11 5225699 5225718 5225702 -
caacgtgctggtctgtgtgc

SEQ ID NO: 48879 - DNA, 20 bp, Artificial Sequence
  Synthetic oligonucleotide; TGG chr11 5225686 5225705 5225689 -
tgtgtgctggcccatcactt

SEQ ID NO: 48880 - DNA, 20 bp, Artificial Sequence
  Synthetic oligonucleotide; AAG chr11 5225681 5225700 5225684 -
gctggcccatcactttggca

SEQ ID NO: 48881 - DNA, 20 bp, Artificial Sequence
  Synthetic oligonucleotide; CAG chr11 5225666 5225685 5225669 -
tggcaaagaattcaccccac

SEQ ID NO: 48882 - DNA, 20 bp, Artificial Sequence
  Synthetic oligonucleotide; CAG chr11 5225661 5225680 5225664 -
aagaattcaccccaccagtg

SEQ ID NO: 48883 - DNA, 20 bp, Artificial Sequence
  Synthetic oligonucleotide; AGG chr11 5225660 5225679 5225663 -
agaattcaccccaccagtgc

SEQ ID NO: 48884 - DNA, 20 bp, Artificial Sequence
  Synthetic oligonucleotide; CAG chr11 5225649 5225668 5225652 -
caccagtgcaggctgcctat

SEQ ID NO: 48885 - DNA, 20 bp, Artificial Sequence
  Synthetic oligonucleotide; AAG chr11 5225645 5225664 5225648 -
agtgcaggctgcctatcaga

SEQ ID NO: 48886 - DNA, 20 bp, Artificial Sequence
  Synthetic oligonucleotide; TGG chr11 5225642 5225661 5225645 -
gcaggctgcctatcagaaag

SEQ ID NO: 48887 - DNA, 20 bp, Artificial Sequence
  Synthetic oligonucleotide; TGG chr11 5225639 5225658 5225642 -
ggctgcctatcagaaagtgg

SEQ ID NO: 48888 - DNA, 20 bp, Artificial Sequence
  Synthetic oligonucleotide; TGG chr11 5225635 5225654 5225638 -
gcctatcagaaagtggtggc

SEQ ID NO: 48889 - DNA, 20 bp, Artificial Sequence
  Synthetic oligonucleotide; TGG chr11 5225630 5225649 5225633 -
tcagaaagtggtggctggtg

SEQ ID NO: 48890 - DNA, 20 bp, Artificial Sequence
  Synthetic oligonucleotide; TGG chr11 5225618 5225637 5225621 -
ggctggtgtggctaatgccc

SEQ ID NO: 48891 - DNA, 20 bp, Artificial Sequence
  Synthetic oligonucleotide; AAG chr11 5225610 5225629 5225613 -
tggctaatgccctggcccac

SEQ ID NO: 48892 - DNA, 20 bp, Artificial Sequence
  Synthetic oligonucleotide; AAG chr11 5225600 5225619 5225603 -
cctggcccacaagtatcact

SEQ ID NO: 48893 - DNA, 20 bp, Artificial Sequence
  Synthetic oligonucleotide; AAG chr11 5225568 5225587 5225571 -
ttgctgtccaatttctatta

SEQ ID NO: 48894 - DNA, 20 bp, Artificial Sequence
  Synthetic oligonucleotide; AGG chr11 5225567 5225586 5225570 -
tgctgtccaatttctattaa

SEQ ID NO: 48895 - DNA, 20 bp, Artificial Sequence
  Synthetic oligonucleotide; AAG chr11 5225550 5225569 5225553 -
taaaggttcctttgttccct

SEQ ID NO: 48896 - DNA, 20 bp, Artificial Sequence
  Synthetic oligonucleotide; TGG chr11 5225533 5225552 5225536 -
cctaagtccaactactaaac

SEQ ID NO: 48897 - DNA, 20 bp, Artificial Sequence
  Synthetic oligonucleotide; GGG chr11 5225532 5225551 5225535 -
ctaagtccaactactaaact

SEQ ID NO: 48898 - DNA, 20 bp, Artificial Sequence
  Synthetic oligonucleotide; GGG chr11 5225531 5225550 5225534 -
taagtccaactactaaactg

SEQ ID NO: 48899 - DNA, 20 bp, Artificial Sequence
  Synthetic oligonucleotide; GGG chr11 5225530 5225549 5225533 -
aagtccaactactaaactgg

SEQ ID NO: 48900 - DNA, 20 bp, Artificial Sequence
  Synthetic oligonucleotide; AAG chr11 5225519 5225538 5225522 -
ctaaactgggggatattatg

SEQ ID NO: 48901 - DNA, 20 bp, Artificial Sequence
  Synthetic oligonucleotide; AGG chr11 5225518 5225537 5225521 -
taaactgggggatattatga

SEQ ID NO: 48902 - DNA, 20 bp, Artificial Sequence
  Synthetic oligonucleotide; GGG chr11 5225517 5225536 5225520 -
aaactgggggatattatgaa

SEQ ID NO: 48903 - DNA, 20 bp, Artificial Sequence
  Synthetic oligonucleotide; GAG chr11 5225510 5225529 5225513 -
gggatattatgaagggcctt

SEQ ID NO: 48904 - DNA, 20 bp, Artificial Sequence
  Synthetic oligonucleotide; TGG chr11 5225503 5225522 5225506 -
tatgaagggccttgagcatc

SEQ ID NO: 48905 - DNA, 20 bp, Artificial Sequence
  Synthetic oligonucleotide; AAG chr11 5225428 5225447 5225431 -
tttctgaatattttactaaa

SEQ ID NO: 48906 - DNA, 20 bp, Artificial Sequence
  Synthetic oligonucleotide; AGG chr11 5225427 5225446 5225430 -
ttctgaatattttactaaaa

SEQ ID NO: 48907 - DNA, 20 bp, Artificial Sequence
  Synthetic oligonucleotide; GGG chr11 5225426 5225445 5225429 -
tctgaatattttactaaaaa

SEQ ID NO: 48908 - DNA, 20 bp, Artificial Sequence
  Synthetic oligonucleotide; TGG chr11 5225419 5225438 5225422 -
attttactaaaaagggaatg

SEQ ID NO: 48909 - DNA, 20 bp, Artificial Sequence
  Synthetic oligonucleotide; GGG chr11 5225418 5225437 5225421 -
ttttactaaaaagggaatgt

SEQ ID NO: 48910 - DNA, 20 bp, Artificial Sequence
  Synthetic oligonucleotide; GAG chr11 5225416 5225435 5225419 -
ttactaaaaagggaatgtgg

SEQ ID NO: 48911 - DNA, 20 bp, Artificial Sequence
  Synthetic oligonucleotide; AGG chr11 5225415 5225434 5225418 -
tactaaaaagggaatgtggg

SEQ ID NO: 48912 - DNA, 20 bp, Artificial Sequence
  Synthetic oligonucleotide; CAG chr11 5225411 5225430 5225414 -
aaaaagggaatgtgggaggt

SEQ ID NO: 48913 - DNA, 20 bp, Artificial Sequence
  Synthetic oligonucleotide; AAG chr11 5225393 5225412 5225396 -
gtcagtgcatttaaaacata

SEQ ID NO: 48914 - DNA, 20 bp, Artificial Sequence
  Synthetic oligonucleotide; AAG chr11 5225385 5225404 5225388 -
atttaaaacataaagaaatg

SEQ ID NO: 48915 - DNA, 20 bp, Artificial Sequence
  Synthetic oligonucleotide; GAG chr11 5225383 5225402 5225386 -
ttaaaacataaagaaatgaa

SEQ ID NO: 48916 - DNA, 20 bp, Artificial Sequence
  Synthetic oligonucleotide; TAG chr11 5225379 5225398 5225382 -
aacataaagaaatgaagagc

SEQ ID NO: 48917 - DNA, 20 bp, Artificial Sequence
  Synthetic oligonucleotide; TGG chr11 5225367 5225386 5225370 -
tgaagagctagttcaaacct

SEQ ID NO: 48918 - DNA, 20 bp, Artificial Sequence
  Synthetic oligonucleotide; GGG chr11 5225366 5225385 5225369 -
gaagagctagttcaaacctt

SEQ ID NO: 48919 - DNA, 20 bp, Artificial Sequence
  Synthetic oligonucleotide; AAG chr11 5225335 5225354 5225338 -
ctatatcttaaactccatga

SEQ ID NO: 48920 - DNA, 20 bp, Artificial Sequence
  Synthetic oligonucleotide; AAG chr11 5225332 5225351 5225335 -
tatcttaaactccatgaaag

SEQ ID NO: 48921 - DNA, 20 bp, Artificial Sequence
  Synthetic oligonucleotide; AGG chr11 5225331 5225350 5225334 -
atcttaaactccatgaaaga

SEQ ID NO: 48922 - DNA, 20 bp, Artificial Sequence
  Synthetic oligonucleotide; GAG chr11 5225327 5225346 5225330 -
taaactccatgaaagaaggt

SEQ ID NO: 48923 - DNA, 20 bp, Artificial Sequence
  Synthetic oligonucleotide; AGG chr11 5225326 5225345 5225329 -
aaactccatgaaagaaggtg

SEQ ID NO: 48924 - DNA, 20 bp, Artificial Sequence
  Synthetic oligonucleotide; CAG chr11 5225316 5225335 5225319 -
aaagaaggtgaggctgcaaa

SEQ ID NO: 48925 - DNA, 20 bp, Artificial Sequence
  Synthetic oligonucleotide; TGG chr11 5225302 5225321 5225305 -
tgcaaacagctaatgcacat

SEQ ID NO: 48926 - DNA, 20 bp, Artificial Sequence
  Synthetic oligonucleotide; CAG chr11 5225296 5225315 5225299 -
cagctaatgcacattggcaa

SEQ ID NO: 48927 - DNA, 20 bp, Artificial Sequence
  Synthetic oligonucleotide; CAG chr11 5225264 5225283 5225267 -
catatgccttattcatccct

SEQ ID NO: 48928 - DNA, 20 bp, Artificial Sequence
  Synthetic oligonucleotide; AAG chr11 5225259 5225278 5225262 -
gccttattcatccctcagaa

SEQ ID NO: 48929 - DNA, 20 bp, Artificial Sequence
  Synthetic oligonucleotide; AGG chr11 5225258 5225277 5225261 -
ccttattcatccctcagaaa

SEQ ID NO: 48930 - DNA, 20 bp, Artificial Sequence
  Synthetic oligonucleotide; AAG chr11 5225251 5225270 5225254 -
catccctcagaaaaggattc

SEQ ID NO: 48931 - DNA, 20 bp, Artificial Sequence
  Synthetic oligonucleotide; TAG chr11 5225248 5225267 5225251 -
ccctcagaaaaggattcaag

SEQ ID NO: 48932 - DNA, 20 bp, Artificial Sequence
  Synthetic oligonucleotide; GAG chr11 5225246 5225265 5225249 -
ctcagaaaaggattcaagta

SEQ ID NO: 48933 - DNA, 20 bp, Artificial Sequence
  Synthetic oligonucleotide; AGG chr11 5225245 5225264 5225248 -
tcagaaaaggattcaagtag

SEQ ID NO: 48934 - DNA, 20 bp, Artificial Sequence
  Synthetic oligonucleotide; TGG chr11 5225235 5225254 5225238 -
attcaagtagaggcttgatt

SEQ ID NO: 48935 - DNA, 20 bp, Artificial Sequence
  Synthetic oligonucleotide; GAG chr11 5225233 5225252 5225236 -
tcaagtagaggcttgatttg

SEQ ID NO: 48936 - DNA, 20 bp, Artificial Sequence
  Synthetic oligonucleotide; AGG chr11 5225232 5225251 5225235 -
caagtagaggcttgatttgg

SEQ ID NO: 48937 - DNA, 20 bp, Artificial Sequence
  Synthetic oligonucleotide; AAG chr11 5225226 5225245 5225229 -
gaggcttgatttggaggtta

SEQ ID NO: 48938 - DNA, 20 bp, Artificial Sequence
  Synthetic oligonucleotide; TAG chr11 5225188 5225207 5225191 -
ttttacattacttattgttt

SEQ ID NO: 48939 - DNA, 20 bp, Artificial Sequence
  Synthetic oligonucleotide; CAG chr11 5225135 5225154 5225138 -
tttgcttatcctgcatctct

SEQ ID NO: 48940 - DNA, 20 bp, Artificial Sequence
  Synthetic oligonucleotide; CAG chr11 5225119 5225138 5225122 -
ctctcagccttgactccact

SEQ ID NO: 48941 - DNA, 20 bp, Artificial Sequence
  Synthetic oligonucleotide; TAG chr11 5225106 5225125 5225109 -
ctccactcagttctcttgct

SEQ ID NO: 48942 - DNA, 20 bp, Artificial Sequence
  Synthetic oligonucleotide; GAG chr11 5225104 5225123 5225107 -
ccactcagttctcttgctta

SEQ ID NO: 48943 - DNA, 20 bp, Artificial Sequence
  Synthetic oligonucleotide; AAG chr11 5225084 5225103 5225087 -
gagataccacctttcccctg

SEQ ID NO: 48944 - DNA, 20 bp, Artificial Sequence
  Synthetic oligonucleotide; CGG chr11 5225063 5225082 5225066 -
agtgttccttccatgtttta

SEQ ID NO: 48945 - DNA, 20 bp, Artificial Sequence
  Synthetic oligonucleotide; GAG chr11 5225059 5225078 5225062 -
ttccttccatgttttacggc

SEQ ID NO: 48946 - DNA, 20 bp, Artificial Sequence
  Synthetic oligonucleotide; TGG chr11 5225055 5225074 5225058 -
ttccatgttttacggcgaga

SEQ ID NO: 48947 - DNA, 20 bp, Artificial Sequence
  Synthetic oligonucleotide; TGG chr11 5225040 5225059 5225043 -
cgagatggtttctcctcgcc

SEQ ID NO: 48948 - DNA, 20 bp, Artificial Sequence
  Synthetic oligonucleotide; CAG chr11 5225032 5225051 5225035 -
tttctcctcgcctggccact

SEQ ID NO: 48949 - DNA, 20 bp, Artificial Sequence
  Synthetic oligonucleotide; TAG chr11 5225026 5225045 5225029 -
ctcgcctggccactcagcct

SEQ ID NO: 48950 - DNA, 20 bp, Artificial Sequence
  Synthetic oligonucleotide; TAG chr11 5225006 5225025 5225009 -
tagttgtctctgttgtctta

SEQ ID NO: 48951 - DNA, 20 bp, Artificial Sequence
  Synthetic oligonucleotide; GAG chr11 5225004 5225023 5225007 -
gttgtctctgttgtcttata

SEQ ID NO: 48952 - DNA, 20 bp, Artificial Sequence
  Synthetic oligonucleotide; AGG chr11 5225003 5225022 5225006 -
ttgtctctgttgtcttatag

SEQ ID NO: 48953 - DNA, 20 bp, Artificial Sequence
  Synthetic oligonucleotide; AAG chr11 5224992 5225011 5224995 -
gtcttatagaggtctacttg

SEQ ID NO: 48954 - DNA, 20 bp, Artificial Sequence
  Synthetic oligonucleotide; AAG chr11 5224989 5225008 5224992 -
ttatagaggtctacttgaag

SEQ ID NO: 48955 - DNA, 20 bp, Artificial Sequence
  Synthetic oligonucleotide; AGG chr11 5224988 5225007 5224991 -
tatagaggtctacttgaaga

SEQ ID NO: 48956 - DNA, 20 bp, Artificial Sequence
  Synthetic oligonucleotide; CAG chr11 5224980 5224999 5224983 -
tctacttgaagaaggaaaaa

SEQ ID NO: 48957 - DNA, 20 bp, Artificial Sequence
  Synthetic oligonucleotide; AGG chr11 5224979 5224998 5224982 -
ctacttgaagaaggaaaaac

SEQ ID NO: 48958 - DNA, 20 bp, Artificial Sequence
  Synthetic oligonucleotide; GGG chr11 5224978 5224997 5224981 -
tacttgaagaaggaaaaaca

SEQ ID NO: 48959 - DNA, 20 bp, Artificial Sequence
  Synthetic oligonucleotide; GGG chr11 5224977 5224996 5224980 -
acttgaagaaggaaaaacag

SEQ ID NO: 48960 - DNA, 20 bp, Artificial Sequence
  Synthetic oligonucleotide; TGG chr11 5224971 5224990 5224974 -
agaaggaaaaacaggggtca

SEQ ID NO: 48961 - DNA, 20 bp, Artificial Sequence
  Synthetic oligonucleotide; GAG chr11 5224954 5224973 5224957 -
tcatggtttgactgtcctgt

SEQ ID NO: 48962 - DNA, 20 bp, Artificial Sequence
  Synthetic oligonucleotide; CAG chr11 5224925 5224944 5224928 -
ttccctgcctcccccactca

SEQ ID NO: 48963 - DNA, 20 bp, Artificial Sequence
  Synthetic oligonucleotide; CGG chr11 5224917 5224936 5224920 -
ctcccccactcacagtgacc

SEQ ID NO: 48964 - DNA, 20 bp, Artificial Sequence
  Synthetic oligonucleotide; CAG chr11 5224908 5224927 5224911 -
tcacagtgacccggaatctg

SEQ ID NO: 48965 - DNA, 20 bp, Artificial Sequence
  Synthetic oligonucleotide; TAG chr11 5224902 5224921 5224905 -
tgacccggaatctgcagtgc

SEQ ID NO: 48966 - DNA, 20 bp, Artificial Sequence
  Synthetic oligonucleotide; CGG chr11 5224894 5224913 5224897 -
aatctgcagtgctagtctcc

SEQ ID NO: 48967 - DNA, 20 bp, Artificial Sequence
  Synthetic oligonucleotide; CAG chr11 5224875 5224894 5224878 -
ccggaactatcactctttca

SEQ ID NO: 48968 - DNA, 20 bp, Artificial Sequence
  Synthetic oligonucleotide; TGG chr11 5224865 5224884 5224868 -
cactctttcacagtctgctt

SEQ ID NO: 48969 - DNA, 20 bp, Artificial Sequence
  Synthetic oligonucleotide; AAG chr11 5224862 5224881 5224865 -
tctttcacagtctgctttgg

SEQ ID NO: 48970 - DNA, 20 bp, Artificial Sequence
  Synthetic oligonucleotide; AGG chr11 5224861 5224880 5224864 -
ctttcacagtctgctttgga

SEQ ID NO: 48971 - DNA, 20 bp, Artificial Sequence
  Synthetic oligonucleotide; TGG chr11 5224856 5224875 5224859 -
acagtctgctttggaaggac

SEQ ID NO: 48972 - DNA, 20 bp, Artificial Sequence
  Synthetic oligonucleotide; GGG chr11 5224855 5224874 5224858 -
cagtctgctttggaaggact

SEQ ID NO: 48973 - DNA, 20 bp, Artificial Sequence
  Synthetic oligonucleotide; TAG chr11 5224850 5224869 5224853 -
tgctttggaaggactgggct

SEQ ID NO: 48974 - DNA, 20 bp, Artificial Sequence
  Synthetic oligonucleotide; AAG chr11 5224841 5224860 5224844 -
aggactgggcttagtatgaa

SEQ ID NO: 48975 - DNA, 20 bp, Artificial Sequence
  Synthetic oligonucleotide; TAG chr11 5224837 5224856 5224840 -
ctgggcttagtatgaaaagt

SEQ ID NO: 48976 - DNA, 20 bp, Artificial Sequence
  Synthetic oligonucleotide; AGG chr11 5224836 5224855 5224839 -
tgggcttagtatgaaaagtt

SEQ ID NO: 48977 - DNA, 20 bp, Artificial Sequence
  Synthetic oligonucleotide; GAG chr11 5224830 5224849 5224833 -
tagtatgaaaagttaggact

SEQ ID NO: 48978 - DNA, 20 bp, Artificial Sequence
  Synthetic oligonucleotide; AAG chr11 5224827 5224846 5224830 -
tatgaaaagttaggactgag

SEQ ID NO: 48979 - DNA, 20 bp, Artificial Sequence
  Synthetic oligonucleotide; AAG chr11 5224817 5224836 5224820 -
taggactgagaagaatttga

SEQ ID NO: 48980 - DNA, 20 bp, Artificial Sequence
  Synthetic oligonucleotide; AGG chr11 5224816 5224835 5224819 -
aggactgagaagaatttgaa

SEQ ID NO: 48981 - DNA, 20 bp, Artificial Sequence
  Synthetic oligonucleotide; CGG chr11 5224813 5224832 5224816 -
actgagaagaatttgaaagg

SEQ ID NO: 48982 - DNA, 20 bp, Artificial Sequence
  Synthetic oligonucleotide; TAG chr11 5224803 5224822 5224806 -
atttgaaaggcggctttttg

SEQ ID NO: 48983 - DNA, 20 bp, Artificial Sequence
  Synthetic oligonucleotide; TAG chr11 5224767 5224786 5224770 -
actgtcttattaccctgtca

SEQ ID NO: 48984 - DNA, 20 bp, Artificial Sequence
  Synthetic oligonucleotide; AGG chr11 5224766 5224785 5224769 -
ctgtcttattaccctgtcat

SEQ ID NO: 48985 - DNA, 20 bp, Artificial Sequence
  Synthetic oligonucleotide; TGG chr11 5224752 5224771 5224755 -
tgtcataggcccaccccaaa

SEQ ID NO: 48986 - DNA, 20 bp, Artificial Sequence
  Synthetic oligonucleotide; AAG chr11 5224749 5224768 5224752 -
cataggcccaccccaaatgg

SEQ ID NO: 48987 - DNA, 20 bp, Artificial Sequence
  Synthetic oligonucleotide; CAG chr11 5224733 5224752 5224736 -
atggaagtcccattcttcct

SEQ ID NO: 48988 - DNA, 20 bp, Artificial Sequence
  Synthetic oligonucleotide; AGG chr11 5224732 5224751 5224735 -
tggaagtcccattcttcctc

SEQ ID NO: 48989 - DNA, 20 bp, Artificial Sequence
  Synthetic oligonucleotide; AAG chr11 5224723 5224742 5224726 -
cattcttcctcaggatgttt

SEQ ID NO: 48990 - DNA, 20 bp, Artificial Sequence
  Synthetic oligonucleotide; TAG chr11 5224718 5224737 5224721 -
ttcctcaggatgtttaagat

SEQ ID NO: 48991 - DNA, 20 bp, Artificial Sequence
  Synthetic oligonucleotide; CAG chr11 5224711 5224730 5224714 -
ggatgtttaagattagcatt

SEQ ID NO: 48992 - DNA, 20 bp, Artificial Sequence
  Synthetic oligonucleotide; AGG chr11 5224710 5224729 5224713 -
gatgtttaagattagcattc

SEQ ID NO: 48993 - DNA, 20 bp, Artificial Sequence
  Synthetic oligonucleotide; AAG chr11 5224707 5224726 5224710 -
gtttaagattagcattcagg

SEQ ID NO: 48994 - DNA, 20 bp, Artificial Sequence
  Synthetic oligonucleotide; GAG chr11 5224705 5224724 5224708 -
ttaagattagcattcaggaa

SEQ ID NO: 48995 - DNA, 20 bp, Artificial Sequence
  Synthetic oligonucleotide; CAG chr11 5224700 5224719 5224703 -
attagcattcaggaagagat

SEQ ID NO: 48996 - DNA, 20 bp, Artificial Sequence
  Synthetic oligonucleotide; GAG chr11 5224698 5224717 5224701 -
tagcattcaggaagagatca

SEQ ID NO: 48997 - DNA, 20 bp, Artificial Sequence
  Synthetic oligonucleotide; AGG chr11 5224697 5224716 5224700 -
agcattcaggaagagatcag

SEQ ID NO: 48998 - DNA, 20 bp, Artificial Sequence
  Synthetic oligonucleotide; TGG chr11 5224689 5224708 5224692 -
ggaagagatcagaggtctgc

SEQ ID NO: 48999 - DNA, 20 bp, Artificial Sequence
  Synthetic oligonucleotide; TGG chr11 5224666 5224685 5224669 -
ctcccttatcatgtccctta

SEQ ID NO: 49000 - DNA, 20 bp, Artificial Sequence
  Synthetic oligonucleotide; TGG chr11 5224657 5224676 5224660 -
catgtcccttatggtgcttc

SEQ ID NO: 49001 - DNA, 20 bp, Artificial Sequence
  Synthetic oligonucleotide; CAG chr11 5224649 5224668 5224652 -
ttatggtgcttctggctctg

SEQ ID NO: 49002 - DNA, 20 bp, Artificial Sequence
  Synthetic oligonucleotide; TAG chr11 5224642 5224661 5224645 -
gcttctggctctgcagttat

SEQ ID NO: 49003 - DNA, 20 bp, Artificial Sequence
  Synthetic oligonucleotide; TAG chr11 5224637 5224656 5224640 -
tggctctgcagttattagca

SEQ ID NO: 49004 - DNA, 20 bp, Artificial Sequence
  Synthetic oligonucleotide; TAG chr11 5224590 5224609 5224593 -
catttttcttattcaatacc

SEQ ID NO: 49005 - DNA, 20 bp, Artificial Sequence
  Synthetic oligonucleotide; AGG chr11 5224589 5224608 5224592 -
atttttcttattcaatacct

SEQ ID NO: 49006 - DNA, 20 bp, Artificial Sequence
  Synthetic oligonucleotide; TAG chr11 5224586 5224605 5224589 -
tttcttattcaatacctagg

SEQ ID NO: 49007 - DNA, 20 bp, Artificial Sequence
  Synthetic oligonucleotide; AGG chr11 5224585 5224604 5224588 -
ttcttattcaatacctaggt

SEQ ID NO: 49008 - DNA, 20 bp, Artificial Sequence
  Synthetic oligonucleotide; TAG chr11 5224582 5224601 5224585 -
ttattcaatacctaggtagg

SEQ ID NO: 49009 - DNA, 20 bp, Artificial Sequence
  Synthetic oligonucleotide; TAG chr11 5224575 5224594 5224578 -
atacctaggtaggtagatgc

SEQ ID NO: 49010 - DNA, 20 bp, Artificial Sequence
  Synthetic oligonucleotide; TGG chr11 5224568 5224587 5224571 -
ggtaggtagatgctagattc

SEQ ID NO: 49011 - DNA, 20 bp, Artificial Sequence
  Synthetic oligonucleotide; GAG chr11 5224554 5224573 5224557 -
agattctggaaataaaatat

SEQ ID NO: 49012 - DNA, 20 bp, Artificial Sequence
  Synthetic oligonucleotide; AAG chr11 5224547 5224566 5224550 -
ggaaataaaatatgagtctc

SEQ ID NO: 49013 - DNA, 20 bp, Artificial Sequence
  Synthetic oligonucleotide; TGG chr11 5224544 5224563 5224547 -
aataaaatatgagtctcaag

SEQ ID NO: 49014 - DNA, 20 bp, Artificial Sequence
  Synthetic oligonucleotide; CAG chr11 5224525 5224544 5224528 -
gtggtccttgtcctctctcc

SEQ ID NO: 49015 - DNA, 20 bp, Artificial Sequence
  Synthetic oligonucleotide; TAG chr11 5224508 5224527 5224511 -
tcccagtcaaattctgaatc

SEQ ID NO: 49016 - DNA, 20 bp, Artificial Sequence
  Synthetic oligonucleotide; TGG chr11 5224504 5224523 5224507 -
agtcaaattctgaatctagt

SEQ ID NO: 49017 - DNA, 20 bp, Artificial Sequence
  Synthetic oligonucleotide; AAG chr11 5224500 5224519 5224503 -
aaattctgaatctagttggc

SEQ ID NO: 49018 - DNA, 20 bp, Artificial Sequence
  Synthetic oligonucleotide; AAG chr11 5224486 5224505 5224489 -
gttggcaagattctgaaatc

SEQ ID NO: 49019 - DNA, 20 bp, Artificial Sequence
  Synthetic oligonucleotide; AGG chr11 5224485 5224504 5224488 -
ttggcaagattctgaaatca

SEQ ID NO: 49020 - DNA, 20 bp, Artificial Sequence
  Synthetic oligonucleotide; CAG chr11 5224474 5224493 5224477 -
ctgaaatcaaggcatataat

SEQ ID NO: 49021 - DNA, 20 bp, Artificial Sequence
  Synthetic oligonucleotide; AAG chr11 5224467 5224486 5224470 -
caaggcatataatcagtaat

SEQ ID NO: 49022 - DNA, 20 bp, Artificial Sequence
  Synthetic oligonucleotide; TAG chr11 5224458 5224477 5224461 -
taatcagtaataagtgatga

SEQ ID NO: 49023 - DNA, 20 bp, Artificial Sequence
  Synthetic oligonucleotide; AAG chr11 5224455 5224474 5224458 -
tcagtaataagtgatgatag

SEQ ID NO: 49024 - DNA, 20 bp, Artificial Sequence
  Synthetic oligonucleotide; AGG chr11 5224454 5224473 5224457 -
cagtaataagtgatgataga

SEQ ID NO: 49025 - DNA, 20 bp, Artificial Sequence
  Synthetic oligonucleotide; GGG chr11 5224453 5224472 5224456 -
agtaataagtgatgatagaa

SEQ ID NO: 49026 - DNA, 20 bp, Artificial Sequence
  Synthetic oligonucleotide; TAG chr11 5224446 5224465 5224449 -
agtgatgatagaagggtata

SEQ ID NO: 49027 - DNA, 20 bp, Artificial Sequence
  Synthetic oligonucleotide; AAG chr11 5224443 5224462 5224446 -
gatgatagaagggtatatag

SEQ ID NO: 49028 - DNA, 20 bp, Artificial Sequence
  Synthetic oligonucleotide; GAG chr11 5224427 5224446 5224430 -
atagaagaattttattatat

SEQ ID NO: 49029 - DNA, 20 bp, Artificial Sequence
  Synthetic oligonucleotide; GAG chr11 5224425 5224444 5224428 -
agaagaattttattatatga

SEQ ID NO: 49030 - DNA, 20 bp, Artificial Sequence
  Synthetic oligonucleotide; AGG chr11 5224424 5224443 5224427 -
gaagaattttattatatgag

SEQ ID NO: 49031 - DNA, 20 bp, Artificial Sequence
  Synthetic oligonucleotide; GGG chr11 5224423 5224442 5224426 -
aagaattttattatatgaga

SEQ ID NO: 49032 - DNA, 20 bp, Artificial Sequence
  Synthetic oligonucleotide; CAG chr11 5224395 5224414 5224398 -
ccctcaaaatgaaatgaaat

SEQ ID NO: 49033 - DNA, 20 bp, Artificial Sequence
  Synthetic oligonucleotide; TGG chr11 5224355 5224374 5224358 -
taaacaaaaataaatttgaa

SEQ ID NO: 49034 - DNA, 20 bp, Artificial Sequence
  Synthetic oligonucleotide; GGG chr11 5224354 5224373 5224357 -
aaacaaaaataaatttgaat

SEQ ID NO: 49035 - DNA, 20 bp, Artificial Sequence
  Synthetic oligonucleotide; AAG chr11 5224348 5224367 5224351 -
aaataaatttgaatgggtta

SEQ ID NO: 49036 - DNA, 20 bp, Artificial Sequence
  Synthetic oligonucleotide; AAG chr11 5224336 5224355 5224339 -
atgggttaaagaattaaact

SEQ ID NO: 49037 - DNA, 20 bp, Artificial Sequence
  Synthetic oligonucleotide; AAG chr11 5224310 5224329 5224313 -
taaaaccataaaaattttta

SEQ ID NO: 49038 - DNA, 20 bp, Artificial Sequence
  Synthetic oligonucleotide; AAG chr11 5224300 5224319 5224303 -
aaaatttttaaagaaatcaa

SEQ ID NO: 49039 - DNA, 20 bp, Artificial Sequence
  Synthetic oligonucleotide; AAG chr11 5224297 5224316 5224300 -
atttttaaagaaatcaaaag

SEQ ID NO: 49040 - DNA, 20 bp, Artificial Sequence
  Synthetic oligonucleotide; CAG chr11 5224273 5224292 5224276 -
aaattctaatattcacgttg

SEQ ID NO: 49041 - DNA, 20 bp, Artificial Sequence
  Synthetic oligonucleotide; GAG chr11 5224250 5224269 5224253 -
ccgttttttgaatttgatat

SEQ ID NO: 49042 - DNA, 20 bp, Artificial Sequence
  Synthetic oligonucleotide; AAG chr11 5224247 5224266 5224250 -
ttttttgaatttgatatgag

SEQ ID NO: 49043 - DNA, 20 bp, Artificial Sequence
  Synthetic oligonucleotide; AAG chr11 5224242 5224261 5224245 -
tgaatttgatatgagaagca

SEQ ID NO: 49044 - DNA, 20 bp, Artificial Sequence
  Synthetic oligonucleotide; AGG chr11 5224241 5224260 5224244 -
gaatttgatatgagaagcaa

SEQ ID NO: 49045 - DNA, 20 bp, Artificial Sequence
  Synthetic oligonucleotide; AAG chr11 5224232 5224251 5224235 -
atgagaagcaaaggcaacaa

SEQ ID NO: 49046 - DNA, 20 bp, Artificial Sequence
  Synthetic oligonucleotide; AGG chr11 5224231 5224250 5224234 -
tgagaagcaaaggcaacaaa

SEQ ID NO: 49047 - DNA, 20 bp, Artificial Sequence
  Synthetic oligonucleotide; AAG chr11 5224221 5224240 5224224 -
aggcaacaaaaggaaaaata

SEQ ID NO: 49048 - DNA, 20 bp, Artificial Sequence
  Synthetic oligonucleotide; AAG chr11 5224218 5224237 5224221 -
caacaaaaggaaaaataaag

SEQ ID NO: 49049 - DNA, 20 bp, Artificial Sequence
  Synthetic oligonucleotide; GAG chr11 5224214 5224233 5224217 -
aaaaggaaaaataaagaagt

SEQ ID NO: 49050 - DNA, 20 bp, Artificial Sequence
  Synthetic oligonucleotide; AGG chr11 5224213 5224232 5224216 -
aaaggaaaaataaagaagtg

SEQ ID NO: 49051 - DNA, 20 bp, Artificial Sequence
  Synthetic oligonucleotide; AAG chr11 5224158 5224177 5224161 -
acaaaacaatgaacaaatga

SEQ ID NO: 49052 - DNA, 20 bp, Artificial Sequence
  Synthetic oligonucleotide; AGG chr11 5224157 5224176 5224160 -
caaaacaatgaacaaatgaa

SEQ ID NO: 49053 - DNA, 20 bp, Artificial Sequence
  Synthetic oligonucleotide; TGG chr11 5224142 5224161 5224145 -
atgaaaggtgaaccatgaaa

SEQ ID NO: 49054 - DNA, 20 bp, Artificial Sequence
  Synthetic oligonucleotide; TGG chr11 5224106 5224125 5224109 -
caaatatttcttaaatattt

SEQ ID NO: 49055 - DNA, 20 bp, Artificial Sequence
  Synthetic oligonucleotide; AAG chr11 5224085 5224104 5224088 -
ggttaatatccaaaatatat

SEQ ID NO: 49056 - DNA, 20 bp, Artificial Sequence
  Synthetic oligonucleotide; CAG chr11 5224077 5224096 5224080 -
tccaaaatatataagaaaca

SEQ ID NO: 49057 - DNA, 20 bp, Artificial Sequence
  Synthetic oligonucleotide; TAG chr11 5224044 5224063 5224047 -
aacaaacaaaaaattaaaaa

SEQ ID NO: 49058 - DNA, 20 bp, Artificial Sequence
  Synthetic oligonucleotide; AGG chr11 5224043 5224062 5224046 -
acaaacaaaaaattaaaaat

SEQ ID NO: 49059 - DNA, 20 bp, Artificial Sequence
  Synthetic oligonucleotide; AAG chr11 5224023 5224042 5224026 -
aggaaaataaaaaaattaaa

SEQ ID NO: 49060 - DNA, 20 bp, Artificial Sequence
  Synthetic oligonucleotide; AAG chr11 5224020 5224039 5224023 -
aaaataaaaaaattaaaaag

SEQ ID NO: 49061 - DNA, 20 bp, Artificial Sequence
  Synthetic oligonucleotide; TGG chr11 5224001 5224020 5224004 -
gaagaaaatcctgccattta

SEQ ID NO: 49062 - DNA, 20 bp, Artificial Sequence
  Synthetic oligonucleotide; CAG chr11 5223998 5224017 5224001 -
gaaaatcctgccatttatgg

SEQ ID NO: 49063 - DNA, 20 bp, Artificial Sequence
  Synthetic oligonucleotide; TGG chr11 5223983 5224002 5223986 -
tatggcagaattgatgaacc

SEQ ID NO: 49064 - DNA, 20 bp, Artificial Sequence
  Synthetic oligonucleotide; GAG chr11 5223981 5224000 5223984 -
tggcagaattgatgaacctg

SEQ ID NO: 49065 - DNA, 20 bp, Artificial Sequence
  Synthetic oligonucleotide; AGG chr11 5223980 5223999 5223983 -
ggcagaattgatgaacctgg

SEQ ID NO: 49066 - DNA, 20 bp, Artificial Sequence
  Synthetic oligonucleotide; AAG chr11 5223967 5223986 5223970 -
aacctggaggatgtaaaact

SEQ ID NO: 49067 - DNA, 20 bp, Artificial Sequence
  Synthetic oligonucleotide; AAG chr11 5223958 5223977 5223961 -
gatgtaaaactaagaaaaat

SEQ ID NO: 49068 - DNA, 20 bp, Artificial Sequence
  Synthetic oligonucleotide; AAG chr11 5223944 5223963 5223947 -
aaaaataagcctgacacaaa

SEQ ID NO: 49069 - DNA, 20 bp, Artificial Sequence
  Synthetic oligonucleotide; AAG chr11 5223901 5223920 5223904 -
ctcatatgtgaaacataaaa

SEQ ID NO: 49070 - DNA, 20 bp, Artificial Sequence
  Synthetic oligonucleotide; TGG chr11 5223889 5223908 5223892 -
acataaaaaagtcactctca

SEQ ID NO: 49071 - DNA, 20 bp, Artificial Sequence
  Synthetic oligonucleotide; CAG chr11 5223883 5223902 5223886 -
aaaagtcactctcatggaaa

SEQ ID NO: 49072 - DNA, 20 bp, Artificial Sequence
  Synthetic oligonucleotide; CAG chr11 5223879 5223898 5223882 -
gtcactctcatggaaacaga

SEQ ID NO: 49073 - DNA, 20 bp, Artificial Sequence
  Synthetic oligonucleotide; TAG chr11 5223876 5223895 5223879 -
actctcatggaaacagacag

SEQ ID NO: 49074 - DNA, 20 bp, Artificial Sequence
  Synthetic oligonucleotide; GAG chr11 5223874 5223893 5223877 -
tctcatggaaacagacagta

SEQ ID NO: 49075 - DNA, 20 bp, Artificial Sequence
  Synthetic oligonucleotide; AGG chr11 5223873 5223892 5223876 -
ctcatggaaacagacagtag

SEQ ID NO: 49076 - DNA, 20 bp, Artificial Sequence
  Synthetic oligonucleotide; TGG chr11 5223868 5223887 5223871 -
ggaaacagacagtagaggta

SEQ ID NO: 49077 - DNA, 20 bp, Artificial Sequence
  Synthetic oligonucleotide; CAG chr11 5223861 5223880 5223864 -
gacagtagaggtatggtttc

SEQ ID NO: 49078 - DNA, 20 bp, Artificial Sequence
  Synthetic oligonucleotide; AGG chr11 5223860 5223879 5223863 -
acagtagaggtatggtttcc

SEQ ID NO: 49079 - DNA, 20 bp, Artificial Sequence
  Synthetic oligonucleotide; GGG chr11 5223859 5223878 5223862 -
cagtagaggtatggtttcca

SEQ ID NO: 49080 - DNA, 20 bp, Artificial Sequence
  Synthetic oligonucleotide; GGG chr11 5223858 5223877 5223861 -
agtagaggtatggtttccag

SEQ ID NO: 49081 - DNA, 20 bp, Artificial Sequence
  Synthetic oligonucleotide; TGG chr11 5223854 5223873 5223857 -
gaggtatggtttccaggggt

SEQ ID NO: 49082 - DNA, 20 bp, Artificial Sequence
  Synthetic oligonucleotide; GGG chr11 5223853 5223872 5223856 -
aggtatggtttccaggggtt

SEQ ID NO: 49083 - DNA, 20 bp, Artificial Sequence
  Synthetic oligonucleotide; GGG chr11 5223852 5223871 5223855 -
ggtatggtttccaggggttg

SEQ ID NO: 49084 - DNA, 20 bp, Artificial Sequence
  Synthetic oligonucleotide; GGG chr11 5223851 5223870 5223854 -
gtatggtttccaggggttgg

SEQ ID NO: 49085 - DNA, 20 bp, Artificial Sequence
  Synthetic oligonucleotide; TGG chr11 5223848 5223867 5223851 -
tggtttccaggggttggggg

SEQ ID NO: 49086 - DNA, 20 bp, Artificial Sequence
  Synthetic oligonucleotide; GGG chr11 5223847 5223866 5223850 -
ggtttccaggggttgggggt

SEQ ID NO: 49087 - DNA, 20 bp, Artificial Sequence
  Synthetic oligonucleotide; GAG chr11 5223845 5223864 5223848 -
tttccaggggttgggggtgg

SEQ ID NO: 49088 - DNA, 20 bp, Artificial Sequence
  Synthetic oligonucleotide; CAG chr11 5223839 5223858 5223842 -
ggggttgggggtgggagaat

SEQ ID NO: 49089 - DNA, 20 bp, Artificial Sequence
  Synthetic oligonucleotide; AGG chr11 5223838 5223857 5223841 -
gggttgggggtgggagaatc

SEQ ID NO: 49090 - DNA, 20 bp, Artificial Sequence
  Synthetic oligonucleotide; AAG chr11 5223822 5223841 5223825 -
aatcaggaaactattactca

SEQ ID NO: 49091 - DNA, 20 bp, Artificial Sequence
  Synthetic oligonucleotide; AGG chr11 5223821 5223840 5223824 -
atcaggaaactattactcaa

SEQ ID NO: 49092 - DNA, 20 bp, Artificial Sequence
  Synthetic oligonucleotide; GGG chr11 5223820 5223839 5223823 -
tcaggaaactattactcaaa

SEQ ID NO: 49093 - DNA, 20 bp, Artificial Sequence
  Synthetic oligonucleotide; CAG chr11 5223807 5223826 5223810 -
actcaaagggtataaaattt

SEQ ID NO: 49094 - DNA, 20 bp, Artificial Sequence
  Synthetic oligonucleotide; TGG chr11 5223799 5223818 5223802 -
ggtataaaatttcagttatg

SEQ ID NO: 49095 - DNA, 20 bp, Artificial Sequence
  Synthetic oligonucleotide; GGG chr11 5223798 5223817 5223801 -
gtataaaatttcagttatgt

SEQ ID NO: 49096 - DNA, 20 bp, Artificial Sequence
  Synthetic oligonucleotide; TAG chr11 5223783 5223802 5223786 -
tatgtgggatgaataaattc

SEQ ID NO: 49097 - DNA, 20 bp, Artificial Sequence
  Synthetic oligonucleotide; CAG chr11 5223768 5223787 5223771 -
aattctagatatctaatgta

SEQ ID NO: 49098 - DNA, 20 bp, Artificial Sequence
  Synthetic oligonucleotide; TAG chr11 5223754 5223773 5223757 -
aatgtacagcatcgtgactg

SEQ ID NO: 49099 - DNA, 20 bp, Artificial Sequence
  Synthetic oligonucleotide; AAG chr11 5223738 5223757 5223741 -
actgtagttaattgtactgt

SEQ ID NO: 49100 - DNA, 20 bp, Artificial Sequence
  Synthetic oligonucleotide; AAG chr11 5223718 5223737 5223721 -
aagtatatttaaaatttgca

SEQ ID NO: 49101 - DNA, 20 bp, Artificial Sequence
  Synthetic oligonucleotide; GAG chr11 5223716 5223735 5223719 -
gtatatttaaaatttgcaaa

SEQ ID NO: 49102 - DNA, 20 bp, Artificial Sequence
  Synthetic oligonucleotide; GAG chr11 5223714 5223733 5223717 -
atatttaaaatttgcaaaga

SEQ ID NO: 49103 - DNA, 20 bp, Artificial Sequence
  Synthetic oligonucleotide; TAG chr11 5223711 5223730 5223714 -
tttaaaatttgcaaagagag

SEQ ID NO: 49104 - DNA, 20 bp, Artificial Sequence
  Synthetic oligonucleotide; TAG chr11 5223693 5223712 5223696 -
agtagatttttttttttttt

SEQ ID NO: 49105 - DNA, 20 bp, Artificial Sequence
  Synthetic oligonucleotide; TGG chr11 5223689 5223708 5223692 -
gatttttttttttttttaga

SEQ ID NO: 49106 - DNA, 20 bp, Artificial Sequence
  Synthetic oligonucleotide; GAG chr11 5223687 5223706 5223690 -
tttttttttttttttagatg

SEQ ID NO: 49107 - DNA, 20 bp, Artificial Sequence
  Synthetic oligonucleotide; CAG chr11 5223668 5223687 5223671 -
ggagttttgctcttgttgtc

SEQ ID NO: 49108 - DNA, 20 bp, Artificial Sequence
  Synthetic oligonucleotide; AGG chr11 5223667 5223686 5223670 -
gagttttgctcttgttgtcc

SEQ ID NO: 49109 - DNA, 20 bp, Artificial Sequence
  Synthetic oligonucleotide; TGG chr11 5223663 5223682 5223666 -
tttgctcttgttgtccaggc

SEQ ID NO: 49110 - DNA, 20 bp, Artificial Sequence
  Synthetic oligonucleotide; GAG chr11 5223661 5223680 5223664 -
tgctcttgttgtccaggctg

SEQ ID NO: 49111 - DNA, 20 bp, Artificial Sequence
  Synthetic oligonucleotide; TGG chr11 5223653 5223672 5223656 -
ttgtccaggctggagtgcaa

SEQ ID NO: 49112 - DNA, 20 bp, Artificial Sequence
  Synthetic oligonucleotide; AAG chr11 5223649 5223668 5223652 -
ccaggctggagtgcaatggc

SEQ ID NO: 49113 - DNA, 20 bp, Artificial Sequence
  Synthetic oligonucleotide; TGG chr11 5223642 5223661 5223645 -
ggagtgcaatggcaagatct

SEQ ID NO: 49114 - DNA, 20 bp, Artificial Sequence
  Synthetic oligonucleotide; TGG chr11 5223618 5223637 5223621 -
tcactgcaacctccgcctcc

SEQ ID NO: 49115 - DNA, 20 bp, Artificial Sequence
  Synthetic oligonucleotide; GGG chr11 5223617 5223636 5223620 -
cactgcaacctccgcctcct

SEQ ID NO: 49116 - DNA, 20 bp, Artificial Sequence
  Synthetic oligonucleotide; AAG chr11 5223611 5223630 5223614 -
aacctccgcctcctgggttc

SEQ ID NO: 49117 - DNA, 20 bp, Artificial Sequence
  Synthetic oligonucleotide; CAG chr11 5223594 5223613 5223597 -
ttcaagcaaatctcctgcct

SEQ ID NO: 49118 - DNA, 20 bp, Artificial Sequence
  Synthetic oligonucleotide; GAG chr11 5223585 5223604 5223588 -
atctcctgcctcagcctccc

SEQ ID NO: 49119 - DNA, 20 bp, Artificial Sequence
  Synthetic oligonucleotide; TAG chr11 5223582 5223601 5223585 -
tcctgcctcagcctcccgag

SEQ ID NO: 49120 - DNA, 20 bp, Artificial Sequence
  Synthetic oligonucleotide; TGG chr11 5223578 5223597 5223581 -
gcctcagcctcccgagtagc

SEQ ID NO: 49121 - DNA, 20 bp, Artificial Sequence
  Synthetic oligonucleotide; GGG chr11 5223577 5223596 5223580 -
cctcagcctcccgagtagct

SEQ ID NO: 49122 - DNA, 20 bp, Artificial Sequence
  Synthetic oligonucleotide; CAG chr11 5223570 5223589 5223573 -
ctcccgagtagctgggatta

SEQ ID NO: 49123 - DNA, 20 bp, Artificial Sequence
  Synthetic oligonucleotide; AGG chr11 5223569 5223588 5223572 -
tcccgagtagctgggattac

SEQ ID NO: 49124 - DNA, 20 bp, Artificial Sequence
  Synthetic oligonucleotide; CAG chr11 5223550 5223569 5223553 -
caggcatgcgacaccatgcc

SEQ ID NO: 49125 - DNA, 20 bp, Artificial Sequence
  Synthetic oligonucleotide; TAG chr11 5223532 5223551 5223535 -
cccagctaattttgtatttt

SEQ ID NO: 49126 - DNA, 20 bp, Artificial Sequence
  Synthetic oligonucleotide; TAG chr11 5223529 5223548 5223532 -
agctaattttgtatttttag

SEQ ID NO: 49127 - DNA, 20 bp, Artificial Sequence
  Synthetic oligonucleotide; GAG chr11 5223527 5223546 5223530 -
ctaattttgtatttttagta

SEQ ID NO: 49128 - DNA, 20 bp, Artificial Sequence
  Synthetic oligonucleotide; CGG chr11 5223523 5223542 5223526 -
ttttgtatttttagtagaga

SEQ ID NO: 49129 - DNA, 20 bp, Artificial Sequence
  Synthetic oligonucleotide; GGG chr11 5223522 5223541 5223525 -
tttgtatttttagtagagac

SEQ ID NO: 49130 - DNA, 20 bp, Artificial Sequence
  Synthetic oligonucleotide; GGG chr11 5223521 5223540 5223524 -
ttgtatttttagtagagacg

SEQ ID NO: 49131 - DNA, 20 bp, Artificial Sequence
  Synthetic oligonucleotide; TGG chr11 5223507 5223526 5223510 -
gagacggggtttctccatgt

SEQ ID NO: 49132 - DNA, 20 bp, Artificial Sequence
  Synthetic oligonucleotide; CAG chr11 5223503 5223522 5223506 -
cggggtttctccatgttggt

SEQ ID NO: 49133 - DNA, 20 bp, Artificial Sequence
  Synthetic oligonucleotide; AGG chr11 5223502 5223521 5223505 -
ggggtttctccatgttggtc

SEQ ID NO: 49134 - DNA, 20 bp, Artificial Sequence
  Synthetic oligonucleotide; CGG chr11 5223484 5223503 5223487 -
tcaggctgatccgcctgcct

SEQ ID NO: 49135 - DNA, 20 bp, Artificial Sequence
  Synthetic oligonucleotide; AAG chr11 5223474 5223493 5223477 -
ccgcctgcctcggccaccca

SEQ ID NO: 49136 - DNA, 20 bp, Artificial Sequence
  Synthetic oligonucleotide; AGG chr11 5223473 5223492 5223476 -
cgcctgcctcggccacccaa

SEQ ID NO: 49137 - DNA, 20 bp, Artificial Sequence
  Synthetic oligonucleotide; GGG chr11 5223472 5223491 5223475 -
gcctgcctcggccacccaaa

SEQ ID NO: 49138 - DNA, 20 bp, Artificial Sequence
  Synthetic oligonucleotide; TGG chr11 5223468 5223487 5223471 -
gcctcggccacccaaagggc

SEQ ID NO: 49139 - DNA, 20 bp, Artificial Sequence
  Synthetic oligonucleotide; GGG chr11 5223467 5223486 5223470 -
cctcggccacccaaagggct

SEQ ID NO: 49140 - DNA, 20 bp, Artificial Sequence
  Synthetic oligonucleotide; CAG chr11 5223460 5223479 5223463 -
cacccaaagggctgggatta

SEQ ID NO: 49141 - DNA, 20 bp, Artificial Sequence
  Synthetic oligonucleotide; AGG chr11 5223459 5223478 5223462 -
acccaaagggctgggattac

SEQ ID NO: 49142 - DNA, 20 bp, Artificial Sequence
  Synthetic oligonucleotide; GAG chr11 5223453 5223472 5223456 -
agggctgggattacaggcgt

SEQ ID NO: 49143 - DNA, 20 bp, Artificial Sequence
  Synthetic oligonucleotide; CGG chr11 5223446 5223465 5223449 -
ggattacaggcgtgagccac

SEQ ID NO: 49144 - DNA, 20 bp, Artificial Sequence
  Synthetic oligonucleotide; GGG chr11 5223445 5223464 5223448 -
gattacaggcgtgagccacc

SEQ ID NO: 49145 - DNA, 20 bp, Artificial Sequence
  Synthetic oligonucleotide; TGG chr11 5223440 5223459 5223443 -
caggcgtgagccaccgggcc

SEQ ID NO: 49146 - DNA, 20 bp, Artificial Sequence
  Synthetic oligonucleotide; GAG chr11 5223435 5223454 5223438 -
gtgagccaccgggcctggcc

SEQ ID NO: 49147 - DNA, 20 bp, Artificial Sequence
  Synthetic oligonucleotide; GAG chr11 5223433 5223452 5223436 -
gagccaccgggcctggccga

SEQ ID NO: 49148 - DNA, 20 bp, Artificial Sequence
  Synthetic oligonucleotide; TAG chr11 5223430 5223449 5223433 -
ccaccgggcctggccgagag

SEQ ID NO: 49149 - DNA, 20 bp, Artificial Sequence
  Synthetic oligonucleotide; AAG chr11 5223420 5223439 5223423 -
tggccgagagtagatcttaa

SEQ ID NO: 49150 - DNA, 20 bp, Artificial Sequence
  Synthetic oligonucleotide; AAG chr11 5223407 5223426 5223410 -
atcttaaaagcatttaccac

SEQ ID NO: 49151 - DNA, 20 bp, Artificial Sequence
  Synthetic oligonucleotide; AAG chr11 5223401 5223420 5223404 -
aaagcatttaccacaagaaa

SEQ ID NO: 49152 - DNA, 20 bp, Artificial Sequence
  Synthetic oligonucleotide; AGG chr11 5223400 5223419 5223403 -
aagcatttaccacaagaaaa

SEQ ID NO: 49153 - DNA, 20 bp, Artificial Sequence
  Synthetic oligonucleotide; GAG chr11 5223388 5223407 5223391 -
caagaaaaaggtaactatgt

SEQ ID NO: 49154 - DNA, 20 bp, Artificial Sequence
  Synthetic oligonucleotide; TGG chr11 5223381 5223400 5223384 -
aaggtaactatgtgagataa

SEQ ID NO: 49155 - DNA, 20 bp, Artificial Sequence
  Synthetic oligonucleotide; GGG chr11 5223380 5223399 5223383 -
aggtaactatgtgagataat

SEQ ID NO: 49156 - DNA, 20 bp, Artificial Sequence
  Synthetic oligonucleotide; TAG chr11 5223368 5223387 5223371 -
gagataatgggtatgttaat

SEQ ID NO: 49157 - DNA, 20 bp, Artificial Sequence
  Synthetic oligonucleotide; TGG chr11 5223357 5223376 5223360 -
tatgttaattagcttgattg

SEQ ID NO: 49158 - DNA, 20 bp, Artificial Sequence
  Synthetic oligonucleotide; AAG chr11 5223342 5223361 5223345 -
gattgtggtaatcatttcac

SEQ ID NO: 49159 - DNA, 20 bp, Artificial Sequence
  Synthetic oligonucleotide; AGG chr11 5223341 5223360 5223344 -
attgtggtaatcatttcaca

SEQ ID NO: 49160 - DNA, 20 bp, Artificial Sequence
  Synthetic oligonucleotide; AAG chr11 5223265 5223284 5223268 -
ttgtgaatgatacctcaata

SEQ ID NO: 49161 - DNA, 20 bp, Artificial Sequence
  Synthetic oligonucleotide; AAG chr11 5223259 5223278 5223262 -
atgatacctcaataaagttg

SEQ ID NO: 49162 - DNA, 20 bp, Artificial Sequence
  Synthetic oligonucleotide; AAG chr11 5223246 5223265 5223249 -
aaagttgaagaataataaaa

SEQ ID NO: 49163 - DNA, 20 bp, Artificial Sequence
  Synthetic oligonucleotide; TAG chr11 5223241 5223260 5223244 -
tgaagaataataaaaaagaa

SEQ ID NO: 49164 - DNA, 20 bp, Artificial Sequence
  Synthetic oligonucleotide; TAG chr11 5223188 5223207 5223191 -
aaaaaatgcatcttgatgat

SEQ ID NO: 49165 - DNA, 20 bp, Artificial Sequence
  Synthetic oligonucleotide; CAG chr11 5223166 5223185 5223169 -
gaattgcattcttgattttt

SEQ ID NO: 49166 - DNA, 20 bp, Artificial Sequence
  Synthetic oligonucleotide; TAG chr11 5223110 5223129 5223113 -
caaaacaatacaataaattt

SEQ ID NO: 49167 - DNA, 20 bp, Artificial Sequence
  Synthetic oligonucleotide; TAG chr11 5223054 5223073 5223057 -
aattatatatatatatattt

SEQ ID NO: 49168 - DNA, 20 bp, Artificial Sequence
  Synthetic oligonucleotide; TAG chr11 5223041 5223060 5223044 -
tatattttagatattttgta

SEQ ID NO: 49169 - DNA, 20 bp, Artificial Sequence
  Synthetic oligonucleotide; TAG chr11 5223028 5223047 5223031 -
ttttgtatagttttactccc

SEQ ID NO: 49170 - DNA, 20 bp, Artificial Sequence
  Synthetic oligonucleotide; TAG chr11 5223019 5223038 5223022 -
gttttactccctagattttc

SEQ ID NO: 49171 - DNA, 20 bp, Artificial Sequence
  Synthetic oligonucleotide; TAG chr11 5223003 5223022 5223006 -
tttctagtgttattattaaa

SEQ ID NO: 49172 - DNA, 20 bp, Artificial Sequence
  Synthetic oligonucleotide; AAG chr11 5222998 5223017 5223001 -
agtgttattattaaatagtg

SEQ ID NO: 49173 - DNA, 20 bp, Artificial Sequence
  Synthetic oligonucleotide; AAG chr11 5222933 5222952 5222936 -
tcatttctaacattctctct

SEQ ID NO: 49174 - DNA, 20 bp, Artificial Sequence
  Synthetic oligonucleotide; TGG chr11 5222884 5222903 5222887 -
ttaatattatctctttctgc

SEQ ID NO: 49175 - DNA, 20 bp, Artificial Sequence
  Synthetic oligonucleotide; TGG chr11 5222864 5222883 5222867 -
tggaaatacattgttacttt

SEQ ID NO: 49176 - DNA, 20 bp, Artificial Sequence
  Synthetic oligonucleotide; TGG chr11 5222849 5222868 5222852 -
acttttggtttatctaaaaa

SEQ ID NO: 49177 - DNA, 20 bp, Artificial Sequence
  Synthetic oligonucleotide; AAG chr11 5222796 5222815 5222799 -
aattaataccactcatgtgt

SEQ ID NO: 49178 - DNA, 20 bp, Artificial Sequence
  Synthetic oligonucleotide; AAG chr11 5222792 5222811 5222795 -
aataccactcatgtgtaagt

SEQ ID NO: 49179 - DNA, 20 bp, Artificial Sequence
  Synthetic oligonucleotide; TAG chr11 5222788 5222807 5222791 -
ccactcatgtgtaagtaaga

SEQ ID NO: 49180 - DNA, 20 bp, Artificial Sequence
  Synthetic oligonucleotide; TGG chr11 5222785 5222804 5222788 -
ctcatgtgtaagtaagatag

SEQ ID NO: 49181 - DNA, 20 bp, Artificial Sequence
  Synthetic oligonucleotide; TAG chr11 5222776 5222795 5222779 -
aagtaagatagtggaataaa

SEQ ID NO: 49182 - DNA, 20 bp, Artificial Sequence
  Synthetic oligonucleotide; TAG chr11 5222721 5222740 5222724 -
taatgtgatatataaaaata

SEQ ID NO: 49183 - DNA, 20 bp, Artificial Sequence
  Synthetic oligonucleotide; TAG chr11 5222708 5222727 5222711 -
aaaaatatagcttttaaatt

SEQ ID NO: 49184 - DNA, 20 bp, Artificial Sequence
  Synthetic oligonucleotide; TGG chr11 5222703 5222722 5222706 -
tatagcttttaaatttagct

SEQ ID NO: 49185 - DNA, 20 bp, Artificial Sequence
  Synthetic oligonucleotide; CAG chr11 5222686 5222705 5222689 -
gcttggaaataaaaaacaaa

SEQ ID NO: 49186 - DNA, 20 bp, Artificial Sequence
  Synthetic oligonucleotide; AAG chr11 5222658 5222677 5222661 -
gaacaactatactttttgaa

SEQ ID NO: 49187 - DNA, 20 bp, Artificial Sequence
  Synthetic oligonucleotide; GAG chr11 5222656 5222675 5222659 -
acaactatactttttgaaaa

SEQ ID NO: 49188 - DNA, 20 bp, Artificial Sequence
  Synthetic oligonucleotide; AAG chr11 5222651 5222670 5222654 -
tatactttttgaaaagagta

SEQ ID NO: 49189 - DNA, 20 bp, Artificial Sequence
  Synthetic oligonucleotide; TAG chr11 5222608 5222627 5222611 -
accacaatcgattacacaat

SEQ ID NO: 49190 - DNA, 20 bp, Artificial Sequence
  Synthetic oligonucleotide; AGG chr11 5222607 5222626 5222610 -
ccacaatcgattacacaatt

SEQ ID NO: 49191 - DNA, 20 bp, Artificial Sequence
  Synthetic oligonucleotide; AAG chr11 5222600 5222619 5222603 -
cgattacacaattaggtgtg

SEQ ID NO: 49192 - DNA, 20 bp, Artificial Sequence
  Synthetic oligonucleotide; AGG chr11 5222599 5222618 5222602 -
gattacacaattaggtgtga

SEQ ID NO: 49193 - DNA, 20 bp, Artificial Sequence
  Synthetic oligonucleotide; CAG chr11 5222589 5222608 5222592 -
ttaggtgtgaaggtaaaatt

SEQ ID NO: 49194 - DNA, 20 bp, Artificial Sequence
  Synthetic oligonucleotide; TAG chr11 5222574 5222593 5222577 -
aaattcagtcacgaaaaaac

SEQ ID NO: 49195 - DNA, 20 bp, Artificial Sequence
  Synthetic oligonucleotide; TGG chr11 5222561 5222580 5222564 -
aaaaaactagaataaaaata

SEQ ID NO: 49196 - DNA, 20 bp, Artificial Sequence
  Synthetic oligonucleotide; GGG chr11 5222560 5222579 5222563 -
aaaaactagaataaaaatat

SEQ ID NO: 49197 - DNA, 20 bp, Artificial Sequence
  Synthetic oligonucleotide; AAG chr11 5222557 5222576 5222560 -
aactagaataaaaatatggg

SEQ ID NO: 49198 - DNA, 20 bp, Artificial Sequence
  Synthetic oligonucleotide; TAG chr11 5222539 5222558 5222542 -
ggaagacatgtatataatct

SEQ ID NO: 49199 - DNA, 20 bp, Artificial Sequence
  Synthetic oligonucleotide; GAG chr11 5222537 5222556 5222540 -
aagacatgtatataatctta

SEQ ID NO: 49200 - DNA, 20 bp, Artificial Sequence
  Synthetic oligonucleotide; AAG chr11 5222506 5222525 5222509 -
gttatttaattatcaaccca

SEQ ID NO: 49201 - DNA, 20 bp, Artificial Sequence
  Synthetic oligonucleotide; TAG chr11 5222503 5222522 5222506 -
atttaattatcaacccaaag

SEQ ID NO: 49202 - DNA, 20 bp, Artificial Sequence
  Synthetic oligonucleotide; AAG chr11 5222492 5222511 5222495 -
aacccaaagtagaaactatc

SEQ ID NO: 49203 - DNA, 20 bp, Artificial Sequence
  Synthetic oligonucleotide; AGG chr11 5222491 5222510 5222494 -
acccaaagtagaaactatca

SEQ ID NO: 49204 - DNA, 20 bp, Artificial Sequence
  Synthetic oligonucleotide; GGG chr11 5222490 5222509 5222493 -
cccaaagtagaaactatcaa

SEQ ID NO: 49205 - DNA, 20 bp, Artificial Sequence
  Synthetic oligonucleotide; GAG chr11 5222488 5222507 5222491 -
caaagtagaaactatcaagg

SEQ ID NO: 49206 - DNA, 20 bp, Artificial Sequence
  Synthetic oligonucleotide; CAG chr11 5222476 5222495 5222479 -
tatcaagggagaaataaatt

SEQ ID NO: 49207 - DNA, 20 bp, Artificial Sequence
  Synthetic oligonucleotide; AAG chr11 5222463 5222482 5222466 -
ataaattcagtcaacaataa

SEQ ID NO: 49208 - DNA, 20 bp, Artificial Sequence
  Synthetic oligonucleotide; AAG chr11 5222455 5222474 5222458 -
agtcaacaataaaagcattt

SEQ ID NO: 49209 - DNA, 20 bp, Artificial Sequence
  Synthetic oligonucleotide; AAG chr11 5222452 5222471 5222455 -
caacaataaaagcatttaag

SEQ ID NO: 49210 - DNA, 20 bp, Artificial Sequence
  Synthetic oligonucleotide; TAG chr11 5222443 5222462 5222446 -
aagcatttaagaagttattc

SEQ ID NO: 49211 - DNA, 20 bp, Artificial Sequence
  Synthetic oligonucleotide; AGG chr11 5222442 5222461 5222445 -
agcatttaagaagttattct

SEQ ID NO: 49212 - DNA, 20 bp, Artificial Sequence
  Synthetic oligonucleotide; TGG chr11 5222438 5222457 5222441 -
tttaagaagttattctaggc

SEQ ID NO: 49213 - DNA, 20 bp, Artificial Sequence
  Synthetic oligonucleotide; GGG chr11 5222437 5222456 5222440 -
ttaagaagttattctaggct

SEQ ID NO: 49214 - DNA, 20 bp, Artificial Sequence
  Synthetic oligonucleotide; GAG chr11 5222435 5222454 5222438 -
aagaagttattctaggctgg

SEQ ID NO: 49215 - DNA, 20 bp, Artificial Sequence
  Synthetic oligonucleotide; CGG chr11 5222432 5222451 5222435 -
aagttattctaggctgggag

SEQ ID NO: 49216 - DNA, 20 bp, Artificial Sequence
  Synthetic oligonucleotide; TGG chr11 5222429 5222448 5222432 -
ttattctaggctgggagcgg

SEQ ID NO: 49217 - DNA, 20 bp, Artificial Sequence
  Synthetic oligonucleotide; CAG chr11 5222410 5222429 5222413 -
gtggctcacacctgcaattg

SEQ ID NO: 49218 - DNA, 20 bp, Artificial Sequence
  Synthetic oligonucleotide; TGG chr11 5222402 5222421 5222405 -
cacctgcaattgcagcactt

SEQ ID NO: 49219 - DNA, 20 bp, Artificial Sequence
  Synthetic oligonucleotide; GGG chr11 5222401 5222420 5222404 -
acctgcaattgcagcacttt

SEQ ID NO: 49220 - DNA, 20 bp, Artificial Sequence
  Synthetic oligonucleotide; GAG chr11 5222399 5222418 5222402 -
ctgcaattgcagcactttgg

SEQ ID NO: 49221 - DNA, 20 bp, Artificial Sequence
  Synthetic oligonucleotide; AGG chr11 5222398 5222417 5222401 -
tgcaattgcagcactttggg

SEQ ID NO: 49222 - DNA, 20 bp, Artificial Sequence
  Synthetic oligonucleotide; TAG chr11 5222393 5222412 5222396 -
ttgcagcactttgggaggcc

SEQ ID NO: 49223 - DNA, 20 bp, Artificial Sequence
  Synthetic oligonucleotide; CAG chr11 5222389 5222408 5222392 -
agcactttgggaggcctaga

SEQ ID NO: 49224 - DNA, 20 bp, Artificial Sequence
  Synthetic oligonucleotide; AGG chr11 5222388 5222407 5222391 -
gcactttgggaggcctagac

SEQ ID NO: 49225 - DNA, 20 bp, Artificial Sequence
  Synthetic oligonucleotide; CGG chr11 5222385 5222404 5222388 -
ctttgggaggcctagacagg

SEQ ID NO: 49226 - DNA, 20 bp, Artificial Sequence
  Synthetic oligonucleotide; CAG chr11 5222372 5222391 5222375 -
agacaggcggatcacgacgt

SEQ ID NO: 49227 - DNA, 20 bp, Artificial Sequence
  Synthetic oligonucleotide; AGG chr11 5222371 5222390 5222374 -
gacaggcggatcacgacgtc

SEQ ID NO: 49228 - DNA, 20 bp, Artificial Sequence
  Synthetic oligonucleotide; GAG chr11 5222369 5222388 5222372 -
caggcggatcacgacgtcag

SEQ ID NO: 49229 - DNA, 20 bp, Artificial Sequence
  Synthetic oligonucleotide; AAG chr11 5222363 5222382 5222366 -
gatcacgacgtcaggagttc

SEQ ID NO: 49230 - DNA, 20 bp, Artificial Sequence
  Synthetic oligonucleotide; CAG chr11 5222358 5222377 5222361 -
cgacgtcaggagttcaagat

SEQ ID NO: 49231 - DNA, 20 bp, Artificial Sequence
  Synthetic oligonucleotide; TGG chr11 5222353 5222372 5222356 -
tcaggagttcaagatcagcc

SEQ ID NO: 49232 - DNA, 20 bp, Artificial Sequence
  Synthetic oligonucleotide; TAG chr11 5222344 5222363 5222347 -
caagatcagcctggccaaca

SEQ ID NO: 49233 - DNA, 20 bp, Artificial Sequence
  Synthetic oligonucleotide; TAG chr11 5222308 5222327 5222311 -
ctactaaaaatataaaaact

SEQ ID NO: 49234 - DNA, 20 bp, Artificial Sequence
  Synthetic oligonucleotide; TGG chr11 5222303 5222322 5222306 -
aaaaatataaaaacttagcc

SEQ ID NO: 49235 - DNA, 20 bp, Artificial Sequence
  Synthetic oligonucleotide; TGG chr11 5222298 5222317 5222301 -
tataaaaacttagcctggcg

SEQ ID NO: 49236 - DNA, 20 bp, Artificial Sequence
  Synthetic oligonucleotide; TGG chr11 5222295 5222314 5222298 -
aaaaacttagcctggcgtgg

SEQ ID NO: 49237 - DNA, 20 bp, Artificial Sequence
  Synthetic oligonucleotide; CAG chr11 5222292 5222311 5222295 -
aacttagcctggcgtggtgg

SEQ ID NO: 49238 - DNA, 20 bp, Artificial Sequence
  Synthetic oligonucleotide; AGG chr11 5222291 5222310 5222294 -
acttagcctggcgtggtggc

SEQ ID NO: 49239 - DNA, 20 bp, Artificial Sequence
  Synthetic oligonucleotide; CAG chr11 5222276 5222295 5222279 -
gtggcaggcatgtgtaatcc

SEQ ID NO: 49240 - DNA, 20 bp, Artificial Sequence
  Synthetic oligonucleotide; TGG chr11 5222268 5222287 5222271 -
catgtgtaatcccagcaatt

SEQ ID NO: 49241 - DNA, 20 bp, Artificial Sequence
  Synthetic oligonucleotide; GGG chr11 5222267 5222286 5222270 -
atgtgtaatcccagcaattt

SEQ ID NO: 49242 - DNA, 20 bp, Artificial Sequence
  Synthetic oligonucleotide; GAG chr11 5222265 5222284 5222268 -
gtgtaatcccagcaatttgg

SEQ ID NO: 49243 - DNA, 20 bp, Artificial Sequence
  Synthetic oligonucleotide; AGG chr11 5222264 5222283 5222267 -
tgtaatcccagcaatttggg

SEQ ID NO: 49244 - DNA, 20 bp, Artificial Sequence
  Synthetic oligonucleotide; GAG chr11 5222259 5222278 5222262 -
tcccagcaatttgggaggct

SEQ ID NO: 49245 - DNA, 20 bp, Artificial Sequence
  Synthetic oligonucleotide; AGG chr11 5222258 5222277 5222261 -
cccagcaatttgggaggctg

SEQ ID NO: 49246 - DNA, 20 bp, Artificial Sequence
  Synthetic oligonucleotide; CAG chr11 5222255 5222274 5222258 -
agcaatttgggaggctgagg

SEQ ID NO: 49247 - DNA, 20 bp, Artificial Sequence
  Synthetic oligonucleotide; AGG chr11 5222254 5222273 5222257 -
gcaatttgggaggctgaggc

SEQ ID NO: 49248 - DNA, 20 bp, Artificial Sequence
  Synthetic oligonucleotide; GAG chr11 5222252 5222271 5222255 -
aatttgggaggctgaggcag

SEQ ID NO: 49249 - DNA, 20 bp, Artificial Sequence
  Synthetic oligonucleotide; TGG chr11 5222236 5222255 5222239 -
gcaggagaatcgcttgatcc

SEQ ID NO: 49250 - DNA, 20 bp, Artificial Sequence
  Synthetic oligonucleotide; GGG chr11 5222235 5222254 5222238 -
caggagaatcgcttgatcct

SEQ ID NO: 49251 - DNA, 20 bp, Artificial Sequence
  Synthetic oligonucleotide; GAG chr11 5222233 5222252 5222236 -
ggagaatcgcttgatcctgg

SEQ ID NO: 49252 - DNA, 20 bp, Artificial Sequence
  Synthetic oligonucleotide; AGG chr11 5222232 5222251 5222235 -
gagaatcgcttgatcctggg

SEQ ID NO: 49253 - DNA, 20 bp, Artificial Sequence
  Synthetic oligonucleotide; CAG chr11 5222229 5222248 5222232 -
aatcgcttgatcctgggagg

SEQ ID NO: 49254 - DNA, 20 bp, Artificial Sequence
  Synthetic oligonucleotide; GAG chr11 5222227 5222246 5222230 -
tcgcttgatcctgggaggca

SEQ ID NO: 49255 - DNA, 20 bp, Artificial Sequence
  Synthetic oligonucleotide; AGG chr11 5222226 5222245 5222229 -
cgcttgatcctgggaggcag

SEQ ID NO: 49256 - DNA, 20 bp, Artificial Sequence
  Synthetic oligonucleotide; CAG chr11 5222220 5222239 5222223 -
atcctgggaggcagaggttg

SEQ ID NO: 49257 - DNA, 20 bp, Artificial Sequence
  Synthetic oligonucleotide; GAG chr11 5222216 5222235 5222219 -
tgggaggcagaggttgcagt

SEQ ID NO: 49258 - DNA, 20 bp, Artificial Sequence
  Synthetic oligonucleotide; AAG chr11 5222211 5222230 5222214 -
ggcagaggttgcagtgagcc

SEQ ID NO: 49259 - DNA, 20 bp, Artificial Sequence
  Synthetic oligonucleotide; CAG chr11 5222191 5222210 5222194 -
aagattgtgccactgcattc

SEQ ID NO: 49260 - DNA, 20 bp, Artificial Sequence
  Synthetic oligonucleotide; CAG chr11 5222186 5222205 5222189 -
tgtgccactgcattccagcc

SEQ ID NO: 49261 - DNA, 20 bp, Artificial Sequence
  Synthetic oligonucleotide; AGG chr11 5222185 5222204 5222188 -
gtgccactgcattccagccc

SEQ ID NO: 49262 - DNA, 20 bp, Artificial Sequence
  Synthetic oligonucleotide; CAG chr11 5222179 5222198 5222182 -
ctgcattccagcccaggtga

SEQ ID NO: 49263 - DNA, 20 bp, Artificial Sequence
  Synthetic oligonucleotide; GAG chr11 5222173 5222192 5222176 -
tccagcccaggtgacagcat

SEQ ID NO: 49264 - DNA, 20 bp, Artificial Sequence
  Synthetic oligonucleotide; AAG chr11 5222152 5222171 5222155 -
agactccgtcacaaaaaaaa

SEQ ID NO: 49265 - DNA, 20 bp, Artificial Sequence
  Synthetic oligonucleotide; AAG chr11 5222141 5222160 5222144 -
caaaaaaaaaagaaaaaaaa

SEQ ID NO: 49266 - DNA, 20 bp, Artificial Sequence
  Synthetic oligonucleotide; AGG chr11 5222140 5222159 5222143 -
aaaaaaaaaagaaaaaaaaa

SEQ ID NO: 49267 - DNA, 20 bp, Artificial Sequence
  Synthetic oligonucleotide; GGG chr11 5222139 5222158 5222142 -
aaaaaaaaagaaaaaaaaaa

SEQ ID NO: 49268 - DNA, 20 bp, Artificial Sequence
  Synthetic oligonucleotide; GGG chr11 5222138 5222157 5222141 -
aaaaaaaagaaaaaaaaaag

SEQ ID NO: 49269 - DNA, 20 bp, Artificial Sequence
  Synthetic oligonucleotide; GGG chr11 5222137 5222156 5222140 -
aaaaaaagaaaaaaaaaagg

SEQ ID NO: 49270 - DNA, 20 bp, Artificial Sequence
  Synthetic oligonucleotide; GGG chr11 5222136 5222155 5222139 -
aaaaaagaaaaaaaaaaggg

SEQ ID NO: 49271 - DNA, 20 bp, Artificial Sequence
  Synthetic oligonucleotide; GGG chr11 5222135 5222154 5222138 -
aaaaagaaaaaaaaaagggg

SEQ ID NO: 49272 - DNA, 20 bp, Artificial Sequence
  Synthetic oligonucleotide; GGG chr11 5222134 5222153 5222137 -
aaaagaaaaaaaaaaggggg

SEQ ID NO: 49273 - DNA, 20 bp, Artificial Sequence
  Synthetic oligonucleotide; GGG chr11 5222133 5222152 5222136 -
aaagaaaaaaaaaagggggg

SEQ ID NO: 49274 - DNA, 20 bp, Artificial Sequence
  Synthetic oligonucleotide; GGG chr11 5222132 5222151 5222135 -
aagaaaaaaaaaaggggggg

SEQ ID NO: 49275 - DNA, 20 bp, Artificial Sequence
  Synthetic oligonucleotide; GAG chr11 5222130 5222149 5222133 -
gaaaaaaaaaaggggggggg

SEQ ID NO: 49276 - DNA, 20 bp, Artificial Sequence
  Synthetic oligonucleotide; CGG chr11 5222127 5222146 5222130 -
aaaaaaaaggggggggggag

SEQ ID NO: 49277 - DNA, 20 bp, Artificial Sequence
  Synthetic oligonucleotide; TGG chr11 5222124 5222143 5222127 -
aaaaaggggggggggagcgg

SEQ ID NO: 49278 - DNA, 20 bp, Artificial Sequence
  Synthetic oligonucleotide; GAG chr11 5222122 5222141 5222125 -
aaaggggggggggagcggtg

SEQ ID NO: 49279 - DNA, 20 bp, Artificial Sequence
  Synthetic oligonucleotide; AAG chr11 5222117 5222136 5222120 -
ggggggggagcggtggagcc

SEQ ID NO: 49280 - DNA, 20 bp, Artificial Sequence
  Synthetic oligonucleotide; TAG chr11 5222105 5222124 5222108 -
gtggagccaagatgaccgaa

SEQ ID NO: 49281 - DNA, 20 bp, Artificial Sequence
  Synthetic oligonucleotide; AGG chr11 5222104 5222123 5222107 -
tggagccaagatgaccgaat

SEQ ID NO: 49282 - DNA, 20 bp, Artificial Sequence
  Synthetic oligonucleotide; CAG chr11 5222099 5222118 5222102 -
ccaagatgaccgaataggaa

SEQ ID NO: 49283 - DNA, 20 bp, Artificial Sequence
  Synthetic oligonucleotide; CAG chr11 5222093 5222112 5222096 -
tgaccgaataggaacagctc

SEQ ID NO: 49284 - DNA, 20 bp, Artificial Sequence
  Synthetic oligonucleotide; TAG chr11 5222086 5222105 5222089 -
ataggaacagctccagtcta

SEQ ID NO: 49285 - DNA, 20 bp, Artificial Sequence
  Synthetic oligonucleotide; GAG chr11 5222073 5222092 5222076 -
cagtctatagctcccatcgt

SEQ ID NO: 49286 - DNA, 20 bp, Artificial Sequence
  Synthetic oligonucleotide; CAG chr11 5222065 5222084 5222068 -
agctcccatcgtgagtgacg

SEQ ID NO: 49287 - DNA, 20 bp, Artificial Sequence
  Synthetic oligonucleotide; AAG chr11 5222062 5222081 5222065 -
tcccatcgtgagtgacgcag

SEQ ID NO: 49288 - DNA, 20 bp, Artificial Sequence
  Synthetic oligonucleotide; CGG chr11 5222058 5222077 5222061 -
atcgtgagtgacgcagaaga

SEQ ID NO: 49289 - DNA, 20 bp, Artificial Sequence
  Synthetic oligonucleotide; GGG chr11 5222057 5222076 5222060 -
tcgtgagtgacgcagaagac

SEQ ID NO: 49290 - DNA, 20 bp, Artificial Sequence
  Synthetic oligonucleotide; GAG chr11 5222034 5222053 5222037 -
tgatttctgcatttccaact

SEQ ID NO: 49291 - DNA, 20 bp, Artificial Sequence
  Synthetic oligonucleotide; AGG chr11 5222033 5222052 5222036 -
gatttctgcatttccaactg

SEQ ID NO: 49292 - DNA, 20 bp, Artificial Sequence
  Synthetic oligonucleotide; CAG chr11 5222027 5222046 5222030 -
tgcatttccaactgaggtac

SEQ ID NO: 49293 - DNA, 20 bp, Artificial Sequence
  Synthetic oligonucleotide; AGG chr11 5222026 5222045 5222029 -
gcatttccaactgaggtacc

SEQ ID NO: 49294 - DNA, 20 bp, Artificial Sequence
  Synthetic oligonucleotide; CAG chr11 5222014 5222033 5222017 -
gaggtaccaggttcatctca

SEQ ID NO: 49295 - DNA, 20 bp, Artificial Sequence
  Synthetic oligonucleotide; AGG chr11 5222013 5222032 5222016 -
aggtaccaggttcatctcac

SEQ ID NO: 49296 - DNA, 20 bp, Artificial Sequence
  Synthetic oligonucleotide; GGG chr11 5222012 5222031 5222015 -
ggtaccaggttcatctcaca

SEQ ID NO: 49297 - DNA, 20 bp, Artificial Sequence
  Synthetic oligonucleotide; AAG chr11 5222009 5222028 5222012 -
accaggttcatctcacaggg

SEQ ID NO: 49298 - DNA, 20 bp, Artificial Sequence
  Synthetic oligonucleotide; CAG chr11 5222003 5222022 5222006 -
ttcatctcacagggaagtgc

SEQ ID NO: 49299 - DNA, 20 bp, Artificial Sequence
  Synthetic oligonucleotide; AGG chr11 5222002 5222021 5222005 -
tcatctcacagggaagtgcc

SEQ ID NO: 49300 - DNA, 20 bp, Artificial Sequence
  Synthetic oligonucleotide; CAG chr11 5221999 5222018 5222002 -
tctcacagggaagtgccagg

SEQ ID NO: 49301 - DNA, 20 bp, Artificial Sequence
  Synthetic oligonucleotide; TGG chr11 5221996 5222015 5221999 -
cacagggaagtgccaggcag

SEQ ID NO: 49302 - DNA, 20 bp, Artificial Sequence
  Synthetic oligonucleotide; GGG chr11 5221995 5222014 5221998 -
acagggaagtgccaggcagt

SEQ ID NO: 49303 - DNA, 20 bp, Artificial Sequence
  Synthetic oligonucleotide; CAG chr11 5221990 5222009 5221993 -
gaagtgccaggcagtgggtg

SEQ ID NO: 49304 - DNA, 20 bp, Artificial Sequence
  Synthetic oligonucleotide; AGG chr11 5221989 5222008 5221992 -
aagtgccaggcagtgggtgc

SEQ ID NO: 49305 - DNA, 20 bp, Artificial Sequence
  Synthetic oligonucleotide; CAG chr11 5221985 5222004 5221988 -
gccaggcagtgggtgcagga

SEQ ID NO: 49306 - DNA, 20 bp, Artificial Sequence
  Synthetic oligonucleotide; TAG chr11 5221982 5222001 5221985 -
aggcagtgggtgcaggacag

SEQ ID NO: 49307 - DNA, 20 bp, Artificial Sequence
  Synthetic oligonucleotide; AGG chr11 5221981 5222000 5221984 -
ggcagtgggtgcaggacagt

SEQ ID NO: 49308 - DNA, 20 bp, Artificial Sequence
  Synthetic oligonucleotide; CAG chr11 5221976 5221995 5221979 -
tgggtgcaggacagtaggtg

SEQ ID NO: 49309 - DNA, 20 bp, Artificial Sequence
  Synthetic oligonucleotide; GAG chr11 5221961 5221980 5221964 -
aggtgcagtgcactgtgcat

SEQ ID NO: 49310 - DNA, 20 bp, Artificial Sequence
  Synthetic oligonucleotide; AAG chr11 5221955 5221974 5221958 -
agtgcactgtgcatgagcca

SEQ ID NO: 49311 - DNA, 20 bp, Artificial Sequence
  Synthetic oligonucleotide; CAG chr11 5221952 5221971 5221955 -
gcactgtgcatgagccaaag

SEQ ID NO: 49312 - DNA, 20 bp, Artificial Sequence
  Synthetic oligonucleotide; AGG chr11 5221951 5221970 5221954 -
cactgtgcatgagccaaagc

SEQ ID NO: 49313 - DNA, 20 bp, Artificial Sequence
  Synthetic oligonucleotide; GGG chr11 5221950 5221969 5221953 -
actgtgcatgagccaaagca

SEQ ID NO: 49314 - DNA, 20 bp, Artificial Sequence
  Synthetic oligonucleotide; GAG chr11 5221946 5221965 5221949 -
tgcatgagccaaagcagggc

SEQ ID NO: 49315 - DNA, 20 bp, Artificial Sequence
  Synthetic oligonucleotide; AGG chr11 5221945 5221964 5221948 -
gcatgagccaaagcagggcg

SEQ ID NO: 49316 - DNA, 20 bp, Artificial Sequence
  Synthetic oligonucleotide; CGG chr11 5221930 5221949 5221933 -
gggcgaggcatcacctcacc

SEQ ID NO: 49317 - DNA, 20 bp, Artificial Sequence
  Synthetic oligonucleotide; GGG chr11 5221929 5221948 5221932 -
ggcgaggcatcacctcaccc

SEQ ID NO: 49318 - DNA, 20 bp, Artificial Sequence
  Synthetic oligonucleotide; AAG chr11 5221926 5221945 5221929 -
gaggcatcacctcacccggg

SEQ ID NO: 49319 - DNA, 20 bp, Artificial Sequence
  Synthetic oligonucleotide; AAG chr11 5221920 5221939 5221923 -
tcacctcacccgggaagcac

SEQ ID NO: 49320 - DNA, 20 bp, Artificial Sequence
  Synthetic oligonucleotide; AGG chr11 5221919 5221938 5221922 -
cacctcacccgggaagcaca

SEQ ID NO: 49321 - DNA, 20 bp, Artificial Sequence
  Synthetic oligonucleotide; GGG chr11 5221918 5221937 5221921 -
acctcacccgggaagcacaa

SEQ ID NO: 49322 - DNA, 20 bp, Artificial Sequence
  Synthetic oligonucleotide; GGG chr11 5221917 5221936 5221920 -
cctcacccgggaagcacaag

SEQ ID NO: 49323 - DNA, 20 bp, Artificial Sequence
  Synthetic oligonucleotide; CAG chr11 5221913 5221932 5221916 -
acccgggaagcacaaggggt

SEQ ID NO: 49324 - DNA, 20 bp, Artificial Sequence
  Synthetic oligonucleotide; AGG chr11 5221912 5221931 5221915 -
cccgggaagcacaaggggtc

SEQ ID NO: 49325 - DNA, 20 bp, Artificial Sequence
  Synthetic oligonucleotide; GGG chr11 5221911 5221930 5221914 -
ccgggaagcacaaggggtca

SEQ ID NO: 49326 - DNA, 20 bp, Artificial Sequence
  Synthetic oligonucleotide; TAG chr11 5221896 5221915 5221899 -
ggtcagggaattccctttcc

SEQ ID NO: 49327 - DNA, 20 bp, Artificial Sequence
  Synthetic oligonucleotide; AAG chr11 5221890 5221909 5221893 -
ggaattccctttcctagtca

SEQ ID NO: 49328 - DNA, 20 bp, Artificial Sequence
  Synthetic oligonucleotide; AAG chr11 5221885 5221904 5221888 -
tccctttcctagtcaaagaa

SEQ ID NO: 49329 - DNA, 20 bp, Artificial Sequence
  Synthetic oligonucleotide; AGG chr11 5221884 5221903 5221887 -
ccctttcctagtcaaagaaa

SEQ ID NO: 49330 - DNA, 20 bp, Artificial Sequence
  Synthetic oligonucleotide; GGG chr11 5221883 5221902 5221886 -
cctttcctagtcaaagaaaa

SEQ ID NO: 49331 - DNA, 20 bp, Artificial Sequence
  Synthetic oligonucleotide; CAG chr11 5221877 5221896 5221880 -
ctagtcaaagaaaagggtga

SEQ ID NO: 49332 - DNA, 20 bp, Artificial Sequence
  Synthetic oligonucleotide; TGG chr11 5221873 5221892 5221876 -
tcaaagaaaagggtgacaga

SEQ ID NO: 49333 - DNA, 20 bp, Artificial Sequence
  Synthetic oligonucleotide; TGG chr11 5221866 5221885 5221869 -
aaagggtgacagatggcacc

SEQ ID NO: 49334 - DNA, 20 bp, Artificial Sequence
  Synthetic oligonucleotide; CGG chr11 5221858 5221877 5221861 -
acagatggcacctggaaaat

SEQ ID NO: 49335 - DNA, 20 bp, Artificial Sequence
  Synthetic oligonucleotide; GGG chr11 5221857 5221876 5221860 -
cagatggcacctggaaaatc

SEQ ID NO: 49336 - DNA, 20 bp, Artificial Sequence
  Synthetic oligonucleotide; AAG chr11 5221822 5221841 5221825 -
taatactgcgctcttccaac

SEQ ID NO: 49337 - DNA, 20 bp, Artificial Sequence
  Synthetic oligonucleotide; TGG chr11 5221810 5221829 5221813 -
cttccaacaagcttaacaaa

SEQ ID NO: 49338 - DNA, 20 bp, Artificial Sequence
  Synthetic oligonucleotide; CAG chr11 5221802 5221821 5221805 -
aagcttaacaaatggcacac

SEQ ID NO: 49339 - DNA, 20 bp, Artificial Sequence
  Synthetic oligonucleotide; AGG chr11 5221801 5221820 5221804 -
agcttaacaaatggcacacc

SEQ ID NO: 49340 - DNA, 20 bp, Artificial Sequence
  Synthetic oligonucleotide; GAG chr11 5221799 5221818 5221802 -
cttaacaaatggcacaccag

SEQ ID NO: 49341 - DNA, 20 bp, Artificial Sequence
  Synthetic oligonucleotide; TGG chr11 5221781 5221800 5221784 -
aggagattatatcccatgcc

SEQ ID NO: 49342 - DNA, 20 bp, Artificial Sequence
  Synthetic oligonucleotide; CAG chr11 5221776 5221795 5221779 -
attatatcccatgcctggct

SEQ ID NO: 49343 - DNA, 20 bp, Artificial Sequence
  Synthetic oligonucleotide; GAG chr11 5221774 5221793 5221777 -
tatatcccatgcctggctca

SEQ ID NO: 49344 - DNA, 20 bp, Artificial Sequence
  Synthetic oligonucleotide; AGG chr11 5221773 5221792 5221776 -
atatcccatgcctggctcag

SEQ ID NO: 49345 - DNA, 20 bp, Artificial Sequence
  Synthetic oligonucleotide; GGG chr11 5221772 5221791 5221775 -
tatcccatgcctggctcaga

SEQ ID NO: 49346 - DNA, 20 bp, Artificial Sequence
  Synthetic oligonucleotide; TGG chr11 5221758 5221777 5221761 -
ctcagagggtcctacgccca

SEQ ID NO: 49347 - DNA, 20 bp, Artificial Sequence
  Synthetic oligonucleotide; GAG chr11 5221756 5221775 5221759 -
cagagggtcctacgcccatg

SEQ ID NO: 49348 - DNA, 20 bp, Artificial Sequence
  Synthetic oligonucleotide; TAG chr11 5221740 5221759 5221743 -
catggagcctcgctcattgc

SEQ ID NO: 49349 - DNA, 20 bp, Artificial Sequence
  Synthetic oligonucleotide; CAG chr11 5221735 5221754 5221738 -
agcctcgctcattgctagca

SEQ ID NO: 49350 - DNA, 20 bp, Artificial Sequence
  Synthetic oligonucleotide; CAG chr11 5221732 5221751 5221735 -
ctcgctcattgctagcacag

SEQ ID NO: 49351 - DNA, 20 bp, Artificial Sequence
  Synthetic oligonucleotide; GAG chr11 5221726 5221745 5221729 -
cattgctagcacagcagtct

SEQ ID NO: 49352 - DNA, 20 bp, Artificial Sequence
  Synthetic oligonucleotide; AGG chr11 5221725 5221744 5221728 -
attgctagcacagcagtctg

SEQ ID NO: 49353 - DNA, 20 bp, Artificial Sequence
  Synthetic oligonucleotide; AAG chr11 5221713 5221732 5221716 -
gcagtctgaggtcaaactgc

SEQ ID NO: 49354 - DNA, 20 bp, Artificial Sequence
  Synthetic oligonucleotide; AGG chr11 5221712 5221731 5221715 -
cagtctgaggtcaaactgca

SEQ ID NO: 49355 - DNA, 20 bp, Artificial Sequence
  Synthetic oligonucleotide; TGG chr11 5221709 5221728 5221712 -
tctgaggtcaaactgcaagg

SEQ ID NO: 49356 - DNA, 20 bp, Artificial Sequence
  Synthetic oligonucleotide; CAG chr11 5221706 5221725 5221709 -
gaggtcaaactgcaaggtgg

SEQ ID NO: 49357 - DNA, 20 bp, Artificial Sequence
  Synthetic oligonucleotide; GAG chr11 5221702 5221721 5221705 -
tcaaactgcaaggtggcagt

SEQ ID NO: 49358 - DNA, 20 bp, Artificial Sequence
  Synthetic oligonucleotide; AGG chr11 5221701 5221720 5221704 -
caaactgcaaggtggcagtg

SEQ ID NO: 49359 - DNA, 20 bp, Artificial Sequence
  Synthetic oligonucleotide; TGG chr11 5221697 5221716 5221700 -
ctgcaaggtggcagtgaggc

SEQ ID NO: 49360 - DNA, 20 bp, Artificial Sequence
  Synthetic oligonucleotide; GGG chr11 5221696 5221715 5221699 -
tgcaaggtggcagtgaggct

SEQ ID NO: 49361 - DNA, 20 bp, Artificial Sequence
  Synthetic oligonucleotide; GGG chr11 5221695 5221714 5221698 -
gcaaggtggcagtgaggctg

SEQ ID NO: 49362 - DNA, 20 bp, Artificial Sequence
  Synthetic oligonucleotide; GGG chr11 5221694 5221713 5221697 -
caaggtggcagtgaggctgg

SEQ ID NO: 49363 - DNA, 20 bp, Artificial Sequence
  Synthetic oligonucleotide; GAG chr11 5221692 5221711 5221695 -
aggtggcagtgaggctgggg

SEQ ID NO: 49364 - DNA, 20 bp, Artificial Sequence
  Synthetic oligonucleotide; AGG chr11 5221691 5221710 5221694 -
ggtggcagtgaggctggggg

SEQ ID NO: 49365 - DNA, 20 bp, Artificial Sequence
  Synthetic oligonucleotide; GGG chr11 5221690 5221709 5221693 -
gtggcagtgaggctggggga

SEQ ID NO: 49366 - DNA, 20 bp, Artificial Sequence
  Synthetic oligonucleotide; GGG chr11 5221689 5221708 5221692 -
tggcagtgaggctgggggag

SEQ ID NO: 49367 - DNA, 20 bp, Artificial Sequence
  Synthetic oligonucleotide; CAG chr11 5221672 5221691 5221675 -
gaggggtgcccaccattgtc

SEQ ID NO: 49368 - DNA, 20 bp, Artificial Sequence
  Synthetic oligonucleotide; AGG chr11 5221671 5221690 5221674 -
aggggtgcccaccattgtcc

SEQ ID NO: 49369 - DNA, 20 bp, Artificial Sequence
  Synthetic oligonucleotide; GAG chr11 5221665 5221684 5221668 -
gcccaccattgtccaggctt

SEQ ID NO: 49370 - DNA, 20 bp, Artificial Sequence
  Synthetic oligonucleotide; CAG chr11 5221662 5221681 5221665 -
caccattgtccaggcttgag

SEQ ID NO: 49371 - DNA, 20 bp, Artificial Sequence
  Synthetic oligonucleotide; AGG chr11 5221661 5221680 5221664 -
accattgtccaggcttgagc

SEQ ID NO: 49372 - DNA, 20 bp, Artificial Sequence
  Synthetic oligonucleotide; AAG chr11 5221652 5221671 5221655 -
caggcttgagcaggtaaaca

SEQ ID NO: 49373 - DNA, 20 bp, Artificial Sequence
  Synthetic oligonucleotide; TGG chr11 5221644 5221663 5221647 -
agcaggtaaacaaagccgcc

SEQ ID NO: 49374 - DNA, 20 bp, Artificial Sequence
  Synthetic oligonucleotide; AAG chr11 5221641 5221660 5221644 -
aggtaaacaaagccgcctgg

SEQ ID NO: 49375 - DNA, 20 bp, Artificial Sequence
  Synthetic oligonucleotide; TGG chr11 5221631 5221650 5221634 -
agccgcctggaagctcgaac

SEQ ID NO: 49376 - DNA, 20 bp, Artificial Sequence
  Synthetic oligonucleotide; GGG chr11 5221630 5221649 5221633 -
gccgcctggaagctcgaact

SEQ ID NO: 49377 - DNA, 20 bp, Artificial Sequence
  Synthetic oligonucleotide; TGG chr11 5221627 5221646 5221630 -
gcctggaagctcgaactggg

SEQ ID NO: 49378 - DNA, 20 bp, Artificial Sequence
  Synthetic oligonucleotide; GAG chr11 5221625 5221644 5221628 -
ctggaagctcgaactgggtg

SEQ ID NO: 49379 - DNA, 20 bp, Artificial Sequence
  Synthetic oligonucleotide; CAG chr11 5221615 5221634 5221618 -
gaactgggtggagcccacca

SEQ ID NO: 49380 - DNA, 20 bp, Artificial Sequence
  Synthetic oligonucleotide; AAG chr11 5221609 5221628 5221612 -
ggtggagcccaccacagctc

SEQ ID NO: 49381 - DNA, 20 bp, Artificial Sequence
  Synthetic oligonucleotide; AGG chr11 5221608 5221627 5221611 -
gtggagcccaccacagctca

SEQ ID NO: 49382 - DNA, 20 bp, Artificial Sequence
  Synthetic oligonucleotide; GAG chr11 5221606 5221625 5221609 -
ggagcccaccacagctcaag

SEQ ID NO: 49383 - DNA, 20 bp, Artificial Sequence
  Synthetic oligonucleotide; AGG chr11 5221605 5221624 5221608 -
gagcccaccacagctcaagg

SEQ ID NO: 49384 - DNA, 20 bp, Artificial Sequence
  Synthetic oligonucleotide; TAG chr11 5221588 5221607 5221591 -
aggaggcctgcctgcctctg

SEQ ID NO: 49385 - DNA, 20 bp, Artificial Sequence
  Synthetic oligonucleotide; AGG chr11 5221587 5221606 5221590 -
ggaggcctgcctgcctctgt

SEQ ID NO: 49386 - DNA, 20 bp, Artificial Sequence
  Synthetic oligonucleotide; TAG chr11 5221575 5221594 5221578 -
gcctctgtaggctccacctc

SEQ ID NO: 49387 - DNA, 20 bp, Artificial Sequence
  Synthetic oligonucleotide; AGG chr11 5221574 5221593 5221577 -
cctctgtaggctccacctct

SEQ ID NO: 49388 - DNA, 20 bp, Artificial Sequence
  Synthetic oligonucleotide; GGG chr11 5221573 5221592 5221576 -
ctctgtaggctccacctcta

SEQ ID NO: 49389 - DNA, 20 bp, Artificial Sequence
  Synthetic oligonucleotide; GGG chr11 5221572 5221591 5221575 -
tctgtaggctccacctctag

SEQ ID NO: 49390 - DNA, 20 bp, Artificial Sequence
  Synthetic oligonucleotide; CAG chr11 5221569 5221588 5221572 -
gtaggctccacctctagggg

SEQ ID NO: 49391 - DNA, 20 bp, Artificial Sequence
  Synthetic oligonucleotide; AGG chr11 5221568 5221587 5221571 -
taggctccacctctaggggc

SEQ ID NO: 49392 - DNA, 20 bp, Artificial Sequence
  Synthetic oligonucleotide; GGG chr11 5221567 5221586 5221570 -
aggctccacctctaggggca

SEQ ID NO: 49393 - DNA, 20 bp, Artificial Sequence
  Synthetic oligonucleotide; CAG chr11 5221562 5221581 5221565 -
ccacctctaggggcagggca

SEQ ID NO: 49394 - DNA, 20 bp, Artificial Sequence
  Synthetic oligonucleotide; AAG chr11 5221551 5221570 5221554 -
ggcagggcacagacaaacaa

SEQ ID NO: 49395 - DNA, 20 bp, Artificial Sequence
  Synthetic oligonucleotide; AAG chr11 5221543 5221562 5221546 -
acagacaaacaaaagacaac

SEQ ID NO: 49396 - DNA, 20 bp, Artificial Sequence
  Synthetic oligonucleotide; CAG chr11 5221532 5221551 5221535 -
aaagacaacaagaacctctg

SEQ ID NO: 49397 - DNA, 20 bp, Artificial Sequence
  Synthetic oligonucleotide; CAG chr11 5221509 5221528 5221512 -
acttaaatgtccctgtctga

SEQ ID NO: 49398 - DNA, 20 bp, Artificial Sequence
  Synthetic oligonucleotide; AAG chr11 5221501 5221520 5221504 -
gtccctgtctgacagctttg

SEQ ID NO: 49399 - DNA, 20 bp, Artificial Sequence
  Synthetic oligonucleotide; GAG chr11 5221499 5221518 5221502 -
ccctgtctgacagctttgaa

SEQ ID NO: 49400 - DNA, 20 bp, Artificial Sequence
  Synthetic oligonucleotide; GAG chr11 5221497 5221516 5221500 -
ctgtctgacagctttgaaga

SEQ ID NO: 49401 - DNA, 20 bp, Artificial Sequence
  Synthetic oligonucleotide; TAG chr11 5221494 5221513 5221497 -
tctgacagctttgaagagag

SEQ ID NO: 49402 - DNA, 20 bp, Artificial Sequence
  Synthetic oligonucleotide; TGG chr11 5221491 5221510 5221494 -
gacagctttgaagagagtag

SEQ ID NO: 49403 - DNA, 20 bp, Artificial Sequence
  Synthetic oligonucleotide; CAG chr11 5221482 5221501 5221485 -
gaagagagtagtggttctcc

SEQ ID NO: 49404 - DNA, 20 bp, Artificial Sequence
  Synthetic oligonucleotide; TAG chr11 5221475 5221494 5221478 -
gtagtggttctcccagcaca

SEQ ID NO: 49405 - DNA, 20 bp, Artificial Sequence
  Synthetic oligonucleotide; CAG chr11 5221469 5221488 5221472 -
gttctcccagcacatagctt

SEQ ID NO: 49406 - DNA, 20 bp, Artificial Sequence
  Synthetic oligonucleotide; GAG chr11 5221462 5221481 5221465 -
cagcacatagcttcagatct

SEQ ID NO: 49407 - DNA, 20 bp, Artificial Sequence
  Synthetic oligonucleotide; CAG chr11 5221457 5221476 5221460 -
catagcttcagatctgagaa

SEQ ID NO: 49408 - DNA, 20 bp, Artificial Sequence
  Synthetic oligonucleotide; AGG chr11 5221456 5221475 5221459 -
atagcttcagatctgagaac

SEQ ID NO: 49409 - DNA, 20 bp, Artificial Sequence
  Synthetic oligonucleotide; CAG chr11 5221453 5221472 5221456 -
gcttcagatctgagaacagg

SEQ ID NO: 49410 - DNA, 20 bp, Artificial Sequence
  Synthetic oligonucleotide; AAG chr11 5221439 5221458 5221442 -
aacaggcagactgcctcctc

SEQ ID NO: 49411 - DNA, 20 bp, Artificial Sequence
  Synthetic oligonucleotide; TGG chr11 5221436 5221455 5221439 -
aggcagactgcctcctcaag

SEQ ID NO: 49412 - DNA, 20 bp, Artificial Sequence
  Synthetic oligonucleotide; GGG chr11 5221435 5221454 5221438 -
ggcagactgcctcctcaagt

SEQ ID NO: 49413 - DNA, 20 bp, Artificial Sequence
  Synthetic oligonucleotide; GAG chr11 5221420 5221439 5221423 -
caagtgggtccctgaccccc

SEQ ID NO: 49414 - DNA, 20 bp, Artificial Sequence
  Synthetic oligonucleotide; TAG chr11 5221417 5221436 5221420 -
gtgggtccctgacccccgag

SEQ ID NO: 49415 - DNA, 20 bp, Artificial Sequence
  Synthetic oligonucleotide; TGG chr11 5221408 5221427 5221411 -
tgacccccgagtagcctaac

SEQ ID NO: 49416 - DNA, 20 bp, Artificial Sequence
  Synthetic oligonucleotide; GGG chr11 5221407 5221426 5221410 -
gacccccgagtagcctaact

SEQ ID NO: 49417 - DNA, 20 bp, Artificial Sequence
  Synthetic oligonucleotide; GAG chr11 5221405 5221424 5221408 -
cccccgagtagcctaactgg

SEQ ID NO: 49418 - DNA, 20 bp, Artificial Sequence
  Synthetic oligonucleotide; AGG chr11 5221404 5221423 5221407 -
ccccgagtagcctaactggg

SEQ ID NO: 49419 - DNA, 20 bp, Artificial Sequence
  Synthetic oligonucleotide; CAG chr11 5221394 5221413 5221397 -
cctaactgggaggcatcccc

SEQ ID NO: 49420 - DNA, 20 bp, Artificial Sequence
  Synthetic oligonucleotide; TAG chr11 5221391 5221410 5221394 -
aactgggaggcatcccccag

SEQ ID NO: 49421 - DNA, 20 bp, Artificial Sequence
  Synthetic oligonucleotide; AGG chr11 5221390 5221409 5221393 -
actgggaggcatcccccagt

SEQ ID NO: 49422 - DNA, 20 bp, Artificial Sequence
  Synthetic oligonucleotide; GGG chr11 5221389 5221408 5221392 -
ctgggaggcatcccccagta

SEQ ID NO: 49423 - DNA, 20 bp, Artificial Sequence
  Synthetic oligonucleotide; GGG chr11 5221388 5221407 5221391 -
tgggaggcatcccccagtag

SEQ ID NO: 49424 - DNA, 20 bp, Artificial Sequence
  Synthetic oligonucleotide; CAG chr11 5221385 5221404 5221388 -
gaggcatcccccagtagggg

SEQ ID NO: 49425 - DNA, 20 bp, Artificial Sequence
  Synthetic oligonucleotide; TGG chr11 5221368 5221387 5221371 -
gggcagactgacacctcaca

SEQ ID NO: 49426 - DNA, 20 bp, Artificial Sequence
  Synthetic oligonucleotide; TGG chr11 5221364 5221383 5221367 -
agactgacacctcacatggc

SEQ ID NO: 49427 - DNA, 20 bp, Artificial Sequence
  Synthetic oligonucleotide; AAG chr11 5221352 5221371 5221355 -
cacatggctggtactcctct

SEQ ID NO: 49428 - DNA, 20 bp, Artificial Sequence
  Synthetic oligonucleotide; CAG chr11 5221339 5221358 5221342 -
ctcctctaagacaaaacttc

SEQ ID NO: 49429 - DNA, 20 bp, Artificial Sequence
  Synthetic oligonucleotide; GAG chr11 5221337 5221356 5221340 -
cctctaagacaaaacttcca

SEQ ID NO: 49430 - DNA, 20 bp, Artificial Sequence
  Synthetic oligonucleotide; AGG chr11 5221336 5221355 5221339 -
ctctaagacaaaacttccag

SEQ ID NO: 49431 - DNA, 20 bp, Artificial Sequence
  Synthetic oligonucleotide; CAG chr11 5221327 5221346 5221330 -
aaaacttccagaggaatgat

SEQ ID NO: 49432 - DNA, 20 bp, Artificial Sequence
  Synthetic oligonucleotide; AGG chr11 5221326 5221345 5221329 -
aaacttccagaggaatgatc

SEQ ID NO: 49433 - DNA, 20 bp, Artificial Sequence
  Synthetic oligonucleotide; CAG chr11 5221323 5221342 5221326 -
cttccagaggaatgatcagg

SEQ ID NO: 49434 - DNA, 20 bp, Artificial Sequence
  Synthetic oligonucleotide; CAG chr11 5221320 5221339 5221323 -
ccagaggaatgatcaggcag

SEQ ID NO: 49435 - DNA, 20 bp, Artificial Sequence
  Synthetic oligonucleotide; CGG chr11 5221311 5221330 5221314 -
tgatcaggcagcagcatttg

SEQ ID NO: 49436 - DNA, 20 bp, Artificial Sequence
  Synthetic oligonucleotide; CAG chr11 5221286 5221305 5221289 -
caccaatatccactgttctg

SEQ ID NO: 49437 - DNA, 20 bp, Artificial Sequence
  Synthetic oligonucleotide; CAG chr11 5221266 5221285 5221269 -
cagccaccgctgttgatacc

SEQ ID NO: 49438 - DNA, 20 bp, Artificial Sequence
  Synthetic oligonucleotide; AGG chr11 5221265 5221284 5221268 -
agccaccgctgttgataccc

SEQ ID NO: 49439 - DNA, 20 bp, Artificial Sequence
  Synthetic oligonucleotide; CAG chr11 5221258 5221277 5221261 -
gctgttgatacccaggaaaa

SEQ ID NO: 49440 - DNA, 20 bp, Artificial Sequence
  Synthetic oligonucleotide; TGG chr11 5221251 5221270 5221254 -
atacccaggaaaacagcttc

SEQ ID NO: 49441 - DNA, 20 bp, Artificial Sequence
  Synthetic oligonucleotide; GAG chr11 5221249 5221268 5221252 -
acccaggaaaacagcttctg

SEQ ID NO: 49442 - DNA, 20 bp, Artificial Sequence
  Synthetic oligonucleotide; TGG chr11 5221246 5221265 5221249 -
caggaaaacagcttctggag

SEQ ID NO: 49443 - DNA, 20 bp, Artificial Sequence
  Synthetic oligonucleotide; CAG chr11 5221238 5221257 5221241 -
cagcttctggagtggacctc

SEQ ID NO: 49444 - DNA, 20 bp, Artificial Sequence
  Synthetic oligonucleotide; CAG chr11 5221225 5221244 5221228 -
ggacctccagtaaactccaa

SEQ ID NO: 49445 - DNA, 20 bp, Artificial Sequence
  Synthetic oligonucleotide; CAG chr11 5221217 5221236 5221220 -
agtaaactccaacagacctg

SEQ ID NO: 49446 - DNA, 20 bp, Artificial Sequence
  Synthetic oligonucleotide; GAG chr11 5221212 5221231 5221215 -
actccaacagacctgcagct

SEQ ID NO: 49447 - DNA, 20 bp, Artificial Sequence
  Synthetic oligonucleotide; AGG chr11 5221211 5221230 5221214 -
ctccaacagacctgcagctg

SEQ ID NO: 49448 - DNA, 20 bp, Artificial Sequence
  Synthetic oligonucleotide; GGG chr11 5221210 5221229 5221213 -
tccaacagacctgcagctga

SEQ ID NO: 49449 - DNA, 20 bp, Artificial Sequence
  Synthetic oligonucleotide; TAG chr11 5221197 5221216 5221200 -
cagctgagggtcctgactgt

SEQ ID NO: 49450 - DNA, 20 bp, Artificial Sequence
  Synthetic oligonucleotide; AAG chr11 5221194 5221213 5221197 -
ctgagggtcctgactgttag

SEQ ID NO: 49451 - DNA, 20 bp, Artificial Sequence
  Synthetic oligonucleotide; AGG chr11 5221193 5221212 5221196 -
tgagggtcctgactgttaga

SEQ ID NO: 49452 - DNA, 20 bp, Artificial Sequence
  Synthetic oligonucleotide; CAG chr11 5221178 5221197 5221181 -
ttagaaggaaaactaacaaa

SEQ ID NO: 49453 - DNA, 20 bp, Artificial Sequence
  Synthetic oligonucleotide; AAG chr11 5221174 5221193 5221177 -
aaggaaaactaacaaacaga

SEQ ID NO: 49454 - DNA, 20 bp, Artificial Sequence
  Synthetic oligonucleotide; AGG chr11 5221173 5221192 5221176 -
aggaaaactaacaaacagaa

SEQ ID NO: 49455 - DNA, 20 bp, Artificial Sequence
  Synthetic oligonucleotide; AAG chr11 5221130 5221149 5221133 -
tctgtacatcgccatcatca

SEQ ID NO: 49456 - DNA, 20 bp, Artificial Sequence
  Synthetic oligonucleotide; AAG chr11 5221123 5221142 5221126 -
atcgccatcatcaaagacca

SEQ ID NO: 49457 - DNA, 20 bp, Artificial Sequence
  Synthetic oligonucleotide; AGG chr11 5221122 5221141 5221125 -
tcgccatcatcaaagaccaa

SEQ ID NO: 49458 - DNA, 20 bp, Artificial Sequence
  Synthetic oligonucleotide; TAG chr11 5221119 5221138 5221122 -
ccatcatcaaagaccaaagg

SEQ ID NO: 49459 - DNA, 20 bp, Artificial Sequence
  Synthetic oligonucleotide; AAG chr11 5221105 5221124 5221108 -
caaaggtagataaaaccata

SEQ ID NO: 49460 - DNA, 20 bp, Artificial Sequence
  Synthetic oligonucleotide; TGG chr11 5221101 5221120 5221104 -
ggtagataaaaccataaaga

SEQ ID NO: 49461 - DNA, 20 bp, Artificial Sequence
  Synthetic oligonucleotide; GGG chr11 5221100 5221119 5221103 -
gtagataaaaccataaagat

SEQ ID NO: 49462 - DNA, 20 bp, Artificial Sequence
  Synthetic oligonucleotide; GGG chr11 5221099 5221118 5221102 -
tagataaaaccataaagatg

SEQ ID NO: 49463 - DNA, 20 bp, Artificial Sequence
  Synthetic oligonucleotide; AAG chr11 5221093 5221112 5221096 -
aaaccataaagatggggaaa

SEQ ID NO: 49464 - DNA, 20 bp, Artificial Sequence
  Synthetic oligonucleotide; CAG chr11 5221090 5221109 5221093 -
ccataaagatggggaaaaag

SEQ ID NO: 49465 - DNA, 20 bp, Artificial Sequence
  Synthetic oligonucleotide; GAG chr11 5221088 5221107 5221091 -
ataaagatggggaaaaagca

SEQ ID NO: 49466 - DNA, 20 bp, Artificial Sequence
  Synthetic oligonucleotide; CAG chr11 5221085 5221104 5221088 -
aagatggggaaaaagcagag

SEQ ID NO: 49467 - DNA, 20 bp, Artificial Sequence
  Synthetic oligonucleotide; TGG chr11 5221076 5221095 5221079 -
aaaaagcagagcagaaaaac

SEQ ID NO: 49468 - DNA, 20 bp, Artificial Sequence
  Synthetic oligonucleotide; GAG chr11 5221060 5221079 5221063 -
aaactggacactctaaaaat

SEQ ID NO: 49469 - DNA, 20 bp, Artificial Sequence
  Synthetic oligonucleotide; GAG chr11 5221058 5221077 5221061 -
actggacactctaaaaatga

SEQ ID NO: 49470 - DNA, 20 bp, Artificial Sequence
  Synthetic oligonucleotide; AAG chr11 5221039 5221058 5221042 -
agagtgcctctcctcctcca

SEQ ID NO: 49471 - DNA, 20 bp, Artificial Sequence
  Synthetic oligonucleotide; CAG chr11 5221031 5221050 5221034 -
tctcctcctccaaagtaacg

SEQ ID NO: 49472 - DNA, 20 bp, Artificial Sequence
  Synthetic oligonucleotide; CAG chr11 5221020 5221039 5221023 -
aaagtaacgcagctcctcac

SEQ ID NO: 49473 - DNA, 20 bp, Artificial Sequence
  Synthetic oligonucleotide; TGG chr11 5221014 5221033 5221017 -
acgcagctcctcaccagcaa

SEQ ID NO: 49474 - DNA, 20 bp, Artificial Sequence
  Synthetic oligonucleotide; AAG chr11 5221007 5221026 5221010 -
tcctcaccagcaatggaaca

SEQ ID NO: 49475 - DNA, 20 bp, Artificial Sequence
  Synthetic oligonucleotide; TGG chr11 5221003 5221022 5221006 -
caccagcaatggaacaaagc

SEQ ID NO: 49476 - DNA, 20 bp, Artificial Sequence
  Synthetic oligonucleotide; GGG chr11 5221002 5221021 5221005 -
accagcaatggaacaaagct

SEQ ID NO: 49477 - DNA, 20 bp, Artificial Sequence
  Synthetic oligonucleotide; CAG chr11 5220999 5221018 5221002 -
agcaatggaacaaagctggg

SEQ ID NO: 49478 - DNA, 20 bp, Artificial Sequence
  Synthetic oligonucleotide; GAG chr11 5220997 5221016 5221000 -
caatggaacaaagctgggca

SEQ ID NO: 49479 - DNA, 20 bp, Artificial Sequence
  Synthetic oligonucleotide; GAG chr11 5220982 5221001 5220985 -
gggcagagaatgactttgac

SEQ ID NO: 49480 - DNA, 20 bp, Artificial Sequence
  Synthetic oligonucleotide; GAG chr11 5220977 5220996 5220980 -
gagaatgactttgacgagtt

SEQ ID NO: 49481 - DNA, 20 bp, Artificial Sequence
  Synthetic oligonucleotide; GAG chr11 5220975 5220994 5220978 -
gaatgactttgacgagttga

SEQ ID NO: 49482 - DNA, 20 bp, Artificial Sequence
  Synthetic oligonucleotide; GAG chr11 5220973 5220992 5220976 -
atgactttgacgagttgaga

SEQ ID NO: 49483 - DNA, 20 bp, Artificial Sequence
  Synthetic oligonucleotide; AGG chr11 5220972 5220991 5220975 -
tgactttgacgagttgagag

SEQ ID NO: 49484 - DNA, 20 bp, Artificial Sequence
  Synthetic oligonucleotide; AAG chr11 5220969 5220988 5220972 -
ctttgacgagttgagagagg

SEQ ID NO: 49485 - DNA, 20 bp, Artificial Sequence
  Synthetic oligonucleotide; AGG chr11 5220968 5220987 5220971 -
tttgacgagttgagagagga

SEQ ID NO: 49486 - DNA, 20 bp, Artificial Sequence
  Synthetic oligonucleotide; CAG chr11 5220962 5220981 5220965 -
gagttgagagaggaaggctt

SEQ ID NO: 49487 - DNA, 20 bp, Artificial Sequence
  Synthetic oligonucleotide; AAG chr11 5220959 5220978 5220962 -
ttgagagaggaaggcttcag

SEQ ID NO: 49488 - DNA, 20 bp, Artificial Sequence
  Synthetic oligonucleotide; AAG chr11 5220943 5220962 5220946 -
tcagaagatcaaactactcc

SEQ ID NO: 49489 - DNA, 20 bp, Artificial Sequence
  Synthetic oligonucleotide; AAG chr11 5220937 5220956 5220940 -
gatcaaactactccaagcta

SEQ ID NO: 49490 - DNA, 20 bp, Artificial Sequence
  Synthetic oligonucleotide; AGG chr11 5220936 5220955 5220939 -
atcaaactactccaagctaa

SEQ ID NO: 49491 - DNA, 20 bp, Artificial Sequence
  Synthetic oligonucleotide; GAG chr11 5220934 5220953 5220937 -
caaactactccaagctaaag

SEQ ID NO: 49492 - DNA, 20 bp, Artificial Sequence
  Synthetic oligonucleotide; AGG chr11 5220933 5220952 5220936 -
aaactactccaagctaaagg

SEQ ID NO: 49493 - DNA, 20 bp, Artificial Sequence
  Synthetic oligonucleotide; AAG chr11 5220930 5220949 5220933 -
ctactccaagctaaaggagg

SEQ ID NO: 49494 - DNA, 20 bp, Artificial Sequence
  Synthetic oligonucleotide; CGG chr11 5220917 5220936 5220920 -
aaggaggaagttcgaacaaa

SEQ ID NO: 49495 - DNA, 20 bp, Artificial Sequence
  Synthetic oligonucleotide; AAG chr11 5220912 5220931 5220915 -
ggaagttcgaacaaacggca

SEQ ID NO: 49496 - DNA, 20 bp, Artificial Sequence
  Synthetic oligonucleotide; AAG chr11 5220909 5220928 5220912 -
agttcgaacaaacggcaaag

SEQ ID NO: 49497 - DNA, 20 bp, Artificial Sequence
  Synthetic oligonucleotide; TAG chr11 5220885 5220904 5220888 -
aaaaaactttgaaaaaaaat

SEQ ID NO: 49498 - DNA, 20 bp, Artificial Sequence
  Synthetic oligonucleotide; TGG chr11 5220877 5220896 5220880 -
ttgaaaaaaaattagatgaa

SEQ ID NO: 49499 - DNA, 20 bp, Artificial Sequence
  Synthetic oligonucleotide; TAG chr11 5220869 5220888 5220872 -
aaattagatgaatggataac

SEQ ID NO: 49500 - DNA, 20 bp, Artificial Sequence
  Synthetic oligonucleotide; CAG chr11 5220853 5220872 5220856 -
taactagaataaccaatgca

SEQ ID NO: 49501 - DNA, 20 bp, Artificial Sequence
  Synthetic oligonucleotide; AAG chr11 5220850 5220869 5220853 -
ctagaataaccaatgcacag

SEQ ID NO: 49502 - DNA, 20 bp, Artificial Sequence
  Synthetic oligonucleotide; AAG chr11 5220841 5220860 5220844 -
ccaatgcacagaagtcctta

SEQ ID NO: 49503 - DNA, 20 bp, Artificial Sequence
  Synthetic oligonucleotide; AGG chr11 5220840 5220859 5220843 -
caatgcacagaagtccttaa

SEQ ID NO: 49504 - DNA, 20 bp, Artificial Sequence
  Synthetic oligonucleotide; TGG chr11 5220831 5220850 5220834 -
gaagtccttaaaggacctga

SEQ ID NO: 49505 - DNA, 20 bp, Artificial Sequence
  Synthetic oligonucleotide; GAG chr11 5220829 5220848 5220832 -
agtccttaaaggacctgatg

SEQ ID NO: 49506 - DNA, 20 bp, Artificial Sequence
  Synthetic oligonucleotide; AAG chr11 5220817 5220836 5220820 -
acctgatggagctgaaaacc

SEQ ID NO: 49507 - DNA, 20 bp, Artificial Sequence
  Synthetic oligonucleotide; AGG chr11 5220816 5220835 5220819 -
cctgatggagctgaaaacca

SEQ ID NO: 49508 - DNA, 20 bp, Artificial Sequence
  Synthetic oligonucleotide; CAG chr11 5220813 5220832 5220816 -
gatggagctgaaaaccaagg

SEQ ID NO: 49509 - DNA, 20 bp, Artificial Sequence
  Synthetic oligonucleotide; AGG chr11 5220812 5220831 5220815 -
atggagctgaaaaccaaggc

SEQ ID NO: 49510 - DNA, 20 bp, Artificial Sequence
  Synthetic oligonucleotide; GAG chr11 5220810 5220829 5220813 -
ggagctgaaaaccaaggcag

SEQ ID NO: 49511 - DNA, 20 bp, Artificial Sequence
  Synthetic oligonucleotide; AAG chr11 5220788 5220807 5220791 -
gaactacgtgacaaatacac

SEQ ID NO: 49512 - DNA, 20 bp, Artificial Sequence
  Synthetic oligonucleotide; CAG chr11 5220782 5220801 5220785 -
cgtgacaaatacacaagcct

SEQ ID NO: 49513 - DNA, 20 bp, Artificial Sequence
  Synthetic oligonucleotide; GAG chr11 5220771 5220790 5220774 -
cacaagcctcagtaaccgat

SEQ ID NO: 49514 - DNA, 20 bp, Artificial Sequence
  Synthetic oligonucleotide; TGG chr11 5220762 5220781 5220765 -
cagtaaccgatgagatcaac

SEQ ID NO: 49515 - DNA, 20 bp, Artificial Sequence
  Synthetic oligonucleotide; AAG chr11 5220759 5220778 5220762 -
taaccgatgagatcaactgg

SEQ ID NO: 49516 - DNA, 20 bp, Artificial Sequence
  Synthetic oligonucleotide; AAG chr11 5220755 5220774 5220758 -
cgatgagatcaactggaaga

SEQ ID NO: 49517 - DNA, 20 bp, Artificial Sequence
  Synthetic oligonucleotide; AGG chr11 5220754 5220773 5220757 -
gatgagatcaactggaagaa

SEQ ID NO: 49518 - DNA, 20 bp, Artificial Sequence
  Synthetic oligonucleotide; GGG chr11 5220753 5220772 5220756 -
atgagatcaactggaagaaa

SEQ ID NO: 49519 - DNA, 20 bp, Artificial Sequence
  Synthetic oligonucleotide; AAG chr11 5220738 5220757 5220741 -
agaaagggtatcaatgacga

SEQ ID NO: 49520 - DNA, 20 bp, Artificial Sequence
  Synthetic oligonucleotide; AAG chr11 5220718 5220737 5220721 -
aagatgaaatgaatgaaatg

SEQ ID NO: 49521 - DNA, 20 bp, Artificial Sequence
  Synthetic oligonucleotide; AAG chr11 5220711 5220730 5220714 -
aatgaatgaaatgaagcatg

SEQ ID NO: 49522 - DNA, 20 bp, Artificial Sequence
  Synthetic oligonucleotide; GAG chr11 5220709 5220728 5220712 -
tgaatgaaatgaagcatgaa

SEQ ID NO: 49523 - DNA, 20 bp, Artificial Sequence
  Synthetic oligonucleotide; AAG chr11 5220706 5220725 5220709 -
atgaaatgaagcatgaagag

SEQ ID NO: 49524 - DNA, 20 bp, Artificial Sequence
  Synthetic oligonucleotide; TAG chr11 5220701 5220720 5220704 -
atgaagcatgaagagaagtt

SEQ ID NO: 49525 - DNA, 20 bp, Artificial Sequence
  Synthetic oligonucleotide; GAG chr11 5220699 5220718 5220702 -
gaagcatgaagagaagttta

SEQ ID NO: 49526 - DNA, 20 bp, Artificial Sequence
  Synthetic oligonucleotide; AAG chr11 5220692 5220711 5220695 -
gaagagaagtttagagaaaa

SEQ ID NO: 49527 - DNA, 20 bp, Artificial Sequence
  Synthetic oligonucleotide; AAG chr11 5220683 5220702 5220686 -
tttagagaaaaaagaataaa

SEQ ID NO: 49528 - DNA, 20 bp, Artificial Sequence
  Synthetic oligonucleotide; AAG chr11 5220671 5220690 5220674 -
agaataaaaagaaacgaaca

SEQ ID NO: 49529 - DNA, 20 bp, Artificial Sequence
  Synthetic oligonucleotide; AAG chr11 5220663 5220682 5220666 -
aagaaacgaacaaagcctcc

SEQ ID NO: 49530 - DNA, 20 bp, Artificial Sequence
  Synthetic oligonucleotide; TGG chr11 5220655 5220674 5220658 -
aacaaagcctccaagaaata

SEQ ID NO: 49531 - DNA, 20 bp, Artificial Sequence
  Synthetic oligonucleotide; GGG chr11 5220654 5220673 5220657 -
acaaagcctccaagaaatat

SEQ ID NO: 49532 - DNA, 20 bp, Artificial Sequence
  Synthetic oligonucleotide; AAG chr11 5220641 5220660 5220644 -
gaaatatgggactatgtgaa

SEQ ID NO: 49533 - DNA, 20 bp, Artificial Sequence
  Synthetic oligonucleotide; TGG chr11 5220620 5220639 5220623 -
agaccaaatctacatctaat

SEQ ID NO: 49534 - DNA, 20 bp, Artificial Sequence
  Synthetic oligonucleotide; TAG chr11 5220615 5220634 5220618 -
aaatctacatctaattggtg

SEQ ID NO: 49535 - DNA, 20 bp, Artificial Sequence
  Synthetic oligonucleotide; AAG chr11 5220608 5220627 5220611 -
catctaattggtgtagctga

SEQ ID NO: 49536 - DNA, 20 bp, Artificial Sequence
  Synthetic oligonucleotide; TGG chr11 5220602 5220621 5220605 -
attggtgtagctgaaagtga

SEQ ID NO: 49537 - DNA, 20 bp, Artificial Sequence
  Synthetic oligonucleotide; GGG chr11 5220601 5220620 5220604 -
ttggtgtagctgaaagtgat

SEQ ID NO: 49538 - DNA, 20 bp, Artificial Sequence
  Synthetic oligonucleotide; GGG chr11 5220600 5220619 5220603 -
tggtgtagctgaaagtgatg

SEQ ID NO: 49539 - DNA, 20 bp, Artificial Sequence
  Synthetic oligonucleotide; GAG chr11 5220598 5220617 5220601 -
gtgtagctgaaagtgatggg

SEQ ID NO: 49540 - DNA, 20 bp, Artificial Sequence
  Synthetic oligonucleotide; TGG chr11 5220593 5220612 5220596 -
gctgaaagtgatggggagaa

SEQ ID NO: 49541 - DNA, 20 bp, Artificial Sequence
  Synthetic oligonucleotide; AAG chr11 5220586 5220605 5220589 -
gtgatggggagaatggaacc

SEQ ID NO: 49542 - DNA, 20 bp, Artificial Sequence
  Synthetic oligonucleotide; TGG chr11 5220582 5220601 5220585 -
tggggagaatggaaccaagt

SEQ ID NO: 49543 - DNA, 20 bp, Artificial Sequence
  Synthetic oligonucleotide; CAG chr11 5220568 5220587 5220571 -
ccaagttggaaaacactctg

SEQ ID NO: 49544 - DNA, 20 bp, Artificial Sequence
  Synthetic oligonucleotide; AGG chr11 5220567 5220586 5220570 -
caagttggaaaacactctgc

SEQ ID NO: 49545 - DNA, 20 bp, Artificial Sequence
  Synthetic oligonucleotide; CAG chr11 5220556 5220575 5220559 -
acactctgcaggatattatc

SEQ ID NO: 49546 - DNA, 20 bp, Artificial Sequence
  Synthetic oligonucleotide; AGG chr11 5220555 5220574 5220558 -
cactctgcaggatattatcc

SEQ ID NO: 49547 - DNA, 20 bp, Artificial Sequence
  Synthetic oligonucleotide; GAG chr11 5220553 5220572 5220556 -
ctctgcaggatattatccag

SEQ ID NO: 49548 - DNA, 20 bp, Artificial Sequence
  Synthetic oligonucleotide; TAG chr11 5220537 5220556 5220540 -
ccaggagaacttccccaatc

SEQ ID NO: 49549 - DNA, 20 bp, Artificial Sequence
  Synthetic oligonucleotide; AAG chr11 5220533 5220552 5220536 -
gagaacttccccaatctagc

SEQ ID NO: 49550 - DNA, 20 bp, Artificial Sequence
  Synthetic oligonucleotide; AGG chr11 5220532 5220551 5220535 -
agaacttccccaatctagca

SEQ ID NO: 49551 - DNA, 20 bp, Artificial Sequence
  Synthetic oligonucleotide; AAG chr11 5220528 5220547 5220531 -
cttccccaatctagcaaggc

SEQ ID NO: 49552 - DNA, 20 bp, Artificial Sequence
  Synthetic oligonucleotide; CAG chr11 5220511 5220530 5220514 -
ggcaagcccaaattcacatt

SEQ ID NO: 49553 - DNA, 20 bp, Artificial Sequence
  Synthetic oligonucleotide; AGG chr11 5220510 5220529 5220513 -
gcaagcccaaattcacattc

SEQ ID NO: 49554 - DNA, 20 bp, Artificial Sequence
  Synthetic oligonucleotide; CAG chr11 5220502 5220521 5220505 -
aaattcacattcaggaaata

SEQ ID NO: 49555 - DNA, 20 bp, Artificial Sequence
  Synthetic oligonucleotide; GAG chr11 5220500 5220519 5220503 -
attcacattcaggaaataca

SEQ ID NO: 49556 - DNA, 20 bp, Artificial Sequence
  Synthetic oligonucleotide; AAG chr11 5220488 5220507 5220491 -
gaaatacagagaacgccaca

SEQ ID NO: 49557 - DNA, 20 bp, Artificial Sequence
  Synthetic oligonucleotide; TAG chr11 5220478 5220497 5220481 -
gaacgccacaaagatactcc

SEQ ID NO: 49558 - DNA, 20 bp, Artificial Sequence
  Synthetic oligonucleotide; GAG chr11 5220476 5220495 5220479 -
acgccacaaagatactccta

SEQ ID NO: 49559 - DNA, 20 bp, Artificial Sequence
  Synthetic oligonucleotide; AAG chr11 5220471 5220490 5220474 -
acaaagatactcctagagaa

SEQ ID NO: 49560 - DNA, 20 bp, Artificial Sequence
  Synthetic oligonucleotide; AAG chr11 5220461 5220480 5220464 -
tcctagagaaaagcaactcc

SEQ ID NO: 49561 - DNA, 20 bp, Artificial Sequence
  Synthetic oligonucleotide; CAG chr11 5220446 5220465 5220449 -
actccaagacacataactgt

SEQ ID NO: 49562 - DNA, 20 bp, Artificial Sequence
  Synthetic oligonucleotide; AAG chr11 5220435 5220454 5220438 -
cataactgtcagattcacca

SEQ ID NO: 49563 - DNA, 20 bp, Artificial Sequence
  Synthetic oligonucleotide; AAG chr11 5220424 5220443 5220427 -
gattcaccaaagttgaaatg

SEQ ID NO: 49564 - DNA, 20 bp, Artificial Sequence
  Synthetic oligonucleotide; AGG chr11 5220423 5220442 5220426 -
attcaccaaagttgaaatga

SEQ ID NO: 49565 - DNA, 20 bp, Artificial Sequence
  Synthetic oligonucleotide; AAG chr11 5220410 5220429 5220413 -
gaaatgaaggaaaaaatgtt

SEQ ID NO: 49566 - DNA, 20 bp, Artificial Sequence
  Synthetic oligonucleotide; AGG chr11 5220409 5220428 5220412 -
aaatgaaggaaaaaatgtta

SEQ ID NO: 49567 - DNA, 20 bp, Artificial Sequence
  Synthetic oligonucleotide; GGG chr11 5220408 5220427 5220411 -
aatgaaggaaaaaatgttaa

SEQ ID NO: 49568 - DNA, 20 bp, Artificial Sequence
  Synthetic oligonucleotide; CAG chr11 5220405 5220424 5220408 -
gaaggaaaaaatgttaaggg

SEQ ID NO: 49569 - DNA, 20 bp, Artificial Sequence
  Synthetic oligonucleotide; CAG chr11 5220401 5220420 5220404 -
gaaaaaatgttaagggcagc

SEQ ID NO: 49570 - DNA, 20 bp, Artificial Sequence
  Synthetic oligonucleotide; GAG chr11 5220399 5220418 5220402 -
aaaaatgttaagggcagcca

SEQ ID NO: 49571 - DNA, 20 bp, Artificial Sequence
  Synthetic oligonucleotide; GAG chr11 5220397 5220416 5220400 -
aaatgttaagggcagccaga

SEQ ID NO: 49572 - DNA, 20 bp, Artificial Sequence
  Synthetic oligonucleotide; AAG chr11 5220393 5220412 5220396 -
gttaagggcagccagagaga

SEQ ID NO: 49573 - DNA, 20 bp, Artificial Sequence
  Synthetic oligonucleotide; AGG chr11 5220392 5220411 5220395 -
ttaagggcagccagagagaa

SEQ ID NO: 49574 - DNA, 20 bp, Artificial Sequence
  Synthetic oligonucleotide; CGG chr11 5220388 5220407 5220391 -
gggcagccagagagaaaggt

SEQ ID NO: 49575 - DNA, 20 bp, Artificial Sequence
  Synthetic oligonucleotide; GGG chr11 5220387 5220406 5220390 -
ggcagccagagagaaaggtc

SEQ ID NO: 49576 - DNA, 20 bp, Artificial Sequence
  Synthetic oligonucleotide; AAG chr11 5220375 5220394 5220378 -
gaaaggtcgggttacccaca

SEQ ID NO: 49577 - DNA, 20 bp, Artificial Sequence
  Synthetic oligonucleotide; AGG chr11 5220374 5220393 5220377 -
aaaggtcgggttacccacaa

SEQ ID NO: 49578 - DNA, 20 bp, Artificial Sequence
  Synthetic oligonucleotide; GGG chr11 5220373 5220392 5220376 -
aaggtcgggttacccacaaa

SEQ ID NO: 49579 - DNA, 20 bp, Artificial Sequence
  Synthetic oligonucleotide; AAG chr11 5220370 5220389 5220373 -
gtcgggttacccacaaaggg

SEQ ID NO: 49580 - DNA, 20 bp, Artificial Sequence
  Synthetic oligonucleotide; CAG chr11 5220362 5220381 5220365 -
acccacaaagggaagcccat

SEQ ID NO: 49581 - DNA, 20 bp, Artificial Sequence
  Synthetic oligonucleotide; CAG chr11 5220354 5220373 5220357 -
agggaagcccatcagactaa

SEQ ID NO: 49582 - DNA, 20 bp, Artificial Sequence
  Synthetic oligonucleotide; CGG chr11 5220342 5220361 5220345 -
cagactaacagctgatctat

SEQ ID NO: 49583 - DNA, 20 bp, Artificial Sequence
  Synthetic oligonucleotide; CAG chr11 5220339 5220358 5220342 -
actaacagctgatctatcgg

SEQ ID NO: 49584 - DNA, 20 bp, Artificial Sequence
  Synthetic oligonucleotide; AAG chr11 5220327 5220346 5220330 -
tctatcggcagaaactctac

SEQ ID NO: 49585 - DNA, 20 bp, Artificial Sequence
  Synthetic oligonucleotide; CAG chr11 5220323 5220342 5220326 -
tcggcagaaactctacaagc

SEQ ID NO: 49586 - DNA, 20 bp, Artificial Sequence
  Synthetic oligonucleotide; AAG chr11 5220320 5220339 5220323 -
gcagaaactctacaagccag

SEQ ID NO: 49587 - DNA, 20 bp, Artificial Sequence
  Synthetic oligonucleotide; AAG chr11 5220316 5220335 5220319 -
aaactctacaagccagaaga

SEQ ID NO: 49588 - DNA, 20 bp, Artificial Sequence
  Synthetic oligonucleotide; TGG chr11 5220313 5220332 5220316 -
ctctacaagccagaagaaag

SEQ ID NO: 49589 - DNA, 20 bp, Artificial Sequence
  Synthetic oligonucleotide; GGG chr11 5220312 5220331 5220315 -
tctacaagccagaagaaagt

SEQ ID NO: 49590 - DNA, 20 bp, Artificial Sequence
  Synthetic oligonucleotide; GGG chr11 5220311 5220330 5220314 -
ctacaagccagaagaaagtg

SEQ ID NO: 49591 - DNA, 20 bp, Artificial Sequence
  Synthetic oligonucleotide; GGG chr11 5220310 5220329 5220313 -
tacaagccagaagaaagtgg

SEQ ID NO: 49592 - DNA, 20 bp, Artificial Sequence
  Synthetic oligonucleotide; AAG chr11 5220288 5220307 5220291 -
gccaatattcaacattgtta

SEQ ID NO: 49593 - DNA, 20 bp, Artificial Sequence
  Synthetic oligonucleotide; AAG chr11 5220283 5220302 5220286 -
tattcaacattgttaaagaa

SEQ ID NO: 49594 - DNA, 20 bp, Artificial Sequence
  Synthetic oligonucleotide; CAG chr11 5220269 5220288 5220272 -
aaagaaaagaattttcaacc

SEQ ID NO: 49595 - DNA, 20 bp, Artificial Sequence
  Synthetic oligonucleotide; CAG chr11 5220255 5220274 5220258 -
tcaacccagaatttcatatc

SEQ ID NO: 49596 - DNA, 20 bp, Artificial Sequence
  Synthetic oligonucleotide; AAG chr11 5220245 5220264 5220248 -
atttcatatccagccaaact

SEQ ID NO: 49597 - DNA, 20 bp, Artificial Sequence
  Synthetic oligonucleotide; AAG chr11 5220236 5220255 5220239 -
ccagccaaactaagcttcat

SEQ ID NO: 49598 - DNA, 20 bp, Artificial Sequence
  Synthetic oligonucleotide; AAG chr11 5220231 5220250 5220234 -
caaactaagcttcataagtg

SEQ ID NO: 49599 - DNA, 20 bp, Artificial Sequence
  Synthetic oligonucleotide; AGG chr11 5220230 5220249 5220233 -
aaactaagcttcataagtga

SEQ ID NO: 49600 - DNA, 20 bp, Artificial Sequence
  Synthetic oligonucleotide; GAG chr11 5220228 5220247 5220231 -
actaagcttcataagtgaag

SEQ ID NO: 49601 - DNA, 20 bp, Artificial Sequence
  Synthetic oligonucleotide; CAG chr11 5220210 5220229 5220213 -
aggagaaataaaatccttta

SEQ ID NO: 49602 - DNA, 20 bp, Artificial Sequence
  Synthetic oligonucleotide; AAG chr11 5220205 5220224 5220208 -
aaataaaatcctttacagac

SEQ ID NO: 49603 - DNA, 20 bp, Artificial Sequence
  Synthetic oligonucleotide; GAG chr11 5220194 5220213 5220197 -
tttacagacaagcaaatgct

SEQ ID NO: 49604 - DNA, 20 bp, Artificial Sequence
  Synthetic oligonucleotide; GAG chr11 5220192 5220211 5220195 -
tacagacaagcaaatgctga

SEQ ID NO: 49605 - DNA, 20 bp, Artificial Sequence
  Synthetic oligonucleotide; CAG chr11 5220176 5220195 5220179 -
ctgagagattttgtcaccac

SEQ ID NO: 49606 - DNA, 20 bp, Artificial Sequence
  Synthetic oligonucleotide; AGG chr11 5220175 5220194 5220178 -
tgagagattttgtcaccacc

SEQ ID NO: 49607 - DNA, 20 bp, Artificial Sequence
  Synthetic oligonucleotide; AAG chr11 5220162 5220181 5220165 -
caccaccaggcctgccctac

SEQ ID NO: 49608 - DNA, 20 bp, Artificial Sequence
  Synthetic oligonucleotide; GAG chr11 5220160 5220179 5220163 -
ccaccaggcctgccctacaa

SEQ ID NO: 49609 - DNA, 20 bp, Artificial Sequence
  Synthetic oligonucleotide; AAG chr11 5220151 5220170 5220154 -
ctgccctacaagagctcctg

SEQ ID NO: 49610 - DNA, 20 bp, Artificial Sequence
  Synthetic oligonucleotide; AGG chr11 5220150 5220169 5220153 -
tgccctacaagagctcctga

SEQ ID NO: 49611 - DNA, 20 bp, Artificial Sequence
  Synthetic oligonucleotide; AAG chr11 5220147 5220166 5220150 -
cctacaagagctcctgaagg

SEQ ID NO: 49612 - DNA, 20 bp, Artificial Sequence
  Synthetic oligonucleotide; TGG chr11 5220135 5220154 5220138 -
cctgaaggaagcactaaaca

SEQ ID NO: 49613 - DNA, 20 bp, Artificial Sequence
  Synthetic oligonucleotide; AAG chr11 5220131 5220150 5220134 -
aaggaagcactaaacatgga

SEQ ID NO: 49614 - DNA, 20 bp, Artificial Sequence
  Synthetic oligonucleotide; AGG chr11 5220130 5220149 5220133 -
aggaagcactaaacatggaa

SEQ ID NO: 49615 - DNA, 20 bp, Artificial Sequence
  Synthetic oligonucleotide; TAG chr11 5220121 5220140 5220124 -
taaacatggaaaggaacaac

SEQ ID NO: 49616 - DNA, 20 bp, Artificial Sequence
  Synthetic oligonucleotide; CAG chr11 5220115 5220134 5220118 -
tggaaaggaacaactagtat

SEQ ID NO: 49617 - DNA, 20 bp, Artificial Sequence
  Synthetic oligonucleotide; AAG chr11 5220086 5220105 5220089 -
caaaaacatgccaaattgta

SEQ ID NO: 49618 - DNA, 20 bp, Artificial Sequence
  Synthetic oligonucleotide; AAG chr11 5220077 5220096 5220080 -
gccaaattgtaaagaccatc

SEQ ID NO: 49619 - DNA, 20 bp, Artificial Sequence
  Synthetic oligonucleotide; AGG chr11 5220076 5220095 5220079 -
ccaaattgtaaagaccatca

SEQ ID NO: 49620 - DNA, 20 bp, Artificial Sequence
  Synthetic oligonucleotide; TAG chr11 5220072 5220091 5220075 -
attgtaaagaccatcaaggc

SEQ ID NO: 49621 - DNA, 20 bp, Artificial Sequence
  Synthetic oligonucleotide; AGG chr11 5220071 5220090 5220074 -
ttgtaaagaccatcaaggct

SEQ ID NO: 49622 - DNA, 20 bp, Artificial Sequence
  Synthetic oligonucleotide; AAG chr11 5220068 5220087 5220071 -
taaagaccatcaaggctagg

SEQ ID NO: 49623 - DNA, 20 bp, Artificial Sequence
  Synthetic oligonucleotide; GAG chr11 5220052 5220071 5220055 -
taggaagaaactgcatcaac

SEQ ID NO: 49624 - DNA, 20 bp, Artificial Sequence
  Synthetic oligonucleotide; CAG chr11 5220040 5220059 5220043 -
gcatcaacgagcaaaataac

SEQ ID NO: 49625 - DNA, 20 bp, Artificial Sequence
  Synthetic oligonucleotide; CAG chr11 5220022 5220041 5220025 -
accagctaacatcataatga

SEQ ID NO: 49626 - DNA, 20 bp, Artificial Sequence
  Synthetic oligonucleotide; AGG chr11 5220021 5220040 5220024 -
ccagctaacatcataatgac

SEQ ID NO: 49627 - DNA, 20 bp, Artificial Sequence
  Synthetic oligonucleotide; TAG chr11 5219979 5219998 5219982 -
atactcaccttaaatgtaaa

SEQ ID NO: 49628 - DNA, 20 bp, Artificial Sequence
  Synthetic oligonucleotide; AGG chr11 5219978 5219997 5219981 -
tactcaccttaaatgtaaat

SEQ ID NO: 49629 - DNA, 20 bp, Artificial Sequence
  Synthetic oligonucleotide; AAG chr11 5219958 5219977 5219961 -
aggctaaatgctccaattaa

SEQ ID NO: 49630 - DNA, 20 bp, Artificial Sequence
  Synthetic oligonucleotide; CAG chr11 5219952 5219971 5219955 -
aatgctccaattaaaagaca

SEQ ID NO: 49631 - DNA, 20 bp, Artificial Sequence
  Synthetic oligonucleotide; TGG chr11 5219947 5219966 5219950 -
tccaattaaaagacacagac

SEQ ID NO: 49632 - DNA, 20 bp, Artificial Sequence
  Synthetic oligonucleotide; TGG chr11 5219939 5219958 5219942 -
aaagacacagactggcaaat

SEQ ID NO: 49633 - DNA, 20 bp, Artificial Sequence
  Synthetic oligonucleotide; AAG chr11 5219934 5219953 5219937 -
cacagactggcaaattggat

SEQ ID NO: 49634 - DNA, 20 bp, Artificial Sequence
  Synthetic oligonucleotide; AGG chr11 5219933 5219952 5219936 -
acagactggcaaattggata

SEQ ID NO: 49635 - DNA, 20 bp, Artificial Sequence
  Synthetic oligonucleotide; GAG chr11 5219931 5219950 5219934 -
agactggcaaattggataag

SEQ ID NO: 49636 - DNA, 20 bp, Artificial Sequence
  Synthetic oligonucleotide; AAG chr11 5219926 5219945 5219929 -
ggcaaattggataaggagtc

SEQ ID NO: 49637 - DNA, 20 bp, Artificial Sequence
  Synthetic oligonucleotide; CAG chr11 5219903 5219922 5219906 -
acccatctgtgttctgtatt

SEQ ID NO: 49638 - DNA, 20 bp, Artificial Sequence
  Synthetic oligonucleotide; AGG chr11 5219902 5219921 5219905 -
cccatctgtgttctgtattc

SEQ ID NO: 49639 - DNA, 20 bp, Artificial Sequence
  Synthetic oligonucleotide; CAG chr11 5219883 5219902 5219886 -
caggaaacccatctcacgtg

SEQ ID NO: 49640 - DNA, 20 bp, Artificial Sequence
  Synthetic oligonucleotide; GAG chr11 5219881 5219900 5219884 -
ggaaacccatctcacgtgca

SEQ ID NO: 49641 - DNA, 20 bp, Artificial Sequence
  Synthetic oligonucleotide; TAG chr11 5219871 5219890 5219874 -
ctcacgtgcagagacacaca

SEQ ID NO: 49642 - DNA, 20 bp, Artificial Sequence
  Synthetic oligonucleotide; AGG chr11 5219870 5219889 5219873 -
tcacgtgcagagacacacat

SEQ ID NO: 49643 - DNA, 20 bp, Artificial Sequence
  Synthetic oligonucleotide; AAG chr11 5219857 5219876 5219860 -
cacacataggctcgaaataa

SEQ ID NO: 49644 - DNA, 20 bp, Artificial Sequence
  Synthetic oligonucleotide; AGG chr11 5219856 5219875 5219859 -
acacataggctcgaaataaa

SEQ ID NO: 49645 - DNA, 20 bp, Artificial Sequence
  Synthetic oligonucleotide; TGG chr11 5219852 5219871 5219855 -
ataggctcgaaataaaagga

SEQ ID NO: 49646 - DNA, 20 bp, Artificial Sequence
  Synthetic oligonucleotide; GAG chr11 5219850 5219869 5219853 -
aggctcgaaataaaaggatg

SEQ ID NO: 49647 - DNA, 20 bp, Artificial Sequence
  Synthetic oligonucleotide; AGG chr11 5219849 5219868 5219852 -
ggctcgaaataaaaggatgg

SEQ ID NO: 49648 - DNA, 20 bp, Artificial Sequence
  Synthetic oligonucleotide; AAG chr11 5219836 5219855 5219839 -
aggatggaggaatatctacc

SEQ ID NO: 49649 - DNA, 20 bp, Artificial Sequence
  Synthetic oligonucleotide; TGG chr11 5219829 5219848 5219832 -
aggaatatctaccaagcaaa

SEQ ID NO: 49650 - DNA, 20 bp, Artificial Sequence
  Synthetic oligonucleotide; AAG chr11 5219816 5219835 5219819 -
aagcaaatggaaaacaaaaa

SEQ ID NO: 49651 - DNA, 20 bp, Artificial Sequence
  Synthetic oligonucleotide; AGG chr11 5219815 5219834 5219818 -
agcaaatggaaaacaaaaaa

SEQ ID NO: 49652 - DNA, 20 bp, Artificial Sequence
  Synthetic oligonucleotide; CAG chr11 5219812 5219831 5219815 -
aaatggaaaacaaaaaaagg

SEQ ID NO: 49653 - DNA, 20 bp, Artificial Sequence
  Synthetic oligonucleotide; AGG chr11 5219811 5219830 5219814 -
aatggaaaacaaaaaaaggc

SEQ ID NO: 49654 - DNA, 20 bp, Artificial Sequence
  Synthetic oligonucleotide; GGG chr11 5219810 5219829 5219813 -
atggaaaacaaaaaaaggca

SEQ ID NO: 49655 - DNA, 20 bp, Artificial Sequence
  Synthetic oligonucleotide; GGG chr11 5219809 5219828 5219812 -
tggaaaacaaaaaaaggcag

SEQ ID NO: 49656 - DNA, 20 bp, Artificial Sequence
  Synthetic oligonucleotide; TAG chr11 5219797 5219816 5219800 -
aaaggcaggggttgcaatcc

SEQ ID NO: 49657 - DNA, 20 bp, Artificial Sequence
  Synthetic oligonucleotide; CAG chr11 5219782 5219801 5219785 -
aatcctagtctctgataaaa

SEQ ID NO: 49658 - DNA, 20 bp, Artificial Sequence
  Synthetic oligonucleotide; AAG chr11 5219765 5219784 5219768 -
aaacagattttaaaccaaca

SEQ ID NO: 49659 - DNA, 20 bp, Artificial Sequence
  Synthetic oligonucleotide; AAG chr11 5219757 5219776 5219760 -
tttaaaccaacaaagatcaa

SEQ ID NO: 49660 - DNA, 20 bp, Artificial Sequence
  Synthetic oligonucleotide; GAG chr11 5219755 5219774 5219758 -
taaaccaacaaagatcaaaa

SEQ ID NO: 49661 - DNA, 20 bp, Artificial Sequence
  Synthetic oligonucleotide; AAG chr11 5219749 5219768 5219752 -
aacaaagatcaaaagagaca

SEQ ID NO: 49662 - DNA, 20 bp, Artificial Sequence
  Synthetic oligonucleotide; AAG chr11 5219746 5219765 5219749 -
aaagatcaaaagagacaaag

SEQ ID NO: 49663 - DNA, 20 bp, Artificial Sequence
  Synthetic oligonucleotide; AGG chr11 5219745 5219764 5219748 -
aagatcaaaagagacaaaga

SEQ ID NO: 49664 - DNA, 20 bp, Artificial Sequence
  Synthetic oligonucleotide; TGG chr11 5219731 5219750 5219734 -
caaagaaggccattacataa

SEQ ID NO: 49665 - DNA, 20 bp, Artificial Sequence
  Synthetic oligonucleotide; AAG chr11 5219726 5219745 5219729 -
aaggccattacataatggca

SEQ ID NO: 49666 - DNA, 20 bp, Artificial Sequence
  Synthetic oligonucleotide; AGG chr11 5219725 5219744 5219728 -
aggccattacataatggcaa

SEQ ID NO: 49667 - DNA, 20 bp, Artificial Sequence
  Synthetic oligonucleotide; GGG chr11 5219724 5219743 5219727 -
ggccattacataatggcaaa

SEQ ID NO: 49668 - DNA, 20 bp, Artificial Sequence
  Synthetic oligonucleotide; AAG chr11 5219713 5219732 5219716 -
aatggcaaagggatctattc

SEQ ID NO: 49669 - DNA, 20 bp, Artificial Sequence
  Synthetic oligonucleotide; AAG chr11 5219710 5219729 5219713 -
ggcaaagggatctattcaag

SEQ ID NO: 49670 - DNA, 20 bp, Artificial Sequence
  Synthetic oligonucleotide; AAG chr11 5219707 5219726 5219710 -
aaagggatctattcaagaag

SEQ ID NO: 49671 - DNA, 20 bp, Artificial Sequence
  Synthetic oligonucleotide; CAG chr11 5219671 5219690 5219674 -
aaatatatatgcacccaata

SEQ ID NO: 49672 - DNA, 20 bp, Artificial Sequence
  Synthetic oligonucleotide; AGG chr11 5219670 5219689 5219673 -
aatatatatgcacccaatac

SEQ ID NO: 49673 - DNA, 20 bp, Artificial Sequence
  Synthetic oligonucleotide; GAG chr11 5219668 5219687 5219671 -
tatatatgcacccaatacag

SEQ ID NO: 49674 - DNA, 20 bp, Artificial Sequence
  Synthetic oligonucleotide; CAG chr11 5219661 5219680 5219664 -
gcacccaatacaggagcacc

SEQ ID NO: 49675 - DNA, 20 bp, Artificial Sequence
  Synthetic oligonucleotide; AAG chr11 5219647 5219666 5219650 -
agcacccagattcataaaac

SEQ ID NO: 49676 - DNA, 20 bp, Artificial Sequence
  Synthetic oligonucleotide; GAG chr11 5219640 5219659 5219643 -
agattcataaaacaagtcct

SEQ ID NO: 49677 - DNA, 20 bp, Artificial Sequence
  Synthetic oligonucleotide; AAG chr11 5219628 5219647 5219631 -
caagtcctgagtgacctaca

SEQ ID NO: 49678 - DNA, 20 bp, Artificial Sequence
  Synthetic oligonucleotide; GAG chr11 5219626 5219645 5219629 -
agtcctgagtgacctacaaa

SEQ ID NO: 49679 - DNA, 20 bp, Artificial Sequence
  Synthetic oligonucleotide; TAG chr11 5219620 5219639 5219623 -
gagtgacctacaaagagact

SEQ ID NO: 49680 - DNA, 20 bp, Artificial Sequence
  Synthetic oligonucleotide; TGG chr11 5219599 5219618 5219602 -
agatgcccacacaataataa

SEQ ID NO: 49681 - DNA, 20 bp, Artificial Sequence
  Synthetic oligonucleotide; GGG chr11 5219598 5219617 5219601 -
gatgcccacacaataataat

SEQ ID NO: 49682 - DNA, 20 bp, Artificial Sequence
  Synthetic oligonucleotide; GAG chr11 5219596 5219615 5219599 -
tgcccacacaataataatgg

SEQ ID NO: 49683 - DNA, 20 bp, Artificial Sequence
  Synthetic oligonucleotide; TAG chr11 5219569 5219588 5219572 -
taacaccccactgtcaacat

SEQ ID NO: 49684 - DNA, 20 bp, Artificial Sequence
  Synthetic oligonucleotide; CAG chr11 5219565 5219584 5219568 -
accccactgtcaacattaga

SEQ ID NO: 49685 - DNA, 20 bp, Artificial Sequence
  Synthetic oligonucleotide; GAG chr11 5219556 5219575 5219559 -
tcaacattagacagatcaac

SEQ ID NO: 49686 - DNA, 20 bp, Artificial Sequence
  Synthetic oligonucleotide; CAG chr11 5219552 5219571 5219555 -
cattagacagatcaacgaga

SEQ ID NO: 49687 - DNA, 20 bp, Artificial Sequence
  Synthetic oligonucleotide; AAG chr11 5219548 5219567 5219551 -
agacagatcaacgagacaga

SEQ ID NO: 49688 - DNA, 20 bp, Artificial Sequence
  Synthetic oligonucleotide; AAG chr11 5219540 5219559 5219543 -
caacgagacagaaagttaac

SEQ ID NO: 49689 - DNA, 20 bp, Artificial Sequence
  Synthetic oligonucleotide; AGG chr11 5219539 5219558 5219542 -
aacgagacagaaagttaaca

SEQ ID NO: 49690 - DNA, 20 bp, Artificial Sequence
  Synthetic oligonucleotide; CAG chr11 5219531 5219550 5219534 -
agaaagttaacaaggatatc

SEQ ID NO: 49691 - DNA, 20 bp, Artificial Sequence
  Synthetic oligonucleotide; AGG chr11 5219530 5219549 5219533 -
gaaagttaacaaggatatcc

SEQ ID NO: 49692 - DNA, 20 bp, Artificial Sequence
  Synthetic oligonucleotide; TGG chr11 5219524 5219543 5219527 -
taacaaggatatccaggaat

SEQ ID NO: 49693 - DNA, 20 bp, Artificial Sequence
  Synthetic oligonucleotide; CAG chr11 5219518 5219537 5219521 -
ggatatccaggaattggact

SEQ ID NO: 49694 - DNA, 20 bp, Artificial Sequence
  Synthetic oligonucleotide; AAG chr11 5219506 5219525 5219509 -
attggactcagctctgcacc

SEQ ID NO: 49695 - DNA, 20 bp, Artificial Sequence
  Synthetic oligonucleotide; CAG chr11 5219503 5219522 5219506 -
ggactcagctctgcaccaag

SEQ ID NO: 49696 - DNA, 20 bp, Artificial Sequence
  Synthetic oligonucleotide; TAG chr11 5219494 5219513 5219497 -
tctgcaccaagcagacctaa

SEQ ID NO: 49697 - DNA, 20 bp, Artificial Sequence
  Synthetic oligonucleotide; CAG chr11 5219484 5219503 5219487 -
gcagacctaatagacatcta

SEQ ID NO: 49698 - DNA, 20 bp, Artificial Sequence
  Synthetic oligonucleotide; CAG chr11 5219461 5219480 5219464 -
aactctccaccccaaatcaa

SEQ ID NO: 49699 - DNA, 20 bp, Artificial Sequence
  Synthetic oligonucleotide; CAG chr11 5219443 5219462 5219446 -
aacagaatatacattctttt

SEQ ID NO: 49700 - DNA, 20 bp, Artificial Sequence
  Synthetic oligonucleotide; TAG chr11 5219407 5219426 5219410 -
ctattccaaaactgaccaca

SEQ ID NO: 49701 - DNA, 20 bp, Artificial Sequence
  Synthetic oligonucleotide; TGG chr11 5219403 5219422 5219406 -
tccaaaactgaccacatagt

SEQ ID NO: 49702 - DNA, 20 bp, Artificial Sequence
  Synthetic oligonucleotide; AAG chr11 5219400 5219419 5219403 -
aaaactgaccacatagttgg

SEQ ID NO: 49703 - DNA, 20 bp, Artificial Sequence
  Synthetic oligonucleotide; AAG chr11 5219395 5219414 5219398 -
tgaccacatagttggaagta

SEQ ID NO: 49704 - DNA, 20 bp, Artificial Sequence
  Synthetic oligonucleotide; CAG chr11 5219385 5219404 5219388 -
gttggaagtaaagctctcct

SEQ ID NO: 49705 - DNA, 20 bp, Artificial Sequence
  Synthetic oligonucleotide; AAG chr11 5219373 5219392 5219376 -
gctctcctcagcaaatgtaa

SEQ ID NO: 49706 - DNA, 20 bp, Artificial Sequence
  Synthetic oligonucleotide; CAG chr11 5219368 5219387 5219371 -
cctcagcaaatgtaaaagaa

SEQ ID NO: 49707 - DNA, 20 bp, Artificial Sequence
  Synthetic oligonucleotide; CAG chr11 5219344 5219363 5219347 -
aactataacaaactgtctct

SEQ ID NO: 49708 - DNA, 20 bp, Artificial Sequence
  Synthetic oligonucleotide; CAG chr11 5219337 5219356 5219340 -
acaaactgtctctcagacca

SEQ ID NO: 49709 - DNA, 20 bp, Artificial Sequence
  Synthetic oligonucleotide; TAG chr11 5219323 5219342 5219326 -
agaccacagtgcaatcaaac

SEQ ID NO: 49710 - DNA, 20 bp, Artificial Sequence
  Synthetic oligonucleotide; CAG chr11 5219316 5219335 5219319 -
agtgcaatcaaactagaact

SEQ ID NO: 49711 - DNA, 20 bp, Artificial Sequence
  Synthetic oligonucleotide; AGG chr11 5219315 5219334 5219318 -
gtgcaatcaaactagaactc

SEQ ID NO: 49712 - DNA, 20 bp, Artificial Sequence
  Synthetic oligonucleotide; AAG chr11 5219309 5219328 5219312 -
tcaaactagaactcaggatt

SEQ ID NO: 49713 - DNA, 20 bp, Artificial Sequence
  Synthetic oligonucleotide; CAG chr11 5219287 5219306 5219290 -
gaaactcactcaaaaccact

SEQ ID NO: 49714 - DNA, 20 bp, Artificial Sequence
  Synthetic oligonucleotide; TGG chr11 5219279 5219298 5219282 -
ctcaaaaccactcagctaca

SEQ ID NO: 49715 - DNA, 20 bp, Artificial Sequence
  Synthetic oligonucleotide; CAG chr11 5219268 5219287 5219271 -
tcagctacatggaaactgaa

SEQ ID NO: 49716 - DNA, 20 bp, Artificial Sequence
  Synthetic oligonucleotide; TGG chr11 5219246 5219265 5219249 -
gcctgctcctgaatgactac

SEQ ID NO: 49717 - DNA, 20 bp, Artificial Sequence
  Synthetic oligonucleotide; GGG chr11 5219245 5219264 5219248 -
cctgctcctgaatgactact

SEQ ID NO: 49718 - DNA, 20 bp, Artificial Sequence
  Synthetic oligonucleotide; AAG chr11 5219228 5219247 5219231 -
actgggtacataacaaaatg

SEQ ID NO: 49719 - DNA, 20 bp, Artificial Sequence
  Synthetic oligonucleotide; AGG chr11 5219227 5219246 5219230 -
ctgggtacataacaaaatga

SEQ ID NO: 49720 - DNA, 20 bp, Artificial Sequence
  Synthetic oligonucleotide; CAG chr11 5219224 5219243 5219227 -
ggtacataacaaaatgaagg

SEQ ID NO: 49721 - DNA, 20 bp, Artificial Sequence
  Synthetic oligonucleotide; AAG chr11 5219216 5219235 5219219 -
acaaaatgaaggcagaaata

SEQ ID NO: 49722 - DNA, 20 bp, Artificial Sequence
  Synthetic oligonucleotide; GAG chr11 5219195 5219214 5219198 -
agatgttctttgaaaccaac

SEQ ID NO: 49723 - DNA, 20 bp, Artificial Sequence
  Synthetic oligonucleotide; AAG chr11 5219188 5219207 5219191 -
ctttgaaaccaacgagaaca

SEQ ID NO: 49724 - DNA, 20 bp, Artificial Sequence
  Synthetic oligonucleotide; CAG chr11 5219174 5219193 5219177 -
agaacaaagacacaacacac

SEQ ID NO: 49725 - DNA, 20 bp, Artificial Sequence
  Synthetic oligonucleotide; GAG chr11 5219164 5219183 5219167 -
cacaacacaccagaatctct

SEQ ID NO: 49726 - DNA, 20 bp, Artificial Sequence
  Synthetic oligonucleotide; AAG chr11 5219152 5219171 5219155 -
gaatctctgagacacattca

SEQ ID NO: 49727 - DNA, 20 bp, Artificial Sequence
  Synthetic oligonucleotide; CAG chr11 5219149 5219168 5219152 -
tctctgagacacattcaaag

SEQ ID NO: 49728 - DNA, 20 bp, Artificial Sequence
  Synthetic oligonucleotide; TAG chr11 5219142 5219161 5219145 -
gacacattcaaagcagtgtg

SEQ ID NO: 49729 - DNA, 20 bp, Artificial Sequence
  Synthetic oligonucleotide; GAG chr11 5219140 5219159 5219143 -
cacattcaaagcagtgtgta

SEQ ID NO: 49730 - DNA, 20 bp, Artificial Sequence
  Synthetic oligonucleotide; AGG chr11 5219139 5219158 5219142 -
acattcaaagcagtgtgtag

SEQ ID NO: 49731 - DNA, 20 bp, Artificial Sequence
  Synthetic oligonucleotide; GGG chr11 5219138 5219157 5219141 -
cattcaaagcagtgtgtaga

SEQ ID NO: 49732 - DNA, 20 bp, Artificial Sequence
  Synthetic oligonucleotide; TAG chr11 5219128 5219147 5219131 -
agtgtgtagagggaaattta

SEQ ID NO: 49733 - DNA, 20 bp, Artificial Sequence
  Synthetic oligonucleotide; AAG chr11 5219111 5219130 5219114 -
ttatagcactaaatgcccac

SEQ ID NO: 49734 - DNA, 20 bp, Artificial Sequence
  Synthetic oligonucleotide; AGG chr11 5219110 5219129 5219113 -
tatagcactaaatgcccaca

SEQ ID NO: 49735 - DNA, 20 bp, Artificial Sequence
  Synthetic oligonucleotide; GGG chr11 5219109 5219128 5219112 -
atagcactaaatgcccacaa

SEQ ID NO: 49736 - DNA, 20 bp, Artificial Sequence
  Synthetic oligonucleotide; AAG chr11 5219105 5219124 5219108 -
cactaaatgcccacaaggga

SEQ ID NO: 49737 - DNA, 20 bp, Artificial Sequence
  Synthetic oligonucleotide; CAG chr11 5219102 5219121 5219105 -
taaatgcccacaagggaaag

SEQ ID NO: 49738 - DNA, 20 bp, Artificial Sequence
  Synthetic oligonucleotide; AGG chr11 5219101 5219120 5219104 -
aaatgcccacaagggaaagc

SEQ ID NO: 49739 - DNA, 20 bp, Artificial Sequence
  Synthetic oligonucleotide; AAG chr11 5219097 5219116 5219100 -
gcccacaagggaaagcagga

SEQ ID NO: 49740 - DNA, 20 bp, Artificial Sequence
  Synthetic oligonucleotide; TAG chr11 5219057 5219076 5219060 -
taacatcacaattaaaaaac

SEQ ID NO: 49741 - DNA, 20 bp, Artificial Sequence
  Synthetic oligonucleotide; GAG chr11 5219055 5219074 5219058 -
acatcacaattaaaaaacta

SEQ ID NO: 49742 - DNA, 20 bp, Artificial Sequence
  Synthetic oligonucleotide; AAG chr11 5219052 5219071 5219055 -
tcacaattaaaaaactagag

SEQ ID NO: 49743 - DNA, 20 bp, Artificial Sequence
  Synthetic oligonucleotide; CAG chr11 5219049 5219068 5219052 -
caattaaaaaactagagaag

SEQ ID NO: 49744 - DNA, 20 bp, Artificial Sequence
  Synthetic oligonucleotide; AGG chr11 5219048 5219067 5219051 -
aattaaaaaactagagaagc

SEQ ID NO: 49745 - DNA, 20 bp, Artificial Sequence
  Synthetic oligonucleotide; GAG chr11 5219046 5219065 5219049 -
ttaaaaaactagagaagcag

SEQ ID NO: 49746 - DNA, 20 bp, Artificial Sequence
  Synthetic oligonucleotide; AAG chr11 5219030 5219049 5219033 -
gcaggagcaaacacattcaa

SEQ ID NO: 49747 - DNA, 20 bp, Artificial Sequence
  Synthetic oligonucleotide; CAG chr11 5219023 5219042 5219026 -
caaacacattcaaaagctaa

SEQ ID NO: 49748 - DNA, 20 bp, Artificial Sequence
  Synthetic oligonucleotide; AAG chr11 5219020 5219039 5219023 -
acacattcaaaagctaacag

SEQ ID NO: 49749 - DNA, 20 bp, Artificial Sequence
  Synthetic oligonucleotide; AAG chr11 5219015 5219034 5219018 -
ttcaaaagctaacagaagac

SEQ ID NO: 49750 - DNA, 20 bp, Artificial Sequence
  Synthetic oligonucleotide; AAG chr11 5219004 5219023 5219007 -
acagaagacaagaaataact

SEQ ID NO: 49751 - DNA, 20 bp, Artificial Sequence
  Synthetic oligonucleotide; CAG chr11 5218999 5219018 5219002 -
agacaagaaataactaagat

SEQ ID NO: 49752 - DNA, 20 bp, Artificial Sequence
  Synthetic oligonucleotide; GAG chr11 5218997 5219016 5219000 -
acaagaaataactaagatca

SEQ ID NO: 49753 - DNA, 20 bp, Artificial Sequence
  Synthetic oligonucleotide; CAG chr11 5218994 5219013 5218997 -
agaaataactaagatcagag

SEQ ID NO: 49754 - DNA, 20 bp, Artificial Sequence
  Synthetic oligonucleotide; AAG chr11 5218991 5219010 5218994 -
aataactaagatcagagcag

SEQ ID NO: 49755 - DNA, 20 bp, Artificial Sequence
  Synthetic oligonucleotide; AAG chr11 5218986 5219005 5218989 -
ctaagatcagagcagaagtg

SEQ ID NO: 49756 - DNA, 20 bp, Artificial Sequence
  Synthetic oligonucleotide; AGG chr11 5218985 5219004 5218988 -
taagatcagagcagaagtga

SEQ ID NO: 49757 - DNA, 20 bp, Artificial Sequence
  Synthetic oligonucleotide; TAG chr11 5218979 5218998 5218982 -
cagagcagaagtgaaggaca

SEQ ID NO: 49758 - DNA, 20 bp, Artificial Sequence
  Synthetic oligonucleotide; GAG chr11 5218977 5218996 5218980 -
gagcagaagtgaaggacata

SEQ ID NO: 49759 - DNA, 20 bp, Artificial Sequence
  Synthetic oligonucleotide; CAG chr11 5218940 5218959 5218943 -
ttcaaaaaaatcaatgaatc

SEQ ID NO: 49760 - DNA, 20 bp, Artificial Sequence
  Synthetic oligonucleotide; AAG chr11 5218937 5218956 5218940 -
aaaaaaatcaatgaatccag

SEQ ID NO: 49761 - DNA, 20 bp, Artificial Sequence
  Synthetic oligonucleotide; AAG chr11 5218921 5218940 5218924 -
ccagaagctgtttttttgaa

SEQ ID NO: 49762 - DNA, 20 bp, Artificial Sequence
  Synthetic oligonucleotide; TAG chr11 5218904 5218923 5218907 -
gaaaagatcaacaaaattga

SEQ ID NO: 49763 - DNA, 20 bp, Artificial Sequence
  Synthetic oligonucleotide; TAG chr11 5218896 5218915 5218899 -
caacaaaattgatagactgc

SEQ ID NO: 49764 - DNA, 20 bp, Artificial Sequence
  Synthetic oligonucleotide; AAG chr11 5218892 5218911 5218895 -
aaaattgatagactgctagc

SEQ ID NO: 49765 - DNA, 20 bp, Artificial Sequence
  Synthetic oligonucleotide; AAG chr11 5218882 5218901 5218885 -
gactgctagcaagactaata

SEQ ID NO: 49766 - DNA, 20 bp, Artificial Sequence
  Synthetic oligonucleotide; AAG chr11 5218879 5218898 5218882 -
tgctagcaagactaataaag

SEQ ID NO: 49767 - DNA, 20 bp, Artificial Sequence
  Synthetic oligonucleotide; AAG chr11 5218874 5218893 5218877 -
gcaagactaataaagaagaa

SEQ ID NO: 49768 - DNA, 20 bp, Artificial Sequence
  Synthetic oligonucleotide; GAG chr11 5218872 5218891 5218875 -
aagactaataaagaagaaaa

SEQ ID NO: 49769 - DNA, 20 bp, Artificial Sequence
  Synthetic oligonucleotide; GAG chr11 5218870 5218889 5218873 -
gactaataaagaagaaaaga

SEQ ID NO: 49770 - DNA, 20 bp, Artificial Sequence
  Synthetic oligonucleotide; AAG chr11 5218867 5218886 5218870 -
taataaagaagaaaagagag

SEQ ID NO: 49771 - DNA, 20 bp, Artificial Sequence
  Synthetic oligonucleotide; TAG chr11 5218857 5218876 5218860 -
gaaaagagagaagaatcaaa

SEQ ID NO: 49772 - DNA, 20 bp, Artificial Sequence
  Synthetic oligonucleotide; CGG chr11 5218836 5218855 5218839 -
agacgcaataaaaaatgaca

SEQ ID NO: 49773 - DNA, 20 bp, Artificial Sequence
  Synthetic oligonucleotide; GGG chr11 5218835 5218854 5218838 -
gacgcaataaaaaatgacac

SEQ ID NO: 49774 - DNA, 20 bp, Artificial Sequence
  Synthetic oligonucleotide; GGG chr11 5218834 5218853 5218837 -
acgcaataaaaaatgacacg

SEQ ID NO: 49775 - DNA, 20 bp, Artificial Sequence
  Synthetic oligonucleotide; CAG chr11 5218814 5218833 5218817 -
gggtatcaccactgatccca

SEQ ID NO: 49776 - DNA, 20 bp, Artificial Sequence
  Synthetic oligonucleotide; CAG chr11 5218795 5218814 5218798 -
acagaaatacaaactaccgt

SEQ ID NO: 49777 - DNA, 20 bp, Artificial Sequence
  Synthetic oligonucleotide; GAG chr11 5218793 5218812 5218796 -
agaaatacaaactaccgtca

SEQ ID NO: 49778 - DNA, 20 bp, Artificial Sequence
  Synthetic oligonucleotide; TAG chr11 5218760 5218779 5218763 -
acacctctacgcaaataaac

SEQ ID NO: 49779 - DNA, 20 bp, Artificial Sequence
  Synthetic oligonucleotide; TAG chr11 5218751 5218770 5218754 -
cgcaaataaactagaaaatc

SEQ ID NO: 49780 - DNA, 20 bp, Artificial Sequence
  Synthetic oligonucleotide; AAG chr11 5218748 5218767 5218751 -
aaataaactagaaaatctag

SEQ ID NO: 49781 - DNA, 20 bp, Artificial Sequence
  Synthetic oligonucleotide; TGG chr11 5218742 5218761 5218745 -
actagaaaatctagaagaaa

SEQ ID NO: 49782 - DNA, 20 bp, Artificial Sequence
  Synthetic oligonucleotide; AAG chr11 5218711 5218730 5218714 -
ctcgacacatacactctgcc

SEQ ID NO: 49783 - DNA, 20 bp, Artificial Sequence
  Synthetic oligonucleotide; CAG chr11 5218701 5218720 5218704 -
acactctgccaagactaaac

SEQ ID NO: 49784 - DNA, 20 bp, Artificial Sequence
  Synthetic oligonucleotide; AGG chr11 5218700 5218719 5218703 -
cactctgccaagactaaacc

SEQ ID NO: 49785 - DNA, 20 bp, Artificial Sequence
  Synthetic oligonucleotide; AAG chr11 5218697 5218716 5218700 -
tctgccaagactaaaccagg

SEQ ID NO: 49786 - DNA, 20 bp, Artificial Sequence
  Synthetic oligonucleotide; AAG chr11 5218694 5218713 5218697 -
gccaagactaaaccaggaag

SEQ ID NO: 49787 - DNA, 20 bp, Artificial Sequence
  Synthetic oligonucleotide; TAG chr11 5218678 5218697 5218681 -
gaagaagttgtatctctgaa

SEQ ID NO: 49788 - DNA, 20 bp, Artificial Sequence
  Synthetic oligonucleotide; CAG chr11 5218667 5218686 5218670 -
atctctgaatagaccaataa

SEQ ID NO: 49789 - DNA, 20 bp, Artificial Sequence
  Synthetic oligonucleotide; AGG chr11 5218666 5218685 5218669 -
tctctgaatagaccaataac

SEQ ID NO: 49790 - DNA, 20 bp, Artificial Sequence
  Synthetic oligonucleotide; GAG chr11 5218653 5218672 5218656 -
caataacaggctctgaaatt

SEQ ID NO: 49791 - DNA, 20 bp, Artificial Sequence
  Synthetic oligonucleotide; AGG chr11 5218652 5218671 5218655 -
aataacaggctctgaaattg

SEQ ID NO: 49792 - DNA, 20 bp, Artificial Sequence
  Synthetic oligonucleotide; TAG chr11 5218639 5218658 5218642 -
gaaattgaggcaataattaa

SEQ ID NO: 49793 - DNA, 20 bp, Artificial Sequence
  Synthetic oligonucleotide; AAG chr11 5218621 5218640 5218624 -
aatagcttatcaaccaaaaa

SEQ ID NO: 49794 - DNA, 20 bp, Artificial Sequence
  Synthetic oligonucleotide; CGG chr11 5218616 5218635 5218619 -
cttatcaaccaaaaaaagtc

SEQ ID NO: 49795 - DNA, 20 bp, Artificial Sequence
  Synthetic oligonucleotide; GGG chr11 5218615 5218634 5218618 -
ttatcaaccaaaaaaagtcc

SEQ ID NO: 49796 - DNA, 20 bp, Artificial Sequence
  Synthetic oligonucleotide; CAG chr11 5218610 5218629 5218613 -
aaccaaaaaaagtccgggac

SEQ ID NO: 49797 - DNA, 20 bp, Artificial Sequence
  Synthetic oligonucleotide; TAG chr11 5218607 5218626 5218610 -
caaaaaaagtccgggaccag

SEQ ID NO: 49798 - DNA, 20 bp, Artificial Sequence
  Synthetic oligonucleotide; AGG chr11 5218606 5218625 5218609 -
aaaaaaagtccgggaccagt

SEQ ID NO: 49799 - DNA, 20 bp, Artificial Sequence
  Synthetic oligonucleotide; TAG chr11 5218598 5218617 5218601 -
tccgggaccagtaggattca

SEQ ID NO: 49800 - DNA, 20 bp, Artificial Sequence
  Synthetic oligonucleotide; CAG chr11 5218584 5218603 5218587 -
gattcatagccgaattctac

SEQ ID NO: 49801 - DNA, 20 bp, Artificial Sequence
  Synthetic oligonucleotide; GAG chr11 5218582 5218601 5218585 -
ttcatagccgaattctacca

SEQ ID NO: 49802 - DNA, 20 bp, Artificial Sequence
  Synthetic oligonucleotide; AGG chr11 5218581 5218600 5218584 -
tcatagccgaattctaccag

SEQ ID NO: 49803 - DNA, 20 bp, Artificial Sequence
  Synthetic oligonucleotide; AAG chr11 5218575 5218594 5218578 -
ccgaattctaccagaggtac

SEQ ID NO: 49804 - DNA, 20 bp, Artificial Sequence
  Synthetic oligonucleotide; AGG chr11 5218574 5218593 5218577 -
cgaattctaccagaggtaca

SEQ ID NO: 49805 - DNA, 20 bp, Artificial Sequence
  Synthetic oligonucleotide; GAG chr11 5218572 5218591 5218575 -
aattctaccagaggtacaag

SEQ ID NO: 49806 - DNA, 20 bp, Artificial Sequence
  Synthetic oligonucleotide; AGG chr11 5218571 5218590 5218574 -
attctaccagaggtacaagg

SEQ ID NO: 49807 - DNA, 20 bp, Artificial Sequence
  Synthetic oligonucleotide; GAG chr11 5218569 5218588 5218572 -
tctaccagaggtacaaggag

SEQ ID NO: 49808 - DNA, 20 bp, Artificial Sequence
  Synthetic oligonucleotide; TGG chr11 5218565 5218584 5218568 -
ccagaggtacaaggaggagc

SEQ ID NO: 49809 - DNA, 20 bp, Artificial Sequence
  Synthetic oligonucleotide; TAG chr11 5218532 5218551 5218535 -
tctgaaactattccaatcaa

SEQ ID NO: 49810 - DNA, 20 bp, Artificial Sequence
  Synthetic oligonucleotide; AAG chr11 5218526 5218545 5218529 -
actattccaatcaatagaaa

SEQ ID NO: 49811 - DNA, 20 bp, Artificial Sequence
  Synthetic oligonucleotide; GAG chr11 5218524 5218543 5218527 -
tattccaatcaatagaaaaa

SEQ ID NO: 49812 - DNA, 20 bp, Artificial Sequence
  Synthetic oligonucleotide; AGG chr11 5218523 5218542 5218526 -
attccaatcaatagaaaaag

SEQ ID NO: 49813 - DNA, 20 bp, Artificial Sequence
  Synthetic oligonucleotide; GGG chr11 5218522 5218541 5218525 -
ttccaatcaatagaaaaaga

SEQ ID NO: 49814 - DNA, 20 bp, Artificial Sequence
  Synthetic oligonucleotide; GAG chr11 5218497 5218516 5218500 -
tcctccctaactcattttat

SEQ ID NO: 49815 - DNA, 20 bp, Artificial Sequence
  Synthetic oligonucleotide; AGG chr11 5218496 5218515 5218499 -
cctccctaactcattttatg

SEQ ID NO: 49816 - DNA, 20 bp, Artificial Sequence
  Synthetic oligonucleotide; CAG chr11 5218492 5218511 5218495 -
cctaactcattttatgaggc

SEQ ID NO: 49817 - DNA, 20 bp, Artificial Sequence
  Synthetic oligonucleotide; AAG chr11 5218473 5218492 5218476 -
ccagcatcatcctgatacca

SEQ ID NO: 49818 - DNA, 20 bp, Artificial Sequence
  Synthetic oligonucleotide; CAG chr11 5218465 5218484 5218468 -
atcctgataccaaagcctga

SEQ ID NO: 49819 - DNA, 20 bp, Artificial Sequence
  Synthetic oligonucleotide; GAG chr11 5218463 5218482 5218466 -
cctgataccaaagcctgaca

SEQ ID NO: 49820 - DNA, 20 bp, Artificial Sequence
  Synthetic oligonucleotide; AAG chr11 5218448 5218467 5218451 -
tgacagagacacaacaaaaa

SEQ ID NO: 49821 - DNA, 20 bp, Artificial Sequence
  Synthetic oligonucleotide; GAG chr11 5218446 5218465 5218449 -
acagagacacaacaaaaaaa

SEQ ID NO: 49822 - DNA, 20 bp, Artificial Sequence
  Synthetic oligonucleotide; TGG chr11 5218388 5218407 5218391 -
aaaaatcctcaataaaatac

SEQ ID NO: 49823 - DNA, 20 bp, Artificial Sequence
  Synthetic oligonucleotide; AAG chr11 5218365 5218384 5218368 -
caaactgatccaccatgatc

SEQ ID NO: 49824 - DNA, 20 bp, Artificial Sequence
  Synthetic oligonucleotide; TGG chr11 5218362 5218381 5218365 -
actgatccaccatgatcaag

SEQ ID NO: 49825 - DNA, 20 bp, Artificial Sequence
  Synthetic oligonucleotide; GGG chr11 5218361 5218380 5218364 -
ctgatccaccatgatcaagt

SEQ ID NO: 49826 - DNA, 20 bp, Artificial Sequence
  Synthetic oligonucleotide; AAG chr11 5218341 5218360 5218344 -
gggcttcatccctgccatgc

SEQ ID NO: 49827 - DNA, 20 bp, Artificial Sequence
  Synthetic oligonucleotide; AGG chr11 5218340 5218359 5218343 -
ggcttcatccctgccatgca

SEQ ID NO: 49828 - DNA, 20 bp, Artificial Sequence
  Synthetic oligonucleotide; TGG chr11 5218336 5218355 5218339 -
tcatccctgccatgcaaggc

SEQ ID NO: 49829 - DNA, 20 bp, Artificial Sequence
  Synthetic oligonucleotide; CAG chr11 5218303 5218322 5218306 -
gaaaatcaataaacataatc

SEQ ID NO: 49830 - DNA, 20 bp, Artificial Sequence
  Synthetic oligonucleotide; CAG chr11 5218292 5218311 5218295 -
aacataatccagcatataaa

SEQ ID NO: 49831 - DNA, 20 bp, Artificial Sequence
  Synthetic oligonucleotide; AAG chr11 5218284 5218303 5218287 -
ccagcatataaacagaacca

SEQ ID NO: 49832 - DNA, 20 bp, Artificial Sequence
  Synthetic oligonucleotide; TAG chr11 5218257 5218276 5218260 -
aaaccatatgattatctcaa

SEQ ID NO: 49833 - DNA, 20 bp, Artificial Sequence
  Synthetic oligonucleotide; CAG chr11 5218251 5218270 5218254 -
tatgattatctcaatagatg

SEQ ID NO: 49834 - DNA, 20 bp, Artificial Sequence
  Synthetic oligonucleotide; AAG chr11 5218246 5218265 5218249 -
ttatctcaatagatgcagaa

SEQ ID NO: 49835 - DNA, 20 bp, Artificial Sequence
  Synthetic oligonucleotide; AGG chr11 5218245 5218264 5218248 -
tatctcaatagatgcagaaa

SEQ ID NO: 49836 - DNA, 20 bp, Artificial Sequence
  Synthetic oligonucleotide; TAG chr11 5218194 5218213 5218197 -
gctaaaaactctcaataaat

SEQ ID NO: 49837 - DNA, 20 bp, Artificial Sequence
  Synthetic oligonucleotide; AGG chr11 5218193 5218212 5218196 -
ctaaaaactctcaataaatt

SEQ ID NO: 49838 - DNA, 20 bp, Artificial Sequence
  Synthetic oligonucleotide; TGG chr11 5218184 5218203 5218187 -
ctcaataaattaggtattga

SEQ ID NO: 49839 - DNA, 20 bp, Artificial Sequence
  Synthetic oligonucleotide; GGG chr11 5218183 5218202 5218186 -
tcaataaattaggtattgat

SEQ ID NO: 49840 - DNA, 20 bp, Artificial Sequence
  Synthetic oligonucleotide; AAG chr11 5218163 5218182 5218166 -
gggacatatctcaaaataat

SEQ ID NO: 49841 - DNA, 20 bp, Artificial Sequence
  Synthetic oligonucleotide; GAG chr11 5218161 5218180 5218164 -
gacatatctcaaaataataa

SEQ ID NO: 49842 - DNA, 20 bp, Artificial Sequence
  Synthetic oligonucleotide; CAG chr11 5218140 5218159 5218143 -
agctatctatgacaaaccca

SEQ ID NO: 49843 - DNA, 20 bp, Artificial Sequence
  Synthetic oligonucleotide; GAG chr11 5218124 5218143 5218127 -
cccacagccaatatcatact

SEQ ID NO: 49844 - DNA, 20 bp, Artificial Sequence
  Synthetic oligonucleotide; TGG chr11 5218121 5218140 5218124 -
acagccaatatcatactgag

SEQ ID NO: 49845 - DNA, 20 bp, Artificial Sequence
  Synthetic oligonucleotide; TGG chr11 5218110 5218129 5218113 -
catactgagtggacaaaaac

SEQ ID NO: 49846 - DNA, 20 bp, Artificial Sequence
  Synthetic oligonucleotide; AAG chr11 5218107 5218126 5218110 -
actgagtggacaaaaactgg

SEQ ID NO: 49847 - DNA, 20 bp, Artificial Sequence
  Synthetic oligonucleotide; TGG chr11 5218088 5218107 5218091 -
gaagcattccctttgaaaac

SEQ ID NO: 49848 - DNA, 20 bp, Artificial Sequence
  Synthetic oligonucleotide; AAG chr11 5218082 5218101 5218085 -
ttccctttgaaaactggcac

SEQ ID NO: 49849 - DNA, 20 bp, Artificial Sequence
  Synthetic oligonucleotide; AGG chr11 5218081 5218100 5218084 -
tccctttgaaaactggcaca

SEQ ID NO: 49850 - DNA, 20 bp, Artificial Sequence
  Synthetic oligonucleotide; CAG chr11 5218078 5218097 5218081 -
ctttgaaaactggcacaagg

SEQ ID NO: 49851 - DNA, 20 bp, Artificial Sequence
  Synthetic oligonucleotide; AGG chr11 5218077 5218096 5218080 -
tttgaaaactggcacaaggc

SEQ ID NO: 49852 - DNA, 20 bp, Artificial Sequence
  Synthetic oligonucleotide; GGG chr11 5218076 5218095 5218079 -
ttgaaaactggcacaaggca

SEQ ID NO: 49853 - DNA, 20 bp, Artificial Sequence
  Synthetic oligonucleotide; TAG chr11 5218044 5218063 5218047 -
ctcaccactcctattcaaca

SEQ ID NO: 49854 - DNA, 20 bp, Artificial Sequence
  Synthetic oligonucleotide; AAG chr11 5218035 5218054 5218038 -
cctattcaacatagtgttgt

SEQ ID NO: 49855 - DNA, 20 bp, Artificial Sequence
  Synthetic oligonucleotide; TGG chr11 5218029 5218048 5218032 -
caacatagtgttgtaagttc

SEQ ID NO: 49856 - DNA, 20 bp, Artificial Sequence
  Synthetic oligonucleotide; CAG chr11 5218025 5218044 5218028 -
atagtgttgtaagttctggc

SEQ ID NO: 49857 - DNA, 20 bp, Artificial Sequence
  Synthetic oligonucleotide; AGG chr11 5218024 5218043 5218027 -
tagtgttgtaagttctggcc

SEQ ID NO: 49858 - DNA, 20 bp, Artificial Sequence
  Synthetic oligonucleotide; GGG chr11 5218023 5218042 5218026 -
agtgttgtaagttctggcca

SEQ ID NO: 49859 - DNA, 20 bp, Artificial Sequence
  Synthetic oligonucleotide; CAG chr11 5218016 5218035 5218019 -
taagttctggccagggcaat

SEQ ID NO: 49860 - DNA, 20 bp, Artificial Sequence
  Synthetic oligonucleotide; AGG chr11 5218015 5218034 5218018 -
aagttctggccagggcaatc

SEQ ID NO: 49861 - DNA, 20 bp, Artificial Sequence
  Synthetic oligonucleotide; CAG chr11 5218012 5218031 5218015 -
ttctggccagggcaatcagg

SEQ ID NO: 49862 - DNA, 20 bp, Artificial Sequence
  Synthetic oligonucleotide; AGG chr11 5218011 5218030 5218014 -
tctggccagggcaatcaggc

SEQ ID NO: 49863 - DNA, 20 bp, Artificial Sequence
  Synthetic oligonucleotide; GAG chr11 5218009 5218028 5218012 -
tggccagggcaatcaggcag

SEQ ID NO: 49864 - DNA, 20 bp, Artificial Sequence
  Synthetic oligonucleotide; AAG chr11 5218006 5218025 5218009 -
ccagggcaatcaggcaggag

SEQ ID NO: 49865 - DNA, 20 bp, Artificial Sequence
  Synthetic oligonucleotide; AGG chr11 5218005 5218024 5218008 -
cagggcaatcaggcaggaga

SEQ ID NO: 49866 - DNA, 20 bp, Artificial Sequence
  Synthetic oligonucleotide; AAG chr11 5217997 5218016 5218000 -
tcaggcaggagaaggaaata

SEQ ID NO: 49867 - DNA, 20 bp, Artificial Sequence
  Synthetic oligonucleotide; AGG chr11 5217996 5218015 5217999 -
caggcaggagaaggaaataa

SEQ ID NO: 49868 - DNA, 20 bp, Artificial Sequence
  Synthetic oligonucleotide; GGG chr11 5217995 5218014 5217998 -
aggcaggagaaggaaataaa

SEQ ID NO: 49869 - DNA, 20 bp, Artificial Sequence
  Synthetic oligonucleotide; TAG chr11 5217984 5218003 5217987 -
ggaaataaagggcattcaat

SEQ ID NO: 49870 - DNA, 20 bp, Artificial Sequence
  Synthetic oligonucleotide; AGG chr11 5217983 5218002 5217986 -
gaaataaagggcattcaatt

SEQ ID NO: 49871 - DNA, 20 bp, Artificial Sequence
  Synthetic oligonucleotide; AAG chr11 5217978 5217997 5217981 -
aaagggcattcaattaggaa

SEQ ID NO: 49872 - DNA, 20 bp, Artificial Sequence
  Synthetic oligonucleotide; GAG chr11 5217976 5217995 5217979 -
agggcattcaattaggaaaa

SEQ ID NO: 49873 - DNA, 20 bp, Artificial Sequence
  Synthetic oligonucleotide; AGG chr11 5217975 5217994 5217978 -
gggcattcaattaggaaaag

SEQ ID NO: 49874 - DNA, 20 bp, Artificial Sequence
  Synthetic oligonucleotide; AAG chr11 5217972 5217991 5217975 -
cattcaattaggaaaagagg

SEQ ID NO: 49875 - DNA, 20 bp, Artificial Sequence
  Synthetic oligonucleotide; CAG chr11 5217951 5217970 5217954 -
agtgaaattgtccctgtttg

SEQ ID NO: 49876 - DNA, 20 bp, Artificial Sequence
  Synthetic oligonucleotide; TAG chr11 5217930 5217949 5217933 -
agatgacatgattgtatatc

SEQ ID NO: 49877 - DNA, 20 bp, Artificial Sequence
  Synthetic oligonucleotide; CAG chr11 5217912 5217931 5217915 -
tctagaaaaccccattgtct

SEQ ID NO: 49878 - DNA, 20 bp, Artificial Sequence
  Synthetic oligonucleotide; AAG chr11 5217895 5217914 5217898 -
tctcagcccaaaatctcctt

SEQ ID NO: 49879 - DNA, 20 bp, Artificial Sequence
  Synthetic oligonucleotide; AAG chr11 5217887 5217906 5217890 -
caaaatctccttaagctgat

SEQ ID NO: 49880 - DNA, 20 bp, Artificial Sequence
  Synthetic oligonucleotide; CAG chr11 5217878 5217897 5217881 -
cttaagctgataagcaactt

SEQ ID NO: 49881 - DNA, 20 bp, Artificial Sequence
  Synthetic oligonucleotide; AAG chr11 5217873 5217892 5217876 -
gctgataagcaacttcagca

SEQ ID NO: 49882 - DNA, 20 bp, Artificial Sequence
  Synthetic oligonucleotide; CAG chr11 5217867 5217886 5217870 -
aagcaacttcagcaaagtct

SEQ ID NO: 49883 - DNA, 20 bp, Artificial Sequence
  Synthetic oligonucleotide; AGG chr11 5217866 5217885 5217869 -
agcaacttcagcaaagtctc

SEQ ID NO: 49884 - DNA, 20 bp, Artificial Sequence
  Synthetic oligonucleotide; CAG chr11 5217854 5217873 5217857 -
aaagtctcaggatataaaat

SEQ ID NO: 49885 - DNA, 20 bp, Artificial Sequence
  Synthetic oligonucleotide; AAG chr11 5217837 5217856 5217840 -
aatcagtgtgcaaaaatcac

SEQ ID NO: 49886 - DNA, 20 bp, Artificial Sequence
  Synthetic oligonucleotide; CAG chr11 5217815 5217834 5217818 -
gtattcctatgcaccaataa

SEQ ID NO: 49887 - DNA, 20 bp, Artificial Sequence
  Synthetic oligonucleotide; CAG chr11 5217807 5217826 5217810 -
atgcaccaataacagacaaa

SEQ ID NO: 49888 - DNA, 20 bp, Artificial Sequence
  Synthetic oligonucleotide; GAG chr11 5217805 5217824 5217808 -
gcaccaataacagacaaaca

SEQ ID NO: 49889 - DNA, 20 bp, Artificial Sequence
  Synthetic oligonucleotide; GAG chr11 5217803 5217822 5217806 -
accaataacagacaaacaga

SEQ ID NO: 49890 - DNA, 20 bp, Artificial Sequence
  Synthetic oligonucleotide; GAG chr11 5217791 5217810 5217794 -
caaacagagagccaaatcat

SEQ ID NO: 49891 - DNA, 20 bp, Artificial Sequence
  Synthetic oligonucleotide; AAG chr11 5217763 5217782 5217766 -
tcccattcacaattgcttca

SEQ ID NO: 49892 - DNA, 20 bp, Artificial Sequence
  Synthetic oligonucleotide; GAG chr11 5217761 5217780 5217764 -
ccattcacaattgcttcaaa

SEQ ID NO: 49893 - DNA, 20 bp, Artificial Sequence
  Synthetic oligonucleotide; TAG chr11 5217747 5217766 5217750 -
ttcaaagagaataaaatacc

SEQ ID NO: 49894 - DNA, 20 bp, Artificial Sequence
  Synthetic oligonucleotide; AGG chr11 5217746 5217765 5217749 -
tcaaagagaataaaatacct

SEQ ID NO: 49895 - DNA, 20 bp, Artificial Sequence
  Synthetic oligonucleotide; AAG chr11 5217731 5217750 5217734 -
tacctaggaatccaacttac

SEQ ID NO: 49896 - DNA, 20 bp, Artificial Sequence
  Synthetic oligonucleotide; AGG chr11 5217730 5217749 5217733 -
acctaggaatccaacttaca

SEQ ID NO: 49897 - DNA, 20 bp, Artificial Sequence
  Synthetic oligonucleotide; GGG chr11 5217729 5217748 5217732 -
cctaggaatccaacttacaa

SEQ ID NO: 49898 - DNA, 20 bp, Artificial Sequence
  Synthetic oligonucleotide; AAG chr11 5217721 5217740 5217724 -
tccaacttacaagggatgtg

SEQ ID NO: 49899 - DNA, 20 bp, Artificial Sequence
  Synthetic oligonucleotide; AGG chr11 5217720 5217739 5217723 -
ccaacttacaagggatgtga

SEQ ID NO: 49900 - DNA, 20 bp, Artificial Sequence
  Synthetic oligonucleotide; AAG chr11 5217709 5217728 5217712 -
gggatgtgaaggacctcttc

SEQ ID NO: 49901 - DNA, 20 bp, Artificial Sequence
  Synthetic oligonucleotide; AGG chr11 5217708 5217727 5217711 -
ggatgtgaaggacctcttca

SEQ ID NO: 49902 - DNA, 20 bp, Artificial Sequence
  Synthetic oligonucleotide; GAG chr11 5217706 5217725 5217709 -
atgtgaaggacctcttcaag

SEQ ID NO: 49903 - DNA, 20 bp, Artificial Sequence
  Synthetic oligonucleotide; AAG chr11 5217675 5217694 5217678 -
accactgctcaatgaaataa

SEQ ID NO: 49904 - DNA, 20 bp, Artificial Sequence
  Synthetic oligonucleotide; GAG chr11 5217673 5217692 5217676 -
cactgctcaatgaaataaaa

SEQ ID NO: 49905 - DNA, 20 bp, Artificial Sequence
  Synthetic oligonucleotide; AGG chr11 5217672 5217691 5217675 -
actgctcaatgaaataaaag

SEQ ID NO: 49906 - DNA, 20 bp, Artificial Sequence
  Synthetic oligonucleotide; TGG chr11 5217658 5217677 5217661 -
taaaagaggatacaaacaaa

SEQ ID NO: 49907 - DNA, 20 bp, Artificial Sequence
  Synthetic oligonucleotide; AAG chr11 5217655 5217674 5217658 -
aagaggatacaaacaaatgg

SEQ ID NO: 49908 - DNA, 20 bp, Artificial Sequence
  Synthetic oligonucleotide; TGG chr11 5217637 5217656 5217640 -
ggaagaacattccatgctca

SEQ ID NO: 49909 - DNA, 20 bp, Artificial Sequence
  Synthetic oligonucleotide; GGG chr11 5217636 5217655 5217639 -
gaagaacattccatgctcat

SEQ ID NO: 49910 - DNA, 20 bp, Artificial Sequence
  Synthetic oligonucleotide; TAG chr11 5217633 5217652 5217636 -
gaacattccatgctcatggg

SEQ ID NO: 49911 - DNA, 20 bp, Artificial Sequence
  Synthetic oligonucleotide; AGG chr11 5217632 5217651 5217635 -
aacattccatgctcatgggt

SEQ ID NO: 49912 - DNA, 20 bp, Artificial Sequence
  Synthetic oligonucleotide; AAG chr11 5217629 5217648 5217632 -
attccatgctcatgggtagg

SEQ ID NO: 49913 - DNA, 20 bp, Artificial Sequence
  Synthetic oligonucleotide; TGG chr11 5217609 5217628 5217612 -
aagaatcaatatcgtgaaaa

SEQ ID NO: 49914 - DNA, 20 bp, Artificial Sequence
  Synthetic oligonucleotide; AAG chr11 5217595 5217614 5217598 -
tgaaaatggtcatactgccc

SEQ ID NO: 49915 - DNA, 20 bp, Artificial Sequence
  Synthetic oligonucleotide; AGG chr11 5217594 5217613 5217597 -
gaaaatggtcatactgccca

SEQ ID NO: 49916 - DNA, 20 bp, Artificial Sequence
  Synthetic oligonucleotide; TAG chr11 5217584 5217603 5217587 -
atactgcccaaggtaattta

SEQ ID NO: 49917 - DNA, 20 bp, Artificial Sequence
  Synthetic oligonucleotide; AAG chr11 5217562 5217581 5217565 -
gattcaatgccatccccatc

SEQ ID NO: 49918 - DNA, 20 bp, Artificial Sequence
  Synthetic oligonucleotide; CAG chr11 5217540 5217559 5217543 -
gctaccaatgactttcttca

SEQ ID NO: 49919 - DNA, 20 bp, Artificial Sequence
  Synthetic oligonucleotide; TGG chr11 5217534 5217553 5217537 -
aatgactttcttcacagaac

SEQ ID NO: 49920 - DNA, 20 bp, Artificial Sequence
  Synthetic oligonucleotide; AAG chr11 5217517 5217536 5217520 -
aactggaaaaaactacttta

SEQ ID NO: 49921 - DNA, 20 bp, Artificial Sequence
  Synthetic oligonucleotide; TGG chr11 5217508 5217527 5217511 -
aaactactttaaagttcata

SEQ ID NO: 49922 - DNA, 20 bp, Artificial Sequence
  Synthetic oligonucleotide; AAG chr11 5217497 5217516 5217500 -
aagttcatatggaaccaaaa

SEQ ID NO: 49923 - DNA, 20 bp, Artificial Sequence
  Synthetic oligonucleotide; GAG chr11 5217495 5217514 5217498 -
gttcatatggaaccaaaaaa

SEQ ID NO: 49924 - DNA, 20 bp, Artificial Sequence
  Synthetic oligonucleotide; AAG chr11 5217481 5217500 5217484 -
aaaaaagagcccacatcacc

SEQ ID NO: 49925 - DNA, 20 bp, Artificial Sequence
  Synthetic oligonucleotide; AGG chr11 5217480 5217499 5217483 -
aaaaagagcccacatcacca

SEQ ID NO: 49926 - DNA, 20 bp, Artificial Sequence
  Synthetic oligonucleotide; AAG chr11 5217470 5217489 5217473 -
cacatcaccaaggcaatcct

SEQ ID NO: 49927 - DNA, 20 bp, Artificial Sequence
  Synthetic oligonucleotide; AAG chr11 5217463 5217482 5217466 -
ccaaggcaatcctaagccaa

SEQ ID NO: 49928 - DNA, 20 bp, Artificial Sequence
  Synthetic oligonucleotide; AAG chr11 5217456 5217475 5217459 -
aatcctaagccaaaagaaca

SEQ ID NO: 49929 - DNA, 20 bp, Artificial Sequence
  Synthetic oligonucleotide; TGG chr11 5217452 5217471 5217455 -
ctaagccaaaagaacaaagc

SEQ ID NO: 49930 - DNA, 20 bp, Artificial Sequence
  Synthetic oligonucleotide; GAG chr11 5217450 5217469 5217453 -
aagccaaaagaacaaagctg

SEQ ID NO: 49931 - DNA, 20 bp, Artificial Sequence
  Synthetic oligonucleotide; AGG chr11 5217449 5217468 5217452 -
agccaaaagaacaaagctgg

SEQ ID NO: 49932 - DNA, 20 bp, Artificial Sequence
  Synthetic oligonucleotide; CGG chr11 5217408 5217427 5217411 -
caaactatactacaatgcta

SEQ ID NO: 49933 - DNA, 20 bp, Artificial Sequence
  Synthetic oligonucleotide; CAG chr11 5217396 5217415 5217399 -
caatgctacggtaaccaaaa

SEQ ID NO: 49934 - DNA, 20 bp, Artificial Sequence
  Synthetic oligonucleotide; TGG chr11 5217391 5217410 5217394 -
ctacggtaaccaaaacagca

SEQ ID NO: 49935 - DNA, 20 bp, Artificial Sequence
  Synthetic oligonucleotide; TGG chr11 5217385 5217404 5217388 -
taaccaaaacagcatggtac

SEQ ID NO: 49936 - DNA, 20 bp, Artificial Sequence
  Synthetic oligonucleotide; CAG chr11 5217374 5217393 5217377 -
gcatggtactggtaccaaaa

SEQ ID NO: 49937 - DNA, 20 bp, Artificial Sequence
  Synthetic oligonucleotide; GAG chr11 5217372 5217391 5217375 -
atggtactggtaccaaaaca

SEQ ID NO: 49938 - DNA, 20 bp, Artificial Sequence
  Synthetic oligonucleotide; TAG chr11 5217366 5217385 5217369 -
ctggtaccaaaacagagatc

SEQ ID NO: 49939 - DNA, 20 bp, Artificial Sequence
  Synthetic oligonucleotide; TGG chr11 5217358 5217377 5217361 -
aaaacagagatctagaccaa

SEQ ID NO: 49940 - DNA, 20 bp, Artificial Sequence
  Synthetic oligonucleotide; CAG chr11 5217353 5217372 5217356 -
agagatctagaccaatggaa

SEQ ID NO: 49941 - DNA, 20 bp, Artificial Sequence
  Synthetic oligonucleotide; CAG chr11 5217348 5217367 5217351 -
tctagaccaatggaacagaa

SEQ ID NO: 49942 - DNA, 20 bp, Artificial Sequence
  Synthetic oligonucleotide; GAG chr11 5217346 5217365 5217349 -
tagaccaatggaacagaaca

SEQ ID NO: 49943 - DNA, 20 bp, Artificial Sequence
  Synthetic oligonucleotide; CAG chr11 5217339 5217358 5217342 -
atggaacagaacagagccct

SEQ ID NO: 49944 - DNA, 20 bp, Artificial Sequence
  Synthetic oligonucleotide; GAG chr11 5217292 5217311 5217295 -
atctgatctttgacaaacct

SEQ ID NO: 49945 - DNA, 20 bp, Artificial Sequence
  Synthetic oligonucleotide; GAG chr11 5217290 5217309 5217293 -
ctgatctttgacaaacctga

SEQ ID NO: 49946 - DNA, 20 bp, Artificial Sequence
  Synthetic oligonucleotide; AAG chr11 5217283 5217302 5217286 -
ttgacaaacctgagagaaac

SEQ ID NO: 49947 - DNA, 20 bp, Artificial Sequence
  Synthetic oligonucleotide; TGG chr11 5217277 5217296 5217280 -
aacctgagagaaacaagcaa

SEQ ID NO: 49948 - DNA, 20 bp, Artificial Sequence
  Synthetic oligonucleotide; GGG chr11 5217276 5217295 5217279 -
acctgagagaaacaagcaat

SEQ ID NO: 49949 - DNA, 20 bp, Artificial Sequence
  Synthetic oligonucleotide; GGG chr11 5217275 5217294 5217278 -
cctgagagaaacaagcaatg

SEQ ID NO: 49950 - DNA, 20 bp, Artificial Sequence
  Synthetic oligonucleotide; AAG chr11 5217271 5217290 5217274 -
agagaaacaagcaatgggga

SEQ ID NO: 49951 - DNA, 20 bp, Artificial Sequence
  Synthetic oligonucleotide; AGG chr11 5217270 5217289 5217273 -
gagaaacaagcaatggggaa

SEQ ID NO: 49952 - DNA, 20 bp, Artificial Sequence
  Synthetic oligonucleotide; TGG chr11 5217250 5217269 5217253 -
aggattccctatttaataaa

SEQ ID NO: 49953 - DNA, 20 bp, Artificial Sequence
  Synthetic oligonucleotide; TGG chr11 5217244 5217263 5217247 -
ccctatttaataaatggtgc

SEQ ID NO: 49954 - DNA, 20 bp, Artificial Sequence
  Synthetic oligonucleotide; GGG chr11 5217243 5217262 5217246 -
cctatttaataaatggtgct

SEQ ID NO: 49955 - DNA, 20 bp, Artificial Sequence
  Synthetic oligonucleotide; TGG chr11 5217235 5217254 5217238 -
ataaatggtgctgggaaaac

SEQ ID NO: 49956 - DNA, 20 bp, Artificial Sequence
  Synthetic oligonucleotide; TAG chr11 5217231 5217250 5217234 -
atggtgctgggaaaactggc

SEQ ID NO: 49957 - DNA, 20 bp, Artificial Sequence
  Synthetic oligonucleotide; TAG chr11 5217221 5217240 5217224 -
gaaaactggctagccatatg

SEQ ID NO: 49958 - DNA, 20 bp, Artificial Sequence
  Synthetic oligonucleotide; AAG chr11 5217217 5217236 5217220 -
actggctagccatatgtaga

SEQ ID NO: 49959 - DNA, 20 bp, Artificial Sequence
  Synthetic oligonucleotide; TGG chr11 5217207 5217226 5217210 -
catatgtagaaagctgaaac

SEQ ID NO: 49960 - DNA, 20 bp, Artificial Sequence
  Synthetic oligonucleotide; AAG chr11 5217170 5217189 5217173 -
ccttatacaaaaattaattc

SEQ ID NO: 49961 - DNA, 20 bp, Artificial Sequence
  Synthetic oligonucleotide; TGG chr11 5217166 5217185 5217169 -
atacaaaaattaattcaaga

SEQ ID NO: 49962 - DNA, 20 bp, Artificial Sequence
  Synthetic oligonucleotide; AAG chr11 5217159 5217178 5217162 -
aattaattcaagatggatta

SEQ ID NO: 49963 - DNA, 20 bp, Artificial Sequence
  Synthetic oligonucleotide; TAG chr11 5217146 5217165 5217149 -
tggattaaagacttacatgt

SEQ ID NO: 49964 - DNA, 20 bp, Artificial Sequence
  Synthetic oligonucleotide; TAG chr11 5217123 5217142 5217126 -
acctaaaaccataaaaaccc

SEQ ID NO: 49965 - DNA, 20 bp, Artificial Sequence
  Synthetic oligonucleotide; TAG chr11 5217111 5217130 5217114 -
aaaaaccctagaaaaaaacc

SEQ ID NO: 49966 - DNA, 20 bp, Artificial Sequence
  Synthetic oligonucleotide; AGG chr11 5217110 5217129 5217113 -
aaaaccctagaaaaaaacct

SEQ ID NO: 49967 - DNA, 20 bp, Artificial Sequence
  Synthetic oligonucleotide; CAG chr11 5217097 5217116 5217100 -
aaaacctaggcaataccatt

SEQ ID NO: 49968 - DNA, 20 bp, Artificial Sequence
  Synthetic oligonucleotide; AGG chr11 5217096 5217115 5217099 -
aaacctaggcaataccattc

SEQ ID NO: 49969 - DNA, 20 bp, Artificial Sequence
  Synthetic oligonucleotide; TAG chr11 5217090 5217109 5217093 -
aggcaataccattcaggaca

SEQ ID NO: 49970 - DNA, 20 bp, Artificial Sequence
  Synthetic oligonucleotide; AGG chr11 5217089 5217108 5217092 -
ggcaataccattcaggacat

SEQ ID NO: 49971 - DNA, 20 bp, Artificial Sequence
  Synthetic oligonucleotide; TGG chr11 5217084 5217103 5217087 -
taccattcaggacataggca

SEQ ID NO: 49972 - DNA, 20 bp, Artificial Sequence
  Synthetic oligonucleotide; GGG chr11 5217083 5217102 5217086 -
accattcaggacataggcat

SEQ ID NO: 49973 - DNA, 20 bp, Artificial Sequence
  Synthetic oligonucleotide; AAG chr11 5217079 5217098 5217082 -
ttcaggacataggcatgggc

SEQ ID NO: 49974 - DNA, 20 bp, Artificial Sequence
  Synthetic oligonucleotide; AGG chr11 5217078 5217097 5217081 -
tcaggacataggcatgggca

SEQ ID NO: 49975 - DNA, 20 bp, Artificial Sequence
  Synthetic oligonucleotide; AAG chr11 5217054 5217073 5217057 -
cttcatgtctaaaacaccaa

SEQ ID NO: 49976 - DNA, 20 bp, Artificial Sequence
  Synthetic oligonucleotide; TGG chr11 5217048 5217067 5217051 -
gtctaaaacaccaaaagcaa

SEQ ID NO: 49977 - DNA, 20 bp, Artificial Sequence
  Synthetic oligonucleotide; AAG chr11 5217039 5217058 5217042 -
accaaaagcaatggcaacaa

SEQ ID NO: 49978 - DNA, 20 bp, Artificial Sequence
  Synthetic oligonucleotide; TGG chr11 5217030 5217049 5217033 -
aatggcaacaaaagacaaaa

SEQ ID NO: 49979 - DNA, 20 bp, Artificial Sequence
  Synthetic oligonucleotide; CGG chr11 5217022 5217041 5217025 -
caaaagacaaaatggacaaa

SEQ ID NO: 49980 - DNA, 20 bp, Artificial Sequence
  Synthetic oligonucleotide; GGG chr11 5217021 5217040 5217024 -
aaaagacaaaatggacaaac

SEQ ID NO: 49981 - DNA, 20 bp, Artificial Sequence
  Synthetic oligonucleotide; AAG chr11 5217004 5217023 5217007 -
aacgggatctaattaaacta

SEQ ID NO: 49982 - DNA, 20 bp, Artificial Sequence
  Synthetic oligonucleotide; GAG chr11 5217002 5217021 5217005 -
cgggatctaattaaactaaa

SEQ ID NO: 49983 - DNA, 20 bp, Artificial Sequence
  Synthetic oligonucleotide; CAG chr11 5216991 5217010 5216994 -
taaactaaagagcttctgca

SEQ ID NO: 49984 - DNA, 20 bp, Artificial Sequence
  Synthetic oligonucleotide; AAG chr11 5216985 5217004 5216988 -
aaagagcttctgcacagcta

SEQ ID NO: 49985 - DNA, 20 bp, Artificial Sequence
  Synthetic oligonucleotide; CAG chr11 5216972 5216991 5216975 -
acagctaaagaaactaccat

SEQ ID NO: 49986 - DNA, 20 bp, Artificial Sequence
  Synthetic oligonucleotide; GAG chr11 5216970 5216989 5216973 -
agctaaagaaactaccatca

SEQ ID NO: 49987 - DNA, 20 bp, Artificial Sequence
  Synthetic oligonucleotide; CAG chr11 5216963 5216982 5216966 -
gaaactaccatcagagtgaa

SEQ ID NO: 49988 - DNA, 20 bp, Artificial Sequence
  Synthetic oligonucleotide; AGG chr11 5216962 5216981 5216965 -
aaactaccatcagagtgaac

SEQ ID NO: 49989 - DNA, 20 bp, Artificial Sequence
  Synthetic oligonucleotide; TGG chr11 5216947 5216966 5216950 -
tgaacaggcaacctacaaaa

SEQ ID NO: 49990 - DNA, 20 bp, Artificial Sequence
  Synthetic oligonucleotide; GGG chr11 5216946 5216965 5216949 -
gaacaggcaacctacaaaat

SEQ ID NO: 49991 - DNA, 20 bp, Artificial Sequence
  Synthetic oligonucleotide; GAG chr11 5216944 5216963 5216947 -
acaggcaacctacaaaatgg

SEQ ID NO: 49992 - DNA, 20 bp, Artificial Sequence
  Synthetic oligonucleotide; AAG chr11 5216913 5216932 5216916 -
tgcaatctactcatctgaca

SEQ ID NO: 49993 - DNA, 20 bp, Artificial Sequence
  Synthetic oligonucleotide; AGG chr11 5216912 5216931 5216915 -
gcaatctactcatctgacaa

SEQ ID NO: 49994 - DNA, 20 bp, Artificial Sequence
  Synthetic oligonucleotide; GGG chr11 5216911 5216930 5216914 -
caatctactcatctgacaaa

SEQ ID NO: 49995 - DNA, 20 bp, Artificial Sequence
  Synthetic oligonucleotide; CAG chr11 5216900 5216919 5216903 -
tctgacaaagggctaatatc

SEQ ID NO: 49996 - DNA, 20 bp, Artificial Sequence
  Synthetic oligonucleotide; AAG chr11 5216869 5216888 5216872 -
atgaactcaaacaaatttac

SEQ ID NO: 49997 - DNA, 20 bp, Artificial Sequence
  Synthetic oligonucleotide; AAG chr11 5216843 5216862 5216846 -
aaacaaacaaccccatcaaa

SEQ ID NO: 49998 - DNA, 20 bp, Artificial Sequence
  Synthetic oligonucleotide; TGG chr11 5216840 5216859 5216843 -
caaacaaccccatcaaaaag

SEQ ID NO: 49999 - DNA, 20 bp, Artificial Sequence
  Synthetic oligonucleotide; GGG chr11 5216839 5216858 5216842 -
aaacaaccccatcaaaaagt

SEQ ID NO: 50000 - DNA, 20 bp, Artificial Sequence
  Synthetic oligonucleotide; AAG chr11 5216834 5216853 5216837 -
accccatcaaaaagtgggca

SEQ ID NO: 50001 - DNA, 20 bp, Artificial Sequence
  Synthetic oligonucleotide; AGG chr11 5216833 5216852 5216836 -
ccccatcaaaaagtgggcaa

SEQ ID NO: 50002 - DNA, 20 bp, Artificial Sequence
  Synthetic oligonucleotide; CAG chr11 5216823 5216842 5216826 -
aagtgggcaaaggatatgaa

SEQ ID NO: 50003 - DNA, 20 bp, Artificial Sequence
  Synthetic oligonucleotide; AAG chr11 5216809 5216828 5216812 -
tatgaacagacacttcgcaa

SEQ ID NO: 50004 - DNA, 20 bp, Artificial Sequence
  Synthetic oligonucleotide; AAG chr11 5216806 5216825 5216809 -
gaacagacacttcgcaaaag

SEQ ID NO: 50005 - DNA, 20 bp, Artificial Sequence
  Synthetic oligonucleotide; TAG chr11 5216758 5216777 5216761 -
gaaaaaatgctcatcatcac

SEQ ID NO: 50006 - DNA, 20 bp, Artificial Sequence
  Synthetic oligonucleotide; CAG chr11 5216751 5216770 5216754 -
tgctcatcatcactagccat

SEQ ID NO: 50007 - DNA, 20 bp, Artificial Sequence
  Synthetic oligonucleotide; GAG chr11 5216749 5216768 5216752 -
ctcatcatcactagccatca

SEQ ID NO: 50008 - DNA, 20 bp, Artificial Sequence
  Synthetic oligonucleotide; GAG chr11 5216724 5216743 5216727 -
atgcaaatcaaaaccacaat

SEQ ID NO: 50009 - DNA, 20 bp, Artificial Sequence
  Synthetic oligonucleotide; CAG chr11 5216707 5216726 5216710 -
aatgagataccatctcacac

SEQ ID NO: 50010 - DNA, 20 bp, Artificial Sequence
  Synthetic oligonucleotide; TAG chr11 5216703 5216722 5216706 -
agataccatctcacaccagt

SEQ ID NO: 50011 - DNA, 20 bp, Artificial Sequence
  Synthetic oligonucleotide; TGG chr11 5216698 5216717 5216701 -
ccatctcacaccagttagaa

SEQ ID NO: 50012 - DNA, 20 bp, Artificial Sequence
  Synthetic oligonucleotide; AAG chr11 5216684 5216703 5216687 -
ttagaatggcgatcattaaa

SEQ ID NO: 50013 - DNA, 20 bp, Artificial Sequence
  Synthetic oligonucleotide; CAG chr11 5216680 5216699 5216683 -
aatggcgatcattaaaaagt

SEQ ID NO: 50014 - DNA, 20 bp, Artificial Sequence
  Synthetic oligonucleotide; AGG chr11 5216679 5216698 5216682 -
atggcgatcattaaaaagtc

SEQ ID NO: 50015 - DNA, 20 bp, Artificial Sequence
  Synthetic oligonucleotide; CAG chr11 5216670 5216689 5216673 -
attaaaaagtcaggaaacaa

SEQ ID NO: 50016 - DNA, 20 bp, Artificial Sequence
  Synthetic oligonucleotide; AGG chr11 5216669 5216688 5216672 -
ttaaaaagtcaggaaacaac

SEQ ID NO: 50017 - DNA, 20 bp, Artificial Sequence
  Synthetic oligonucleotide; TGG chr11 5216663 5216682 5216666 -
agtcaggaaacaacaggtgc

SEQ ID NO: 50018 - DNA, 20 bp, Artificial Sequence
  Synthetic oligonucleotide; GAG chr11 5216661 5216680 5216664 -
tcaggaaacaacaggtgctg

SEQ ID NO: 50019 - DNA, 20 bp, Artificial Sequence
  Synthetic oligonucleotide; GAG chr11 5216659 5216678 5216662 -
aggaaacaacaggtgctgga

SEQ ID NO: 50020 - DNA, 20 bp, Artificial Sequence
  Synthetic oligonucleotide; AGG chr11 5216658 5216677 5216661 -
ggaaacaacaggtgctggag

SEQ ID NO: 50021 - DNA, 20 bp, Artificial Sequence
  Synthetic oligonucleotide; TGG chr11 5216652 5216671 5216655 -
aacaggtgctggagaggatg

SEQ ID NO: 50022 - DNA, 20 bp, Artificial Sequence
  Synthetic oligonucleotide; GAG chr11 5216650 5216669 5216653 -
caggtgctggagaggatgtg

SEQ ID NO: 50023 - DNA, 20 bp, Artificial Sequence
  Synthetic oligonucleotide; CAG chr11 5216644 5216663 5216647 -
ctggagaggatgtggagaaa

SEQ ID NO: 50024 - DNA, 20 bp, Artificial Sequence
  Synthetic oligonucleotide; AGG chr11 5216643 5216662 5216646 -
tggagaggatgtggagaaac

SEQ ID NO: 50025 - DNA, 20 bp, Artificial Sequence
  Synthetic oligonucleotide; TGG chr11 5216623 5216642 5216626 -
aggaacaacttttacactgt

SEQ ID NO: 50026 - DNA, 20 bp, Artificial Sequence
  Synthetic oligonucleotide; TGG chr11 5216620 5216639 5216623 -
aacaacttttacactgttgg

SEQ ID NO: 50027 - DNA, 20 bp, Artificial Sequence
  Synthetic oligonucleotide; GGG chr11 5216619 5216638 5216622 -
acaacttttacactgttggt

SEQ ID NO: 50028 - DNA, 20 bp, Artificial Sequence
  Synthetic oligonucleotide; TAG chr11 5216607 5216626 5216610 -
ctgttggtgggactgtaaac

SEQ ID NO: 50029 - DNA, 20 bp, Artificial Sequence
  Synthetic oligonucleotide; CGG chr11 5216593 5216612 5216596 -
gtaaactagttcaaccattg

SEQ ID NO: 50030 - DNA, 20 bp, Artificial Sequence
  Synthetic oligonucleotide; AAG chr11 5216590 5216609 5216593 -
aactagttcaaccattgcgg

SEQ ID NO: 50031 - DNA, 20 bp, Artificial Sequence
  Synthetic oligonucleotide; CAG chr11 5216586 5216605 5216589 -
agttcaaccattgcggaagt

SEQ ID NO: 50032 - DNA, 20 bp, Artificial Sequence
  Synthetic oligonucleotide; TGG chr11 5216581 5216600 5216584 -
aaccattgcggaagtcagtg

SEQ ID NO: 50033 - DNA, 20 bp, Artificial Sequence
  Synthetic oligonucleotide; CAG chr11 5216570 5216589 5216573 -
aagtcagtgtggcaattcct

SEQ ID NO: 50034 - DNA, 20 bp, Artificial Sequence
  Synthetic oligonucleotide; AGG chr11 5216569 5216588 5216572 -
agtcagtgtggcaattcctc

SEQ ID NO: 50035 - DNA, 20 bp, Artificial Sequence
  Synthetic oligonucleotide; TAG chr11 5216562 5216581 5216565 -
gtggcaattcctcaggaatc

SEQ ID NO: 50036 - DNA, 20 bp, Artificial Sequence
  Synthetic oligonucleotide; TAG chr11 5216556 5216575 5216559 -
attcctcaggaatctagaac

SEQ ID NO: 50037 - DNA, 20 bp, Artificial Sequence
  Synthetic oligonucleotide; CAG chr11 5216538 5216557 5216541 -
actagaaataccatttgacc

SEQ ID NO: 50038 - DNA, 20 bp, Artificial Sequence
  Synthetic oligonucleotide; TGG chr11 5216523 5216542 5216526 -
tgacccagccatcccattac

SEQ ID NO: 50039 - DNA, 20 bp, Artificial Sequence
  Synthetic oligonucleotide; GGG chr11 5216522 5216541 5216525 -
gacccagccatcccattact

SEQ ID NO: 50040 - DNA, 20 bp, Artificial Sequence
  Synthetic oligonucleotide; AAG chr11 5216509 5216528 5216512 -
cattactgggtacataccca

SEQ ID NO: 50041 - DNA, 20 bp, Artificial Sequence
  Synthetic oligonucleotide; AGG chr11 5216508 5216527 5216511 -
attactgggtacatacccaa

SEQ ID NO: 50042 - DNA, 20 bp, Artificial Sequence
  Synthetic oligonucleotide; AAG chr11 5216484 5216503 5216487 -
ttataaatcatgctgctata

SEQ ID NO: 50043 - DNA, 20 bp, Artificial Sequence
  Synthetic oligonucleotide; CAG chr11 5216457 5216476 5216460 -
atgcacacgtatgtttattg

SEQ ID NO: 50044 - DNA, 20 bp, Artificial Sequence
  Synthetic oligonucleotide; TAG chr11 5216442 5216461 5216445 -
tattgcagcactattcacaa

SEQ ID NO: 50045 - DNA, 20 bp, Artificial Sequence
  Synthetic oligonucleotide; AAG chr11 5216437 5216456 5216440 -
cagcactattcacaatagca

SEQ ID NO: 50046 - DNA, 20 bp, Artificial Sequence
  Synthetic oligonucleotide; TGG chr11 5216431 5216450 5216434 -
tattcacaatagcaaagact

SEQ ID NO: 50047 - DNA, 20 bp, Artificial Sequence
  Synthetic oligonucleotide; TAG chr11 5216403 5216422 5216406 -
acccaaatgtccaacaacga

SEQ ID NO: 50048 - DNA, 20 bp, Artificial Sequence
  Synthetic oligonucleotide; TGG chr11 5216398 5216417 5216401 -
aatgtccaacaacgatagac

SEQ ID NO: 50049 - DNA, 20 bp, Artificial Sequence
  Synthetic oligonucleotide; AAG chr11 5216392 5216411 5216395 -
caacaacgatagactggatt

SEQ ID NO: 50050 - DNA, 20 bp, Artificial Sequence
  Synthetic oligonucleotide; TGG chr11 5216383 5216402 5216386 -
tagactggattaagaaaatg

SEQ ID NO: 50051 - DNA, 20 bp, Artificial Sequence
  Synthetic oligonucleotide; TGG chr11 5216367 5216386 5216370 -
aatgtggcacatatacacca

SEQ ID NO: 50052 - DNA, 20 bp, Artificial Sequence
  Synthetic oligonucleotide; CAG chr11 5216355 5216374 5216358 -
atacaccatggaatactatg

SEQ ID NO: 50053 - DNA, 20 bp, Artificial Sequence
  Synthetic oligonucleotide; GAG chr11 5216338 5216357 5216341 -
atgcagccataaaaaatgat

SEQ ID NO: 50054 - DNA, 20 bp, Artificial Sequence
  Synthetic oligonucleotide; TAG chr11 5216322 5216341 5216325 -
tgatgagttcatgtcctttg

SEQ ID NO: 50055 - DNA, 20 bp, Artificial Sequence
  Synthetic oligonucleotide; AGG chr11 5216321 5216340 5216324 -
gatgagttcatgtcctttgt

SEQ ID NO: 50056 - DNA, 20 bp, Artificial Sequence
  Synthetic oligonucleotide; GGG chr11 5216320 5216339 5216323 -
atgagttcatgtcctttgta

SEQ ID NO: 50057 - DNA, 20 bp, Artificial Sequence
  Synthetic oligonucleotide; TGG chr11 5216314 5216333 5216317 -
tcatgtcctttgtagggaca

SEQ ID NO: 50058 - DNA, 20 bp, Artificial Sequence
  Synthetic oligonucleotide; AAG chr11 5216308 5216327 5216311 -
cctttgtagggacatggatg

SEQ ID NO: 50059 - DNA, 20 bp, Artificial Sequence
  Synthetic oligonucleotide; TGG chr11 5216304 5216323 5216307 -
tgtagggacatggatgaagc

SEQ ID NO: 50060 - DNA, 20 bp, Artificial Sequence
  Synthetic oligonucleotide; CAG chr11 5216288 5216307 5216291 -
aagctggaaactatcattct

SEQ ID NO: 50061 - DNA, 20 bp, Artificial Sequence
  Synthetic oligonucleotide; AAG chr11 5216274 5216293 5216277 -
cattctcagcaaactatcac

SEQ ID NO: 50062 - DNA, 20 bp, Artificial Sequence
  Synthetic oligonucleotide; AGG chr11 5216273 5216292 5216276 -
attctcagcaaactatcaca

SEQ ID NO: 50063 - DNA, 20 bp, Artificial Sequence
  Synthetic oligonucleotide; GAG chr11 5216271 5216290 5216274 -
tctcagcaaactatcacaag

SEQ ID NO: 50064 - DNA, 20 bp, Artificial Sequence
  Synthetic oligonucleotide; TAG chr11 5216238 5216257 5216241 -
acaccgcatgttctcactca

SEQ ID NO: 50065 - DNA, 20 bp, Artificial Sequence
  Synthetic oligonucleotide; AGG chr11 5216237 5216256 5216240 -
caccgcatgttctcactcat

SEQ ID NO: 50066 - DNA, 20 bp, Artificial Sequence
  Synthetic oligonucleotide; TGG chr11 5216234 5216253 5216237 -
cgcatgttctcactcatagg

SEQ ID NO: 50067 - DNA, 20 bp, Artificial Sequence
  Synthetic oligonucleotide; GGG chr11 5216233 5216252 5216236 -
gcatgttctcactcataggt

SEQ ID NO: 50068 - DNA, 20 bp, Artificial Sequence
  Synthetic oligonucleotide; GAG chr11 5216219 5216238 5216222 -
ataggtgggaattgaacaat

SEQ ID NO: 50069 - DNA, 20 bp, Artificial Sequence
  Synthetic oligonucleotide; TGG chr11 5216210 5216229 5216213 -
aattgaacaatgagaacaca

SEQ ID NO: 50070 - DNA, 20 bp, Artificial Sequence
  Synthetic oligonucleotide; AAG chr11 5216200 5216219 5216203 -
tgagaacacatggacacatg

SEQ ID NO: 50071 - DNA, 20 bp, Artificial Sequence
  Synthetic oligonucleotide; GAG chr11 5216198 5216217 5216201 -
agaacacatggacacatgaa

SEQ ID NO: 50072 - DNA, 20 bp, Artificial Sequence
  Synthetic oligonucleotide; AGG chr11 5216197 5216216 5216200 -
gaacacatggacacatgaag

SEQ ID NO: 50073 - DNA, 20 bp, Artificial Sequence
  Synthetic oligonucleotide; TGG chr11 5216182 5216201 5216185 -
tgaagaggaacatcacactc

SEQ ID NO: 50074 - DNA, 20 bp, Artificial Sequence
  Synthetic oligonucleotide; GGG chr11 5216181 5216200 5216184 -
gaagaggaacatcacactct

SEQ ID NO: 50075 - DNA, 20 bp, Artificial Sequence
  Synthetic oligonucleotide; GGG chr11 5216180 5216199 5216183 -
aagaggaacatcacactctg

SEQ ID NO: 50076 - DNA, 20 bp, Artificial Sequence
  Synthetic oligonucleotide; TGG chr11 5216170 5216189 5216173 -
tcacactctggggactgtta

SEQ ID NO: 50077 - DNA, 20 bp, Artificial Sequence
  Synthetic oligonucleotide; GGG chr11 5216169 5216188 5216172 -
cacactctggggactgttat

SEQ ID NO: 50078 - DNA, 20 bp, Artificial Sequence
  Synthetic oligonucleotide; GGG chr11 5216168 5216187 5216171 -
acactctggggactgttatg

SEQ ID NO: 50079 - DNA, 20 bp, Artificial Sequence
  Synthetic oligonucleotide; TGG chr11 5216165 5216184 5216168 -
ctctggggactgttatgggg

SEQ ID NO: 50080 - DNA, 20 bp, Artificial Sequence
  Synthetic oligonucleotide; GGG chr11 5216164 5216183 5216167 -
tctggggactgttatggggt

SEQ ID NO: 50081 - DNA, 20 bp, Artificial Sequence
  Synthetic oligonucleotide; GGG chr11 5216163 5216182 5216166 -
ctggggactgttatggggtg

SEQ ID NO: 50082 - DNA, 20 bp, Artificial Sequence
  Synthetic oligonucleotide; GGG chr11 5216162 5216181 5216165 -
tggggactgttatggggtgg

SEQ ID NO: 50083 - DNA, 20 bp, Artificial Sequence
  Synthetic oligonucleotide; GGG chr11 5216161 5216180 5216164 -
ggggactgttatggggtggg

SEQ ID NO: 50084 - DNA, 20 bp, Artificial Sequence
  Synthetic oligonucleotide; CAG chr11 5216158 5216177 5216161 -
gactgttatggggtgggggg

SEQ ID NO: 50085 - DNA, 20 bp, Artificial Sequence
  Synthetic oligonucleotide; AGG chr11 5216157 5216176 5216160 -
actgttatggggtggggggc

SEQ ID NO: 50086 - DNA, 20 bp, Artificial Sequence
  Synthetic oligonucleotide; GGG chr11 5216156 5216175 5216159 -
ctgttatggggtggggggca

SEQ ID NO: 50087 - DNA, 20 bp, Artificial Sequence
  Synthetic oligonucleotide; GGG chr11 5216155 5216174 5216158 -
tgttatggggtggggggcag

SEQ ID NO: 50088 - DNA, 20 bp, Artificial Sequence
  Synthetic oligonucleotide; CAG chr11 5216152 5216171 5216155 -
tatggggtggggggcagggg

SEQ ID NO: 50089 - DNA, 20 bp, Artificial Sequence
  Synthetic oligonucleotide; AGG chr11 5216151 5216170 5216154 -
atggggtggggggcaggggc

SEQ ID NO: 50090 - DNA, 20 bp, Artificial Sequence
  Synthetic oligonucleotide; GGG chr11 5216150 5216169 5216153 -
tggggtggggggcaggggca

SEQ ID NO: 50091 - DNA, 20 bp, Artificial Sequence
  Synthetic oligonucleotide; TAG chr11 5216146 5216165 5216149 -
gtggggggcaggggcaggga

SEQ ID NO: 50092 - DNA, 20 bp, Artificial Sequence
  Synthetic oligonucleotide; TAG chr11 5216140 5216159 5216143 -
ggcaggggcagggatagcac

SEQ ID NO: 50093 - DNA, 20 bp, Artificial Sequence
  Synthetic oligonucleotide; AGG chr11 5216139 5216158 5216142 -
gcaggggcagggatagcact

SEQ ID NO: 50094 - DNA, 20 bp, Artificial Sequence
  Synthetic oligonucleotide; GAG chr11 5216137 5216156 5216140 -
aggggcagggatagcactag

SEQ ID NO: 50095 - DNA, 20 bp, Artificial Sequence
  Synthetic oligonucleotide; GAG chr11 5216113 5216132 5216116 -
tatacctaatgctaaatgac

SEQ ID NO: 50096 - DNA, 20 bp, Artificial Sequence
  Synthetic oligonucleotide; TGG chr11 5216106 5216125 5216109 -
aatgctaaatgacgagttaa

SEQ ID NO: 50097 - DNA, 20 bp, Artificial Sequence
  Synthetic oligonucleotide; GGG chr11 5216105 5216124 5216108 -
atgctaaatgacgagttaat

SEQ ID NO: 50098 - DNA, 20 bp, Artificial Sequence
  Synthetic oligonucleotide; CAG chr11 5216100 5216119 5216103 -
aaatgacgagttaatgggtg

SEQ ID NO: 50099 - DNA, 20 bp, Artificial Sequence
  Synthetic oligonucleotide; TGG chr11 5216087 5216106 5216090 -
atgggtgcagcacaccaaca

SEQ ID NO: 50100 - DNA, 20 bp, Artificial Sequence
  Synthetic oligonucleotide; AAG chr11 5216028 5216047 5216031 -
cacatgtaccctaaaacttg

SEQ ID NO: 50101 - DNA, 20 bp, Artificial Sequence
  Synthetic oligonucleotide; AAG chr11 5216010 5216029 5216013 -
tgaagtataataataaaaaa

SEQ ID NO: 50102 - DNA, 20 bp, Artificial Sequence
  Synthetic oligonucleotide; TAG chr11 5215976 5215995 5215979 -
aaactgatctcacacatccg

SEQ ID NO: 50103 - DNA, 20 bp, Artificial Sequence
  Synthetic oligonucleotide; GAG chr11 5215974 5215993 5215977 -
actgatctcacacatccgta

SEQ ID NO: 50104 - DNA, 20 bp, Artificial Sequence
  Synthetic oligonucleotide; AAG chr11 5215963 5215982 5215966 -
acatccgtagagccattatc

SEQ ID NO: 50105 - DNA, 20 bp, Artificial Sequence
  Synthetic oligonucleotide; TAG chr11 5215945 5215964 5215948 -
tcaagtctttctctttgaaa

SEQ ID NO: 50106 - DNA, 20 bp, Artificial Sequence
  Synthetic oligonucleotide; CAG chr11 5215941 5215960 5215944 -
gtctttctctttgaaataga

SEQ ID NO: 50107 - DNA, 20 bp, Artificial Sequence
  Synthetic oligonucleotide; TAG chr11 5215933 5215952 5215936 -
ctttgaaatagacagaaatt

SEQ ID NO: 50108 - DNA, 20 bp, Artificial Sequence
  Synthetic oligonucleotide; CAG chr11 5215922 5215941 5215925 -
acagaaatttagtgttttct

SEQ ID NO: 50109 - DNA, 20 bp, Artificial Sequence
  Synthetic oligonucleotide; CAG chr11 5215918 5215937 5215921 -
aaatttagtgttttctcagt

SEQ ID NO: 50110 - DNA, 20 bp, Artificial Sequence
  Synthetic oligonucleotide; TAG chr11 5215899 5215918 5215902 -
tcagttaacattccttcaac

SEQ ID NO: 50111 - DNA, 20 bp, Artificial Sequence
  Synthetic oligonucleotide; TAG chr11 5215894 5215913 5215897 -
taacattccttcaactagat

SEQ ID NO: 50112 - DNA, 20 bp, Artificial Sequence
  Synthetic oligonucleotide; CAG chr11 5215877 5215896 5215880 -
gattagttgtgacaaaattt

SEQ ID NO: 50113 - DNA, 20 bp, Artificial Sequence
  Synthetic oligonucleotide; AGG chr11 5215876 5215895 5215879 -
attagttgtgacaaaatttc

SEQ ID NO: 50114 - DNA, 20 bp, Artificial Sequence
  Synthetic oligonucleotide; CAG chr11 5215854 5215873 5215857 -
gccttgctcaactctaacct

SEQ ID NO: 50115 - DNA, 20 bp, Artificial Sequence
  Synthetic oligonucleotide; GAG chr11 5215834 5215853 5215837 -
cagtctctccatatatttct

SEQ ID NO: 50116 - DNA, 20 bp, Artificial Sequence
  Synthetic oligonucleotide; GAG chr11 5215832 5215851 5215835 -
gtctctccatatatttctga

SEQ ID NO: 50117 - DNA, 20 bp, Artificial Sequence
  Synthetic oligonucleotide; AAG chr11 5215808 5215827 5215811 -
cttccttcttatttgtttat

SEQ ID NO: 50118 - DNA, 20 bp, Artificial Sequence
  Synthetic oligonucleotide; TAG chr11 5215801 5215820 5215804 -
cttatttgtttataagaatt

SEQ ID NO: 50119 - DNA, 20 bp, Artificial Sequence
  Synthetic oligonucleotide; TGG chr11 5215794 5215813 5215797 -
gtttataagaatttagtaaa

SEQ ID NO: 50120 - DNA, 20 bp, Artificial Sequence
  Synthetic oligonucleotide; GAG chr11 5215784 5215803 5215787 -
atttagtaaatggcaatatt

SEQ ID NO: 50121 - DNA, 20 bp, Artificial Sequence
  Synthetic oligonucleotide; AAG chr11 5215781 5215800 5215784 -
tagtaaatggcaatattgag

SEQ ID NO: 50122 - DNA, 20 bp, Artificial Sequence
  Synthetic oligonucleotide; TAG chr11 5215778 5215797 5215781 -
taaatggcaatattgagaag

SEQ ID NO: 50123 - DNA, 20 bp, Artificial Sequence
  Synthetic oligonucleotide; TGG chr11 5215768 5215787 5215771 -
tattgagaagtagaaaattt

SEQ ID NO: 50124 - DNA, 20 bp, Artificial Sequence
  Synthetic oligonucleotide; GAG chr11 5215766 5215785 5215769 -
ttgagaagtagaaaattttg

SEQ ID NO: 50125 - DNA, 20 bp, Artificial Sequence
  Synthetic oligonucleotide; CAG chr11 5215746 5215765 5215749 -
gagacttgtttttcatgaac

SEQ ID NO: 50126 - DNA, 20 bp, Artificial Sequence
  Synthetic oligonucleotide; AAG chr11 5215733 5215752 5215736 -
catgaaccagaacaatctca

SEQ ID NO: 50127 - DNA, 20 bp, Artificial Sequence
  Synthetic oligonucleotide; CAG chr11 5215730 5215749 5215733 -
gaaccagaacaatctcaaag

SEQ ID NO: 50128 - DNA, 20 bp, Artificial Sequence
  Synthetic oligonucleotide; CAG chr11 5215717 5215736 5215720 -
ctcaaagcagcaatactaaa

SEQ ID NO: 50129 - DNA, 20 bp, Artificial Sequence
  Synthetic oligonucleotide; AGG chr11 5215716 5215735 5215719 -
tcaaagcagcaatactaaac

SEQ ID NO: 50130 - DNA, 20 bp, Artificial Sequence
  Synthetic oligonucleotide; GAG chr11 5215714 5215733 5215717 -
aaagcagcaatactaaacag

SEQ ID NO: 50131 - DNA, 20 bp, Artificial Sequence
  Synthetic oligonucleotide; AAG chr11 5215709 5215728 5215712 -
agcaatactaaacaggagcc

SEQ ID NO: 50132 - DNA, 20 bp, Artificial Sequence
  Synthetic oligonucleotide; TAG chr11 5215704 5215723 5215707 -
tactaaacaggagccaagcc

SEQ ID NO: 50133 - DNA, 20 bp, Artificial Sequence
  Synthetic oligonucleotide; AAG chr11 5215697 5215716 5215700 -
caggagccaagcctagaata

SEQ ID NO: 50134 - DNA, 20 bp, Artificial Sequence
  Synthetic oligonucleotide; TGG chr11 5215685 5215704 5215688 -
ctagaataaagttgaatttc

SEQ ID NO: 50135 - DNA, 20 bp, Artificial Sequence
  Synthetic oligonucleotide; AAG chr11 5215675 5215694 5215678 -
gttgaatttctggaatcaac

SEQ ID NO: 50136 - DNA, 20 bp, Artificial Sequence
  Synthetic oligonucleotide; TAG chr11 5215671 5215690 5215674 -
aatttctggaatcaacaagc

SEQ ID NO: 50137 - DNA, 20 bp, Artificial Sequence
  Synthetic oligonucleotide; AGG chr11 5215670 5215689 5215673 -
atttctggaatcaacaagct

SEQ ID NO: 50138 - DNA, 20 bp, Artificial Sequence
  Synthetic oligonucleotide; GGG chr11 5215669 5215688 5215672 -
tttctggaatcaacaagcta

SEQ ID NO: 50139 - DNA, 20 bp, Artificial Sequence
  Synthetic oligonucleotide; GGG chr11 5215668 5215687 5215671 -
ttctggaatcaacaagctag

SEQ ID NO: 50140 - DNA, 20 bp, Artificial Sequence
  Synthetic oligonucleotide; AAG chr11 5215664 5215683 5215667 -
ggaatcaacaagctagggga

SEQ ID NO: 50141 - DNA, 20 bp, Artificial Sequence
  Synthetic oligonucleotide; AAG chr11 5215652 5215671 5215655 -
ctaggggaaagtctcccatt

SEQ ID NO: 50142 - DNA, 20 bp, Artificial Sequence
  Synthetic oligonucleotide; TGG chr11 5215633 5215652 5215636 -
taagtcaaatatttgacaac

SEQ ID NO: 50143 - DNA, 20 bp, Artificial Sequence
  Synthetic oligonucleotide; GGG chr11 5215632 5215651 5215635 -
aagtcaaatatttgacaact

SEQ ID NO: 50144 - DNA, 20 bp, Artificial Sequence
  Synthetic oligonucleotide; GAG chr11 5215630 5215649 5215633 -
gtcaaatatttgacaactgg

SEQ ID NO: 50145 - DNA, 20 bp, Artificial Sequence
  Synthetic oligonucleotide; AGG chr11 5215629 5215648 5215632 -
tcaaatatttgacaactggg

SEQ ID NO: 50146 - DNA, 20 bp, Artificial Sequence
  Synthetic oligonucleotide; AAG chr11 5215624 5215643 5215627 -
tatttgacaactgggaggtc

SEQ ID NO: 50147 - DNA, 20 bp, Artificial Sequence
  Synthetic oligonucleotide; CAG chr11 5215620 5215639 5215623 -
tgacaactgggaggtcaagt

SEQ ID NO: 50148 - DNA, 20 bp, Artificial Sequence
  Synthetic oligonucleotide; GAG chr11 5215618 5215637 5215621 -
acaactgggaggtcaagtca

SEQ ID NO: 50149 - DNA, 20 bp, Artificial Sequence
  Synthetic oligonucleotide; AGG chr11 5215617 5215636 5215620 -
caactgggaggtcaagtcag

SEQ ID NO: 50150 - DNA, 20 bp, Artificial Sequence
  Synthetic oligonucleotide; AAG chr11 5215601 5215620 5215604 -
tcagaggtgaaaaatgatta

SEQ ID NO: 50151 - DNA, 20 bp, Artificial Sequence
  Synthetic oligonucleotide; AAG chr11 5215593 5215612 5215596 -
gaaaaatgattaaagataac

SEQ ID NO: 50152 - DNA, 20 bp, Artificial Sequence
  Synthetic oligonucleotide; GAG chr11 5215591 5215610 5215594 -
aaaatgattaaagataacaa

SEQ ID NO: 50153 - DNA, 20 bp, Artificial Sequence
  Synthetic oligonucleotide; AGG chr11 5215590 5215609 5215593 -
aaatgattaaagataacaag

SEQ ID NO: 50154 - DNA, 20 bp, Artificial Sequence
  Synthetic oligonucleotide; AAG chr11 5215577 5215596 5215580 -
taacaagaggtctgaaaaca

SEQ ID NO: 50155 - DNA, 20 bp, Artificial Sequence
  Synthetic oligonucleotide; AAG chr11 5215557 5215576 5215560 -
aagtgaccaattaaaataaa

SEQ ID NO: 50156 - DNA, 20 bp, Artificial Sequence
  Synthetic oligonucleotide; AAG chr11 5215553 5215572 5215556 -
gaccaattaaaataaaaaga

SEQ ID NO: 50157 - DNA, 20 bp, Artificial Sequence
  Synthetic oligonucleotide; GAG chr11 5215551 5215570 5215554 -
ccaattaaaataaaaagaaa

SEQ ID NO: 50158 - DNA, 20 bp, Artificial Sequence
  Synthetic oligonucleotide; AAG chr11 5215546 5215565 5215549 -
taaaataaaaagaaagagcc

SEQ ID NO: 50159 - DNA, 20 bp, Artificial Sequence
  Synthetic oligonucleotide; TGG chr11 5215542 5215561 5215545 -
ataaaaagaaagagccaagc

SEQ ID NO: 50160 - DNA, 20 bp, Artificial Sequence
  Synthetic oligonucleotide; GGG chr11 5215541 5215560 5215544 -
taaaaagaaagagccaagct

SEQ ID NO: 50161 - DNA, 20 bp, Artificial Sequence
  Synthetic oligonucleotide; CAG chr11 5215536 5215555 5215539 -
agaaagagccaagctgggca

SEQ ID NO: 50162 - DNA, 20 bp, Artificial Sequence
  Synthetic oligonucleotide; TGG chr11 5215533 5215552 5215536 -
aagagccaagctgggcacag

SEQ ID NO: 50163 - DNA, 20 bp, Artificial Sequence
  Synthetic oligonucleotide; TAG chr11 5215520 5215539 5215523 -
ggcacagtggcttgcatctg

SEQ ID NO: 50164 - DNA, 20 bp, Artificial Sequence
  Synthetic oligonucleotide; CAG chr11 5215514 5215533 5215517 -
gtggcttgcatctgtagtcc

SEQ ID NO: 50165 - DNA, 20 bp, Artificial Sequence
  Synthetic oligonucleotide; CAG chr11 5215506 5215525 5215509 -
catctgtagtcccagtaacc

SEQ ID NO: 50166 - DNA, 20 bp, Artificial Sequence
  Synthetic oligonucleotide; AGG chr11 5215505 5215524 5215508 -
atctgtagtcccagtaaccc

SEQ ID NO: 50167 - DNA, 20 bp, Artificial Sequence
  Synthetic oligonucleotide; GAG chr11 5215503 5215522 5215506 -
ctgtagtcccagtaacccag

SEQ ID NO: 50168 - DNA, 20 bp, Artificial Sequence
  Synthetic oligonucleotide; AGG chr11 5215502 5215521 5215505 -
tgtagtcccagtaacccagg

SEQ ID NO: 50169 - DNA, 20 bp, Artificial Sequence
  Synthetic oligonucleotide; AAG chr11 5215496 5215515 5215499 -
cccagtaacccaggaggctg

SEQ ID NO: 50170 - DNA, 20 bp, Artificial Sequence
  Synthetic oligonucleotide; TAG chr11 5215490 5215509 5215493 -
aacccaggaggctgaagtga

SEQ ID NO: 50171 - DNA, 20 bp, Artificial Sequence
  Synthetic oligonucleotide; AGG chr11 5215489 5215508 5215492 -
acccaggaggctgaagtgat

SEQ ID NO: 50172 - DNA, 20 bp, Artificial Sequence
  Synthetic oligonucleotide; GAG chr11 5215479 5215498 5215482 -
ctgaagtgataggatcactt

SEQ ID NO: 50173 - DNA, 20 bp, Artificial Sequence
  Synthetic oligonucleotide; CAG chr11 5215474 5215493 5215477 -
gtgataggatcacttgagcc

SEQ ID NO: 50174 - DNA, 20 bp, Artificial Sequence
  Synthetic oligonucleotide; AGG chr11 5215473 5215492 5215476 -
tgataggatcacttgagccc

SEQ ID NO: 50175 - DNA, 20 bp, Artificial Sequence
  Synthetic oligonucleotide; CAG chr11 5215466 5215485 5215469 -
atcacttgagcccaggattt

SEQ ID NO: 50176 - DNA, 20 bp, Artificial Sequence
  Synthetic oligonucleotide; AGG chr11 5215465 5215484 5215468 -
tcacttgagcccaggatttc

SEQ ID NO: 50177 - DNA, 20 bp, Artificial Sequence
  Synthetic oligonucleotide; GGG chr11 5215464 5215483 5215467 -
cacttgagcccaggatttca

SEQ ID NO: 50178 - DNA, 20 bp, Artificial Sequence
  Synthetic oligonucleotide; CAG chr11 5215458 5215477 5215461 -
agcccaggatttcagggttg

SEQ ID NO: 50179 - DNA, 20 bp, Artificial Sequence
  Synthetic oligonucleotide; GAG chr11 5215454 5215473 5215457 -
caggatttcagggttgcagt

SEQ ID NO: 50180 - DNA, 20 bp, Artificial Sequence
  Synthetic oligonucleotide; TAG chr11 5215429 5215448 5215432 -
ataatgacaccactgctctc

SEQ ID NO: 50181 - DNA, 20 bp, Artificial Sequence
  Synthetic oligonucleotide; TGG chr11 5215423 5215442 5215426 -
acaccactgctctctagcct

SEQ ID NO: 50182 - DNA, 20 bp, Artificial Sequence
  Synthetic oligonucleotide; GAG chr11 5215415 5215434 5215418 -
gctctctagccttggtgact

SEQ ID NO: 50183 - DNA, 20 bp, Artificial Sequence
  Synthetic oligonucleotide; GAG chr11 5215401 5215420 5215404 -
gtgactgagatcctgtctct

SEQ ID NO: 50184 - DNA, 20 bp, Artificial Sequence
  Synthetic oligonucleotide; AGG chr11 5215400 5215419 5215403 -
tgactgagatcctgtctctg

SEQ ID NO: 50185 - DNA, 20 bp, Artificial Sequence
  Synthetic oligonucleotide; AAG chr11 5215383 5215402 5215386 -
ctgaggaaaaacaaacaaac

SEQ ID NO: 50186 - DNA, 20 bp, Artificial Sequence
  Synthetic oligonucleotide; CAG chr11 5215357 5215376 5215360 -
aaaacaaacaaacaaacaca

SEQ ID NO: 50187 - DNA, 20 bp, Artificial Sequence
  Synthetic oligonucleotide; AAG chr11 5215349 5215368 5215352 -
caaacaaacacacagatatt

SEQ ID NO: 50188 - DNA, 20 bp, Artificial Sequence
  Synthetic oligonucleotide; TAG chr11 5215342 5215361 5215345 -
acacacagatattaagaaca

SEQ ID NO: 50189 - DNA, 20 bp, Artificial Sequence
  Synthetic oligonucleotide; AAG chr11 5215339 5215358 5215342 -
cacagatattaagaacatag

SEQ ID NO: 50190 - DNA, 20 bp, Artificial Sequence
  Synthetic oligonucleotide; CGG chr11 5215328 5215347 5215331 -
agaacatagaagttttgtta

SEQ ID NO: 50191 - DNA, 20 bp, Artificial Sequence
  Synthetic oligonucleotide; CAG chr11 5215307 5215326 5215310 -
ggtgatgatattctccaaca

SEQ ID NO: 50192 - DNA, 20 bp, Artificial Sequence
  Synthetic oligonucleotide; AGG chr11 5215306 5215325 5215309 -
gtgatgatattctccaacac

SEQ ID NO: 50193 - DNA, 20 bp, Artificial Sequence
  Synthetic oligonucleotide; CAG chr11 5215290 5215309 5215293 -
acacaggtctgaaccccttg

SEQ ID NO: 50194 - DNA, 20 bp, Artificial Sequence
  Synthetic oligonucleotide; CGG chr11 5215282 5215301 5215285 -
ctgaaccccttgcagtgcct

SEQ ID NO: 50195 - DNA, 20 bp, Artificial Sequence
  Synthetic oligonucleotide; GGG chr11 5215281 5215300 5215284 -
tgaaccccttgcagtgcctc

SEQ ID NO: 50196 - DNA, 20 bp, Artificial Sequence
  Synthetic oligonucleotide; GGG chr11 5215280 5215299 5215283 -
gaaccccttgcagtgcctcg

SEQ ID NO: 50197 - DNA, 20 bp, Artificial Sequence
  Synthetic oligonucleotide; CAG chr11 5215268 5215287 5215271 -
gtgcctcggggctgtttctc

SEQ ID NO: 50198 - DNA, 20 bp, Artificial Sequence
  Synthetic oligonucleotide; TGG chr11 5215265 5215284 5215268 -
cctcggggctgtttctccag

SEQ ID NO: 50199 - DNA, 20 bp, Artificial Sequence
  Synthetic oligonucleotide; TGG chr11 5215257 5215276 5215260 -
ctgtttctccagtggattct

SEQ ID NO: 50200 - DNA, 20 bp, Artificial Sequence
  Synthetic oligonucleotide; GGG chr11 5215256 5215275 5215259 -
tgtttctccagtggattctt

SEQ ID NO: 50201 - DNA, 20 bp, Artificial Sequence
  Synthetic oligonucleotide; AAG chr11 5215226 5215245 5215229 -
catcttctcaactttgtgaa

SEQ ID NO: 50202 - DNA, 20 bp, Artificial Sequence
  Synthetic oligonucleotide; AAG chr11 5215212 5215231 5215215 -
tgtgaaaagatattcatcca

SEQ ID NO: 50203 - DNA, 20 bp, Artificial Sequence
  Synthetic oligonucleotide; AGG chr11 5215211 5215230 5215214 -
gtgaaaagatattcatccaa

SEQ ID NO: 50204 - DNA, 20 bp, Artificial Sequence
  Synthetic oligonucleotide; CAG chr11 5215192 5215211 5215195 -
aaggtctcacctgtcttatt

SEQ ID NO: 50205 - DNA, 20 bp, Artificial Sequence
  Synthetic oligonucleotide; GAG chr11 5215190 5215209 5215193 -
ggtctcacctgtcttattca

SEQ ID NO: 50206 - DNA, 20 bp, Artificial Sequence
  Synthetic oligonucleotide; TGG chr11 5215185 5215204 5215188 -
cacctgtcttattcagagct

SEQ ID NO: 50207 - DNA, 20 bp, Artificial Sequence
  Synthetic oligonucleotide; TGG chr11 5215178 5215197 5215181 -
cttattcagagcttggattt

SEQ ID NO: 50208 - DNA, 20 bp, Artificial Sequence
  Synthetic oligonucleotide; TAG chr11 5215173 5215192 5215176 -
tcagagcttggattttggac

SEQ ID NO: 50209 - DNA, 20 bp, Artificial Sequence
  Synthetic oligonucleotide; TGG chr11 5215156 5215175 5215159 -
gactagctttttctatttct

SEQ ID NO: 50210 - DNA, 20 bp, Artificial Sequence
  Synthetic oligonucleotide; GGG chr11 5215155 5215174 5215158 -
actagctttttctatttctt

SEQ ID NO: 50211 - DNA, 20 bp, Artificial Sequence
  Synthetic oligonucleotide; TAG chr11 5215146 5215165 5215149 -
ttctatttcttgggattctc

SEQ ID NO: 50212 - DNA, 20 bp, Artificial Sequence
  Synthetic oligonucleotide; GAG chr11 5215144 5215163 5215147 -
ctatttcttgggattctcta

SEQ ID NO: 50213 - DNA, 20 bp, Artificial Sequence
  Synthetic oligonucleotide; CAG chr11 5215132 5215151 5215135 -
attctctagagccatatatt

SEQ ID NO: 50214 - DNA, 20 bp, Artificial Sequence
  Synthetic oligonucleotide; CAG chr11 5215121 5215140 5215124 -
ccatatattcagatataaca

SEQ ID NO: 50215 - DNA, 20 bp, Artificial Sequence
  Synthetic oligonucleotide; AAG chr11 5215108 5215127 5215111 -
tataacacagatataaccaa

SEQ ID NO: 50216 - DNA, 20 bp, Artificial Sequence
  Synthetic oligonucleotide; AAG chr11 5215105 5215124 5215108 -
aacacagatataaccaaaag

SEQ ID NO: 50217 - DNA, 20 bp, Artificial Sequence
  Synthetic oligonucleotide; AAG chr11 5215100 5215119 5215103 -
agatataaccaaaagaagca

SEQ ID NO: 50218 - DNA, 20 bp, Artificial Sequence
  Synthetic oligonucleotide; AGG chr11 5215099 5215118 5215102 -
gatataaccaaaagaagcaa

SEQ ID NO: 50219 - DNA, 20 bp, Artificial Sequence
  Synthetic oligonucleotide; GAG chr11 5215097 5215116 5215100 -
tataaccaaaagaagcaaag

SEQ ID NO: 50220 - DNA, 20 bp, Artificial Sequence
  Synthetic oligonucleotide; AGG chr11 5215096 5215115 5215099 -
ataaccaaaagaagcaaagg

SEQ ID NO: 50221 - DNA, 20 bp, Artificial Sequence
  Synthetic oligonucleotide; CAG chr11 5215088 5215107 5215091 -
aagaagcaaaggaggcatca

SEQ ID NO: 50222 - DNA, 20 bp, Artificial Sequence
  Synthetic oligonucleotide; AAG chr11 5215085 5215104 5215088 -
aagcaaaggaggcatcacag

SEQ ID NO: 50223 - DNA, 20 bp, Artificial Sequence
  Synthetic oligonucleotide; AGG chr11 5215084 5215103 5215087 -
agcaaaggaggcatcacaga

SEQ ID NO: 50224 - DNA, 20 bp, Artificial Sequence
  Synthetic oligonucleotide; GGG chr11 5215083 5215102 5215086 -
gcaaaggaggcatcacagaa

SEQ ID NO: 50225 - DNA, 20 bp, Artificial Sequence
  Synthetic oligonucleotide; GGG chr11 5215082 5215101 5215085 -
caaaggaggcatcacagaag

SEQ ID NO: 50226 - DNA, 20 bp, Artificial Sequence
  Synthetic oligonucleotide; TGG chr11 5215069 5215088 5215072 -
acagaaggggctttgtattc

SEQ ID NO: 50227 - DNA, 20 bp, Artificial Sequence
  Synthetic oligonucleotide; GGG chr11 5215068 5215087 5215071 -
cagaaggggctttgtattct

SEQ ID NO: 50228 - DNA, 20 bp, Artificial Sequence
  Synthetic oligonucleotide; GGG chr11 5215067 5215086 5215070 -
agaaggggctttgtattctg

SEQ ID NO: 50229 - DNA, 20 bp, Artificial Sequence
  Synthetic oligonucleotide; GAG chr11 5215065 5215084 5215068 -
aaggggctttgtattctggg

SEQ ID NO: 50230 - DNA, 20 bp, Artificial Sequence
  Synthetic oligonucleotide; AGG chr11 5215064 5215083 5215067 -
aggggctttgtattctgggg

SEQ ID NO: 50231 - DNA, 20 bp, Artificial Sequence
  Synthetic oligonucleotide; GGG chr11 5215063 5215082 5215066 -
ggggctttgtattctgggga

SEQ ID NO: 50232 - DNA, 20 bp, Artificial Sequence
  Synthetic oligonucleotide; GGG chr11 5215062 5215081 5215065 -
gggctttgtattctggggag

SEQ ID NO: 50233 - DNA, 20 bp, Artificial Sequence
  Synthetic oligonucleotide; GGG chr11 5215061 5215080 5215064 -
ggctttgtattctggggagg

SEQ ID NO: 50234 - DNA, 20 bp, Artificial Sequence
  Synthetic oligonucleotide; TAG chr11 5215055 5215074 5215058 -
gtattctggggagggggaca

SEQ ID NO: 50235 - DNA, 20 bp, Artificial Sequence
  Synthetic oligonucleotide; GAG chr11 5215053 5215072 5215056 -
attctggggagggggacata

SEQ ID NO: 50236 - DNA, 20 bp, Artificial Sequence
  Synthetic oligonucleotide; GAG chr11 5215048 5215067 5215051 -
ggggagggggacatagagtt

SEQ ID NO: 50237 - DNA, 20 bp, Artificial Sequence
  Synthetic oligonucleotide; GAG chr11 5215046 5215065 5215049 -
ggagggggacatagagttga

SEQ ID NO: 50238 - DNA, 20 bp, Artificial Sequence
  Synthetic oligonucleotide; CAG chr11 5215038 5215057 5215041 -
acatagagttgagagaaata

SEQ ID NO: 50239 - DNA, 20 bp, Artificial Sequence
  Synthetic oligonucleotide; AGG chr11 5215037 5215056 5215040 -
catagagttgagagaaatac

SEQ ID NO: 50240 - DNA, 20 bp, Artificial Sequence
  Synthetic oligonucleotide; TAG chr11 5215028 5215047 5215031 -
gagagaaatacaggaattta

SEQ ID NO: 50241 - DNA, 20 bp, Artificial Sequence
  Synthetic oligonucleotide; AGG chr11 5215027 5215046 5215030 -
agagaaatacaggaatttat

SEQ ID NO: 50242 - DNA, 20 bp, Artificial Sequence
  Synthetic oligonucleotide; AAG chr11 5215014 5215033 5215017 -
aatttataggactctactca

SEQ ID NO: 50243 - DNA, 20 bp, Artificial Sequence
  Synthetic oligonucleotide; GAG chr11 5215012 5215031 5215015 -
tttataggactctactcaaa

SEQ ID NO: 50244 - DNA, 20 bp, Artificial Sequence
  Synthetic oligonucleotide; AAG chr11 5214999 5215018 5215002 -
actcaaagagccctcaaata

SEQ ID NO: 50245 - DNA, 20 bp, Artificial Sequence
  Synthetic oligonucleotide; CGG chr11 5214994 5215013 5214997 -
aagagccctcaaataaagta

SEQ ID NO: 50246 - DNA, 20 bp, Artificial Sequence
  Synthetic oligonucleotide; TAG chr11 5214990 5215009 5214993 -
gccctcaaataaagtacggc

SEQ ID NO: 50247 - DNA, 20 bp, Artificial Sequence
  Synthetic oligonucleotide; AAG chr11 5214975 5214994 5214978 -
acggctagtcttctttgcct

SEQ ID NO: 50248 - DNA, 20 bp, Artificial Sequence
  Synthetic oligonucleotide; GAG chr11 5214967 5214986 5214970 -
tcttctttgcctaagacaat

SEQ ID NO: 50249 - DNA, 20 bp, Artificial Sequence
  Synthetic oligonucleotide; CAG chr11 5214964 5214983 5214967 -
tctttgcctaagacaatgag

SEQ ID NO: 50250 - DNA, 20 bp, Artificial Sequence
  Synthetic oligonucleotide; CAG chr11 5214959 5214978 5214962 -
gcctaagacaatgagcagtc

SEQ ID NO: 50251 - DNA, 20 bp, Artificial Sequence
  Synthetic oligonucleotide; AGG chr11 5214958 5214977 5214961 -
cctaagacaatgagcagtcc

SEQ ID NO: 50252 - DNA, 20 bp, Artificial Sequence
  Synthetic oligonucleotide; AAG chr11 5214955 5214974 5214958 -
aagacaatgagcagtccagg

SEQ ID NO: 50253 - DNA, 20 bp, Artificial Sequence
  Synthetic oligonucleotide; TAG chr11 5214938 5214957 5214941 -
aggaagttatccatttcttt

SEQ ID NO: 50254 - DNA, 20 bp, Artificial Sequence
  Synthetic oligonucleotide; TAG chr11 5214929 5214948 5214932 -
tccatttcttttagattttc

SEQ ID NO: 50255 - DNA, 20 bp, Artificial Sequence
  Synthetic oligonucleotide; TAG chr11 5214916 5214935 5214919 -
gattttctagtttatgtaca

SEQ ID NO: 50256 - DNA, 20 bp, Artificial Sequence
  Synthetic oligonucleotide; GAG chr11 5214914 5214933 5214917 -
ttttctagtttatgtacata

SEQ ID NO: 50257 - DNA, 20 bp, Artificial Sequence
  Synthetic oligonucleotide; TAG chr11 5214904 5214923 5214907 -
tatgtacatagagatgttca

SEQ ID NO: 50258 - DNA, 20 bp, Artificial Sequence
  Synthetic oligonucleotide; TAG chr11 5214901 5214920 5214904 -
gtacatagagatgttcatag

SEQ ID NO: 50259 - DNA, 20 bp, Artificial Sequence
  Synthetic oligonucleotide; TGG chr11 5214873 5214892 5214876 -
gatgattatttgtatttctg

SEQ ID NO: 50260 - DNA, 20 bp, Artificial Sequence
  Synthetic oligonucleotide; GGG chr11 5214872 5214891 5214875 -
atgattatttgtatttctgt

SEQ ID NO: 50261 - DNA, 20 bp, Artificial Sequence
  Synthetic oligonucleotide; GGG chr11 5214871 5214890 5214874 -
tgattatttgtatttctgtg

SEQ ID NO: 50262 - DNA, 20 bp, Artificial Sequence
  Synthetic oligonucleotide; GAG chr11 5214867 5214886 5214870 -
tatttgtatttctgtggggt

SEQ ID NO: 50263 - DNA, 20 bp, Artificial Sequence
  Synthetic oligonucleotide; TGG chr11 5214826 5214845 5214829 -
catttctaactgtgcttatt

SEQ ID NO: 50264 - DNA, 20 bp, Artificial Sequence
  Synthetic oligonucleotide; TAG chr11 5214800 5214819 5214803 -
ttctctcttgtcttctttat

SEQ ID NO: 50265 - DNA, 20 bp, Artificial Sequence
  Synthetic oligonucleotide; TAG chr11 5214795 5214814 5214798 -
tcttgtcttctttattagtc

SEQ ID NO: 50266 - DNA, 20 bp, Artificial Sequence
  Synthetic oligonucleotide; TAG chr11 5214791 5214810 5214794 -
gtcttctttattagtctagc

SEQ ID NO: 50267 - DNA, 20 bp, Artificial Sequence
  Synthetic oligonucleotide; CAG chr11 5214758 5214777 5214761 -
tattaattttttcacaaaac

SEQ ID NO: 50268 - DNA, 20 bp, Artificial Sequence
  Synthetic oligonucleotide; TGG chr11 5214751 5214770 5214754 -
tttttcacaaaaccagctct

SEQ ID NO: 50269 - DNA, 20 bp, Artificial Sequence
  Synthetic oligonucleotide; TGG chr11 5214730 5214749 5214733 -
ggactcattaatcttttgaa

SEQ ID NO: 50270 - DNA, 20 bp, Artificial Sequence
  Synthetic oligonucleotide; CAG chr11 5214705 5214724 5214708 -
ttttgtgttttaatatcctt

SEQ ID NO: 50271 - DNA, 20 bp, Artificial Sequence
  Synthetic oligonucleotide; TAG chr11 5214701 5214720 5214704 -
gtgttttaatatccttcagt

SEQ ID NO: 50272 - DNA, 20 bp, Artificial Sequence
  Synthetic oligonucleotide; TAG chr11 5214668 5214687 5214671 -
gtttatttcttgtcttctgc

SEQ ID NO: 50273 - DNA, 20 bp, Artificial Sequence
  Synthetic oligonucleotide; TAG chr11 5214662 5214681 5214665 -
ttcttgtcttctgctagatt

SEQ ID NO: 50274 - DNA, 20 bp, Artificial Sequence
  Synthetic oligonucleotide; AGG chr11 5214661 5214680 5214664 -
tcttgtcttctgctagattt

SEQ ID NO: 50275 - DNA, 20 bp, Artificial Sequence
  Synthetic oligonucleotide; GGG chr11 5214660 5214679 5214663 -
cttgtcttctgctagattta

SEQ ID NO: 50276 - DNA, 20 bp, Artificial Sequence
  Synthetic oligonucleotide; TGG chr11 5214656 5214675 5214659 -
tcttctgctagatttagggt

SEQ ID NO: 50277 - DNA, 20 bp, Artificial Sequence
  Synthetic oligonucleotide; TGG chr11 5214645 5214664 5214648 -
atttagggttggtttgctct

SEQ ID NO: 50278 - DNA, 20 bp, Artificial Sequence
  Synthetic oligonucleotide; TGG chr11 5214637 5214656 5214640 -
ttggtttgctcttggttctc

SEQ ID NO: 50279 - DNA, 20 bp, Artificial Sequence
  Synthetic oligonucleotide; TAG chr11 5214628 5214647 5214631 -
tcttggttctctggttcttt

SEQ ID NO: 50280 - DNA, 20 bp, Artificial Sequence
  Synthetic oligonucleotide; TAG chr11 5214616 5214635 5214619 -
ggttcttttagttgtgacat

SEQ ID NO: 50281 - DNA, 20 bp, Artificial Sequence
  Synthetic oligonucleotide; AGG chr11 5214615 5214634 5214618 -
gttcttttagttgtgacatt

SEQ ID NO: 50282 - DNA, 20 bp, Artificial Sequence
  Synthetic oligonucleotide; GAG chr11 5214602 5214621 5214605 -
tgacattaggttgttaattt

SEQ ID NO: 50283 - DNA, 20 bp, Artificial Sequence
  Synthetic oligonucleotide; AGG chr11 5214601 5214620 5214604 -
gacattaggttgttaatttg

SEQ ID NO: 50284 - DNA, 20 bp, Artificial Sequence
  Synthetic oligonucleotide; GGG chr11 5214600 5214619 5214603 -
acattaggttgttaatttga

SEQ ID NO: 50285 - DNA, 20 bp, Artificial Sequence
  Synthetic oligonucleotide; AAG chr11 5214593 5214612 5214596 -
gttgttaatttgagggcttt

SEQ ID NO: 50286 - DNA, 20 bp, Artificial Sequence
  Synthetic oligonucleotide; TGG chr11 5214579 5214598 5214582 -
ggctttaagactttttgatg

SEQ ID NO: 50287 - DNA, 20 bp, Artificial Sequence
  Synthetic oligonucleotide; GGG chr11 5214578 5214597 5214581 -
gctttaagactttttgatgt

SEQ ID NO: 50288 - DNA, 20 bp, Artificial Sequence
  Synthetic oligonucleotide; TAG chr11 5214571 5214590 5214574 -
gactttttgatgtgggcatt

SEQ ID NO: 50289 - DNA, 20 bp, Artificial Sequence
  Synthetic oligonucleotide; AAG chr11 5214540 5214559 5214543 -
tttctctcttaacactgtct

SEQ ID NO: 50290 - DNA, 20 bp, Artificial Sequence
  Synthetic oligonucleotide; CAG chr11 5214529 5214548 5214532 -
acactgtctaagctgtgtcc

SEQ ID NO: 50291 - DNA, 20 bp, Artificial Sequence
  Synthetic oligonucleotide; GAG chr11 5214527 5214546 5214530 -
actgtctaagctgtgtccca

SEQ ID NO: 50292 - DNA, 20 bp, Artificial Sequence
  Synthetic oligonucleotide; CGG chr11 5214520 5214539 5214523 -
aagctgtgtcccagagattc

SEQ ID NO: 50293 - DNA, 20 bp, Artificial Sequence
  Synthetic oligonucleotide; TAG chr11 5214495 5214514 5214498 -
tattgtatctttgttctcat

SEQ ID NO: 50294 - DNA, 20 bp, Artificial Sequence
  Synthetic oligonucleotide; AAG chr11 5214487 5214506 5214490 -
ctttgttctcattagtttca

SEQ ID NO: 50295 - DNA, 20 bp, Artificial Sequence
  Synthetic oligonucleotide; TAG chr11 5214465 5214484 5214468 -
gaactattttatttttgcct

SEQ ID NO: 50296 - DNA, 20 bp, Artificial Sequence
  Synthetic oligonucleotide; CAG chr11 5214436 5214455 5214439 -
ttatttacccaaaattcatt

SEQ ID NO: 50297 - DNA, 20 bp, Artificial Sequence
  Synthetic oligonucleotide; AGG chr11 5214435 5214454 5214438 -
tatttacccaaaattcattc

SEQ ID NO: 50298 - DNA, 20 bp, Artificial Sequence
  Synthetic oligonucleotide; GAG chr11 5214433 5214452 5214436 -
tttacccaaaattcattcag

SEQ ID NO: 50299 - DNA, 20 bp, Artificial Sequence
  Synthetic oligonucleotide; CAG chr11 5214430 5214449 5214433 -
acccaaaattcattcaggag

SEQ ID NO: 50300 - DNA, 20 bp, Artificial Sequence
  Synthetic oligonucleotide; AGG chr11 5214429 5214448 5214432 -
cccaaaattcattcaggagc

SEQ ID NO: 50301 - DNA, 20 bp, Artificial Sequence
  Synthetic oligonucleotide; TAG chr11 5214402 5214421 5214405 -
ttaatttccatgtaattgca

SEQ ID NO: 50302 - DNA, 20 bp, Artificial Sequence
  Synthetic oligonucleotide; CAG chr11 5214395 5214414 5214398 -
ccatgtaattgcatagtttt

SEQ ID NO: 50303 - DNA, 20 bp, Artificial Sequence
  Synthetic oligonucleotide; TAG chr11 5214384 5214403 5214387 -
catagttttcagctattcat

SEQ ID NO: 50304 - DNA, 20 bp, Artificial Sequence
  Synthetic oligonucleotide; TGG chr11 5214355 5214374 5214358 -
aatctatttttattcctctg

SEQ ID NO: 50305 - DNA, 20 bp, Artificial Sequence
  Synthetic oligonucleotide; GAG chr11 5214349 5214368 5214352 -
tttttattcctctgtggtct

SEQ ID NO: 50306 - DNA, 20 bp, Artificial Sequence
  Synthetic oligonucleotide; GAG chr11 5214347 5214366 5214350 -
tttattcctctgtggtctga

SEQ ID NO: 50307 - DNA, 20 bp, Artificial Sequence
  Synthetic oligonucleotide; GAG chr11 5214313 5214332 5214316 -
attttttttttgcatttgct

SEQ ID NO: 50308 - DNA, 20 bp, Artificial Sequence
  Synthetic oligonucleotide; AGG chr11 5214312 5214331 5214315 -
ttttttttttgcatttgctg

SEQ ID NO: 50309 - DNA, 20 bp, Artificial Sequence
  Synthetic oligonucleotide; TAG chr11 5214302 5214321 5214305 -
gcatttgctgaggattgttt

SEQ ID NO: 50310 - DNA, 20 bp, Artificial Sequence
  Synthetic oligonucleotide; AGG chr11 5214301 5214320 5214304 -
catttgctgaggattgtttt

SEQ ID NO: 50311 - DNA, 20 bp, Artificial Sequence
  Synthetic oligonucleotide; AAG chr11 5214291 5214310 5214294 -
ggattgttttaggtcctccc

SEQ ID NO: 50312 - DNA, 20 bp, Artificial Sequence
  Synthetic oligonucleotide; AGG chr11 5214290 5214309 5214293 -
gattgttttaggtcctccca

SEQ ID NO: 50313 - DNA, 20 bp, Artificial Sequence
  Synthetic oligonucleotide; CAG chr11 5214281 5214300 5214284 -
aggtcctcccaaggctgaac

SEQ ID NO: 50314 - DNA, 20 bp, Artificial Sequence
  Synthetic oligonucleotide; AGG chr11 5214280 5214299 5214283 -
ggtcctcccaaggctgaacc

SEQ ID NO: 50315 - DNA, 20 bp, Artificial Sequence
  Synthetic oligonucleotide; AAG chr11 5214277 5214296 5214280 -
cctcccaaggctgaaccagg

SEQ ID NO: 50316 - DNA, 20 bp, Artificial Sequence
  Synthetic oligonucleotide; AAG chr11 5214260 5214279 5214263 -
aggaagaaatcaatttcctg

SEQ ID NO: 50317 - DNA, 20 bp, Artificial Sequence
  Synthetic oligonucleotide; GAG chr11 5214258 5214277 5214261 -
gaagaaatcaatttcctgaa

SEQ ID NO: 50318 - DNA, 20 bp, Artificial Sequence
  Synthetic oligonucleotide; GAG chr11 5214246 5214265 5214249 -
ttcctgaagagatccatgat

SEQ ID NO: 50319 - DNA, 20 bp, Artificial Sequence
  Synthetic oligonucleotide; CAG chr11 5214229 5214248 5214232 -
gatgagctctgaaaatgatt

SEQ ID NO: 50320 - DNA, 20 bp, Artificial Sequence
  Synthetic oligonucleotide; TAG chr11 5214219 5214238 5214222 -
gaaaatgattcagtaataaa

SEQ ID NO: 50321 - DNA, 20 bp, Artificial Sequence
  Synthetic oligonucleotide; AAG chr11 5214201 5214220 5214204 -
aatagcctatcaaacaaaaa

SEQ ID NO: 50322 - DNA, 20 bp, Artificial Sequence
  Synthetic oligonucleotide; TGG chr11 5214195 5214214 5214198 -
ctatcaaacaaaaaaagccc

SEQ ID NO: 50323 - DNA, 20 bp, Artificial Sequence
  Synthetic oligonucleotide; CAG chr11 5214165 5214184 5214168 -
gattcacaaccaaattctat

SEQ ID NO: 50324 - DNA, 20 bp, Artificial Sequence
  Synthetic oligonucleotide; AAG chr11 5214155 5214174 5214158 -
caaattctatcagatgcaca

SEQ ID NO: 50325 - DNA, 20 bp, Artificial Sequence
  Synthetic oligonucleotide; AAG chr11 5214152 5214171 5214155 -
attctatcagatgcacaaag

SEQ ID NO: 50326 - DNA, 20 bp, Artificial Sequence
  Synthetic oligonucleotide; GAG chr11 5214150 5214169 5214153 -
tctatcagatgcacaaagaa

SEQ ID NO: 50327 - DNA, 20 bp, Artificial Sequence
  Synthetic oligonucleotide; TGG chr11 5214146 5214165 5214149 -
tcagatgcacaaagaagagt

SEQ ID NO: 50328 - DNA, 20 bp, Artificial Sequence
  Synthetic oligonucleotide; AAG chr11 5214129 5214148 5214132 -
agttggaaaaattcctactg

SEQ ID NO: 50329 - DNA, 20 bp, Artificial Sequence
  Synthetic oligonucleotide; GAG chr11 5214111 5214130 5214114 -
tgaagctactccaaaaaatt

SEQ ID NO: 50330 - DNA, 20 bp, Artificial Sequence
  Synthetic oligonucleotide; AGG chr11 5214110 5214129 5214113 -
gaagctactccaaaaaattg

SEQ ID NO: 50331 - DNA, 20 bp, Artificial Sequence
  Synthetic oligonucleotide; GGG chr11 5214109 5214128 5214112 -
aagctactccaaaaaattga

SEQ ID NO: 50332 - DNA, 20 bp, Artificial Sequence
  Synthetic oligonucleotide; GGG chr11 5214108 5214127 5214111 -
agctactccaaaaaattgag

SEQ ID NO: 50333 - DNA, 20 bp, Artificial Sequence
  Synthetic oligonucleotide; GGG chr11 5214107 5214126 5214110 -
gctactccaaaaaattgagg

SEQ ID NO: 50334 - DNA, 20 bp, Artificial Sequence
  Synthetic oligonucleotide; GAG chr11 5214105 5214124 5214108 -
tactccaaaaaattgagggg

SEQ ID NO: 50335 - DNA, 20 bp, Artificial Sequence
  Synthetic oligonucleotide; AGG chr11 5214104 5214123 5214107 -
actccaaaaaattgaggggg

SEQ ID NO: 50336 - DNA, 20 bp, Artificial Sequence
  Synthetic oligonucleotide; GGG chr11 5214103 5214122 5214106 -
ctccaaaaaattgaggggga

SEQ ID NO: 50337 - DNA, 20 bp, Artificial Sequence
  Synthetic oligonucleotide; CAG chr11 5214091 5214110 5214094 -
gagggggagggattcaacct

SEQ ID NO: 50338 - DNA, 20 bp, Artificial Sequence
  Synthetic oligonucleotide; GAG chr11 5214078 5214097 5214081 -
tcaacctcagctcattttat

SEQ ID NO: 50339 - DNA, 20 bp, Artificial Sequence
  Synthetic oligonucleotide; AGG chr11 5214077 5214096 5214080 -
caacctcagctcattttatg

SEQ ID NO: 50340 - DNA, 20 bp, Artificial Sequence
  Synthetic oligonucleotide; CAG chr11 5214073 5214092 5214076 -
ctcagctcattttatgaggc

SEQ ID NO: 50341 - DNA, 20 bp, Artificial Sequence
  Synthetic oligonucleotide; TAG chr11 5214046 5214065 5214049 -
atcctgataccaaaacctga

SEQ ID NO: 50342 - DNA, 20 bp, Artificial Sequence
  Synthetic oligonucleotide; AAG chr11 5214026 5214045 5214029 -
tagacacacaacaacaaaaa

SEQ ID NO: 50343 - DNA, 20 bp, Artificial Sequence
  Synthetic oligonucleotide; CAG chr11 5214016 5214035 5214019 -
acaacaaaaaaagaaaactt

SEQ ID NO: 50344 - DNA, 20 bp, Artificial Sequence
  Synthetic oligonucleotide; AGG chr11 5214015 5214034 5214018 -
caacaaaaaaagaaaacttc

SEQ ID NO: 50345 - DNA, 20 bp, Artificial Sequence
  Synthetic oligonucleotide; TAG chr11 5213981 5214000 5213984 -
gaacattgatgcaaaaatac

SEQ ID NO: 50346 - DNA, 20 bp, Artificial Sequence
  Synthetic oligonucleotide; AAG chr11 5213977 5213996 5213980 -
attgatgcaaaaatactagc

SEQ ID NO: 50347 - DNA, 20 bp, Artificial Sequence
  Synthetic oligonucleotide; CAG chr11 5213967 5213986 5213970 -
aaatactagcaagccaaatc

SEQ ID NO: 50348 - DNA, 20 bp, Artificial Sequence
  Synthetic oligonucleotide; AAG chr11 5213952 5213971 5213955 -
aaatccagcaacacatcaca

SEQ ID NO: 50349 - DNA, 20 bp, Artificial Sequence
  Synthetic oligonucleotide; AAG chr11 5213933 5213952 5213936 -
aaagctaatccacctcaatc

SEQ ID NO: 50350 - DNA, 20 bp, Artificial Sequence
  Synthetic oligonucleotide; TAG chr11 5213930 5213949 5213933 -
gctaatccacctcaatcaag

SEQ ID NO: 50351 - DNA, 20 bp, Artificial Sequence
  Synthetic oligonucleotide; AGG chr11 5213929 5213948 5213932 -
ctaatccacctcaatcaagt

SEQ ID NO: 50352 - DNA, 20 bp, Artificial Sequence
  Synthetic oligonucleotide; GAG chr11 5213916 5213935 5213919 -
atcaagtaggctttatccct

SEQ ID NO: 50353 - DNA, 20 bp, Artificial Sequence
  Synthetic oligonucleotide; AAG chr11 5213913 5213932 5213916 -
aagtaggctttatccctgag

SEQ ID NO: 50354 - DNA, 20 bp, Artificial Sequence
  Synthetic oligonucleotide; AAG chr11 5213909 5213928 5213912 -
aggctttatccctgagaagc

SEQ ID NO: 50355 - DNA, 20 bp, Artificial Sequence
  Synthetic oligonucleotide; TGG chr11 5213904 5213923 5213907 -
ttatccctgagaagcaagat

SEQ ID NO: 50356 - DNA, 20 bp, Artificial Sequence
  Synthetic oligonucleotide; CAG chr11 5213899 5213918 5213902 -
cctgagaagcaagattggtt

SEQ ID NO: 50357 - DNA, 20 bp, Artificial Sequence
  Synthetic oligonucleotide; CAG chr11 5213860 5213879 5213863 -
aatgtgattcatcatatata

SEQ ID NO: 50358 - DNA, 20 bp, Artificial Sequence
  Synthetic oligonucleotide; CAG chr11 5213848 5213867 5213851 -
catatatacagcactaaaaa

SEQ ID NO: 50359 - DNA, 20 bp, Artificial Sequence
  Synthetic oligonucleotide; AAG chr11 5213813 5213832 5213816 -
catttcaatatgtgcaaaaa

SEQ ID NO: 50360 - DNA, 20 bp, Artificial Sequence
  Synthetic oligonucleotide; TAG chr11 5213762 5213781 5213765 -
gttaaaacctctcaacaaac

SEQ ID NO: 50361 - DNA, 20 bp, Artificial Sequence
  Synthetic oligonucleotide; AAG chr11 5213753 5213772 5213756 -
tctcaacaaactagctattt

SEQ ID NO: 50362 - DNA, 20 bp, Artificial Sequence
  Synthetic oligonucleotide; AGG chr11 5213752 5213771 5213755 -
ctcaacaaactagctattta

SEQ ID NO: 50363 - DNA, 20 bp, Artificial Sequence
  Synthetic oligonucleotide; GAG chr11 5213729 5213748 5213732 -
acatgacctcaaaataatat

SEQ ID NO: 50364 - DNA, 20 bp, Artificial Sequence
  Synthetic oligonucleotide; CAG chr11 5213708 5213727 5213711 -
agccatctatgacaaaccca

SEQ ID NO: 50365 - DNA, 20 bp, Artificial Sequence
  Synthetic oligonucleotide; CAG chr11 5213694 5213713 5213697 -
aacccacagccaacatcata

SEQ ID NO: 50366 - DNA, 20 bp, Artificial Sequence
  Synthetic oligonucleotide; TGG chr11 5213689 5213708 5213692 -
acagccaacatcatacagaa

SEQ ID NO: 50367 - DNA, 20 bp, Artificial Sequence
  Synthetic oligonucleotide; GGG chr11 5213688 5213707 5213691 -
cagccaacatcatacagaat

SEQ ID NO: 50368 - DNA, 20 bp, Artificial Sequence
  Synthetic oligonucleotide; TGG chr11 5213678 5213697 5213681 -
catacagaatgggcaaaacc

SEQ ID NO: 50369 - DNA, 20 bp, Artificial Sequence
  Synthetic oligonucleotide; AAG chr11 5213675 5213694 5213678 -
acagaatgggcaaaacctgg

SEQ ID NO: 50370 - DNA, 20 bp, Artificial Sequence
  Synthetic oligonucleotide; TGG chr11 5213656 5213675 5213659 -
gaagcattcttcttgaaaac

SEQ ID NO: 50371 - DNA, 20 bp, Artificial Sequence
  Synthetic oligonucleotide; AAG chr11 5213650 5213669 5213653 -
ttcttcttgaaaactggcac

SEQ ID NO: 50372 - DNA, 20 bp, Artificial Sequence
  Synthetic oligonucleotide; AAG chr11 5213645 5213664 5213648 -
cttgaaaactggcacaagac

SEQ ID NO: 50373 - DNA, 20 bp, Artificial Sequence
  Synthetic oligonucleotide; AGG chr11 5213644 5213663 5213647 -
ttgaaaactggcacaagaca

SEQ ID NO: 50374 - DNA, 20 bp, Artificial Sequence
  Synthetic oligonucleotide; CAG chr11 5213617 5213636 5213620 -
cctctctcaccactgctatt

SEQ ID NO: 50375 - DNA, 20 bp, Artificial Sequence
  Synthetic oligonucleotide; TAG chr11 5213612 5213631 5213615 -
ctcaccactgctattcagta

SEQ ID NO: 50376 - DNA, 20 bp, Artificial Sequence
  Synthetic oligonucleotide; TGG chr11 5213606 5213625 5213609 -
actgctattcagtatagtac

SEQ ID NO: 50377 - DNA, 20 bp, Artificial Sequence
  Synthetic oligonucleotide; CAG chr11 5213603 5213622 5213606 -
gctattcagtatagtactgg

SEQ ID NO: 50378 - DNA, 20 bp, Artificial Sequence
  Synthetic oligonucleotide; TGG chr11 5213597 5213616 5213600 -
cagtatagtactggcagtcc

SEQ ID NO: 50379 - DNA, 20 bp, Artificial Sequence
  Synthetic oligonucleotide; CAG chr11 5213593 5213612 5213596 -
atagtactggcagtcctggc

SEQ ID NO: 50380 - DNA, 20 bp, Artificial Sequence
  Synthetic oligonucleotide; GAG chr11 5213591 5213610 5213594 -
agtactggcagtcctggcca

SEQ ID NO: 50381 - DNA, 20 bp, Artificial Sequence
  Synthetic oligonucleotide; CAG chr11 5213584 5213603 5213587 -
gcagtcctggccagagcaat

SEQ ID NO: 50382 - DNA, 20 bp, Artificial Sequence
  Synthetic oligonucleotide; AGG chr11 5213583 5213602 5213586 -
cagtcctggccagagcaatc

SEQ ID NO: 50383 - DNA, 20 bp, Artificial Sequence
  Synthetic oligonucleotide; AAG chr11 5213579 5213598 5213582 -
cctggccagagcaatcaggc

SEQ ID NO: 50384 - DNA, 20 bp, Artificial Sequence
  Synthetic oligonucleotide; GAG chr11 5213577 5213596 5213580 -
tggccagagcaatcaggcaa

SEQ ID NO: 50385 - DNA, 20 bp, Artificial Sequence
  Synthetic oligonucleotide; AAG chr11 5213574 5213593 5213577 -
ccagagcaatcaggcaagag

SEQ ID NO: 50386 - DNA, 20 bp, Artificial Sequence
  Synthetic oligonucleotide; AGG chr11 5213573 5213592 5213576 -
cagagcaatcaggcaagaga

SEQ ID NO: 50387 - DNA, 20 bp, Artificial Sequence
  Synthetic oligonucleotide; GGG chr11 5213572 5213591 5213575 -
agagcaatcaggcaagagaa

SEQ ID NO: 50388 - DNA, 20 bp, Artificial Sequence
  Synthetic oligonucleotide; AAG chr11 5213565 5213584 5213568 -
tcaggcaagagaagggaata

SEQ ID NO: 50389 - DNA, 20 bp, Artificial Sequence
  Synthetic oligonucleotide; AGG chr11 5213564 5213583 5213567 -
caggcaagagaagggaataa

SEQ ID NO: 50390 - DNA, 20 bp, Artificial Sequence
  Synthetic oligonucleotide; GGG chr11 5213563 5213582 5213566 -
aggcaagagaagggaataaa

SEQ ID NO: 50391 - DNA, 20 bp, Artificial Sequence
  Synthetic oligonucleotide; TAG chr11 5213552 5213571 5213555 -
gggaataaagggcatccaaa

SEQ ID NO: 50392 - DNA, 20 bp, Artificial Sequence
  Synthetic oligonucleotide; AGG chr11 5213551 5213570 5213554 -
ggaataaagggcatccaaat

SEQ ID NO: 50393 - DNA, 20 bp, Artificial Sequence
  Synthetic oligonucleotide; AAG chr11 5213548 5213567 5213551 -
ataaagggcatccaaatagg

SEQ ID NO: 50394 - DNA, 20 bp, Artificial Sequence
  Synthetic oligonucleotide; GAG chr11 5213546 5213565 5213549 -
aaagggcatccaaataggaa

SEQ ID NO: 50395 - DNA, 20 bp, Artificial Sequence
  Synthetic oligonucleotide; GAG chr11 5213544 5213563 5213547 -
agggcatccaaataggaaga

SEQ ID NO: 50396 - DNA, 20 bp, Artificial Sequence
  Synthetic oligonucleotide; AAG chr11 5213540 5213559 5213543 -
catccaaataggaagagaga

SEQ ID NO: 50397 - DNA, 20 bp, Artificial Sequence
  Synthetic oligonucleotide; AAG chr11 5213534 5213553 5213537 -
aataggaagagagaaagtca

SEQ ID NO: 50398 - DNA, 20 bp, Artificial Sequence
  Synthetic oligonucleotide; TAG chr11 5213512 5213531 5213515 -
gtatccctgttttctgtatc

SEQ ID NO: 50399 - DNA, 20 bp, Artificial Sequence
  Synthetic oligonucleotide; TAG chr11 5213500 5213519 5213503 -
tctgtatctagaaaacacca

SEQ ID NO: 50400 - DNA, 20 bp, Artificial Sequence
  Synthetic oligonucleotide; AAG chr11 5213495 5213514 5213498 -
atctagaaaacaccatagtc

SEQ ID NO: 50401 - DNA, 20 bp, Artificial Sequence
  Synthetic oligonucleotide; AGG chr11 5213494 5213513 5213497 -
tctagaaaacaccatagtca

SEQ ID NO: 50402 - DNA, 20 bp, Artificial Sequence
  Synthetic oligonucleotide; AAG chr11 5213486 5213505 5213489 -
acaccatagtcaaggcccaa

SEQ ID NO: 50403 - DNA, 20 bp, Artificial Sequence
  Synthetic oligonucleotide; CAG chr11 5213477 5213496 5213480 -
tcaaggcccaaaagctcctt

SEQ ID NO: 50404 - DNA, 20 bp, Artificial Sequence
  Synthetic oligonucleotide; CAG chr11 5213464 5213483 5213467 -
gctccttcagctgataactt

SEQ ID NO: 50405 - DNA, 20 bp, Artificial Sequence
  Synthetic oligonucleotide; AAG chr11 5213459 5213478 5213462 -
ttcagctgataacttcagca

SEQ ID NO: 50406 - DNA, 20 bp, Artificial Sequence
  Synthetic oligonucleotide; CAG chr11 5213453 5213472 5213456 -
tgataacttcagcaaagttt

SEQ ID NO: 50407 - DNA, 20 bp, Artificial Sequence
  Synthetic oligonucleotide; AGG chr11 5213452 5213471 5213455 -
gataacttcagcaaagtttc

SEQ ID NO: 50408 - DNA, 20 bp, Artificial Sequence
  Synthetic oligonucleotide; TAG chr11 5213423 5213442 5213426 -
aatcaatgtacaaaaatcac

SEQ ID NO: 50409 - DNA, 20 bp, Artificial Sequence
  Synthetic oligonucleotide; TAG chr11 5213401 5213420 5213404 -
gcattcccatacatcaacaa

SEQ ID NO: 50410 - DNA, 20 bp, Artificial Sequence
  Synthetic oligonucleotide; AAG chr11 5213396 5213415 5213399 -
cccatacatcaacaatagcc

SEQ ID NO: 50411 - DNA, 20 bp, Artificial Sequence
  Synthetic oligonucleotide; TAG chr11 5213391 5213410 5213394 -
acatcaacaatagccaagcc

SEQ ID NO: 50412 - DNA, 20 bp, Artificial Sequence
  Synthetic oligonucleotide; GAG chr11 5213389 5213408 5213392 -
atcaacaatagccaagccta

SEQ ID NO: 50413 - DNA, 20 bp, Artificial Sequence
  Synthetic oligonucleotide; CAG chr11 5213380 5213399 5213383 -
agccaagcctagagccaaat

SEQ ID NO: 50414 - DNA, 20 bp, Artificial Sequence
  Synthetic oligonucleotide; AGG chr11 5213379 5213398 5213382 -
gccaagcctagagccaaatc

SEQ ID NO: 50415 - DNA, 20 bp, Artificial Sequence
  Synthetic oligonucleotide; AAG chr11 5213376 5213395 5213379 -
aagcctagagccaaatcagg

SEQ ID NO: 50416 - DNA, 20 bp, Artificial Sequence
  Synthetic oligonucleotide; AAG chr11 5213347 5213366 5213350 -
ccatttaccgttgccacaaa

SEQ ID NO: 50417 - DNA, 20 bp, Artificial Sequence
  Synthetic oligonucleotide; AAG chr11 5213332 5213351 5213335 -
acaaaaagaataaaatacct

SEQ ID NO: 50418 - DNA, 20 bp, Artificial Sequence
  Synthetic oligonucleotide; AGG chr11 5213331 5213350 5213334 -
caaaaagaataaaataccta

SEQ ID NO: 50419 - DNA, 20 bp, Artificial Sequence
  Synthetic oligonucleotide; AAG chr11 5213316 5213335 5213319 -
acctaaggatatatctaacc

SEQ ID NO: 50420 - DNA, 20 bp, Artificial Sequence
  Synthetic oligonucleotide; CAG chr11 5213313 5213332 5213316 -
taaggatatatctaaccaag

SEQ ID NO: 50421 - DNA, 20 bp, Artificial Sequence
  Synthetic oligonucleotide; AAG chr11 5213306 5213325 5213309 -
atatctaaccaagcagttga

SEQ ID NO: 50422 - DNA, 20 bp, Artificial Sequence
  Synthetic oligonucleotide; GAG chr11 5213292 5213311 5213295 -
agttgaaagatctctacaat

SEQ ID NO: 50423 - DNA, 20 bp, Artificial Sequence
  Synthetic oligonucleotide; AAG chr11 5213270 5213289 5213273 -
gatttacaaaacactgctca

SEQ ID NO: 50424 - DNA, 20 bp, Artificial Sequence
  Synthetic oligonucleotide; CAG chr11 5213263 5213282 5213266 -
aaaacactgctcaaagaaat

SEQ ID NO: 50425 - DNA, 20 bp, Artificial Sequence
  Synthetic oligonucleotide; GAG chr11 5213261 5213280 5213264 -
aacactgctcaaagaaatca

SEQ ID NO: 50426 - DNA, 20 bp, Artificial Sequence
  Synthetic oligonucleotide; TAG chr11 5213254 5213273 5213257 -
ctcaaagaaatcagagctga

SEQ ID NO: 50427 - DNA, 20 bp, Artificial Sequence
  Synthetic oligonucleotide; TGG chr11 5213244 5213263 5213247 -
tcagagctgatagaaacaaa

SEQ ID NO: 50428 - DNA, 20 bp, Artificial Sequence
  Synthetic oligonucleotide; TGG chr11 5213223 5213242 5213226 -
ggaaaaactttccatgctca

SEQ ID NO: 50429 - DNA, 20 bp, Artificial Sequence
  Synthetic oligonucleotide; AAG chr11 5213215 5213234 5213218 -
tttccatgctcatggataaa

SEQ ID NO: 50430 - DNA, 20 bp, Artificial Sequence
  Synthetic oligonucleotide; TAG chr11 5213182 5213201 5213185 -
gttaaaatgtccatactgcc

SEQ ID NO: 50431 - DNA, 20 bp, Artificial Sequence
  Synthetic oligonucleotide; GAG chr11 5213180 5213199 5213183 -
taaaatgtccatactgccta

SEQ ID NO: 50432 - DNA, 20 bp, Artificial Sequence
  Synthetic oligonucleotide; CAG chr11 5213170 5213189 5213173 -
atactgcctagagcaattta

SEQ ID NO: 50433 - DNA, 20 bp, Artificial Sequence
  Synthetic oligonucleotide; AAG chr11 5213162 5213181 5213165 -
tagagcaatttacagtttca

SEQ ID NO: 50434 - DNA, 20 bp, Artificial Sequence
  Synthetic oligonucleotide; CAG chr11 5213126 5213145 5213129 -
actaccaatgacattcttca

SEQ ID NO: 50435 - DNA, 20 bp, Artificial Sequence
  Synthetic oligonucleotide; TAG chr11 5213120 5213139 5213123 -
aatgacattcttcacagaac

SEQ ID NO: 50436 - DNA, 20 bp, Artificial Sequence
  Synthetic oligonucleotide; AAG chr11 5213103 5213122 5213106 -
aactagaaaaatacacttta

SEQ ID NO: 50437 - DNA, 20 bp, Artificial Sequence
  Synthetic oligonucleotide; TGG chr11 5213094 5213113 5213097 -
aatacactttaaagttcata

SEQ ID NO: 50438 - DNA, 20 bp, Artificial Sequence
  Synthetic oligonucleotide; AAG chr11 5213077 5213096 5213080 -
atatggaacaacaacaaaaa

SEQ ID NO: 50439 - DNA, 20 bp, Artificial Sequence
  Synthetic oligonucleotide; TAG chr11 5213068 5213087 5213071 -
aacaacaaaaaaagtccaaa

SEQ ID NO: 50440 - DNA, 20 bp, Artificial Sequence
  Synthetic oligonucleotide; TAG chr11 5213063 5213082 5213066 -
caaaaaaagtccaaatagcc

SEQ ID NO: 50441 - DNA, 20 bp, Artificial Sequence
  Synthetic oligonucleotide; AGG chr11 5213062 5213081 5213065 -
aaaaaaagtccaaatagcct

SEQ ID NO: 50442 - DNA, 20 bp, Artificial Sequence
  Synthetic oligonucleotide; CAG chr11 5213044 5213063 5213047 -
ctaggaaatcctaatactca

SEQ ID NO: 50443 - DNA, 20 bp, Artificial Sequence
  Synthetic oligonucleotide; AGG chr11 5213043 5213062 5213046 -
taggaaatcctaatactcac

SEQ ID NO: 50444 - DNA, 20 bp, Artificial Sequence
  Synthetic oligonucleotide; TGG chr11 5213040 5213059 5213043 -
gaaatcctaatactcacagg

SEQ ID NO: 50445 - DNA, 20 bp, Artificial Sequence
  Synthetic oligonucleotide; GGG chr11 5213039 5213058 5213042 -
aaatcctaatactcacaggt

SEQ ID NO: 50446 - DNA, 20 bp, Artificial Sequence
  Synthetic oligonucleotide; GAG chr11 5213025 5213044 5213028 -
acaggtgggaattgaaaaat

SEQ ID NO: 50447 - DNA, 20 bp, Artificial Sequence
  Synthetic oligonucleotide; TGG chr11 5213016 5213035 5213019 -
aattgaaaaatgagaacact

SEQ ID NO: 50448 - DNA, 20 bp, Artificial Sequence
  Synthetic oligonucleotide; CAG chr11 5213010 5213029 5213013 -
aaaatgagaacacttggaca

SEQ ID NO: 50449 - DNA, 20 bp, Artificial Sequence
  Synthetic oligonucleotide; AGG chr11 5213009 5213028 5213012 -
aaatgagaacacttggacac

SEQ ID NO: 50450 - DNA, 20 bp, Artificial Sequence
  Synthetic oligonucleotide; GGG chr11 5213008 5213027 5213011 -
aatgagaacacttggacaca

SEQ ID NO: 50451 - DNA, 20 bp, Artificial Sequence
  Synthetic oligonucleotide; TGG chr11 5213005 5213024 5213008 -
gagaacacttggacacaggg

SEQ ID NO: 50452 - DNA, 20 bp, Artificial Sequence
  Synthetic oligonucleotide; GGG chr11 5213004 5213023 5213007 -
agaacacttggacacagggt

SEQ ID NO: 50453 - DNA, 20 bp, Artificial Sequence
  Synthetic oligonucleotide; GGG chr11 5213003 5213022 5213006 -
gaacacttggacacagggtg

SEQ ID NO: 50454 - DNA, 20 bp, Artificial Sequence
  Synthetic oligonucleotide; CGG chr11 5212988 5213007 5212991 -
gggtggggaacatcacacac

SEQ ID NO: 50455 - DNA, 20 bp, Artificial Sequence
  Synthetic oligonucleotide; GGG chr11 5212987 5213006 5212990 -
ggtggggaacatcacacacc

SEQ ID NO: 50456 - DNA, 20 bp, Artificial Sequence
  Synthetic oligonucleotide; GGG chr11 5212986 5213005 5212989 -
gtggggaacatcacacaccg

SEQ ID NO: 50457 - DNA, 20 bp, Artificial Sequence
  Synthetic oligonucleotide; TGG chr11 5212976 5212995 5212979 -
tcacacaccggggcctgtcg

SEQ ID NO: 50458 - DNA, 20 bp, Artificial Sequence
  Synthetic oligonucleotide; GGG chr11 5212975 5212994 5212978 -
cacacaccggggcctgtcgt

SEQ ID NO: 50459 - DNA, 20 bp, Artificial Sequence
  Synthetic oligonucleotide; GGG chr11 5212974 5212993 5212977 -
acacaccggggcctgtcgtg

SEQ ID NO: 50460 - DNA, 20 bp, Artificial Sequence
  Synthetic oligonucleotide; TGG chr11 5212971 5212990 5212974 -
caccggggcctgtcgtgggg

SEQ ID NO: 50461 - DNA, 20 bp, Artificial Sequence
  Synthetic oligonucleotide; TAG chr11 5212968 5212987 5212971 -
cggggcctgtcgtggggtgg

SEQ ID NO: 50462 - DNA, 20 bp, Artificial Sequence
  Synthetic oligonucleotide; AGG chr11 5212967 5212986 5212970 -
ggggcctgtcgtggggtggt

SEQ ID NO: 50463 - DNA, 20 bp, Artificial Sequence
  Synthetic oligonucleotide; GAG chr11 5212965 5212984 5212968 -
ggcctgtcgtggggtggtag

SEQ ID NO: 50464 - DNA, 20 bp, Artificial Sequence
  Synthetic oligonucleotide; GAG chr11 5212963 5212982 5212966 -
cctgtcgtggggtggtagga

SEQ ID NO: 50465 - DNA, 20 bp, Artificial Sequence
  Synthetic oligonucleotide; GAG chr11 5212961 5212980 5212964 -
tgtcgtggggtggtaggaga

SEQ ID NO: 50466 - DNA, 20 bp, Artificial Sequence
  Synthetic oligonucleotide; AGG chr11 5212960 5212979 5212963 -
gtcgtggggtggtaggagag

SEQ ID NO: 50467 - DNA, 20 bp, Artificial Sequence
  Synthetic oligonucleotide; GAG chr11 5212958 5212977 5212961 -
cgtggggtggtaggagagag

SEQ ID NO: 50468 - DNA, 20 bp, Artificial Sequence
  Synthetic oligonucleotide; AGG chr11 5212957 5212976 5212960 -
gtggggtggtaggagagagg

SEQ ID NO: 50469 - DNA, 20 bp, Artificial Sequence
  Synthetic oligonucleotide; GGG chr11 5212956 5212975 5212959 -
tggggtggtaggagagagga

SEQ ID NO: 50470 - DNA, 20 bp, Artificial Sequence
  Synthetic oligonucleotide; TAG chr11 5212946 5212965 5212949 -
ggagagaggagggataacat

SEQ ID NO: 50471 - DNA, 20 bp, Artificial Sequence
  Synthetic oligonucleotide; AGG chr11 5212945 5212964 5212948 -
gagagaggagggataacatt

SEQ ID NO: 50472 - DNA, 20 bp, Artificial Sequence
  Synthetic oligonucleotide; GAG chr11 5212943 5212962 5212946 -
gagaggagggataacattag

SEQ ID NO: 50473 - DNA, 20 bp, Artificial Sequence
  Synthetic oligonucleotide; GAG chr11 5212920 5212939 5212923 -
atatatctaatgtaaatgac

SEQ ID NO: 50474 - DNA, 20 bp, Artificial Sequence
  Synthetic oligonucleotide; CGG chr11 5212913 5212932 5212916 -
taatgtaaatgacgagttaa

SEQ ID NO: 50475 - DNA, 20 bp, Artificial Sequence
  Synthetic oligonucleotide; GGG chr11 5212912 5212931 5212915 -
aatgtaaatgacgagttaac

SEQ ID NO: 50476 - DNA, 20 bp, Artificial Sequence
  Synthetic oligonucleotide; CAG chr11 5212907 5212926 5212910 -
aaatgacgagttaacgggtg

SEQ ID NO: 50477 - DNA, 20 bp, Artificial Sequence
  Synthetic oligonucleotide; TGG chr11 5212894 5212913 5212897 -
acgggtgcagcacaccaata

SEQ ID NO: 50478 - DNA, 20 bp, Artificial Sequence
  Synthetic oligonucleotide; CAG chr11 5212863 5212882 5212866 -
tacatatgtaacaaactgca

SEQ ID NO: 50479 - DNA, 20 bp, Artificial Sequence
  Synthetic oligonucleotide; AGG chr11 5212862 5212881 5212865 -
acatatgtaacaaactgcac

SEQ ID NO: 50480 - DNA, 20 bp, Artificial Sequence
  Synthetic oligonucleotide; TAG chr11 5212854 5212873 5212857 -
aacaaactgcacaggtaccg

SEQ ID NO: 50481 - DNA, 20 bp, Artificial Sequence
  Synthetic oligonucleotide; TAG chr11 5212847 5212866 5212850 -
tgcacaggtaccgtagaact

SEQ ID NO: 50482 - DNA, 20 bp, Artificial Sequence
  Synthetic oligonucleotide; GAG chr11 5212845 5212864 5212848 -
cacaggtaccgtagaactta

SEQ ID NO: 50483 - DNA, 20 bp, Artificial Sequence
  Synthetic oligonucleotide; AAG chr11 5212828 5212847 5212831 -
ttagagtacaaaaaaaaaaa

SEQ ID NO: 50484 - DNA, 20 bp, Artificial Sequence
  Synthetic oligonucleotide; GAG chr11 5212826 5212845 5212829 -
agagtacaaaaaaaaaaaaa

SEQ ID NO: 50485 - DNA, 20 bp, Artificial Sequence
  Synthetic oligonucleotide; AAG chr11 5212820 5212839 5212823 -
caaaaaaaaaaaaagagaaa

SEQ ID NO: 50486 - DNA, 20 bp, Artificial Sequence
  Synthetic oligonucleotide; AAG chr11 5212813 5212832 5212816 -
aaaaaaagagaaaaagaaaa

SEQ ID NO: 50487 - DNA, 20 bp, Artificial Sequence
  Synthetic oligonucleotide; TGG chr11 5212809 5212828 5212812 -
aaagagaaaaagaaaaaagc

SEQ ID NO: 50488 - DNA, 20 bp, Artificial Sequence
  Synthetic oligonucleotide; GAG chr11 5212807 5212826 5212810 -
agagaaaaagaaaaaagctg

SEQ ID NO: 50489 - DNA, 20 bp, Artificial Sequence
  Synthetic oligonucleotide; CAG chr11 5212773 5212792 5212776 -
cctaacttcaaaccatacca

SEQ ID NO: 50490 - DNA, 20 bp, Artificial Sequence
  Synthetic oligonucleotide; AGG chr11 5212772 5212791 5212775 -
ctaacttcaaaccataccac

SEQ ID NO: 50491 - DNA, 20 bp, Artificial Sequence
  Synthetic oligonucleotide; GGG chr11 5212771 5212790 5212774 -
taacttcaaaccataccaca

SEQ ID NO: 50492 - DNA, 20 bp, Artificial Sequence
  Synthetic oligonucleotide; CAG chr11 5212765 5212784 5212768 -
caaaccataccacagggcta

SEQ ID NO: 50493 - DNA, 20 bp, Artificial Sequence
  Synthetic oligonucleotide; CAG chr11 5212753 5212772 5212756 -
cagggctacagtaaccaaaa

SEQ ID NO: 50494 - DNA, 20 bp, Artificial Sequence
  Synthetic oligonucleotide; TGG chr11 5212748 5212767 5212751 -
ctacagtaaccaaaacagtg

SEQ ID NO: 50495 - DNA, 20 bp, Artificial Sequence
  Synthetic oligonucleotide; CAG chr11 5212737 5212756 5212740 -
aaaacagtgtggtactgtta

SEQ ID NO: 50496 - DNA, 20 bp, Artificial Sequence
  Synthetic oligonucleotide; AAG chr11 5212732 5212751 5212735 -
agtgtggtactgttacagaa

SEQ ID NO: 50497 - DNA, 20 bp, Artificial Sequence
  Synthetic oligonucleotide; CAG chr11 5212724 5212743 5212727 -
actgttacagaaaagacaca

SEQ ID NO: 50498 - DNA, 20 bp, Artificial Sequence
  Synthetic oligonucleotide; TGG chr11 5212716 5212735 5212719 -
agaaaagacacacagacaaa

SEQ ID NO: 50499 - DNA, 20 bp, Artificial Sequence
  Synthetic oligonucleotide; CAG chr11 5212711 5212730 5212714 -
agacacacagacaaatggaa

SEQ ID NO: 50500 - DNA, 20 bp, Artificial Sequence
  Synthetic oligonucleotide; TAG chr11 5212706 5212725 5212709 -
cacagacaaatggaacagaa

SEQ ID NO: 50501 - DNA, 20 bp, Artificial Sequence
  Synthetic oligonucleotide; GAG chr11 5212704 5212723 5212707 -
cagacaaatggaacagaata

SEQ ID NO: 50502 - DNA, 20 bp, Artificial Sequence
  Synthetic oligonucleotide; GAG chr11 5212702 5212721 5212705 -
gacaaatggaacagaataga

SEQ ID NO: 50503 - DNA, 20 bp, Artificial Sequence
  Synthetic oligonucleotide; CAG chr11 5212697 5212716 5212700 -
atggaacagaatagagagcc

SEQ ID NO: 50504 - DNA, 20 bp, Artificial Sequence
  Synthetic oligonucleotide; AAG chr11 5212690 5212709 5212693 -
agaatagagagcccagaaat

SEQ ID NO: 50505 - DNA, 20 bp, Artificial Sequence
  Synthetic oligonucleotide; AAG chr11 5212655 5212674 5212658 -
caaccatctgatctttgaca

SEQ ID NO: 50506 - DNA, 20 bp, Artificial Sequence
  Synthetic oligonucleotide; AAG chr11 5212641 5212660 5212644 -
ttgacaaagctgataaaaac

SEQ ID NO: 50507 - DNA, 20 bp, Artificial Sequence
  Synthetic oligonucleotide; GAG chr11 5212634 5212653 5212637 -
agctgataaaaacaagcaat

SEQ ID NO: 50508 - DNA, 20 bp, Artificial Sequence
  Synthetic oligonucleotide; AGG chr11 5212633 5212652 5212636 -
gctgataaaaacaagcaatg

SEQ ID NO: 50509 - DNA, 20 bp, Artificial Sequence
  Synthetic oligonucleotide; AAG chr11 5212628 5212647 5212631 -
taaaaacaagcaatgaggaa

SEQ ID NO: 50510 - DNA, 20 bp, Artificial Sequence
  Synthetic oligonucleotide; AAG chr11 5212611 5212630 5212614 -
gaaaagacaccctattcaac

SEQ ID NO: 50511 - DNA, 20 bp, Artificial Sequence
  Synthetic oligonucleotide; TGG chr11 5212608 5212627 5212611 -
aagacaccctattcaacaag

SEQ ID NO: 50512 - DNA, 20 bp, Artificial Sequence
  Synthetic oligonucleotide; TGG chr11 5212602 5212621 5212605 -
ccctattcaacaagtggtgt

SEQ ID NO: 50513 - DNA, 20 bp, Artificial Sequence
  Synthetic oligonucleotide; GGG chr11 5212601 5212620 5212604 -
cctattcaacaagtggtgtt

SEQ ID NO: 50514 - DNA, 20 bp, Artificial Sequence
  Synthetic oligonucleotide; TAG chr11 5212579 5212598 5212582 -
gataactgactaaccgtatg

SEQ ID NO: 50515 - DNA, 20 bp, Artificial Sequence
  Synthetic oligonucleotide; AAG chr11 5212576 5212595 5212579 -
aactgactaaccgtatgtag

SEQ ID NO: 50516 - DNA, 20 bp, Artificial Sequence
  Synthetic oligonucleotide; CAG chr11 5212565 5212584 5212568 -
cgtatgtagaagattgaaac

SEQ ID NO: 50517 - DNA, 20 bp, Artificial Sequence
  Synthetic oligonucleotide; AAG chr11 5212529 5212548 5212532 -
tcatatacacaaataaactc

SEQ ID NO: 50518 - DNA, 20 bp, Artificial Sequence
  Synthetic oligonucleotide; TGG chr11 5212525 5212544 5212528 -
atacacaaataaactcaaga

SEQ ID NO: 50519 - DNA, 20 bp, Artificial Sequence
  Synthetic oligonucleotide; TAG chr11 5212520 5212539 5212523 -
caaataaactcaagatggat

SEQ ID NO: 50520 - DNA, 20 bp, Artificial Sequence
  Synthetic oligonucleotide; GAG chr11 5212518 5212537 5212521 -
aataaactcaagatggatta

SEQ ID NO: 50521 - DNA, 20 bp, Artificial Sequence
  Synthetic oligonucleotide; AAG chr11 5212479 5212498 5212482 -
caaactataaaaatgcttga

SEQ ID NO: 50522 - DNA, 20 bp, Artificial Sequence
  Synthetic oligonucleotide; TAG chr11 5212471 5212490 5212474 -
aaaaatgcttgaaagcaacc

SEQ ID NO: 50523 - DNA, 20 bp, Artificial Sequence
  Synthetic oligonucleotide; AGG chr11 5212470 5212489 5212473 -
aaaatgcttgaaagcaacct

SEQ ID NO: 50524 - DNA, 20 bp, Artificial Sequence
  Synthetic oligonucleotide; CGG chr11 5212456 5212475 5212459 -
caacctaggcaataccattc

SEQ ID NO: 50525 - DNA, 20 bp, Artificial Sequence
  Synthetic oligonucleotide; AAG chr11 5212449 5212468 5212452 -
ggcaataccattccggacat

SEQ ID NO: 50526 - DNA, 20 bp, Artificial Sequence
  Synthetic oligonucleotide; CAG chr11 5212446 5212465 5212449 -
aataccattccggacataag

SEQ ID NO: 50527 - DNA, 20 bp, Artificial Sequence
  Synthetic oligonucleotide; AGG chr11 5212445 5212464 5212448 -
ataccattccggacataagc

SEQ ID NO: 50528 - DNA, 20 bp, Artificial Sequence
  Synthetic oligonucleotide; GGG chr11 5212444 5212463 5212447 -
taccattccggacataagca

SEQ ID NO: 50529 - DNA, 20 bp, Artificial Sequence
  Synthetic oligonucleotide; GGG chr11 5212443 5212462 5212446 -
accattccggacataagcag

SEQ ID NO: 50530 - DNA, 20 bp, Artificial Sequence
  Synthetic oligonucleotide; AAG chr11 5212438 5212457 5212441 -
tccggacataagcaggggca

SEQ ID NO: 50531 - DNA, 20 bp, Artificial Sequence
  Synthetic oligonucleotide; AAG chr11 5212424 5212443 5212427 -
ggggcaaagatttcatgaca

SEQ ID NO: 50532 - DNA, 20 bp, Artificial Sequence
  Synthetic oligonucleotide; CAG chr11 5212414 5212433 5212417 -
tttcatgacaaagatgccaa

SEQ ID NO: 50533 - DNA, 20 bp, Artificial Sequence
  Synthetic oligonucleotide; CAG chr11 5212405 5212424 5212408 -
aaagatgccaacagtcattg

SEQ ID NO: 50534 - DNA, 20 bp, Artificial Sequence
  Synthetic oligonucleotide; AAG chr11 5212399 5212418 5212402 -
gccaacagtcattgcagcaa

SEQ ID NO: 50535 - DNA, 20 bp, Artificial Sequence
  Synthetic oligonucleotide; TAG chr11 5212382 5212401 5212385 -
caaaagcaaaaattgacaaa

SEQ ID NO: 50536 - DNA, 20 bp, Artificial Sequence
  Synthetic oligonucleotide; AGG chr11 5212381 5212400 5212384 -
aaaagcaaaaattgacaaat

SEQ ID NO: 50537 - DNA, 20 bp, Artificial Sequence
  Synthetic oligonucleotide; AAG chr11 5212364 5212383 5212367 -
aataggatctaattaaaata

SEQ ID NO: 50538 - DNA, 20 bp, Artificial Sequence
  Synthetic oligonucleotide; CAG chr11 5212353 5212372 5212356 -
attaaaataaagtttctgca

SEQ ID NO: 50539 - DNA, 20 bp, Artificial Sequence
  Synthetic oligonucleotide; AAG chr11 5212347 5212366 5212350 -
ataaagtttctgcacagcaa

SEQ ID NO: 50540 - DNA, 20 bp, Artificial Sequence
  Synthetic oligonucleotide; GAG chr11 5212332 5212351 5212335 -
agcaaaagaaactatcaact

SEQ ID NO: 50541 - DNA, 20 bp, Artificial Sequence
  Synthetic oligonucleotide; TAG chr11 5212318 5212337 5212321 -
tcaactgagtaaacaaccta

SEQ ID NO: 50542 - DNA, 20 bp, Artificial Sequence
  Synthetic oligonucleotide; TGG chr11 5212313 5212332 5212316 -
tgagtaaacaacctatagaa

SEQ ID NO: 50543 - DNA, 20 bp, Artificial Sequence
  Synthetic oligonucleotide; GGG chr11 5212312 5212331 5212315 -
gagtaaacaacctatagaat

SEQ ID NO: 50544 - DNA, 20 bp, Artificial Sequence
  Synthetic oligonucleotide; GAG chr11 5212310 5212329 5212313 -
gtaaacaacctatagaatgg

SEQ ID NO: 50545 - DNA, 20 bp, Artificial Sequence
  Synthetic oligonucleotide; AAG chr11 5212279 5212298 5212282 -
tgcaaactatgcatccaaca

SEQ ID NO: 50546 - DNA, 20 bp, Artificial Sequence
  Synthetic oligonucleotide; AGG chr11 5212278 5212297 5212281 -
gcaaactatgcatccaacaa

SEQ ID NO: 50547 - DNA, 20 bp, Artificial Sequence
  Synthetic oligonucleotide; CAG chr11 5212266 5212285 5212269 -
tccaacaaaggcctaatatt

SEQ ID NO: 50548 - DNA, 20 bp, Artificial Sequence
  Synthetic oligonucleotide; AAG chr11 5212256 5212275 5212259 -
gcctaatattcagaatctat

SEQ ID NO: 50549 - DNA, 20 bp, Artificial Sequence
  Synthetic oligonucleotide; AGG chr11 5212255 5212274 5212258 -
cctaatattcagaatctata

SEQ ID NO: 50550 - DNA, 20 bp, Artificial Sequence
  Synthetic oligonucleotide; AAG chr11 5212235 5212254 5212238 -
aggaacttaaatgaatctac

SEQ ID NO: 50551 - DNA, 20 bp, Artificial Sequence
  Synthetic oligonucleotide; TGG chr11 5212206 5212225 5212209 -
acaaacaatgccacaaaaaa

SEQ ID NO: 50552 - DNA, 20 bp, Artificial Sequence
  Synthetic oligonucleotide; GGG chr11 5212205 5212224 5212208 -
caaacaatgccacaaaaaat

SEQ ID NO: 50553 - DNA, 20 bp, Artificial Sequence
  Synthetic oligonucleotide; AAG chr11 5212200 5212219 5212203 -
aatgccacaaaaaatgggta

SEQ ID NO: 50554 - DNA, 20 bp, Artificial Sequence
  Synthetic oligonucleotide; AGG chr11 5212199 5212218 5212202 -
atgccacaaaaaatgggtaa

SEQ ID NO: 50555 - DNA, 20 bp, Artificial Sequence
  Synthetic oligonucleotide; CAG chr11 5212189 5212208 5212192 -
aaatgggtaaaggacatgaa

SEQ ID NO: 50556 - DNA, 20 bp, Artificial Sequence
  Synthetic oligonucleotide; CAG chr11 5212185 5212204 5212188 -
gggtaaaggacatgaacaga

SEQ ID NO: 50557 - DNA, 20 bp, Artificial Sequence
  Synthetic oligonucleotide; AAG chr11 5212175 5212194 5212178 -
catgaacagacagtattcaa

SEQ ID NO: 50558 - DNA, 20 bp, Artificial Sequence
  Synthetic oligonucleotide; AAG chr11 5212172 5212191 5212175 -
gaacagacagtattcaaaag

SEQ ID NO: 50559 - DNA, 20 bp, Artificial Sequence
  Synthetic oligonucleotide; TGG chr11 5212160 5212179 5212163 -
ttcaaaagaagacatacatg

SEQ ID NO: 50560 - DNA, 20 bp, Artificial Sequence
  Synthetic oligonucleotide; AAG chr11 5212152 5212171 5212155 -
aagacatacatgtggccacc

SEQ ID NO: 50561 - DNA, 20 bp, Artificial Sequence
  Synthetic oligonucleotide; AAG chr11 5212139 5212158 5212142 -
ggccaccaagcatatgaaaa

SEQ ID NO: 50562 - DNA, 20 bp, Artificial Sequence
  Synthetic oligonucleotide; CAG chr11 5212134 5212153 5212137 -
ccaagcatatgaaaaaagct

SEQ ID NO: 50563 - DNA, 20 bp, Artificial Sequence
  Synthetic oligonucleotide; TAG chr11 5212118 5212137 5212121 -
agctcagtgtcactgatcat

SEQ ID NO: 50564 - DNA, 20 bp, Artificial Sequence
  Synthetic oligonucleotide; GAG chr11 5212116 5212135 5212119 -
ctcagtgtcactgatcatta

SEQ ID NO: 50565 - DNA, 20 bp, Artificial Sequence
  Synthetic oligonucleotide; GAG chr11 5212091 5212110 5212094 -
atgccaatcaaacccaaaat

SEQ ID NO: 50566 - DNA, 20 bp, Artificial Sequence
  Synthetic oligonucleotide; TAG chr11 5212051 5212070 5212054 -
ttaaaatatctataattaaa

SEQ ID NO: 50567 - DNA, 20 bp, Artificial Sequence
  Synthetic oligonucleotide; CAG chr11 5212037 5212056 5212040 -
attaaatagtcaaaaaataa

SEQ ID NO: 50568 - DNA, 20 bp, Artificial Sequence
  Synthetic oligonucleotide; TGG chr11 5212031 5212050 5212034 -
tagtcaaaaaataacagatg

SEQ ID NO: 50569 - DNA, 20 bp, Artificial Sequence
  Synthetic oligonucleotide; GGG chr11 5212030 5212049 5212033 -
agtcaaaaaataacagatgt

SEQ ID NO: 50570 - DNA, 20 bp, Artificial Sequence
  Synthetic oligonucleotide; AAG chr11 5212026 5212045 5212029 -
aaaaaataacagatgtgggt

SEQ ID NO: 50571 - DNA, 20 bp, Artificial Sequence
  Synthetic oligonucleotide; AGG chr11 5212025 5212044 5212028 -
aaaaataacagatgtgggta

SEQ ID NO: 50572 - DNA, 20 bp, Artificial Sequence
  Synthetic oligonucleotide; TGG chr11 5212019 5212038 5212022 -
aacagatgtgggtaaggttg

SEQ ID NO: 50573 - DNA, 20 bp, Artificial Sequence
  Synthetic oligonucleotide; GAG chr11 5212017 5212036 5212020 -
cagatgtgggtaaggttgtg

SEQ ID NO: 50574 - DNA, 20 bp, Artificial Sequence
  Synthetic oligonucleotide; AAG chr11 5212012 5212031 5212015 -
gtgggtaaggttgtggagaa

SEQ ID NO: 50575 - DNA, 20 bp, Artificial Sequence
  Synthetic oligonucleotide; AGG chr11 5212011 5212030 5212014 -
tgggtaaggttgtggagaaa

SEQ ID NO: 50576 - DNA, 20 bp, Artificial Sequence
  Synthetic oligonucleotide; GGG chr11 5212010 5212029 5212013 -
gggtaaggttgtggagaaaa

SEQ ID NO: 50577 - DNA, 20 bp, Artificial Sequence
  Synthetic oligonucleotide; TGG chr11 5211991 5212010 5211994 -
agggaatgtttatacaccat

SEQ ID NO: 50578 - DNA, 20 bp, Artificial Sequence
  Synthetic oligonucleotide; TGG chr11 5211988 5212007 5211991 -
gaatgtttatacaccattgg

SEQ ID NO: 50579 - DNA, 20 bp, Artificial Sequence
  Synthetic oligonucleotide; TAG chr11 5211975 5211994 5211978 -
ccattggtggcaatataaat

SEQ ID NO: 50580 - DNA, 20 bp, Artificial Sequence
  Synthetic oligonucleotide; TAG chr11 5211961 5211980 5211964 -
ataaattagttcgaccattg

SEQ ID NO: 50581 - DNA, 20 bp, Artificial Sequence
  Synthetic oligonucleotide; CAG chr11 5211957 5211976 5211960 -
attagttcgaccattgtaga

SEQ ID NO: 50582 - DNA, 20 bp, Artificial Sequence
  Synthetic oligonucleotide; CAG chr11 5211954 5211973 5211957 -
agttcgaccattgtagacag

SEQ ID NO: 50583 - DNA, 20 bp, Artificial Sequence
  Synthetic oligonucleotide; TGG chr11 5211949 5211968 5211952 -
gaccattgtagacagcagtg

SEQ ID NO: 50584 - DNA, 20 bp, Artificial Sequence
  Synthetic oligonucleotide; AAG chr11 5211936 5211955 5211939 -
agcagtgtggcaattcccta

SEQ ID NO: 50585 - DNA, 20 bp, Artificial Sequence
  Synthetic oligonucleotide; CAG chr11 5211924 5211943 5211927 -
attccctaaagacctaaaaa

SEQ ID NO: 50586 - DNA, 20 bp, Artificial Sequence
  Synthetic oligonucleotide; GAG chr11 5211890 5211909 5211893 -
aacccaacaatcctattatt

SEQ ID NO: 50587 - DNA, 20 bp, Artificial Sequence
  Synthetic oligonucleotide; AAG chr11 5211877 5211896 5211880 -
tattattgagtatataccta

SEQ ID NO: 50588 - DNA, 20 bp, Artificial Sequence
  Synthetic oligonucleotide; AGG chr11 5211876 5211895 5211879 -
attattgagtatatacctaa

SEQ ID NO: 50589 - DNA, 20 bp, Artificial Sequence
  Synthetic oligonucleotide; AAG chr11 5211852 5211871 5211855 -
aaataaaccattctatcaca

SEQ ID NO: 50590 - DNA, 20 bp, Artificial Sequence
  Synthetic oligonucleotide; CAG chr11 5211825 5211844 5211828 -
atgcacacctgtgtccattg

SEQ ID NO: 50591 - DNA, 20 bp, Artificial Sequence
  Synthetic oligonucleotide; TAG chr11 5211811 5211830 5211814 -
ccattgcagcataatcacaa

SEQ ID NO: 50592 - DNA, 20 bp, Artificial Sequence
  Synthetic oligonucleotide; AAG chr11 5211806 5211825 5211809 -
gcagcataatcacaatagca

SEQ ID NO: 50593 - DNA, 20 bp, Artificial Sequence
  Synthetic oligonucleotide; TAG chr11 5211800 5211819 5211803 -
taatcacaatagcaaagaca

SEQ ID NO: 50594 - DNA, 20 bp, Artificial Sequence
  Synthetic oligonucleotide; AAG chr11 5211787 5211806 5211790 -
aaagacatagaatcaacctg

SEQ ID NO: 50595 - DNA, 20 bp, Artificial Sequence
  Synthetic oligonucleotide; AGG chr11 5211786 5211805 5211789 -
aagacatagaatcaacctga

SEQ ID NO: 50596 - DNA, 20 bp, Artificial Sequence
  Synthetic oligonucleotide; TAG chr11 5211778 5211797 5211781 -
gaatcaacctgaaggcccat

SEQ ID NO: 50597 - DNA, 20 bp, Artificial Sequence
  Synthetic oligonucleotide; TGG chr11 5211775 5211794 5211778 -
tcaacctgaaggcccattag

SEQ ID NO: 50598 - DNA, 20 bp, Artificial Sequence
  Synthetic oligonucleotide; AAG chr11 5211762 5211781 5211765 -
ccattagtggtataccgata

SEQ ID NO: 50599 - DNA, 20 bp, Artificial Sequence
  Synthetic oligonucleotide; TGG chr11 5211740 5211759 5211743 -
gaacatgtacatatacacca

SEQ ID NO: 50600 - DNA, 20 bp, Artificial Sequence
  Synthetic oligonucleotide; TGG chr11 5211728 5211747 5211731 -
atacaccatggaatactatg

SEQ ID NO: 50601 - DNA, 20 bp, Artificial Sequence
  Synthetic oligonucleotide; AAG chr11 5211717 5211736 5211720 -
aatactatgtggccataaaa

SEQ ID NO: 50602 - DNA, 20 bp, Artificial Sequence
  Synthetic oligonucleotide; GAG chr11 5211711 5211730 5211714 -
atgtggccataaaaaagaat

SEQ ID NO: 50603 - DNA, 20 bp, Artificial Sequence
  Synthetic oligonucleotide; CAG chr11 5211695 5211714 5211698 -
gaatgagatcatgtcctttg

SEQ ID NO: 50604 - DNA, 20 bp, Artificial Sequence
  Synthetic oligonucleotide; AGG chr11 5211694 5211713 5211697 -
aatgagatcatgtcctttgc

SEQ ID NO: 50605 - DNA, 20 bp, Artificial Sequence
  Synthetic oligonucleotide; TGG chr11 5211687 5211706 5211690 -
tcatgtcctttgcaggaaca

SEQ ID NO: 50606 - DNA, 20 bp, Artificial Sequence
  Synthetic oligonucleotide; TGG chr11 5211683 5211702 5211686 -
gtcctttgcaggaacatgga

SEQ ID NO: 50607 - DNA, 20 bp, Artificial Sequence
  Synthetic oligonucleotide; GAG chr11 5211681 5211700 5211684 -
cctttgcaggaacatggatg

SEQ ID NO: 50608 - DNA, 20 bp, Artificial Sequence
  Synthetic oligonucleotide; CGG chr11 5211677 5211696 5211680 -
tgcaggaacatggatggagc

SEQ ID NO: 50609 - DNA, 20 bp, Artificial Sequence
  Synthetic oligonucleotide; AAG chr11 5211647 5211666 5211650 -
tatccttaacaaactaatgt

SEQ ID NO: 50610 - DNA, 20 bp, Artificial Sequence
  Synthetic oligonucleotide; CAG chr11 5211642 5211661 5211645 -
ttaacaaactaatgtaagaa

SEQ ID NO: 50611 - DNA, 20 bp, Artificial Sequence
  Synthetic oligonucleotide; AAG chr11 5211610 5211629 5211613 -
tactacatattatcacttac

SEQ ID NO: 50612 - DNA, 20 bp, Artificial Sequence
  Synthetic oligonucleotide; TAG chr11 5211607 5211626 5211610 -
tacatattatcacttacaag

SEQ ID NO: 50613 - DNA, 20 bp, Artificial Sequence
  Synthetic oligonucleotide; AGG chr11 5211606 5211625 5211609 -
acatattatcacttacaagt

SEQ ID NO: 50614 - DNA, 20 bp, Artificial Sequence
  Synthetic oligonucleotide; GAG chr11 5211592 5211611 5211595 -
acaagtaggaactaaatgat

SEQ ID NO: 50615 - DNA, 20 bp, Artificial Sequence
  Synthetic oligonucleotide; CGG chr11 5211572 5211591 5211575 -
gagaaaacatgcacacataa

SEQ ID NO: 50616 - DNA, 20 bp, Artificial Sequence
  Synthetic oligonucleotide; GGG chr11 5211571 5211590 5211574 -
agaaaacatgcacacataac

SEQ ID NO: 50617 - DNA, 20 bp, Artificial Sequence
  Synthetic oligonucleotide; AAG chr11 5211563 5211582 5211566 -
tgcacacataacgggaacaa

SEQ ID NO: 50618 - DNA, 20 bp, Artificial Sequence
  Synthetic oligonucleotide; CAG chr11 5211554 5211573 5211557 -
aacgggaacaaaagacactg

SEQ ID NO: 50619 - DNA, 20 bp, Artificial Sequence
  Synthetic oligonucleotide; GAG chr11 5211544 5211563 5211547 -
aaagacactgcagcctaatt

SEQ ID NO: 50620 - DNA, 20 bp, Artificial Sequence
  Synthetic oligonucleotide; TGG chr11 5211539 5211558 5211542 -
cactgcagcctaattgagtt

SEQ ID NO: 50621 - DNA, 20 bp, Artificial Sequence
  Synthetic oligonucleotide; GAG chr11 5211537 5211556 5211540 -
ctgcagcctaattgagtttg

SEQ ID NO: 50622 - DNA, 20 bp, Artificial Sequence
  Synthetic oligonucleotide; AGG chr11 5211536 5211555 5211539 -
tgcagcctaattgagtttgg

SEQ ID NO: 50623 - DNA, 20 bp, Artificial Sequence
  Synthetic oligonucleotide; GGG chr11 5211535 5211554 5211538 -
gcagcctaattgagtttgga

SEQ ID NO: 50624 - DNA, 20 bp, Artificial Sequence
  Synthetic oligonucleotide; TGG chr11 5211532 5211551 5211535 -
gcctaattgagtttggaggg

SEQ ID NO: 50625 - DNA, 20 bp, Artificial Sequence
  Synthetic oligonucleotide; GGG chr11 5211531 5211550 5211534 -
cctaattgagtttggagggt

SEQ ID NO: 50626 - DNA, 20 bp, Artificial Sequence
  Synthetic oligonucleotide; CGG chr11 5211526 5211545 5211529 -
ttgagtttggagggtgggaa

SEQ ID NO: 50627 - DNA, 20 bp, Artificial Sequence
  Synthetic oligonucleotide; GGG chr11 5211525 5211544 5211528 -
tgagtttggagggtgggaac

SEQ ID NO: 50628 - DNA, 20 bp, Artificial Sequence
  Synthetic oligonucleotide; GGG chr11 5211524 5211543 5211527 -
gagtttggagggtgggaacg

SEQ ID NO: 50629 - DNA, 20 bp, Artificial Sequence
  Synthetic oligonucleotide; GAG chr11 5211522 5211541 5211525 -
gtttggagggtgggaacggg

SEQ ID NO: 50630 - DNA, 20 bp, Artificial Sequence
  Synthetic oligonucleotide; AAG chr11 5211519 5211538 5211522 -
tggagggtgggaacggggag

SEQ ID NO: 50631 - DNA, 20 bp, Artificial Sequence
  Synthetic oligonucleotide; GAG chr11 5211517 5211536 5211520 -
gagggtgggaacggggagaa

SEQ ID NO: 50632 - DNA, 20 bp, Artificial Sequence
  Synthetic oligonucleotide; CAG chr11 5211514 5211533 5211517 -
ggtgggaacggggagaagag

SEQ ID NO: 50633 - DNA, 20 bp, Artificial Sequence
  Synthetic oligonucleotide; AAG chr11 5211508 5211527 5211511 -
aacggggagaagagcagaaa

SEQ ID NO: 50634 - DNA, 20 bp, Artificial Sequence
  Synthetic oligonucleotide; GAG chr11 5211497 5211516 5211500 -
gagcagaaaaagtaactatt

SEQ ID NO: 50635 - DNA, 20 bp, Artificial Sequence
  Synthetic oligonucleotide; TGG chr11 5211491 5211510 5211494 -
aaaaagtaactattgagtac

SEQ ID NO: 50636 - DNA, 20 bp, Artificial Sequence
  Synthetic oligonucleotide; GGG chr11 5211490 5211509 5211493 -
aaaagtaactattgagtact

SEQ ID NO: 50637 - DNA, 20 bp, Artificial Sequence
  Synthetic oligonucleotide; GAG chr11 5211488 5211507 5211491 -
aagtaactattgagtactgg

SEQ ID NO: 50638 - DNA, 20 bp, Artificial Sequence
  Synthetic oligonucleotide; TAG chr11 5211448 5211467 5211451 -
acaaacccatgacatgtgtt

SEQ ID NO: 50639 - DNA, 20 bp, Artificial Sequence
  Synthetic oligonucleotide; GAG chr11 5211426 5211445 5211429 -
gctatgtaacaaaccatcgt

SEQ ID NO: 50640 - DNA, 20 bp, Artificial Sequence
  Synthetic oligonucleotide; TAG chr11 5211419 5211438 5211422 -
aacaaaccatcgtgagtctt

SEQ ID NO: 50641 - DNA, 20 bp, Artificial Sequence
  Synthetic oligonucleotide; CAG chr11 5211416 5211435 5211419 -
aaaccatcgtgagtctttag

SEQ ID NO: 50642 - DNA, 20 bp, Artificial Sequence
  Synthetic oligonucleotide; TAG chr11 5211368 5211387 5211371 -
ttgctcctctttccacctat

SEQ ID NO: 50643 - DNA, 20 bp, Artificial Sequence
  Synthetic oligonucleotide; TAG chr11 5211350 5211369 5211353 -
attagtcacatatcttttta

SEQ ID NO: 50644 - DNA, 20 bp, Artificial Sequence
  Synthetic oligonucleotide; CAG chr11 5211340 5211359 5211343 -
tatctttttatagttataat

SEQ ID NO: 50645 - DNA, 20 bp, Artificial Sequence
  Synthetic oligonucleotide; AAG chr11 5211328 5211347 5211331 -
gttataatcagcttgttttt

SEQ ID NO: 50646 - DNA, 20 bp, Artificial Sequence
  Synthetic oligonucleotide; AAG chr11 5211293 5211312 5211296 -
ttgttttatgcgcattatga

SEQ ID NO: 50647 - DNA, 20 bp, Artificial Sequence
  Synthetic oligonucleotide; AAG chr11 5211243 5211262 5211246 -
gtaatttgattttatgcaac

SEQ ID NO: 50648 - DNA, 20 bp, Artificial Sequence
  Synthetic oligonucleotide; TAG chr11 5211221 5211240 5211224 -
gcatttattgtgttcctata

SEQ ID NO: 50649 - DNA, 20 bp, Artificial Sequence
  Synthetic oligonucleotide; TGG chr11 5211194 5211213 5211197 -
tataaaaactgtatatatgt

SEQ ID NO: 50650 - DNA, 20 bp, Artificial Sequence
  Synthetic oligonucleotide; GAG chr11 5211192 5211211 5211195 -
taaaaactgtatatatgttg

SEQ ID NO: 50651 - DNA, 20 bp, Artificial Sequence
  Synthetic oligonucleotide; AGG chr11 5211191 5211210 5211194 -
aaaaactgtatatatgttgg

SEQ ID NO: 50652 - DNA, 20 bp, Artificial Sequence
  Synthetic oligonucleotide; GAG chr11 5211146 5211165 5211149 -
ttttgccctcaaaataatgt

SEQ ID NO: 50653 - DNA, 20 bp, Artificial Sequence
  Synthetic oligonucleotide; TAG chr11 5211138 5211157 5211141 -
tcaaaataatgtgagcaatt

SEQ ID NO: 50654 - DNA, 20 bp, Artificial Sequence
  Synthetic oligonucleotide; TGG chr11 5211130 5211149 5211133 -
atgtgagcaatttagtccta

SEQ ID NO: 50655 - DNA, 20 bp, Artificial Sequence
  Synthetic oligonucleotide; AAG chr11 5211114 5211133 5211117 -
cctatggctcctatttgtta

SEQ ID NO: 50656 - DNA, 20 bp, Artificial Sequence
  Synthetic oligonucleotide; CAG chr11 5211106 5211125 5211109 -
tcctatttgttaaagacatt

SEQ ID NO: 50657 - DNA, 20 bp, Artificial Sequence
  Synthetic oligonucleotide; TAG chr11 5211065 5211084 5211068 -
attgttaatttctttctttc

SEQ ID NO: 50658 - DNA, 20 bp, Artificial Sequence
  Synthetic oligonucleotide; CAG chr11 5211041 5211060 5211044 -
tctcttttttttttttttga

SEQ ID NO: 50659 - DNA, 20 bp, Artificial Sequence
  Synthetic oligonucleotide; AGG chr11 5211040 5211059 5211043 -
ctcttttttttttttttgac

SEQ ID NO: 50660 - DNA, 20 bp, Artificial Sequence
  Synthetic oligonucleotide; GGG chr11 5211039 5211058 5211042 -
tcttttttttttttttgaca

SEQ ID NO: 50661 - DNA, 20 bp, Artificial Sequence
  Synthetic oligonucleotide; CAG chr11 5211021 5211040 5211024 -
cagggtctcgctgtgttgcc

SEQ ID NO: 50662 - DNA, 20 bp, Artificial Sequence
  Synthetic oligonucleotide; AGG chr11 5211020 5211039 5211023 -
agggtctcgctgtgttgccc

SEQ ID NO: 50663 - DNA, 20 bp, Artificial Sequence
  Synthetic oligonucleotide; TGG chr11 5211016 5211035 5211019 -
tctcgctgtgttgcccaggt

SEQ ID NO: 50664 - DNA, 20 bp, Artificial Sequence
  Synthetic oligonucleotide; GAG chr11 5211014 5211033 5211017 -
tcgctgtgttgcccaggttg

SEQ ID NO: 50665 - DNA, 20 bp, Artificial Sequence
  Synthetic oligonucleotide; CAG chr11 5211009 5211028 5211012 -
gtgttgcccaggttggagtg

SEQ ID NO: 50666 - DNA, 20 bp, Artificial Sequence
  Synthetic oligonucleotide; TGG chr11 5211006 5211025 5211009 -
ttgcccaggttggagtgcag

SEQ ID NO: 50667 - DNA, 20 bp, Artificial Sequence
  Synthetic oligonucleotide; TGG chr11 5210970 5210989 5210973 -
cactgcaatctccccctcct

SEQ ID NO: 50668 - DNA, 20 bp, Artificial Sequence
  Synthetic oligonucleotide; AAG chr11 5210964 5210983 5210967 -
aatctccccctccttggctc

SEQ ID NO: 50669 - DNA, 20 bp, Artificial Sequence
  Synthetic oligonucleotide; CAG chr11 5210947 5210966 5210950 -
ctcaagatatccttccacct

SEQ ID NO: 50670 - DNA, 20 bp, Artificial Sequence
  Synthetic oligonucleotide; AAG chr11 5210938 5210957 5210941 -
tccttccacctcagcctccc

SEQ ID NO: 50671 - DNA, 20 bp, Artificial Sequence
  Synthetic oligonucleotide; TAG chr11 5210935 5210954 5210938 -
ttccacctcagcctcccaag

SEQ ID NO: 50672 - DNA, 20 bp, Artificial Sequence
  Synthetic oligonucleotide; TGG chr11 5210931 5210950 5210934 -
acctcagcctcccaagtagc

SEQ ID NO: 50673 - DNA, 20 bp, Artificial Sequence
  Synthetic oligonucleotide; GGG chr11 5210930 5210949 5210933 -
cctcagcctcccaagtagct

SEQ ID NO: 50674 - DNA, 20 bp, Artificial Sequence
  Synthetic oligonucleotide; CAG chr11 5210923 5210942 5210926 -
ctcccaagtagctgggacta

SEQ ID NO: 50675 - DNA, 20 bp, Artificial Sequence
  Synthetic oligonucleotide; AGG chr11 5210922 5210941 5210925 -
tcccaagtagctgggactac

SEQ ID NO: 50676 - DNA, 20 bp, Artificial Sequence
  Synthetic oligonucleotide; CGG chr11 5210903 5210922 5210906 -
caggcacgtaacaccatatt

SEQ ID NO: 50677 - DNA, 20 bp, Artificial Sequence
  Synthetic oligonucleotide; TAG chr11 5210880 5210899 5210883 -
ctactttttaaaattttttg

SEQ ID NO: 50678 - DNA, 20 bp, Artificial Sequence
  Synthetic oligonucleotide; GAG chr11 5210878 5210897 5210881 -
actttttaaaattttttgta

SEQ ID NO: 50679 - DNA, 20 bp, Artificial Sequence
  Synthetic oligonucleotide; GAG chr11 5210876 5210895 5210879 -
tttttaaaattttttgtaga

SEQ ID NO: 50680 - DNA, 20 bp, Artificial Sequence
  Synthetic oligonucleotide; AGG chr11 5210875 5210894 5210878 -
ttttaaaattttttgtagag

SEQ ID NO: 50681 - DNA, 20 bp, Artificial Sequence
  Synthetic oligonucleotide; GGG chr11 5210874 5210893 5210877 -
tttaaaattttttgtagaga

SEQ ID NO: 50682 - DNA, 20 bp, Artificial Sequence
  Synthetic oligonucleotide; GGG chr11 5210873 5210892 5210876 -
ttaaaattttttgtagagag

SEQ ID NO: 50683 - DNA, 20 bp, Artificial Sequence
  Synthetic oligonucleotide; AAG chr11 5210854 5210873 5210857 -
ggggtttctccatgttgccc

SEQ ID NO: 50684 - DNA, 20 bp, Artificial Sequence
  Synthetic oligonucleotide; TGG chr11 5210850 5210869 5210853 -
tttctccatgttgcccaagc

SEQ ID NO: 50685 - DNA, 20 bp, Artificial Sequence
  Synthetic oligonucleotide; GAG chr11 5210835 5210854 5210838 -
caagctggtctccaactcct

SEQ ID NO: 50686 - DNA, 20 bp, Artificial Sequence
  Synthetic oligonucleotide; CGG chr11 5210814 5210833 5210817 -
agctcaaatcgttctccctc

SEQ ID NO: 50687 - DNA, 20 bp, Artificial Sequence
  Synthetic oligonucleotide; CGG chr11 5210808 5210827 5210811 -
aatcgttctccctccggcct

SEQ ID NO: 50688 - DNA, 20 bp, Artificial Sequence
  Synthetic oligonucleotide; CAG chr11 5210796 5210815 5210799 -
tccggcctcggctgtgatta

SEQ ID NO: 50689 - DNA, 20 bp, Artificial Sequence
  Synthetic oligonucleotide; AGG chr11 5210795 5210814 5210798 -
ccggcctcggctgtgattac

SEQ ID NO: 50690 - DNA, 20 bp, Artificial Sequence
  Synthetic oligonucleotide; GAG chr11 5210789 5210808 5210792 -
tcggctgtgattacaggtgt

SEQ ID NO: 50691 - DNA, 20 bp, Artificial Sequence
  Synthetic oligonucleotide; TGG chr11 5210776 5210795 5210779 -
caggtgtgagccactgtgct

SEQ ID NO: 50692 - DNA, 20 bp, Artificial Sequence
  Synthetic oligonucleotide; CAG chr11 5210771 5210790 5210774 -
gtgagccactgtgcttggcc

SEQ ID NO: 50693 - DNA, 20 bp, Artificial Sequence
  Synthetic oligonucleotide; GAG chr11 5210732 5210751 5210735 -
ctgttattttctaatccttc

SEQ ID NO: 50694 - DNA, 20 bp, Artificial Sequence
  Synthetic oligonucleotide; AGG chr11 5210731 5210750 5210734 -
tgttattttctaatccttcg

SEQ ID NO: 50695 - DNA, 20 bp, Artificial Sequence
  Synthetic oligonucleotide; AAG chr11 5210723 5210742 5210726 -
tctaatccttcgaggaactc

SEQ ID NO: 50696 - DNA, 20 bp, Artificial Sequence
  Synthetic oligonucleotide; AAG chr11 5210697 5210716 5210700 -
tatcttgaaaactaattcaa

SEQ ID NO: 50697 - DNA, 20 bp, Artificial Sequence
  Synthetic oligonucleotide; AGG chr11 5210696 5210715 5210699 -
atcttgaaaactaattcaaa

SEQ ID NO: 50698 - DNA, 20 bp, Artificial Sequence
  Synthetic oligonucleotide; GAG chr11 5210686 5210705 5210689 -
ctaattcaaaaggtactaac

SEQ ID NO: 50699 - DNA, 20 bp, Artificial Sequence
  Synthetic oligonucleotide; TAG chr11 5210681 5210700 5210684 -
tcaaaaggtactaacgagat

SEQ ID NO: 50700 - DNA, 20 bp, Artificial Sequence
  Synthetic oligonucleotide; AGG chr11 5210680 5210699 5210683 -
caaaaggtactaacgagatt

SEQ ID NO: 50701 - DNA, 20 bp, Artificial Sequence
  Synthetic oligonucleotide; AAG chr11 5210677 5210696 5210680 -
aaggtactaacgagattagg

SEQ ID NO: 50702 - DNA, 20 bp, Artificial Sequence
  Synthetic oligonucleotide; GAG chr11 5210668 5210687 5210671 -
acgagattaggaagtgcccc

SEQ ID NO: 50703 - DNA, 20 bp, Artificial Sequence
  Synthetic oligonucleotide; GAG chr11 5210666 5210685 5210669 -
gagattaggaagtgccccga

SEQ ID NO: 50704 - DNA, 20 bp, Artificial Sequence
  Synthetic oligonucleotide; GAG chr11 5210664 5210683 5210667 -
gattaggaagtgccccgaga

SEQ ID NO: 50705 - DNA, 20 bp, Artificial Sequence
  Synthetic oligonucleotide; TAG chr11 5210657 5210676 5210660 -
aagtgccccgagagagtgca

SEQ ID NO: 50706 - DNA, 20 bp, Artificial Sequence
  Synthetic oligonucleotide; GAG chr11 5210655 5210674 5210658 -
gtgccccgagagagtgcata

SEQ ID NO: 50707 - DNA, 20 bp, Artificial Sequence
  Synthetic oligonucleotide; AGG chr11 5210654 5210673 5210657 -
tgccccgagagagtgcatag

SEQ ID NO: 50708 - DNA, 20 bp, Artificial Sequence
  Synthetic oligonucleotide; GAG chr11 5210652 5210671 5210655 -
ccccgagagagtgcatagag

SEQ ID NO: 50709 - DNA, 20 bp, Artificial Sequence
  Synthetic oligonucleotide; GAG chr11 5210650 5210669 5210653 -
ccgagagagtgcatagagga

SEQ ID NO: 50710 - DNA, 20 bp, Artificial Sequence
  Synthetic oligonucleotide; AGG chr11 5210649 5210668 5210652 -
cgagagagtgcatagaggag

SEQ ID NO: 50711 - DNA, 20 bp, Artificial Sequence
  Synthetic oligonucleotide; GGG chr11 5210648 5210667 5210651 -
gagagagtgcatagaggaga

SEQ ID NO: 50712 - DNA, 20 bp, Artificial Sequence
  Synthetic oligonucleotide; TAG chr11 5210645 5210664 5210648 -
agagtgcatagaggagaggg

SEQ ID NO: 50713 - DNA, 20 bp, Artificial Sequence
  Synthetic oligonucleotide; AAG chr11 5210642 5210661 5210645 -
gtgcatagaggagagggtag

SEQ ID NO: 50714 - DNA, 20 bp, Artificial Sequence
  Synthetic oligonucleotide; AAG chr11 5210637 5210656 5210640 -
tagaggagagggtagaagta

SEQ ID NO: 50715 - DNA, 20 bp, Artificial Sequence
  Synthetic oligonucleotide; TGG chr11 5210633 5210652 5210636 -
ggagagggtagaagtaaagc

SEQ ID NO: 50716 - DNA, 20 bp, Artificial Sequence
  Synthetic oligonucleotide; GGG chr11 5210632 5210651 5210635 -
gagagggtagaagtaaagct

SEQ ID NO: 50717 - DNA, 20 bp, Artificial Sequence
  Synthetic oligonucleotide; TAG chr11 5210619 5210638 5210622 -
taaagctgggtttgctttgt

SEQ ID NO: 50718 - DNA, 20 bp, Artificial Sequence
  Synthetic oligonucleotide; AAG chr11 5210614 5210633 5210617 -
ctgggtttgctttgttagtg

SEQ ID NO: 50719 - DNA, 20 bp, Artificial Sequence
  Synthetic oligonucleotide; AGG chr11 5210613 5210632 5210616 -
tgggtttgctttgttagtga

SEQ ID NO: 50720 - DNA, 20 bp, Artificial Sequence
  Synthetic oligonucleotide; CAG chr11 5210598 5210617 5210601 -
agtgaaggaataaaatgcat

SEQ ID NO: 50721 - DNA, 20 bp, Artificial Sequence
  Synthetic oligonucleotide; GAG chr11 5210596 5210615 5210599 -
tgaaggaataaaatgcatca

SEQ ID NO: 50722 - DNA, 20 bp, Artificial Sequence
  Synthetic oligonucleotide; AGG chr11 5210595 5210614 5210598 -
gaaggaataaaatgcatcag

SEQ ID NO: 50723 - DNA, 20 bp, Artificial Sequence
  Synthetic oligonucleotide; GGG chr11 5210594 5210613 5210597 -
aaggaataaaatgcatcaga

SEQ ID NO: 50724 - DNA, 20 bp, Artificial Sequence
  Synthetic oligonucleotide; CAG chr11 5210581 5210600 5210584 -
catcagagggccgaccttct

SEQ ID NO: 50725 - DNA, 20 bp, Artificial Sequence
  Synthetic oligonucleotide; TAG chr11 5210571 5210590 5210574 -
ccgaccttctcagcctctga

SEQ ID NO: 50726 - DNA, 20 bp, Artificial Sequence
  Synthetic oligonucleotide; AGG chr11 5210570 5210589 5210573 -
cgaccttctcagcctctgat

SEQ ID NO: 50727 - DNA, 20 bp, Artificial Sequence
  Synthetic oligonucleotide; GAG chr11 5210563 5210582 5210566 -
ctcagcctctgataggccct

SEQ ID NO: 50728 - DNA, 20 bp, Artificial Sequence
  Synthetic oligonucleotide; TGG chr11 5210559 5210578 5210562 -
gcctctgataggccctgagc

SEQ ID NO: 50729 - DNA, 20 bp, Artificial Sequence
  Synthetic oligonucleotide; GGG chr11 5210558 5210577 5210561 -
cctctgataggccctgagct

SEQ ID NO: 50730 - DNA, 20 bp, Artificial Sequence
  Synthetic oligonucleotide; GAG chr11 5210556 5210575 5210559 -
tctgataggccctgagctgg

SEQ ID NO: 50731 - DNA, 20 bp, Artificial Sequence
  Synthetic oligonucleotide; AAG chr11 5210548 5210567 5210551 -
gccctgagctgggagctgct

SEQ ID NO: 50732 - DNA, 20 bp, Artificial Sequence
  Synthetic oligonucleotide; CAG chr11 5210537 5210556 5210540 -
ggagctgctaagccatcctg

SEQ ID NO: 50733 - DNA, 20 bp, Artificial Sequence
  Synthetic oligonucleotide; GAG chr11 5210535 5210554 5210538 -
agctgctaagccatcctgca

SEQ ID NO: 50734 - DNA, 20 bp, Artificial Sequence
  Synthetic oligonucleotide; AAG chr11 5210531 5210550 5210534 -
gctaagccatcctgcagagc

SEQ ID NO: 50735 - DNA, 20 bp, Artificial Sequence
  Synthetic oligonucleotide; TGG chr11 5210528 5210547 5210531 -
aagccatcctgcagagcaag

SEQ ID NO: 50736 - DNA, 20 bp, Artificial Sequence
  Synthetic oligonucleotide; GGG chr11 5210527 5210546 5210530 -
agccatcctgcagagcaagt

SEQ ID NO: 50737 - DNA, 20 bp, Artificial Sequence
  Synthetic oligonucleotide; GAG chr11 5210525 5210544 5210528 -
ccatcctgcagagcaagtgg

SEQ ID NO: 50738 - DNA, 20 bp, Artificial Sequence
  Synthetic oligonucleotide; CAG chr11 5210519 5210538 5210522 -
tgcagagcaagtgggagaaa

SEQ ID NO: 50739 - DNA, 20 bp, Artificial Sequence
  Synthetic oligonucleotide; GAG chr11 5210517 5210536 5210520 -
cagagcaagtgggagaaaca

SEQ ID NO: 50740 - DNA, 20 bp, Artificial Sequence
  Synthetic oligonucleotide; AGG chr11 5210516 5210535 5210519 -
agagcaagtgggagaaacag

SEQ ID NO: 50741 - DNA, 20 bp, Artificial Sequence
  Synthetic oligonucleotide; GGG chr11 5210515 5210534 5210518 -
gagcaagtgggagaaacaga

SEQ ID NO: 50742 - DNA, 20 bp, Artificial Sequence
  Synthetic oligonucleotide; TAG chr11 5210509 5210528 5210512 -
gtgggagaaacagagggcat

SEQ ID NO: 50743 - DNA, 20 bp, Artificial Sequence
  Synthetic oligonucleotide; AGG chr11 5210508 5210527 5210511 -
tgggagaaacagagggcatt

SEQ ID NO: 50744 - DNA, 20 bp, Artificial Sequence
  Synthetic oligonucleotide; CAG chr11 5210504 5210523 5210507 -
agaaacagagggcattaggt

SEQ ID NO: 50745 - DNA, 20 bp, Artificial Sequence
  Synthetic oligonucleotide; TGG chr11 5210498 5210517 5210501 -
agagggcattaggtcagact

SEQ ID NO: 50746 - DNA, 20 bp, Artificial Sequence
  Synthetic oligonucleotide; CAG chr11 5210495 5210514 5210498 -
gggcattaggtcagacttgg

SEQ ID NO: 50747 - DNA, 20 bp, Artificial Sequence
  Synthetic oligonucleotide; TGG chr11 5210445 5210464 5210448 -
ccccatccacttgctcattc

SEQ ID NO: 50748 - DNA, 20 bp, Artificial Sequence
  Synthetic oligonucleotide; TGG chr11 5210441 5210460 5210444 -
atccacttgctcattctgga

SEQ ID NO: 50749 - DNA, 20 bp, Artificial Sequence
  Synthetic oligonucleotide; CAG chr11 5210438 5210457 5210441 -
cacttgctcattctggatgg

SEQ ID NO: 50750 - DNA, 20 bp, Artificial Sequence
  Synthetic oligonucleotide; AGG chr11 5210437 5210456 5210440 -
acttgctcattctggatggc

SEQ ID NO: 50751 - DNA, 20 bp, Artificial Sequence
  Synthetic oligonucleotide; TAG chr11 5210432 5210451 5210435 -
ctcattctggatggcaggat

SEQ ID NO: 50752 - DNA, 20 bp, Artificial Sequence
  Synthetic oligonucleotide; AGG chr11 5210431 5210450 5210434 -
tcattctggatggcaggatt

SEQ ID NO: 50753 - DNA, 20 bp, Artificial Sequence
  Synthetic oligonucleotide; TAG chr11 5210407 5210426 5210410 -
tttatatttccctaccatat

SEQ ID NO: 50754 - DNA, 20 bp, Artificial Sequence
  Synthetic oligonucleotide; AAG chr11 5210392 5210411 5210395 -
catattagcttgtgcactta

SEQ ID NO: 50755 - DNA, 20 bp, Artificial Sequence
  Synthetic oligonucleotide; AGG chr11 5210391 5210410 5210394 -
atattagcttgtgcacttaa

SEQ ID NO: 50756 - DNA, 20 bp, Artificial Sequence
  Synthetic oligonucleotide; AAG chr11 5210388 5210407 5210391 -
ttagcttgtgcacttaaagg

SEQ ID NO: 50757 - DNA, 20 bp, Artificial Sequence
  Synthetic oligonucleotide; TAG chr11 5210383 5210402 5210386 -
ttgtgcacttaaaggaagtt

SEQ ID NO: 50758 - DNA, 20 bp, Artificial Sequence
  Synthetic oligonucleotide; TAG chr11 5210379 5210398 5210382 -
gcacttaaaggaagtttaga

SEQ ID NO: 50759 - DNA, 20 bp, Artificial Sequence
  Synthetic oligonucleotide; TGG chr11 5210365 5210384 5210368 -
tttagatagccttgactcca

SEQ ID NO: 50760 - DNA, 20 bp, Artificial Sequence
  Synthetic oligonucleotide; GGG chr11 5210364 5210383 5210367 -
ttagatagccttgactccat

SEQ ID NO: 50761 - DNA, 20 bp, Artificial Sequence
  Synthetic oligonucleotide; GGG chr11 5210363 5210382 5210366 -
tagatagccttgactccatg

SEQ ID NO: 50762 - DNA, 20 bp, Artificial Sequence
  Synthetic oligonucleotide; AAG chr11 5210358 5210377 5210361 -
agccttgactccatggggaa

SEQ ID NO: 50763 - DNA, 20 bp, Artificial Sequence
  Synthetic oligonucleotide; AGG chr11 5210357 5210376 5210360 -
gccttgactccatggggaaa

SEQ ID NO: 50764 - DNA, 20 bp, Artificial Sequence
  Synthetic oligonucleotide; AAG chr11 5210351 5210370 5210354 -
actccatggggaaaaggaaa

SEQ ID NO: 50765 - DNA, 20 bp, Artificial Sequence
  Synthetic oligonucleotide; TAG chr11 5210342 5210361 5210345 -
ggaaaaggaaaaagtacatt

SEQ ID NO: 50766 - DNA, 20 bp, Artificial Sequence
  Synthetic oligonucleotide; TGG chr11 5210339 5210358 5210342 -
aaaggaaaaagtacatttag

SEQ ID NO: 50767 - DNA, 20 bp, Artificial Sequence
  Synthetic oligonucleotide; GGG chr11 5210338 5210357 5210341 -
aaggaaaaagtacatttagt

SEQ ID NO: 50768 - DNA, 20 bp, Artificial Sequence
  Synthetic oligonucleotide; GGG chr11 5210337 5210356 5210340 -
aggaaaaagtacatttagtg

SEQ ID NO: 50769 - DNA, 20 bp, Artificial Sequence
  Synthetic oligonucleotide; TGG chr11 5210332 5210351 5210335 -
aaagtacatttagtggggtg

SEQ ID NO: 50770 - DNA, 20 bp, Artificial Sequence
  Synthetic oligonucleotide; GGG chr11 5210331 5210350 5210334 -
aagtacatttagtggggtgt

SEQ ID NO: 50771 - DNA, 20 bp, Artificial Sequence
  Synthetic oligonucleotide; TGG chr11 5210323 5210342 5210326 -
ttagtggggtgtgggactgt

SEQ ID NO: 50772 - DNA, 20 bp, Artificial Sequence
  Synthetic oligonucleotide; TAG chr11 5210315 5210334 5210318 -
gtgtgggactgttggattat

SEQ ID NO: 50773 - DNA, 20 bp, Artificial Sequence
  Synthetic oligonucleotide; CAG chr11 5210285 5210304 5210288 -
gcatttctctcattctgttc

SEQ ID NO: 50774 - DNA, 20 bp, Artificial Sequence
  Synthetic oligonucleotide; GAG chr11 5210280 5210299 5210283 -
tctctcattctgttccagtt

SEQ ID NO: 50775 - DNA, 20 bp, Artificial Sequence
  Synthetic oligonucleotide; AGG chr11 5210279 5210298 5210282 -
ctctcattctgttccagttg

SEQ ID NO: 50776 - DNA, 20 bp, Artificial Sequence
  Synthetic oligonucleotide; CAG chr11 5210275 5210294 5210278 -
cattctgttccagttgaggc

SEQ ID NO: 50777 - DNA, 20 bp, Artificial Sequence
  Synthetic oligonucleotide; TAG chr11 5210260 5210279 5210263 -
gaggccagcttgcttcccac

SEQ ID NO: 50778 - DNA, 20 bp, Artificial Sequence
  Synthetic oligonucleotide; AAG chr11 5210257 5210276 5210260 -
gccagcttgcttcccactag

SEQ ID NO: 50779 - DNA, 20 bp, Artificial Sequence
  Synthetic oligonucleotide; TAG chr11 5210228 5210247 5210231 -
tgttctctttatacaattcc

SEQ ID NO: 50780 - DNA, 20 bp, Artificial Sequence
  Synthetic oligonucleotide; AAG chr11 5210223 5210242 5210226 -
tctttatacaattcctagtc

SEQ ID NO: 50781 - DNA, 20 bp, Artificial Sequence
  Synthetic oligonucleotide; TAG chr11 5210220 5210239 5210223 -
ttatacaattcctagtcaag

SEQ ID NO: 50782 - DNA, 20 bp, Artificial Sequence
  Synthetic oligonucleotide; AGG chr11 5210219 5210238 5210222 -
tatacaattcctagtcaagt

SEQ ID NO: 50783 - DNA, 20 bp, Artificial Sequence
  Synthetic oligonucleotide; GGG chr11 5210218 5210237 5210221 -
atacaattcctagtcaagta

SEQ ID NO: 50784 - DNA, 20 bp, Artificial Sequence
  Synthetic oligonucleotide; GGG chr11 5210217 5210236 5210220 -
tacaattcctagtcaagtag

SEQ ID NO: 50785 - DNA, 20 bp, Artificial Sequence
  Synthetic oligonucleotide; AAG chr11 5210210 5210229 5210213 -
cctagtcaagtaggggcaaa

SEQ ID NO: 50786 - DNA, 20 bp, Artificial Sequence
  Synthetic oligonucleotide; TGG chr11 5210183 5210202 5210186 -
ttcatttattattgtttttc

SEQ ID NO: 50787 - DNA, 20 bp, Artificial Sequence
  Synthetic oligonucleotide; GGG chr11 5210182 5210201 5210185 -
tcatttattattgtttttct

SEQ ID NO: 50788 - DNA, 20 bp, Artificial Sequence
  Synthetic oligonucleotide; TAG chr11 5210176 5210195 5210179 -
attattgtttttctgggatg

SEQ ID NO: 50789 - DNA, 20 bp, Artificial Sequence
  Synthetic oligonucleotide; CAG chr11 5210172 5210191 5210175 -
ttgtttttctgggatgtagc

SEQ ID NO: 50790 - DNA, 20 bp, Artificial Sequence
  Synthetic oligonucleotide; AGG chr11 5210171 5210190 5210174 -
tgtttttctgggatgtagcc

SEQ ID NO: 50791 - DNA, 20 bp, Artificial Sequence
  Synthetic oligonucleotide; GAG chr11 5210169 5210188 5210172 -
tttttctgggatgtagccag

SEQ ID NO: 50792 - DNA, 20 bp, Artificial Sequence
  Synthetic oligonucleotide; TGG chr11 5210152 5210171 5210155 -
caggagcaatttaaacttgc

SEQ ID NO: 50793 - DNA, 20 bp, Artificial Sequence
  Synthetic oligonucleotide; GAG chr11 5210150 5210169 5210153 -
ggagcaatttaaacttgctg

SEQ ID NO: 50794 - DNA, 20 bp, Artificial Sequence
  Synthetic oligonucleotide; GAG chr11 5210125 5210144 5210128 -
caatttcttcaactacaaat

SEQ ID NO: 50795 - DNA, 20 bp, Artificial Sequence
  Synthetic oligonucleotide; CAG chr11 5210111 5210130 5210114 -
acaaatgagaataataataa

SEQ ID NO: 50796 - DNA, 20 bp, Artificial Sequence
  Synthetic oligonucleotide; AGG chr11 5210110 5210129 5210113 -
caaatgagaataataataac

SEQ ID NO: 50797 - DNA, 20 bp, Artificial Sequence
  Synthetic oligonucleotide; CAG chr11 5210084 5210103 5210087 -
acgaactaattgtaataata

SEQ ID NO: 50798 - DNA, 20 bp, Artificial Sequence
  Synthetic oligonucleotide; AAG chr11 5210062 5210081 5210065 -
gaactaaatgtaaatataca

SEQ ID NO: 50799 - DNA, 20 bp, Artificial Sequence
  Synthetic oligonucleotide; AGG chr11 5210061 5210080 5210064 -
aactaaatgtaaatatacaa

SEQ ID NO: 50800 - DNA, 20 bp, Artificial Sequence
  Synthetic oligonucleotide; TGG chr11 5210044 5210063 5210047 -
caaaggataaattcaaaatc

SEQ ID NO: 50801 - DNA, 20 bp, Artificial Sequence
  Synthetic oligonucleotide; GGG chr11 5210043 5210062 5210046 -
aaaggataaattcaaaatct

SEQ ID NO: 50802 - DNA, 20 bp, Artificial Sequence
  Synthetic oligonucleotide; CAG chr11 5210034 5210053 5210037 -
attcaaaatctgggcacatg

SEQ ID NO: 50803 - DNA, 20 bp, Artificial Sequence
  Synthetic oligonucleotide; AGG chr11 5210033 5210052 5210036 -
ttcaaaatctgggcacatgc

SEQ ID NO: 50804 - DNA, 20 bp, Artificial Sequence
  Synthetic oligonucleotide; AAG chr11 5210023 5210042 5210026 -
gggcacatgcaggctgctat

SEQ ID NO: 50805 - DNA, 20 bp, Artificial Sequence
  Synthetic oligonucleotide; GAG chr11 5210021 5210040 5210024 -
gcacatgcaggctgctataa

SEQ ID NO: 50806 - DNA, 20 bp, Artificial Sequence
  Synthetic oligonucleotide; TAG chr11 5210000 5210019 5210003 -
agaaaacatctatgatatta

SEQ ID NO: 50807 - DNA, 20 bp, Artificial Sequence
  Synthetic oligonucleotide; AGG chr11 5209999 5210018 5210002 -
gaaaacatctatgatattat

SEQ ID NO: 50808 - DNA, 20 bp, Artificial Sequence
  Synthetic oligonucleotide; TAG chr11 5209974 5209993 5209977 -
gaccaaatgacattaaatta

SEQ ID NO: 50809 - DNA, 20 bp, Artificial Sequence
  Synthetic oligonucleotide; TGG chr11 5209971 5209990 5209974 -
caaatgacattaaattatag

SEQ ID NO: 50810 - DNA, 20 bp, Artificial Sequence
  Synthetic oligonucleotide; GGG chr11 5209970 5209989 5209973 -
aaatgacattaaattatagt

SEQ ID NO: 50811 - DNA, 20 bp, Artificial Sequence
  Synthetic oligonucleotide; GGG chr11 5209969 5209988 5209972 -
aatgacattaaattatagtg

SEQ ID NO: 50812 - DNA, 20 bp, Artificial Sequence
  Synthetic oligonucleotide; GAG chr11 5209967 5209986 5209970 -
tgacattaaattatagtggg

SEQ ID NO: 50813 - DNA, 20 bp, Artificial Sequence
  Synthetic oligonucleotide; AGG chr11 5209966 5209985 5209969 -
gacattaaattatagtgggg

SEQ ID NO: 50814 - DNA, 20 bp, Artificial Sequence
  Synthetic oligonucleotide; CAG chr11 5209959 5209978 5209962 -
aattatagtggggaggtaaa

SEQ ID NO: 50815 - DNA, 20 bp, Artificial Sequence
  Synthetic oligonucleotide; AGG chr11 5209958 5209977 5209961 -
attatagtggggaggtaaac

SEQ ID NO: 50816 - DNA, 20 bp, Artificial Sequence
  Synthetic oligonucleotide; TGG chr11 5209954 5209973 5209957 -
tagtggggaggtaaacaggt

SEQ ID NO: 50817 - DNA, 20 bp, Artificial Sequence
  Synthetic oligonucleotide; CAG chr11 5209951 5209970 5209954 -
tggggaggtaaacaggttgg

SEQ ID NO: 50818 - DNA, 20 bp, Artificial Sequence
  Synthetic oligonucleotide; AAG chr11 5209939 5209958 5209942 -
caggttggcagtgtatttta

SEQ ID NO: 50819 - DNA, 20 bp, Artificial Sequence
  Synthetic oligonucleotide; TAG chr11 5209911 5209930 5209914 -
catatgcatattttatgacc

SEQ ID NO: 50820 - DNA, 20 bp, Artificial Sequence
  Synthetic oligonucleotide; CAG chr11 5209901 5209920 5209904 -
ttttatgacctagcaattta

SEQ ID NO: 50821 - DNA, 20 bp, Artificial Sequence
  Synthetic oligonucleotide; AAG chr11 5209877 5209896 5209880 -
atatatatacaaaaatatat

SEQ ID NO: 50822 - DNA, 20 bp, Artificial Sequence
  Synthetic oligonucleotide; TAG chr11 5209866 5209885 5209869 -
aaaatatataagaatcttca

SEQ ID NO: 50823 - DNA, 20 bp, Artificial Sequence
  Synthetic oligonucleotide; CAG chr11 5209863 5209882 5209866 -
atatataagaatcttcatag

SEQ ID NO: 50824 - DNA, 20 bp, Artificial Sequence
  Synthetic oligonucleotide; TAG chr11 5209848 5209867 5209851 -
catagcagcaatttatatta

SEQ ID NO: 50825 - DNA, 20 bp, Artificial Sequence
  Synthetic oligonucleotide; AAG chr11 5209841 5209860 5209844 -
gcaatttatattatagccaa

SEQ ID NO: 50826 - DNA, 20 bp, Artificial Sequence
  Synthetic oligonucleotide; TAG chr11 5209837 5209856 5209840 -
tttatattatagccaaaagc

SEQ ID NO: 50827 - DNA, 20 bp, Artificial Sequence
  Synthetic oligonucleotide; AAG chr11 5209834 5209853 5209837 -
atattatagccaaaagctag

SEQ ID NO: 50828 - DNA, 20 bp, Artificial Sequence
  Synthetic oligonucleotide; AGG chr11 5209833 5209852 5209836 -
tattatagccaaaagctaga

SEQ ID NO: 50829 - DNA, 20 bp, Artificial Sequence
  Synthetic oligonucleotide; TGG chr11 5209809 5209828 5209812 -
actcaaatatctatcaactg

SEQ ID NO: 50830 - DNA, 20 bp, Artificial Sequence
  Synthetic oligonucleotide; GAG chr11 5209807 5209826 5209810 -
tcaaatatctatcaactgtg

SEQ ID NO: 50831 - DNA, 20 bp, Artificial Sequence
  Synthetic oligonucleotide; TGG chr11 5209789 5209808 5209792 -
tggagtcaataaatatattg

SEQ ID NO: 50832 - DNA, 20 bp, Artificial Sequence
  Synthetic oligonucleotide; TAG chr11 5209773 5209792 5209776 -
attgtggtatatacataaaa

SEQ ID NO: 50833 - DNA, 20 bp, Artificial Sequence
  Synthetic oligonucleotide; CAG chr11 5209761 5209780 5209764 -
acataaaatagaatgacatt

SEQ ID NO: 50834 - DNA, 20 bp, Artificial Sequence
  Synthetic oligonucleotide; CAG chr11 5209741 5209760 5209744 -
cagaaatgaaaaatcaacta

SEQ ID NO: 50835 - DNA, 20 bp, Artificial Sequence
  Synthetic oligonucleotide; TAG chr11 5209730 5209749 5209733 -
aatcaactacagtcatacac

SEQ ID NO: 50836 - DNA, 20 bp, Artificial Sequence
  Synthetic oligonucleotide; AAG chr11 5209694 5209713 5209697 -
cacaaacataatattgaata

SEQ ID NO: 50837 - DNA, 20 bp, Artificial Sequence
  Synthetic oligonucleotide; CAG chr11 5209690 5209709 5209693 -
aacataatattgaataaagt

SEQ ID NO: 50838 - DNA, 20 bp, Artificial Sequence
  Synthetic oligonucleotide; AAG chr11 5209683 5209702 5209686 -
tattgaataaagtcagacat

SEQ ID NO: 50839 - DNA, 20 bp, Artificial Sequence
  Synthetic oligonucleotide; CAG chr11 5209675 5209694 5209678 -
aaagtcagacataagcaaca

SEQ ID NO: 50840 - DNA, 20 bp, Artificial Sequence
  Synthetic oligonucleotide; AAG chr11 5209642 5209661 5209645 -
tgtatacacacttttaaaaa

SEQ ID NO: 50841 - DNA, 20 bp, Artificial Sequence
  Synthetic oligonucleotide; AGG chr11 5209641 5209660 5209644 -
gtatacacacttttaaaaaa

SEQ ID NO: 50842 - DNA, 20 bp, Artificial Sequence
  Synthetic oligonucleotide; GGG chr11 5209640 5209659 5209643 -
tatacacacttttaaaaaaa

SEQ ID NO: 50843 - DNA, 20 bp, Artificial Sequence
  Synthetic oligonucleotide; GAG chr11 5209633 5209652 5209636 -
acttttaaaaaaagggacat

SEQ ID NO: 50844 - DNA, 20 bp, Artificial Sequence
  Synthetic oligonucleotide; CAG chr11 5209604 5209623 5209607 -
gtgataaaaatgaattatat

SEQ ID NO: 50845 - DNA, 20 bp, Artificial Sequence
  Synthetic oligonucleotide; AGG chr11 5209603 5209622 5209606 -
tgataaaaatgaattatatc

SEQ ID NO: 50846 - DNA, 20 bp, Artificial Sequence
  Synthetic oligonucleotide; TGG chr11 5209586 5209605 5209589 -
atcaggataattattaactt

SEQ ID NO: 50847 - DNA, 20 bp, Artificial Sequence
  Synthetic oligonucleotide; GAG chr11 5209584 5209603 5209587 -
caggataattattaactttg

SEQ ID NO: 50848 - DNA, 20 bp, Artificial Sequence
  Synthetic oligonucleotide; TAG chr11 5209576 5209595 5209579 -
ttattaactttggagacaat

SEQ ID NO: 50849 - DNA, 20 bp, Artificial Sequence
  Synthetic oligonucleotide; TGG chr11 5209573 5209592 5209576 -
ttaactttggagacaattag

SEQ ID NO: 50850 - DNA, 20 bp, Artificial Sequence
  Synthetic oligonucleotide; AAG chr11 5209563 5209582 5209566 -
agacaattagtggaatgata

SEQ ID NO: 50851 - DNA, 20 bp, Artificial Sequence
  Synthetic oligonucleotide; GAG chr11 5209561 5209580 5209564 -
acaattagtggaatgataaa

SEQ ID NO: 50852 - DNA, 20 bp, Artificial Sequence
  Synthetic oligonucleotide; GAG chr11 5209557 5209576 5209560 -
ttagtggaatgataaagagt

SEQ ID NO: 50853 - DNA, 20 bp, Artificial Sequence
  Synthetic oligonucleotide; TAG chr11 5209523 5209542 5209526 -
tctttaatttcctatcttat

SEQ ID NO: 50854 - DNA, 20 bp, Artificial Sequence
  Synthetic oligonucleotide; TGG chr11 5209512 5209531 5209515 -
ctatcttattagttgttaca

SEQ ID NO: 50855 - DNA, 20 bp, Artificial Sequence
  Synthetic oligonucleotide; GGG chr11 5209511 5209530 5209514 -
tatcttattagttgttacat

SEQ ID NO: 50856 - DNA, 20 bp, Artificial Sequence
  Synthetic oligonucleotide; AAG chr11 5209492 5209511 5209495 -
tgggtgtgttcaccttccaa

SEQ ID NO: 50857 - DNA, 20 bp, Artificial Sequence
  Synthetic oligonucleotide; CAG chr11 5209483 5209502 5209486 -
tcaccttccaaaagttaatt

SEQ ID NO: 50858 - DNA, 20 bp, Artificial Sequence
  Synthetic oligonucleotide; TAG chr11 5209409 5209428 5209412 -
attaaaataaaaactaaatt

SEQ ID NO: 50859 - DNA, 20 bp, Artificial Sequence
  Synthetic oligonucleotide; TGG chr11 5209395 5209414 5209398 -
taaatttagaaactaaacaa

SEQ ID NO: 50860 - DNA, 20 bp, Artificial Sequence
  Synthetic oligonucleotide; AAG chr11 5209388 5209407 5209391 -
agaaactaaacaatggaaaa

SEQ ID NO: 50861 - DNA, 20 bp, Artificial Sequence
  Synthetic oligonucleotide; CAG chr11 5209384 5209403 5209387 -
actaaacaatggaaaaaagt

SEQ ID NO: 50862 - DNA, 20 bp, Artificial Sequence
  Synthetic oligonucleotide; AAG chr11 5209363 5209382 5209366 -
agaccatttctttgcatttc

SEQ ID NO: 50863 - DNA, 20 bp, Artificial Sequence
  Synthetic oligonucleotide; AAG chr11 5209360 5209379 5209363 -
ccatttctttgcatttcaag

SEQ ID NO: 50864 - DNA, 20 bp, Artificial Sequence
  Synthetic oligonucleotide; GAG chr11 5209345 5209364 5209348 -
tcaagaagtgcatactaact

SEQ ID NO: 50865 - DNA, 20 bp, Artificial Sequence
  Synthetic oligonucleotide; TGG chr11 5209326 5209345 5209329 -
tgagatattacattcttaaa

SEQ ID NO: 50866 - DNA, 20 bp, Artificial Sequence
  Synthetic oligonucleotide; TAG chr11 5209320 5209339 5209323 -
attacattcttaaatggctt

SEQ ID NO: 50867 - DNA, 20 bp, Artificial Sequence
  Synthetic oligonucleotide; TAG chr11 5209312 5209331 5209315 -
cttaaatggctttagtcaat

SEQ ID NO: 50868 - DNA, 20 bp, Artificial Sequence
  Synthetic oligonucleotide; AGG chr11 5209311 5209330 5209314 -
ttaaatggctttagtcaatt

SEQ ID NO: 50869 - DNA, 20 bp, Artificial Sequence
  Synthetic oligonucleotide; TAG chr11 5209268 5209287 5209271 -
taaacatttgcttctaaatc

SEQ ID NO: 50870 - DNA, 20 bp, Artificial Sequence
  Synthetic oligonucleotide; AGG chr11 5209267 5209286 5209270 -
aaacatttgcttctaaatct

SEQ ID NO: 50871 - DNA, 20 bp, Artificial Sequence
  Synthetic oligonucleotide; TAG chr11 5209264 5209283 5209267 -
catttgcttctaaatctagg

SEQ ID NO: 50872 - DNA, 20 bp, Artificial Sequence
  Synthetic oligonucleotide; AAG chr11 5209244 5209263 5209247 -
tagactgtcttaacttcctg

SEQ ID NO: 50873 - DNA, 20 bp, Artificial Sequence
  Synthetic oligonucleotide; AAG chr11 5209241 5209260 5209244 -
actgtcttaacttcctgaag

SEQ ID NO: 50874 - DNA, 20 bp, Artificial Sequence
  Synthetic oligonucleotide; GAG chr11 5209239 5209258 5209242 -
tgtcttaacttcctgaagaa

SEQ ID NO: 50875 - DNA, 20 bp, Artificial Sequence
  Synthetic oligonucleotide; AGG chr11 5209238 5209257 5209241 -
gtcttaacttcctgaagaag

SEQ ID NO: 50876 - DNA, 20 bp, Artificial Sequence
  Synthetic oligonucleotide; GGG chr11 5209237 5209256 5209240 -
tcttaacttcctgaagaaga

SEQ ID NO: 50877 - DNA, 20 bp, Artificial Sequence
  Synthetic oligonucleotide; AAG chr11 5209234 5209253 5209237 -
taacttcctgaagaagaggg

SEQ ID NO: 50878 - DNA, 20 bp, Artificial Sequence
  Synthetic oligonucleotide; AAG chr11 5209219 5209238 5209222 -
gagggaagaaataatgaaaa

SEQ ID NO: 50879 - DNA, 20 bp, Artificial Sequence
  Synthetic oligonucleotide; AGG chr11 5209218 5209237 5209221 -
agggaagaaataatgaaaaa

SEQ ID NO: 50880 - DNA, 20 bp, Artificial Sequence
  Synthetic oligonucleotide; CAG chr11 5209208 5209227 5209211 -
taatgaaaaaaggaaaataa

SEQ ID NO: 50881 - DNA, 20 bp, Artificial Sequence
  Synthetic oligonucleotide; TAG chr11 5209198 5209217 5209201 -
aggaaaataacagaaatacc

SEQ ID NO: 50882 - DNA, 20 bp, Artificial Sequence
  Synthetic oligonucleotide; GAG chr11 5209196 5209215 5209199 -
gaaaataacagaaataccta

SEQ ID NO: 50883 - DNA, 20 bp, Artificial Sequence
  Synthetic oligonucleotide; AGG chr11 5209195 5209214 5209198 -
aaaataacagaaatacctag

SEQ ID NO: 50884 - DNA, 20 bp, Artificial Sequence
  Synthetic oligonucleotide; GAG chr11 5209193 5209212 5209196 -
aataacagaaatacctagag

SEQ ID NO: 50885 - DNA, 20 bp, Artificial Sequence
  Synthetic oligonucleotide; AGG chr11 5209192 5209211 5209195 -
ataacagaaatacctagagg

SEQ ID NO: 50886 - DNA, 20 bp, Artificial Sequence
  Synthetic oligonucleotide; GGG chr11 5209191 5209210 5209194 -
taacagaaatacctagagga

SEQ ID NO: 50887 - DNA, 20 bp, Artificial Sequence
  Synthetic oligonucleotide; AAG chr11 5209181 5209200 5209184 -
acctagaggagggaaataaa

SEQ ID NO: 50888 - DNA, 20 bp, Artificial Sequence
  Synthetic oligonucleotide; TAG chr11 5209176 5209195 5209179 -
gaggagggaaataaaaagcc

SEQ ID NO: 50889 - DNA, 20 bp, Artificial Sequence
  Synthetic oligonucleotide; AGG chr11 5209175 5209194 5209178 -
aggagggaaataaaaagcct

SEQ ID NO: 50890 - DNA, 20 bp, Artificial Sequence
  Synthetic oligonucleotide; AAG chr11 5209171 5209190 5209174 -
gggaaataaaaagcctagga

SEQ ID NO: 50891 - DNA, 20 bp, Artificial Sequence
  Synthetic oligonucleotide; AAG chr11 5209159 5209178 5209162 -
gcctaggaaagcaacatgaa

SEQ ID NO: 50892 - DNA, 20 bp, Artificial Sequence
  Synthetic oligonucleotide; TGG chr11 5209155 5209174 5209158 -
aggaaagcaacatgaaaaga

SEQ ID NO: 50893 - DNA, 20 bp, Artificial Sequence
  Synthetic oligonucleotide; TGG chr11 5209145 5209164 5209148 -
catgaaaagatggtgctctc

SEQ ID NO: 50894 - DNA, 20 bp, Artificial Sequence
  Synthetic oligonucleotide; GAG chr11 5209125 5209144 5209128 -
tggtacatcctgtgcttcct

SEQ ID NO: 50895 - DNA, 20 bp, Artificial Sequence
  Synthetic oligonucleotide; TGG chr11 5209090 5209109 5209093 -
gtcttttacacacactgtct

SEQ ID NO: 50896 - DNA, 20 bp, Artificial Sequence
  Synthetic oligonucleotide; GGG chr11 5209089 5209108 5209092 -
tcttttacacacactgtctt

SEQ ID NO: 50897 - DNA, 20 bp, Artificial Sequence
  Synthetic oligonucleotide; TGG chr11 5209085 5209104 5209088 -
ttacacacactgtcttggga

SEQ ID NO: 50898 - DNA, 20 bp, Artificial Sequence
  Synthetic oligonucleotide; GGG chr11 5209084 5209103 5209087 -
tacacacactgtcttgggat

SEQ ID NO: 50899 - DNA, 20 bp, Artificial Sequence
  Synthetic oligonucleotide; AAG chr11 5209077 5209096 5209080 -
actgtcttgggatgggcatt

SEQ ID NO: 50900 - DNA, 20 bp, Artificial Sequence
  Synthetic oligonucleotide; AGG chr11 5209076 5209095 5209079 -
ctgtcttgggatgggcatta

SEQ ID NO: 50901 - DNA, 20 bp, Artificial Sequence
  Synthetic oligonucleotide; TAG chr11 5209068 5209087 5209071 -
ggatgggcattaaggtgttg

SEQ ID NO: 50902 - DNA, 20 bp, Artificial Sequence
  Synthetic oligonucleotide; CAG chr11 5209060 5209079 5209063 -
attaaggtgttgtagctact

SEQ ID NO: 50903 - DNA, 20 bp, Artificial Sequence
  Synthetic oligonucleotide; TAG chr11 5209056 5209075 5209059 -
aggtgttgtagctactcagc

SEQ ID NO: 50904 - DNA, 20 bp, Artificial Sequence
  Synthetic oligonucleotide; AAG chr11 5209052 5209071 5209055 -
gttgtagctactcagctagt

SEQ ID NO: 50905 - DNA, 20 bp, Artificial Sequence
  Synthetic oligonucleotide; TAG chr11 5209049 5209068 5209052 -
gtagctactcagctagtaag

SEQ ID NO: 50906 - DNA, 20 bp, Artificial Sequence
  Synthetic oligonucleotide; GAG chr11 5209044 5209063 5209047 -
tactcagctagtaagtagct

SEQ ID NO: 50907 - DNA, 20 bp, Artificial Sequence
  Synthetic oligonucleotide; AAG chr11 5209039 5209058 5209042 -
agctagtaagtagctgagct

SEQ ID NO: 50908 - DNA, 20 bp, Artificial Sequence
  Synthetic oligonucleotide; AAG chr11 5209021 5209040 5209024 -
ctaagattctttcaattcca

SEQ ID NO: 50909 - DNA, 20 bp, Artificial Sequence
  Synthetic oligonucleotide; CAG chr11 5209017 5209036 5209020 -
gattctttcaattccaaagt

SEQ ID NO: 50910 - DNA, 20 bp, Artificial Sequence
  Synthetic oligonucleotide; CAG chr11 5209014 5209033 5209017 -
tctttcaattccaaagtcag

SEQ ID NO: 50911 - DNA, 20 bp, Artificial Sequence
  Synthetic oligonucleotide; TGG chr11 5208998 5209017 5209001 -
tcagcagtgtcttcactaca

SEQ ID NO: 50912 - DNA, 20 bp, Artificial Sequence
  Synthetic oligonucleotide; AAG chr11 5208986 5209005 5208989 -
tcactacatggtactatgtc

SEQ ID NO: 50913 - DNA, 20 bp, Artificial Sequence
  Synthetic oligonucleotide; AAG chr11 5208982 5209001 5208985 -
tacatggtactatgtcaaga

SEQ ID NO: 50914 - DNA, 20 bp, Artificial Sequence
  Synthetic oligonucleotide; GAG chr11 5208980 5208999 5208983 -
catggtactatgtcaagaaa

SEQ ID NO: 50915 - DNA, 20 bp, Artificial Sequence
  Synthetic oligonucleotide; AAG chr11 5208964 5208983 5208967 -
gaaagagaaactccactaaa

SEQ ID NO: 50916 - DNA, 20 bp, Artificial Sequence
  Synthetic oligonucleotide; TAG chr11 5208943 5208962 5208946 -
agaacttcattgctctctgt

SEQ ID NO: 50917 - DNA, 20 bp, Artificial Sequence
  Synthetic oligonucleotide; AGG chr11 5208942 5208961 5208945 -
gaacttcattgctctctgtt

SEQ ID NO: 50918 - DNA, 20 bp, Artificial Sequence
  Synthetic oligonucleotide; GGG chr11 5208941 5208960 5208944 -
aacttcattgctctctgtta

SEQ ID NO: 50919 - DNA, 20 bp, Artificial Sequence
  Synthetic oligonucleotide; TGG chr11 5208924 5208943 5208927 -
ttagggatacattaacattt

SEQ ID NO: 50920 - DNA, 20 bp, Artificial Sequence
  Synthetic oligonucleotide; GGG chr11 5208923 5208942 5208926 -
tagggatacattaacatttt

SEQ ID NO: 50921 - DNA, 20 bp, Artificial Sequence
  Synthetic oligonucleotide; TAG chr11 5208898 5208917 5208901 -
atgaaaaaaaaatgttacaa

SEQ ID NO: 50922 - DNA, 20 bp, Artificial Sequence
  Synthetic oligonucleotide; CAG chr11 5208891 5208910 5208894 -
aaaaatgttacaatagctta

SEQ ID NO: 50923 - DNA, 20 bp, Artificial Sequence
  Synthetic oligonucleotide; AGG chr11 5208890 5208909 5208893 -
aaaatgttacaatagcttac

SEQ ID NO: 50924 - DNA, 20 bp, Artificial Sequence
  Synthetic oligonucleotide; TGG chr11 5208865 5208884 5208868 -
acctccacttatatgaccta

SEQ ID NO: 50925 - DNA, 20 bp, Artificial Sequence
  Synthetic oligonucleotide; CAG chr11 5208850 5208869 5208853 -
acctatggacctcttaaact

SEQ ID NO: 50926 - DNA, 20 bp, Artificial Sequence
  Synthetic oligonucleotide; GAG chr11 5208846 5208865 5208849 -
atggacctcttaaactcagc

SEQ ID NO: 50927 - DNA, 20 bp, Artificial Sequence
  Synthetic oligonucleotide; AAG chr11 5208838 5208857 5208841 -
cttaaactcagcgagttgaa

SEQ ID NO: 50928 - DNA, 20 bp, Artificial Sequence
  Synthetic oligonucleotide; TAG chr11 5208834 5208853 5208837 -
aactcagcgagttgaaaaga

SEQ ID NO: 50929 - DNA, 20 bp, Artificial Sequence
  Synthetic oligonucleotide; CAG chr11 5208810 5208829 5208813 -
aaattatcctccacttcttt

SEQ ID NO: 50930 - DNA, 20 bp, Artificial Sequence
  Synthetic oligonucleotide; TGG chr11 5208778 5208797 5208781 -
atgcttccaaacttgatgaa

SEQ ID NO: 50931 - DNA, 20 bp, Artificial Sequence
  Synthetic oligonucleotide; CAG chr11 5208769 5208788 5208772 -
aacttgatgaatggttcact

SEQ ID NO: 50932 - DNA, 20 bp, Artificial Sequence
  Synthetic oligonucleotide; AAG chr11 5208760 5208779 5208763 -
aatggttcactcagatttcc

SEQ ID NO: 50933 - DNA, 20 bp, Artificial Sequence
  Synthetic oligonucleotide; TAG chr11 5208674 5208693 5208677 -
aataatcaatttctcacaac

SEQ ID NO: 50934 - DNA, 20 bp, Artificial Sequence
  Synthetic oligonucleotide; TAG chr11 5208650 5208669 5208653 -
attattatcataaatactga

SEQ ID NO: 50935 - DNA, 20 bp, Artificial Sequence
  Synthetic oligonucleotide; GAG chr11 5208642 5208661 5208645 -
cataaatactgatagctttt

SEQ ID NO: 50936 - DNA, 20 bp, Artificial Sequence
  Synthetic oligonucleotide; TGG chr11 5208639 5208658 5208642 -
aaatactgatagcttttgag

SEQ ID NO: 50937 - DNA, 20 bp, Artificial Sequence
  Synthetic oligonucleotide; CAG chr11 5208636 5208655 5208639 -
tactgatagcttttgagtgg

SEQ ID NO: 50938 - DNA, 20 bp, Artificial Sequence
  Synthetic oligonucleotide; GAG chr11 5208628 5208647 5208631 -
gcttttgagtggcagataat

SEQ ID NO: 50939 - DNA, 20 bp, Artificial Sequence
  Synthetic oligonucleotide; CAG chr11 5208577 5208596 5208580 -
caatatttttaaaaattgtg

SEQ ID NO: 50940 - DNA, 20 bp, Artificial Sequence
  Synthetic oligonucleotide; AAG chr11 5208572 5208591 5208575 -
tttttaaaaattgtgcagct

SEQ ID NO: 50941 - DNA, 20 bp, Artificial Sequence
  Synthetic oligonucleotide; GAG chr11 5208565 5208584 5208568 -
aaattgtgcagctaagtgtt

SEQ ID NO: 50942 - DNA, 20 bp, Artificial Sequence
  Synthetic oligonucleotide; AAG chr11 5208545 5208564 5208548 -
gagctaaaaattatatacct

SEQ ID NO: 50943 - DNA, 20 bp, Artificial Sequence
  Synthetic oligonucleotide; AAG chr11 5208529 5208548 5208532 -
acctaagaaatgacaaaacc

SEQ ID NO: 50944 - DNA, 20 bp, Artificial Sequence
  Synthetic oligonucleotide; CAG chr11 5208517 5208536 5208520 -
acaaaaccaagatttgaaac

SEQ ID NO: 50945 - DNA, 20 bp, Artificial Sequence
  Synthetic oligonucleotide; CAG chr11 5208503 5208522 5208506 -
tgaaaccagttctcactgac

SEQ ID NO: 50946 - DNA, 20 bp, Artificial Sequence
  Synthetic oligonucleotide; AAG chr11 5208500 5208519 5208503 -
aaccagttctcactgaccag

SEQ ID NO: 50947 - DNA, 20 bp, Artificial Sequence
  Synthetic oligonucleotide; CAG chr11 5208487 5208506 5208490 -
tgaccagaagatcattcttt

SEQ ID NO: 50948 - DNA, 20 bp, Artificial Sequence
  Synthetic oligonucleotide; AAG chr11 5208482 5208501 5208485 -
agaagatcattctttcagct

SEQ ID NO: 50949 - DNA, 20 bp, Artificial Sequence
  Synthetic oligonucleotide; AGG chr11 5208481 5208500 5208484 -
gaagatcattctttcagcta

SEQ ID NO: 50950 - DNA, 20 bp, Artificial Sequence
  Synthetic oligonucleotide; GAG chr11 5208479 5208498 5208482 -
agatcattctttcagctaag

SEQ ID NO: 50951 - DNA, 20 bp, Artificial Sequence
  Synthetic oligonucleotide; TAG chr11 5208456 5208475 5208459 -
ctaattactgcgttccttca

SEQ ID NO: 50952 - DNA, 20 bp, Artificial Sequence
  Synthetic oligonucleotide; CAG chr11 5208437 5208456 5208440 -
atagtttttttttttcctct

SEQ ID NO: 50953 - DNA, 20 bp, Artificial Sequence
  Synthetic oligonucleotide; AGG chr11 5208436 5208455 5208439 -
tagtttttttttttcctctc

SEQ ID NO: 50954 - DNA, 20 bp, Artificial Sequence
  Synthetic oligonucleotide; TGG chr11 5208409 5208428 5208412 -
ccctgaaatatgcattttct

SEQ ID NO: 50955 - DNA, 20 bp, Artificial Sequence
  Synthetic oligonucleotide; CGG chr11 5208348 5208367 5208351 -
gcccttcaataacttctaac

SEQ ID NO: 50956 - DNA, 20 bp, Artificial Sequence
  Synthetic oligonucleotide; TGG chr11 5208316 5208335 5208319 -
cctatttgtgtcttgcaaca

SEQ ID NO: 50957 - DNA, 20 bp, Artificial Sequence
  Synthetic oligonucleotide; GGG chr11 5208315 5208334 5208318 -
ctatttgtgtcttgcaacat

SEQ ID NO: 50958 - DNA, 20 bp, Artificial Sequence
  Synthetic oligonucleotide; TAG chr11 5208308 5208327 5208311 -
tgtcttgcaacatgggataa

SEQ ID NO: 50959 - DNA, 20 bp, Artificial Sequence
  Synthetic oligonucleotide; AGG chr11 5208307 5208326 5208310 -
gtcttgcaacatgggataat

SEQ ID NO: 50960 - DNA, 20 bp, Artificial Sequence
  Synthetic oligonucleotide; TGG chr11 5208301 5208320 5208304 -
caacatgggataataggttc

SEQ ID NO: 50961 - DNA, 20 bp, Artificial Sequence
  Synthetic oligonucleotide; GAG chr11 5208295 5208314 5208298 -
gggataataggttctggcat

SEQ ID NO: 50962 - DNA, 20 bp, Artificial Sequence
  Synthetic oligonucleotide; CAG chr11 5208291 5208310 5208294 -
taataggttctggcatgaga

SEQ ID NO: 50963 - DNA, 20 bp, Artificial Sequence
  Synthetic oligonucleotide; CGG chr11 5208286 5208305 5208289 -
ggttctggcatgagacagcc

SEQ ID NO: 50964 - DNA, 20 bp, Artificial Sequence
  Synthetic oligonucleotide; GGG chr11 5208285 5208304 5208288 -
gttctggcatgagacagccc

SEQ ID NO: 50965 - DNA, 20 bp, Artificial Sequence
  Synthetic oligonucleotide; CAG chr11 5208273 5208292 5208276 -
gacagcccgggctctactct

SEQ ID NO: 50966 - DNA, 20 bp, Artificial Sequence
  Synthetic oligonucleotide; AGG chr11 5208272 5208291 5208275 -
acagcccgggctctactctc

SEQ ID NO: 50967 - DNA, 20 bp, Artificial Sequence
  Synthetic oligonucleotide; AAG chr11 5208264 5208283 5208267 -
ggctctactctcaggtccat

SEQ ID NO: 50968 - DNA, 20 bp, Artificial Sequence
  Synthetic oligonucleotide; TAG chr11 5208257 5208276 5208260 -
ctctcaggtccataagttaa

SEQ ID NO: 50969 - DNA, 20 bp, Artificial Sequence
  Synthetic oligonucleotide; GAG chr11 5208245 5208264 5208248 -
taagttaatagctttgtttt

SEQ ID NO: 50970 - DNA, 20 bp, Artificial Sequence
  Synthetic oligonucleotide; AGG chr11 5208244 5208263 5208247 -
aagttaatagctttgttttg

SEQ ID NO: 50971 - DNA, 20 bp, Artificial Sequence
  Synthetic oligonucleotide; AAG chr11 5208239 5208258 5208242 -
aatagctttgttttgaggat

SEQ ID NO: 50972 - DNA, 20 bp, Artificial Sequence
  Synthetic oligonucleotide; AAG chr11 5208199 5208218 5208202 -
acattcctcaataataaatt

SEQ ID NO: 50973 - DNA, 20 bp, Artificial Sequence
  Synthetic oligonucleotide; GAG chr11 5208197 5208216 5208200 -
attcctcaataataaattaa

SEQ ID NO: 50974 - DNA, 20 bp, Artificial Sequence
  Synthetic oligonucleotide; TGG chr11 5208188 5208207 5208191 -
taataaattaagagctataa

SEQ ID NO: 50975 - DNA, 20 bp, Artificial Sequence
  Synthetic oligonucleotide; TAG chr11 5208163 5208182 5208166 -
tctactttataaatttctta

SEQ ID NO: 50976 - DNA, 20 bp, Artificial Sequence
  Synthetic oligonucleotide; GAG chr11 5208159 5208178 5208162 -
ctttataaatttcttatagt

SEQ ID NO: 50977 - DNA, 20 bp, Artificial Sequence
  Synthetic oligonucleotide; AAG chr11 5208116 5208135 5208119 -
cgaaaaatgacaaaccaaat

SEQ ID NO: 50978 - DNA, 20 bp, Artificial Sequence
  Synthetic oligonucleotide; CAG chr11 5208109 5208128 5208112 -
tgacaaaccaaataagttcc

SEQ ID NO: 50979 - DNA, 20 bp, Artificial Sequence
  Synthetic oligonucleotide; TGG chr11 5208077 5208096 5208080 -
actttttatcatgatgatca

SEQ ID NO: 50980 - DNA, 20 bp, Artificial Sequence
  Synthetic oligonucleotide; TAG chr11 5208029 5208048 5208032 -
ataatttttttcttcaccta

SEQ ID NO: 50981 - DNA, 20 bp, Artificial Sequence
  Synthetic oligonucleotide; CAG chr11 5208023 5208042 5208026 -
tttttcttcacctatagcca

SEQ ID NO: 50982 - DNA, 20 bp, Artificial Sequence
  Synthetic oligonucleotide; CAG chr11 5208019 5208038 5208022 -
tcttcacctatagccacagt

SEQ ID NO: 50983 - DNA, 20 bp, Artificial Sequence
  Synthetic oligonucleotide; AAG chr11 5208009 5208028 5208012 -
tagccacagtcagcttctca

SEQ ID NO: 50984 - DNA, 20 bp, Artificial Sequence
  Synthetic oligonucleotide; TAG chr11 5207970 5207989 5207973 -
ctcacctttttatgatctaa

SEQ ID NO: 50985 - DNA, 20 bp, Artificial Sequence
  Synthetic oligonucleotide; CAG chr11 5207937 5207956 5207940 -
ctccacgctgacgtttacca

SEQ ID NO: 50986 - DNA, 20 bp, Artificial Sequence
  Synthetic oligonucleotide; TGG chr11 5207930 5207949 5207933 -
ctgacgtttaccacagaacc

SEQ ID NO: 50987 - DNA, 20 bp, Artificial Sequence
  Synthetic oligonucleotide; TAG chr11 5207924 5207943 5207927 -
tttaccacagaacctggaca

SEQ ID NO: 50988 - DNA, 20 bp, Artificial Sequence
  Synthetic oligonucleotide; AGG chr11 5207923 5207942 5207926 -
ttaccacagaacctggacat

SEQ ID NO: 50989 - DNA, 20 bp, Artificial Sequence
  Synthetic oligonucleotide; CAG chr11 5207874 5207893 5207877 -
aataaataaaataaataaaa

SEQ ID NO: 50990 - DNA, 20 bp, Artificial Sequence
  Synthetic oligonucleotide; AAG chr11 5207856 5207875 5207859 -
aacagaaaaaaaacgataca

SEQ ID NO: 50991 - DNA, 20 bp, Artificial Sequence
  Synthetic oligonucleotide; AGG chr11 5207855 5207874 5207858 -
acagaaaaaaaacgatacaa

SEQ ID NO: 50992 - DNA, 20 bp, Artificial Sequence
  Synthetic oligonucleotide; GGG chr11 5207854 5207873 5207857 -
cagaaaaaaaacgatacaaa

SEQ ID NO: 50993 - DNA, 20 bp, Artificial Sequence
  Synthetic oligonucleotide; AAG chr11 5207847 5207866 5207850 -
aaaacgatacaaagggtatg

SEQ ID NO: 50994 - DNA, 20 bp, Artificial Sequence
  Synthetic oligonucleotide; AGG chr11 5207846 5207865 5207849 -
aaacgatacaaagggtatga

SEQ ID NO: 50995 - DNA, 20 bp, Artificial Sequence
  Synthetic oligonucleotide; GAG chr11 5207840 5207859 5207843 -
tacaaagggtatgaaggatt

SEQ ID NO: 50996 - DNA, 20 bp, Artificial Sequence
  Synthetic oligonucleotide; CGG chr11 5207819 5207838 5207822 -
agtgaatatgttatatgcta

SEQ ID NO: 50997 - DNA, 20 bp, Artificial Sequence
  Synthetic oligonucleotide; CAG chr11 5207813 5207832 5207816 -
tatgttatatgctacggcac

SEQ ID NO: 50998 - DNA, 20 bp, Artificial Sequence
  Synthetic oligonucleotide; TGG chr11 5207810 5207829 5207813 -
gttatatgctacggcaccag

SEQ ID NO: 50999 - DNA, 20 bp, Artificial Sequence
  Synthetic oligonucleotide; TGG chr11 5207801 5207820 5207804 -
tacggcaccagtggtctttc

SEQ ID NO: 51000 - DNA, 20 bp, Artificial Sequence
  Synthetic oligonucleotide; GGG chr11 5207800 5207819 5207803 -
acggcaccagtggtctttct

SEQ ID NO: 51001 - DNA, 20 bp, Artificial Sequence
  Synthetic oligonucleotide; TAG chr11 5207776 5207795 5207779 -
attgtacacttgccccattc

SEQ ID NO: 51002 - DNA, 20 bp, Artificial Sequence
  Synthetic oligonucleotide; AGG chr11 5207775 5207794 5207778 -
ttgtacacttgccccattct

SEQ ID NO: 51003 - DNA, 20 bp, Artificial Sequence
  Synthetic oligonucleotide; TGG chr11 5207768 5207787 5207771 -
cttgccccattctaggacaa

SEQ ID NO: 51004 - DNA, 20 bp, Artificial Sequence
  Synthetic oligonucleotide; TAG chr11 5207754 5207773 5207757 -
ggacaatggttccttctgat

SEQ ID NO: 51005 - DNA, 20 bp, Artificial Sequence
  Synthetic oligonucleotide; CAG chr11 5207741 5207760 5207744 -
ttctgattagttaccttttc

SEQ ID NO: 51006 - DNA, 20 bp, Artificial Sequence
  Synthetic oligonucleotide; GAG chr11 5207735 5207754 5207738 -
ttagttaccttttccagtct

SEQ ID NO: 51007 - DNA, 20 bp, Artificial Sequence
  Synthetic oligonucleotide; GAG chr11 5207733 5207752 5207736 -
agttaccttttccagtctga

SEQ ID NO: 51008 - DNA, 20 bp, Artificial Sequence
  Synthetic oligonucleotide; TGG chr11 5207723 5207742 5207726 -
tccagtctgagagacatgcc

SEQ ID NO: 51009 - DNA, 20 bp, Artificial Sequence
  Synthetic oligonucleotide; AAG chr11 5207704 5207723 5207707 -
ctggctcacacctgatttgt

SEQ ID NO: 51010 - DNA, 20 bp, Artificial Sequence
  Synthetic oligonucleotide; AGG chr11 5207703 5207722 5207706 -
tggctcacacctgatttgta

SEQ ID NO: 51011 - DNA, 20 bp, Artificial Sequence
  Synthetic oligonucleotide; TGG chr11 5207697 5207716 5207700 -
acacctgatttgtaaggcaa

SEQ ID NO: 51012 - DNA, 20 bp, Artificial Sequence
  Synthetic oligonucleotide; GAG chr11 5207695 5207714 5207698 -
acctgatttgtaaggcaatg

SEQ ID NO: 51013 - DNA, 20 bp, Artificial Sequence
  Synthetic oligonucleotide; TGG chr11 5207691 5207710 5207694 -
gatttgtaaggcaatggaga

SEQ ID NO: 51014 - DNA, 20 bp, Artificial Sequence
  Synthetic oligonucleotide; GAG chr11 5207689 5207708 5207692 -
tttgtaaggcaatggagatg

SEQ ID NO: 51015 - DNA, 20 bp, Artificial Sequence
  Synthetic oligonucleotide; AAG chr11 5207670 5207689 5207673 -
ggagacactcttatatccaa

SEQ ID NO: 51016 - DNA, 20 bp, Artificial Sequence
  Synthetic oligonucleotide; TAG chr11 5207663 5207682 5207666 -
ctcttatatccaaaagtaca

SEQ ID NO: 51017 - DNA, 20 bp, Artificial Sequence
  Synthetic oligonucleotide; CGG chr11 5207657 5207676 5207660 -
tatccaaaagtacatagctc

SEQ ID NO: 51018 - DNA, 20 bp, Artificial Sequence
  Synthetic oligonucleotide; TAG chr11 5207654 5207673 5207657 -
ccaaaagtacatagctccgg

SEQ ID NO: 51019 - DNA, 20 bp, Artificial Sequence
  Synthetic oligonucleotide; TAG chr11 5207649 5207668 5207652 -
agtacatagctccggtagct

SEQ ID NO: 51020 - DNA, 20 bp, Artificial Sequence
  Synthetic oligonucleotide; TAG chr11 5207625 5207644 5207628 -
taataaacctttgtcacctc

SEQ ID NO: 51021 - DNA, 20 bp, Artificial Sequence
  Synthetic oligonucleotide; GAG chr11 5207623 5207642 5207626 -
ataaacctttgtcacctcta

SEQ ID NO: 51022 - DNA, 20 bp, Artificial Sequence
  Synthetic oligonucleotide; CAG chr11 5207605 5207624 5207608 -
tagagaattctaaaaatcca

SEQ ID NO: 51023 - DNA, 20 bp, Artificial Sequence
  Synthetic oligonucleotide; TAG chr11 5207599 5207618 5207602 -
attctaaaaatccacagatt

SEQ ID NO: 51024 - DNA, 20 bp, Artificial Sequence
  Synthetic oligonucleotide; TAG chr11 5207590 5207609 5207593 -
atccacagatttagaaattc

SEQ ID NO: 51025 - DNA, 20 bp, Artificial Sequence
  Synthetic oligonucleotide; AGG chr11 5207589 5207608 5207592 -
tccacagatttagaaattct

SEQ ID NO: 51026 - DNA, 20 bp, Artificial Sequence
  Synthetic oligonucleotide; AAG chr11 5207581 5207600 5207584 -
tttagaaattctaggaatcc

SEQ ID NO: 51027 - DNA, 20 bp, Artificial Sequence
  Synthetic oligonucleotide; TAG chr11 5207566 5207585 5207569 -
aatccaagaaattacaattt

SEQ ID NO: 51028 - DNA, 20 bp, Artificial Sequence
  Synthetic oligonucleotide; CGG chr11 5207523 5207542 5207526 -
ataacaataaccaataaaca

SEQ ID NO: 51029 - DNA, 20 bp, Artificial Sequence
  Synthetic oligonucleotide; AAG chr11 5207499 5207518 5207502 -
cattttatttacataaataa

SEQ ID NO: 51030 - DNA, 20 bp, Artificial Sequence
  Synthetic oligonucleotide; TGG chr11 5207495 5207514 5207498 -
ttatttacataaataaaaga

SEQ ID NO: 51031 - DNA, 20 bp, Artificial Sequence
  Synthetic oligonucleotide; GGG chr11 5207494 5207513 5207497 -
tatttacataaataaaagat

SEQ ID NO: 51032 - DNA, 20 bp, Artificial Sequence
  Synthetic oligonucleotide; TAG chr11 5207469 5207488 5207472 -
tgtcacacaatttaaaaatc

SEQ ID NO: 51033 - DNA, 20 bp, Artificial Sequence
  Synthetic oligonucleotide; AGG chr11 5207468 5207487 5207471 -
gtcacacaatttaaaaatct

SEQ ID NO: 51034 - DNA, 20 bp, Artificial Sequence
  Synthetic oligonucleotide; GGG chr11 5207467 5207486 5207470 -
tcacacaatttaaaaatcta

SEQ ID NO: 51035 - DNA, 20 bp, Artificial Sequence
  Synthetic oligonucleotide; AAG chr11 5207460 5207479 5207463 -
atttaaaaatctagggtcga

SEQ ID NO: 51036 - DNA, 20 bp, Artificial Sequence
  Synthetic oligonucleotide; CAG chr11 5207454 5207473 5207457 -
aaatctagggtcgaaagcca

SEQ ID NO: 51037 - DNA, 20 bp, Artificial Sequence
  Synthetic oligonucleotide; AAG chr11 5207449 5207468 5207452 -
tagggtcgaaagccacagca

SEQ ID NO: 51038 - DNA, 20 bp, Artificial Sequence
  Synthetic oligonucleotide; AGG chr11 5207448 5207467 5207451 -
agggtcgaaagccacagcaa

SEQ ID NO: 51039 - DNA, 20 bp, Artificial Sequence
  Synthetic oligonucleotide; TGG chr11 5207437 5207456 5207440 -
ccacagcaaaggcaacctcc

SEQ ID NO: 51040 - DNA, 20 bp, Artificial Sequence
  Synthetic oligonucleotide; TAG chr11 5207421 5207440 5207424 -
ctcctggcactatatcacaa

SEQ ID NO: 51041 - DNA, 20 bp, Artificial Sequence
  Synthetic oligonucleotide; TAG chr11 5207406 5207425 5207409 -
cacaatagatgacacctgca

SEQ ID NO: 51042 - DNA, 20 bp, Artificial Sequence
  Synthetic oligonucleotide; GAG chr11 5207404 5207423 5207407 -
caatagatgacacctgcata

SEQ ID NO: 51043 - DNA, 20 bp, Artificial Sequence
  Synthetic oligonucleotide; AAG chr11 5207400 5207419 5207403 -
agatgacacctgcatagaga

SEQ ID NO: 51044 - DNA, 20 bp, Artificial Sequence
  Synthetic oligonucleotide; AAG chr11 5207395 5207414 5207398 -
acacctgcatagagaaagca

SEQ ID NO: 51045 - DNA, 20 bp, Artificial Sequence
  Synthetic oligonucleotide; TGG chr11 5207392 5207411 5207395 -
cctgcatagagaaagcaaag

SEQ ID NO: 51046 - DNA, 20 bp, Artificial Sequence
  Synthetic oligonucleotide; TAG chr11 5207383 5207402 5207386 -
agaaagcaaagtggtcatgt

SEQ ID NO: 51047 - DNA, 20 bp, Artificial Sequence
  Synthetic oligonucleotide; TGG chr11 5207354 5207373 5207357 -
attgcctcaaataatccctg

SEQ ID NO: 51048 - DNA, 20 bp, Artificial Sequence
  Synthetic oligonucleotide; GGG chr11 5207353 5207372 5207356 -
ttgcctcaaataatccctgt

SEQ ID NO: 51049 - DNA, 20 bp, Artificial Sequence
  Synthetic oligonucleotide; GGG chr11 5207352 5207371 5207355 -
tgcctcaaataatccctgtg

SEQ ID NO: 51050 - DNA, 20 bp, Artificial Sequence
  Synthetic oligonucleotide; CAG chr11 5207326 5207345 5207329 -
tctactcttttgtattccat

SEQ ID NO: 51051 - DNA, 20 bp, Artificial Sequence
  Synthetic oligonucleotide; CAG chr11 5207314 5207333 5207317 -
tattccatcagcttttttcc

SEQ ID NO: 51052 - DNA, 20 bp, Artificial Sequence
  Synthetic oligonucleotide; TAG chr11 5207298 5207317 5207301 -
ttcccagtaacaacacatcc

SEQ ID NO: 51053 - DNA, 20 bp, Artificial Sequence
  Synthetic oligonucleotide; GAG chr11 5207280 5207299 5207283 -
cctagcaataatatcctgac

SEQ ID NO: 51054 - DNA, 20 bp, Artificial Sequence
  Synthetic oligonucleotide; AAG chr11 5207248 5207267 5207251 -
aaaaaaaaaactcccctcct

SEQ ID NO: 51055 - DNA, 20 bp, Artificial Sequence
  Synthetic oligonucleotide; CAG chr11 5207242 5207261 5207245 -
aaaactcccctcctaagata

SEQ ID NO: 51056 - DNA, 20 bp, Artificial Sequence
  Synthetic oligonucleotide; TGG chr11 5207231 5207250 5207234 -
cctaagatacagtatctttg

SEQ ID NO: 51057 - DNA, 20 bp, Artificial Sequence
  Synthetic oligonucleotide; CAG chr11 5207219 5207238 5207222 -
tatctttgtggttgcatccc

SEQ ID NO: 51058 - DNA, 20 bp, Artificial Sequence
  Synthetic oligonucleotide; TGG chr11 5207204 5207223 5207207 -
atccccagccatccctcatt

SEQ ID NO: 51059 - DNA, 20 bp, Artificial Sequence
  Synthetic oligonucleotide; GAG chr11 5207199 5207218 5207202 -
cagccatccctcatttggtt

SEQ ID NO: 51060 - DNA, 20 bp, Artificial Sequence
  Synthetic oligonucleotide; AGG chr11 5207198 5207217 5207201 -
agccatccctcatttggttg

SEQ ID NO: 51061 - DNA, 20 bp, Artificial Sequence
  Synthetic oligonucleotide; TGG chr11 5207194 5207213 5207197 -
atccctcatttggttgaggt

SEQ ID NO: 51062 - DNA, 20 bp, Artificial Sequence
  Synthetic oligonucleotide; TGG chr11 5207183 5207202 5207186 -
ggttgaggttggaatttcaa

SEQ ID NO: 51063 - DNA, 20 bp, Artificial Sequence
  Synthetic oligonucleotide; GGG chr11 5207182 5207201 5207185 -
gttgaggttggaatttcaat

SEQ ID NO: 51064 - DNA, 20 bp, Artificial Sequence
  Synthetic oligonucleotide; TGG chr11 5207179 5207198 5207182 -
gaggttggaatttcaatggg

SEQ ID NO: 51065 - DNA, 20 bp, Artificial Sequence
  Synthetic oligonucleotide; GGG chr11 5207178 5207197 5207181 -
aggttggaatttcaatgggt

SEQ ID NO: 51066 - DNA, 20 bp, Artificial Sequence
  Synthetic oligonucleotide; TGG chr11 5207147 5207166 5207150 -
ttccctaaacaaacttgcca

SEQ ID NO: 51067 - DNA, 20 bp, Artificial Sequence
  Synthetic oligonucleotide; AAG chr11 5207137 5207156 5207140 -
aaacttgccatggtaaaatc

SEQ ID NO: 51068 - DNA, 20 bp, Artificial Sequence
  Synthetic oligonucleotide; AGG chr11 5207136 5207155 5207139 -
aacttgccatggtaaaatca

SEQ ID NO: 51069 - DNA, 20 bp, Artificial Sequence
  Synthetic oligonucleotide; TAG chr11 5207132 5207151 5207135 -
tgccatggtaaaatcaaggc

SEQ ID NO: 51070 - DNA, 20 bp, Artificial Sequence
  Synthetic oligonucleotide; AAG chr11 5207114 5207133 5207117 -
gctagcattactgttcacac

SEQ ID NO: 51071 - DNA, 20 bp, Artificial Sequence
  Synthetic oligonucleotide; AGG chr11 5207113 5207132 5207116 -
ctagcattactgttcacaca

SEQ ID NO: 51072 - DNA, 20 bp, Artificial Sequence
  Synthetic oligonucleotide; AAG chr11 5207101 5207120 5207104 -
ttcacacaaggcactgtgct

SEQ ID NO: 51073 - DNA, 20 bp, Artificial Sequence
  Synthetic oligonucleotide; TAG chr11 5207085 5207104 5207088 -
tgctaagatccccatcctta

SEQ ID NO: 51074 - DNA, 20 bp, Artificial Sequence
  Synthetic oligonucleotide; TGG chr11 5207079 5207098 5207082 -
gatccccatccttatagcaa

SEQ ID NO: 51075 - DNA, 20 bp, Artificial Sequence
  Synthetic oligonucleotide; GGG chr11 5207078 5207097 5207081 -
atccccatccttatagcaat

SEQ ID NO: 51076 - DNA, 20 bp, Artificial Sequence
  Synthetic oligonucleotide; GAG chr11 5207076 5207095 5207079 -
ccccatccttatagcaatgg

SEQ ID NO: 51077 - DNA, 20 bp, Artificial Sequence
  Synthetic oligonucleotide; AGG chr11 5207075 5207094 5207078 -
cccatccttatagcaatggg

SEQ ID NO: 51078 - DNA, 20 bp, Artificial Sequence
  Synthetic oligonucleotide; GGG chr11 5207074 5207093 5207077 -
ccatccttatagcaatggga

SEQ ID NO: 51079 - DNA, 20 bp, Artificial Sequence
  Synthetic oligonucleotide; TAG chr11 5207067 5207086 5207070 -
tatagcaatgggagggctca

SEQ ID NO: 51080 - DNA, 20 bp, Artificial Sequence
  Synthetic oligonucleotide; AGG chr11 5207066 5207085 5207069 -
atagcaatgggagggctcat

SEQ ID NO: 51081 - DNA, 20 bp, Artificial Sequence
  Synthetic oligonucleotide; AAG chr11 5207062 5207081 5207065 -
caatgggagggctcataggc

SEQ ID NO: 51082 - DNA, 20 bp, Artificial Sequence
  Synthetic oligonucleotide; CAG chr11 5207049 5207068 5207052 -
cataggcaagtcatgtcatg

SEQ ID NO: 51083 - DNA, 20 bp, Artificial Sequence
  Synthetic oligonucleotide; GAG chr11 5207047 5207066 5207050 -
taggcaagtcatgtcatgca

SEQ ID NO: 51084 - DNA, 20 bp, Artificial Sequence
  Synthetic oligonucleotide; AGG chr11 5207046 5207065 5207049 -
aggcaagtcatgtcatgcag

SEQ ID NO: 51085 - DNA, 20 bp, Artificial Sequence
  Synthetic oligonucleotide; TGG chr11 5207018 5207037 5207021 -
tcatcatcccttcttgtctt

SEQ ID NO: 51086 - DNA, 20 bp, Artificial Sequence
  Synthetic oligonucleotide; GGG chr11 5207017 5207036 5207020 -
catcatcccttcttgtcttt

SEQ ID NO: 51087 - DNA, 20 bp, Artificial Sequence
  Synthetic oligonucleotide; GGG chr11 5207016 5207035 5207019 -
atcatcccttcttgtctttg

SEQ ID NO: 51088 - DNA, 20 bp, Artificial Sequence
  Synthetic oligonucleotide; TGG chr11 5207010 5207029 5207013 -
ccttcttgtctttggggact

SEQ ID NO: 51089 - DNA, 20 bp, Artificial Sequence
  Synthetic oligonucleotide; GGG chr11 5207009 5207028 5207012 -
cttcttgtctttggggactt

SEQ ID NO: 51090 - DNA, 20 bp, Artificial Sequence
  Synthetic oligonucleotide; CGG chr11 5207000 5207019 5207003 -
tttggggacttgggtctctc

SEQ ID NO: 51091 - DNA, 20 bp, Artificial Sequence
  Synthetic oligonucleotide; TAG chr11 5206992 5207011 5206995 -
cttgggtctctccggttgta

SEQ ID NO: 51092 - DNA, 20 bp, Artificial Sequence
  Synthetic oligonucleotide; AGG chr11 5206991 5207010 5206994 -
ttgggtctctccggttgtat

SEQ ID NO: 51093 - DNA, 20 bp, Artificial Sequence
  Synthetic oligonucleotide; GAG chr11 5206989 5207008 5206992 -
gggtctctccggttgtatag

SEQ ID NO: 51094 - DNA, 20 bp, Artificial Sequence
  Synthetic oligonucleotide; CAG chr11 5206979 5206998 5206982 -
ggttgtataggagatttcgc

SEQ ID NO: 51095 - DNA, 20 bp, Artificial Sequence
  Synthetic oligonucleotide; AGG chr11 5206978 5206997 5206981 -
gttgtataggagatttcgcc

SEQ ID NO: 51096 - DNA, 20 bp, Artificial Sequence
  Synthetic oligonucleotide; TAG chr11 5206956 5206975 5206959 -
gcatttgaatccttcactgc

SEQ ID NO: 51097 - DNA, 20 bp, Artificial Sequence
  Synthetic oligonucleotide; TGG chr11 5206947 5206966 5206950 -
tccttcactgctagtcatcc

SEQ ID NO: 51098 - DNA, 20 bp, Artificial Sequence
  Synthetic oligonucleotide; TGG chr11 5206938 5206957 5206941 -
gctagtcatcctggactctg

SEQ ID NO: 51099 - DNA, 20 bp, Artificial Sequence
  Synthetic oligonucleotide; GAG chr11 5206907 5206926 5206910 -
atccatctctcctatgttct

SEQ ID NO: 51100 - DNA, 20 bp, Artificial Sequence
  Synthetic oligonucleotide; AGG chr11 5206906 5206925 5206909 -
tccatctctcctatgttctg

SEQ ID NO: 51101 - DNA, 20 bp, Artificial Sequence
  Synthetic oligonucleotide; CAG chr11 5206902 5206921 5206905 -
tctctcctatgttctgaggt

SEQ ID NO: 51102 - DNA, 20 bp, Artificial Sequence
  Synthetic oligonucleotide; CAG chr11 5206881 5206900 5206884 -
agaatgacctctctcttaac

SEQ ID NO: 51103 - DNA, 20 bp, Artificial Sequence
  Synthetic oligonucleotide; TGG chr11 5206873 5206892 5206876 -
ctctctcttaaccagttgtc

SEQ ID NO: 51104 - DNA, 20 bp, Artificial Sequence
  Synthetic oligonucleotide; GGG chr11 5206872 5206891 5206875 -
tctctcttaaccagttgtct

SEQ ID NO: 51105 - DNA, 20 bp, Artificial Sequence
  Synthetic oligonucleotide; CAG chr11 5206867 5206886 5206870 -
cttaaccagttgtctgggcc

SEQ ID NO: 51106 - DNA, 20 bp, Artificial Sequence
  Synthetic oligonucleotide; AGG chr11 5206866 5206885 5206869 -
ttaaccagttgtctgggccc

SEQ ID NO: 51107 - DNA, 20 bp, Artificial Sequence
  Synthetic oligonucleotide; TAG chr11 5206849 5206868 5206852 -
cccaggctccattattgata

SEQ ID NO: 51108 - DNA, 20 bp, Artificial Sequence
  Synthetic oligonucleotide; TGG chr11 5206830 5206849 5206833 -
atagtcatgatctcctctgt

SEQ ID NO: 51109 - DNA, 20 bp, Artificial Sequence
  Synthetic oligonucleotide; GGG chr11 5206829 5206848 5206832 -
tagtcatgatctcctctgtt

SEQ ID NO: 51110 - DNA, 20 bp, Artificial Sequence
  Synthetic oligonucleotide; GGG chr11 5206828 5206847 5206831 -
agtcatgatctcctctgttg

SEQ ID NO: 51111 - DNA, 20 bp, Artificial Sequence
  Synthetic oligonucleotide; AAG chr11 5206822 5206841 5206825 -
gatctcctctgttggggatg

SEQ ID NO: 51112 - DNA, 20 bp, Artificial Sequence
  Synthetic oligonucleotide; TAG chr11 5206819 5206838 5206822 -
ctcctctgttggggatgaag

SEQ ID NO: 51113 - DNA, 20 bp, Artificial Sequence
  Synthetic oligonucleotide; AGG chr11 5206818 5206837 5206821 -
tcctctgttggggatgaagt

SEQ ID NO: 51114 - DNA, 20 bp, Artificial Sequence
  Synthetic oligonucleotide; GAG chr11 5206808 5206827 5206811 -
gggatgaagtaggcaaattt

SEQ ID NO: 51115 - DNA, 20 bp, Artificial Sequence
  Synthetic oligonucleotide; AGG chr11 5206807 5206826 5206810 -
ggatgaagtaggcaaatttg

SEQ ID NO: 51116 - DNA, 20 bp, Artificial Sequence
  Synthetic oligonucleotide; CAG chr11 5206772 5206791 5206775 -
tctcacattcttttcttgaa

SEQ ID NO: 51117 - DNA, 20 bp, Artificial Sequence
  Synthetic oligonucleotide; AAG chr11 5206768 5206787 5206771 -
acattcttttcttgaacaga

SEQ ID NO: 51118 - DNA, 20 bp, Artificial Sequence
  Synthetic oligonucleotide; TAG chr11 5206764 5206783 5206767 -
tcttttcttgaacagaaaga

SEQ ID NO: 51119 - DNA, 20 bp, Artificial Sequence
  Synthetic oligonucleotide; TGG chr11 5206758 5206777 5206761 -
cttgaacagaaagatagaac

SEQ ID NO: 51120 - DNA, 20 bp, Artificial Sequence
  Synthetic oligonucleotide; TAG chr11 5206748 5206767 5206751 -
aagatagaactggaaattaa

SEQ ID NO: 51121 - DNA, 20 bp, Artificial Sequence
  Synthetic oligonucleotide; TAG chr11 5206745 5206764 5206748 -
atagaactggaaattaatag

SEQ ID NO: 51122 - DNA, 20 bp, Artificial Sequence
  Synthetic oligonucleotide; TAG chr11 5206724 5206743 5206727 -
agtatataaattcaaaattt

SEQ ID NO: 51123 - DNA, 20 bp, Artificial Sequence
  Synthetic oligonucleotide; CAG chr11 5206704 5206723 5206707 -
tagctttaataacatttaat

SEQ ID NO: 51124 - DNA, 20 bp, Artificial Sequence
  Synthetic oligonucleotide; TGG chr11 5206688 5206707 5206691 -
taatcagacataaataatta

SEQ ID NO: 51125 - DNA, 20 bp, Artificial Sequence
  Synthetic oligonucleotide; TAG chr11 5206659 5206678 5206662 -
gaatttcaataaataaattt

SEQ ID NO: 51126 - DNA, 20 bp, Artificial Sequence
  Synthetic oligonucleotide; AAG chr11 5206647 5206666 5206650 -
ataaattttagttctaatat

SEQ ID NO: 51127 - DNA, 20 bp, Artificial Sequence
  Synthetic oligonucleotide; AAG chr11 5206614 5206633 5206617 -
taatattcatactttttctg

SEQ ID NO: 51128 - DNA, 20 bp, Artificial Sequence
  Synthetic oligonucleotide; AGG chr11 5206613 5206632 5206616 -
aatattcatactttttctga

SEQ ID NO: 51129 - DNA, 20 bp, Artificial Sequence
  Synthetic oligonucleotide; TGG chr11 5206594 5206613 5206597 -
aaggctttactaatttgata

SEQ ID NO: 51130 - DNA, 20 bp, Artificial Sequence
  Synthetic oligonucleotide; TGG chr11 5206547 5206566 5206550 -
actattcttattccactgtg

SEQ ID NO: 51131 - DNA, 20 bp, Artificial Sequence
  Synthetic oligonucleotide; GAG chr11 5206540 5206559 5206543 -
ttattccactgtgtggtgat

SEQ ID NO: 51132 - DNA, 20 bp, Artificial Sequence
  Synthetic oligonucleotide; AAG chr11 5206536 5206555 5206539 -
tccactgtgtggtgatgaga

SEQ ID NO: 51133 - DNA, 20 bp, Artificial Sequence
  Synthetic oligonucleotide; GAG chr11 5206532 5206551 5206535 -
ctgtgtggtgatgagaaagt

SEQ ID NO: 51134 - DNA, 20 bp, Artificial Sequence
  Synthetic oligonucleotide; GAG chr11 5206530 5206549 5206533 -
gtgtggtgatgagaaagtga

SEQ ID NO: 51135 - DNA, 20 bp, Artificial Sequence
  Synthetic oligonucleotide; TGG chr11 5206521 5206540 5206524 -
tgagaaagtgagagatgttc

SEQ ID NO: 51136 - DNA, 20 bp, Artificial Sequence
  Synthetic oligonucleotide; GAG chr11 5206519 5206538 5206522 -
agaaagtgagagatgttctg

SEQ ID NO: 51137 - DNA, 20 bp, Artificial Sequence
  Synthetic oligonucleotide; TGG chr11 5206515 5206534 5206518 -
agtgagagatgttctggaga

SEQ ID NO: 51138 - DNA, 20 bp, Artificial Sequence
  Synthetic oligonucleotide; TAG chr11 5206506 5206525 5206509 -
tgttctggagatggtgatta

SEQ ID NO: 51139 - DNA, 20 bp, Artificial Sequence
  Synthetic oligonucleotide; TAG chr11 5206502 5206521 5206505 -
ctggagatggtgattataga

SEQ ID NO: 51140 - DNA, 20 bp, Artificial Sequence
  Synthetic oligonucleotide; AAG chr11 5206491 5206510 5206494 -
gattatagatagcttccctg

SEQ ID NO: 51141 - DNA, 20 bp, Artificial Sequence
  Synthetic oligonucleotide; TAG chr11 5206485 5206504 5206488 -
agatagcttccctgaagcca

SEQ ID NO: 51142 - DNA, 20 bp, Artificial Sequence
  Synthetic oligonucleotide; TGG chr11 5206474 5206493 5206477 -
ctgaagccatagtaaccccc

SEQ ID NO: 51143 - DNA, 20 bp, Artificial Sequence
  Synthetic oligonucleotide; GAG chr11 5206472 5206491 5206475 -
gaagccatagtaaccccctg

SEQ ID NO: 51144 - DNA, 20 bp, Artificial Sequence
  Synthetic oligonucleotide; TGG chr11 5206463 5206482 5206466 -
gtaaccccctggagaaaaat

SEQ ID NO: 51145 - DNA, 20 bp, Artificial Sequence
  Synthetic oligonucleotide; TGG chr11 5206457 5206476 5206460 -
ccctggagaaaaattggacc

SEQ ID NO: 51146 - DNA, 20 bp, Artificial Sequence
  Synthetic oligonucleotide; GAG chr11 5206455 5206474 5206458 -
ctggagaaaaattggacctg

SEQ ID NO: 51147 - DNA, 20 bp, Artificial Sequence
  Synthetic oligonucleotide; TAG chr11 5206450 5206469 5206453 -
gaaaaattggacctggagtc

SEQ ID NO: 51148 - DNA, 20 bp, Artificial Sequence
  Synthetic oligonucleotide; CAG chr11 5206447 5206466 5206450 -
aaattggacctggagtctag

SEQ ID NO: 51149 - DNA, 20 bp, Artificial Sequence
  Synthetic oligonucleotide; TAG chr11 5206442 5206461 5206445 -
ggacctggagtctagcagcc

SEQ ID NO: 51150 - DNA, 20 bp, Artificial Sequence
  Synthetic oligonucleotide; AGG chr11 5206441 5206460 5206444 -
gacctggagtctagcagcct

SEQ ID NO: 51151 - DNA, 20 bp, Artificial Sequence
  Synthetic oligonucleotide; TGG chr11 5206436 5206455 5206439 -
ggagtctagcagcctaggta

SEQ ID NO: 51152 - DNA, 20 bp, Artificial Sequence
  Synthetic oligonucleotide; GGG chr11 5206435 5206454 5206438 -
gagtctagcagcctaggtat

SEQ ID NO: 51153 - DNA, 20 bp, Artificial Sequence
  Synthetic oligonucleotide; TAG chr11 5206420 5206439 5206423 -
ggtatgggtactcgatttct

SEQ ID NO: 51154 - DNA, 20 bp, Artificial Sequence
  Synthetic oligonucleotide; AAG chr11 5206416 5206435 5206419 -
tgggtactcgatttcttaga

SEQ ID NO: 51155 - DNA, 20 bp, Artificial Sequence
  Synthetic oligonucleotide; AAG chr11 5206385 5206404 5206388 -
atttcctttatcttaaaaat

SEQ ID NO: 51156 - DNA, 20 bp, Artificial Sequence
  Synthetic oligonucleotide; AGG chr11 5206384 5206403 5206387 -
tttcctttatcttaaaaata

SEQ ID NO: 51157 - DNA, 20 bp, Artificial Sequence
  Synthetic oligonucleotide; GGG chr11 5206383 5206402 5206386 -
ttcctttatcttaaaaataa

SEQ ID NO: 51158 - DNA, 20 bp, Artificial Sequence
  Synthetic oligonucleotide; AAG chr11 5206375 5206394 5206378 -
tcttaaaaataagggtattg

SEQ ID NO: 51159 - DNA, 20 bp, Artificial Sequence
  Synthetic oligonucleotide; TAG chr11 5206372 5206391 5206375 -
taaaaataagggtattgaag

SEQ ID NO: 51160 - DNA, 20 bp, Artificial Sequence
  Synthetic oligonucleotide; TAG chr11 5206364 5206383 5206367 -
agggtattgaagtagaattc

SEQ ID NO: 51161 - DNA, 20 bp, Artificial Sequence
  Synthetic oligonucleotide; CAG chr11 5206355 5206374 5206358 -
aagtagaattctagaatttt

SEQ ID NO: 51162 - DNA, 20 bp, Artificial Sequence
  Synthetic oligonucleotide; GAG chr11 5206353 5206372 5206356 -
gtagaattctagaattttca

SEQ ID NO: 51163 - DNA, 20 bp, Artificial Sequence
  Synthetic oligonucleotide; AGG chr11 5206352 5206371 5206355 -
tagaattctagaattttcag

SEQ ID NO: 51164 - DNA, 20 bp, Artificial Sequence
  Synthetic oligonucleotide; TAG chr11 5206329 5206348 5206332 -
acaacttaaaatatgtgtaa

SEQ ID NO: 51165 - DNA, 20 bp, Artificial Sequence
  Synthetic oligonucleotide; AAG chr11 5206278 5206297 5206281 -
ctgttcattttaatatattt

SEQ ID NO: 51166 - DNA, 20 bp, Artificial Sequence
  Synthetic oligonucleotide; AGG chr11 5206277 5206296 5206280 -
tgttcattttaatatattta

SEQ ID NO: 51167 - DNA, 20 bp, Artificial Sequence
  Synthetic oligonucleotide; AAG chr11 5206260 5206279 5206263 -
ttaaggatgaattttttaaa

SEQ ID NO: 51168 - DNA, 20 bp, Artificial Sequence
  Synthetic oligonucleotide; CGG chr11 5206242 5206261 5206245 -
aaaagttgatttcataaaaa

SEQ ID NO: 51169 - DNA, 20 bp, Artificial Sequence
  Synthetic oligonucleotide; GGG chr11 5206241 5206260 5206244 -
aaagttgatttcataaaaac

SEQ ID NO: 51170 - DNA, 20 bp, Artificial Sequence
  Synthetic oligonucleotide; TAG chr11 5206236 5206255 5206239 -
tgatttcataaaaacgggaa

SEQ ID NO: 51171 - DNA, 20 bp, Artificial Sequence
  Synthetic oligonucleotide; AAG chr11 5206232 5206251 5206235 -
ttcataaaaacgggaataga

SEQ ID NO: 51172 - DNA, 20 bp, Artificial Sequence
  Synthetic oligonucleotide; TGG chr11 5206228 5206247 5206231 -
taaaaacgggaatagaaaga

SEQ ID NO: 51173 - DNA, 20 bp, Artificial Sequence
  Synthetic oligonucleotide; TAG chr11 5206220 5206239 5206223 -
ggaatagaaagatggttcca

SEQ ID NO: 51174 - DNA, 20 bp, Artificial Sequence
  Synthetic oligonucleotide; AGG chr11 5206219 5206238 5206222 -
gaatagaaagatggttccat

SEQ ID NO: 51175 - DNA, 20 bp, Artificial Sequence
  Synthetic oligonucleotide; GAG chr11 5206210 5206229 5206213 -
gatggttccataggctgact

SEQ ID NO: 51176 - DNA, 20 bp, Artificial Sequence
  Synthetic oligonucleotide; GAG chr11 5206208 5206227 5206211 -
tggttccataggctgactga

SEQ ID NO: 51177 - DNA, 20 bp, Artificial Sequence
  Synthetic oligonucleotide; TAG chr11 5206203 5206222 5206206 -
ccataggctgactgagagtg

SEQ ID NO: 51178 - DNA, 20 bp, Artificial Sequence
  Synthetic oligonucleotide; GAG chr11 5206201 5206220 5206204 -
ataggctgactgagagtgta

SEQ ID NO: 51179 - DNA, 20 bp, Artificial Sequence
  Synthetic oligonucleotide; AGG chr11 5206200 5206219 5206203 -
taggctgactgagagtgtag

SEQ ID NO: 51180 - DNA, 20 bp, Artificial Sequence
  Synthetic oligonucleotide; GAG chr11 5206198 5206217 5206201 -
ggctgactgagagtgtagag

SEQ ID NO: 51181 - DNA, 20 bp, Artificial Sequence
  Synthetic oligonucleotide; AGG chr11 5206197 5206216 5206200 -
gctgactgagagtgtagagg

SEQ ID NO: 51182 - DNA, 20 bp, Artificial Sequence
  Synthetic oligonucleotide; GGG chr11 5206196 5206215 5206199 -
ctgactgagagtgtagagga

SEQ ID NO: 51183 - DNA, 20 bp, Artificial Sequence
  Synthetic oligonucleotide; TGG chr11 5206192 5206211 5206195 -
ctgagagtgtagaggaggga

SEQ ID NO: 51184 - DNA, 20 bp, Artificial Sequence
  Synthetic oligonucleotide; GGG chr11 5206191 5206210 5206194 -
tgagagtgtagaggagggat

SEQ ID NO: 51185 - DNA, 20 bp, Artificial Sequence
  Synthetic oligonucleotide; AAG chr11 5206188 5206207 5206191 -
gagtgtagaggagggatggg

SEQ ID NO: 51186 - DNA, 20 bp, Artificial Sequence
  Synthetic oligonucleotide; AGG chr11 5206187 5206206 5206190 -
agtgtagaggagggatggga

SEQ ID NO: 51187 - DNA, 20 bp, Artificial Sequence
  Synthetic oligonucleotide; GGG chr11 5206186 5206205 5206189 -
gtgtagaggagggatgggaa

SEQ ID NO: 51188 - DNA, 20 bp, Artificial Sequence
  Synthetic oligonucleotide; AAG chr11 5206182 5206201 5206185 -
agaggagggatgggaaggga

SEQ ID NO: 51189 - DNA, 20 bp, Artificial Sequence
  Synthetic oligonucleotide; AAG chr11 5206179 5206198 5206182 -
ggagggatgggaagggaaag

SEQ ID NO: 51190 - DNA, 20 bp, Artificial Sequence
  Synthetic oligonucleotide; CAG chr11 5206168 5206187 5206171 -
aagggaaagaagttgatctt

SEQ ID NO: 51191 - DNA, 20 bp, Artificial Sequence
  Synthetic oligonucleotide; TAG chr11 5206164 5206183 5206167 -
gaaagaagttgatcttcagt

SEQ ID NO: 51192 - DNA, 20 bp, Artificial Sequence
  Synthetic oligonucleotide; TAG chr11 5206159 5206178 5206162 -
aagttgatcttcagttagac

SEQ ID NO: 51193 - DNA, 20 bp, Artificial Sequence
  Synthetic oligonucleotide; GAG chr11 5206157 5206176 5206160 -
gttgatcttcagttagacta

SEQ ID NO: 51194 - DNA, 20 bp, Artificial Sequence
  Synthetic oligonucleotide; AGG chr11 5206156 5206175 5206159 -
ttgatcttcagttagactag

SEQ ID NO: 51195 - DNA, 20 bp, Artificial Sequence
  Synthetic oligonucleotide; AAG chr11 5206150 5206169 5206153 -
ttcagttagactagaggaat

SEQ ID NO: 51196 - DNA, 20 bp, Artificial Sequence
  Synthetic oligonucleotide; TAG chr11 5206144 5206163 5206147 -
tagactagaggaataagttt

SEQ ID NO: 51197 - DNA, 20 bp, Artificial Sequence
  Synthetic oligonucleotide; TAG chr11 5206124 5206143 5206127 -
tagtgatctctcacactgca

SEQ ID NO: 51198 - DNA, 20 bp, Artificial Sequence
  Synthetic oligonucleotide; CAG chr11 5206115 5206134 5206118 -
ctcacactgcatagtgaaca

SEQ ID NO: 51199 - DNA, 20 bp, Artificial Sequence
  Synthetic oligonucleotide; AAG chr11 5206042 5206061 5206045 -
ttatgttctcaccacaaaaa

SEQ ID NO: 51200 - DNA, 20 bp, Artificial Sequence
  Synthetic oligonucleotide; TGG chr11 5206038 5206057 5206041 -
gttctcaccacaaaaaaagt

SEQ ID NO: 51201 - DNA, 20 bp, Artificial Sequence
  Synthetic oligonucleotide; AAG chr11 5206035 5206054 5206038 -
ctcaccacaaaaaaagttgg

SEQ ID NO: 51202 - DNA, 20 bp, Artificial Sequence
  Synthetic oligonucleotide; AGG chr11 5206034 5206053 5206037 -
tcaccacaaaaaaagttgga

SEQ ID NO: 51203 - DNA, 20 bp, Artificial Sequence
  Synthetic oligonucleotide; TAG chr11 5206015 5206034 5206018 -
aaggtgattcatatgctaat

SEQ ID NO: 51204 - DNA, 20 bp, Artificial Sequence
  Synthetic oligonucleotide; TAG chr11 5206007 5206026 5206010 -
tcatatgctaattagcttga

SEQ ID NO: 51205 - DNA, 20 bp, Artificial Sequence
  Synthetic oligonucleotide; TAG chr11 5205983 5206002 5205986 -
ctctctctacaatgtatata

SEQ ID NO: 51206 - DNA, 20 bp, Artificial Sequence
  Synthetic oligonucleotide; CAG chr11 5205882 5205901 5205885 -
tatatgcacttattatttgc

SEQ ID NO: 51207 - DNA, 20 bp, Artificial Sequence
  Synthetic oligonucleotide; AGG chr11 5205881 5205900 5205884 -
atatgcacttattatttgcc

SEQ ID NO: 51208 - DNA, 20 bp, Artificial Sequence
  Synthetic oligonucleotide; TGG chr11 5205819 5205838 5205822 -
cctccttttacttttctgct

SEQ ID NO: 51209 - DNA, 20 bp, Artificial Sequence
  Synthetic oligonucleotide; CAG chr11 5205801 5205820 5205804 -
cttggttttcttctttcatt

SEQ ID NO: 51210 - DNA, 20 bp, Artificial Sequence
  Synthetic oligonucleotide; CAG chr11 5205791 5205810 5205794 -
ttctttcattcagtgtttac

SEQ ID NO: 51211 - DNA, 20 bp, Artificial Sequence
  Synthetic oligonucleotide; TAG chr11 5205781 5205800 5205784 -
cagtgtttaccagtttctta

SEQ ID NO: 51212 - DNA, 20 bp, Artificial Sequence
  Synthetic oligonucleotide; AAG chr11 5205765 5205784 5205768 -
cttatagttaattttatttt

SEQ ID NO: 51213 - DNA, 20 bp, Artificial Sequence
  Synthetic oligonucleotide; AAG chr11 5205745 5205764 5205748 -
aagctgtctcacattttctg

SEQ ID NO: 51214 - DNA, 20 bp, Artificial Sequence
  Synthetic oligonucleotide; AAG chr11 5205740 5205759 5205743 -
gtctcacattttctgaagaa

SEQ ID NO: 51215 - DNA, 20 bp, Artificial Sequence
  Synthetic oligonucleotide; AGG chr11 5205739 5205758 5205742 -
tctcacattttctgaagaaa

SEQ ID NO: 51216 - DNA, 20 bp, Artificial Sequence
  Synthetic oligonucleotide; GGG chr11 5205738 5205757 5205741 -
ctcacattttctgaagaaaa

SEQ ID NO: 51217 - DNA, 20 bp, Artificial Sequence
  Synthetic oligonucleotide; AAG chr11 5205726 5205745 5205729 -
gaagaaaagggaacatatta

SEQ ID NO: 51218 - DNA, 20 bp, Artificial Sequence
  Synthetic oligonucleotide; GAG chr11 5205695 5205714 5205698 -
acaaatacactatcttgcat

SEQ ID NO: 51219 - DNA, 20 bp, Artificial Sequence
  Synthetic oligonucleotide; TGG chr11 5205679 5205698 5205682 -
gcatgagatgatttatgtca

SEQ ID NO: 51220 - DNA, 20 bp, Artificial Sequence
  Synthetic oligonucleotide; TGG chr11 5205637 5205656 5205640 -
tcttataaaaacttctcaaa

SEQ ID NO: 51221 - DNA, 20 bp, Artificial Sequence
  Synthetic oligonucleotide; TAG chr11 5205633 5205652 5205636 -
ataaaaacttctcaaatggt

SEQ ID NO: 51222 - DNA, 20 bp, Artificial Sequence
  Synthetic oligonucleotide; TGG chr11 5205629 5205648 5205632 -
aaacttctcaaatggttaga

SEQ ID NO: 51223 - DNA, 20 bp, Artificial Sequence
  Synthetic oligonucleotide; CAG chr11 5205623 5205642 5205626 -
ctcaaatggttagatggcta

SEQ ID NO: 51224 - DNA, 20 bp, Artificial Sequence
  Synthetic oligonucleotide; CAG chr11 5205615 5205634 5205618 -
gttagatggctacagttgaa

SEQ ID NO: 51225 - DNA, 20 bp, Artificial Sequence
  Synthetic oligonucleotide; TGG chr11 5205611 5205630 5205614 -
gatggctacagttgaacaga

SEQ ID NO: 51226 - DNA, 20 bp, Artificial Sequence
  Synthetic oligonucleotide; AAG chr11 5205578 5205597 5205581 -
atattttttataatgcttct

SEQ ID NO: 51227 - DNA, 20 bp, Artificial Sequence
  Synthetic oligonucleotide; AGG chr11 5205577 5205596 5205580 -
tattttttataatgcttcta

SEQ ID NO: 51228 - DNA, 20 bp, Artificial Sequence
  Synthetic oligonucleotide; TGG chr11 5205572 5205591 5205575 -
tttataatgcttctaaggta

SEQ ID NO: 51229 - DNA, 20 bp, Artificial Sequence
  Synthetic oligonucleotide; TAG chr11 5205549 5205568 5205552 -
ctaatttttaaaaaatattt

SEQ ID NO: 51230 - DNA, 20 bp, Artificial Sequence
  Synthetic oligonucleotide; TGG chr11 5205540 5205559 5205543 -
aaaaaatattttagtaatga

SEQ ID NO: 51231 - DNA, 20 bp, Artificial Sequence
  Synthetic oligonucleotide; GGG chr11 5205539 5205558 5205542 -
aaaaatattttagtaatgat

SEQ ID NO: 51232 - DNA, 20 bp, Artificial Sequence
  Synthetic oligonucleotide; TAG chr11 5205525 5205544 5205528 -
aatgatgggaatattattta

SEQ ID NO: 51233 - DNA, 20 bp, Artificial Sequence
  Synthetic oligonucleotide; AAG chr11 5205488 5205507 5205491 -
atataatgaaatatgtaata

SEQ ID NO: 51234 - DNA, 20 bp, Artificial Sequence
  Synthetic oligonucleotide; TAG chr11 5205483 5205502 5205486 -
atgaaatatgtaataaagtc

SEQ ID NO: 51235 - DNA, 20 bp, Artificial Sequence
  Synthetic oligonucleotide; TAG chr11 5205288 5205307 5205291 -
tataatatataataaatata

SEQ ID NO: 51236 - DNA, 20 bp, Artificial Sequence
  Synthetic oligonucleotide; AAG chr11 5205239 5205258 5205242 -
tgtatctatatatgtttata

SEQ ID NO: 51237 - DNA, 20 bp, Artificial Sequence
  Synthetic oligonucleotide; TAG chr11 5205223 5205242 5205226 -
tataaagtcattcctctaat

SEQ ID NO: 51238 - DNA, 20 bp, Artificial Sequence
  Synthetic oligonucleotide; AGG chr11 5205222 5205241 5205225 -
ataaagtcattcctctaatt

SEQ ID NO: 51239 - DNA, 20 bp, Artificial Sequence
  Synthetic oligonucleotide; CAG chr11 5205208 5205227 5205211 -
ctaattaggtcataaccatt

SEQ ID NO: 51240 - DNA, 20 bp, Artificial Sequence
  Synthetic oligonucleotide; AGG chr11 5205207 5205226 5205210 -
taattaggtcataaccattc

SEQ ID NO: 51241 - DNA, 20 bp, Artificial Sequence
  Synthetic oligonucleotide; TGG chr11 5205199 5205218 5205202 -
tcataaccattcaggtaaac

SEQ ID NO: 51242 - DNA, 20 bp, Artificial Sequence
  Synthetic oligonucleotide; AAG chr11 5205190 5205209 5205193 -
ttcaggtaaactggaaattt

SEQ ID NO: 51243 - DNA, 20 bp, Artificial Sequence
  Synthetic oligonucleotide; CAG chr11 5205180 5205199 5205183 -
ctggaaatttaagcctactt

SEQ ID NO: 51244 - DNA, 20 bp, Artificial Sequence
  Synthetic oligonucleotide; AGG chr11 5205179 5205198 5205182 -
tggaaatttaagcctacttc

SEQ ID NO: 51245 - DNA, 20 bp, Artificial Sequence
  Synthetic oligonucleotide; TGG chr11 5205172 5205191 5205175 -
ttaagcctacttcaggtttg

SEQ ID NO: 51246 - DNA, 20 bp, Artificial Sequence
  Synthetic oligonucleotide; TAG chr11 5205165 5205184 5205168 -
tacttcaggtttgtggtaaa

SEQ ID NO: 51247 - DNA, 20 bp, Artificial Sequence
  Synthetic oligonucleotide; TAG chr11 5205149 5205168 5205152 -
taaatagattctctctgaac

SEQ ID NO: 51248 - DNA, 20 bp, Artificial Sequence
  Synthetic oligonucleotide; CAG chr11 5205140 5205159 5205143 -
tctctctgaactagcatatt

SEQ ID NO: 51249 - DNA, 20 bp, Artificial Sequence
  Synthetic oligonucleotide; CAG chr11 5205127 5205146 5205130 -
gcatattcagaatcattaaa

SEQ ID NO: 51250 - DNA, 20 bp, Artificial Sequence
  Synthetic oligonucleotide; CAG chr11 5205123 5205142 5205126 -
attcagaatcattaaacagt

SEQ ID NO: 51251 - DNA, 20 bp, Artificial Sequence
  Synthetic oligonucleotide; TGG chr11 5205115 5205134 5205118 -
tcattaaacagtcagttctt

SEQ ID NO: 51252 - DNA, 20 bp, Artificial Sequence
  Synthetic oligonucleotide; AAG chr11 5205110 5205129 5205113 -
aaacagtcagttctttggac

SEQ ID NO: 51253 - DNA, 20 bp, Artificial Sequence
  Synthetic oligonucleotide; TAG chr11 5205102 5205121 5205105 -
agttctttggacaagtctta

SEQ ID NO: 51254 - DNA, 20 bp, Artificial Sequence
  Synthetic oligonucleotide; CAG chr11 5205083 5205102 5205086 -
atagaatgttcttacctctt

SEQ ID NO: 51255 - DNA, 20 bp, Artificial Sequence
  Synthetic oligonucleotide; AAG chr11 5205073 5205092 5205076 -
cttacctcttcagccatccc

SEQ ID NO: 51256 - DNA, 20 bp, Artificial Sequence
  Synthetic oligonucleotide; GAG chr11 5205064 5205083 5205067 -
tcagccatcccaagactctt

SEQ ID NO: 51257 - DNA, 20 bp, Artificial Sequence
  Synthetic oligonucleotide; AGG chr11 5205063 5205082 5205066 -
cagccatcccaagactcttg

SEQ ID NO: 51258 - DNA, 20 bp, Artificial Sequence
  Synthetic oligonucleotide; GGG chr11 5205062 5205081 5205065 -
agccatcccaagactcttga

SEQ ID NO: 51259 - DNA, 20 bp, Artificial Sequence
  Synthetic oligonucleotide; AAG chr11 5205040 5205059 5205043 -
gcctgacctcgcttacacta

SEQ ID NO: 51260 - DNA, 20 bp, Artificial Sequence
  Synthetic oligonucleotide; CAG chr11 5205037 5205056 5205040 -
tgacctcgcttacactaaag

SEQ ID NO: 51261 - DNA, 20 bp, Artificial Sequence
  Synthetic oligonucleotide; AAG chr11 5205014 5205033 5205017 -
atctgccttatgcatcactg

SEQ ID NO: 51262 - DNA, 20 bp, Artificial Sequence
  Synthetic oligonucleotide; TAG chr11 5205011 5205030 5205014 -
tgccttatgcatcactgaag

SEQ ID NO: 51263 - DNA, 20 bp, Artificial Sequence
  Synthetic oligonucleotide; AGG chr11 5205010 5205029 5205013 -
gccttatgcatcactgaagt

SEQ ID NO: 51264 - DNA, 20 bp, Artificial Sequence
  Synthetic oligonucleotide; GGG chr11 5205009 5205028 5205012 -
ccttatgcatcactgaagta

SEQ ID NO: 51265 - DNA, 20 bp, Artificial Sequence
  Synthetic oligonucleotide; GAG chr11 5205007 5205026 5205010 -
ttatgcatcactgaagtagg

SEQ ID NO: 51266 - DNA, 20 bp, Artificial Sequence
  Synthetic oligonucleotide; AGG chr11 5205006 5205025 5205009 -
tatgcatcactgaagtaggg

SEQ ID NO: 51267 - DNA, 20 bp, Artificial Sequence
  Synthetic oligonucleotide; GGG chr11 5205005 5205024 5205008 -
atgcatcactgaagtaggga

SEQ ID NO: 51268 - DNA, 20 bp, Artificial Sequence
  Synthetic oligonucleotide; AAG chr11 5205002 5205021 5205005 -
catcactgaagtagggaggg

SEQ ID NO: 51269 - DNA, 20 bp, Artificial Sequence
  Synthetic oligonucleotide; AAG chr11 5204998 5205017 5205001 -
actgaagtagggagggaaga

SEQ ID NO: 51270 - DNA, 20 bp, Artificial Sequence
  Synthetic oligonucleotide; TAG chr11 5204972 5204991 5204975 -
gatgaactacttctgacccc

SEQ ID NO: 51271 - DNA, 20 bp, Artificial Sequence
  Synthetic oligonucleotide; TGG chr11 5204969 5204988 5204972 -
gaactacttctgacccctag

SEQ ID NO: 51272 - DNA, 20 bp, Artificial Sequence
  Synthetic oligonucleotide; CAG chr11 5204962 5204981 5204965 -
ttctgacccctagtggtgtc

SEQ ID NO: 51273 - DNA, 20 bp, Artificial Sequence
  Synthetic oligonucleotide; AAG chr11 5204957 5204976 5204960 -
acccctagtggtgtccagaa

SEQ ID NO: 51274 - DNA, 20 bp, Artificial Sequence
  Synthetic oligonucleotide; AAG chr11 5204947 5204966 5204950 -
gtgtccagaaaagaccatta

SEQ ID NO: 51275 - DNA, 20 bp, Artificial Sequence
  Synthetic oligonucleotide; AGG chr11 5204946 5204965 5204949 -
tgtccagaaaagaccattaa

SEQ ID NO: 51276 - DNA, 20 bp, Artificial Sequence
  Synthetic oligonucleotide; AAG chr11 5204932 5204951 5204935 -
cattaaaggaatgaccttta

SEQ ID NO: 51277 - DNA, 20 bp, Artificial Sequence
  Synthetic oligonucleotide; AGG chr11 5204931 5204950 5204934 -
attaaaggaatgacctttaa

SEQ ID NO: 51278 - DNA, 20 bp, Artificial Sequence
  Synthetic oligonucleotide; TGG chr11 5204927 5204946 5204930 -
aaggaatgacctttaaagga

SEQ ID NO: 51279 - DNA, 20 bp, Artificial Sequence
  Synthetic oligonucleotide; AAG chr11 5204906 5204925 5204909 -
ggacatacaattttttgtcc

SEQ ID NO: 51280 - DNA, 20 bp, Artificial Sequence
  Synthetic oligonucleotide; AGG chr11 5204905 5204924 5204908 -
gacatacaattttttgtcca

SEQ ID NO: 51281 - DNA, 20 bp, Artificial Sequence
  Synthetic oligonucleotide; CAG chr11 5204902 5204921 5204905 -
atacaattttttgtccaagg

SEQ ID NO: 51282 - DNA, 20 bp, Artificial Sequence
  Synthetic oligonucleotide; AGG chr11 5204901 5204920 5204904 -
tacaattttttgtccaaggc

SEQ ID NO: 51283 - DNA, 20 bp, Artificial Sequence
  Synthetic oligonucleotide; TGG chr11 5204891 5204910 5204894 -
tgtccaaggcaggacatgtg

SEQ ID NO: 51284 - DNA, 20 bp, Artificial Sequence
  Synthetic oligonucleotide; GGG chr11 5204890 5204909 5204893 -
gtccaaggcaggacatgtgt

SEQ ID NO: 51285 - DNA, 20 bp, Artificial Sequence
  Synthetic oligonucleotide; CAG chr11 5204880 5204899 5204883 -
ggacatgtgtgggtgtcttt

SEQ ID NO: 51286 - DNA, 20 bp, Artificial Sequence
  Synthetic oligonucleotide; AAG chr11 5204865 5204884 5204868 -
tctttcagtaattatgttct

SEQ ID NO: 51287 - DNA, 20 bp, Artificial Sequence
  Synthetic oligonucleotide; CAG chr11 5204860 5204879 5204863 -
cagtaattatgttctaagaa

SEQ ID NO: 51288 - DNA, 20 bp, Artificial Sequence
  Synthetic oligonucleotide; TGG chr11 5204840 5204859 5204843 -
cagcaaaaactccactgcct

SEQ ID NO: 51289 - DNA, 20 bp, Artificial Sequence
  Synthetic oligonucleotide; TAG chr11 5204833 5204852 5204836 -
aactccactgccttggcaaa

SEQ ID NO: 51290 - DNA, 20 bp, Artificial Sequence
  Synthetic oligonucleotide; AGG chr11 5204832 5204851 5204835 -
actccactgccttggcaaat

SEQ ID NO: 51291 - DNA, 20 bp, Artificial Sequence
  Synthetic oligonucleotide; TAG chr11 5204822 5204841 5204825 -
cttggcaaataggaatgttt

SEQ ID NO: 51292 - DNA, 20 bp, Artificial Sequence
  Synthetic oligonucleotide; TAG chr11 5204814 5204833 5204817 -
ataggaatgttttagttcta

SEQ ID NO: 51293 - DNA, 20 bp, Artificial Sequence
  Synthetic oligonucleotide; AAG chr11 5204804 5204823 5204807 -
tttagttctatagaattata

SEQ ID NO: 51294 - DNA, 20 bp, Artificial Sequence
  Synthetic oligonucleotide; AAG chr11 5204801 5204820 5204804 -
agttctatagaattataaag

SEQ ID NO: 51295 - DNA, 20 bp, Artificial Sequence
  Synthetic oligonucleotide; TGG chr11 5204762 5204781 5204765 -
atatactttctctatgtctt

SEQ ID NO: 51296 - DNA, 20 bp, Artificial Sequence
  Synthetic oligonucleotide; TGG chr11 5204747 5204766 5204750 -
gtctttggaacaatgactat

SEQ ID NO: 51297 - DNA, 20 bp, Artificial Sequence
  Synthetic oligonucleotide; AAG chr11 5204728 5204747 5204731 -
ttggtcattaccctatttta

SEQ ID NO: 51298 - DNA, 20 bp, Artificial Sequence
  Synthetic oligonucleotide; AAG chr11 5204724 5204743 5204727 -
tcattaccctattttaaagt

SEQ ID NO: 51299 - DNA, 20 bp, Artificial Sequence
  Synthetic oligonucleotide; AAG chr11 5204720 5204739 5204723 -
taccctattttaaagtaagc

SEQ ID NO: 51300 - DNA, 20 bp, Artificial Sequence
  Synthetic oligonucleotide; CAG chr11 5204709 5204728 5204712 -
aaagtaagcaagtaatcaca

SEQ ID NO: 51301 - DNA, 20 bp, Artificial Sequence
  Synthetic oligonucleotide; AGG chr11 5204708 5204727 5204711 -
aagtaagcaagtaatcacac

SEQ ID NO: 51302 - DNA, 20 bp, Artificial Sequence
  Synthetic oligonucleotide; GGG chr11 5204707 5204726 5204710 -
agtaagcaagtaatcacaca

SEQ ID NO: 51303 - DNA, 20 bp, Artificial Sequence
  Synthetic oligonucleotide; AAG chr11 5204692 5204711 5204695 -
acacagggaattattctgaa

SEQ ID NO: 51304 - DNA, 20 bp, Artificial Sequence
  Synthetic oligonucleotide; CAG chr11 5204688 5204707 5204691 -
agggaattattctgaaaaga

SEQ ID NO: 51305 - DNA, 20 bp, Artificial Sequence
  Synthetic oligonucleotide; AAG chr11 5204669 5204688 5204672 -
acagaaaaaaaaaaaaaacc

SEQ ID NO: 51306 - DNA, 20 bp, Artificial Sequence
  Synthetic oligonucleotide; GAG chr11 5204667 5204686 5204670 -
agaaaaaaaaaaaaaaccaa

SEQ ID NO: 51307 - DNA, 20 bp, Artificial Sequence
  Synthetic oligonucleotide; TAG chr11 5204651 5204670 5204654 -
ccaagagatttctgcatatg

SEQ ID NO: 51308 - DNA, 20 bp, Artificial Sequence
  Synthetic oligonucleotide; AGG chr11 5204650 5204669 5204653 -
caagagatttctgcatatgt

SEQ ID NO: 51309 - DNA, 20 bp, Artificial Sequence
  Synthetic oligonucleotide; CAG chr11 5204646 5204665 5204649 -
agatttctgcatatgtaggt

SEQ ID NO: 51310 - DNA, 20 bp, Artificial Sequence
  Synthetic oligonucleotide; CAG chr11 5204636 5204655 5204639 -
atatgtaggtcagttttaat

SEQ ID NO: 51311 - DNA, 20 bp, Artificial Sequence
  Synthetic oligonucleotide; GAG chr11 5204634 5204653 5204637 -
atgtaggtcagttttaatca

SEQ ID NO: 51312 - DNA, 20 bp, Artificial Sequence
  Synthetic oligonucleotide; AGG chr11 5204633 5204652 5204636 -
tgtaggtcagttttaatcag

SEQ ID NO: 51313 - DNA, 20 bp, Artificial Sequence
  Synthetic oligonucleotide; GGG chr11 5204632 5204651 5204635 -
gtaggtcagttttaatcaga

SEQ ID NO: 51314 - DNA, 20 bp, Artificial Sequence
  Synthetic oligonucleotide; CAG chr11 5204626 5204645 5204629 -
cagttttaatcagagggcat

SEQ ID NO: 51315 - DNA, 20 bp, Artificial Sequence
  Synthetic oligonucleotide; AAG chr11 5204621 5204640 5204624 -
ttaatcagagggcatcagaa

SEQ ID NO: 51316 - DNA, 20 bp, Artificial Sequence
  Synthetic oligonucleotide; AAG chr11 5204610 5204629 5204613 -
gcatcagaaaagactcctga

SEQ ID NO: 51317 - DNA, 20 bp, Artificial Sequence
  Synthetic oligonucleotide; TGG chr11 5204600 5204619 5204603 -
agactcctgaaagaatgacc

SEQ ID NO: 51318 - DNA, 20 bp, Artificial Sequence
  Synthetic oligonucleotide; CAG chr11 5204585 5204604 5204588 -
tgacctggttattataatca

SEQ ID NO: 51319 - DNA, 20 bp, Artificial Sequence
  Synthetic oligonucleotide; AAG chr11 5204571 5204590 5204574 -
taatcacagatttgctttcc

SEQ ID NO: 51320 - DNA, 20 bp, Artificial Sequence
  Synthetic oligonucleotide; CAG chr11 5204559 5204578 5204562 -
tgctttccaagtcaacattc

SEQ ID NO: 51321 - DNA, 20 bp, Artificial Sequence
  Synthetic oligonucleotide; CAG chr11 5204555 5204574 5204558 -
ttccaagtcaacattccaga

SEQ ID NO: 51322 - DNA, 20 bp, Artificial Sequence
  Synthetic oligonucleotide; CAG chr11 5204548 5204567 5204551 -
tcaacattccagacagtgct

SEQ ID NO: 51323 - DNA, 20 bp, Artificial Sequence
  Synthetic oligonucleotide; GAG chr11 5204546 5204565 5204549 -
aacattccagacagtgctca

SEQ ID NO: 51324 - DNA, 20 bp, Artificial Sequence
  Synthetic oligonucleotide; AGG chr11 5204545 5204564 5204548 -
acattccagacagtgctcag

SEQ ID NO: 51325 - DNA, 20 bp, Artificial Sequence
  Synthetic oligonucleotide; GGG chr11 5204544 5204563 5204547 -
cattccagacagtgctcaga

SEQ ID NO: 51326 - DNA, 20 bp, Artificial Sequence
  Synthetic oligonucleotide; GGG chr11 5204543 5204562 5204546 -
attccagacagtgctcagag

SEQ ID NO: 51327 - DNA, 20 bp, Artificial Sequence
  Synthetic oligonucleotide; CAG chr11 5204517 5204536 5204520 -
cgaaaacccttttatttctc

SEQ ID NO: 51328 - DNA, 20 bp, Artificial Sequence
  Synthetic oligonucleotide; TAG chr11 5204472 5204491 5204475 -
cttctctatttattttatta

SEQ ID NO: 51329 - DNA, 20 bp, Artificial Sequence
  Synthetic oligonucleotide; AGG chr11 5204471 5204490 5204474 -
ttctctatttattttattat

SEQ ID NO: 51330 - DNA, 20 bp, Artificial Sequence
  Synthetic oligonucleotide; TGG chr11 5204460 5204479 5204463 -
ttttattataggcattgttc

SEQ ID NO: 51331 - DNA, 20 bp, Artificial Sequence
  Synthetic oligonucleotide; TGG chr11 5204453 5204472 5204456 -
ataggcattgttctggttgc

SEQ ID NO: 51332 - DNA, 20 bp, Artificial Sequence
  Synthetic oligonucleotide; GGG chr11 5204452 5204471 5204455 -
taggcattgttctggttgct

SEQ ID NO: 51333 - DNA, 20 bp, Artificial Sequence
  Synthetic oligonucleotide; CAG chr11 5204445 5204464 5204448 -
tgttctggttgctgggaact

SEQ ID NO: 51334 - DNA, 20 bp, Artificial Sequence
  Synthetic oligonucleotide; GAG chr11 5204439 5204458 5204442 -
ggttgctgggaactcagact

SEQ ID NO: 51335 - DNA, 20 bp, Artificial Sequence
  Synthetic oligonucleotide; CAG chr11 5204418 5204437 5204421 -
agataccatacactgactct

SEQ ID NO: 51336 - DNA, 20 bp, Artificial Sequence
  Synthetic oligonucleotide; TAG chr11 5204414 5204433 5204417 -
accatacactgactctcaga

SEQ ID NO: 51337 - DNA, 20 bp, Artificial Sequence
  Synthetic oligonucleotide; TGG chr11 5204391 5204410 5204394 -
cataacacaacatgatgtct

SEQ ID NO: 51338 - DNA, 20 bp, Artificial Sequence
  Synthetic oligonucleotide; CAG chr11 5204358 5204377 5204361 -
atctttttgttttttaaata

SEQ ID NO: 51339 - DNA, 20 bp, Artificial Sequence
  Synthetic oligonucleotide; AGG chr11 5204357 5204376 5204360 -
tctttttgttttttaaatac

SEQ ID NO: 51340 - DNA, 20 bp, Artificial Sequence
  Synthetic oligonucleotide; TGG chr11 5204354 5204373 5204357 -
ttttgttttttaaatacagg

SEQ ID NO: 51341 - DNA, 20 bp, Artificial Sequence
  Synthetic oligonucleotide; GAG chr11 5204352 5204371 5204355 -
ttgttttttaaatacaggtg

SEQ ID NO: 51342 - DNA, 20 bp, Artificial Sequence
  Synthetic oligonucleotide; TGG chr11 5204345 5204364 5204348 -
ttaaatacaggtggagcatc

SEQ ID NO: 51343 - DNA, 20 bp, Artificial Sequence
  Synthetic oligonucleotide; TGG chr11 5204219 5204238 5204222 -
ctccaacatgtattttgctc

SEQ ID NO: 51344 - DNA, 20 bp, Artificial Sequence
  Synthetic oligonucleotide; AAG chr11 5204207 5204226 5204210 -
ttttgctctggtaatcccaa

SEQ ID NO: 51345 - DNA, 20 bp, Artificial Sequence
  Synthetic oligonucleotide; AGG chr11 5204206 5204225 5204209 -
tttgctctggtaatcccaaa

SEQ ID NO: 51346 - DNA, 20 bp, Artificial Sequence
  Synthetic oligonucleotide; TAG chr11 5204199 5204218 5204202 -
tggtaatcccaaaaggctga

SEQ ID NO: 51347 - DNA, 20 bp, Artificial Sequence
  Synthetic oligonucleotide; TGG chr11 5204190 5204209 5204193 -
caaaaggctgatagtctcta

SEQ ID NO: 51348 - DNA, 20 bp, Artificial Sequence
  Synthetic oligonucleotide; TGG chr11 5204187 5204206 5204190 -
aaggctgatagtctctatgg

SEQ ID NO: 51349 - DNA, 20 bp, Artificial Sequence
  Synthetic oligonucleotide; TGG chr11 5204179 5204198 5204182 -
tagtctctatggtggcaaca

SEQ ID NO: 51350 - DNA, 20 bp, Artificial Sequence
  Synthetic oligonucleotide; TAG chr11 5204158 5204177 5204161 -
ggataatactgttccccatc

SEQ ID NO: 51351 - DNA, 20 bp, Artificial Sequence
  Synthetic oligonucleotide; TGG chr11 5204154 5204173 5204157 -
aatactgttccccatctaga

SEQ ID NO: 51352 - DNA, 20 bp, Artificial Sequence
  Synthetic oligonucleotide; TAG chr11 5204133 5204152 5204136 -
ggtctcatttcttctgtatc

SEQ ID NO: 51353 - DNA, 20 bp, Artificial Sequence
  Synthetic oligonucleotide; AAG chr11 5204126 5204145 5204129 -
tttcttctgtatctagtctg

SEQ ID NO: 51354 - DNA, 20 bp, Artificial Sequence
  Synthetic oligonucleotide; AAG chr11 5204123 5204142 5204126 -
cttctgtatctagtctgaag

SEQ ID NO: 51355 - DNA, 20 bp, Artificial Sequence
  Synthetic oligonucleotide; AAG chr11 5204111 5204130 5204114 -
gtctgaagaagcctgaatga

SEQ ID NO: 51356 - DNA, 20 bp, Artificial Sequence
  Synthetic oligonucleotide; TAG chr11 5204108 5204127 5204111 -
tgaagaagcctgaatgaaag

SEQ ID NO: 51357 - DNA, 20 bp, Artificial Sequence
  Synthetic oligonucleotide; AAG chr11 5204099 5204118 5204102 -
ctgaatgaaagtagattttt

SEQ ID NO: 51358 - DNA, 20 bp, Artificial Sequence
  Synthetic oligonucleotide; TAG chr11 5204091 5204110 5204094 -
aagtagatttttaagctttg

SEQ ID NO: 51359 - DNA, 20 bp, Artificial Sequence
  Synthetic oligonucleotide; TAG chr11 5204087 5204106 5204090 -
agatttttaagctttgtagc

SEQ ID NO: 51360 - DNA, 20 bp, Artificial Sequence
  Synthetic oligonucleotide; AAG chr11 5204080 5204099 5204083 -
taagctttgtagctagtctg

SEQ ID NO: 51361 - DNA, 20 bp, Artificial Sequence
  Synthetic oligonucleotide; TAG chr11 5204071 5204090 5204074 -
tagctagtctgaagcctttg

SEQ ID NO: 51362 - DNA, 20 bp, Artificial Sequence
  Synthetic oligonucleotide; CAG chr11 5204067 5204086 5204070 -
tagtctgaagcctttgtagt

SEQ ID NO: 51363 - DNA, 20 bp, Artificial Sequence
  Synthetic oligonucleotide; AAG chr11 5204060 5204079 5204063 -
aagcctttgtagtcagtctg

SEQ ID NO: 51364 - DNA, 20 bp, Artificial Sequence
  Synthetic oligonucleotide; TAG chr11 5204042 5204061 5204045 -
tgaagaaacctgcatgaaaa

SEQ ID NO: 51365 - DNA, 20 bp, Artificial Sequence
  Synthetic oligonucleotide; TGG chr11 5204024 5204043 5204027 -
aatagattttttttttcctt

SEQ ID NO: 51366 - DNA, 20 bp, Artificial Sequence
  Synthetic oligonucleotide; GGG chr11 5204023 5204042 5204026 -
atagattttttttttccttt

SEQ ID NO: 51367 - DNA, 20 bp, Artificial Sequence
  Synthetic oligonucleotide; CAG chr11 5204019 5204038 5204022 -
attttttttttcctttggga

SEQ ID NO: 51368 - DNA, 20 bp, Artificial Sequence
  Synthetic oligonucleotide; GAG chr11 5204017 5204036 5204020 -
tttttttttcctttgggaca

SEQ ID NO: 51369 - DNA, 20 bp, Artificial Sequence
  Synthetic oligonucleotide; CAG chr11 5203999 5204018 5204002 -
cagagtcttgctctgtcgcc

SEQ ID NO: 51370 - DNA, 20 bp, Artificial Sequence
  Synthetic oligonucleotide; TGG chr11 5203994 5204013 5203997 -
tcttgctctgtcgcccagac

SEQ ID NO: 51371 - DNA, 20 bp, Artificial Sequence
  Synthetic oligonucleotide; GAG chr11 5203992 5204011 5203995 -
ttgctctgtcgcccagactg

SEQ ID NO: 51372 - DNA, 20 bp, Artificial Sequence
  Synthetic oligonucleotide; TGG chr11 5203984 5204003 5203987 -
tcgcccagactggagtgcaa

SEQ ID NO: 51373 - DNA, 20 bp, Artificial Sequence
  Synthetic oligonucleotide; CGG chr11 5203973 5203992 5203976 -
ggagtgcaatggcgcgatct

SEQ ID NO: 51374 - DNA, 20 bp, Artificial Sequence
  Synthetic oligonucleotide; CAG chr11 5203949 5203968 5203952 -
tcactgcaacttccacctcc

SEQ ID NO: 51375 - DNA, 20 bp, Artificial Sequence
  Synthetic oligonucleotide; AGG chr11 5203948 5203967 5203951 -
cactgcaacttccacctccc

SEQ ID NO: 51376 - DNA, 20 bp, Artificial Sequence
  Synthetic oligonucleotide; AAG chr11 5203942 5203961 5203945 -
aacttccacctcccaggatc

SEQ ID NO: 51377 - DNA, 20 bp, Artificial Sequence
  Synthetic oligonucleotide; CAG chr11 5203925 5203944 5203928 -
atcaagcaattctcctgcct

SEQ ID NO: 51378 - DNA, 20 bp, Artificial Sequence
  Synthetic oligonucleotide; AAG chr11 5203916 5203935 5203919 -
ttctcctgcctcagtctccc

SEQ ID NO: 51379 - DNA, 20 bp, Artificial Sequence
  Synthetic oligonucleotide; TGG chr11 5203909 5203928 5203912 -
gcctcagtctcccaagtaac

SEQ ID NO: 51380 - DNA, 20 bp, Artificial Sequence
  Synthetic oligonucleotide; GGG chr11 5203908 5203927 5203911 -
cctcagtctcccaagtaact

SEQ ID NO: 51381 - DNA, 20 bp, Artificial Sequence
  Synthetic oligonucleotide; CAG chr11 5203901 5203920 5203904 -
ctcccaagtaactgggatta

SEQ ID NO: 51382 - DNA, 20 bp, Artificial Sequence
  Synthetic oligonucleotide; AGG chr11 5203900 5203919 5203903 -
tcccaagtaactgggattac

SEQ ID NO: 51383 - DNA, 20 bp, Artificial Sequence
  Synthetic oligonucleotide; GAG chr11 5203898 5203917 5203901 -
ccaagtaactgggattacag

SEQ ID NO: 51384 - DNA, 20 bp, Artificial Sequence
  Synthetic oligonucleotide; CAG chr11 5203881 5203900 5203884 -
caggagcacactgccatgcc

SEQ ID NO: 51385 - DNA, 20 bp, Artificial Sequence
  Synthetic oligonucleotide; TAG chr11 5203860 5203879 5203863 -
agctaattatttttgtgttt

SEQ ID NO: 51386 - DNA, 20 bp, Artificial Sequence
  Synthetic oligonucleotide; TAG chr11 5203857 5203876 5203860 -
taattatttttgtgttttag

SEQ ID NO: 51387 - DNA, 20 bp, Artificial Sequence
  Synthetic oligonucleotide; GAG chr11 5203855 5203874 5203858 -
attatttttgtgttttagta

SEQ ID NO: 51388 - DNA, 20 bp, Artificial Sequence
  Synthetic oligonucleotide; CAG chr11 5203851 5203870 5203854 -
tttttgtgttttagtagaga

SEQ ID NO: 51389 - DNA, 20 bp, Artificial Sequence
  Synthetic oligonucleotide; AGG chr11 5203850 5203869 5203853 -
ttttgtgttttagtagagac

SEQ ID NO: 51390 - DNA, 20 bp, Artificial Sequence
  Synthetic oligonucleotide; GGG chr11 5203849 5203868 5203852 -
tttgtgttttagtagagaca

SEQ ID NO: 51391 - DNA, 20 bp, Artificial Sequence
  Synthetic oligonucleotide; CAG chr11 5203831 5203850 5203834 -
cagggtttcaccattttgcc

SEQ ID NO: 51392 - DNA, 20 bp, Artificial Sequence
  Synthetic oligonucleotide; AGG chr11 5203830 5203849 5203833 -
agggtttcaccattttgccc

SEQ ID NO: 51393 - DNA, 20 bp, Artificial Sequence
  Synthetic oligonucleotide; TGG chr11 5203826 5203845 5203829 -
tttcaccattttgcccaggt

SEQ ID NO: 51394 - DNA, 20 bp, Artificial Sequence
  Synthetic oligonucleotide; GAG chr11 5203811 5203830 5203814 -
caggttggtctccaactcct

SEQ ID NO: 51395 - DNA, 20 bp, Artificial Sequence
  Synthetic oligonucleotide; CAG chr11 5203806 5203825 5203809 -
tggtctccaactcctgagct

SEQ ID NO: 51396 - DNA, 20 bp, Artificial Sequence
  Synthetic oligonucleotide; CGG chr11 5203788 5203807 5203791 -
ctcagccaatccacctgcct

SEQ ID NO: 51397 - DNA, 20 bp, Artificial Sequence
  Synthetic oligonucleotide; AAG chr11 5203778 5203797 5203781 -
ccacctgcctcggcctccca

SEQ ID NO: 51398 - DNA, 20 bp, Artificial Sequence
  Synthetic oligonucleotide; TAG chr11 5203772 5203791 5203775 -
gcctcggcctcccaaagtgc

SEQ ID NO: 51399 - DNA, 20 bp, Artificial Sequence
  Synthetic oligonucleotide; AGG chr11 5203771 5203790 5203774 -
cctcggcctcccaaagtgct

SEQ ID NO: 51400 - DNA, 20 bp, Artificial Sequence
  Synthetic oligonucleotide; CAG chr11 5203764 5203783 5203767 -
ctcccaaagtgctaggatta

SEQ ID NO: 51401 - DNA, 20 bp, Artificial Sequence
  Synthetic oligonucleotide; AGG chr11 5203763 5203782 5203766 -
tcccaaagtgctaggattac

SEQ ID NO: 51402 - DNA, 20 bp, Artificial Sequence
  Synthetic oligonucleotide; GAG chr11 5203757 5203776 5203760 -
agtgctaggattacaggcgt

SEQ ID NO: 51403 - DNA, 20 bp, Artificial Sequence
  Synthetic oligonucleotide; AAG chr11 5203749 5203768 5203752 -
gattacaggcgtgagccacc

SEQ ID NO: 51404 - DNA, 20 bp, Artificial Sequence
  Synthetic oligonucleotide; TGG chr11 5203744 5203763 5203747 -
caggcgtgagccaccaagcc

SEQ ID NO: 51405 - DNA, 20 bp, Artificial Sequence
  Synthetic oligonucleotide; AAG chr11 5203737 5203756 5203740 -
gagccaccaagcctggctga

SEQ ID NO: 51406 - DNA, 20 bp, Artificial Sequence
  Synthetic oligonucleotide; TAG chr11 5203734 5203753 5203737 -
ccaccaagcctggctgaaag

SEQ ID NO: 51407 - DNA, 20 bp, Artificial Sequence
  Synthetic oligonucleotide; CAG chr11 5203705 5203724 5203708 -
ttaacacatacctacattca

SEQ ID NO: 51408 - DNA, 20 bp, Artificial Sequence
  Synthetic oligonucleotide; CAG chr11 5203676 5203695 5203679 -
aaatcttttgtgatcaatcc

SEQ ID NO: 51409 - DNA, 20 bp, Artificial Sequence
  Synthetic oligonucleotide; GAG chr11 5203655 5203674 5203658 -
agatccttgacgatatgtct

SEQ ID NO: 51410 - DNA, 20 bp, Artificial Sequence
  Synthetic oligonucleotide; CAG chr11 5203651 5203670 5203654 -
ccttgacgatatgtctgagt

SEQ ID NO: 51411 - DNA, 20 bp, Artificial Sequence
  Synthetic oligonucleotide; AGG chr11 5203650 5203669 5203653 -
cttgacgatatgtctgagtc

SEQ ID NO: 51412 - DNA, 20 bp, Artificial Sequence
  Synthetic oligonucleotide; TGG chr11 5203646 5203665 5203649 -
acgatatgtctgagtcaggc

SEQ ID NO: 51413 - DNA, 20 bp, Artificial Sequence
  Synthetic oligonucleotide; GAG chr11 5203639 5203658 5203642 -
gtctgagtcaggctggaaat

SEQ ID NO: 51414 - DNA, 20 bp, Artificial Sequence
  Synthetic oligonucleotide; GAG chr11 5203637 5203656 5203640 -
ctgagtcaggctggaaatga

SEQ ID NO: 51415 - DNA, 20 bp, Artificial Sequence
  Synthetic oligonucleotide; TGG chr11 5203618 5203637 5203621 -
agagaaatcatgtttgaaat

SEQ ID NO: 51416 - DNA, 20 bp, Artificial Sequence
  Synthetic oligonucleotide; GAG chr11 5203616 5203635 5203619 -
agaaatcatgtttgaaattg

SEQ ID NO: 51417 - DNA, 20 bp, Artificial Sequence
  Synthetic oligonucleotide; AAG chr11 5203603 5203622 5203606 -
gaaattggagtgttgtattc

SEQ ID NO: 51418 - DNA, 20 bp, Artificial Sequence
  Synthetic oligonucleotide; AGG chr11 5203602 5203621 5203605 -
aaattggagtgttgtattca

SEQ ID NO: 51419 - DNA, 20 bp, Artificial Sequence
  Synthetic oligonucleotide; CAG chr11 5203598 5203617 5203601 -
tggagtgttgtattcaaggt

SEQ ID NO: 51420 - DNA, 20 bp, Artificial Sequence
  Synthetic oligonucleotide; AAG chr11 5203594 5203613 5203597 -
gtgttgtattcaaggtcagc

SEQ ID NO: 51421 - DNA, 20 bp, Artificial Sequence
  Synthetic oligonucleotide; TGG chr11 5203586 5203605 5203589 -
ttcaaggtcagcaagatccc

SEQ ID NO: 51422 - DNA, 20 bp, Artificial Sequence
  Synthetic oligonucleotide; GAG chr11 5203584 5203603 5203587 -
caaggtcagcaagatccctg

SEQ ID NO: 51423 - DNA, 20 bp, Artificial Sequence
  Synthetic oligonucleotide; CAG chr11 5203581 5203600 5203584 -
ggtcagcaagatccctggag

SEQ ID NO: 51424 - DNA, 20 bp, Artificial Sequence
  Synthetic oligonucleotide; TGG chr11 5203552 5203571 5203555 -
ttttataaaccattcaaact

SEQ ID NO: 51425 - DNA, 20 bp, Artificial Sequence
  Synthetic oligonucleotide; TGG chr11 5203533 5203552 5203536 -
ttggtatatgatgactcaat

SEQ ID NO: 51426 - DNA, 20 bp, Artificial Sequence
  Synthetic oligonucleotide; TGG chr11 5203530 5203549 5203533 -
gtatatgatgactcaattgg

SEQ ID NO: 51427 - DNA, 20 bp, Artificial Sequence
  Synthetic oligonucleotide; AAG chr11 5203524 5203543 5203527 -
gatgactcaattggtggcca

SEQ ID NO: 51428 - DNA, 20 bp, Artificial Sequence
  Synthetic oligonucleotide; AGG chr11 5203523 5203542 5203526 -
atgactcaattggtggccaa

SEQ ID NO: 51429 - DNA, 20 bp, Artificial Sequence
  Synthetic oligonucleotide; CAG chr11 5203519 5203538 5203522 -
ctcaattggtggccaaaggt

SEQ ID NO: 51430 - DNA, 20 bp, Artificial Sequence
  Synthetic oligonucleotide; AAG chr11 5203514 5203533 5203517 -
ttggtggccaaaggtcagaa

SEQ ID NO: 51431 - DNA, 20 bp, Artificial Sequence
  Synthetic oligonucleotide; AAG chr11 5203508 5203527 5203511 -
gccaaaggtcagaaaagact

SEQ ID NO: 51432 - DNA, 20 bp, Artificial Sequence
  Synthetic oligonucleotide; CAG chr11 5203499 5203518 5203502 -
cagaaaagactaagtgtaca

SEQ ID NO: 51433 - DNA, 20 bp, Artificial Sequence
  Synthetic oligonucleotide; TAG chr11 5203475 5203494 5203478 -
tgattttacacacactttga

SEQ ID NO: 51434 - DNA, 20 bp, Artificial Sequence
  Synthetic oligonucleotide; AGG chr11 5203474 5203493 5203477 -
gattttacacacactttgat

SEQ ID NO: 51435 - DNA, 20 bp, Artificial Sequence
  Synthetic oligonucleotide; GAG chr11 5203472 5203491 5203475 -
ttttacacacactttgatag

SEQ ID NO: 51436 - DNA, 20 bp, Artificial Sequence
  Synthetic oligonucleotide; TAG chr11 5203430 5203449 5203433 -
tttatatctctgtgattgtc

SEQ ID NO: 51437 - DNA, 20 bp, Artificial Sequence
  Synthetic oligonucleotide; TAG chr11 5203416 5203435 5203419 -
attgtctagctcttatttca

SEQ ID NO: 51438 - DNA, 20 bp, Artificial Sequence
  Synthetic oligonucleotide; AAG chr11 5203388 5203407 5203391 -
ttaattaaaaattatttgat

SEQ ID NO: 51439 - DNA, 20 bp, Artificial Sequence
  Synthetic oligonucleotide; GAG chr11 5203348 5203367 5203351 -
cccttatttttcatattctt

SEQ ID NO: 51440 - DNA, 20 bp, Artificial Sequence
  Synthetic oligonucleotide; CAG chr11 5203338 5203357 5203341 -
tcatattcttgagcaaaaaa

SEQ ID NO: 51441 - DNA, 20 bp, Artificial Sequence
  Synthetic oligonucleotide; TGG chr11 5203332 5203351 5203335 -
tcttgagcaaaaaacagata

SEQ ID NO: 51442 - DNA, 20 bp, Artificial Sequence
  Synthetic oligonucleotide; CAG chr11 5203315 5203334 5203318 -
atatggttcctaatcttcta

SEQ ID NO: 51443 - DNA, 20 bp, Artificial Sequence
  Synthetic oligonucleotide; TGG chr11 5203296 5203315 5203299 -
acagcctctaatgaatctaa

SEQ ID NO: 51444 - DNA, 20 bp, Artificial Sequence
  Synthetic oligonucleotide; CAG chr11 5203288 5203307 5203291 -
taatgaatctaatggaaatt

SEQ ID NO: 51445 - DNA, 20 bp, Artificial Sequence
  Synthetic oligonucleotide; AAG chr11 5203277 5203296 5203280 -
atggaaattcagtgtataat

SEQ ID NO: 51446 - DNA, 20 bp, Artificial Sequence
  Synthetic oligonucleotide; TGG chr11 5203274 5203293 5203277 -
gaaattcagtgtataataag

SEQ ID NO: 51447 - DNA, 20 bp, Artificial Sequence
  Synthetic oligonucleotide; TAG chr11 5203258 5203277 5203261 -
taagtggtataaatataaac

SEQ ID NO: 51448 - DNA, 20 bp, Artificial Sequence
  Synthetic oligonucleotide; GAG chr11 5203244 5203263 5203247 -
ataaactagtatactgtgat

SEQ ID NO: 51449 - DNA, 20 bp, Artificial Sequence
  Synthetic oligonucleotide; GAG chr11 5203242 5203261 5203245 -
aaactagtatactgtgatga

SEQ ID NO: 51450 - DNA, 20 bp, Artificial Sequence
  Synthetic oligonucleotide; AAG chr11 5203238 5203257 5203241 -
tagtatactgtgatgagagt

SEQ ID NO: 51451 - DNA, 20 bp, Artificial Sequence
  Synthetic oligonucleotide; TAG chr11 5203234 5203253 5203237 -
atactgtgatgagagtaagt

SEQ ID NO: 51452 - DNA, 20 bp, Artificial Sequence
  Synthetic oligonucleotide; AAG chr11 5203229 5203248 5203232 -
gtgatgagagtaagttagtt

SEQ ID NO: 51453 - DNA, 20 bp, Artificial Sequence
  Synthetic oligonucleotide; AGG chr11 5203228 5203247 5203231 -
tgatgagagtaagttagtta

SEQ ID NO: 51454 - DNA, 20 bp, Artificial Sequence
  Synthetic oligonucleotide; GGG chr11 5203227 5203246 5203230 -
gatgagagtaagttagttaa

SEQ ID NO: 51455 - DNA, 20 bp, Artificial Sequence
  Synthetic oligonucleotide; GGG chr11 5203226 5203245 5203229 -
atgagagtaagttagttaag

SEQ ID NO: 51456 - DNA, 20 bp, Artificial Sequence
  Synthetic oligonucleotide; GGG chr11 5203225 5203244 5203228 -
tgagagtaagttagttaagg

SEQ ID NO: 51457 - DNA, 20 bp, Artificial Sequence
  Synthetic oligonucleotide; AAG chr11 5203219 5203238 5203222 -
taagttagttaagggggttg

SEQ ID NO: 51458 - DNA, 20 bp, Artificial Sequence
  Synthetic oligonucleotide; GAG chr11 5203212 5203231 5203215 -
gttaagggggttgaagaaat

SEQ ID NO: 51459 - DNA, 20 bp, Artificial Sequence
  Synthetic oligonucleotide; TAG chr11 5203203 5203222 5203206 -
gttgaagaaatgagataatc

SEQ ID NO: 51460 - DNA, 20 bp, Artificial Sequence
  Synthetic oligonucleotide; AGG chr11 5203202 5203221 5203205 -
ttgaagaaatgagataatct

SEQ ID NO: 51461 - DNA, 20 bp, Artificial Sequence
  Synthetic oligonucleotide; TGG chr11 5203199 5203218 5203202 -
aagaaatgagataatctagg

SEQ ID NO: 51462 - DNA, 20 bp, Artificial Sequence
  Synthetic oligonucleotide; GGG chr11 5203198 5203217 5203201 -
agaaatgagataatctaggt

SEQ ID NO: 51463 - DNA, 20 bp, Artificial Sequence
  Synthetic oligonucleotide; GGG chr11 5203197 5203216 5203200 -
gaaatgagataatctaggtg

SEQ ID NO: 51464 - DNA, 20 bp, Artificial Sequence
  Synthetic oligonucleotide; GAG chr11 5203195 5203214 5203198 -
aatgagataatctaggtggg

SEQ ID NO: 51465 - DNA, 20 bp, Artificial Sequence
  Synthetic oligonucleotide; CAG chr11 5203192 5203211 5203195 -
gagataatctaggtggggag

SEQ ID NO: 51466 - DNA, 20 bp, Artificial Sequence
  Synthetic oligonucleotide; TAG chr11 5203186 5203205 5203189 -
atctaggtggggagcagtat

SEQ ID NO: 51467 - DNA, 20 bp, Artificial Sequence
  Synthetic oligonucleotide; GAG chr11 5203171 5203190 5203174 -
agtattagaaaaatccccct

SEQ ID NO: 51468 - DNA, 20 bp, Artificial Sequence
  Synthetic oligonucleotide; AGG chr11 5203170 5203189 5203173 -
gtattagaaaaatccccctg

SEQ ID NO: 51469 - DNA, 20 bp, Artificial Sequence
  Synthetic oligonucleotide; AAG chr11 5203167 5203186 5203170 -
ttagaaaaatccccctgagg

SEQ ID NO: 51470 - DNA, 20 bp, Artificial Sequence
  Synthetic oligonucleotide; AAG chr11 5203147 5203166 5203150 -
aagtaatcattttaactcaa

SEQ ID NO: 51471 - DNA, 20 bp, Artificial Sequence
  Synthetic oligonucleotide; TGG chr11 5203140 5203159 5203143 -
cattttaactcaaaagttaa

SEQ ID NO: 51472 - DNA, 20 bp, Artificial Sequence
  Synthetic oligonucleotide; AAG chr11 5203134 5203153 5203137 -
aactcaaaagttaatggtga

SEQ ID NO: 51473 - DNA, 20 bp, Artificial Sequence
  Synthetic oligonucleotide; AGG chr11 5203133 5203152 5203136 -
actcaaaagttaatggtgaa

SEQ ID NO: 51474 - DNA, 20 bp, Artificial Sequence
  Synthetic oligonucleotide; TGG chr11 5203112 5203131 5203115 -
ggaattgctgtgcaaatact

SEQ ID NO: 51475 - DNA, 20 bp, Artificial Sequence
  Synthetic oligonucleotide; GGG chr11 5203111 5203130 5203114 -
gaattgctgtgcaaatactt

SEQ ID NO: 51476 - DNA, 20 bp, Artificial Sequence
  Synthetic oligonucleotide; GGG chr11 5203110 5203129 5203113 -
aattgctgtgcaaatacttg

SEQ ID NO: 51477 - DNA, 20 bp, Artificial Sequence
  Synthetic oligonucleotide; TAG chr11 5203107 5203126 5203110 -
tgctgtgcaaatacttgggg

SEQ ID NO: 51478 - DNA, 20 bp, Artificial Sequence
  Synthetic oligonucleotide; CGG chr11 5203098 5203117 5203101 -
aatacttggggtagataatt

SEQ ID NO: 51479 - DNA, 20 bp, Artificial Sequence
  Synthetic oligonucleotide; GAG chr11 5203096 5203115 5203099 -
tacttggggtagataattcg

SEQ ID NO: 51480 - DNA, 20 bp, Artificial Sequence
  Synthetic oligonucleotide; CAG chr11 5203091 5203110 5203094 -
ggggtagataattcggagca

SEQ ID NO: 51481 - DNA, 20 bp, Artificial Sequence
  Synthetic oligonucleotide; GAG chr11 5203089 5203108 5203092 -
ggtagataattcggagcaca

SEQ ID NO: 51482 - DNA, 20 bp, Artificial Sequence
  Synthetic oligonucleotide; AAG chr11 5203086 5203105 5203089 -
agataattcggagcacagag

SEQ ID NO: 51483 - DNA, 20 bp, Artificial Sequence
  Synthetic oligonucleotide; TGG chr11 5203079 5203098 5203082 -
tcggagcacagagaagacca

SEQ ID NO: 51484 - DNA, 20 bp, Artificial Sequence
  Synthetic oligonucleotide; GGG chr11 5203078 5203097 5203081 -
cggagcacagagaagaccat

SEQ ID NO: 51485 - DNA, 20 bp, Artificial Sequence
  Synthetic oligonucleotide; AAG chr11 5203073 5203092 5203076 -
cacagagaagaccatgggca

SEQ ID NO: 51486 - DNA, 20 bp, Artificial Sequence
  Synthetic oligonucleotide; GAG chr11 5203065 5203084 5203068 -
agaccatgggcaaagatcct

SEQ ID NO: 51487 - DNA, 20 bp, Artificial Sequence
  Synthetic oligonucleotide; TAG chr11 5203049 5203068 5203052 -
tcctgagacatgcatgtact

SEQ ID NO: 51488 - DNA, 20 bp, Artificial Sequence
  Synthetic oligonucleotide; GAG chr11 5203038 5203057 5203041 -
gcatgtacttagcttgtttt

SEQ ID NO: 51489 - DNA, 20 bp, Artificial Sequence
  Synthetic oligonucleotide; AGG chr11 5203037 5203056 5203040 -
catgtacttagcttgttttg

SEQ ID NO: 51490 - DNA, 20 bp, Artificial Sequence
  Synthetic oligonucleotide; AAG chr11 5203034 5203053 5203037 -
gtacttagcttgttttgagg

SEQ ID NO: 51491 - DNA, 20 bp, Artificial Sequence
  Synthetic oligonucleotide; AAG chr11 5203028 5203047 5203031 -
agcttgttttgaggaagata

SEQ ID NO: 51492 - DNA, 20 bp, Artificial Sequence
  Synthetic oligonucleotide; AAG chr11 5203012 5203031 5203015 -
gataaagatacctaaatatt

SEQ ID NO: 51493 - DNA, 20 bp, Artificial Sequence
  Synthetic oligonucleotide; AGG chr11 5203011 5203030 5203014 -
ataaagatacctaaatatta

SEQ ID NO: 51494 - DNA, 20 bp, Artificial Sequence
  Synthetic oligonucleotide; GAG chr11 5203009 5203028 5203012 -
aaagatacctaaatattaag

SEQ ID NO: 51495 - DNA, 20 bp, Artificial Sequence
  Synthetic oligonucleotide; TAG chr11 5203004 5203023 5203007 -
tacctaaatattaaggagtg

SEQ ID NO: 51496 - DNA, 20 bp, Artificial Sequence
  Synthetic oligonucleotide; AGG chr11 5203003 5203022 5203006 -
acctaaatattaaggagtgt

SEQ ID NO: 51497 - DNA, 20 bp, Artificial Sequence
  Synthetic oligonucleotide; CAG chr11 5203000 5203019 5203003 -
taaatattaaggagtgtagg

SEQ ID NO: 51498 - DNA, 20 bp, Artificial Sequence
  Synthetic oligonucleotide; TAG chr11 5202997 5203016 5203000 -
atattaaggagtgtaggcag

SEQ ID NO: 51499 - DNA, 20 bp, Artificial Sequence
  Synthetic oligonucleotide; TGG chr11 5202994 5203013 5202997 -
ttaaggagtgtaggcagtag

SEQ ID NO: 51500 - DNA, 20 bp, Artificial Sequence
  Synthetic oligonucleotide; AAG chr11 5202987 5203006 5202990 -
gtgtaggcagtagtggtcta

SEQ ID NO: 51501 - DNA, 20 bp, Artificial Sequence
  Synthetic oligonucleotide; TAG chr11 5202978 5202997 5202981 -
gtagtggtctaaagatgtaa

SEQ ID NO: 51502 - DNA, 20 bp, Artificial Sequence
  Synthetic oligonucleotide; AAG chr11 5202975 5202994 5202978 -
gtggtctaaagatgtaatag

SEQ ID NO: 51503 - DNA, 20 bp, Artificial Sequence
  Synthetic oligonucleotide; GAG chr11 5202973 5202992 5202976 -
ggtctaaagatgtaatagaa

SEQ ID NO: 51504 - DNA, 20 bp, Artificial Sequence
  Synthetic oligonucleotide; AGG chr11 5202972 5202991 5202975 -
gtctaaagatgtaatagaag

SEQ ID NO: 51505 - DNA, 20 bp, Artificial Sequence
  Synthetic oligonucleotide; CAG chr11 5202969 5202988 5202972 -
taaagatgtaatagaagagg

SEQ ID NO: 51506 - DNA, 20 bp, Artificial Sequence
  Synthetic oligonucleotide; AGG chr11 5202968 5202987 5202971 -
aaagatgtaatagaagaggc

SEQ ID NO: 51507 - DNA, 20 bp, Artificial Sequence
  Synthetic oligonucleotide; GAG chr11 5202964 5202983 5202967 -
atgtaatagaagaggcaggt

SEQ ID NO: 51508 - DNA, 20 bp, Artificial Sequence
  Synthetic oligonucleotide; AAG chr11 5202950 5202969 5202953 -
gcaggtgagccacgttatac

SEQ ID NO: 51509 - DNA, 20 bp, Artificial Sequence
  Synthetic oligonucleotide; AGG chr11 5202949 5202968 5202952 -
caggtgagccacgttataca

SEQ ID NO: 51510 - DNA, 20 bp, Artificial Sequence
  Synthetic oligonucleotide; AAG chr11 5202930 5202949 5202933 -
aaggctttttgactatgata

SEQ ID NO: 51511 - DNA, 20 bp, Artificial Sequence
  Synthetic oligonucleotide; GAG chr11 5202908 5202927 5202911 -
gaatttgtattttacattac

SEQ ID NO: 51512 - DNA, 20 bp, Artificial Sequence
  Synthetic oligonucleotide; TGG chr11 5202902 5202921 5202905 -
gtattttacattacgagcaa

SEQ ID NO: 51513 - DNA, 20 bp, Artificial Sequence
  Synthetic oligonucleotide; GGG chr11 5202901 5202920 5202904 -
tattttacattacgagcaat

SEQ ID NO: 51514 - DNA, 20 bp, Artificial Sequence
  Synthetic oligonucleotide; AAG chr11 5202897 5202916 5202900 -
ttacattacgagcaatgggt

SEQ ID NO: 51515 - DNA, 20 bp, Artificial Sequence
  Synthetic oligonucleotide; AAG chr11 5202885 5202904 5202888 -
caatgggtaagtgaccatca

SEQ ID NO: 51516 - DNA, 20 bp, Artificial Sequence
  Synthetic oligonucleotide; GAG chr11 5202883 5202902 5202886 -
atgggtaagtgaccatcaaa

SEQ ID NO: 51517 - DNA, 20 bp, Artificial Sequence
  Synthetic oligonucleotide; AAG chr11 5202869 5202888 5202872 -
atcaaagagttttttcaaca

SEQ ID NO: 51518 - DNA, 20 bp, Artificial Sequence
  Synthetic oligonucleotide; AGG chr11 5202868 5202887 5202871 -
tcaaagagttttttcaacaa

SEQ ID NO: 51519 - DNA, 20 bp, Artificial Sequence
  Synthetic oligonucleotide; TAG chr11 5202854 5202873 5202857 -
caacaaaggtttgtgtgatt

SEQ ID NO: 51520 - DNA, 20 bp, Artificial Sequence
  Synthetic oligonucleotide; TAG chr11 5202851 5202870 5202854 -
caaaggtttgtgtgatttag

SEQ ID NO: 51521 - DNA, 20 bp, Artificial Sequence
  Synthetic oligonucleotide; TAG chr11 5202841 5202860 5202844 -
tgtgatttagtagatgtttg

SEQ ID NO: 51522 - DNA, 20 bp, Artificial Sequence
  Synthetic oligonucleotide; AAG chr11 5202836 5202855 5202839 -
tttagtagatgtttgtagaa

SEQ ID NO: 51523 - DNA, 20 bp, Artificial Sequence
  Synthetic oligonucleotide; TGG chr11 5202828 5202847 5202831 -
atgtttgtagaaaagcaatt

SEQ ID NO: 51524 - DNA, 20 bp, Artificial Sequence
  Synthetic oligonucleotide; TGG chr11 5202819 5202838 5202822 -
gaaaagcaatttggtttccc

SEQ ID NO: 51525 - DNA, 20 bp, Artificial Sequence
  Synthetic oligonucleotide; GAG chr11 5202817 5202836 5202820 -
aaagcaatttggtttccctg

SEQ ID NO: 51526 - DNA, 20 bp, Artificial Sequence
  Synthetic oligonucleotide; TAG chr11 5202801 5202820 5202804 -
cctggagataatacattttt

SEQ ID NO: 51527 - DNA, 20 bp, Artificial Sequence
  Synthetic oligonucleotide; GAG chr11 5202799 5202818 5202802 -
tggagataatacatttttta

SEQ ID NO: 51528 - DNA, 20 bp, Artificial Sequence
  Synthetic oligonucleotide; AGG chr11 5202798 5202817 5202801 -
ggagataatacattttttag

SEQ ID NO: 51529 - DNA, 20 bp, Artificial Sequence
  Synthetic oligonucleotide; CAG chr11 5202790 5202809 5202793 -
tacattttttagaggacaaa

SEQ ID NO: 51530 - DNA, 20 bp, Artificial Sequence
  Synthetic oligonucleotide; TAG chr11 5202773 5202792 5202776 -
aaacagataaatcatgatat

SEQ ID NO: 51531 - DNA, 20 bp, Artificial Sequence
  Synthetic oligonucleotide; TAG chr11 5202769 5202788 5202772 -
agataaatcatgatattagc

SEQ ID NO: 51532 - DNA, 20 bp, Artificial Sequence
  Synthetic oligonucleotide; TAG chr11 5202728 5202747 5202731 -
attaatttaataaattatca

SEQ ID NO: 51533 - DNA, 20 bp, Artificial Sequence
  Synthetic oligonucleotide; TAG chr11 5202725 5202744 5202728 -
aatttaataaattatcatag

SEQ ID NO: 51534 - DNA, 20 bp, Artificial Sequence
  Synthetic oligonucleotide; CAG chr11 5202721 5202740 5202724 -
taataaattatcatagtagc

SEQ ID NO: 51535 - DNA, 20 bp, Artificial Sequence
  Synthetic oligonucleotide; AGG chr11 5202720 5202739 5202723 -
aataaattatcatagtagcc

SEQ ID NO: 51536 - DNA, 20 bp, Artificial Sequence
  Synthetic oligonucleotide; GGG chr11 5202719 5202738 5202722 -
ataaattatcatagtagcca

SEQ ID NO: 51537 - DNA, 20 bp, Artificial Sequence
  Synthetic oligonucleotide; AAG chr11 5202696 5202715 5202699 -
aaacaatgatattataaacc

SEQ ID NO: 51538 - DNA, 20 bp, Artificial Sequence
  Synthetic oligonucleotide; CGG chr11 5202692 5202711 5202695 -
aatgatattataaaccaaga

SEQ ID NO: 51539 - DNA, 20 bp, Artificial Sequence
  Synthetic oligonucleotide; GGG chr11 5202691 5202710 5202694 -
atgatattataaaccaagac

SEQ ID NO: 51540 - DNA, 20 bp, Artificial Sequence
  Synthetic oligonucleotide; AAG chr11 5202678 5202697 5202681 -
ccaagacgggcaatgtgtaa

SEQ ID NO: 51541 - DNA, 20 bp, Artificial Sequence
  Synthetic oligonucleotide; TGG chr11 5202675 5202694 5202678 -
agacgggcaatgtgtaaaag

SEQ ID NO: 51542 - DNA, 20 bp, Artificial Sequence
  Synthetic oligonucleotide; GGG chr11 5202674 5202693 5202677 -
gacgggcaatgtgtaaaagt

SEQ ID NO: 51543 - DNA, 20 bp, Artificial Sequence
  Synthetic oligonucleotide; TGG chr11 5202665 5202684 5202668 -
tgtgtaaaagtgggcctatc

SEQ ID NO: 51544 - DNA, 20 bp, Artificial Sequence
  Synthetic oligonucleotide; GGG chr11 5202664 5202683 5202667 -
gtgtaaaagtgggcctatct

SEQ ID NO: 51545 - DNA, 20 bp, Artificial Sequence
  Synthetic oligonucleotide; TGG chr11 5202652 5202671 5202655 -
gcctatctgggatgtgtttc

SEQ ID NO: 51546 - DNA, 20 bp, Artificial Sequence
  Synthetic oligonucleotide; TAG chr11 5202649 5202668 5202652 -
tatctgggatgtgtttctgg

SEQ ID NO: 51547 - DNA, 20 bp, Artificial Sequence
  Synthetic oligonucleotide; TGG chr11 5202643 5202662 5202646 -
ggatgtgtttctggtagaaa

SEQ ID NO: 51548 - DNA, 20 bp, Artificial Sequence
  Synthetic oligonucleotide; TAG chr11 5202640 5202659 5202643 -
tgtgtttctggtagaaatgg

SEQ ID NO: 51549 - DNA, 20 bp, Artificial Sequence
  Synthetic oligonucleotide; AAG chr11 5202627 5202646 5202630 -
gaaatggtagaaattgatga

SEQ ID NO: 51550 - DNA, 20 bp, Artificial Sequence
  Synthetic oligonucleotide; TGG chr11 5202618 5202637 5202621 -
gaaattgatgaaagatttga

SEQ ID NO: 51551 - DNA, 20 bp, Artificial Sequence
  Synthetic oligonucleotide; GAG chr11 5202616 5202635 5202619 -
aattgatgaaagatttgatg

SEQ ID NO: 51552 - DNA, 20 bp, Artificial Sequence
  Synthetic oligonucleotide; GAG chr11 5202614 5202633 5202617 -
ttgatgaaagatttgatgga

SEQ ID NO: 51553 - DNA, 20 bp, Artificial Sequence
  Synthetic oligonucleotide; GAG chr11 5202612 5202631 5202615 -
gatgaaagatttgatggaga

SEQ ID NO: 51554 - DNA, 20 bp, Artificial Sequence
  Synthetic oligonucleotide; AGG chr11 5202611 5202630 5202614 -
atgaaagatttgatggagag

SEQ ID NO: 51555 - DNA, 20 bp, Artificial Sequence
  Synthetic oligonucleotide; AAG chr11 5202607 5202626 5202610 -
aagatttgatggagagagga

SEQ ID NO: 51556 - DNA, 20 bp, Artificial Sequence
  Synthetic oligonucleotide; AGG chr11 5202606 5202625 5202609 -
agatttgatggagagaggaa

SEQ ID NO: 51557 - DNA, 20 bp, Artificial Sequence
  Synthetic oligonucleotide; GGG chr11 5202605 5202624 5202608 -
gatttgatggagagaggaaa

SEQ ID NO: 51558 - DNA, 20 bp, Artificial Sequence
  Synthetic oligonucleotide; AAG chr11 5202602 5202621 5202605 -
ttgatggagagaggaaaggg

SEQ ID NO: 51559 - DNA, 20 bp, Artificial Sequence
  Synthetic oligonucleotide; AGG chr11 5202601 5202620 5202604 -
tgatggagagaggaaaggga

SEQ ID NO: 51560 - DNA, 20 bp, Artificial Sequence
  Synthetic oligonucleotide; AAG chr11 5202597 5202616 5202600 -
ggagagaggaaagggaagga

SEQ ID NO: 51561 - DNA, 20 bp, Artificial Sequence
  Synthetic oligonucleotide; GAG chr11 5202595 5202614 5202598 -
agagaggaaagggaaggaaa

SEQ ID NO: 51562 - DNA, 20 bp, Artificial Sequence
  Synthetic oligonucleotide; GAG chr11 5202593 5202612 5202596 -
agaggaaagggaaggaaaga

SEQ ID NO: 51563 - DNA, 20 bp, Artificial Sequence
  Synthetic oligonucleotide; AAG chr11 5202565 5202584 5202568 -
aaaaattttaaaaatgactc

SEQ ID NO: 51564 - DNA, 20 bp, Artificial Sequence
  Synthetic oligonucleotide; TGG chr11 5202538 5202557 5202541 -
gtcttatgcaattgtgttat

SEQ ID NO: 51565 - DNA, 20 bp, Artificial Sequence
  Synthetic oligonucleotide; TGG chr11 5202535 5202554 5202538 -
ttatgcaattgtgttattgg

SEQ ID NO: 51566 - DNA, 20 bp, Artificial Sequence
  Synthetic oligonucleotide; GAG chr11 5202533 5202552 5202536 -
atgcaattgtgttattggtg

SEQ ID NO: 51567 - DNA, 20 bp, Artificial Sequence
  Synthetic oligonucleotide; TAG chr11 5202516 5202535 5202519 -
gtggagtcactttataatat

SEQ ID NO: 51568 - DNA, 20 bp, Artificial Sequence
  Synthetic oligonucleotide; AGG chr11 5202515 5202534 5202518 -
tggagtcactttataatatt

SEQ ID NO: 51569 - DNA, 20 bp, Artificial Sequence
  Synthetic oligonucleotide; GAG chr11 5202513 5202532 5202516 -
gagtcactttataatattag

SEQ ID NO: 51570 - DNA, 20 bp, Artificial Sequence
  Synthetic oligonucleotide; AAG chr11 5202508 5202527 5202511 -
actttataatattaggagaa

SEQ ID NO: 51571 - DNA, 20 bp, Artificial Sequence
  Synthetic oligonucleotide; AGG chr11 5202507 5202526 5202510 -
ctttataatattaggagaaa

SEQ ID NO: 51572 - DNA, 20 bp, Artificial Sequence
  Synthetic oligonucleotide; GGG chr11 5202506 5202525 5202509 -
tttataatattaggagaaaa

SEQ ID NO: 51573 - DNA, 20 bp, Artificial Sequence
  Synthetic oligonucleotide; CAG chr11 5202502 5202521 5202505 -
taatattaggagaaaaggga

SEQ ID NO: 51574 - DNA, 20 bp, Artificial Sequence
  Synthetic oligonucleotide; TAG chr11 5202495 5202514 5202498 -
aggagaaaagggacagaaaa

SEQ ID NO: 51575 - DNA, 20 bp, Artificial Sequence
  Synthetic oligonucleotide; TGG chr11 5202488 5202507 5202491 -
aagggacagaaaatagattt

SEQ ID NO: 51576 - DNA, 20 bp, Artificial Sequence
  Synthetic oligonucleotide; GGG chr11 5202487 5202506 5202490 -
agggacagaaaatagatttt

SEQ ID NO: 51577 - DNA, 20 bp, Artificial Sequence
  Synthetic oligonucleotide; GGG chr11 5202486 5202505 5202489 -
gggacagaaaatagattttg

SEQ ID NO: 51578 - DNA, 20 bp, Artificial Sequence
  Synthetic oligonucleotide; GGG chr11 5202485 5202504 5202488 -
ggacagaaaatagattttgg

SEQ ID NO: 51579 - DNA, 20 bp, Artificial Sequence
  Synthetic oligonucleotide; GGG chr11 5202484 5202503 5202487 -
gacagaaaatagattttggg

SEQ ID NO: 51580 - DNA, 20 bp, Artificial Sequence
  Synthetic oligonucleotide; AAG chr11 5202475 5202494 5202478 -
tagattttggggggaaaatc

SEQ ID NO: 51581 - DNA, 20 bp, Artificial Sequence
  Synthetic oligonucleotide; TGG chr11 5202464 5202483 5202467 -
gggaaaatcaagtactttat

SEQ ID NO: 51582 - DNA, 20 bp, Artificial Sequence
  Synthetic oligonucleotide; AAG chr11 5202446 5202465 5202449 -
attggcatcattcttatttt

SEQ ID NO: 51583 - DNA, 20 bp, Artificial Sequence
  Synthetic oligonucleotide; CAG chr11 5202433 5202452 5202436 -
ttattttaagattaaacact

SEQ ID NO: 51584 - DNA, 20 bp, Artificial Sequence
  Synthetic oligonucleotide; TAG chr11 5202416 5202435 5202419 -
actcagatgaatatattaaa

SEQ ID NO: 51585 - DNA, 20 bp, Artificial Sequence
  Synthetic oligonucleotide; CAG chr11 5202412 5202431 5202415 -
agatgaatatattaaatagc

SEQ ID NO: 51586 - DNA, 20 bp, Artificial Sequence
  Synthetic oligonucleotide; GAG chr11 5202393 5202412 5202396 -
ccagttgtattcatgaattt

SEQ ID NO: 51587 - DNA, 20 bp, Artificial Sequence
  Synthetic oligonucleotide; CAG chr11 5202386 5202405 5202389 -
tattcatgaatttgagctct

SEQ ID NO: 51588 - DNA, 20 bp, Artificial Sequence
  Synthetic oligonucleotide; AGG chr11 5202385 5202404 5202388 -
attcatgaatttgagctctc

SEQ ID NO: 51589 - DNA, 20 bp, Artificial Sequence
  Synthetic oligonucleotide; GAG chr11 5202383 5202402 5202386 -
tcatgaatttgagctctcag

SEQ ID NO: 51590 - DNA, 20 bp, Artificial Sequence
  Synthetic oligonucleotide; TGG chr11 5202380 5202399 5202383 -
tgaatttgagctctcaggag

SEQ ID NO: 51591 - DNA, 20 bp, Artificial Sequence
  Synthetic oligonucleotide; CAG chr11 5202376 5202395 5202379 -
tttgagctctcaggagtggt

SEQ ID NO: 51592 - DNA, 20 bp, Artificial Sequence
  Synthetic oligonucleotide; AGG chr11 5202375 5202394 5202378 -
ttgagctctcaggagtggtc

SEQ ID NO: 51593 - DNA, 20 bp, Artificial Sequence
  Synthetic oligonucleotide; CAG chr11 5202369 5202388 5202372 -
tctcaggagtggtcaggaat

SEQ ID NO: 51594 - DNA, 20 bp, Artificial Sequence
  Synthetic oligonucleotide; GAG chr11 5202367 5202386 5202370 -
tcaggagtggtcaggaatca

SEQ ID NO: 51595 - DNA, 20 bp, Artificial Sequence
  Synthetic oligonucleotide; AGG chr11 5202366 5202385 5202369 -
caggagtggtcaggaatcag

SEQ ID NO: 51596 - DNA, 20 bp, Artificial Sequence
  Synthetic oligonucleotide; TAG chr11 5202354 5202373 5202357 -
ggaatcagaggtgcaaatgt

SEQ ID NO: 51597 - DNA, 20 bp, Artificial Sequence
  Synthetic oligonucleotide; AAG chr11 5202340 5202359 5202343 -
aaatgttagtttcaaataat

SEQ ID NO: 51598 - DNA, 20 bp, Artificial Sequence
  Synthetic oligonucleotide; AAG chr11 5202334 5202353 5202337 -
tagtttcaaataataagaaa

SEQ ID NO: 51599 - DNA, 20 bp, Artificial Sequence
  Synthetic oligonucleotide; TAG chr11 5202325 5202344 5202328 -
ataataagaaaaagttgaca

SEQ ID NO: 51600 - DNA, 20 bp, Artificial Sequence
  Synthetic oligonucleotide; AAG chr11 5202312 5202331 5202315 -
gttgacatagtctgcacatt

SEQ ID NO: 51601 - DNA, 20 bp, Artificial Sequence
  Synthetic oligonucleotide; AGG chr11 5202311 5202330 5202314 -
ttgacatagtctgcacatta

SEQ ID NO: 51602 - DNA, 20 bp, Artificial Sequence
  Synthetic oligonucleotide; GAG chr11 5202304 5202323 5202307 -
agtctgcacattaaggaact

SEQ ID NO: 51603 - DNA, 20 bp, Artificial Sequence
  Synthetic oligonucleotide; TAG chr11 5202297 5202316 5202300 -
acattaaggaactgagaatt

SEQ ID NO: 51604 - DNA, 20 bp, Artificial Sequence
  Synthetic oligonucleotide; CAG chr11 5202287 5202306 5202290 -
actgagaatttagtttgtaa

SEQ ID NO: 51605 - DNA, 20 bp, Artificial Sequence
  Synthetic oligonucleotide; GAG chr11 5202285 5202304 5202288 -
tgagaatttagtttgtaaca

SEQ ID NO: 51606 - DNA, 20 bp, Artificial Sequence
  Synthetic oligonucleotide; TAG chr11 5202278 5202297 5202281 -
ttagtttgtaacagagatat

SEQ ID NO: 51607 - DNA, 20 bp, Artificial Sequence
  Synthetic oligonucleotide; TAG chr11 5202266 5202285 5202269 -
agagatattagttaaatatt

SEQ ID NO: 51608 - DNA, 20 bp, Artificial Sequence
  Synthetic oligonucleotide; TAG chr11 5202254 5202273 5202257 -
taaatatttagtttaaatat

SEQ ID NO: 51609 - DNA, 20 bp, Artificial Sequence
  Synthetic oligonucleotide; TAG chr11 5202242 5202261 5202245 -
ttaaatattagttaaatatt

SEQ ID NO: 51610 - DNA, 20 bp, Artificial Sequence
  Synthetic oligonucleotide; AAG chr11 5202220 5202239 5202223 -
gctaataaatacaaaattat

SEQ ID NO: 51611 - DNA, 20 bp, Artificial Sequence
  Synthetic oligonucleotide; TAG chr11 5202183 5202202 5202186 -
gaaacatgataccaaaataa

SEQ ID NO: 51612 - DNA, 20 bp, Artificial Sequence
  Synthetic oligonucleotide; TGG chr11 5202175 5202194 5202178 -
ataccaaaataatagatata

SEQ ID NO: 51613 - DNA, 20 bp, Artificial Sequence
  Synthetic oligonucleotide; AAG chr11 5202159 5202178 5202162 -
tatatggataaatttgtctt

SEQ ID NO: 51614 - DNA, 20 bp, Artificial Sequence
  Synthetic oligonucleotide; AAG chr11 5202144 5202163 5202147 -
gtcttaagaaacttcttgaa

SEQ ID NO: 51615 - DNA, 20 bp, Artificial Sequence
  Synthetic oligonucleotide; GAG chr11 5202133 5202152 5202136 -
cttcttgaaaagtgattgtt

SEQ ID NO: 51616 - DNA, 20 bp, Artificial Sequence
  Synthetic oligonucleotide; AAG chr11 5202126 5202145 5202129 -
aaaagtgattgttgagttgc

SEQ ID NO: 51617 - DNA, 20 bp, Artificial Sequence
  Synthetic oligonucleotide; AAG chr11 5202112 5202131 5202115 -
agttgcaagatcgttttaaa

SEQ ID NO: 51618 - DNA, 20 bp, Artificial Sequence
  Synthetic oligonucleotide; AGG chr11 5202111 5202130 5202114 -
gttgcaagatcgttttaaaa

SEQ ID NO: 51619 - DNA, 20 bp, Artificial Sequence
  Synthetic oligonucleotide; GGG chr11 5202110 5202129 5202113 -
ttgcaagatcgttttaaaaa

SEQ ID NO: 51620 - DNA, 20 bp, Artificial Sequence
  Synthetic oligonucleotide; TAG chr11 5202107 5202126 5202110 -
caagatcgttttaaaaaggg

SEQ ID NO: 51621 - DNA, 20 bp, Artificial Sequence
  Synthetic oligonucleotide; AGG chr11 5202106 5202125 5202109 -
aagatcgttttaaaaagggt

SEQ ID NO: 51622 - DNA, 20 bp, Artificial Sequence
  Synthetic oligonucleotide; AAG chr11 5202103 5202122 5202106 -
atcgttttaaaaagggtagg

SEQ ID NO: 51623 - DNA, 20 bp, Artificial Sequence
  Synthetic oligonucleotide; GAG chr11 5202095 5202114 5202098 -
aaaaagggtaggaagaaatt

SEQ ID NO: 51624 - DNA, 20 bp, Artificial Sequence
  Synthetic oligonucleotide; AGG chr11 5202094 5202113 5202097 -
aaaagggtaggaagaaattg

SEQ ID NO: 51625 - DNA, 20 bp, Artificial Sequence
  Synthetic oligonucleotide; AAG chr11 5202089 5202108 5202092 -
ggtaggaagaaattgaggaa

SEQ ID NO: 51626 - DNA, 20 bp, Artificial Sequence
  Synthetic oligonucleotide; TAG chr11 5202073 5202092 5202076 -
ggaaaagatgatgaataatt

SEQ ID NO: 51627 - DNA, 20 bp, Artificial Sequence
  Synthetic oligonucleotide; AGG chr11 5202072 5202091 5202075 -
gaaaagatgatgaataattt

SEQ ID NO: 51628 - DNA, 20 bp, Artificial Sequence
  Synthetic oligonucleotide; CAG chr11 5202069 5202088 5202072 -
aagatgatgaataatttagg

SEQ ID NO: 51629 - DNA, 20 bp, Artificial Sequence
  Synthetic oligonucleotide; TAG chr11 5202065 5202084 5202068 -
tgatgaataatttaggcaga

SEQ ID NO: 51630 - DNA, 20 bp, Artificial Sequence
  Synthetic oligonucleotide; GAG chr11 5202054 5202073 5202057 -
ttaggcagatagaacatttc

SEQ ID NO: 51631 - DNA, 20 bp, Artificial Sequence
  Synthetic oligonucleotide; AAG chr11 5202038 5202057 5202041 -
tttcgagaaaaattttacga

SEQ ID NO: 51632 - DNA, 20 bp, Artificial Sequence
  Synthetic oligonucleotide; AAG chr11 5202035 5202054 5202038 -
cgagaaaaattttacgaaag

SEQ ID NO: 51633 - DNA, 20 bp, Artificial Sequence
  Synthetic oligonucleotide; GAG chr11 5202033 5202052 5202036 -
agaaaaattttacgaaagaa

SEQ ID NO: 51634 - DNA, 20 bp, Artificial Sequence
  Synthetic oligonucleotide; TAG chr11 5202020 5202039 5202023 -
gaaagaagagaaattcgatt

SEQ ID NO: 51635 - DNA, 20 bp, Artificial Sequence
  Synthetic oligonucleotide; GAG chr11 5202018 5202037 5202021 -
aagaagagaaattcgattta

SEQ ID NO: 51636 - DNA, 20 bp, Artificial Sequence
  Synthetic oligonucleotide; AAG chr11 5202009 5202028 5202012 -
aattcgatttagagaaatga

SEQ ID NO: 51637 - DNA, 20 bp, Artificial Sequence
  Synthetic oligonucleotide; AAG chr11 5202006 5202025 5202009 -
tcgatttagagaaatgaaag

SEQ ID NO: 51638 - DNA, 20 bp, Artificial Sequence
  Synthetic oligonucleotide; AAG chr11 5201991 5202010 5201994 -
gaaagaagatacgtattcaa

SEQ ID NO: 51639 - DNA, 20 bp, Artificial Sequence
  Synthetic oligonucleotide; AAG chr11 5201971 5201990 5201974 -
aagactgaaaaatcctctgc

SEQ ID NO: 51640 - DNA, 20 bp, Artificial Sequence
  Synthetic oligonucleotide; AAG chr11 5201963 5201982 5201966 -
aaaatcctctgcaagaaacg

SEQ ID NO: 51641 - DNA, 20 bp, Artificial Sequence
  Synthetic oligonucleotide; AAG chr11 5201953 5201972 5201956 -
gcaagaaacgaagaaacttc

SEQ ID NO: 51642 - DNA, 20 bp, Artificial Sequence
  Synthetic oligonucleotide; TGG chr11 5201943 5201962 5201946 -
aagaaacttcaagcattcta

SEQ ID NO: 51643 - DNA, 20 bp, Artificial Sequence
  Synthetic oligonucleotide; GAG chr11 5201941 5201960 5201944 -
gaaacttcaagcattctatg

SEQ ID NO: 51644 - DNA, 20 bp, Artificial Sequence
  Synthetic oligonucleotide; AAG chr11 5201934 5201953 5201937 -
caagcattctatggagaaaa

SEQ ID NO: 51645 - DNA, 20 bp, Artificial Sequence
  Synthetic oligonucleotide; TAG chr11 5201922 5201941 5201925 -
ggagaaaaaagtattaaaaa

SEQ ID NO: 51646 - DNA, 20 bp, Artificial Sequence
  Synthetic oligonucleotide; GAG chr11 5201918 5201937 5201921 -
aaaaaagtattaaaaatagt

SEQ ID NO: 51647 - DNA, 20 bp, Artificial Sequence
  Synthetic oligonucleotide; AAG chr11 5201913 5201932 5201916 -
agtattaaaaatagtgagct

SEQ ID NO: 51648 - DNA, 20 bp, Artificial Sequence
  Synthetic oligonucleotide; GAG chr11 5201898 5201917 5201901 -
gagctaagttattcaatgct

SEQ ID NO: 51649 - DNA, 20 bp, Artificial Sequence
  Synthetic oligonucleotide; AAG chr11 5201895 5201914 5201898 -
ctaagttattcaatgctgag

SEQ ID NO: 51650 - DNA, 20 bp, Artificial Sequence
  Synthetic oligonucleotide; AGG chr11 5201894 5201913 5201897 -
taagttattcaatgctgaga

SEQ ID NO: 51651 - DNA, 20 bp, Artificial Sequence
  Synthetic oligonucleotide; GAG chr11 5201892 5201911 5201895 -
agttattcaatgctgagaag

SEQ ID NO: 51652 - DNA, 20 bp, Artificial Sequence
  Synthetic oligonucleotide; CAG chr11 5201888 5201907 5201891 -
attcaatgctgagaaggagt

SEQ ID NO: 51653 - DNA, 20 bp, Artificial Sequence
  Synthetic oligonucleotide; AGG chr11 5201887 5201906 5201890 -
ttcaatgctgagaaggagtc

SEQ ID NO: 51654 - DNA, 20 bp, Artificial Sequence
  Synthetic oligonucleotide; GGG chr11 5201886 5201905 5201889 -
tcaatgctgagaaggagtca

SEQ ID NO: 51655 - DNA, 20 bp, Artificial Sequence
  Synthetic oligonucleotide; AAG chr11 5201882 5201901 5201885 -
tgctgagaaggagtcagggc

SEQ ID NO: 51656 - DNA, 20 bp, Artificial Sequence
  Synthetic oligonucleotide; TGG chr11 5201871 5201890 5201874 -
agtcagggcaagaaaaacaa

SEQ ID NO: 51657 - DNA, 20 bp, Artificial Sequence
  Synthetic oligonucleotide; TAG chr11 5201867 5201886 5201870 -
agggcaagaaaaacaatggt

SEQ ID NO: 51658 - DNA, 20 bp, Artificial Sequence
  Synthetic oligonucleotide; TAG chr11 5201859 5201878 5201862 -
aaaaacaatggttagactgc

SEQ ID NO: 51659 - DNA, 20 bp, Artificial Sequence
  Synthetic oligonucleotide; AAG chr11 5201856 5201875 5201859 -
aacaatggttagactgctag

SEQ ID NO: 51660 - DNA, 20 bp, Artificial Sequence
  Synthetic oligonucleotide; CAG chr11 5201849 5201868 5201852 -
gttagactgctagaagacgt

SEQ ID NO: 51661 - DNA, 20 bp, Artificial Sequence
  Synthetic oligonucleotide; TAG chr11 5201844 5201863 5201847 -
actgctagaagacgtcagtg

SEQ ID NO: 51662 - DNA, 20 bp, Artificial Sequence
  Synthetic oligonucleotide; TAG chr11 5201839 5201858 5201842 -
tagaagacgtcagtgtagta

SEQ ID NO: 51663 - DNA, 20 bp, Artificial Sequence
  Synthetic oligonucleotide; GAG chr11 5201837 5201856 5201840 -
gaagacgtcagtgtagtata

SEQ ID NO: 51664 - DNA, 20 bp, Artificial Sequence
  Synthetic oligonucleotide; GAG chr11 5201835 5201854 5201838 -
agacgtcagtgtagtataga

SEQ ID NO: 51665 - DNA, 20 bp, Artificial Sequence
  Synthetic oligonucleotide; GAG chr11 5201826 5201845 5201829 -
tgtagtatagagagtacatt

SEQ ID NO: 51666 - DNA, 20 bp, Artificial Sequence
  Synthetic oligonucleotide; AAG chr11 5201823 5201842 5201826 -
agtatagagagtacattgag

SEQ ID NO: 51667 - DNA, 20 bp, Artificial Sequence
  Synthetic oligonucleotide; AAG chr11 5201819 5201838 5201822 -
tagagagtacattgagaaga

SEQ ID NO: 51668 - DNA, 20 bp, Artificial Sequence
  Synthetic oligonucleotide; TGG chr11 5201812 5201831 5201815 -
tacattgagaagaaagtctg

SEQ ID NO: 51669 - DNA, 20 bp, Artificial Sequence
  Synthetic oligonucleotide; GAG chr11 5201798 5201817 5201801 -
agtctgtggaactgtgttgt

SEQ ID NO: 51670 - DNA, 20 bp, Artificial Sequence
  Synthetic oligonucleotide; AGG chr11 5201797 5201816 5201800 -
gtctgtggaactgtgttgtg

SEQ ID NO: 51671 - DNA, 20 bp, Artificial Sequence
  Synthetic oligonucleotide; AAG chr11 5201789 5201808 5201792 -
aactgtgttgtgaggctaat

SEQ ID NO: 51672 - DNA, 20 bp, Artificial Sequence
  Synthetic oligonucleotide; AAG chr11 5201783 5201802 5201786 -
gttgtgaggctaataagaca

SEQ ID NO: 51673 - DNA, 20 bp, Artificial Sequence
  Synthetic oligonucleotide; AAG chr11 5201775 5201794 5201778 -
gctaataagacaaagctgaa

SEQ ID NO: 51674 - DNA, 20 bp, Artificial Sequence
  Synthetic oligonucleotide; TAG chr11 5201772 5201791 5201775 -
aataagacaaagctgaaaag

SEQ ID NO: 51675 - DNA, 20 bp, Artificial Sequence
  Synthetic oligonucleotide; AGG chr11 5201771 5201790 5201774 -
ataagacaaagctgaaaagt

SEQ ID NO: 51676 - DNA, 20 bp, Artificial Sequence
  Synthetic oligonucleotide; AAG chr11 5201763 5201782 5201766 -
aagctgaaaagtaggacata

SEQ ID NO: 51677 - DNA, 20 bp, Artificial Sequence
  Synthetic oligonucleotide; AGG chr11 5201762 5201781 5201765 -
agctgaaaagtaggacataa

SEQ ID NO: 51678 - DNA, 20 bp, Artificial Sequence
  Synthetic oligonucleotide; GGG chr11 5201761 5201780 5201764 -
gctgaaaagtaggacataaa

SEQ ID NO: 51679 - DNA, 20 bp, Artificial Sequence
  Synthetic oligonucleotide; CAG chr11 5201758 5201777 5201761 -
gaaaagtaggacataaaggg

SEQ ID NO: 51680 - DNA, 20 bp, Artificial Sequence
  Synthetic oligonucleotide; AAG chr11 5201745 5201764 5201748 -
taaagggcagcccaaatctg

SEQ ID NO: 51681 - DNA, 20 bp, Artificial Sequence
  Synthetic oligonucleotide; AAG chr11 5201726 5201745 5201729 -
gaagttactttaacatctcg

SEQ ID NO: 51682 - DNA, 20 bp, Artificial Sequence
  Synthetic oligonucleotide; AAG chr11 5201705 5201724 5201708 -
agttactcaatcaaacatga

SEQ ID NO: 51683 - DNA, 20 bp, Artificial Sequence
  Synthetic oligonucleotide; TGG chr11 5201700 5201719 5201703 -
ctcaatcaaacatgaaagta

SEQ ID NO: 51684 - DNA, 20 bp, Artificial Sequence
  Synthetic oligonucleotide; TAG chr11 5201672 5201691 5201675 -
tgaacatctgtttacattat

SEQ ID NO: 51685 - DNA, 20 bp, Artificial Sequence
  Synthetic oligonucleotide; GAG chr11 5201670 5201689 5201673 -
aacatctgtttacattatta

SEQ ID NO: 51686 - DNA, 20 bp, Artificial Sequence
  Synthetic oligonucleotide; CAG chr11 5201642 5201661 5201645 -
aaaaaacttatgatgattct

SEQ ID NO: 51687 - DNA, 20 bp, Artificial Sequence
  Synthetic oligonucleotide; AGG chr11 5201641 5201660 5201644 -
aaaaacttatgatgattctc

SEQ ID NO: 51688 - DNA, 20 bp, Artificial Sequence
  Synthetic oligonucleotide; TGG chr11 5201636 5201655 5201639 -
cttatgatgattctcaggtc

SEQ ID NO: 51689 - DNA, 20 bp, Artificial Sequence
  Synthetic oligonucleotide; AAG chr11 5201627 5201646 5201630 -
attctcaggtctggaactta

SEQ ID NO: 51690 - DNA, 20 bp, Artificial Sequence
  Synthetic oligonucleotide; CAG chr11 5201624 5201643 5201627 -
ctcaggtctggaacttaaag

SEQ ID NO: 51691 - DNA, 20 bp, Artificial Sequence
  Synthetic oligonucleotide; AGG chr11 5201623 5201642 5201626 -
tcaggtctggaacttaaagc

SEQ ID NO: 51692 - DNA, 20 bp, Artificial Sequence
  Synthetic oligonucleotide; AAG chr11 5201609 5201628 5201612 -
taaagcaggcaaacaatgta

SEQ ID NO: 51693 - DNA, 20 bp, Artificial Sequence
  Synthetic oligonucleotide; AAG chr11 5201606 5201625 5201609 -
agcaggcaaacaatgtaaag

SEQ ID NO: 51694 - DNA, 20 bp, Artificial Sequence
  Synthetic oligonucleotide; AAG chr11 5201603 5201622 5201606 -
aggcaaacaatgtaaagaag

SEQ ID NO: 51695 - DNA, 20 bp, Artificial Sequence
  Synthetic oligonucleotide; GAG chr11 5201580 5201599 5201583 -
ccaattgattctgctaccat

SEQ ID NO: 51696 - DNA, 20 bp, Artificial Sequence
  Synthetic oligonucleotide; AGG chr11 5201579 5201598 5201582 -
caattgattctgctaccatg

SEQ ID NO: 51697 - DNA, 20 bp, Artificial Sequence
  Synthetic oligonucleotide; AAG chr11 5201563 5201582 5201566 -
catgaggcttttgaaattat

SEQ ID NO: 51698 - DNA, 20 bp, Artificial Sequence
  Synthetic oligonucleotide; GAG chr11 5201549 5201568 5201552 -
aattataagcttgcttgttt

SEQ ID NO: 51699 - DNA, 20 bp, Artificial Sequence
  Synthetic oligonucleotide; TGG chr11 5201544 5201563 5201547 -
taagcttgcttgtttgagcc

SEQ ID NO: 51700 - DNA, 20 bp, Artificial Sequence
  Synthetic oligonucleotide; TAG chr11 5201529 5201548 5201532 -
gagcctggctttgtgatctg

SEQ ID NO: 51701 - DNA, 20 bp, Artificial Sequence
  Synthetic oligonucleotide; CAG chr11 5201521 5201540 5201524 -
ctttgtgatctgtagaactg

SEQ ID NO: 51702 - DNA, 20 bp, Artificial Sequence
  Synthetic oligonucleotide; AGG chr11 5201520 5201539 5201523 -
tttgtgatctgtagaactgc

SEQ ID NO: 51703 - DNA, 20 bp, Artificial Sequence
  Synthetic oligonucleotide; AAG chr11 5201513 5201532 5201516 -
tctgtagaactgcaggttct

SEQ ID NO: 51704 - DNA, 20 bp, Artificial Sequence
  Synthetic oligonucleotide; AAG chr11 5201509 5201528 5201512 -
tagaactgcaggttctaaga

SEQ ID NO: 51705 - DNA, 20 bp, Artificial Sequence
  Synthetic oligonucleotide; TGG chr11 5201496 5201515 5201499 -
tctaagaaagaaaacacaat

SEQ ID NO: 51706 - DNA, 20 bp, Artificial Sequence
  Synthetic oligonucleotide; TAG chr11 5201461 5201480 5201464 -
ataaatgtatattgaataaa

SEQ ID NO: 51707 - DNA, 20 bp, Artificial Sequence
  Synthetic oligonucleotide; CAG chr11 5201453 5201472 5201456 -
atattgaataaatagttaat

SEQ ID NO: 51708 - DNA, 20 bp, Artificial Sequence
  Synthetic oligonucleotide; AAG chr11 5201431 5201450 5201434 -
gctcattaactgaataaata

SEQ ID NO: 51709 - DNA, 20 bp, Artificial Sequence
  Synthetic oligonucleotide; AGG chr11 5201430 5201449 5201433 -
ctcattaactgaataaataa

SEQ ID NO: 51710 - DNA, 20 bp, Artificial Sequence
  Synthetic oligonucleotide; TGG chr11 5201425 5201444 5201428 -
taactgaataaataaaggaa

SEQ ID NO: 51711 - DNA, 20 bp, Artificial Sequence
  Synthetic oligonucleotide; GGG chr11 5201424 5201443 5201427 -
aactgaataaataaaggaat

SEQ ID NO: 51712 - DNA, 20 bp, Artificial Sequence
  Synthetic oligonucleotide; AAG chr11 5201421 5201440 5201424 -
tgaataaataaaggaatggg

SEQ ID NO: 51713 - DNA, 20 bp, Artificial Sequence
  Synthetic oligonucleotide; GAG chr11 5201414 5201433 5201417 -
ataaaggaatgggaagcact

SEQ ID NO: 51714 - DNA, 20 bp, Artificial Sequence
  Synthetic oligonucleotide; AAG chr11 5201402 5201421 5201405 -
gaagcactgagctgctatca

SEQ ID NO: 51715 - DNA, 20 bp, Artificial Sequence
  Synthetic oligonucleotide; AGG chr11 5201401 5201420 5201404 -
aagcactgagctgctatcaa

SEQ ID NO: 51716 - DNA, 20 bp, Artificial Sequence
  Synthetic oligonucleotide; CAG chr11 5201396 5201415 5201399 -
ctgagctgctatcaaaggct

SEQ ID NO: 51717 - DNA, 20 bp, Artificial Sequence
  Synthetic oligonucleotide; AAG chr11 5201365 5201384 5201368 -
atctaattctctacatcaca

SEQ ID NO: 51718 - DNA, 20 bp, Artificial Sequence
  Synthetic oligonucleotide; AGG chr11 5201364 5201383 5201367 -
tctaattctctacatcacaa

SEQ ID NO: 51719 - DNA, 20 bp, Artificial Sequence
  Synthetic oligonucleotide; GAG chr11 5201354 5201373 5201357 -
tacatcacaaaggcacaaat

SEQ ID NO: 51720 - DNA, 20 bp, Artificial Sequence
  Synthetic oligonucleotide; AAG chr11 5201340 5201359 5201343 -
acaaatgagttgaacatctc

SEQ ID NO: 51721 - DNA, 20 bp, Artificial Sequence
  Synthetic oligonucleotide; GAG chr11 5201338 5201357 5201341 -
aaatgagttgaacatctcaa

SEQ ID NO: 51722 - DNA, 20 bp, Artificial Sequence
  Synthetic oligonucleotide; AGG chr11 5201337 5201356 5201340 -
aatgagttgaacatctcaag

SEQ ID NO: 51723 - DNA, 20 bp, Artificial Sequence
  Synthetic oligonucleotide; CAG chr11 5201333 5201352 5201336 -
agttgaacatctcaagaggc

SEQ ID NO: 51724 - DNA, 20 bp, Artificial Sequence
  Synthetic oligonucleotide; GAG chr11 5201331 5201350 5201334 -
ttgaacatctcaagaggcca

SEQ ID NO: 51725 - DNA, 20 bp, Artificial Sequence
  Synthetic oligonucleotide; CAG chr11 5201325 5201344 5201328 -
atctcaagaggccagagctc

SEQ ID NO: 51726 - DNA, 20 bp, Artificial Sequence
  Synthetic oligonucleotide; GAG chr11 5201321 5201340 5201324 -
caagaggccagagctccagt

SEQ ID NO: 51727 - DNA, 20 bp, Artificial Sequence
  Synthetic oligonucleotide; AAG chr11 5201305 5201324 5201308 -
cagtgagaaatcatttaccc

SEQ ID NO: 51728 - DNA, 20 bp, Artificial Sequence
  Synthetic oligonucleotide; AGG chr11 5201304 5201323 5201307 -
agtgagaaatcatttaccca

SEQ ID NO: 51729 - DNA, 20 bp, Artificial Sequence
  Synthetic oligonucleotide; AAG chr11 5201263 5201282 5201266 -
ctgtctgcttatcaccaatg

SEQ ID NO: 51730 - DNA, 20 bp, Artificial Sequence
  Synthetic oligonucleotide; AAG chr11 5201257 5201276 5201260 -
gcttatcaccaatgaagaaa

SEQ ID NO: 51731 - DNA, 20 bp, Artificial Sequence
  Synthetic oligonucleotide; TGG chr11 5201247 5201266 5201250 -
aatgaagaaaaagtaattgc

SEQ ID NO: 51732 - DNA, 20 bp, Artificial Sequence
  Synthetic oligonucleotide; TGG chr11 5201234 5201253 5201237 -
taattgctggctacgtcatc

SEQ ID NO: 51733 - DNA, 20 bp, Artificial Sequence
  Synthetic oligonucleotide; GAG chr11 5201232 5201251 5201235 -
attgctggctacgtcatctg

SEQ ID NO: 51734 - DNA, 20 bp, Artificial Sequence
  Synthetic oligonucleotide; AGG chr11 5201231 5201250 5201234 -
ttgctggctacgtcatctgg

SEQ ID NO: 51735 - DNA, 20 bp, Artificial Sequence
  Synthetic oligonucleotide; GGG chr11 5201230 5201249 5201233 -
tgctggctacgtcatctgga

SEQ ID NO: 51736 - DNA, 20 bp, Artificial Sequence
  Synthetic oligonucleotide; GGG chr11 5201229 5201248 5201232 -
gctggctacgtcatctggag

SEQ ID NO: 51737 - DNA, 20 bp, Artificial Sequence
  Synthetic oligonucleotide; GGG chr11 5201228 5201247 5201231 -
ctggctacgtcatctggagg

SEQ ID NO: 51738 - DNA, 20 bp, Artificial Sequence
  Synthetic oligonucleotide; GAG chr11 5201226 5201245 5201229 -
ggctacgtcatctggagggg

SEQ ID NO: 51739 - DNA, 20 bp, Artificial Sequence
  Synthetic oligonucleotide; CAG chr11 5201219 5201238 5201222 -
tcatctggagggggagaaaa

SEQ ID NO: 51740 - DNA, 20 bp, Artificial Sequence
  Synthetic oligonucleotide; AGG chr11 5201218 5201237 5201221 -
catctggagggggagaaaac

SEQ ID NO: 51741 - DNA, 20 bp, Artificial Sequence
  Synthetic oligonucleotide; GAG chr11 5201216 5201235 5201219 -
tctggagggggagaaaacag

SEQ ID NO: 51742 - DNA, 20 bp, Artificial Sequence
  Synthetic oligonucleotide; TAG chr11 5201200 5201219 5201203 -
acaggagtatcttcattaaa

SEQ ID NO: 51743 - DNA, 20 bp, Artificial Sequence
  Synthetic oligonucleotide; TGG chr11 5201193 5201212 5201196 -
tatcttcattaaatagtatt

SEQ ID NO: 51744 - DNA, 20 bp, Artificial Sequence
  Synthetic oligonucleotide; GAG chr11 5201191 5201210 5201194 -
tcttcattaaatagtatttg

SEQ ID NO: 51745 - DNA, 20 bp, Artificial Sequence
  Synthetic oligonucleotide; TGG chr11 5201176 5201195 5201179 -
atttggagaaaaaatatact

SEQ ID NO: 51746 - DNA, 20 bp, Artificial Sequence
  Synthetic oligonucleotide; GAG chr11 5201174 5201193 5201177 -
ttggagaaaaaatatacttg

SEQ ID NO: 51747 - DNA, 20 bp, Artificial Sequence
  Synthetic oligonucleotide; CGG chr11 5201170 5201189 5201173 -
agaaaaaatatacttggaga

SEQ ID NO: 51748 - DNA, 20 bp, Artificial Sequence
  Synthetic oligonucleotide; TGG chr11 5201160 5201179 5201163 -
tacttggagacggcacaaaa

SEQ ID NO: 51749 - DNA, 20 bp, Artificial Sequence
  Synthetic oligonucleotide; CGG chr11 5201150 5201169 5201153 -
cggcacaaaatggaaaatga

SEQ ID NO: 51750 - DNA, 20 bp, Artificial Sequence
  Synthetic oligonucleotide; AAG chr11 5201145 5201164 5201148 -
caaaatggaaaatgacggaa

SEQ ID NO: 51751 - DNA, 20 bp, Artificial Sequence
  Synthetic oligonucleotide; TAG chr11 5201131 5201150 5201134 -
acggaaaagtgactatttaa

SEQ ID NO: 51752 - DNA, 20 bp, Artificial Sequence
  Synthetic oligonucleotide; AAG chr11 5201114 5201133 5201117 -
taatagacttatgatattta

SEQ ID NO: 51753 - DNA, 20 bp, Artificial Sequence
  Synthetic oligonucleotide; AAG chr11 5201107 5201126 5201110 -
cttatgatatttaaagccca

SEQ ID NO: 51754 - DNA, 20 bp, Artificial Sequence
  Synthetic oligonucleotide; TGG chr11 5201074 5201093 5201077 -
acttcgaatgtttaatgaat

SEQ ID NO: 51755 - DNA, 20 bp, Artificial Sequence
  Synthetic oligonucleotide; GAG chr11 5201072 5201091 5201075 -
ttcgaatgtttaatgaattg

SEQ ID NO: 51756 - DNA, 20 bp, Artificial Sequence
  Synthetic oligonucleotide; GAG chr11 5201070 5201089 5201073 -
cgaatgtttaatgaattgga

SEQ ID NO: 51757 - DNA, 20 bp, Artificial Sequence
  Synthetic oligonucleotide; AAG chr11 5201067 5201086 5201070 -
atgtttaatgaattggagag

SEQ ID NO: 51758 - DNA, 20 bp, Artificial Sequence
  Synthetic oligonucleotide; AAG chr11 5201051 5201070 5201054 -
agagaagaaaataatttttc

SEQ ID NO: 51759 - DNA, 20 bp, Artificial Sequence
  Synthetic oligonucleotide; CGG chr11 5201043 5201062 5201046 -
aaataatttttcaagaacct

SEQ ID NO: 51760 - DNA, 20 bp, Artificial Sequence
  Synthetic oligonucleotide; TGG chr11 5201032 5201051 5201035 -
caagaacctcggctctttac

SEQ ID NO: 51761 - DNA, 20 bp, Artificial Sequence
  Synthetic oligonucleotide; TGG chr11 5201006 5201025 5201009 -
aaaatttttaccactatcct

SEQ ID NO: 51762 - DNA, 20 bp, Artificial Sequence
  Synthetic oligonucleotide; GGG chr11 5201005 5201024 5201008 -
aaatttttaccactatcctt

SEQ ID NO: 51763 - DNA, 20 bp, Artificial Sequence
  Synthetic oligonucleotide; AAG chr11 5200993 5201012 5200996 -
ctatccttgggaaaatgtct

SEQ ID NO: 51764 - DNA, 20 bp, Artificial Sequence
  Synthetic oligonucleotide; TAG chr11 5200971 5200990 5200974 -
gcaacgtatttttttaaaac

SEQ ID NO: 51765 - DNA, 20 bp, Artificial Sequence
  Synthetic oligonucleotide; TGG chr11 5200926 5200945 5200929 -
tccttatttgtttttgctta

SEQ ID NO: 51766 - DNA, 20 bp, Artificial Sequence
  Synthetic oligonucleotide; AAG chr11 5200918 5200937 5200921 -
tgtttttgcttatggcttct

SEQ ID NO: 51767 - DNA, 20 bp, Artificial Sequence
  Synthetic oligonucleotide; AGG chr11 5200917 5200936 5200920 -
gtttttgcttatggcttcta

SEQ ID NO: 51768 - DNA, 20 bp, Artificial Sequence
  Synthetic oligonucleotide; CAG chr11 5200901 5200920 5200904 -
tctaaggatatgttcacatc

SEQ ID NO: 51769 - DNA, 20 bp, Artificial Sequence
  Synthetic oligonucleotide; CAG chr11 5200897 5200916 5200900 -
aggatatgttcacatccaga

SEQ ID NO: 51770 - DNA, 20 bp, Artificial Sequence
  Synthetic oligonucleotide; AAG chr11 5200863 5200882 5200866 -
tgacttttaaatgacatcaa

SEQ ID NO: 51771 - DNA, 20 bp, Artificial Sequence
  Synthetic oligonucleotide; AAG chr11 5200860 5200879 5200863 -
cttttaaatgacatcaaaag

SEQ ID NO: 51772 - DNA, 20 bp, Artificial Sequence
  Synthetic oligonucleotide; AAG chr11 5200845 5200864 5200848 -
aaaagaagaccattttctca

SEQ ID NO: 51773 - DNA, 20 bp, Artificial Sequence
  Synthetic oligonucleotide; AGG chr11 5200844 5200863 5200847 -
aaagaagaccattttctcaa

SEQ ID NO: 51774 - DNA, 20 bp, Artificial Sequence
  Synthetic oligonucleotide; TGG chr11 5200838 5200857 5200841 -
gaccattttctcaaaggcaa

SEQ ID NO: 51775 - DNA, 20 bp, Artificial Sequence
  Synthetic oligonucleotide; AAG chr11 5200822 5200841 5200825 -
gcaatggatactatgtctca

SEQ ID NO: 51776 - DNA, 20 bp, Artificial Sequence
  Synthetic oligonucleotide; CAG chr11 5200816 5200835 5200819 -
gatactatgtctcaaagaaa

SEQ ID NO: 51777 - DNA, 20 bp, Artificial Sequence
  Synthetic oligonucleotide; CAG chr11 5200806 5200825 5200809 -
ctcaaagaaacagaatttct

SEQ ID NO: 51778 - DNA, 20 bp, Artificial Sequence
  Synthetic oligonucleotide; AAG chr11 5200792 5200811 5200795 -
atttctcagctgtttttttt

SEQ ID NO: 51779 - DNA, 20 bp, Artificial Sequence
  Synthetic oligonucleotide; CAG chr11 5200788 5200807 5200791 -
ctcagctgttttttttaagt

SEQ ID NO: 51780 - DNA, 20 bp, Artificial Sequence
  Synthetic oligonucleotide; AAG chr11 5200784 5200803 5200787 -
gctgttttttttaagtcagt

SEQ ID NO: 51781 - DNA, 20 bp, Artificial Sequence
  Synthetic oligonucleotide; TAG chr11 5200778 5200797 5200781 -
ttttttaagtcagtaagttt

SEQ ID NO: 51782 - DNA, 20 bp, Artificial Sequence
  Synthetic oligonucleotide; AGG chr11 5200777 5200796 5200780 -
tttttaagtcagtaagtttt

SEQ ID NO: 51783 - DNA, 20 bp, Artificial Sequence
  Synthetic oligonucleotide; GGG chr11 5200776 5200795 5200779 -
ttttaagtcagtaagtttta

SEQ ID NO: 51784 - DNA, 20 bp, Artificial Sequence
  Synthetic oligonucleotide; TAG chr11 5200760 5200779 5200763 -
tttagggtatttcatttact

SEQ ID NO: 51785 - DNA, 20 bp, Artificial Sequence
  Synthetic oligonucleotide; CAG chr11 5200742 5200761 5200745 -
cttagaaatttcattgtatt

SEQ ID NO: 51786 - DNA, 20 bp, Artificial Sequence
  Synthetic oligonucleotide; AGG chr11 5200741 5200760 5200744 -
ttagaaatttcattgtattc

SEQ ID NO: 51787 - DNA, 20 bp, Artificial Sequence
  Synthetic oligonucleotide; CAG chr11 5200693 5200712 5200696 -
aaatactctcacatgtttct

SEQ ID NO: 51788 - DNA, 20 bp, Artificial Sequence
  Synthetic oligonucleotide; CAG chr11 5200687 5200706 5200690 -
tctcacatgtttctcagttc

SEQ ID NO: 51789 - DNA, 20 bp, Artificial Sequence
  Synthetic oligonucleotide; CAG chr11 5200673 5200692 5200676 -
cagttccagaatgattactt

SEQ ID NO: 51790 - DNA, 20 bp, Artificial Sequence
  Synthetic oligonucleotide; AAG chr11 5200669 5200688 5200672 -
tccagaatgattacttcagt

SEQ ID NO: 51791 - DNA, 20 bp, Artificial Sequence
  Synthetic oligonucleotide; TAG chr11 5200663 5200682 5200666 -
atgattacttcagtaagccc

SEQ ID NO: 51792 - DNA, 20 bp, Artificial Sequence
  Synthetic oligonucleotide; CAG chr11 5200657 5200676 5200660 -
acttcagtaagccctagcac

SEQ ID NO: 51793 - DNA, 20 bp, Artificial Sequence
  Synthetic oligonucleotide; TGG chr11 5200630 5200649 5200633 -
aattcttcctttcttctcac

SEQ ID NO: 51794 - DNA, 20 bp, Artificial Sequence
  Synthetic oligonucleotide; TGG chr11 5200621 5200640 5200624 -
tttcttctcactggattttc

SEQ ID NO: 51795 - DNA, 20 bp, Artificial Sequence
  Synthetic oligonucleotide; TGG chr11 5200616 5200635 5200619 -
tctcactggattttctggca

SEQ ID NO: 51796 - DNA, 20 bp, Artificial Sequence
  Synthetic oligonucleotide; GAG chr11 5200614 5200633 5200617 -
tcactggattttctggcatg

SEQ ID NO: 51797 - DNA, 20 bp, Artificial Sequence
  Synthetic oligonucleotide; CAG chr11 5200611 5200630 5200614 -
ctggattttctggcatggag

SEQ ID NO: 51798 - DNA, 20 bp, Artificial Sequence
  Synthetic oligonucleotide; TGG chr11 5200599 5200618 5200602 -
gcatggagcagcaatacccc

SEQ ID NO: 51799 - DNA, 20 bp, Artificial Sequence
  Synthetic oligonucleotide; TGG chr11 5200565 5200584 5200568 -
cttctcctcaatctatgcca

SEQ ID NO: 51800 - DNA, 20 bp, Artificial Sequence
  Synthetic oligonucleotide; TGG chr11 5200556 5200575 5200559 -
aatctatgccatggtgcttt

SEQ ID NO: 51801 - DNA, 20 bp, Artificial Sequence
  Synthetic oligonucleotide; GGG chr11 5200555 5200574 5200558 -
atctatgccatggtgctttt

SEQ ID NO: 51802 - DNA, 20 bp, Artificial Sequence
  Synthetic oligonucleotide; TGG chr11 5200544 5200563 5200547 -
ggtgcttttgggcaattgca

SEQ ID NO: 51803 - DNA, 20 bp, Artificial Sequence
  Synthetic oligonucleotide; TGG chr11 5200527 5200546 5200530 -
gcatggttctccatgtgata

SEQ ID NO: 51804 - DNA, 20 bp, Artificial Sequence
  Synthetic oligonucleotide; GAG chr11 5200521 5200540 5200524 -
ttctccatgtgatatggact

SEQ ID NO: 51805 - DNA, 20 bp, Artificial Sequence
  Synthetic oligonucleotide; AAG chr11 5200516 5200535 5200519 -
catgtgatatggactgagcc

SEQ ID NO: 51806 - DNA, 20 bp, Artificial Sequence
  Synthetic oligonucleotide; CAG chr11 5200506 5200525 5200509 -
ggactgagccaagcctgcac

SEQ ID NO: 51807 - DNA, 20 bp, Artificial Sequence
  Synthetic oligonucleotide; TGG chr11 5200478 5200497 5200481 -
gttttacttcctgtccatgc

SEQ ID NO: 51808 - DNA, 20 bp, Artificial Sequence
  Synthetic oligonucleotide; TGG chr11 5200457 5200476 5200460 -
ggccctcactgacctgtgca

SEQ ID NO: 51809 - DNA, 20 bp, Artificial Sequence
  Synthetic oligonucleotide; GGG chr11 5200456 5200475 5200459 -
gccctcactgacctgtgcat

SEQ ID NO: 51810 - DNA, 20 bp, Artificial Sequence
  Synthetic oligonucleotide; GGG chr11 5200455 5200474 5200458 -
ccctcactgacctgtgcatg

SEQ ID NO: 51811 - DNA, 20 bp, Artificial Sequence
  Synthetic oligonucleotide; CAG chr11 5200436 5200455 5200439 -
ggggctgtccactgtgtaca

SEQ ID NO: 51812 - DNA, 20 bp, Artificial Sequence
  Synthetic oligonucleotide; TGG chr11 5200430 5200449 5200433 -
gtccactgtgtacacagtgc

SEQ ID NO: 51813 - DNA, 20 bp, Artificial Sequence
  Synthetic oligonucleotide; GGG chr11 5200429 5200448 5200432 -
tccactgtgtacacagtgct

SEQ ID NO: 51814 - DNA, 20 bp, Artificial Sequence
  Synthetic oligonucleotide; GGG chr11 5200428 5200447 5200431 -
ccactgtgtacacagtgctg

SEQ ID NO: 51815 - DNA, 20 bp, Artificial Sequence
  Synthetic oligonucleotide; TGG chr11 5200419 5200438 5200422 -
acacagtgctggggatcctg

SEQ ID NO: 51816 - DNA, 20 bp, Artificial Sequence
  Synthetic oligonucleotide; GGG chr11 5200418 5200437 5200421 -
cacagtgctggggatcctgt

SEQ ID NO: 51817 - DNA, 20 bp, Artificial Sequence
  Synthetic oligonucleotide; GGG chr11 5200417 5200436 5200420 -
acagtgctggggatcctgtg

SEQ ID NO: 51818 - DNA, 20 bp, Artificial Sequence
  Synthetic oligonucleotide; GGG chr11 5200416 5200435 5200419 -
cagtgctggggatcctgtgg

SEQ ID NO: 51819 - DNA, 20 bp, Artificial Sequence
  Synthetic oligonucleotide; GAG chr11 5200406 5200425 5200409 -
gatcctgtgggggatcattc

SEQ ID NO: 51820 - DNA, 20 bp, Artificial Sequence
  Synthetic oligonucleotide; GAG chr11 5200404 5200423 5200407 -
tcctgtgggggatcattcga

SEQ ID NO: 51821 - DNA, 20 bp, Artificial Sequence
  Synthetic oligonucleotide; CAG chr11 5200399 5200418 5200402 -
tgggggatcattcgagagat

SEQ ID NO: 51822 - DNA, 20 bp, Artificial Sequence
  Synthetic oligonucleotide; TGG chr11 5200394 5200413 5200397 -
gatcattcgagagatcagct

SEQ ID NO: 51823 - DNA, 20 bp, Artificial Sequence
  Synthetic oligonucleotide; CAG chr11 5200377 5200396 5200380 -
gcttggattcctgcattgcc

SEQ ID NO: 51824 - DNA, 20 bp, Artificial Sequence
  Synthetic oligonucleotide; TGG chr11 5200360 5200379 5200363 -
gcccagtcctatttcatcca

SEQ ID NO: 51825 - DNA, 20 bp, Artificial Sequence
  Synthetic oligonucleotide; TGG chr11 5200346 5200365 5200349 -
catccatggtctgtccttca

SEQ ID NO: 51826 - DNA, 20 bp, Artificial Sequence
  Synthetic oligonucleotide; GAG chr11 5200344 5200363 5200347 -
tccatggtctgtccttcatg

SEQ ID NO: 51827 - DNA, 20 bp, Artificial Sequence
  Synthetic oligonucleotide; TGG chr11 5200322 5200341 5200325 -
gtcctctgtcctcctcacta

SEQ ID NO: 51828 - DNA, 20 bp, Artificial Sequence
  Synthetic oligonucleotide; CGG chr11 5200311 5200330 5200314 -
tcctcactatggcctttgac

SEQ ID NO: 51829 - DNA, 20 bp, Artificial Sequence
  Synthetic oligonucleotide; CAG chr11 5200258 5200277 5200261 -
tcctccatcctgactaattc

SEQ ID NO: 51830 - DNA, 20 bp, Artificial Sequence
  Synthetic oligonucleotide; TGG chr11 5200243 5200262 5200246 -
aattccagaattatcaaaat

SEQ ID NO: 51831 - DNA, 20 bp, Artificial Sequence
  Synthetic oligonucleotide; GGG chr11 5200242 5200261 5200245 -
attccagaattatcaaaatt

SEQ ID NO: 51832 - DNA, 20 bp, Artificial Sequence
  Synthetic oligonucleotide; TAG chr11 5200229 5200248 5200232 -
caaaattgggctcactataa

SEQ ID NO: 51833 - DNA, 20 bp, Artificial Sequence
  Synthetic oligonucleotide; AGG chr11 5200228 5200247 5200231 -
aaaattgggctcactataat

SEQ ID NO: 51834 - DNA, 20 bp, Artificial Sequence
  Synthetic oligonucleotide; TAG chr11 5200225 5200244 5200228 -
attgggctcactataatagg

SEQ ID NO: 51835 - DNA, 20 bp, Artificial Sequence
  Synthetic oligonucleotide; AGG chr11 5200224 5200243 5200227 -
ttgggctcactataataggt

SEQ ID NO: 51836 - DNA, 20 bp, Artificial Sequence
  Synthetic oligonucleotide; GAG chr11 5200222 5200241 5200225 -
gggctcactataataggtag

SEQ ID NO: 51837 - DNA, 20 bp, Artificial Sequence
  Synthetic oligonucleotide; CAG chr11 5200131 5200150 5200134 -
ctcactctttctgcctgcac

SEQ ID NO: 51838 - DNA, 20 bp, Artificial Sequence
  Synthetic oligonucleotide; AGG chr11 5200130 5200149 5200133 -
tcactctttctgcctgcacc

SEQ ID NO: 51839 - DNA, 20 bp, Artificial Sequence
  Synthetic oligonucleotide; TAG chr11 5200115 5200134 5200118 -
gcaccaggatcttctccgct

SEQ ID NO: 51840 - DNA, 20 bp, Artificial Sequence
  Synthetic oligonucleotide; CAG chr11 5200106 5200125 5200109 -
tcttctccgcttagcctgtt

SEQ ID NO: 51841 - DNA, 20 bp, Artificial Sequence
  Synthetic oligonucleotide; TAG chr11 5200090 5200109 5200093 -
tgttcagacatccgattcaa

SEQ ID NO: 51842 - DNA, 20 bp, Artificial Sequence
  Synthetic oligonucleotide; TGG chr11 5200070 5200089 5200073 -
tagttactatgccctgatgc

SEQ ID NO: 51843 - DNA, 20 bp, Artificial Sequence
  Synthetic oligonucleotide; TGG chr11 5200049 5200068 5200052 -
ggttatttgcatactgttgt

SEQ ID NO: 51844 - DNA, 20 bp, Artificial Sequence
  Synthetic oligonucleotide; AAG chr11 5200008 5200027 5200011 -
tctcctacatcctgattctt

SEQ ID NO: 51845 - DNA, 20 bp, Artificial Sequence
  Synthetic oligonucleotide; CAG chr11 5200004 5200023 5200007 -
ctacatcctgattcttaagt

SEQ ID NO: 51846 - DNA, 20 bp, Artificial Sequence
  Synthetic oligonucleotide; TGG chr11 5199998 5200017 5200001 -
cctgattcttaagtcagtcc

SEQ ID NO: 51847 - DNA, 20 bp, Artificial Sequence
  Synthetic oligonucleotide; CAG chr11 5199995 5200014 5199998 -
gattcttaagtcagtcctgg

SEQ ID NO: 51848 - DNA, 20 bp, Artificial Sequence
  Synthetic oligonucleotide; CAG chr11 5199984 5200003 5199987 -
cagtcctggcagttgcctct

SEQ ID NO: 51849 - DNA, 20 bp, Artificial Sequence
  Synthetic oligonucleotide; AGG chr11 5199983 5200002 5199986 -
agtcctggcagttgcctctc

SEQ ID NO: 51850 - DNA, 20 bp, Artificial Sequence
  Synthetic oligonucleotide; AAG chr11 5199980 5199999 5199983 -
cctggcagttgcctctcagg

SEQ ID NO: 51851 - DNA, 20 bp, Artificial Sequence
  Synthetic oligonucleotide; GAG chr11 5199978 5199997 5199981 -
tggcagttgcctctcaggaa

SEQ ID NO: 51852 - DNA, 20 bp, Artificial Sequence
  Synthetic oligonucleotide; GAG chr11 5199976 5199995 5199979 -
gcagttgcctctcaggaaga

SEQ ID NO: 51853 - DNA, 20 bp, Artificial Sequence
  Synthetic oligonucleotide; AGG chr11 5199975 5199994 5199978 -
cagttgcctctcaggaagag

SEQ ID NO: 51854 - DNA, 20 bp, Artificial Sequence
  Synthetic oligonucleotide; CAG chr11 5199960 5199979 5199963 -
aagagaggcataaattattt

SEQ ID NO: 51855 - DNA, 20 bp, Artificial Sequence
  Synthetic oligonucleotide; TAG chr11 5199907 5199926 5199910 -
gtgttctacatccctatcat

SEQ ID NO: 51856 - DNA, 20 bp, Artificial Sequence
  Synthetic oligonucleotide; TGG chr11 5199896 5199915 5199899 -
ccctatcattagcctcacaa

SEQ ID NO: 51857 - DNA, 20 bp, Artificial Sequence
  Synthetic oligonucleotide; TGG chr11 5199883 5199902 5199886 -
ctcacaatggtgcaccgttt

SEQ ID NO: 51858 - DNA, 20 bp, Artificial Sequence
  Synthetic oligonucleotide; AAG chr11 5199879 5199898 5199882 -
caatggtgcaccgttttggc

SEQ ID NO: 51859 - DNA, 20 bp, Artificial Sequence
  Synthetic oligonucleotide; TGG chr11 5199863 5199882 5199866 -
tggcaagcacctttcccccg

SEQ ID NO: 51860 - DNA, 20 bp, Artificial Sequence
  Synthetic oligonucleotide; TGG chr11 5199847 5199866 5199850 -
cccgtggcccacgttctcat

SEQ ID NO: 51861 - DNA, 20 bp, Artificial Sequence
  Synthetic oligonucleotide; CAG chr11 5199799 5199818 5199802 -
ttaatgaatcccatcatcta

SEQ ID NO: 51862 - DNA, 20 bp, Artificial Sequence
  Synthetic oligonucleotide; AAG chr11 5199792 5199811 5199795 -
atcccatcatctacagtgtc

SEQ ID NO: 51863 - DNA, 20 bp, Artificial Sequence
  Synthetic oligonucleotide; CAG chr11 5199783 5199802 5199786 -
tctacagtgtcaagacccaa

SEQ ID NO: 51864 - DNA, 20 bp, Artificial Sequence
  Synthetic oligonucleotide; CAG chr11 5199772 5199791 5199775 -
aagacccaacagattcatac

SEQ ID NO: 51865 - DNA, 20 bp, Artificial Sequence
  Synthetic oligonucleotide; TAG chr11 5199763 5199782 5199766 -
cagattcataccagaatgct

SEQ ID NO: 51866 - DNA, 20 bp, Artificial Sequence
  Synthetic oligonucleotide; AAG chr11 5199745 5199764 5199748 -
cttagactcttttctctgaa

SEQ ID NO: 51867 - DNA, 20 bp, Artificial Sequence
  Synthetic oligonucleotide; GAG chr11 5199737 5199756 5199740 -
cttttctctgaaaagatatt

SEQ ID NO: 51868 - DNA, 20 bp, Artificial Sequence
  Synthetic oligonucleotide; GAG chr11 5199735 5199754 5199738 -
tttctctgaaaagatattga

SEQ ID NO: 51869 - DNA, 20 bp, Artificial Sequence
  Synthetic oligonucleotide; GAG chr11 5199727 5199746 5199730 -
aaaagatattgagagatatt

SEQ ID NO: 51870 - DNA, 20 bp, Artificial Sequence
  Synthetic oligonucleotide; AAG chr11 5199707 5199726 5199710 -
gagatgtattgcctaaaaaa

SEQ ID NO: 51871 - DNA, 20 bp, Artificial Sequence
  Synthetic oligonucleotide; AAG chr11 5199703 5199722 5199706 -
tgtattgcctaaaaaaaaga

SEQ ID NO: 51872 - DNA, 20 bp, Artificial Sequence
  Synthetic oligonucleotide; AAG chr11 5199698 5199717 5199701 -
tgcctaaaaaaaagaaagaa

SEQ ID NO: 51873 - DNA, 20 bp, Artificial Sequence
  Synthetic oligonucleotide; CAG chr11 5199695 5199714 5199698 -
ctaaaaaaaagaaagaaaag

SEQ ID NO: 51874 - DNA, 20 bp, Artificial Sequence
  Synthetic oligonucleotide; CAG chr11 5199672 5199691 5199675 -
caacaataataaacaaaaat

SEQ ID NO: 51875 - DNA, 20 bp, Artificial Sequence
  Synthetic oligonucleotide; AAG chr11 5199659 5199678 5199662 -
caaaaatcagtgccataaaa

SEQ ID NO: 51876 - DNA, 20 bp, Artificial Sequence
  Synthetic oligonucleotide; TAG chr11 5199638 5199657 5199641 -
agaaaaaattattaaaattg

SEQ ID NO: 51877 - DNA, 20 bp, Artificial Sequence
  Synthetic oligonucleotide; GAG chr11 5199626 5199645 5199629 -
taaaattgtagatttactct

SEQ ID NO: 51878 - DNA, 20 bp, Artificial Sequence
  Synthetic oligonucleotide; TAG chr11 5199589 5199608 5199592 -
ccttaaaaaatatttaaata

SEQ ID NO: 51879 - DNA, 20 bp, Artificial Sequence
  Synthetic oligonucleotide; CAG chr11 5199585 5199604 5199588 -
aaaaaatatttaaatatagt

SEQ ID NO: 51880 - DNA, 20 bp, Artificial Sequence
  Synthetic oligonucleotide; GAG chr11 5199583 5199602 5199586 -
aaaatatttaaatatagtca

SEQ ID NO: 51881 - DNA, 20 bp, Artificial Sequence
  Synthetic oligonucleotide; AAG chr11 5199569 5199588 5199572 -
tagtcagagaatcaacaaac

SEQ ID NO: 51882 - DNA, 20 bp, Artificial Sequence
  Synthetic oligonucleotide; CAG chr11 5199555 5199574 5199558 -
acaaacaagttccattgtgt

SEQ ID NO: 51883 - DNA, 20 bp, Artificial Sequence
  Synthetic oligonucleotide; TGG chr11 5199550 5199569 5199553 -
caagttccattgtgtcagcc

SEQ ID NO: 51884 - DNA, 20 bp, Artificial Sequence
  Synthetic oligonucleotide; TAG chr11 5199540 5199559 5199543 -
tgtgtcagcctggacacatg

SEQ ID NO: 51885 - DNA, 20 bp, Artificial Sequence
  Synthetic oligonucleotide; AGG chr11 5199539 5199558 5199542 -
gtgtcagcctggacacatgt

SEQ ID NO: 51886 - DNA, 20 bp, Artificial Sequence
  Synthetic oligonucleotide; CAG chr11 5199527 5199546 5199530 -
acacatgtaggtcactctat

SEQ ID NO: 51887 - DNA, 20 bp, Artificial Sequence
  Synthetic oligonucleotide; AAG chr11 5199511 5199530 5199514 -
ctatcagtctgaccatattt

SEQ ID NO: 51888 - DNA, 20 bp, Artificial Sequence
  Synthetic oligonucleotide; AAG chr11 5199507 5199526 5199510 -
cagtctgaccatatttaaga

SEQ ID NO: 51889 - DNA, 20 bp, Artificial Sequence
  Synthetic oligonucleotide; GAG chr11 5199505 5199524 5199508 -
gtctgaccatatttaagaaa

SEQ ID NO: 51890 - DNA, 20 bp, Artificial Sequence
  Synthetic oligonucleotide; AGG chr11 5199504 5199523 5199507 -
tctgaccatatttaagaaag

SEQ ID NO: 51891 - DNA, 20 bp, Artificial Sequence
  Synthetic oligonucleotide; GAG chr11 5199468 5199487 5199471 -
tttgcctgaaatgtactttt

SEQ ID NO: 51892 - DNA, 20 bp, Artificial Sequence
  Synthetic oligonucleotide; AAG chr11 5199444 5199463 5199447 -
atttcctttgctgtaaaaca

SEQ ID NO: 51893 - DNA, 20 bp, Artificial Sequence
  Synthetic oligonucleotide; TGG chr11 5199440 5199459 5199443 -
cctttgctgtaaaacaaagc

SEQ ID NO: 51894 - DNA, 20 bp, Artificial Sequence
  Synthetic oligonucleotide; TAG chr11 5199427 5199446 5199430 -
acaaagctggattaaaaacc

SEQ ID NO: 51895 - DNA, 20 bp, Artificial Sequence
  Synthetic oligonucleotide; AGG chr11 5199426 5199445 5199429 -
caaagctggattaaaaacct

SEQ ID NO: 51896 - DNA, 20 bp, Artificial Sequence
  Synthetic oligonucleotide; AAG chr11 5199418 5199437 5199421 -
gattaaaaacctaggttttc

SEQ ID NO: 51897 - DNA, 20 bp, Artificial Sequence
  Synthetic oligonucleotide; AAG chr11 5199410 5199429 5199413 -
acctaggttttcaagtttca

SEQ ID NO: 51898 - DNA, 20 bp, Artificial Sequence
  Synthetic oligonucleotide; TAG chr11 5199407 5199426 5199410 -
taggttttcaagtttcaaag

SEQ ID NO: 51899 - DNA, 20 bp, Artificial Sequence
  Synthetic oligonucleotide; AAG chr11 5199396 5199415 5199399 -
gtttcaaagtagaaaacttg

SEQ ID NO: 51900 - DNA, 20 bp, Artificial Sequence
  Synthetic oligonucleotide; GAG chr11 5199378 5199397 5199381 -
tgaagtttctttcattctct

SEQ ID NO: 51901 - DNA, 20 bp, Artificial Sequence
  Synthetic oligonucleotide; AGG chr11 5199377 5199396 5199380 -
gaagtttctttcattctctg

SEQ ID NO: 51902 - DNA, 20 bp, Artificial Sequence
  Synthetic oligonucleotide; TGG chr11 5199352 5199371 5199355 -
tacttaattaaccttcaaaa

SEQ ID NO: 51903 - DNA, 20 bp, Artificial Sequence
  Synthetic oligonucleotide; GAG chr11 5199350 5199369 5199353 -
cttaattaaccttcaaaatg

SEQ ID NO: 51904 - DNA, 20 bp, Artificial Sequence
  Synthetic oligonucleotide; TAG chr11 5199343 5199362 5199346 -
aaccttcaaaatggagacta

SEQ ID NO: 51905 - DNA, 20 bp, Artificial Sequence
  Synthetic oligonucleotide; CAG chr11 5199332 5199351 5199335 -
tggagactatagccaactca

SEQ ID NO: 51906 - DNA, 20 bp, Artificial Sequence
  Synthetic oligonucleotide; AGG chr11 5199331 5199350 5199334 -
ggagactatagccaactcac

SEQ ID NO: 51907 - DNA, 20 bp, Artificial Sequence
  Synthetic oligonucleotide; TGG chr11 5199310 5199329 5199313 -
ggaatgttgtgatatctgta

SEQ ID NO: 51908 - DNA, 20 bp, Artificial Sequence
  Synthetic oligonucleotide; CAG chr11 5199305 5199324 5199308 -
gttgtgatatctgtatggac

SEQ ID NO: 51909 - DNA, 20 bp, Artificial Sequence
  Synthetic oligonucleotide; AAG chr11 5199294 5199313 5199297 -
tgtatggaccagaattgtcc

SEQ ID NO: 51910 - DNA, 20 bp, Artificial Sequence
  Synthetic oligonucleotide; AGG chr11 5199293 5199312 5199296 -
gtatggaccagaattgtcca

SEQ ID NO: 51911 - DNA, 20 bp, Artificial Sequence
  Synthetic oligonucleotide; GGG chr11 5199292 5199311 5199295 -
tatggaccagaattgtccaa

SEQ ID NO: 51912 - DNA, 20 bp, Artificial Sequence
  Synthetic oligonucleotide; TGG chr11 5199273 5199292 5199276 -
agggaacttttctaaactga

SEQ ID NO: 51913 - DNA, 20 bp, Artificial Sequence
  Synthetic oligonucleotide; TGG chr11 5199245 5199264 5199248 -
ttctataaaataccataaaa

SEQ ID NO: 51914 - DNA, 20 bp, Artificial Sequence
  Synthetic oligonucleotide; AAG chr11 5199239 5199258 5199242 -
aaaataccataaaatggcta

SEQ ID NO: 51915 - DNA, 20 bp, Artificial Sequence
  Synthetic oligonucleotide; TGG chr11 5199236 5199255 5199239 -
ataccataaaatggctaaag

SEQ ID NO: 51916 - DNA, 20 bp, Artificial Sequence
  Synthetic oligonucleotide; TGG chr11 5199227 5199246 5199230 -
aatggctaaagtggaatata

SEQ ID NO: 51917 - DNA, 20 bp, Artificial Sequence
  Synthetic oligonucleotide; TGG chr11 5199204 5199223 5199207 -
ctcctgtgcgcttgaaatga

SEQ ID NO: 51918 - DNA, 20 bp, Artificial Sequence
  Synthetic oligonucleotide; TAG chr11 5199201 5199220 5199204 -
ctgtgcgcttgaaatgatgg

SEQ ID NO: 51919 - DNA, 20 bp, Artificial Sequence
  Synthetic oligonucleotide; CAG chr11 5199170 5199189 5199173 -
aacaactgcatttacaattt

SEQ ID NO: 51920 - DNA, 20 bp, Artificial Sequence
  Synthetic oligonucleotide; AAG chr11 5199160 5199179 5199163 -
tttacaatttcagttacttt

SEQ ID NO: 51921 - DNA, 20 bp, Artificial Sequence
  Synthetic oligonucleotide; TGG chr11 5199123 5199142 5199126 -
aatgtttaatgtccttgtat

SEQ ID NO: 51922 - DNA, 20 bp, Artificial Sequence
  Synthetic oligonucleotide; CAG chr11 5199119 5199138 5199122 -
tttaatgtccttgtattgga

SEQ ID NO: 51923 - DNA, 20 bp, Artificial Sequence
  Synthetic oligonucleotide; CAG chr11 5199114 5199133 5199117 -
tgtccttgtattggacagtt

SEQ ID NO: 51924 - DNA, 20 bp, Artificial Sequence
  Synthetic oligonucleotide; CAG chr11 5199109 5199128 5199112 -
ttgtattggacagttcagtt

SEQ ID NO: 51925 - DNA, 20 bp, Artificial Sequence
  Synthetic oligonucleotide; CAG chr11 5199106 5199125 5199109 -
tattggacagttcagttcag

SEQ ID NO: 51926 - DNA, 20 bp, Artificial Sequence
  Synthetic oligonucleotide; TGG chr11 5199094 5199113 5199097 -
cagttcagcagccactatat

SEQ ID NO: 51927 - DNA, 20 bp, Artificial Sequence
  Synthetic oligonucleotide; CAG chr11 5199090 5199109 5199093 -
tcagcagccactatattgga

SEQ ID NO: 51928 - DNA, 20 bp, Artificial Sequence
  Synthetic oligonucleotide; AGG chr11 5199089 5199108 5199092 -
cagcagccactatattggac

SEQ ID NO: 51929 - DNA, 20 bp, Artificial Sequence
  Synthetic oligonucleotide; GGG chr11 5199088 5199107 5199091 -
agcagccactatattggaca

SEQ ID NO: 51930 - DNA, 20 bp, Artificial Sequence
  Synthetic oligonucleotide; AAG chr11 5199085 5199104 5199088 -
agccactatattggacaggg

SEQ ID NO: 51931 - DNA, 20 bp, Artificial Sequence
  Synthetic oligonucleotide; CAG chr11 5199079 5199098 5199082 -
tatattggacagggaagcta

SEQ ID NO: 51932 - DNA, 20 bp, Artificial Sequence
  Synthetic oligonucleotide; AAG chr11 5199070 5199089 5199073 -
cagggaagctacagttcata

SEQ ID NO: 51933 - DNA, 20 bp, Artificial Sequence
  Synthetic oligonucleotide; GAG chr11 5199068 5199087 5199071 -
gggaagctacagttcataaa

SEQ ID NO: 51934 - DNA, 20 bp, Artificial Sequence
  Synthetic oligonucleotide; AGG chr11 5199067 5199086 5199070 -
ggaagctacagttcataaag

SEQ ID NO: 51935 - DNA, 20 bp, Artificial Sequence
  Synthetic oligonucleotide; AAG chr11 5199059 5199078 5199062 -
cagttcataaagaggacaca

SEQ ID NO: 51936 - DNA, 20 bp, Artificial Sequence
  Synthetic oligonucleotide; TGG chr11 5199045 5199064 5199048 -
gacacaaagaaatatgactt

SEQ ID NO: 51937 - DNA, 20 bp, Artificial Sequence
  Synthetic oligonucleotide; TAG chr11 5199013 5199032 5199016 -
ctaccatgtctaatttaaat

SEQ ID NO: 51938 - DNA, 20 bp, Artificial Sequence
  Synthetic oligonucleotide; TAG chr11 5198997 5199016 5199000 -
aaattagaatccttattttt

SEQ ID NO: 51939 - DNA, 20 bp, Artificial Sequence
  Synthetic oligonucleotide; TGG chr11 5198984 5199003 5198987 -
tattttttagattttatatg

SEQ ID NO: 51940 - DNA, 20 bp, Artificial Sequence
  Synthetic oligonucleotide; AAG chr11 5198968 5198987 5198971 -
tatgtggactccactgctac

SEQ ID NO: 51941 - DNA, 20 bp, Artificial Sequence
  Synthetic oligonucleotide; AGG chr11 5198967 5198986 5198970 -
atgtggactccactgctaca

SEQ ID NO: 51942 - DNA, 20 bp, Artificial Sequence
  Synthetic oligonucleotide; TGG chr11 5198963 5198982 5198966 -
ggactccactgctacaaggc

SEQ ID NO: 51943 - DNA, 20 bp, Artificial Sequence
  Synthetic oligonucleotide; AAG chr11 5198960 5198979 5198963 -
ctccactgctacaaggctgg

SEQ ID NO: 51944 - DNA, 20 bp, Artificial Sequence
  Synthetic oligonucleotide; CAG chr11 5198957 5198976 5198960 -
cactgctacaaggctggaag

SEQ ID NO: 51945 - DNA, 20 bp, Artificial Sequence
  Synthetic oligonucleotide; TAG chr11 5198945 5198964 5198948 -
gctggaagcagattttgctc

SEQ ID NO: 51946 - DNA, 20 bp, Artificial Sequence
  Synthetic oligonucleotide; AAG chr11 5198923 5198942 5198926 -
gatcttttgcttttatatct

SEQ ID NO: 51947 - DNA, 20 bp, Artificial Sequence
  Synthetic oligonucleotide; TGG chr11 5198920 5198939 5198923 -
cttttgcttttatatctaag

SEQ ID NO: 51948 - DNA, 20 bp, Artificial Sequence
  Synthetic oligonucleotide; GGG chr11 5198919 5198938 5198922 -
ttttgcttttatatctaagt

SEQ ID NO: 51949 - DNA, 20 bp, Artificial Sequence
  Synthetic oligonucleotide; GGG chr11 5198918 5198937 5198921 -
tttgcttttatatctaagtg

SEQ ID NO: 51950 - DNA, 20 bp, Artificial Sequence
  Synthetic oligonucleotide; GGG chr11 5198917 5198936 5198920 -
ttgcttttatatctaagtgg

SEQ ID NO: 51951 - DNA, 20 bp, Artificial Sequence
  Synthetic oligonucleotide; CAG chr11 5198904 5198923 5198907 -
taagtgggggatcttctgaa

SEQ ID NO: 51952 - DNA, 20 bp, Artificial Sequence
  Synthetic oligonucleotide; GAG chr11 5198899 5198918 5198902 -
gggggatcttctgaacagat

SEQ ID NO: 51953 - DNA, 20 bp, Artificial Sequence
  Synthetic oligonucleotide; GAG chr11 5198873 5198892 5198876 -
gtccgctaccgacttattct

SEQ ID NO: 51954 - DNA, 20 bp, Artificial Sequence
  Synthetic oligonucleotide; AAG chr11 5198865 5198884 5198868 -
ccgacttattctgagtttaa

SEQ ID NO: 51955 - DNA, 20 bp, Artificial Sequence
  Synthetic oligonucleotide; AAG chr11 5198858 5198877 5198861 -
attctgagtttaaaagaaaa

SEQ ID NO: 51956 - DNA, 20 bp, Artificial Sequence
  Synthetic oligonucleotide; AAG chr11 5198851 5198870 5198854 -
gtttaaaagaaaaaagataa

SEQ ID NO: 51957 - DNA, 20 bp, Artificial Sequence
  Synthetic oligonucleotide; AAG chr11 5198842 5198861 5198845 -
aaaaaagataaaagaacata

SEQ ID NO: 51958 - DNA, 20 bp, Artificial Sequence
  Synthetic oligonucleotide; CGG chr11 5198839 5198858 5198842 -
aaagataaaagaacataaag

SEQ ID NO: 51959 - DNA, 20 bp, Artificial Sequence
  Synthetic oligonucleotide; AAG chr11 5198827 5198846 5198830 -
acataaagcggttcttttct

SEQ ID NO: 51960 - DNA, 20 bp, Artificial Sequence
  Synthetic oligonucleotide; AAG chr11 5198823 5198842 5198826 -
aaagcggttcttttctaagt

SEQ ID NO: 51961 - DNA, 20 bp, Artificial Sequence
  Synthetic oligonucleotide; TAG chr11 5198819 5198838 5198822 -
cggttcttttctaagtaagc

SEQ ID NO: 51962 - DNA, 20 bp, Artificial Sequence
  Synthetic oligonucleotide; CAG chr11 5198814 5198833 5198817 -
cttttctaagtaagctagtg

SEQ ID NO: 51963 - DNA, 20 bp, Artificial Sequence
  Synthetic oligonucleotide; AAG chr11 5198804 5198823 5198807 -
taagctagtgcagctttcca

SEQ ID NO: 51964 - DNA, 20 bp, Artificial Sequence
  Synthetic oligonucleotide; AAG chr11 5198801 5198820 5198804 -
gctagtgcagctttccaaag

SEQ ID NO: 51965 - DNA, 20 bp, Artificial Sequence
  Synthetic oligonucleotide; AGG chr11 5198800 5198819 5198803 -
ctagtgcagctttccaaaga

SEQ ID NO: 51966 - DNA, 20 bp, Artificial Sequence
  Synthetic oligonucleotide; AAG chr11 5198796 5198815 5198799 -
tgcagctttccaaagaagga

SEQ ID NO: 51967 - DNA, 20 bp, Artificial Sequence
  Synthetic oligonucleotide; AAG chr11 5198792 5198811 5198795 -
gctttccaaagaaggaaaga

SEQ ID NO: 51968 - DNA, 20 bp, Artificial Sequence
  Synthetic oligonucleotide; AGG chr11 5198791 5198810 5198794 -
ctttccaaagaaggaaagaa

SEQ ID NO: 51969 - DNA, 20 bp, Artificial Sequence
  Synthetic oligonucleotide; AAG chr11 5198788 5198807 5198791 -
tccaaagaaggaaagaaagg

SEQ ID NO: 51970 - DNA, 20 bp, Artificial Sequence
  Synthetic oligonucleotide; AGG chr11 5198787 5198806 5198790 -
ccaaagaaggaaagaaagga

SEQ ID NO: 51971 - DNA, 20 bp, Artificial Sequence
  Synthetic oligonucleotide; CAG chr11 5198780 5198799 5198783 -
aggaaagaaaggaaggaaat

SEQ ID NO: 51972 - DNA, 20 bp, Artificial Sequence
  Synthetic oligonucleotide; AGG chr11 5198779 5198798 5198782 -
ggaaagaaaggaaggaaatc

SEQ ID NO: 51973 - DNA, 20 bp, Artificial Sequence
  Synthetic oligonucleotide; TGG chr11 5198762 5198781 5198765 -
atcaggtacaaaactatgca

SEQ ID NO: 51974 - DNA, 20 bp, Artificial Sequence
  Synthetic oligonucleotide; AAG chr11 5198754 5198773 5198757 -
caaaactatgcatggataac

SEQ ID NO: 51975 - DNA, 20 bp, Artificial Sequence
  Synthetic oligonucleotide; TAG chr11 5198719 5198738 5198722 -
ttaatcttcctatattctat

SEQ ID NO: 51976 - DNA, 20 bp, Artificial Sequence
  Synthetic oligonucleotide; AGG chr11 5198718 5198737 5198721 -
taatcttcctatattctatt

SEQ ID NO: 51977 - DNA, 20 bp, Artificial Sequence
  Synthetic oligonucleotide; AAG chr11 5198710 5198729 5198713 -
ctatattctattaggtatct

SEQ ID NO: 51978 - DNA, 20 bp, Artificial Sequence
  Synthetic oligonucleotide; AAG chr11 5198707 5198726 5198710 -
tattctattaggtatctaag

SEQ ID NO: 51979 - DNA, 20 bp, Artificial Sequence
  Synthetic oligonucleotide; AGG chr11 5198706 5198725 5198709 -
attctattaggtatctaaga

SEQ ID NO: 51980 - DNA, 20 bp, Artificial Sequence
  Synthetic oligonucleotide; AAG chr11 5198702 5198721 5198705 -
tattaggtatctaagaaggt

SEQ ID NO: 51981 - DNA, 20 bp, Artificial Sequence
  Synthetic oligonucleotide; TGG chr11 5198690 5198709 5198693 -
aagaaggtaagtgttaaaat

SEQ ID NO: 51982 - DNA, 20 bp, Artificial Sequence
  Synthetic oligonucleotide; AAG chr11 5198673 5198692 5198676 -
aattggacaaattaatgcat

SEQ ID NO: 51983 - DNA, 20 bp, Artificial Sequence
  Synthetic oligonucleotide; GAG chr11 5198671 5198690 5198674 -
ttggacaaattaatgcataa

SEQ ID NO: 51984 - DNA, 20 bp, Artificial Sequence
  Synthetic oligonucleotide; AAG chr11 5198653 5198672 5198656 -
aagagtcattttacaccaaa

SEQ ID NO: 51985 - DNA, 20 bp, Artificial Sequence
  Synthetic oligonucleotide; TAG chr11 5198630 5198649 5198633 -
caaatatttatttttatttt

SEQ ID NO: 51986 - DNA, 20 bp, Artificial Sequence
  Synthetic oligonucleotide; CAG chr11 5198610 5198629 5198613 -
tagatatcaactaaaacaac

SEQ ID NO: 51987 - DNA, 20 bp, Artificial Sequence
  Synthetic oligonucleotide; TGG chr11 5198567 5198586 5198570 -
gccttcctttcctttcactt

SEQ ID NO: 51988 - DNA, 20 bp, Artificial Sequence
  Synthetic oligonucleotide; TAG chr11 5198548 5198567 5198551 -
ttggacttcattcaataaca

SEQ ID NO: 51989 - DNA, 20 bp, Artificial Sequence
  Synthetic oligonucleotide; CAG chr11 5198524 5198543 5198527 -
ctctgtctacttatttgact

SEQ ID NO: 51990 - DNA, 20 bp, Artificial Sequence
  Synthetic oligonucleotide; GAG chr11 5198522 5198541 5198525 -
ctgtctacttatttgactca

SEQ ID NO: 51991 - DNA, 20 bp, Artificial Sequence
  Synthetic oligonucleotide; AGG chr11 5198521 5198540 5198524 -
tgtctacttatttgactcag

SEQ ID NO: 51992 - DNA, 20 bp, Artificial Sequence
  Synthetic oligonucleotide; GGG chr11 5198520 5198539 5198523 -
gtctacttatttgactcaga

SEQ ID NO: 51993 - DNA, 20 bp, Artificial Sequence
  Synthetic oligonucleotide; CAG chr11 5198506 5198525 5198509 -
ctcagagggaaacaaaaata

SEQ ID NO: 51994 - DNA, 20 bp, Artificial Sequence
  Synthetic oligonucleotide; AGG chr11 5198505 5198524 5198508 -
tcagagggaaacaaaaatac

SEQ ID NO: 51995 - DNA, 20 bp, Artificial Sequence
  Synthetic oligonucleotide; TGG chr11 5198499 5198518 5198502 -
ggaaacaaaaatacaggctt

SEQ ID NO: 51996 - DNA, 20 bp, Artificial Sequence
  Synthetic oligonucleotide; TAG chr11 5198489 5198508 5198492 -
atacaggctttggtttctaa

SEQ ID NO: 51997 - DNA, 20 bp, Artificial Sequence
  Synthetic oligonucleotide; AAG chr11 5198483 5198502 5198486 -
gctttggtttctaatagctt

SEQ ID NO: 51998 - DNA, 20 bp, Artificial Sequence
  Synthetic oligonucleotide; AAG chr11 5198475 5198494 5198478 -
ttctaatagcttaagcctca

SEQ ID NO: 51999 - DNA, 20 bp, Artificial Sequence
  Synthetic oligonucleotide; GAG chr11 5198471 5198490 5198474 -
aatagcttaagcctcaaagt

SEQ ID NO: 52000 - DNA, 20 bp, Artificial Sequence
  Synthetic oligonucleotide; AGG chr11 5198470 5198489 5198473 -
atagcttaagcctcaaagtg

SEQ ID NO: 52001 - DNA, 20 bp, Artificial Sequence
  Synthetic oligonucleotide; TGG chr11 5198457 5198476 5198460 -
caaagtgaggaaattgtttc

SEQ ID NO: 52002 - DNA, 20 bp, Artificial Sequence
  Synthetic oligonucleotide; CAG chr11 5198453 5198472 5198456 -
gtgaggaaattgtttctgga

SEQ ID NO: 52003 - DNA, 20 bp, Artificial Sequence
  Synthetic oligonucleotide; GAG chr11 5198451 5198470 5198454 -
gaggaaattgtttctggaca

SEQ ID NO: 52004 - DNA, 20 bp, Artificial Sequence
  Synthetic oligonucleotide; AAG chr11 5198446 5198465 5198449 -
aattgtttctggacagagta

SEQ ID NO: 52005 - DNA, 20 bp, Artificial Sequence
  Synthetic oligonucleotide; TGG chr11 5198439 5198458 5198442 -
tctggacagagtaaagtatc

SEQ ID NO: 52006 - DNA, 20 bp, Artificial Sequence
  Synthetic oligonucleotide; TAG chr11 5198435 5198454 5198438 -
gacagagtaaagtatctggt

SEQ ID NO: 52007 - DNA, 20 bp, Artificial Sequence
  Synthetic oligonucleotide; AAG chr11 5198431 5198450 5198434 -
gagtaaagtatctggttaga

SEQ ID NO: 52008 - DNA, 20 bp, Artificial Sequence
  Synthetic oligonucleotide; AAG chr11 5198426 5198445 5198429 -
aagtatctggttagaaagat

SEQ ID NO: 52009 - DNA, 20 bp, Artificial Sequence
  Synthetic oligonucleotide; TAG chr11 5198409 5198428 5198412 -
gataagtgtaaaattattcc

SEQ ID NO: 52010 - DNA, 20 bp, Artificial Sequence
  Synthetic oligonucleotide; TAG chr11 5198396 5198415 5198399 -
ttattcctagaacaataaat

SEQ ID NO: 52011 - DNA, 20 bp, Artificial Sequence
  Synthetic oligonucleotide; AGG chr11 5198395 5198414 5198398 -
tattcctagaacaataaatt

SEQ ID NO: 52012 - DNA, 20 bp, Artificial Sequence
  Synthetic oligonucleotide; TGG chr11 5198387 5198406 5198390 -
gaacaataaattaggtcttc

SEQ ID NO: 52013 - DNA, 20 bp, Artificial Sequence
  Synthetic oligonucleotide; GGG chr11 5198386 5198405 5198389 -
aacaataaattaggtcttct

SEQ ID NO: 52014 - DNA, 20 bp, Artificial Sequence
  Synthetic oligonucleotide; CAG chr11 5198380 5198399 5198383 -
aaattaggtcttctgggtta

SEQ ID NO: 52015 - DNA, 20 bp, Artificial Sequence
  Synthetic oligonucleotide; AAG chr11 5198374 5198393 5198377 -
ggtcttctgggttacagtat

SEQ ID NO: 52016 - DNA, 20 bp, Artificial Sequence
  Synthetic oligonucleotide; AGG chr11 5198373 5198392 5198376 -
gtcttctgggttacagtata

SEQ ID NO: 52017 - DNA, 20 bp, Artificial Sequence
  Synthetic oligonucleotide; AAG chr11 5198362 5198381 5198365 -
tacagtataaggttaatttg

SEQ ID NO: 52018 - DNA, 20 bp, Artificial Sequence
  Synthetic oligonucleotide; AGG chr11 5198361 5198380 5198364 -
acagtataaggttaatttga

SEQ ID NO: 52019 - DNA, 20 bp, Artificial Sequence
  Synthetic oligonucleotide; AAG chr11 5198355 5198374 5198358 -
taaggttaatttgaaggata

SEQ ID NO: 52020 - DNA, 20 bp, Artificial Sequence
  Synthetic oligonucleotide; AGG chr11 5198354 5198373 5198357 -
aaggttaatttgaaggataa

SEQ ID NO: 52021 - DNA, 20 bp, Artificial Sequence
  Synthetic oligonucleotide; GAG chr11 5198352 5198371 5198355 -
ggttaatttgaaggataaag

SEQ ID NO: 52022 - DNA, 20 bp, Artificial Sequence
  Synthetic oligonucleotide; AAG chr11 5198332 5198351 5198335 -
gagtgaatttcctgatgtca

SEQ ID NO: 52023 - DNA, 20 bp, Artificial Sequence
  Synthetic oligonucleotide; GAG chr11 5198330 5198349 5198333 -
gtgaatttcctgatgtcaaa

SEQ ID NO: 52024 - DNA, 20 bp, Artificial Sequence
  Synthetic oligonucleotide; AGG chr11 5198329 5198348 5198332 -
tgaatttcctgatgtcaaag

SEQ ID NO: 52025 - DNA, 20 bp, Artificial Sequence
  Synthetic oligonucleotide; TAG chr11 5198323 5198342 5198326 -
tcctgatgtcaaagaggatc

SEQ ID NO: 52026 - DNA, 20 bp, Artificial Sequence
  Synthetic oligonucleotide; TGG chr11 5198311 5198330 5198314 -
agaggatctagtgcatcttc

SEQ ID NO: 52027 - DNA, 20 bp, Artificial Sequence
  Synthetic oligonucleotide; TAG chr11 5198306 5198325 5198309 -
atctagtgcatcttctggta

SEQ ID NO: 52028 - DNA, 20 bp, Artificial Sequence
  Synthetic oligonucleotide; CAG chr11 5198299 5198318 5198302 -
gcatcttctggtatagctat

SEQ ID NO: 52029 - DNA, 20 bp, Artificial Sequence
  Synthetic oligonucleotide; AAG chr11 5198296 5198315 5198299 -
tcttctggtatagctatcag

SEQ ID NO: 52030 - DNA, 20 bp, Artificial Sequence
  Synthetic oligonucleotide; GAG chr11 5198283 5198302 5198286 -
ctatcagaagtgaaaactgt

SEQ ID NO: 52031 - DNA, 20 bp, Artificial Sequence
  Synthetic oligonucleotide; AGG chr11 5198282 5198301 5198285 -
tatcagaagtgaaaactgtg

SEQ ID NO: 52032 - DNA, 20 bp, Artificial Sequence
  Synthetic oligonucleotide; TAG chr11 5198279 5198298 5198282 -
cagaagtgaaaactgtgagg

SEQ ID NO: 52033 - DNA, 20 bp, Artificial Sequence
  Synthetic oligonucleotide; AGG chr11 5198278 5198297 5198281 -
agaagtgaaaactgtgaggt

SEQ ID NO: 52034 - DNA, 20 bp, Artificial Sequence
  Synthetic oligonucleotide; TAG chr11 5198272 5198291 5198275 -
gaaaactgtgaggtaggttc

SEQ ID NO: 52035 - DNA, 20 bp, Artificial Sequence
  Synthetic oligonucleotide; GAG chr11 5198270 5198289 5198273 -
aaactgtgaggtaggttcta

SEQ ID NO: 52036 - DNA, 20 bp, Artificial Sequence
  Synthetic oligonucleotide; AGG chr11 5198269 5198288 5198272 -
aactgtgaggtaggttctag

SEQ ID NO: 52037 - DNA, 20 bp, Artificial Sequence
  Synthetic oligonucleotide; GGG chr11 5198268 5198287 5198271 -
actgtgaggtaggttctaga

SEQ ID NO: 52038 - DNA, 20 bp, Artificial Sequence
  Synthetic oligonucleotide; GGG chr11 5198267 5198286 5198270 -
ctgtgaggtaggttctagag

SEQ ID NO: 52039 - DNA, 20 bp, Artificial Sequence
  Synthetic oligonucleotide; TAG chr11 5198228 5198247 5198231 -
tattttttactatataatca

SEQ ID NO: 52040 - DNA, 20 bp, Artificial Sequence
  Synthetic oligonucleotide; TAG chr11 5198225 5198244 5198228 -
tttttactatataatcatag

SEQ ID NO: 52041 - DNA, 20 bp, Artificial Sequence
  Synthetic oligonucleotide; GAG chr11 5198217 5198236 5198220 -
atataatcatagtagctgcc

SEQ ID NO: 52042 - DNA, 20 bp, Artificial Sequence
  Synthetic oligonucleotide; AGG chr11 5198216 5198235 5198219 -
tataatcatagtagctgccg

SEQ ID NO: 52043 - DNA, 20 bp, Artificial Sequence
  Synthetic oligonucleotide; CGG chr11 5198213 5198232 5198216 -
aatcatagtagctgccgagg

SEQ ID NO: 52044 - DNA, 20 bp, Artificial Sequence
  Synthetic oligonucleotide; GGG chr11 5198212 5198231 5198215 -
atcatagtagctgccgaggc

SEQ ID NO: 52045 - DNA, 20 bp, Artificial Sequence
  Synthetic oligonucleotide; CGG chr11 5198209 5198228 5198212 -
atagtagctgccgaggcggg

SEQ ID NO: 52046 - DNA, 20 bp, Artificial Sequence
  Synthetic oligonucleotide; GAG chr11 5198201 5198220 5198204 -
tgccgaggcgggcggatcat

SEQ ID NO: 52047 - DNA, 20 bp, Artificial Sequence
  Synthetic oligonucleotide; AGG chr11 5198200 5198219 5198203 -
gccgaggcgggcggatcatg

SEQ ID NO: 52048 - DNA, 20 bp, Artificial Sequence
  Synthetic oligonucleotide; CAG chr11 5198196 5198215 5198199 -
aggcgggcggatcatgaggt

SEQ ID NO: 52049 - DNA, 20 bp, Artificial Sequence
  Synthetic oligonucleotide; AGG chr11 5198195 5198214 5198198 -
ggcgggcggatcatgaggtc

SEQ ID NO: 52050 - DNA, 20 bp, Artificial Sequence
  Synthetic oligonucleotide; GAG chr11 5198193 5198212 5198196 -
cgggcggatcatgaggtcag

SEQ ID NO: 52051 - DNA, 20 bp, Artificial Sequence
  Synthetic oligonucleotide; GAG chr11 5198187 5198206 5198190 -
gatcatgaggtcaggagatc

SEQ ID NO: 52052 - DNA, 20 bp, Artificial Sequence
  Synthetic oligonucleotide; TGG chr11 5198177 5198196 5198180 -
tcaggagatcgagaccatcc

SEQ ID NO: 52053 - DNA, 20 bp, Artificial Sequence
  Synthetic oligonucleotide; CAG chr11 5198173 5198192 5198176 -
gagatcgagaccatcctggc

SEQ ID NO: 52054 - DNA, 20 bp, Artificial Sequence
  Synthetic oligonucleotide; TGG chr11 5198167 5198186 5198170 -
gagaccatcctggccagcaa

SEQ ID NO: 52055 - DNA, 20 bp, Artificial Sequence
  Synthetic oligonucleotide; AAG chr11 5198136 5198155 5198139 -
cgtctctactaaaaaaacac

SEQ ID NO: 52056 - DNA, 20 bp, Artificial Sequence
  Synthetic oligonucleotide; AAG chr11 5198132 5198151 5198135 -
tctactaaaaaaacacaaga

SEQ ID NO: 52057 - DNA, 20 bp, Artificial Sequence
  Synthetic oligonucleotide; CAG chr11 5198125 5198144 5198128 -
aaaaaacacaagaaagtatc

SEQ ID NO: 52058 - DNA, 20 bp, Artificial Sequence
  Synthetic oligonucleotide; AGG chr11 5198124 5198143 5198127 -
aaaaacacaagaaagtatcc

SEQ ID NO: 52059 - DNA, 20 bp, Artificial Sequence
  Synthetic oligonucleotide; TGG chr11 5198119 5198138 5198122 -
cacaagaaagtatccaggcg

SEQ ID NO: 52060 - DNA, 20 bp, Artificial Sequence
  Synthetic oligonucleotide; TGG chr11 5198116 5198135 5198119 -
aagaaagtatccaggcgtgg

SEQ ID NO: 52061 - DNA, 20 bp, Artificial Sequence
  Synthetic oligonucleotide; CGG chr11 5198113 5198132 5198116 -
aaagtatccaggcgtggtgg

SEQ ID NO: 52062 - DNA, 20 bp, Artificial Sequence
  Synthetic oligonucleotide; GGG chr11 5198112 5198131 5198115 -
aagtatccaggcgtggtggc

SEQ ID NO: 52063 - DNA, 20 bp, Artificial Sequence
  Synthetic oligonucleotide; TAG chr11 5198103 5198122 5198106 -
ggcgtggtggcgggcacctg

SEQ ID NO: 52064 - DNA, 20 bp, Artificial Sequence
  Synthetic oligonucleotide; CAG chr11 5198097 5198116 5198100 -
gtggcgggcacctgtagtcc

SEQ ID NO: 52065 - DNA, 20 bp, Artificial Sequence
  Synthetic oligonucleotide; AGG chr11 5198096 5198115 5198099 -
tggcgggcacctgtagtccc

SEQ ID NO: 52066 - DNA, 20 bp, Artificial Sequence
  Synthetic oligonucleotide; CGG chr11 5198089 5198108 5198092 -
cacctgtagtcccaggtact

SEQ ID NO: 52067 - DNA, 20 bp, Artificial Sequence
  Synthetic oligonucleotide; GGG chr11 5198088 5198107 5198091 -
acctgtagtcccaggtactc

SEQ ID NO: 52068 - DNA, 20 bp, Artificial Sequence
  Synthetic oligonucleotide; GAG chr11 5198086 5198105 5198089 -
ctgtagtcccaggtactcgg

SEQ ID NO: 52069 - DNA, 20 bp, Artificial Sequence
  Synthetic oligonucleotide; AGG chr11 5198085 5198104 5198088 -
tgtagtcccaggtactcggg

SEQ ID NO: 52070 - DNA, 20 bp, Artificial Sequence
  Synthetic oligonucleotide; GAG chr11 5198080 5198099 5198083 -
tcccaggtactcgggaggct

SEQ ID NO: 52071 - DNA, 20 bp, Artificial Sequence
  Synthetic oligonucleotide; CAG chr11 5198076 5198095 5198079 -
aggtactcgggaggctgaga

SEQ ID NO: 52072 - DNA, 20 bp, Artificial Sequence
  Synthetic oligonucleotide; AGG chr11 5198075 5198094 5198078 -
ggtactcgggaggctgagac

SEQ ID NO: 52073 - DNA, 20 bp, Artificial Sequence
  Synthetic oligonucleotide; GAG chr11 5198073 5198092 5198076 -
tactcgggaggctgagacag

SEQ ID NO: 52074 - DNA, 20 bp, Artificial Sequence
  Synthetic oligonucleotide; TGG chr11 5198068 5198087 5198071 -
gggaggctgagacaggagaa

SEQ ID NO: 52075 - DNA, 20 bp, Artificial Sequence
  Synthetic oligonucleotide; CGG chr11 5198057 5198076 5198060 -
acaggagaatggcgtgaacc

SEQ ID NO: 52076 - DNA, 20 bp, Artificial Sequence
  Synthetic oligonucleotide; GGG chr11 5198056 5198075 5198059 -
caggagaatggcgtgaaccc

SEQ ID NO: 52077 - DNA, 20 bp, Artificial Sequence
  Synthetic oligonucleotide; GAG chr11 5198054 5198073 5198057 -
ggagaatggcgtgaacccgg

SEQ ID NO: 52078 - DNA, 20 bp, Artificial Sequence
  Synthetic oligonucleotide; AGG chr11 5198053 5198072 5198056 -
gagaatggcgtgaacccggg

SEQ ID NO: 52079 - DNA, 20 bp, Artificial Sequence
  Synthetic oligonucleotide; TGG chr11 5198050 5198069 5198053 -
aatggcgtgaacccgggagg

SEQ ID NO: 52080 - DNA, 20 bp, Artificial Sequence
  Synthetic oligonucleotide; GAG chr11 5198048 5198067 5198051 -
tggcgtgaacccgggaggtg

SEQ ID NO: 52081 - DNA, 20 bp, Artificial Sequence
  Synthetic oligonucleotide; CAG chr11 5198041 5198060 5198044 -
aacccgggaggtggagcttg

SEQ ID NO: 52082 - DNA, 20 bp, Artificial Sequence
  Synthetic oligonucleotide; GAG chr11 5198037 5198056 5198040 -
cgggaggtggagcttgcagt

SEQ ID NO: 52083 - DNA, 20 bp, Artificial Sequence
  Synthetic oligonucleotide; GAG chr11 5198032 5198051 5198035 -
ggtggagcttgcagtgagtc

SEQ ID NO: 52084 - DNA, 20 bp, Artificial Sequence
  Synthetic oligonucleotide; CAG chr11 5198012 5198031 5198015 -
gagatcacgccactgcactc

SEQ ID NO: 52085 - DNA, 20 bp, Artificial Sequence
  Synthetic oligonucleotide; TGG chr11 5198007 5198026 5198010 -
cacgccactgcactccagcc

SEQ ID NO: 52086 - DNA, 20 bp, Artificial Sequence
  Synthetic oligonucleotide; GGG chr11 5198006 5198025 5198009 -
acgccactgcactccagcct

SEQ ID NO: 52087 - DNA, 20 bp, Artificial Sequence
  Synthetic oligonucleotide; CAG chr11 5198000 5198019 5198003 -
ctgcactccagcctgggcga

SEQ ID NO: 52088 - DNA, 20 bp, Artificial Sequence
  Synthetic oligonucleotide; GAG chr11 5197998 5198017 5198001 -
gcactccagcctgggcgaca

SEQ ID NO: 52089 - DNA, 20 bp, Artificial Sequence
  Synthetic oligonucleotide; GAG chr11 5197996 5198015 5197999 -
actccagcctgggcgacaga

SEQ ID NO: 52090 - DNA, 20 bp, Artificial Sequence
  Synthetic oligonucleotide; GAG chr11 5197994 5198013 5197997 -
tccagcctgggcgacagaga

SEQ ID NO: 52091 - DNA, 20 bp, Artificial Sequence
  Synthetic oligonucleotide; AAG chr11 5197966 5197985 5197969 -
gtctcaaaaaaaaaaaaaaa

SEQ ID NO: 52092 - DNA, 20 bp, Artificial Sequence
  Synthetic oligonucleotide; GAG chr11 5197964 5197983 5197967 -
ctcaaaaaaaaaaaaaaaaa

SEQ ID NO: 52093 - DNA, 20 bp, Artificial Sequence
  Synthetic oligonucleotide; AAG chr11 5197954 5197973 5197957 -
aaaaaaaaaagagaaaaaaa

SEQ ID NO: 52094 - DNA, 20 bp, Artificial Sequence
  Synthetic oligonucleotide; AAG chr11 5197949 5197968 5197952 -
aaaaagagaaaaaaaaagaa

SEQ ID NO: 52095 - DNA, 20 bp, Artificial Sequence
  Synthetic oligonucleotide; CAG chr11 5197933 5197952 5197936 -
agaaaagttgatatgaatgt

SEQ ID NO: 52096 - DNA, 20 bp, Artificial Sequence
  Synthetic oligonucleotide; AGG chr11 5197932 5197951 5197935 -
gaaaagttgatatgaatgtc

SEQ ID NO: 52097 - DNA, 20 bp, Artificial Sequence
  Synthetic oligonucleotide; TGG chr11 5197929 5197948 5197932 -
aagttgatatgaatgtcagg

SEQ ID NO: 52098 - DNA, 20 bp, Artificial Sequence
  Synthetic oligonucleotide; TAG chr11 5197926 5197945 5197929 -
ttgatatgaatgtcaggtgg

SEQ ID NO: 52099 - DNA, 20 bp, Artificial Sequence
  Synthetic oligonucleotide; CAG chr11 5197915 5197934 5197918 -
gtcaggtggtagtactgctc

SEQ ID NO: 52100 - DNA, 20 bp, Artificial Sequence
  Synthetic oligonucleotide; AGG chr11 5197914 5197933 5197917 -
tcaggtggtagtactgctcc

SEQ ID NO: 52101 - DNA, 20 bp, Artificial Sequence
  Synthetic oligonucleotide; TGG chr11 5197885 5197904 5197888 -
aatgataataaatgtctgca

SEQ ID NO: 52102 - DNA, 20 bp, Artificial Sequence
  Synthetic oligonucleotide; TGG chr11 5197875 5197894 5197878 -
aatgtctgcatggtccctcc

SEQ ID NO: 52103 - DNA, 20 bp, Artificial Sequence
  Synthetic oligonucleotide; TGG chr11 5197867 5197886 5197870 -
catggtccctcctggccgac

SEQ ID NO: 52104 - DNA, 20 bp, Artificial Sequence
  Synthetic oligonucleotide; TGG chr11 5197860 5197879 5197863 -
cctcctggccgactggaatg

SEQ ID NO: 52105 - DNA, 20 bp, Artificial Sequence
  Synthetic oligonucleotide; AAG chr11 5197847 5197866 5197850 -
tggaatgtggccaatctgac

SEQ ID NO: 52106 - DNA, 20 bp, Artificial Sequence
  Synthetic oligonucleotide; CAG chr11 5197832 5197851 5197835 -
ctgacaagattcctatgccc

SEQ ID NO: 52107 - DNA, 20 bp, Artificial Sequence
  Synthetic oligonucleotide; AAG chr11 5197817 5197836 5197820 -
tgccccagttttataatgaa

SEQ ID NO: 52108 - DNA, 20 bp, Artificial Sequence
  Synthetic oligonucleotide; GAG chr11 5197815 5197834 5197818 -
ccccagttttataatgaaaa

SEQ ID NO: 52109 - DNA, 20 bp, Artificial Sequence
  Synthetic oligonucleotide; AAG chr11 5197812 5197831 5197815 -
cagttttataatgaaaagag

SEQ ID NO: 52110 - DNA, 20 bp, Artificial Sequence
  Synthetic oligonucleotide; TAG chr11 5197808 5197827 5197811 -
tttataatgaaaagagaagt

SEQ ID NO: 52111 - DNA, 20 bp, Artificial Sequence
  Synthetic oligonucleotide; TAG chr11 5197793 5197812 5197796 -
gaagttagctgctgaatctg

SEQ ID NO: 52112 - DNA, 20 bp, Artificial Sequence
  Synthetic oligonucleotide; GAG chr11 5197791 5197810 5197794 -
agttagctgctgaatctgta

SEQ ID NO: 52113 - DNA, 20 bp, Artificial Sequence
  Synthetic oligonucleotide; AGG chr11 5197790 5197809 5197793 -
gttagctgctgaatctgtag

SEQ ID NO: 52114 - DNA, 20 bp, Artificial Sequence
  Synthetic oligonucleotide; TAG chr11 5197771 5197790 5197774 -
gaggtcatgtgaatgtctca

SEQ ID NO: 52115 - DNA, 20 bp, Artificial Sequence
  Synthetic oligonucleotide; TGG chr11 5197759 5197778 5197762 -
atgtctcatagatttctcaa

SEQ ID NO: 52116 - DNA, 20 bp, Artificial Sequence
  Synthetic oligonucleotide; AAG chr11 5197753 5197772 5197756 -
catagatttctcaatggcca

SEQ ID NO: 52117 - DNA, 20 bp, Artificial Sequence
  Synthetic oligonucleotide; AAG chr11 5197750 5197769 5197753 -
agatttctcaatggccaaag

SEQ ID NO: 52118 - DNA, 20 bp, Artificial Sequence
  Synthetic oligonucleotide; AAG chr11 5197728 5197747 5197731 -
gcttccttctaatgctttga

SEQ ID NO: 52119 - DNA, 20 bp, Artificial Sequence
  Synthetic oligonucleotide; AAG chr11 5197720 5197739 5197723 -
ctaatgctttgaaagtgaat

SEQ ID NO: 52120 - DNA, 20 bp, Artificial Sequence
  Synthetic oligonucleotide; CGG chr11 5197698 5197717 5197701 -
gcatccaccctcccatacgc

SEQ ID NO: 52121 - DNA, 20 bp, Artificial Sequence
  Synthetic oligonucleotide; GAG chr11 5197696 5197715 5197699 -
atccaccctcccatacgccg

SEQ ID NO: 52122 - DNA, 20 bp, Artificial Sequence
  Synthetic oligonucleotide; GAG chr11 5197694 5197713 5197697 -
ccaccctcccatacgccgga

SEQ ID NO: 52123 - DNA, 20 bp, Artificial Sequence
  Synthetic oligonucleotide; TGG chr11 5197679 5197698 5197682 -
ccggagagctgacacaacac

SEQ ID NO: 52124 - DNA, 20 bp, Artificial Sequence
  Synthetic oligonucleotide; GGG chr11 5197678 5197697 5197681 -
cggagagctgacacaacact

SEQ ID NO: 52125 - DNA, 20 bp, Artificial Sequence
  Synthetic oligonucleotide; GGG chr11 5197677 5197696 5197680 -
ggagagctgacacaacactg

SEQ ID NO: 52126 - DNA, 20 bp, Artificial Sequence
  Synthetic oligonucleotide; AAG chr11 5197674 5197693 5197677 -
gagctgacacaacactgggg

SEQ ID NO: 52127 - DNA, 20 bp, Artificial Sequence
  Synthetic oligonucleotide; CAG chr11 5197671 5197690 5197674 -
ctgacacaacactggggaag

SEQ ID NO: 52128 - DNA, 20 bp, Artificial Sequence
  Synthetic oligonucleotide; GAG chr11 5197669 5197688 5197672 -
gacacaacactggggaagca

SEQ ID NO: 52129 - DNA, 20 bp, Artificial Sequence
  Synthetic oligonucleotide; CAG chr11 5197634 5197653 5197637 -
actgacaatatgttttccac

SEQ ID NO: 52130 - DNA, 20 bp, Artificial Sequence
  Synthetic oligonucleotide; TAG chr11 5197624 5197643 5197627 -
tgttttccaccagccactca

SEQ ID NO: 52131 - DNA, 20 bp, Artificial Sequence
  Synthetic oligonucleotide; AGG chr11 5197623 5197642 5197626 -
gttttccaccagccactcat

SEQ ID NO: 52132 - DNA, 20 bp, Artificial Sequence
  Synthetic oligonucleotide; GGG chr11 5197622 5197641 5197625 -
ttttccaccagccactcata

SEQ ID NO: 52133 - DNA, 20 bp, Artificial Sequence
  Synthetic oligonucleotide; AAG chr11 5197619 5197638 5197622 -
tccaccagccactcataggg

SEQ ID NO: 52134 - DNA, 20 bp, Artificial Sequence
  Synthetic oligonucleotide; CAG chr11 5197613 5197632 5197616 -
agccactcatagggaagcat

SEQ ID NO: 52135 - DNA, 20 bp, Artificial Sequence
  Synthetic oligonucleotide; GAG chr11 5197561 5197580 5197564 -
attacatgtctgacacaact

SEQ ID NO: 52136 - DNA, 20 bp, Artificial Sequence
  Synthetic oligonucleotide; TGG chr11 5197554 5197573 5197557 -
gtctgacacaactgagttgt

SEQ ID NO: 52137 - DNA, 20 bp, Artificial Sequence
  Synthetic oligonucleotide; GAG chr11 5197548 5197567 5197551 -
cacaactgagttgttggttt

SEQ ID NO: 52138 - DNA, 20 bp, Artificial Sequence
  Synthetic oligonucleotide; GAG chr11 5197546 5197565 5197549 -
caactgagttgttggtttga

SEQ ID NO: 52139 - DNA, 20 bp, Artificial Sequence
  Synthetic oligonucleotide; CAG chr11 5197533 5197552 5197536 -
ggtttgagagttatgtttaa

SEQ ID NO: 52140 - DNA, 20 bp, Artificial Sequence
  Synthetic oligonucleotide; AGG chr11 5197532 5197551 5197535 -
gtttgagagttatgtttaac

SEQ ID NO: 52141 - DNA, 20 bp, Artificial Sequence
  Synthetic oligonucleotide; GGG chr11 5197531 5197550 5197534 -
tttgagagttatgtttaaca

SEQ ID NO: 52142 - DNA, 20 bp, Artificial Sequence
  Synthetic oligonucleotide; GAG chr11 5197529 5197548 5197532 -
tgagagttatgtttaacagg

SEQ ID NO: 52143 - DNA, 20 bp, Artificial Sequence
  Synthetic oligonucleotide; GAG chr11 5197527 5197546 5197530 -
agagttatgtttaacaggga

SEQ ID NO: 52144 - DNA, 20 bp, Artificial Sequence
  Synthetic oligonucleotide; TAG chr11 5197524 5197543 5197527 -
gttatgtttaacagggagag

SEQ ID NO: 52145 - DNA, 20 bp, Artificial Sequence
  Synthetic oligonucleotide; AGG chr11 5197523 5197542 5197526 -
ttatgtttaacagggagagt

SEQ ID NO: 52146 - DNA, 20 bp, Artificial Sequence
  Synthetic oligonucleotide; AAG chr11 5197520 5197539 5197523 -
tgtttaacagggagagtagg

SEQ ID NO: 52147 - DNA, 20 bp, Artificial Sequence
  Synthetic oligonucleotide; AGG chr11 5197519 5197538 5197522 -
gtttaacagggagagtagga

SEQ ID NO: 52148 - DNA, 20 bp, Artificial Sequence
  Synthetic oligonucleotide; AAG chr11 5197508 5197527 5197511 -
agagtaggaaggctcatctg

SEQ ID NO: 52149 - DNA, 20 bp, Artificial Sequence
  Synthetic oligonucleotide; GAG chr11 5197493 5197512 5197496 -
atctgaagacttcatactat

SEQ ID NO: 52150 - DNA, 20 bp, Artificial Sequence
  Synthetic oligonucleotide; CAG chr11 5197479 5197498 5197482 -
tactatgagtgtttgtgctt

SEQ ID NO: 52151 - DNA, 20 bp, Artificial Sequence
  Synthetic oligonucleotide; TAG chr11 5197474 5197493 5197477 -
tgagtgtttgtgcttcagat

SEQ ID NO: 52152 - DNA, 20 bp, Artificial Sequence
  Synthetic oligonucleotide; AGG chr11 5197473 5197492 5197476 -
gagtgtttgtgcttcagatt

SEQ ID NO: 52153 - DNA, 20 bp, Artificial Sequence
  Synthetic oligonucleotide; TAG chr11 5197463 5197482 5197466 -
gcttcagattaggcaaccta

SEQ ID NO: 52154 - DNA, 20 bp, Artificial Sequence
  Synthetic oligonucleotide; TAG chr11 5197446 5197465 5197449 -
ctatagaatgtgaaccaaaa

SEQ ID NO: 52155 - DNA, 20 bp, Artificial Sequence
  Synthetic oligonucleotide; TGG chr11 5197433 5197452 5197436 -
accaaaatagtttgaaataa

SEQ ID NO: 52156 - DNA, 20 bp, Artificial Sequence
  Synthetic oligonucleotide; CAG chr11 5197419 5197438 5197422 -
aaataatggccgtgacaaaa

SEQ ID NO: 52157 - DNA, 20 bp, Artificial Sequence
  Synthetic oligonucleotide; AAG chr11 5197400 5197419 5197403 -
acagttaataaaaaatacct

SEQ ID NO: 52158 - DNA, 20 bp, Artificial Sequence
  Synthetic oligonucleotide; GAG chr11 5197398 5197417 5197401 -
agttaataaaaaatacctaa

SEQ ID NO: 52159 - DNA, 20 bp, Artificial Sequence
  Synthetic oligonucleotide; CAG chr11 5197389 5197408 5197392 -
aaaatacctaagagtatcct

SEQ ID NO: 52160 - DNA, 20 bp, Artificial Sequence
  Synthetic oligonucleotide; TAG chr11 5197370 5197389 5197373 -
tcagaaatcattgcttattt

SEQ ID NO: 52161 - DNA, 20 bp, Artificial Sequence
  Synthetic oligonucleotide; GAG chr11 5197368 5197387 5197371 -
agaaatcattgcttatttta

SEQ ID NO: 52162 - DNA, 20 bp, Artificial Sequence
  Synthetic oligonucleotide; AAG chr11 5197342 5197361 5197345 -
tataattgtactatgatgat

SEQ ID NO: 52163 - DNA, 20 bp, Artificial Sequence
  Synthetic oligonucleotide; AAG chr11 5197332 5197351 5197335 -
ctatgatgataagatttatg

SEQ ID NO: 52164 - DNA, 20 bp, Artificial Sequence
  Synthetic oligonucleotide; CAG chr11 5197324 5197343 5197327 -
ataagatttatgaagaactt

SEQ ID NO: 52165 - DNA, 20 bp, Artificial Sequence
  Synthetic oligonucleotide; CAG chr11 5197308 5197327 5197311 -
acttcagaatctttacaatt

SEQ ID NO: 52166 - DNA, 20 bp, Artificial Sequence
  Synthetic oligonucleotide; AAG chr11 5197302 5197321 5197305 -
gaatctttacaattcagcca

SEQ ID NO: 52167 - DNA, 20 bp, Artificial Sequence
  Synthetic oligonucleotide; AGG chr11 5197301 5197320 5197304 -
aatctttacaattcagccaa

SEQ ID NO: 52168 - DNA, 20 bp, Artificial Sequence
  Synthetic oligonucleotide; GGG chr11 5197300 5197319 5197303 -
atctttacaattcagccaaa

SEQ ID NO: 52169 - DNA, 20 bp, Artificial Sequence
  Synthetic oligonucleotide; GAG chr11 5197298 5197317 5197301 -
ctttacaattcagccaaagg

SEQ ID NO: 52170 - DNA, 20 bp, Artificial Sequence
  Synthetic oligonucleotide; AGG chr11 5197297 5197316 5197300 -
tttacaattcagccaaaggg

SEQ ID NO: 52171 - DNA, 20 bp, Artificial Sequence
  Synthetic oligonucleotide; CAG chr11 5197289 5197308 5197292 -
tcagccaaagggaggaaaat

SEQ ID NO: 52172 - DNA, 20 bp, Artificial Sequence
  Synthetic oligonucleotide; AAG chr11 5197270 5197289 5197273 -
tcagtaaaaaaaaaaaaaaa

SEQ ID NO: 52173 - DNA, 20 bp, Artificial Sequence
  Synthetic oligonucleotide; AAG chr11 5197260 5197279 5197263 -
aaaaaaaaaaaagccaatga

SEQ ID NO: 52174 - DNA, 20 bp, Artificial Sequence
  Synthetic oligonucleotide; TGG chr11 5197239 5197258 5197242 -
agtaaactttatatgattac

SEQ ID NO: 52175 - DNA, 20 bp, Artificial Sequence
  Synthetic oligonucleotide; GGG chr11 5197238 5197257 5197241 -
gtaaactttatatgattact

SEQ ID NO: 52176 - DNA, 20 bp, Artificial Sequence
  Synthetic oligonucleotide; CAG chr11 5197228 5197247 5197231 -
tatgattactgggctttata

SEQ ID NO: 52177 - DNA, 20 bp, Artificial Sequence
  Synthetic oligonucleotide; AAG chr11 5197224 5197243 5197227 -
attactgggctttatacaga

SEQ ID NO: 52178 - DNA, 20 bp, Artificial Sequence
  Synthetic oligonucleotide; CAG chr11 5197218 5197237 5197221 -
gggctttatacagaaagaaa

SEQ ID NO: 52179 - DNA, 20 bp, Artificial Sequence
  Synthetic oligonucleotide; AGG chr11 5197217 5197236 5197220 -
ggctttatacagaaagaaac

SEQ ID NO: 52180 - DNA, 20 bp, Artificial Sequence
  Synthetic oligonucleotide; TAG chr11 5197212 5197231 5197215 -
tatacagaaagaaacaggtt

SEQ ID NO: 52181 - DNA, 20 bp, Artificial Sequence
  Synthetic oligonucleotide; TAG chr11 5197204 5197223 5197207 -
aagaaacaggtttagaacat

SEQ ID NO: 52182 - DNA, 20 bp, Artificial Sequence
  Synthetic oligonucleotide; TAG chr11 5197201 5197220 5197204 -
aaacaggtttagaacattag

SEQ ID NO: 52183 - DNA, 20 bp, Artificial Sequence
  Synthetic oligonucleotide; TAG chr11 5197196 5197215 5197199 -
ggtttagaacattagtagtt

SEQ ID NO: 52184 - DNA, 20 bp, Artificial Sequence
  Synthetic oligonucleotide; AAG chr11 5197178 5197197 5197181 -
tttagattgtttgttttgca

SEQ ID NO: 52185 - DNA, 20 bp, Artificial Sequence
  Synthetic oligonucleotide; AGG chr11 5197177 5197196 5197180 -
ttagattgtttgttttgcaa

SEQ ID NO: 52186 - DNA, 20 bp, Artificial Sequence
  Synthetic oligonucleotide; TGG chr11 5197166 5197185 5197169 -
gttttgcaaaggcctctatc

SEQ ID NO: 52187 - DNA, 20 bp, Artificial Sequence
  Synthetic oligonucleotide; AAG chr11 5197163 5197182 5197166 -
ttgcaaaggcctctatctgg

SEQ ID NO: 52188 - DNA, 20 bp, Artificial Sequence
  Synthetic oligonucleotide; GAG chr11 5197128 5197147 5197131 -
aaaataactaaacctctcct

SEQ ID NO: 52189 - DNA, 20 bp, Artificial Sequence
  Synthetic oligonucleotide; AGG chr11 5197127 5197146 5197130 -
aaataactaaacctctcctg

SEQ ID NO: 52190 - DNA, 20 bp, Artificial Sequence
  Synthetic oligonucleotide; AAG chr11 5197124 5197143 5197127 -
taactaaacctctcctgagg

SEQ ID NO: 52191 - DNA, 20 bp, Artificial Sequence
  Synthetic oligonucleotide; AAG chr11 5197119 5197138 5197122 -
aaacctctcctgaggaagaa

SEQ ID NO: 52192 - DNA, 20 bp, Artificial Sequence
  Synthetic oligonucleotide; AGG chr11 5197118 5197137 5197121 -
aacctctcctgaggaagaaa

SEQ ID NO: 52193 - DNA, 20 bp, Artificial Sequence
  Synthetic oligonucleotide; CAG chr11 5197109 5197128 5197112 -
tgaggaagaaaaggcaattt

SEQ ID NO: 52194 - DNA, 20 bp, Artificial Sequence
  Synthetic oligonucleotide; GAG chr11 5197107 5197126 5197110 -
aggaagaaaaggcaatttca

SEQ ID NO: 52195 - DNA, 20 bp, Artificial Sequence
  Synthetic oligonucleotide; CAG chr11 5197100 5197119 5197103 -
aaaggcaatttcagagacat

SEQ ID NO: 52196 - DNA, 20 bp, Artificial Sequence
  Synthetic oligonucleotide; CAG chr11 5197095 5197114 5197098 -
caatttcagagacatcagcc

SEQ ID NO: 52197 - DNA, 20 bp, Artificial Sequence
  Synthetic oligonucleotide; AGG chr11 5197094 5197113 5197097 -
aatttcagagacatcagccc

SEQ ID NO: 52198 - DNA, 20 bp, Artificial Sequence
  Synthetic oligonucleotide; AAG chr11 5197085 5197104 5197088 -
gacatcagcccaggtcctga

SEQ ID NO: 52199 - DNA, 20 bp, Artificial Sequence
  Synthetic oligonucleotide; AGG chr11 5197084 5197103 5197087 -
acatcagcccaggtcctgaa

SEQ ID NO: 52200 - DNA, 20 bp, Artificial Sequence
  Synthetic oligonucleotide; AAG chr11 5197081 5197100 5197084 -
tcagcccaggtcctgaaagg

SEQ ID NO: 52201 - DNA, 20 bp, Artificial Sequence
  Synthetic oligonucleotide; GAG chr11 5197079 5197098 5197082 -
agcccaggtcctgaaaggaa

SEQ ID NO: 52202 - DNA, 20 bp, Artificial Sequence
  Synthetic oligonucleotide; CAG chr11 5197076 5197095 5197079 -
ccaggtcctgaaaggaagag

SEQ ID NO: 52203 - DNA, 20 bp, Artificial Sequence
  Synthetic oligonucleotide; TGG chr11 5197072 5197091 5197075 -
gtcctgaaaggaagagcaga

SEQ ID NO: 52204 - DNA, 20 bp, Artificial Sequence
  Synthetic oligonucleotide; GAG chr11 5197070 5197089 5197073 -
cctgaaaggaagagcagatg

SEQ ID NO: 52205 - DNA, 20 bp, Artificial Sequence
  Synthetic oligonucleotide; CAG chr11 5197061 5197080 5197064 -
aagagcagatggagacatca

SEQ ID NO: 52206 - DNA, 20 bp, Artificial Sequence
  Synthetic oligonucleotide; AGG chr11 5197060 5197079 5197063 -
agagcagatggagacatcac

SEQ ID NO: 52207 - DNA, 20 bp, Artificial Sequence
  Synthetic oligonucleotide; AAG chr11 5197032 5197051 5197035 -
aaaacactgtctgttttgaa

SEQ ID NO: 52208 - DNA, 20 bp, Artificial Sequence
  Synthetic oligonucleotide; TAG chr11 5197024 5197043 5197027 -
gtctgttttgaaaagctaca

SEQ ID NO: 52209 - DNA, 20 bp, Artificial Sequence
  Synthetic oligonucleotide; TAG chr11 5197021 5197040 5197024 -
tgttttgaaaagctacatag

SEQ ID NO: 52210 - DNA, 20 bp, Artificial Sequence
  Synthetic oligonucleotide; CAG chr11 5197017 5197036 5197020 -
ttgaaaagctacatagtagc

SEQ ID NO: 52211 - DNA, 20 bp, Artificial Sequence
  Synthetic oligonucleotide; AGG chr11 5197016 5197035 5197019 -
tgaaaagctacatagtagcc

SEQ ID NO: 52212 - DNA, 20 bp, Artificial Sequence
  Synthetic oligonucleotide; TGG chr11 5197013 5197032 5197016 -
aaagctacatagtagccagg

SEQ ID NO: 52213 - DNA, 20 bp, Artificial Sequence
  Synthetic oligonucleotide; GAG chr11 5197011 5197030 5197014 -
agctacatagtagccaggtg

SEQ ID NO: 52214 - DNA, 20 bp, Artificial Sequence
  Synthetic oligonucleotide; AAG chr11 5196986 5197005 5196989 -
atttttccatatatctcaaa

SEQ ID NO: 52215 - DNA, 20 bp, Artificial Sequence
  Synthetic oligonucleotide; CAG chr11 5196982 5197001 5196985 -
ttccatatatctcaaaaagc

SEQ ID NO: 52216 - DNA, 20 bp, Artificial Sequence
  Synthetic oligonucleotide; AAG chr11 5196974 5196993 5196977 -
atctcaaaaagccagcttct

SEQ ID NO: 52217 - DNA, 20 bp, Artificial Sequence
  Synthetic oligonucleotide; AGG chr11 5196973 5196992 5196976 -
tctcaaaaagccagcttcta

SEQ ID NO: 52218 - DNA, 20 bp, Artificial Sequence
  Synthetic oligonucleotide; TAG chr11 5196951 5196970 5196954 -
gaaacttgttttccatgaat

SEQ ID NO: 52219 - DNA, 20 bp, Artificial Sequence
  Synthetic oligonucleotide; AGG chr11 5196950 5196969 5196953 -
aaacttgttttccatgaatt

SEQ ID NO: 52220 - DNA, 20 bp, Artificial Sequence
  Synthetic oligonucleotide; CAG chr11 5196941 5196960 5196944 -
ttccatgaattaggcaacaa

SEQ ID NO: 52221 - DNA, 20 bp, Artificial Sequence
  Synthetic oligonucleotide; TGG chr11 5196920 5196939 5196923 -
agctgaaactgttgttgatg

SEQ ID NO: 52222 - DNA, 20 bp, Artificial Sequence
  Synthetic oligonucleotide; TAG chr11 5196917 5196936 5196920 -
tgaaactgttgttgatgtgg

SEQ ID NO: 52223 - DNA, 20 bp, Artificial Sequence
  Synthetic oligonucleotide; CAG chr11 5196910 5196929 5196913 -
gttgttgatgtggtagcctg

SEQ ID NO: 52224 - DNA, 20 bp, Artificial Sequence
  Synthetic oligonucleotide; GAG chr11 5196908 5196927 5196911 -
tgttgatgtggtagcctgca

SEQ ID NO: 52225 - DNA, 20 bp, Artificial Sequence
  Synthetic oligonucleotide; CAG chr11 5196904 5196923 5196907 -
gatgtggtagcctgcagagc

SEQ ID NO: 52226 - DNA, 20 bp, Artificial Sequence
  Synthetic oligonucleotide; GAG chr11 5196900 5196919 5196903 -
tggtagcctgcagagccagt

SEQ ID NO: 52227 - DNA, 20 bp, Artificial Sequence
  Synthetic oligonucleotide; AAG chr11 5196897 5196916 5196900 -
tagcctgcagagccagtgag

SEQ ID NO: 52228 - DNA, 20 bp, Artificial Sequence
  Synthetic oligonucleotide; CAG chr11 5196894 5196913 5196897 -
cctgcagagccagtgagaag

SEQ ID NO: 52229 - DNA, 20 bp, Artificial Sequence
  Synthetic oligonucleotide; CAG chr11 5196887 5196906 5196890 -
agccagtgagaagcagttat

SEQ ID NO: 52230 - DNA, 20 bp, Artificial Sequence
  Synthetic oligonucleotide; AAG chr11 5196874 5196893 5196877 -
cagttatcagattcctttgt

SEQ ID NO: 52231 - DNA, 20 bp, Artificial Sequence
  Synthetic oligonucleotide; AGG chr11 5196873 5196892 5196876 -
agttatcagattcctttgta

SEQ ID NO: 52232 - DNA, 20 bp, Artificial Sequence
  Synthetic oligonucleotide; AAG chr11 5196865 5196884 5196868 -
gattcctttgtaaggcctgc

SEQ ID NO: 52233 - DNA, 20 bp, Artificial Sequence
  Synthetic oligonucleotide; AGG chr11 5196864 5196883 5196867 -
attcctttgtaaggcctgca

SEQ ID NO: 52234 - DNA, 20 bp, Artificial Sequence
  Synthetic oligonucleotide; CAG chr11 5196853 5196872 5196856 -
aggcctgcaaggctactatc

SEQ ID NO: 52235 - DNA, 20 bp, Artificial Sequence
  Synthetic oligonucleotide; GAG chr11 5196843 5196862 5196846 -
ggctactatccagcgtcact

SEQ ID NO: 52236 - DNA, 20 bp, Artificial Sequence
  Synthetic oligonucleotide; CAG chr11 5196826 5196845 5196829 -
actgagaaacgttacgaaaa

SEQ ID NO: 52237 - DNA, 20 bp, Artificial Sequence
  Synthetic oligonucleotide; CAG chr11 5196820 5196839 5196823 -
aaacgttacgaaaacagcca

SEQ ID NO: 52238 - DNA, 20 bp, Artificial Sequence
  Synthetic oligonucleotide; TAG chr11 5196811 5196830 5196814 -
gaaaacagccacagtgatgt

SEQ ID NO: 52239 - DNA, 20 bp, Artificial Sequence
  Synthetic oligonucleotide; AGG chr11 5196810 5196829 5196813 -
aaaacagccacagtgatgtt

SEQ ID NO: 52240 - DNA, 20 bp, Artificial Sequence
  Synthetic oligonucleotide; GGG chr11 5196809 5196828 5196812 -
aaacagccacagtgatgtta

SEQ ID NO: 52241 - DNA, 20 bp, Artificial Sequence
  Synthetic oligonucleotide; CAG chr11 5196801 5196820 5196804 -
acagtgatgttagggaaaca

SEQ ID NO: 52242 - DNA, 20 bp, Artificial Sequence
  Synthetic oligonucleotide; TAG chr11 5196773 5196792 5196776 -
ttttgcctttttttttttaa

SEQ ID NO: 52243 - DNA, 20 bp, Artificial Sequence
  Synthetic oligonucleotide; AGG chr11 5196772 5196791 5196775 -
tttgcctttttttttttaat

SEQ ID NO: 52244 - DNA, 20 bp, Artificial Sequence
  Synthetic oligonucleotide; TAG chr11 5196769 5196788 5196772 -
gcctttttttttttaatagg

SEQ ID NO: 52245 - DNA, 20 bp, Artificial Sequence
  Synthetic oligonucleotide; AAG chr11 5196733 5196752 5196736 -
tgtaactgctgccttaaatg

SEQ ID NO: 52246 - DNA, 20 bp, Artificial Sequence
  Synthetic oligonucleotide; CGG chr11 5196727 5196746 5196730 -
tgctgccttaaatgaagtca

SEQ ID NO: 52247 - DNA, 20 bp, Artificial Sequence
  Synthetic oligonucleotide; AAG chr11 5196714 5196733 5196717 -
gaagtcacggttattataat

SEQ ID NO: 52248 - DNA, 20 bp, Artificial Sequence
  Synthetic oligonucleotide; AGG chr11 5196713 5196732 5196716 -
aagtcacggttattataata

SEQ ID NO: 52249 - DNA, 20 bp, Artificial Sequence
  Synthetic oligonucleotide; GAG chr11 5196711 5196730 5196714 -
gtcacggttattataataag

SEQ ID NO: 52250 - DNA, 20 bp, Artificial Sequence
  Synthetic oligonucleotide; GAG chr11 5196691 5196710 5196694 -
gagaaaacaaaaatattgcc

SEQ ID NO: 52251 - DNA, 20 bp, Artificial Sequence
  Synthetic oligonucleotide; AAG chr11 5196685 5196704 5196688 -
acaaaaatattgccgagaac

SEQ ID NO: 52252 - DNA, 20 bp, Artificial Sequence
  Synthetic oligonucleotide; AGG chr11 5196684 5196703 5196687 -
caaaaatattgccgagaaca

SEQ ID NO: 52253 - DNA, 20 bp, Artificial Sequence
  Synthetic oligonucleotide; AAG chr11 5196675 5196694 5196678 -
tgccgagaacaaggtgacaa

SEQ ID NO: 52254 - DNA, 20 bp, Artificial Sequence
  Synthetic oligonucleotide; AAG chr11 5196671 5196690 5196674 -
gagaacaaggtgacaaaagt

SEQ ID NO: 52255 - DNA, 20 bp, Artificial Sequence
  Synthetic oligonucleotide; CAG chr11 5196665 5196684 5196668 -
aaggtgacaaaagtaagatt

SEQ ID NO: 52256 - DNA, 20 bp, Artificial Sequence
  Synthetic oligonucleotide; CAG chr11 5196657 5196676 5196660 -
aaaagtaagattcagaaaat

SEQ ID NO: 52257 - DNA, 20 bp, Artificial Sequence
  Synthetic oligonucleotide; AAG chr11 5196653 5196672 5196656 -
gtaagattcagaaaatcaga

SEQ ID NO: 52258 - DNA, 20 bp, Artificial Sequence
  Synthetic oligonucleotide; TAG chr11 5196648 5196667 5196651 -
attcagaaaatcagaaagtc

SEQ ID NO: 52259 - DNA, 20 bp, Artificial Sequence
  Synthetic oligonucleotide; AAG chr11 5196608 5196627 5196611 -
catttaactcttacaccgaa

SEQ ID NO: 52260 - DNA, 20 bp, Artificial Sequence
  Synthetic oligonucleotide; AAG chr11 5196603 5196622 5196606 -
aactcttacaccgaaaagct

SEQ ID NO: 52261 - DNA, 20 bp, Artificial Sequence
  Synthetic oligonucleotide; AGG chr11 5196602 5196621 5196605 -
actcttacaccgaaaagcta

SEQ ID NO: 52262 - DNA, 20 bp, Artificial Sequence
  Synthetic oligonucleotide; CAG chr11 5196597 5196616 5196600 -
tacaccgaaaagctaaggtc

SEQ ID NO: 52263 - DNA, 20 bp, Artificial Sequence
  Synthetic oligonucleotide; TGG chr11 5196594 5196613 5196597 -
accgaaaagctaaggtccag

SEQ ID NO: 52264 - DNA, 20 bp, Artificial Sequence
  Synthetic oligonucleotide; GGG chr11 5196593 5196612 5196596 -
ccgaaaagctaaggtccagt

SEQ ID NO: 52265 - DNA, 20 bp, Artificial Sequence
  Synthetic oligonucleotide; GAG chr11 5196591 5196610 5196594 -
gaaaagctaaggtccagtgg

SEQ ID NO: 52266 - DNA, 20 bp, Artificial Sequence
  Synthetic oligonucleotide; CAG chr11 5196584 5196603 5196587 -
taaggtccagtgggagaaat

SEQ ID NO: 52267 - DNA, 20 bp, Artificial Sequence
  Synthetic oligonucleotide; TAG chr11 5196574 5196593 5196577 -
tgggagaaatcagtgattct

SEQ ID NO: 52268 - DNA, 20 bp, Artificial Sequence
  Synthetic oligonucleotide; AAG chr11 5196571 5196590 5196574 -
gagaaatcagtgattcttag

SEQ ID NO: 52269 - DNA, 20 bp, Artificial Sequence
  Synthetic oligonucleotide; GAG chr11 5196567 5196586 5196570 -
aatcagtgattcttagaagt

SEQ ID NO: 52270 - DNA, 20 bp, Artificial Sequence
  Synthetic oligonucleotide; GAG chr11 5196565 5196584 5196568 -
tcagtgattcttagaagtga

SEQ ID NO: 52271 - DNA, 20 bp, Artificial Sequence
  Synthetic oligonucleotide; AGG chr11 5196564 5196583 5196567 -
cagtgattcttagaagtgag

SEQ ID NO: 52272 - DNA, 20 bp, Artificial Sequence
  Synthetic oligonucleotide; CAG chr11 5196553 5196572 5196556 -
agaagtgagaggacatgatt

SEQ ID NO: 52273 - DNA, 20 bp, Artificial Sequence
  Synthetic oligonucleotide; AGG chr11 5196552 5196571 5196555 -
gaagtgagaggacatgattc

SEQ ID NO: 52274 - DNA, 20 bp, Artificial Sequence
  Synthetic oligonucleotide; TAG chr11 5196547 5196566 5196550 -
gagaggacatgattcaggat

SEQ ID NO: 52275 - DNA, 20 bp, Artificial Sequence
  Synthetic oligonucleotide; TAG chr11 5196533 5196552 5196536 -
caggattagaaatgtgtttt

SEQ ID NO: 52276 - DNA, 20 bp, Artificial Sequence
  Synthetic oligonucleotide; CAG chr11 5196502 5196521 5196505 -
atctgctaataataaatcca

SEQ ID NO: 52277 - DNA, 20 bp, Artificial Sequence
  Synthetic oligonucleotide; AGG chr11 5196501 5196520 5196504 -
tctgctaataataaatccac

SEQ ID NO: 52278 - DNA, 20 bp, Artificial Sequence
  Synthetic oligonucleotide; CAG chr11 5196498 5196517 5196501 -
gctaataataaatccacagg

SEQ ID NO: 52279 - DNA, 20 bp, Artificial Sequence
  Synthetic oligonucleotide; CAG chr11 5196480 5196499 5196483 -
ggcagatgttcactgtacac

SEQ ID NO: 52280 - DNA, 20 bp, Artificial Sequence
  Synthetic oligonucleotide; CAG chr11 5196477 5196496 5196480 -
agatgttcactgtacaccag

SEQ ID NO: 52281 - DNA, 20 bp, Artificial Sequence
  Synthetic oligonucleotide; TGG chr11 5196461 5196480 5196464 -
ccagcagtcttcaatgtttt

SEQ ID NO: 52282 - DNA, 20 bp, Artificial Sequence
  Synthetic oligonucleotide; CAG chr11 5196455 5196474 5196458 -
gtcttcaatgtttttggtac

SEQ ID NO: 52283 - DNA, 20 bp, Artificial Sequence
  Synthetic oligonucleotide; AGG chr11 5196454 5196473 5196457 -
tcttcaatgtttttggtacc

SEQ ID NO: 52284 - DNA, 20 bp, Artificial Sequence
  Synthetic oligonucleotide; GGG chr11 5196453 5196472 5196456 -
cttcaatgtttttggtacca

SEQ ID NO: 52285 - DNA, 20 bp, Artificial Sequence
  Synthetic oligonucleotide; TGG chr11 5196440 5196459 5196443 -
ggtaccagggactgcttttg

SEQ ID NO: 52286 - DNA, 20 bp, Artificial Sequence
  Synthetic oligonucleotide; AAG chr11 5196437 5196456 5196440 -
accagggactgcttttgtgg

SEQ ID NO: 52287 - DNA, 20 bp, Artificial Sequence
  Synthetic oligonucleotide; AAG chr11 5196432 5196451 5196435 -
ggactgcttttgtggaagac

SEQ ID NO: 52288 - DNA, 20 bp, Artificial Sequence
  Synthetic oligonucleotide; AGG chr11 5196431 5196450 5196434 -
gactgcttttgtggaagaca

SEQ ID NO: 52289 - DNA, 20 bp, Artificial Sequence
  Synthetic oligonucleotide; CAG chr11 5196426 5196445 5196429 -
cttttgtggaagacaaggtg

SEQ ID NO: 52290 - DNA, 20 bp, Artificial Sequence
  Synthetic oligonucleotide; AGG chr11 5196425 5196444 5196428 -
ttttgtggaagacaaggtgc

SEQ ID NO: 52291 - DNA, 20 bp, Artificial Sequence
  Synthetic oligonucleotide; GAG chr11 5196423 5196442 5196426 -
ttgtggaagacaaggtgcag

SEQ ID NO: 52292 - DNA, 20 bp, Artificial Sequence
  Synthetic oligonucleotide; AGG chr11 5196422 5196441 5196425 -
tgtggaagacaaggtgcagg

SEQ ID NO: 52293 - DNA, 20 bp, Artificial Sequence
  Synthetic oligonucleotide; GGG chr11 5196421 5196440 5196424 -
gtggaagacaaggtgcagga

SEQ ID NO: 52294 - DNA, 20 bp, Artificial Sequence
  Synthetic oligonucleotide; TGG chr11 5196416 5196435 5196419 -
agacaaggtgcaggagggca

SEQ ID NO: 52295 - DNA, 20 bp, Artificial Sequence
  Synthetic oligonucleotide; CAG chr11 5196410 5196429 5196413 -
ggtgcaggagggcatggttt

SEQ ID NO: 52296 - DNA, 20 bp, Artificial Sequence
  Synthetic oligonucleotide; AGG chr11 5196409 5196428 5196412 -
gtgcaggagggcatggtttc

SEQ ID NO: 52297 - DNA, 20 bp, Artificial Sequence
  Synthetic oligonucleotide; CAG chr11 5196389 5196408 5196392 -
aggatgaaactgttccacct

SEQ ID NO: 52298 - DNA, 20 bp, Artificial Sequence
  Synthetic oligonucleotide; GAG chr11 5196387 5196406 5196390 -
gatgaaactgttccacctca

SEQ ID NO: 52299 - DNA, 20 bp, Artificial Sequence
  Synthetic oligonucleotide; TAG chr11 5196381 5196400 5196384 -
actgttccacctcagagcat

SEQ ID NO: 52300 - DNA, 20 bp, Artificial Sequence
  Synthetic oligonucleotide; AGG chr11 5196380 5196399 5196383 -
ctgttccacctcagagcatt

SEQ ID NO: 52301 - DNA, 20 bp, Artificial Sequence
  Synthetic oligonucleotide; TAG chr11 5196374 5196393 5196377 -
cacctcagagcattaggcat

SEQ ID NO: 52302 - DNA, 20 bp, Artificial Sequence
  Synthetic oligonucleotide; AAG chr11 5196363 5196382 5196366 -
attaggcattagattctcat

SEQ ID NO: 52303 - DNA, 20 bp, Artificial Sequence
  Synthetic oligonucleotide; AAG chr11 5196360 5196379 5196363 -
aggcattagattctcataag

SEQ ID NO: 52304 - DNA, 20 bp, Artificial Sequence
  Synthetic oligonucleotide; TAG chr11 5196349 5196368 5196352 -
tctcataagaagccgcaacc

SEQ ID NO: 52305 - DNA, 20 bp, Artificial Sequence
  Synthetic oligonucleotide; GAG chr11 5196327 5196346 5196330 -
gatcccttgcatgcctctat

SEQ ID NO: 52306 - DNA, 20 bp, Artificial Sequence
  Synthetic oligonucleotide; CAG chr11 5196297 5196316 5196300 -
tgccgccactgccgatgtga

SEQ ID NO: 52307 - DNA, 20 bp, Artificial Sequence
  Synthetic oligonucleotide; AGG chr11 5196296 5196315 5196299 -
gccgccactgccgatgtgac

SEQ ID NO: 52308 - DNA, 20 bp, Artificial Sequence
  Synthetic oligonucleotide; GAG chr11 5196294 5196313 5196297 -
cgccactgccgatgtgacag

SEQ ID NO: 52309 - DNA, 20 bp, Artificial Sequence
  Synthetic oligonucleotide; AGG chr11 5196293 5196312 5196296 -
gccactgccgatgtgacagg

SEQ ID NO: 52310 - DNA, 20 bp, Artificial Sequence
  Synthetic oligonucleotide; GAG chr11 5196291 5196310 5196294 -
cactgccgatgtgacaggag

SEQ ID NO: 52311 - DNA, 20 bp, Artificial Sequence
  Synthetic oligonucleotide; AGG chr11 5196290 5196309 5196293 -
actgccgatgtgacaggagg

SEQ ID NO: 52312 - DNA, 20 bp, Artificial Sequence
  Synthetic oligonucleotide; GAG chr11 5196288 5196307 5196291 -
tgccgatgtgacaggaggag

SEQ ID NO: 52313 - DNA, 20 bp, Artificial Sequence
  Synthetic oligonucleotide; CAG chr11 5196283 5196302 5196286 -
atgtgacaggaggaggagct

SEQ ID NO: 52314 - DNA, 20 bp, Artificial Sequence
  Synthetic oligonucleotide; AGG chr11 5196282 5196301 5196285 -
tgtgacaggaggaggagctc

SEQ ID NO: 52315 - DNA, 20 bp, Artificial Sequence
  Synthetic oligonucleotide; CAG chr11 5196279 5196298 5196282 -
gacaggaggaggagctcagg

SEQ ID NO: 52316 - DNA, 20 bp, Artificial Sequence
  Synthetic oligonucleotide; GAG chr11 5196251 5196270 5196254 -
cttgctcatccccctgctgt

SEQ ID NO: 52317 - DNA, 20 bp, Artificial Sequence
  Synthetic oligonucleotide; CAG chr11 5196246 5196265 5196249 -
tcatccccctgctgtgagac

SEQ ID NO: 52318 - DNA, 20 bp, Artificial Sequence
  Synthetic oligonucleotide; AGG chr11 5196245 5196264 5196248 -
catccccctgctgtgagacc

SEQ ID NO: 52319 - DNA, 20 bp, Artificial Sequence
  Synthetic oligonucleotide; TAG chr11 5196238 5196257 5196241 -
ctgctgtgagaccaggttcc

SEQ ID NO: 52320 - DNA, 20 bp, Artificial Sequence
  Synthetic oligonucleotide; CAG chr11 5196235 5196254 5196238 -
ctgtgagaccaggttcctag

SEQ ID NO: 52321 - DNA, 20 bp, Artificial Sequence
  Synthetic oligonucleotide; AGG chr11 5196234 5196253 5196237 -
tgtgagaccaggttcctagc

SEQ ID NO: 52322 - DNA, 20 bp, Artificial Sequence
  Synthetic oligonucleotide; CGG chr11 5196228 5196247 5196231 -
accaggttcctagcaggcca

SEQ ID NO: 52323 - DNA, 20 bp, Artificial Sequence
  Synthetic oligonucleotide; CAG chr11 5196223 5196242 5196226 -
gttcctagcaggccacggac

SEQ ID NO: 52324 - DNA, 20 bp, Artificial Sequence
  Synthetic oligonucleotide; TGG chr11 5196217 5196236 5196220 -
agcaggccacggaccagtac

SEQ ID NO: 52325 - DNA, 20 bp, Artificial Sequence
  Synthetic oligonucleotide; AAG chr11 5196213 5196232 5196216 -
ggccacggaccagtactggt

SEQ ID NO: 52326 - DNA, 20 bp, Artificial Sequence
  Synthetic oligonucleotide; TGG chr11 5196210 5196229 5196213 -
cacggaccagtactggtaag

SEQ ID NO: 52327 - DNA, 20 bp, Artificial Sequence
  Synthetic oligonucleotide; CAG chr11 5196206 5196225 5196209 -
gaccagtactggtaagtggc

SEQ ID NO: 52328 - DNA, 20 bp, Artificial Sequence
  Synthetic oligonucleotide; AGG chr11 5196205 5196224 5196208 -
accagtactggtaagtggcc

SEQ ID NO: 52329 - DNA, 20 bp, Artificial Sequence
  Synthetic oligonucleotide; TAG chr11 5196172 5196191 5196175 -
actatacctccctattttcc

SEQ ID NO: 52330 - DNA, 20 bp, Artificial Sequence
  Synthetic oligonucleotide; AGG chr11 5196171 5196190 5196174 -
ctatacctccctattttcct

SEQ ID NO: 52331 - DNA, 20 bp, Artificial Sequence
  Synthetic oligonucleotide; CAG chr11 5196145 5196164 5196148 -
atcaaaatcgtattgttaaa

SEQ ID NO: 52332 - DNA, 20 bp, Artificial Sequence
  Synthetic oligonucleotide; AAG chr11 5196138 5196157 5196141 -
tcgtattgttaaacagactt

SEQ ID NO: 52333 - DNA, 20 bp, Artificial Sequence
  Synthetic oligonucleotide; GAG chr11 5196136 5196155 5196139 -
gtattgttaaacagacttaa

SEQ ID NO: 52334 - DNA, 20 bp, Artificial Sequence
  Synthetic oligonucleotide; GAG chr11 5196122 5196141 5196125 -
acttaagagatgttctactt

SEQ ID NO: 52335 - DNA, 20 bp, Artificial Sequence
  Synthetic oligonucleotide; AGG chr11 5196121 5196140 5196124 -
cttaagagatgttctacttg

SEQ ID NO: 52336 - DNA, 20 bp, Artificial Sequence
  Synthetic oligonucleotide; TAG chr11 5196102 5196121 5196105 -
gaggttgtgtctccattccc

SEQ ID NO: 52337 - DNA, 20 bp, Artificial Sequence
  Synthetic oligonucleotide; AGG chr11 5196101 5196120 5196104 -
aggttgtgtctccattccct

SEQ ID NO: 52338 - DNA, 20 bp, Artificial Sequence
  Synthetic oligonucleotide; CAG chr11 5196078 5196097 5196081 -
atatttgttaccattacttg

SEQ ID NO: 52339 - DNA, 20 bp, Artificial Sequence
  Synthetic oligonucleotide; AAG chr11 5196075 5196094 5196078 -
tttgttaccattacttgcag

SEQ ID NO: 52340 - DNA, 20 bp, Artificial Sequence
  Synthetic oligonucleotide; TAG chr11 5196064 5196083 5196067 -
tacttgcagaagataattgc

SEQ ID NO: 52341 - DNA, 20 bp, Artificial Sequence
  Synthetic oligonucleotide; GAG chr11 5196062 5196081 5196065 -
cttgcagaagataattgcta

SEQ ID NO: 52342 - DNA, 20 bp, Artificial Sequence
  Synthetic oligonucleotide; TAG chr11 5196059 5196078 5196062 -
gcagaagataattgctagag

SEQ ID NO: 52343 - DNA, 20 bp, Artificial Sequence
  Synthetic oligonucleotide; TAG chr11 5196052 5196071 5196055 -
ataattgctagagtagtgaa

SEQ ID NO: 52344 - DNA, 20 bp, Artificial Sequence
  Synthetic oligonucleotide; GAG chr11 5196050 5196069 5196053 -
aattgctagagtagtgaata

SEQ ID NO: 52345 - DNA, 20 bp, Artificial Sequence
  Synthetic oligonucleotide; AGG chr11 5196049 5196068 5196052 -
attgctagagtagtgaatag

SEQ ID NO: 52346 - DNA, 20 bp, Artificial Sequence
  Synthetic oligonucleotide; CAG chr11 5196042 5196061 5196045 -
gagtagtgaatagaggcctc

SEQ ID NO: 52347 - DNA, 20 bp, Artificial Sequence
  Synthetic oligonucleotide; AAG chr11 5196036 5196055 5196039 -
tgaatagaggcctccagatg

SEQ ID NO: 52348 - DNA, 20 bp, Artificial Sequence
  Synthetic oligonucleotide; AGG chr11 5196035 5196054 5196038 -
gaatagaggcctccagatga

SEQ ID NO: 52349 - DNA, 20 bp, Artificial Sequence
  Synthetic oligonucleotide; TAG chr11 5196023 5196042 5196026 -
ccagatgaaggaaataaaaa

SEQ ID NO: 52350 - DNA, 20 bp, Artificial Sequence
  Synthetic oligonucleotide; CAG chr11 5196010 5196029 5196013 -
ataaaaatagtccattttcc

SEQ ID NO: 52351 - DNA, 20 bp, Artificial Sequence
  Synthetic oligonucleotide; AAG chr11 5196007 5196026 5196010 -
aaaatagtccattttcccag

SEQ ID NO: 52352 - DNA, 20 bp, Artificial Sequence
  Synthetic oligonucleotide; CAG chr11 5195997 5196016 5196000 -
attttcccagaagtctcttg

SEQ ID NO: 52353 - DNA, 20 bp, Artificial Sequence
  Synthetic oligonucleotide; TAG chr11 5195971 5195990 5195974 -
cttaaaaattaatgccaacc

SEQ ID NO: 52354 - DNA, 20 bp, Artificial Sequence
  Synthetic oligonucleotide; AAG chr11 5195966 5195985 5195969 -
aaattaatgccaacctagcc

SEQ ID NO: 52355 - DNA, 20 bp, Artificial Sequence
  Synthetic oligonucleotide; CAG chr11 5195953 5195972 5195956 -
cctagccaagaacacccctg

SEQ ID NO: 52356 - DNA, 20 bp, Artificial Sequence
  Synthetic oligonucleotide; TAG chr11 5195950 5195969 5195953 -
agccaagaacacccctgcag

SEQ ID NO: 52357 - DNA, 20 bp, Artificial Sequence
  Synthetic oligonucleotide; AGG chr11 5195949 5195968 5195952 -
gccaagaacacccctgcagt

SEQ ID NO: 52358 - DNA, 20 bp, Artificial Sequence
  Synthetic oligonucleotide; GAG chr11 5195947 5195966 5195950 -
caagaacacccctgcagtag

SEQ ID NO: 52359 - DNA, 20 bp, Artificial Sequence
  Synthetic oligonucleotide; AAG chr11 5195933 5195952 5195936 -
cagtaggagtcgatgtccta

SEQ ID NO: 52360 - DNA, 20 bp, Artificial Sequence
  Synthetic oligonucleotide; CAG chr11 5195924 5195943 5195927 -
tcgatgtcctaaagcttttc

SEQ ID NO: 52361 - DNA, 20 bp, Artificial Sequence
  Synthetic oligonucleotide; AAG chr11 5195918 5195937 5195921 -
tcctaaagcttttccagtaa

SEQ ID NO: 52362 - DNA, 20 bp, Artificial Sequence
  Synthetic oligonucleotide; TGG chr11 5195913 5195932 5195916 -
aagcttttccagtaaaagtg

SEQ ID NO: 52363 - DNA, 20 bp, Artificial Sequence
  Synthetic oligonucleotide; CAG chr11 5195898 5195917 5195901 -
aagtgtggtttctgcccctg

SEQ ID NO: 52364 - DNA, 20 bp, Artificial Sequence
  Synthetic oligonucleotide; TGG chr11 5195892 5195911 5195895 -
ggtttctgcccctgcagtct

SEQ ID NO: 52365 - DNA, 20 bp, Artificial Sequence
  Synthetic oligonucleotide; TGG chr11 5195879 5195898 5195882 -
gcagtcttggcaccatgtaa

SEQ ID NO: 52366 - DNA, 20 bp, Artificial Sequence
  Synthetic oligonucleotide; TAG chr11 5195872 5195891 5195875 -
tggcaccatgtaatggcaca

SEQ ID NO: 52367 - DNA, 20 bp, Artificial Sequence
  Synthetic oligonucleotide; CAG chr11 5195863 5195882 5195866 -
gtaatggcacatagaaaatg

SEQ ID NO: 52368 - DNA, 20 bp, Artificial Sequence
  Synthetic oligonucleotide; AGG chr11 5195862 5195881 5195865 -
taatggcacatagaaaatgc

SEQ ID NO: 52369 - DNA, 20 bp, Artificial Sequence
  Synthetic oligonucleotide; CAG chr11 5195855 5195874 5195858 -
acatagaaaatgcaggcttt

SEQ ID NO: 52370 - DNA, 20 bp, Artificial Sequence
  Synthetic oligonucleotide; AGG chr11 5195854 5195873 5195857 -
catagaaaatgcaggctttc

SEQ ID NO: 52371 - DNA, 20 bp, Artificial Sequence
  Synthetic oligonucleotide; CAG chr11 5195848 5195867 5195851 -
aaatgcaggctttcaggttg

SEQ ID NO: 52372 - DNA, 20 bp, Artificial Sequence
  Synthetic oligonucleotide; CAG chr11 5195844 5195863 5195847 -
gcaggctttcaggttgcagc

SEQ ID NO: 52373 - DNA, 20 bp, Artificial Sequence
  Synthetic oligonucleotide; GAG chr11 5195837 5195856 5195840 -
ttcaggttgcagccagaact

SEQ ID NO: 52374 - DNA, 20 bp, Artificial Sequence
  Synthetic oligonucleotide; AGG chr11 5195836 5195855 5195839 -
tcaggttgcagccagaactg

SEQ ID NO: 52375 - DNA, 20 bp, Artificial Sequence
  Synthetic oligonucleotide; CGG chr11 5195826 5195845 5195829 -
gccagaactgaggaatcaat

SEQ ID NO: 52376 - DNA, 20 bp, Artificial Sequence
  Synthetic oligonucleotide; TAG chr11 5195819 5195838 5195822 -
ctgaggaatcaatcggtgtt

SEQ ID NO: 52377 - DNA, 20 bp, Artificial Sequence
  Synthetic oligonucleotide; GAG chr11 5195811 5195830 5195814 -
tcaatcggtgtttagctttt

SEQ ID NO: 52378 - DNA, 20 bp, Artificial Sequence
  Synthetic oligonucleotide; TGG chr11 5195804 5195823 5195807 -
gtgtttagcttttgagatgc

SEQ ID NO: 52379 - DNA, 20 bp, Artificial Sequence
  Synthetic oligonucleotide; TGG chr11 5195786 5195805 5195789 -
gctggtaatgttctctttct

SEQ ID NO: 52380 - DNA, 20 bp, Artificial Sequence
  Synthetic oligonucleotide; GAG chr11 5195780 5195799 5195783 -
aatgttctctttcttggtct

SEQ ID NO: 52381 - DNA, 20 bp, Artificial Sequence
  Synthetic oligonucleotide; AAG chr11 5195767 5195786 5195770 -
ttggtctgagtgtttgttaa

SEQ ID NO: 52382 - DNA, 20 bp, Artificial Sequence
  Synthetic oligonucleotide; AAG chr11 5195683 5195702 5195686 -
gaataataaaatataaattt

SEQ ID NO: 52383 - DNA, 20 bp, Artificial Sequence
  Synthetic oligonucleotide; GAG chr11 5195674 5195693 5195677 -
aatataaatttaagaaatat

SEQ ID NO: 52384 - DNA, 20 bp, Artificial Sequence
  Synthetic oligonucleotide; AAG chr11 5195668 5195687 5195671 -
aatttaagaaatatgagtga

SEQ ID NO: 52385 - DNA, 20 bp, Artificial Sequence
  Synthetic oligonucleotide; TGG chr11 5195645 5195664 5195648 -
tgtcaatttacatataaacc

SEQ ID NO: 52386 - DNA, 20 bp, Artificial Sequence
  Synthetic oligonucleotide; CAG chr11 5195642 5195661 5195645 -
caatttacatataaacctgg

SEQ ID NO: 52387 - DNA, 20 bp, Artificial Sequence
  Synthetic oligonucleotide; AAG chr11 5195597 5195616 5195600 -
ctactttctctaatccacta

SEQ ID NO: 52388 - DNA, 20 bp, Artificial Sequence
  Synthetic oligonucleotide; TAG chr11 5195591 5195610 5195594 -
tctctaatccactaaagcta

SEQ ID NO: 52389 - DNA, 20 bp, Artificial Sequence
  Synthetic oligonucleotide; CAG chr11 5195581 5195600 5195584 -
actaaagctatagatgtaca

SEQ ID NO: 52390 - DNA, 20 bp, Artificial Sequence
  Synthetic oligonucleotide; GAG chr11 5195579 5195598 5195582 -
taaagctatagatgtacaca

SEQ ID NO: 52391 - DNA, 20 bp, Artificial Sequence
  Synthetic oligonucleotide; AAG chr11 5195568 5195587 5195571 -
atgtacacagagacactgtg

SEQ ID NO: 52392 - DNA, 20 bp, Artificial Sequence
  Synthetic oligonucleotide; TAG chr11 5195561 5195580 5195564 -
cagagacactgtgaagaaaa

SEQ ID NO: 52393 - DNA, 20 bp, Artificial Sequence
  Synthetic oligonucleotide; AAG chr11 5195534 5195553 5195537 -
atatgtatgaacaaattgat

SEQ ID NO: 52394 - DNA, 20 bp, Artificial Sequence
  Synthetic oligonucleotide; CAG chr11 5195500 5195519 5195503 -
aaatatgattttttaaaaaa

SEQ ID NO: 52395 - DNA, 20 bp, Artificial Sequence
  Synthetic oligonucleotide; CAG chr11 5195495 5195514 5195498 -
tgattttttaaaaaacagaa

SEQ ID NO: 52396 - DNA, 20 bp, Artificial Sequence
  Synthetic oligonucleotide; AGG chr11 5195494 5195513 5195497 -
gattttttaaaaaacagaac

SEQ ID NO: 52397 - DNA, 20 bp, Artificial Sequence
  Synthetic oligonucleotide; CAG chr11 5195468 5195487 5195471 -
atctgaaatctatatgtcta

SEQ ID NO: 52398 - DNA, 20 bp, Artificial Sequence
  Synthetic oligonucleotide; AAG chr11 5195463 5195482 5195466 -
aaatctatatgtctacagaa

SEQ ID NO: 52399 - DNA, 20 bp, Artificial Sequence
  Synthetic oligonucleotide; AGG chr11 5195462 5195481 5195465 -
aatctatatgtctacagaaa

SEQ ID NO: 52400 - DNA, 20 bp, Artificial Sequence
  Synthetic oligonucleotide; GAG chr11 5195451 5195470 5195454 -
ctacagaaaaggataccaat

SEQ ID NO: 52401 - DNA, 20 bp, Artificial Sequence
  Synthetic oligonucleotide; AAG chr11 5195431 5195450 5195434 -
gagaaaaaacgttatctgca

SEQ ID NO: 52402 - DNA, 20 bp, Artificial Sequence
  Synthetic oligonucleotide; GAG chr11 5195429 5195448 5195432 -
gaaaaaacgttatctgcaaa

SEQ ID NO: 52403 - DNA, 20 bp, Artificial Sequence
  Synthetic oligonucleotide; TGG chr11 5195419 5195438 5195422 -
tatctgcaaagagcattttc

SEQ ID NO: 52404 - DNA, 20 bp, Artificial Sequence
  Synthetic oligonucleotide; CAG chr11 5195409 5195428 5195412 -
gagcattttctggaaaaaca

SEQ ID NO: 52405 - DNA, 20 bp, Artificial Sequence
  Synthetic oligonucleotide; AAG chr11 5195394 5195413 5195397 -
aaacacagaaattacttata

SEQ ID NO: 52406 - DNA, 20 bp, Artificial Sequence
  Synthetic oligonucleotide; GAG chr11 5195384 5195403 5195387 -
attacttataaagcattcgt

SEQ ID NO: 52407 - DNA, 20 bp, Artificial Sequence
  Synthetic oligonucleotide; AGG chr11 5195383 5195402 5195386 -
ttacttataaagcattcgtg

SEQ ID NO: 52408 - DNA, 20 bp, Artificial Sequence
  Synthetic oligonucleotide; GGG chr11 5195382 5195401 5195385 -
tacttataaagcattcgtga

SEQ ID NO: 52409 - DNA, 20 bp, Artificial Sequence
  Synthetic oligonucleotide; GGG chr11 5195381 5195400 5195384 -
acttataaagcattcgtgag

SEQ ID NO: 52410 - DNA, 20 bp, Artificial Sequence
  Synthetic oligonucleotide; TAG chr11 5195378 5195397 5195381 -
tataaagcattcgtgagggg

SEQ ID NO: 52411 - DNA, 20 bp, Artificial Sequence
  Synthetic oligonucleotide; AGG chr11 5195377 5195396 5195380 -
ataaagcattcgtgaggggt

SEQ ID NO: 52412 - DNA, 20 bp, Artificial Sequence
  Synthetic oligonucleotide; GGG chr11 5195376 5195395 5195379 -
taaagcattcgtgaggggta

SEQ ID NO: 52413 - DNA, 20 bp, Artificial Sequence
  Synthetic oligonucleotide; TGG chr11 5195366 5195385 5195369 -
gtgaggggtagggctaaaaa

SEQ ID NO: 52414 - DNA, 20 bp, Artificial Sequence
  Synthetic oligonucleotide; TAG chr11 5195363 5195382 5195366 -
aggggtagggctaaaaatgg

SEQ ID NO: 52415 - DNA, 20 bp, Artificial Sequence
  Synthetic oligonucleotide; AAG chr11 5195358 5195377 5195361 -
tagggctaaaaatggtagaa

SEQ ID NO: 52416 - DNA, 20 bp, Artificial Sequence
  Synthetic oligonucleotide; AGG chr11 5195357 5195376 5195360 -
agggctaaaaatggtagaaa

SEQ ID NO: 52417 - DNA, 20 bp, Artificial Sequence
  Synthetic oligonucleotide; AAG chr11 5195341 5195360 5195344 -
gaaaaggtgaatacctgttt

SEQ ID NO: 52418 - DNA, 20 bp, Artificial Sequence
  Synthetic oligonucleotide; AGG chr11 5195340 5195359 5195343 -
aaaaggtgaatacctgttta

SEQ ID NO: 52419 - DNA, 20 bp, Artificial Sequence
  Synthetic oligonucleotide; AAG chr11 5195329 5195348 5195332 -
acctgtttaaggttgcctaa

SEQ ID NO: 52420 - DNA, 20 bp, Artificial Sequence
  Synthetic oligonucleotide; TAG chr11 5195325 5195344 5195328 -
gtttaaggttgcctaaaaga

SEQ ID NO: 52421 - DNA, 20 bp, Artificial Sequence
  Synthetic oligonucleotide; CAG chr11 5195321 5195340 5195324 -
aaggttgcctaaaagatagc

SEQ ID NO: 52422 - DNA, 20 bp, Artificial Sequence
  Synthetic oligonucleotide; AGG chr11 5195320 5195339 5195323 -
aggttgcctaaaagatagcc

SEQ ID NO: 52423 - DNA, 20 bp, Artificial Sequence
  Synthetic oligonucleotide; TAG chr11 5195303 5195322 5195306 -
gccaggtactcatttctctt

SEQ ID NO: 52424 - DNA, 20 bp, Artificial Sequence
  Synthetic oligonucleotide; TGG chr11 5195297 5195316 5195300 -
tactcatttctctttagttc

SEQ ID NO: 52425 - DNA, 20 bp, Artificial Sequence
  Synthetic oligonucleotide; TAG chr11 5195285 5195304 5195288 -
tttagttctggcaaaatgat

SEQ ID NO: 52426 - DNA, 20 bp, Artificial Sequence
  Synthetic oligonucleotide; TAG chr11 5195276 5195295 5195279 -
ggcaaaatgattagtgtctg

SEQ ID NO: 52427 - DNA, 20 bp, Artificial Sequence
  Synthetic oligonucleotide; CAG chr11 5195253 5195272 5195256 -
taaccaaatcaatgatgatc

SEQ ID NO: 52428 - DNA, 20 bp, Artificial Sequence
  Synthetic oligonucleotide; TGG chr11 5195246 5195265 5195249 -
atcaatgatgatccagacac

SEQ ID NO: 52429 - DNA, 20 bp, Artificial Sequence
  Synthetic oligonucleotide; GGG chr11 5195245 5195264 5195248 -
tcaatgatgatccagacact

SEQ ID NO: 52430 - DNA, 20 bp, Artificial Sequence
  Synthetic oligonucleotide; CAG chr11 5195237 5195256 5195240 -
gatccagacactgggaaatt

SEQ ID NO: 52431 - DNA, 20 bp, Artificial Sequence
  Synthetic oligonucleotide; AAG chr11 5195230 5195249 5195233 -
acactgggaaattcagtgca

SEQ ID NO: 52432 - DNA, 20 bp, Artificial Sequence
  Synthetic oligonucleotide; AGG chr11 5195229 5195248 5195232 -
cactgggaaattcagtgcaa

SEQ ID NO: 52433 - DNA, 20 bp, Artificial Sequence
  Synthetic oligonucleotide; CAG chr11 5195222 5195241 5195225 -
aaattcagtgcaaaggatgc

SEQ ID NO: 52434 - DNA, 20 bp, Artificial Sequence
  Synthetic oligonucleotide; AGG chr11 5195221 5195240 5195224 -
aattcagtgcaaaggatgcc

SEQ ID NO: 52435 - DNA, 20 bp, Artificial Sequence
  Synthetic oligonucleotide; AAG chr11 5195215 5195234 5195218 -
gtgcaaaggatgccaggact

SEQ ID NO: 52436 - DNA, 20 bp, Artificial Sequence
  Synthetic oligonucleotide; AGG chr11 5195214 5195233 5195217 -
tgcaaaggatgccaggacta

SEQ ID NO: 52437 - DNA, 20 bp, Artificial Sequence
  Synthetic oligonucleotide; CAG chr11 5195197 5195216 5195200 -
ctaaggtgtaatatatgaaa

SEQ ID NO: 52438 - DNA, 20 bp, Artificial Sequence
  Synthetic oligonucleotide; GAG chr11 5195195 5195214 5195198 -
aaggtgtaatatatgaaaca

SEQ ID NO: 52439 - DNA, 20 bp, Artificial Sequence
  Synthetic oligonucleotide; GAG chr11 5195193 5195212 5195196 -
ggtgtaatatatgaaacaga

SEQ ID NO: 52440 - DNA, 20 bp, Artificial Sequence
  Synthetic oligonucleotide; AAG chr11 5195181 5195200 5195184 -
gaaacagagagattatgcaa

SEQ ID NO: 52441 - DNA, 20 bp, Artificial Sequence
  Synthetic oligonucleotide; AAG chr11 5195148 5195167 5195151 -
gaatgatgataaactgtctc

SEQ ID NO: 52442 - DNA, 20 bp, Artificial Sequence
  Synthetic oligonucleotide; GAG chr11 5195146 5195165 5195149 -
atgatgataaactgtctcaa

SEQ ID NO: 52443 - DNA, 20 bp, Artificial Sequence
  Synthetic oligonucleotide; AAG chr11 5195142 5195161 5195145 -
tgataaactgtctcaagaga

SEQ ID NO: 52444 - DNA, 20 bp, Artificial Sequence
  Synthetic oligonucleotide; AGG chr11 5195141 5195160 5195144 -
gataaactgtctcaagagaa

SEQ ID NO: 52445 - DNA, 20 bp, Artificial Sequence
  Synthetic oligonucleotide; TAG chr11 5195133 5195152 5195136 -
gtctcaagagaaaggactaa

SEQ ID NO: 52446 - DNA, 20 bp, Artificial Sequence
  Synthetic oligonucleotide; TGG chr11 5195126 5195145 5195129 -
gagaaaggactaatagatat

SEQ ID NO: 52447 - DNA, 20 bp, Artificial Sequence
  Synthetic oligonucleotide; GAG chr11 5195118 5195137 5195121 -
actaatagatattggcattt

SEQ ID NO: 52448 - DNA, 20 bp, Artificial Sequence
  Synthetic oligonucleotide; TGG chr11 5195104 5195123 5195107 -
gcatttgagtattcgcttac

SEQ ID NO: 52449 - DNA, 20 bp, Artificial Sequence
  Synthetic oligonucleotide; TAG chr11 5195099 5195118 5195102 -
tgagtattcgcttactggat

SEQ ID NO: 52450 - DNA, 20 bp, Artificial Sequence
  Synthetic oligonucleotide; TAG chr11 5195095 5195114 5195098 -
tattcgcttactggattagc

SEQ ID NO: 52451 - DNA, 20 bp, Artificial Sequence
  Synthetic oligonucleotide; AGG chr11 5195094 5195113 5195097 -
attcgcttactggattagct

SEQ ID NO: 52452 - DNA, 20 bp, Artificial Sequence
  Synthetic oligonucleotide; CAG chr11 5195079 5195098 5195082 -
tagctaggcttctttctgat

SEQ ID NO: 52453 - DNA, 20 bp, Artificial Sequence
  Synthetic oligonucleotide; AAG chr11 5195070 5195089 5195073 -
ttctttctgatcagccttca

SEQ ID NO: 52454 - DNA, 20 bp, Artificial Sequence
  Synthetic oligonucleotide; TGG chr11 5195063 5195082 5195066 -
tgatcagccttcaaagtaac

SEQ ID NO: 52455 - DNA, 20 bp, Artificial Sequence
  Synthetic oligonucleotide; CAG chr11 5195059 5195078 5195062 -
cagccttcaaagtaactggc

SEQ ID NO: 52456 - DNA, 20 bp, Artificial Sequence
  Synthetic oligonucleotide; TAG chr11 5195034 5195053 5195037 -
aactaattgtaccgtgttca

SEQ ID NO: 52457 - DNA, 20 bp, Artificial Sequence
  Synthetic oligonucleotide; AAG chr11 5194977 5194996 5194980 -
ttttattattattatacttt

SEQ ID NO: 52458 - DNA, 20 bp, Artificial Sequence
  Synthetic oligonucleotide; TAG chr11 5194971 5194990 5194974 -
tattattatactttaagttt

SEQ ID NO: 52459 - DNA, 20 bp, Artificial Sequence
  Synthetic oligonucleotide; AGG chr11 5194970 5194989 5194973 -
attattatactttaagtttt

SEQ ID NO: 52460 - DNA, 20 bp, Artificial Sequence
  Synthetic oligonucleotide; GGG chr11 5194969 5194988 5194972 -
ttattatactttaagtttta

SEQ ID NO: 52461 - DNA, 20 bp, Artificial Sequence
  Synthetic oligonucleotide; CAG chr11 5194949 5194968 5194952 -
gggtacatgtgcacaatgtg

SEQ ID NO: 52462 - DNA, 20 bp, Artificial Sequence
  Synthetic oligonucleotide; AGG chr11 5194948 5194967 5194951 -
ggtacatgtgcacaatgtgc

SEQ ID NO: 52463 - DNA, 20 bp, Artificial Sequence
  Synthetic oligonucleotide; TAG chr11 5194944 5194963 5194947 -
catgtgcacaatgtgcaggt

SEQ ID NO: 52464 - DNA, 20 bp, Artificial Sequence
  Synthetic oligonucleotide; TGG chr11 5194916 5194935 5194919 -
tatgtatacatgtgccatgc

SEQ ID NO: 52465 - DNA, 20 bp, Artificial Sequence
  Synthetic oligonucleotide; TAG chr11 5194887 5194906 5194890 -
tcacccattaactcatcatt

SEQ ID NO: 52466 - DNA, 20 bp, Artificial Sequence
  Synthetic oligonucleotide; TAG chr11 5194881 5194900 5194884 -
attaactcatcatttagcat

SEQ ID NO: 52467 - DNA, 20 bp, Artificial Sequence
  Synthetic oligonucleotide; AGG chr11 5194880 5194899 5194883 -
ttaactcatcatttagcatt

SEQ ID NO: 52468 - DNA, 20 bp, Artificial Sequence
  Synthetic oligonucleotide; CAG chr11 5194833 5194852 5194836 -
tccctccccccaccccacaa

SEQ ID NO: 52469 - DNA, 20 bp, Artificial Sequence
  Synthetic oligonucleotide; CAG chr11 5194826 5194845 5194829 -
ccccaccccacaacagtccc

SEQ ID NO: 52470 - DNA, 20 bp, Artificial Sequence
  Synthetic oligonucleotide; GAG chr11 5194824 5194843 5194827 -
ccaccccacaacagtcccca

SEQ ID NO: 52471 - DNA, 20 bp, Artificial Sequence
  Synthetic oligonucleotide; GAG chr11 5194767 5194786 5194770 -
attgttcaattcccacctat

SEQ ID NO: 52472 - DNA, 20 bp, Artificial Sequence
  Synthetic oligonucleotide; GAG chr11 5194763 5194782 5194766 -
ttcaattcccacctatgagt

SEQ ID NO: 52473 - DNA, 20 bp, Artificial Sequence
  Synthetic oligonucleotide; CAG chr11 5194754 5194773 5194757 -
cacctatgagtgagaacatg

SEQ ID NO: 52474 - DNA, 20 bp, Artificial Sequence
  Synthetic oligonucleotide; TGG chr11 5194747 5194766 5194750 -
gagtgagaacatgcagtgtt

SEQ ID NO: 52475 - DNA, 20 bp, Artificial Sequence
  Synthetic oligonucleotide; TAG chr11 5194728 5194747 5194731 -
ttggtttttcgtccttgcga

SEQ ID NO: 52476 - DNA, 20 bp, Artificial Sequence
  Synthetic oligonucleotide; GAG chr11 5194719 5194738 5194722 -
cgtccttgcgatagtttact

SEQ ID NO: 52477 - DNA, 20 bp, Artificial Sequence
  Synthetic oligonucleotide; AAG chr11 5194682 5194701 5194685 -
atttcatccatgtccctaca

SEQ ID NO: 52478 - DNA, 20 bp, Artificial Sequence
  Synthetic oligonucleotide; AGG chr11 5194681 5194700 5194684 -
tttcatccatgtccctacaa

SEQ ID NO: 52479 - DNA, 20 bp, Artificial Sequence
  Synthetic oligonucleotide; TGG chr11 5194657 5194676 5194660 -
catgaactcatcctttttta

SEQ ID NO: 52480 - DNA, 20 bp, Artificial Sequence
  Synthetic oligonucleotide; TAG chr11 5194649 5194668 5194652 -
catccttttttatggctgca

SEQ ID NO: 52481 - DNA, 20 bp, Artificial Sequence
  Synthetic oligonucleotide; TGG chr11 5194639 5194658 5194642 -
tatggctgcatagtattcca

SEQ ID NO: 52482 - DNA, 20 bp, Artificial Sequence
  Synthetic oligonucleotide; CAG chr11 5194610 5194629 5194613 -
tgtgccacattttcttaatc

SEQ ID NO: 52483 - DNA, 20 bp, Artificial Sequence
  Synthetic oligonucleotide; TGG chr11 5194596 5194615 5194599 -
ttaatccagtctatcattgt

SEQ ID NO: 52484 - DNA, 20 bp, Artificial Sequence
  Synthetic oligonucleotide; TGG chr11 5194588 5194607 5194591 -
gtctatcattgttggacatt

SEQ ID NO: 52485 - DNA, 20 bp, Artificial Sequence
  Synthetic oligonucleotide; GGG chr11 5194587 5194606 5194590 -
tctatcattgttggacattt

SEQ ID NO: 52486 - DNA, 20 bp, Artificial Sequence
  Synthetic oligonucleotide; TGG chr11 5194583 5194602 5194586 -
tcattgttggacatttgggt

SEQ ID NO: 52487 - DNA, 20 bp, Artificial Sequence
  Synthetic oligonucleotide; AAG chr11 5194576 5194595 5194579 -
tggacatttgggttggttcc

SEQ ID NO: 52488 - DNA, 20 bp, Artificial Sequence
  Synthetic oligonucleotide; TAG chr11 5194557 5194576 5194560 -
caagtctttgctattgtgaa

SEQ ID NO: 52489 - DNA, 20 bp, Artificial Sequence
  Synthetic oligonucleotide; TAG chr11 5194525 5194544 5194528 -
aaattgcatttacaaacctt

SEQ ID NO: 52490 - DNA, 20 bp, Artificial Sequence
  Synthetic oligonucleotide; TAG chr11 5194521 5194540 5194524 -
tgcatttacaaacctttagc

SEQ ID NO: 52491 - DNA, 20 bp, Artificial Sequence
  Synthetic oligonucleotide; AAG chr11 5194512 5194531 5194515 -
aaacctttagctagacatga

SEQ ID NO: 52492 - DNA, 20 bp, Artificial Sequence
  Synthetic oligonucleotide; CAG chr11 5194504 5194523 5194507 -
agctagacatgaaagttctc

SEQ ID NO: 52493 - DNA, 20 bp, Artificial Sequence
  Synthetic oligonucleotide; TGG chr11 5194489 5194508 5194492 -
ttctccagttccatatttca

SEQ ID NO: 52494 - DNA, 20 bp, Artificial Sequence
  Synthetic oligonucleotide; GAG chr11 5194485 5194504 5194488 -
ccagttccatatttcatggt

SEQ ID NO: 52495 - DNA, 20 bp, Artificial Sequence
  Synthetic oligonucleotide; AGG chr11 5194484 5194503 5194487 -
cagttccatatttcatggtg

SEQ ID NO: 52496 - DNA, 20 bp, Artificial Sequence
  Synthetic oligonucleotide; AAG chr11 5194477 5194496 5194480 -
atatttcatggtgaggaaca

SEQ ID NO: 52497 - DNA, 20 bp, Artificial Sequence
  Synthetic oligonucleotide; TGG chr11 5194470 5194489 5194473 -
atggtgaggaacaaagaata

SEQ ID NO: 52498 - DNA, 20 bp, Artificial Sequence
  Synthetic oligonucleotide; TGG chr11 5194467 5194486 5194470 -
gtgaggaacaaagaatatgg

SEQ ID NO: 52499 - DNA, 20 bp, Artificial Sequence
  Synthetic oligonucleotide; GGG chr11 5194466 5194485 5194469 -
tgaggaacaaagaatatggt

SEQ ID NO: 52500 - DNA, 20 bp, Artificial Sequence
  Synthetic oligonucleotide; GGG chr11 5194465 5194484 5194468 -
gaggaacaaagaatatggtg

SEQ ID NO: 52501 - DNA, 20 bp, Artificial Sequence
  Synthetic oligonucleotide; TGG chr11 5194426 5194445 5194429 -
ttgttcctcaccatgaaata

SEQ ID NO: 52502 - DNA, 20 bp, Artificial Sequence
  Synthetic oligonucleotide; TGG chr11 5194420 5194439 5194423 -
ctcaccatgaaatatggaac

SEQ ID NO: 52503 - DNA, 20 bp, Artificial Sequence
  Synthetic oligonucleotide; GAG chr11 5194418 5194437 5194421 -
caccatgaaatatggaactg

SEQ ID NO: 52504 - DNA, 20 bp, Artificial Sequence
  Synthetic oligonucleotide; TAG chr11 5194403 5194422 5194406 -
aactggagaactttcatgtc

SEQ ID NO: 52505 - DNA, 20 bp, Artificial Sequence
  Synthetic oligonucleotide; AAG chr11 5194397 5194416 5194400 -
agaactttcatgtctagcta

SEQ ID NO: 52506 - DNA, 20 bp, Artificial Sequence
  Synthetic oligonucleotide; AGG chr11 5194396 5194415 5194399 -
gaactttcatgtctagctaa

SEQ ID NO: 52507 - DNA, 20 bp, Artificial Sequence
  Synthetic oligonucleotide; CAG chr11 5194376 5194395 5194379 -
aggtttgtaaatgcaccaat

SEQ ID NO: 52508 - DNA, 20 bp, Artificial Sequence
  Synthetic oligonucleotide; AAG chr11 5194356 5194375 5194359 -
cagcaatctgtgtctaactc

SEQ ID NO: 52509 - DNA, 20 bp, Artificial Sequence
  Synthetic oligonucleotide; AGG chr11 5194355 5194374 5194358 -
agcaatctgtgtctaactca

SEQ ID NO: 52510 - DNA, 20 bp, Artificial Sequence
  Synthetic oligonucleotide; CAG chr11 5194335 5194354 5194338 -
aggtttgtaaatgcaccaat

SEQ ID NO: 52511 - DNA, 20 bp, Artificial Sequence
  Synthetic oligonucleotide; TAG chr11 5194321 5194340 5194324 -
accaatcagtgctctgtgtc

SEQ ID NO: 52512 - DNA, 20 bp, Artificial Sequence
  Synthetic oligonucleotide; TAG chr11 5194312 5194331 5194315 -
tgctctgtgtctagctaatc

SEQ ID NO: 52513 - DNA, 20 bp, Artificial Sequence
  Synthetic oligonucleotide; TGG chr11 5194309 5194328 5194312 -
tctgtgtctagctaatctag

SEQ ID NO: 52514 - DNA, 20 bp, Artificial Sequence
  Synthetic oligonucleotide; GGG chr11 5194308 5194327 5194311 -
ctgtgtctagctaatctagt

SEQ ID NO: 52515 - DNA, 20 bp, Artificial Sequence
  Synthetic oligonucleotide; GGG chr11 5194307 5194326 5194310 -
tgtgtctagctaatctagtg

SEQ ID NO: 52516 - DNA, 20 bp, Artificial Sequence
  Synthetic oligonucleotide; TGG chr11 5194301 5194320 5194304 -
tagctaatctagtggggact

SEQ ID NO: 52517 - DNA, 20 bp, Artificial Sequence
  Synthetic oligonucleotide; GAG chr11 5194299 5194318 5194302 -
gctaatctagtggggacttg

SEQ ID NO: 52518 - DNA, 20 bp, Artificial Sequence
  Synthetic oligonucleotide; TAG chr11 5194284 5194303 5194287 -
acttggagaacttttgtgtc

SEQ ID NO: 52519 - DNA, 20 bp, Artificial Sequence
  Synthetic oligonucleotide; AAG chr11 5194278 5194297 5194281 -
agaacttttgtgtctagcta

SEQ ID NO: 52520 - DNA, 20 bp, Artificial Sequence
  Synthetic oligonucleotide; AGG chr11 5194277 5194296 5194280 -
gaacttttgtgtctagctaa

SEQ ID NO: 52521 - DNA, 20 bp, Artificial Sequence
  Synthetic oligonucleotide; CAG chr11 5194257 5194276 5194260 -
aggattgtaaatgcactaat

SEQ ID NO: 52522 - DNA, 20 bp, Artificial Sequence
  Synthetic oligonucleotide; TAG chr11 5194243 5194262 5194246 -
actaatcagcactctgtgtc

SEQ ID NO: 52523 - DNA, 20 bp, Artificial Sequence
  Synthetic oligonucleotide; AAG chr11 5194237 5194256 5194240 -
cagcactctgtgtctagctc

SEQ ID NO: 52524 - DNA, 20 bp, Artificial Sequence
  Synthetic oligonucleotide; AGG chr11 5194236 5194255 5194239 -
agcactctgtgtctagctca

SEQ ID NO: 52525 - DNA, 20 bp, Artificial Sequence
  Synthetic oligonucleotide; CAG chr11 5194216 5194235 5194219 -
aggtttgtaaatgcaccaat

SEQ ID NO: 52526 - DNA, 20 bp, Artificial Sequence
  Synthetic oligonucleotide; CGG chr11 5194200 5194219 5194203 -
caatcagcactctgccaaaa

SEQ ID NO: 52527 - DNA, 20 bp, Artificial Sequence
  Synthetic oligonucleotide; CAG chr11 5194191 5194210 5194194 -
ctctgccaaaacggaccaac

SEQ ID NO: 52528 - DNA, 20 bp, Artificial Sequence
  Synthetic oligonucleotide; TGG chr11 5194176 5194195 5194179 -
ccaaccagctctctgtaaaa

SEQ ID NO: 52529 - DNA, 20 bp, Artificial Sequence
  Synthetic oligonucleotide; GGG chr11 5194175 5194194 5194178 -
caaccagctctctgtaaaat

SEQ ID NO: 52530 - DNA, 20 bp, Artificial Sequence
  Synthetic oligonucleotide; CAG chr11 5194167 5194186 5194170 -
tctctgtaaaatgggccaat

SEQ ID NO: 52531 - DNA, 20 bp, Artificial Sequence
  Synthetic oligonucleotide; TGG chr11 5194152 5194171 5194155 -
ccaatcagctctctgtaaaa

SEQ ID NO: 52532 - DNA, 20 bp, Artificial Sequence
  Synthetic oligonucleotide; CAG chr11 5194143 5194162 5194146 -
tctctgtaaaatggaccaat

SEQ ID NO: 52533 - DNA, 20 bp, Artificial Sequence
  Synthetic oligonucleotide; CAG chr11 5194140 5194159 5194143 -
ctgtaaaatggaccaatcag

SEQ ID NO: 52534 - DNA, 20 bp, Artificial Sequence
  Synthetic oligonucleotide; AGG chr11 5194139 5194158 5194142 -
tgtaaaatggaccaatcagc

SEQ ID NO: 52535 - DNA, 20 bp, Artificial Sequence
  Synthetic oligonucleotide; TGG chr11 5194133 5194152 5194136 -
atggaccaatcagcaggatg

SEQ ID NO: 52536 - DNA, 20 bp, Artificial Sequence
  Synthetic oligonucleotide; GGG chr11 5194132 5194151 5194135 -
tggaccaatcagcaggatgt

SEQ ID NO: 52537 - DNA, 20 bp, Artificial Sequence
  Synthetic oligonucleotide; TGG chr11 5194129 5194148 5194132 -
accaatcagcaggatgtggg

SEQ ID NO: 52538 - DNA, 20 bp, Artificial Sequence
  Synthetic oligonucleotide; GGG chr11 5194128 5194147 5194131 -
ccaatcagcaggatgtgggt

SEQ ID NO: 52539 - DNA, 20 bp, Artificial Sequence
  Synthetic oligonucleotide; GGG chr11 5194127 5194146 5194130 -
caatcagcaggatgtgggtg

SEQ ID NO: 52540 - DNA, 20 bp, Artificial Sequence
  Synthetic oligonucleotide; CAG chr11 5194123 5194142 5194126 -
cagcaggatgtgggtggggt

SEQ ID NO: 52541 - DNA, 20 bp, Artificial Sequence
  Synthetic oligonucleotide; AAG chr11 5194118 5194137 5194121 -
ggatgtgggtggggtcagat

SEQ ID NO: 52542 - DNA, 20 bp, Artificial Sequence
  Synthetic oligonucleotide; AGG chr11 5194117 5194136 5194120 -
gatgtgggtggggtcagata

SEQ ID NO: 52543 - DNA, 20 bp, Artificial Sequence
  Synthetic oligonucleotide; AAG chr11 5194109 5194128 5194112 -
tggggtcagataaggaaata

SEQ ID NO: 52544 - DNA, 20 bp, Artificial Sequence
  Synthetic oligonucleotide; AGG chr11 5194108 5194127 5194111 -
ggggtcagataaggaaataa

SEQ ID NO: 52545 - DNA, 20 bp, Artificial Sequence
  Synthetic oligonucleotide; CAG chr11 5194105 5194124 5194108 -
gtcagataaggaaataaagg

SEQ ID NO: 52546 - DNA, 20 bp, Artificial Sequence
  Synthetic oligonucleotide; AGG chr11 5194104 5194123 5194107 -
tcagataaggaaataaaggc

SEQ ID NO: 52547 - DNA, 20 bp, Artificial Sequence
  Synthetic oligonucleotide; CGG chr11 5194097 5194116 5194100 -
aggaaataaaggcaggctgc

SEQ ID NO: 52548 - DNA, 20 bp, Artificial Sequence
  Synthetic oligonucleotide; GAG chr11 5194095 5194114 5194098 -
gaaataaaggcaggctgccg

SEQ ID NO: 52549 - DNA, 20 bp, Artificial Sequence
  Synthetic oligonucleotide; CAG chr11 5194091 5194110 5194094 -
taaaggcaggctgccggagc

SEQ ID NO: 52550 - DNA, 20 bp, Artificial Sequence
  Synthetic oligonucleotide; TGG chr11 5194073 5194092 5194076 -
gccagctgtgacaactgact

SEQ ID NO: 52551 - DNA, 20 bp, Artificial Sequence
  Synthetic oligonucleotide; GGG chr11 5194072 5194091 5194075 -
ccagctgtgacaactgactt

SEQ ID NO: 52552 - DNA, 20 bp, Artificial Sequence
  Synthetic oligonucleotide; TGG chr11 5194054 5194073 5194057 -
ttgggttccctaccatgctg

SEQ ID NO: 52553 - DNA, 20 bp, Artificial Sequence
  Synthetic oligonucleotide; AAG chr11 5194051 5194070 5194054 -
ggttccctaccatgctgtgg

SEQ ID NO: 52554 - DNA, 20 bp, Artificial Sequence
  Synthetic oligonucleotide; TGG chr11 5194001 5194020 5194004 -
tcttactgctgctcactctt

SEQ ID NO: 52555 - DNA, 20 bp, Artificial Sequence
  Synthetic oligonucleotide; GAG chr11 5193981 5194000 5193984 -
tggatccgcgctgcctttat

SEQ ID NO: 52556 - DNA, 20 bp, Artificial Sequence
  Synthetic oligonucleotide; AAG chr11 5193961 5193980 5193964 -
gagctgtaacactcactgcg

SEQ ID NO: 52557 - DNA, 20 bp, Artificial Sequence
  Synthetic oligonucleotide; AGG chr11 5193960 5193979 5193963 -
agctgtaacactcactgcga

SEQ ID NO: 52558 - DNA, 20 bp, Artificial Sequence
  Synthetic oligonucleotide; CGG chr11 5193953 5193972 5193956 -
acactcactgcgaaggtctg

SEQ ID NO: 52559 - DNA, 20 bp, Artificial Sequence
  Synthetic oligonucleotide; AAG chr11 5193939 5193958 5193942 -
ggtctgcggcttcacttctg

SEQ ID NO: 52560 - DNA, 20 bp, Artificial Sequence
  Synthetic oligonucleotide; CAG chr11 5193935 5193954 5193938 -
tgcggcttcacttctgaagc

SEQ ID NO: 52561 - DNA, 20 bp, Artificial Sequence
  Synthetic oligonucleotide; AAG chr11 5193931 5193950 5193934 -
gcttcacttctgaagccagc

SEQ ID NO: 52562 - DNA, 20 bp, Artificial Sequence
  Synthetic oligonucleotide; CAG chr11 5193918 5193937 5193921 -
agccagcaagaccacgaacc

SEQ ID NO: 52563 - DNA, 20 bp, Artificial Sequence
  Synthetic oligonucleotide; TGG chr11 5193913 5193932 5193916 -
gcaagaccacgaacccagca

SEQ ID NO: 52564 - DNA, 20 bp, Artificial Sequence
  Synthetic oligonucleotide; GGG chr11 5193912 5193931 5193915 -
caagaccacgaacccagcat

SEQ ID NO: 52565 - DNA, 20 bp, Artificial Sequence
  Synthetic oligonucleotide; GGG chr11 5193911 5193930 5193914 -
aagaccacgaacccagcatg

SEQ ID NO: 52566 - DNA, 20 bp, Artificial Sequence
  Synthetic oligonucleotide; GGG chr11 5193910 5193929 5193913 -
agaccacgaacccagcatgg

SEQ ID NO: 52567 - DNA, 20 bp, Artificial Sequence
  Synthetic oligonucleotide; AAG chr11 5193896 5193915 5193899 -
gcatgggggatgaacaaccc

SEQ ID NO: 52568 - DNA, 20 bp, Artificial Sequence
  Synthetic oligonucleotide; CAG chr11 5193892 5193911 5193895 -
gggggatgaacaacccaaga

SEQ ID NO: 52569 - DNA, 20 bp, Artificial Sequence
  Synthetic oligonucleotide; AGG chr11 5193891 5193910 5193894 -
ggggatgaacaacccaagac

SEQ ID NO: 52570 - DNA, 20 bp, Artificial Sequence
  Synthetic oligonucleotide; GAG chr11 5193889 5193908 5193892 -
ggatgaacaacccaagacag

SEQ ID NO: 52571 - DNA, 20 bp, Artificial Sequence
  Synthetic oligonucleotide; AGG chr11 5193888 5193907 5193891 -
gatgaacaacccaagacagg

SEQ ID NO: 52572 - DNA, 20 bp, Artificial Sequence
  Synthetic oligonucleotide; GAG chr11 5193882 5193901 5193885 -
caacccaagacaggaggaat

SEQ ID NO: 52573 - DNA, 20 bp, Artificial Sequence
  Synthetic oligonucleotide; AAG chr11 5193857 5193876 5193860 -
actccatacgctccgccttt

SEQ ID NO: 52574 - DNA, 20 bp, Artificial Sequence
  Synthetic oligonucleotide; GAG chr11 5193855 5193874 5193858 -
tccatacgctccgcctttaa

SEQ ID NO: 52575 - DNA, 20 bp, Artificial Sequence
  Synthetic oligonucleotide; TGG chr11 5193837 5193856 5193840 -
aagagctgtaacactccccg

SEQ ID NO: 52576 - DNA, 20 bp, Artificial Sequence
  Synthetic oligonucleotide; GGG chr11 5193836 5193855 5193839 -
agagctgtaacactccccgt

SEQ ID NO: 52577 - DNA, 20 bp, Artificial Sequence
  Synthetic oligonucleotide; GGG chr11 5193835 5193854 5193838 -
gagctgtaacactccccgtg

SEQ ID NO: 52578 - DNA, 20 bp, Artificial Sequence
  Synthetic oligonucleotide; GGG chr11 5193834 5193853 5193837 -
agctgtaacactccccgtgg

SEQ ID NO: 52579 - DNA, 20 bp, Artificial Sequence
  Synthetic oligonucleotide; CAG chr11 5193827 5193846 5193830 -
acactccccgtgggggtctg

SEQ ID NO: 52580 - DNA, 20 bp, Artificial Sequence
  Synthetic oligonucleotide; TGG chr11 5193815 5193834 5193818 -
ggggtctgcagcttcactcc

SEQ ID NO: 52581 - DNA, 20 bp, Artificial Sequence
  Synthetic oligonucleotide; GAG chr11 5193813 5193832 5193816 -
ggtctgcagcttcactcctg

SEQ ID NO: 52582 - DNA, 20 bp, Artificial Sequence
  Synthetic oligonucleotide; CAG chr11 5193809 5193828 5193812 -
tgcagcttcactcctggagc

SEQ ID NO: 52583 - DNA, 20 bp, Artificial Sequence
  Synthetic oligonucleotide; AAG chr11 5193805 5193824 5193808 -
gcttcactcctggagccagc

SEQ ID NO: 52584 - DNA, 20 bp, Artificial Sequence
  Synthetic oligonucleotide; CAG chr11 5193789 5193808 5193792 -
cagcaagaccgtgaacacac

SEQ ID NO: 52585 - DNA, 20 bp, Artificial Sequence
  Synthetic oligonucleotide; AAG chr11 5193786 5193805 5193789 -
caagaccgtgaacacaccag

SEQ ID NO: 52586 - DNA, 20 bp, Artificial Sequence
  Synthetic oligonucleotide; AGG chr11 5193785 5193804 5193788 -
aagaccgtgaacacaccaga

SEQ ID NO: 52587 - DNA, 20 bp, Artificial Sequence
  Synthetic oligonucleotide; AAG chr11 5193782 5193801 5193785 -
accgtgaacacaccagaagg

SEQ ID NO: 52588 - DNA, 20 bp, Artificial Sequence
  Synthetic oligonucleotide; TGG chr11 5193773 5193792 5193776 -
acaccagaaggaagaaactc

SEQ ID NO: 52589 - DNA, 20 bp, Artificial Sequence
  Synthetic oligonucleotide; AAG chr11 5193761 5193780 5193764 -
agaaactctggacacatctg

SEQ ID NO: 52590 - DNA, 20 bp, Artificial Sequence
  Synthetic oligonucleotide; TGG chr11 5193748 5193767 5193751 -
acatctgaagtaacaaactt

SEQ ID NO: 52591 - DNA, 20 bp, Artificial Sequence
  Synthetic oligonucleotide; AAG chr11 5193716 5193735 5193719 -
cctttgaacacaccatcttt

SEQ ID NO: 52592 - DNA, 20 bp, Artificial Sequence
  Synthetic oligonucleotide; GAG chr11 5193695 5193714 5193698 -
agaattgtaacactcaccac

SEQ ID NO: 52593 - DNA, 20 bp, Artificial Sequence
  Synthetic oligonucleotide; AGG chr11 5193694 5193713 5193697 -
gaattgtaacactcaccacg

SEQ ID NO: 52594 - DNA, 20 bp, Artificial Sequence
  Synthetic oligonucleotide; GGG chr11 5193693 5193712 5193696 -
aattgtaacactcaccacga

SEQ ID NO: 52595 - DNA, 20 bp, Artificial Sequence
  Synthetic oligonucleotide; CGG chr11 5193686 5193705 5193689 -
acactcaccacgagggttcg

SEQ ID NO: 52596 - DNA, 20 bp, Artificial Sequence
  Synthetic oligonucleotide; AAG chr11 5193672 5193691 5193675 -
ggttcgcggcttcattcttt

SEQ ID NO: 52597 - DNA, 20 bp, Artificial Sequence
  Synthetic oligonucleotide; CAG chr11 5193668 5193687 5193671 -
cgcggcttcattctttaagt

SEQ ID NO: 52598 - DNA, 20 bp, Artificial Sequence
  Synthetic oligonucleotide; GAG chr11 5193664 5193683 5193667 -
gcttcattctttaagtcagc

SEQ ID NO: 52599 - DNA, 20 bp, Artificial Sequence
  Synthetic oligonucleotide; AAG chr11 5193658 5193677 5193661 -
ttctttaagtcagcgagacc

SEQ ID NO: 52600 - DNA, 20 bp, Artificial Sequence
  Synthetic oligonucleotide; CGG chr11 5193642 5193661 5193645 -
gaccaagaacccaccaattc

SEQ ID NO: 52601 - DNA, 20 bp, Artificial Sequence
  Synthetic oligonucleotide; CAG chr11 5193636 5193655 5193639 -
gaacccaccaattccggaca

SEQ ID NO: 52602 - DNA, 20 bp, Artificial Sequence
  Synthetic oligonucleotide; AAG chr11 5193633 5193652 5193636 -
cccaccaattccggacacag

SEQ ID NO: 52603 - DNA, 20 bp, Artificial Sequence
  Synthetic oligonucleotide; AGG chr11 5193632 5193651 5193635 -
ccaccaattccggacacaga

SEQ ID NO: 52604 - DNA, 20 bp, Artificial Sequence
  Synthetic oligonucleotide; TGG chr11 5193628 5193647 5193631 -
caattccggacacagaagga

SEQ ID NO: 52605 - DNA, 20 bp, Artificial Sequence
  Synthetic oligonucleotide; AAG chr11 5193622 5193641 5193625 -
cggacacagaaggatggaca

SEQ ID NO: 52606 - DNA, 20 bp, Artificial Sequence
  Synthetic oligonucleotide; CAG chr11 5193614 5193633 5193617 -
gaaggatggacaaagattat

SEQ ID NO: 52607 - DNA, 20 bp, Artificial Sequence
  Synthetic oligonucleotide; AGG chr11 5193613 5193632 5193616 -
aaggatggacaaagattatc

SEQ ID NO: 52608 - DNA, 20 bp, Artificial Sequence
  Synthetic oligonucleotide; AAG chr11 5193601 5193620 5193604 -
agattatcaggaatgcaatt

SEQ ID NO: 52609 - DNA, 20 bp, Artificial Sequence
  Synthetic oligonucleotide; TAG chr11 5193573 5193592 5193576 -
caacacaaaaattacatacc

SEQ ID NO: 52610 - DNA, 20 bp, Artificial Sequence
  Synthetic oligonucleotide; AAG chr11 5193556 5193575 5193559 -
acctagaatcaattttaata

SEQ ID NO: 52611 - DNA, 20 bp, Artificial Sequence
  Synthetic oligonucleotide; TGG chr11 5193543 5193562 5193546 -
tttaataaagaaaacttatt

SEQ ID NO: 52612 - DNA, 20 bp, Artificial Sequence
  Synthetic oligonucleotide; GAG chr11 5193541 5193560 5193544 -
taataaagaaaacttatttg

SEQ ID NO: 52613 - DNA, 20 bp, Artificial Sequence
  Synthetic oligonucleotide; CAG chr11 5193536 5193555 5193539 -
aagaaaacttatttggagca

SEQ ID NO: 52614 - DNA, 20 bp, Artificial Sequence
  Synthetic oligonucleotide; CAG chr11 5193527 5193546 5193530 -
tatttggagcacagcttatt

SEQ ID NO: 52615 - DNA, 20 bp, Artificial Sequence
  Synthetic oligonucleotide; AGG chr11 5193526 5193545 5193529 -
atttggagcacagcttattc

SEQ ID NO: 52616 - DNA, 20 bp, Artificial Sequence
  Synthetic oligonucleotide; GGG chr11 5193525 5193544 5193528 -
tttggagcacagcttattca

SEQ ID NO: 52617 - DNA, 20 bp, Artificial Sequence
  Synthetic oligonucleotide; CAG chr11 5193522 5193541 5193525 -
ggagcacagcttattcaggg

SEQ ID NO: 52618 - DNA, 20 bp, Artificial Sequence
  Synthetic oligonucleotide; AAG chr11 5193512 5193531 5193515 -
ttattcagggcagaaaataa

SEQ ID NO: 52619 - DNA, 20 bp, Artificial Sequence
  Synthetic oligonucleotide; AAG chr11 5193499 5193518 5193502 -
aaaataaaagctaataataa

SEQ ID NO: 52620 - DNA, 20 bp, Artificial Sequence
  Synthetic oligonucleotide; GAG chr11 5193497 5193516 5193500 -
aataaaagctaataataaaa

SEQ ID NO: 52621 - DNA, 20 bp, Artificial Sequence
  Synthetic oligonucleotide; AGG chr11 5193496 5193515 5193499 -
ataaaagctaataataaaag

SEQ ID NO: 52622 - DNA, 20 bp, Artificial Sequence
  Synthetic oligonucleotide; TAG chr11 5193455 5193474 5193458 -
aattaaataaccactcattt

SEQ ID NO: 52623 - DNA, 20 bp, Artificial Sequence
  Synthetic oligonucleotide; CAG chr11 5193436 5193455 5193439 -
ttagatccttgatatttgaa

SEQ ID NO: 52624 - DNA, 20 bp, Artificial Sequence
  Synthetic oligonucleotide; TAG chr11 5193431 5193450 5193434 -
tccttgatatttgaacagaa

SEQ ID NO: 52625 - DNA, 20 bp, Artificial Sequence
  Synthetic oligonucleotide; TAG chr11 5193419 5193438 5193422 -
gaacagaatagtataaaaaa

SEQ ID NO: 52626 - DNA, 20 bp, Artificial Sequence
  Synthetic oligonucleotide; GAG chr11 5193417 5193436 5193420 -
acagaatagtataaaaaata

SEQ ID NO: 52627 - DNA, 20 bp, Artificial Sequence
  Synthetic oligonucleotide; AGG chr11 5193416 5193435 5193419 -
cagaatagtataaaaaatag

SEQ ID NO: 52628 - DNA, 20 bp, Artificial Sequence
  Synthetic oligonucleotide; GGG chr11 5193415 5193434 5193418 -
agaatagtataaaaaataga

SEQ ID NO: 52629 - DNA, 20 bp, Artificial Sequence
  Synthetic oligonucleotide; TAG chr11 5193403 5193422 5193406 -
aaaatagagggcatgataaa

SEQ ID NO: 52630 - DNA, 20 bp, Artificial Sequence
  Synthetic oligonucleotide; AAG chr11 5193394 5193413 5193397 -
ggcatgataaatagtaaata

SEQ ID NO: 52631 - DNA, 20 bp, Artificial Sequence
  Synthetic oligonucleotide; GAG chr11 5193382 5193401 5193385 -
agtaaataaagcaaaaatat

SEQ ID NO: 52632 - DNA, 20 bp, Artificial Sequence
  Synthetic oligonucleotide; GAG chr11 5193380 5193399 5193383 -
taaataaagcaaaaatatga

SEQ ID NO: 52633 - DNA, 20 bp, Artificial Sequence
  Synthetic oligonucleotide; GAG chr11 5193375 5193394 5193378 -
aaagcaaaaatatgagagat

SEQ ID NO: 52634 - DNA, 20 bp, Artificial Sequence
  Synthetic oligonucleotide; AAG chr11 5193369 5193388 5193372 -
aaaatatgagagatgagatg

SEQ ID NO: 52635 - DNA, 20 bp, Artificial Sequence
  Synthetic oligonucleotide; TAG chr11 5193366 5193385 5193369 -
atatgagagatgagatgaag

SEQ ID NO: 52636 - DNA, 20 bp, Artificial Sequence
  Synthetic oligonucleotide; AAG chr11 5193358 5193377 5193361 -
gatgagatgaagtagccaat

SEQ ID NO: 52637 - DNA, 20 bp, Artificial Sequence
  Synthetic oligonucleotide; AGG chr11 5193357 5193376 5193360 -
atgagatgaagtagccaata

SEQ ID NO: 52638 - DNA, 20 bp, Artificial Sequence
  Synthetic oligonucleotide; GGG chr11 5193356 5193375 5193359 -
tgagatgaagtagccaataa

SEQ ID NO: 52639 - DNA, 20 bp, Artificial Sequence
  Synthetic oligonucleotide; GGG chr11 5193355 5193374 5193358 -
gagatgaagtagccaataag

SEQ ID NO: 52640 - DNA, 20 bp, Artificial Sequence
  Synthetic oligonucleotide; GGG chr11 5193354 5193373 5193357 -
agatgaagtagccaataagg

SEQ ID NO: 52641 - DNA, 20 bp, Artificial Sequence
  Synthetic oligonucleotide; CAG chr11 5193350 5193369 5193353 -
gaagtagccaataaggggga

SEQ ID NO: 52642 - DNA, 20 bp, Artificial Sequence
  Synthetic oligonucleotide; AGG chr11 5193349 5193368 5193352 -
aagtagccaataagggggac

SEQ ID NO: 52643 - DNA, 20 bp, Artificial Sequence
  Synthetic oligonucleotide; AAG chr11 5193346 5193365 5193349 -
tagccaataagggggacagg

SEQ ID NO: 52644 - DNA, 20 bp, Artificial Sequence
  Synthetic oligonucleotide; TAG chr11 5193343 5193362 5193346 -
ccaataagggggacaggaag

SEQ ID NO: 52645 - DNA, 20 bp, Artificial Sequence
  Synthetic oligonucleotide; AAG chr11 5193336 5193355 5193339 -
gggggacaggaagtagattt

SEQ ID NO: 52646 - DNA, 20 bp, Artificial Sequence
  Synthetic oligonucleotide; GAG chr11 5193334 5193353 5193337 -
gggacaggaagtagatttaa

SEQ ID NO: 52647 - DNA, 20 bp, Artificial Sequence
  Synthetic oligonucleotide; CAG chr11 5193329 5193348 5193332 -
aggaagtagatttaagagtg

SEQ ID NO: 52648 - DNA, 20 bp, Artificial Sequence
  Synthetic oligonucleotide; AAG chr11 5193321 5193340 5193324 -
gatttaagagtgcagaaaaa

SEQ ID NO: 52649 - DNA, 20 bp, Artificial Sequence
  Synthetic oligonucleotide; AGG chr11 5193320 5193339 5193323 -
atttaagagtgcagaaaaaa

SEQ ID NO: 52650 - DNA, 20 bp, Artificial Sequence
  Synthetic oligonucleotide; AAG chr11 5193314 5193333 5193317 -
gagtgcagaaaaaaaggaca

SEQ ID NO: 52651 - DNA, 20 bp, Artificial Sequence
  Synthetic oligonucleotide; AGG chr11 5193313 5193332 5193316 -
agtgcagaaaaaaaggacaa

SEQ ID NO: 52652 - DNA, 20 bp, Artificial Sequence
  Synthetic oligonucleotide; TGG chr11 5193302 5193321 5193305 -
aaaggacaaaggaataaata

SEQ ID NO: 52653 - DNA, 20 bp, Artificial Sequence
  Synthetic oligonucleotide; GGG chr11 5193301 5193320 5193304 -
aaggacaaaggaataaatat

SEQ ID NO: 52654 - DNA, 20 bp, Artificial Sequence
  Synthetic oligonucleotide; GGG chr11 5193300 5193319 5193303 -
aggacaaaggaataaatatg

SEQ ID NO: 52655 - DNA, 20 bp, Artificial Sequence
  Synthetic oligonucleotide; GGG chr11 5193299 5193318 5193302 -
ggacaaaggaataaatatgg

SEQ ID NO: 52656 - DNA, 20 bp, Artificial Sequence
  Synthetic oligonucleotide; GGG chr11 5193298 5193317 5193301 -
gacaaaggaataaatatggg

SEQ ID NO: 52657 - DNA, 20 bp, Artificial Sequence
  Synthetic oligonucleotide; TGG chr11 5193293 5193312 5193296 -
aggaataaatatggggggca

SEQ ID NO: 52658 - DNA, 20 bp, Artificial Sequence
  Synthetic oligonucleotide; GAG chr11 5193291 5193310 5193294 -
gaataaatatggggggcatg

SEQ ID NO: 52659 - DNA, 20 bp, Artificial Sequence
  Synthetic oligonucleotide; AGG chr11 5193290 5193309 5193293 -
aataaatatggggggcatgg

SEQ ID NO: 52660 - DNA, 20 bp, Artificial Sequence
  Synthetic oligonucleotide; TAG chr11 5193281 5193300 5193284 -
ggggggcatggaggaaaaaa

SEQ ID NO: 52661 - DNA, 20 bp, Artificial Sequence
  Synthetic oligonucleotide; AGG chr11 5193280 5193299 5193283 -
gggggcatggaggaaaaaat

SEQ ID NO: 52662 - DNA, 20 bp, Artificial Sequence
  Synthetic oligonucleotide; GGG chr11 5193279 5193298 5193282 -
ggggcatggaggaaaaaata

SEQ ID NO: 52663 - DNA, 20 bp, Artificial Sequence
  Synthetic oligonucleotide; AAG chr11 5193274 5193293 5193277 -
atggaggaaaaaatagggtg

SEQ ID NO: 52664 - DNA, 20 bp, Artificial Sequence
  Synthetic oligonucleotide; CAG chr11 5193270 5193289 5193273 -
aggaaaaaatagggtgaagt

SEQ ID NO: 52665 - DNA, 20 bp, Artificial Sequence
  Synthetic oligonucleotide; AGG chr11 5193269 5193288 5193272 -
ggaaaaaatagggtgaagtc

SEQ ID NO: 52666 - DNA, 20 bp, Artificial Sequence
  Synthetic oligonucleotide; TGG chr11 5193249 5193268 5193252 -
aggaactccaaaatcttaac

SEQ ID NO: 52667 - DNA, 20 bp, Artificial Sequence
  Synthetic oligonucleotide; GAG chr11 5193247 5193266 5193250 -
gaactccaaaatcttaactg

SEQ ID NO: 52668 - DNA, 20 bp, Artificial Sequence
  Synthetic oligonucleotide; CAG chr11 5193242 5193261 5193245 -
ccaaaatcttaactggagtt

SEQ ID NO: 52669 - DNA, 20 bp, Artificial Sequence
  Synthetic oligonucleotide; AGG chr11 5193241 5193260 5193244 -
caaaatcttaactggagttc

SEQ ID NO: 52670 - DNA, 20 bp, Artificial Sequence
  Synthetic oligonucleotide; GAG chr11 5193239 5193258 5193242 -
aaatcttaactggagttcag

SEQ ID NO: 52671 - DNA, 20 bp, Artificial Sequence
  Synthetic oligonucleotide; GAG chr11 5193237 5193256 5193240 -
atcttaactggagttcagga

SEQ ID NO: 52672 - DNA, 20 bp, Artificial Sequence
  Synthetic oligonucleotide; GAG chr11 5193235 5193254 5193238 -
cttaactggagttcaggaga

SEQ ID NO: 52673 - DNA, 20 bp, Artificial Sequence
  Synthetic oligonucleotide; TAG chr11 5193226 5193245 5193229 -
agttcaggagagagtgaaaa

SEQ ID NO: 52674 - DNA, 20 bp, Artificial Sequence
  Synthetic oligonucleotide; TAG chr11 5193217 5193236 5193220 -
gagagtgaaaatagaacatg

SEQ ID NO: 52675 - DNA, 20 bp, Artificial Sequence
  Synthetic oligonucleotide; AAG chr11 5193214 5193233 5193217 -
agtgaaaatagaacatgtag

SEQ ID NO: 52676 - DNA, 20 bp, Artificial Sequence
  Synthetic oligonucleotide; AGG chr11 5193213 5193232 5193216 -
gtgaaaatagaacatgtaga

SEQ ID NO: 52677 - DNA, 20 bp, Artificial Sequence
  Synthetic oligonucleotide; TAG chr11 5193203 5193222 5193206 -
aacatgtagaaggaacttac

SEQ ID NO: 52678 - DNA, 20 bp, Artificial Sequence
  Synthetic oligonucleotide; GAG chr11 5193201 5193220 5193204 -
catgtagaaggaacttacta

SEQ ID NO: 52679 - DNA, 20 bp, Artificial Sequence
  Synthetic oligonucleotide; AAG chr11 5193190 5193209 5193193 -
aacttactagagatcaatac

SEQ ID NO: 52680 - DNA, 20 bp, Artificial Sequence
  Synthetic oligonucleotide; AAG chr11 5193171 5193190 5193174 -
caagacaattttctgaacaa

SEQ ID NO: 52681 - DNA, 20 bp, Artificial Sequence
  Synthetic oligonucleotide; CAG chr11 5193164 5193183 5193167 -
attttctgaacaaaagaaca

SEQ ID NO: 52682 - DNA, 20 bp, Artificial Sequence
  Synthetic oligonucleotide; CAG chr11 5193161 5193180 5193164 -
ttctgaacaaaagaacacag

SEQ ID NO: 52683 - DNA, 20 bp, Artificial Sequence
  Synthetic oligonucleotide; GAG chr11 5193150 5193169 5193153 -
agaacacagcagttgaaatt

SEQ ID NO: 52684 - DNA, 20 bp, Artificial Sequence
  Synthetic oligonucleotide; GAG chr11 5193148 5193167 5193151 -
aacacagcagttgaaattga

SEQ ID NO: 52685 - DNA, 20 bp, Artificial Sequence
  Synthetic oligonucleotide; CAG chr11 5193130 5193149 5193133 -
gagagtatccacaaaatacc

SEQ ID NO: 52686 - DNA, 20 bp, Artificial Sequence
  Synthetic oligonucleotide; TGG chr11 5193100 5193119 5193103 -
taaaataaaataaaaattca

SEQ ID NO: 52687 - DNA, 20 bp, Artificial Sequence
  Synthetic oligonucleotide; AAG chr11 5193096 5193115 5193099 -
ataaaataaaaattcatggt

SEQ ID NO: 52688 - DNA, 20 bp, Artificial Sequence
  Synthetic oligonucleotide; AAG chr11 5193091 5193110 5193094 -
ataaaaattcatggtaagtt

SEQ ID NO: 52689 - DNA, 20 bp, Artificial Sequence
  Synthetic oligonucleotide; GAG chr11 5193089 5193108 5193092 -
aaaaattcatggtaagttaa

SEQ ID NO: 52690 - DNA, 20 bp, Artificial Sequence
  Synthetic oligonucleotide; AAG chr11 5193074 5193093 5193077 -
gttaagagaatgaaaaaaac

SEQ ID NO: 52691 - DNA, 20 bp, Artificial Sequence
  Synthetic oligonucleotide; CAG chr11 5193068 5193087 5193071 -
agaatgaaaaaaacaagcca

SEQ ID NO: 52692 - DNA, 20 bp, Artificial Sequence
  Synthetic oligonucleotide; GAG chr11 5193066 5193085 5193069 -
aatgaaaaaaacaagccaca

SEQ ID NO: 52693 - DNA, 20 bp, Artificial Sequence
  Synthetic oligonucleotide; AAG chr11 5193034 5193053 5193037 -
gcaaaacatattatctgata

SEQ ID NO: 52694 - DNA, 20 bp, Artificial Sequence
  Synthetic oligonucleotide; AGG chr11 5193033 5193052 5193036 -
caaaacatattatctgataa

SEQ ID NO: 52695 - DNA, 20 bp, Artificial Sequence
  Synthetic oligonucleotide; AAG chr11 5193010 5193029 5193013 -
acttgtatacatattataca

SEQ ID NO: 52696 - DNA, 20 bp, Artificial Sequence
  Synthetic oligonucleotide; AAG chr11 5192964 5192983 5192967 -
aaacaaacaatccaattgca

SEQ ID NO: 52697 - DNA, 20 bp, Artificial Sequence
  Synthetic oligonucleotide; TGG chr11 5192961 5192980 5192964 -
caaacaatccaattgcaaag

SEQ ID NO: 52698 - DNA, 20 bp, Artificial Sequence
  Synthetic oligonucleotide; GGG chr11 5192960 5192979 5192963 -
aaacaatccaattgcaaagt

SEQ ID NO: 52699 - DNA, 20 bp, Artificial Sequence
  Synthetic oligonucleotide; AAG chr11 5192954 5192973 5192957 -
tccaattgcaaagtgggcaa

SEQ ID NO: 52700 - DNA, 20 bp, Artificial Sequence
  Synthetic oligonucleotide; CAG chr11 5192944 5192963 5192947 -
aagtgggcaaaagatctgaa

SEQ ID NO: 52701 - DNA, 20 bp, Artificial Sequence
  Synthetic oligonucleotide; AAG chr11 5192930 5192949 5192933 -
tctgaacagacactttacca

SEQ ID NO: 52702 - DNA, 20 bp, Artificial Sequence
  Synthetic oligonucleotide; AAG chr11 5192927 5192946 5192930 -
gaacagacactttaccaaag

SEQ ID NO: 52703 - DNA, 20 bp, Artificial Sequence
  Synthetic oligonucleotide; TAG chr11 5192919 5192938 5192922 -
actttaccaaagaagatata

SEQ ID NO: 52704 - DNA, 20 bp, Artificial Sequence
  Synthetic oligonucleotide; AAG chr11 5192908 5192927 5192911 -
gaagatatatagattgcaat

SEQ ID NO: 52705 - DNA, 20 bp, Artificial Sequence
  Synthetic oligonucleotide; CAG chr11 5192889 5192908 5192892 -
taagcacatgaaaatatact

SEQ ID NO: 52706 - DNA, 20 bp, Artificial Sequence
  Synthetic oligonucleotide; AAG chr11 5192872 5192891 5192875 -
actcagtaacacatgtcatt

SEQ ID NO: 52707 - DNA, 20 bp, Artificial Sequence
  Synthetic oligonucleotide; AAG chr11 5192852 5192871 5192855 -
aagaaactgcacattaaaac

SEQ ID NO: 52708 - DNA, 20 bp, Artificial Sequence
  Synthetic oligonucleotide; AAG chr11 5192849 5192868 5192852 -
aaactgcacattaaaacaag

SEQ ID NO: 52709 - DNA, 20 bp, Artificial Sequence
  Synthetic oligonucleotide; TAG chr11 5192824 5192843 5192827 -
accaaccactacacacatat

SEQ ID NO: 52710 - DNA, 20 bp, Artificial Sequence
  Synthetic oligonucleotide; AAG chr11 5192821 5192840 5192824 -
aaccactacacacatattag

SEQ ID NO: 52711 - DNA, 20 bp, Artificial Sequence
  Synthetic oligonucleotide; AGG chr11 5192820 5192839 5192823 -
accactacacacatattaga

SEQ ID NO: 52712 - DNA, 20 bp, Artificial Sequence
  Synthetic oligonucleotide; TGG chr11 5192784 5192803 5192787 -
tactgacatccaccaaacac

SEQ ID NO: 52713 - DNA, 20 bp, Artificial Sequence
  Synthetic oligonucleotide; AAG chr11 5192776 5192795 5192779 -
tccaccaaacactggcaacg

SEQ ID NO: 52714 - DNA, 20 bp, Artificial Sequence
  Synthetic oligonucleotide; TGG chr11 5192773 5192792 5192776 -
accaaacactggcaacgaag

SEQ ID NO: 52715 - DNA, 20 bp, Artificial Sequence
  Synthetic oligonucleotide; GAG chr11 5192771 5192790 5192774 -
caaacactggcaacgaagtg

SEQ ID NO: 52716 - DNA, 20 bp, Artificial Sequence
  Synthetic oligonucleotide; CAG chr11 5192765 5192784 5192768 -
ctggcaacgaagtggagcaa

SEQ ID NO: 52717 - DNA, 20 bp, Artificial Sequence
  Synthetic oligonucleotide; TAG chr11 5192742 5192761 5192745 -
taactctcacttattgcttg

SEQ ID NO: 52718 - DNA, 20 bp, Artificial Sequence
  Synthetic oligonucleotide; AGG chr11 5192741 5192760 5192744 -
aactctcacttattgcttgt

SEQ ID NO: 52719 - DNA, 20 bp, Artificial Sequence
  Synthetic oligonucleotide; GGG chr11 5192740 5192759 5192743 -
actctcacttattgcttgta

SEQ ID NO: 52720 - DNA, 20 bp, Artificial Sequence
  Synthetic oligonucleotide; GAG chr11 5192735 5192754 5192738 -
cacttattgcttgtagggat

SEQ ID NO: 52721 - DNA, 20 bp, Artificial Sequence
  Synthetic oligonucleotide; TAG chr11 5192729 5192748 5192732 -
ttgcttgtagggatgagaaa

SEQ ID NO: 52722 - DNA, 20 bp, Artificial Sequence
  Synthetic oligonucleotide; CAG chr11 5192724 5192743 5192727 -
tgtagggatgagaaatagtg

SEQ ID NO: 52723 - DNA, 20 bp, Artificial Sequence
  Synthetic oligonucleotide; TGG chr11 5192715 5192734 5192718 -
gagaaatagtgcagccaaat

SEQ ID NO: 52724 - DNA, 20 bp, Artificial Sequence
  Synthetic oligonucleotide; AAG chr11 5192712 5192731 5192715 -
aaatagtgcagccaaattgg

SEQ ID NO: 52725 - DNA, 20 bp, Artificial Sequence
  Synthetic oligonucleotide; CAG chr11 5192708 5192727 5192711 -
agtgcagccaaattggaaga

SEQ ID NO: 52726 - DNA, 20 bp, Artificial Sequence
  Synthetic oligonucleotide; CAG chr11 5192701 5192720 5192704 -
ccaaattggaagacagttta

SEQ ID NO: 52727 - DNA, 20 bp, Artificial Sequence
  Synthetic oligonucleotide; TAG chr11 5192685 5192704 5192688 -
tttacagtttcttacaaaac

SEQ ID NO: 52728 - DNA, 20 bp, Artificial Sequence
  Synthetic oligonucleotide; GAG chr11 5192635 5192654 5192638 -
tcctatgtatttacccaaat

SEQ ID NO: 52729 - DNA, 20 bp, Artificial Sequence
  Synthetic oligonucleotide; CAG chr11 5192611 5192630 5192614 -
caaaaatttatgtccacaca

SEQ ID NO: 52730 - DNA, 20 bp, Artificial Sequence
  Synthetic oligonucleotide; AAG chr11 5192595 5192614 5192598 -
cacacagacatgaactaacc

SEQ ID NO: 52731 - DNA, 20 bp, Artificial Sequence
  Synthetic oligonucleotide; AGG chr11 5192594 5192613 5192597 -
acacagacatgaactaacca

SEQ ID NO: 52732 - DNA, 20 bp, Artificial Sequence
  Synthetic oligonucleotide; TAG chr11 5192587 5192606 5192590 -
catgaactaaccaaggttta

SEQ ID NO: 52733 - DNA, 20 bp, Artificial Sequence
  Synthetic oligonucleotide; AGG chr11 5192586 5192605 5192589 -
atgaactaaccaaggtttat

SEQ ID NO: 52734 - DNA, 20 bp, Artificial Sequence
  Synthetic oligonucleotide; AAG chr11 5192562 5192581 5192565 -
actttactcataattgccaa

SEQ ID NO: 52735 - DNA, 20 bp, Artificial Sequence
  Synthetic oligonucleotide; AAG chr11 5192555 5192574 5192558 -
tcataattgccaaaagttga

SEQ ID NO: 52736 - DNA, 20 bp, Artificial Sequence
  Synthetic oligonucleotide; AAG chr11 5192547 5192566 5192550 -
gccaaaagttgaaagtaacc

SEQ ID NO: 52737 - DNA, 20 bp, Artificial Sequence
  Synthetic oligonucleotide; TGG chr11 5192539 5192558 5192542 -
ttgaaagtaaccaagatgaa

SEQ ID NO: 52738 - DNA, 20 bp, Artificial Sequence
  Synthetic oligonucleotide; TGG chr11 5192528 5192547 5192531 -
caagatgaatggataaactg

SEQ ID NO: 52739 - DNA, 20 bp, Artificial Sequence
  Synthetic oligonucleotide; TAG chr11 5192517 5192536 5192520 -
gataaactgtggaacatcca

SEQ ID NO: 52740 - DNA, 20 bp, Artificial Sequence
  Synthetic oligonucleotide; AGG chr11 5192516 5192535 5192519 -
ataaactgtggaacatccat

SEQ ID NO: 52741 - DNA, 20 bp, Artificial Sequence
  Synthetic oligonucleotide; TAG chr11 5192512 5192531 5192515 -
actgtggaacatccatagga

SEQ ID NO: 52742 - DNA, 20 bp, Artificial Sequence
  Synthetic oligonucleotide; CAG chr11 5192500 5192519 5192503 -
ccataggatagaatattatt

SEQ ID NO: 52743 - DNA, 20 bp, Artificial Sequence
  Synthetic oligonucleotide; AAG chr11 5192486 5192505 5192489 -
attattcagtgatataaata

SEQ ID NO: 52744 - DNA, 20 bp, Artificial Sequence
  Synthetic oligonucleotide; AGG chr11 5192485 5192504 5192488 -
ttattcagtgatataaataa

SEQ ID NO: 52745 - DNA, 20 bp, Artificial Sequence
  Synthetic oligonucleotide; AAG chr11 5192476 5192495 5192479 -
gatataaataaaggtctatc

SEQ ID NO: 52746 - DNA, 20 bp, Artificial Sequence
  Synthetic oligonucleotide; AAG chr11 5192466 5192485 5192469 -
aaggtctatcaagctgtgaa

SEQ ID NO: 52747 - DNA, 20 bp, Artificial Sequence
  Synthetic oligonucleotide; AAG chr11 5192458 5192477 5192461 -
tcaagctgtgaaaagacata

SEQ ID NO: 52748 - DNA, 20 bp, Artificial Sequence
  Synthetic oligonucleotide; GAG chr11 5192456 5192475 5192459 -
aagctgtgaaaagacataaa

SEQ ID NO: 52749 - DNA, 20 bp, Artificial Sequence
  Synthetic oligonucleotide; TAG chr11 5192415 5192434 5192418 -
taattcattttctttaatta

SEQ ID NO: 52750 - DNA, 20 bp, Artificial Sequence
  Synthetic oligonucleotide; GAG chr11 5192364 5192383 5192367 -
acctattttatcttgctgtt

SEQ ID NO: 52751 - DNA, 20 bp, Artificial Sequence
  Synthetic oligonucleotide; TAG chr11 5192346 5192365 5192349 -
ttgagaaacttccattccta

SEQ ID NO: 52752 - DNA, 20 bp, Artificial Sequence
  Synthetic oligonucleotide; TAG chr11 5192299 5192318 5192302 -
tattattcctcaaacaaata

SEQ ID NO: 52753 - DNA, 20 bp, Artificial Sequence
  Synthetic oligonucleotide; TAG chr11 5192285 5192304 5192288 -
caaatatagatattcaataa

SEQ ID NO: 52754 - DNA, 20 bp, Artificial Sequence
  Synthetic oligonucleotide; TAG chr11 5192277 5192296 5192280 -
gatattcaataatagacaaa

SEQ ID NO: 52755 - DNA, 20 bp, Artificial Sequence
  Synthetic oligonucleotide; AAG chr11 5192268 5192287 5192271 -
taatagacaaatagtgaata

SEQ ID NO: 52756 - DNA, 20 bp, Artificial Sequence
  Synthetic oligonucleotide; TGG chr11 5192263 5192282 5192266 -
gacaaatagtgaataaagta

SEQ ID NO: 52757 - DNA, 20 bp, Artificial Sequence
  Synthetic oligonucleotide; TAG chr11 5192246 5192265 5192249 -
gtatggtacattctttgact

SEQ ID NO: 52758 - DNA, 20 bp, Artificial Sequence
  Synthetic oligonucleotide; CAG chr11 5192240 5192259 5192243 -
tacattctttgacttagttt

SEQ ID NO: 52759 - DNA, 20 bp, Artificial Sequence
  Synthetic oligonucleotide; CAG chr11 5192236 5192255 5192239 -
ttctttgacttagtttcaga

SEQ ID NO: 52760 - DNA, 20 bp, Artificial Sequence
  Synthetic oligonucleotide; TAG chr11 5192225 5192244 5192228 -
agtttcagacagctattgca

SEQ ID NO: 52761 - DNA, 20 bp, Artificial Sequence
  Synthetic oligonucleotide; TAG chr11 5192215 5192234 5192218 -
agctattgcatagaatgaaa

SEQ ID NO: 52762 - DNA, 20 bp, Artificial Sequence
  Synthetic oligonucleotide; CAG chr11 5192197 5192216 5192200 -
aatagattaatatttaataa

SEQ ID NO: 52763 - DNA, 20 bp, Artificial Sequence
  Synthetic oligonucleotide; AGG chr11 5192196 5192215 5192199 -
atagattaatatttaataac

SEQ ID NO: 52764 - DNA, 20 bp, Artificial Sequence
  Synthetic oligonucleotide; AAG chr11 5192170 5192189 5192173 -
tgttatgatttattaaaaat

SEQ ID NO: 52765 - DNA, 20 bp, Artificial Sequence
  Synthetic oligonucleotide; AAG chr11 5192156 5192175 5192159 -
aaaaataagatgataaataa

SEQ ID NO: 52766 - DNA, 20 bp, Artificial Sequence
  Synthetic oligonucleotide; TAG chr11 5192150 5192169 5192153 -
aagatgataaataaaagatt

SEQ ID NO: 52767 - DNA, 20 bp, Artificial Sequence
  Synthetic oligonucleotide; TGG chr11 5192137 5192156 5192140 -
aaagatttagtatcttccca

SEQ ID NO: 52768 - DNA, 20 bp, Artificial Sequence
  Synthetic oligonucleotide; GAG chr11 5192135 5192154 5192138 -
agatttagtatcttcccatg

SEQ ID NO: 52769 - DNA, 20 bp, Artificial Sequence
  Synthetic oligonucleotide; TAG chr11 5192122 5192141 5192125 -
tcccatggagataacacact

SEQ ID NO: 52770 - DNA, 20 bp, Artificial Sequence
  Synthetic oligonucleotide; CAG chr11 5192116 5192135 5192119 -
ggagataacacacttagata

SEQ ID NO: 52771 - DNA, 20 bp, Artificial Sequence
  Synthetic oligonucleotide; AGG chr11 5192115 5192134 5192118 -
gagataacacacttagatac

SEQ ID NO: 52772 - DNA, 20 bp, Artificial Sequence
  Synthetic oligonucleotide; TGG chr11 5192099 5192118 5192102 -
atacaggtttcatgtcactt

SEQ ID NO: 52773 - DNA, 20 bp, Artificial Sequence
  Synthetic oligonucleotide; GAG chr11 5192092 5192111 5192095 -
tttcatgtcactttggacat

SEQ ID NO: 52774 - DNA, 20 bp, Artificial Sequence
  Synthetic oligonucleotide; AAG chr11 5192087 5192106 5192090 -
tgtcactttggacatgagta

SEQ ID NO: 52775 - DNA, 20 bp, Artificial Sequence
  Synthetic oligonucleotide; GAG chr11 5192085 5192104 5192088 -
tcactttggacatgagtaaa

SEQ ID NO: 52776 - DNA, 20 bp, Artificial Sequence
  Synthetic oligonucleotide; AGG chr11 5192084 5192103 5192087 -
cactttggacatgagtaaag

SEQ ID NO: 52777 - DNA, 20 bp, Artificial Sequence
  Synthetic oligonucleotide; GAG chr11 5192082 5192101 5192085 -
ctttggacatgagtaaagag

SEQ ID NO: 52778 - DNA, 20 bp, Artificial Sequence
  Synthetic oligonucleotide; GAG chr11 5192046 5192065 5192049 -
tcccaaatcttgatcacatt

SEQ ID NO: 52779 - DNA, 20 bp, Artificial Sequence
  Synthetic oligonucleotide; AAG chr11 5192038 5192057 5192041 -
cttgatcacattgagtatca

SEQ ID NO: 52780 - DNA, 20 bp, Artificial Sequence
  Synthetic oligonucleotide; AGG chr11 5192037 5192056 5192040 -
ttgatcacattgagtatcaa

SEQ ID NO: 52781 - DNA, 20 bp, Artificial Sequence
  Synthetic oligonucleotide; AAG chr11 5192034 5192053 5192037 -
atcacattgagtatcaaagg

SEQ ID NO: 52782 - DNA, 20 bp, Artificial Sequence
  Synthetic oligonucleotide; AGG chr11 5192033 5192052 5192036 -
tcacattgagtatcaaagga

SEQ ID NO: 52783 - DNA, 20 bp, Artificial Sequence
  Synthetic oligonucleotide; AAG chr11 5192030 5192049 5192033 -
cattgagtatcaaaggaagg

SEQ ID NO: 52784 - DNA, 20 bp, Artificial Sequence
  Synthetic oligonucleotide; AAG chr11 5192027 5192046 5192030 -
tgagtatcaaaggaaggaag

SEQ ID NO: 52785 - DNA, 20 bp, Artificial Sequence
  Synthetic oligonucleotide; TGG chr11 5192011 5192030 5192014 -
gaagaagaaaaaattattaa

SEQ ID NO: 52786 - DNA, 20 bp, Artificial Sequence
  Synthetic oligonucleotide; TGG chr11 5192008 5192027 5192011 -
gaagaaaaaattattaatgg

SEQ ID NO: 52787 - DNA, 20 bp, Artificial Sequence
  Synthetic oligonucleotide; TGG chr11 5191985 5192004 5191988 -
cattaaatatcatttattat

SEQ ID NO: 52788 - DNA, 20 bp, Artificial Sequence
  Synthetic oligonucleotide; TGG chr11 5191973 5191992 5191976 -
tttattattggatgtgttat

SEQ ID NO: 52789 - DNA, 20 bp, Artificial Sequence
  Synthetic oligonucleotide; TGG chr11 5191962 5191981 5191965 -
atgtgttattggcattgtat

SEQ ID NO: 52790 - DNA, 20 bp, Artificial Sequence
  Synthetic oligonucleotide; GAG chr11 5191928 5191947 5191931 -
actgctgtaaaaaaatacct

SEQ ID NO: 52791 - DNA, 20 bp, Artificial Sequence
  Synthetic oligonucleotide; TGG chr11 5191923 5191942 5191926 -
tgtaaaaaaatacctgagac

SEQ ID NO: 52792 - DNA, 20 bp, Artificial Sequence
  Synthetic oligonucleotide; GGG chr11 5191922 5191941 5191925 -
gtaaaaaaatacctgagact

SEQ ID NO: 52793 - DNA, 20 bp, Artificial Sequence
  Synthetic oligonucleotide; AAG chr11 5191910 5191929 5191913 -
ctgagactgggtaatttata

SEQ ID NO: 52794 - DNA, 20 bp, Artificial Sequence
  Synthetic oligonucleotide; CAG chr11 5191905 5191924 5191908 -
actgggtaatttataaagaa

SEQ ID NO: 52795 - DNA, 20 bp, Artificial Sequence
  Synthetic oligonucleotide; GAG chr11 5191903 5191922 5191906 -
tgggtaatttataaagaaca

SEQ ID NO: 52796 - DNA, 20 bp, Artificial Sequence
  Synthetic oligonucleotide; AGG chr11 5191902 5191921 5191905 -
gggtaatttataaagaacag

SEQ ID NO: 52797 - DNA, 20 bp, Artificial Sequence
  Synthetic oligonucleotide; TGG chr11 5191893 5191912 5191896 -
ataaagaacagaggtttaat

SEQ ID NO: 52798 - DNA, 20 bp, Artificial Sequence
  Synthetic oligonucleotide; AAG chr11 5191886 5191905 5191889 -
acagaggtttaattggctca

SEQ ID NO: 52799 - DNA, 20 bp, Artificial Sequence
  Synthetic oligonucleotide; CAG chr11 5191878 5191897 5191881 -
ttaattggctcaaagttctt

SEQ ID NO: 52800 - DNA, 20 bp, Artificial Sequence
  Synthetic oligonucleotide; AGG chr11 5191877 5191896 5191880 -
taattggctcaaagttcttc

SEQ ID NO: 52801 - DNA, 20 bp, Artificial Sequence
  Synthetic oligonucleotide; AAG chr11 5191868 5191887 5191871 -
caaagttcttcaggctgtac

SEQ ID NO: 52802 - DNA, 20 bp, Artificial Sequence
  Synthetic oligonucleotide; AAG chr11 5191865 5191884 5191868 -
agttcttcaggctgtacaag

SEQ ID NO: 52803 - DNA, 20 bp, Artificial Sequence
  Synthetic oligonucleotide; TGG chr11 5191860 5191879 5191863 -
ttcaggctgtacaagaagca

SEQ ID NO: 52804 - DNA, 20 bp, Artificial Sequence
  Synthetic oligonucleotide; CAG chr11 5191857 5191876 5191860 -
aggctgtacaagaagcatgg

SEQ ID NO: 52805 - DNA, 20 bp, Artificial Sequence
  Synthetic oligonucleotide; CAG chr11 5191846 5191865 5191849 -
gaagcatggcagcatctgct

SEQ ID NO: 52806 - DNA, 20 bp, Artificial Sequence
  Synthetic oligonucleotide; TAG chr11 5191839 5191858 5191842 -
ggcagcatctgctcagcttc

SEQ ID NO: 52807 - DNA, 20 bp, Artificial Sequence
  Synthetic oligonucleotide; AGG chr11 5191838 5191857 5191841 -
gcagcatctgctcagcttct

SEQ ID NO: 52808 - DNA, 20 bp, Artificial Sequence
  Synthetic oligonucleotide; GGG chr11 5191837 5191856 5191840 -
cagcatctgctcagcttcta

SEQ ID NO: 52809 - DNA, 20 bp, Artificial Sequence
  Synthetic oligonucleotide; GAG chr11 5191835 5191854 5191838 -
gcatctgctcagcttctagg

SEQ ID NO: 52810 - DNA, 20 bp, Artificial Sequence
  Synthetic oligonucleotide; AAG chr11 5191827 5191846 5191830 -
tcagcttctagggagacctc

SEQ ID NO: 52811 - DNA, 20 bp, Artificial Sequence
  Synthetic oligonucleotide; TGG chr11 5191811 5191830 5191814 -
cctcaagaaacttacaatca

SEQ ID NO: 52812 - DNA, 20 bp, Artificial Sequence
  Synthetic oligonucleotide; CAG chr11 5191808 5191827 5191811 -
caagaaacttacaatcatgg

SEQ ID NO: 52813 - DNA, 20 bp, Artificial Sequence
  Synthetic oligonucleotide; AAG chr11 5191805 5191824 5191808 -
gaaacttacaatcatggcag

SEQ ID NO: 52814 - DNA, 20 bp, Artificial Sequence
  Synthetic oligonucleotide; AAG chr11 5191799 5191818 5191802 -
tacaatcatggcagaagaca

SEQ ID NO: 52815 - DNA, 20 bp, Artificial Sequence
  Synthetic oligonucleotide; CAG chr11 5191796 5191815 5191799 -
aatcatggcagaagacaaag

SEQ ID NO: 52816 - DNA, 20 bp, Artificial Sequence
  Synthetic oligonucleotide; AGG chr11 5191795 5191814 5191798 -
atcatggcagaagacaaagc

SEQ ID NO: 52817 - DNA, 20 bp, Artificial Sequence
  Synthetic oligonucleotide; GAG chr11 5191793 5191812 5191796 -
catggcagaagacaaagcag

SEQ ID NO: 52818 - DNA, 20 bp, Artificial Sequence
  Synthetic oligonucleotide; AAG chr11 5191789 5191808 5191792 -
gcagaagacaaagcaggagc

SEQ ID NO: 52819 - DNA, 20 bp, Artificial Sequence
  Synthetic oligonucleotide; TGG chr11 5191776 5191795 5191779 -
caggagcaagtatcttcaca

SEQ ID NO: 52820 - DNA, 20 bp, Artificial Sequence
  Synthetic oligonucleotide; CAG chr11 5191772 5191791 5191775 -
agcaagtatcttcacatggc

SEQ ID NO: 52821 - DNA, 20 bp, Artificial Sequence
  Synthetic oligonucleotide; AGG chr11 5191771 5191790 5191774 -
gcaagtatcttcacatggcc

SEQ ID NO: 52822 - DNA, 20 bp, Artificial Sequence
  Synthetic oligonucleotide; CAG chr11 5191767 5191786 5191770 -
gtatcttcacatggccagga

SEQ ID NO: 52823 - DNA, 20 bp, Artificial Sequence
  Synthetic oligonucleotide; AGG chr11 5191766 5191785 5191769 -
tatcttcacatggccaggac

SEQ ID NO: 52824 - DNA, 20 bp, Artificial Sequence
  Synthetic oligonucleotide; GGG chr11 5191765 5191784 5191768 -
atcttcacatggccaggaca

SEQ ID NO: 52825 - DNA, 20 bp, Artificial Sequence
  Synthetic oligonucleotide; GAG chr11 5191763 5191782 5191766 -
cttcacatggccaggacagg

SEQ ID NO: 52826 - DNA, 20 bp, Artificial Sequence
  Synthetic oligonucleotide; AAG chr11 5191760 5191779 5191763 -
cacatggccaggacagggag

SEQ ID NO: 52827 - DNA, 20 bp, Artificial Sequence
  Synthetic oligonucleotide; CAG chr11 5191757 5191776 5191760 -
atggccaggacagggagaag

SEQ ID NO: 52828 - DNA, 20 bp, Artificial Sequence
  Synthetic oligonucleotide; AGG chr11 5191756 5191775 5191759 -
tggccaggacagggagaagc

SEQ ID NO: 52829 - DNA, 20 bp, Artificial Sequence
  Synthetic oligonucleotide; GGG chr11 5191755 5191774 5191758 -
ggccaggacagggagaagca

SEQ ID NO: 52830 - DNA, 20 bp, Artificial Sequence
  Synthetic oligonucleotide; TAG chr11 5191752 5191771 5191755 -
caggacagggagaagcaggg

SEQ ID NO: 52831 - DNA, 20 bp, Artificial Sequence
  Synthetic oligonucleotide; AGG chr11 5191751 5191770 5191754 -
aggacagggagaagcagggt

SEQ ID NO: 52832 - DNA, 20 bp, Artificial Sequence
  Synthetic oligonucleotide; GAG chr11 5191749 5191768 5191752 -
gacagggagaagcagggtag

SEQ ID NO: 52833 - DNA, 20 bp, Artificial Sequence
  Synthetic oligonucleotide; AGG chr11 5191748 5191767 5191751 -
acagggagaagcagggtagg

SEQ ID NO: 52834 - DNA, 20 bp, Artificial Sequence
  Synthetic oligonucleotide; CAG chr11 5191724 5191743 5191727 -
gctacacactttcaaacaac

SEQ ID NO: 52835 - DNA, 20 bp, Artificial Sequence
  Synthetic oligonucleotide; GAG chr11 5191715 5191734 5191718 -
tttcaaacaaccagcctctt

SEQ ID NO: 52836 - DNA, 20 bp, Artificial Sequence
  Synthetic oligonucleotide; CAG chr11 5191701 5191720 5191704 -
cctcttgagaactcactata

SEQ ID NO: 52837 - DNA, 20 bp, Artificial Sequence
  Synthetic oligonucleotide; AAG chr11 5191694 5191713 5191697 -
agaactcactatacagtacc

SEQ ID NO: 52838 - DNA, 20 bp, Artificial Sequence
  Synthetic oligonucleotide; AGG chr11 5191693 5191712 5191696 -
gaactcactatacagtacca

SEQ ID NO: 52839 - DNA, 20 bp, Artificial Sequence
  Synthetic oligonucleotide; GGG chr11 5191692 5191711 5191695 -
aactcactatacagtaccaa

SEQ ID NO: 52840 - DNA, 20 bp, Artificial Sequence
  Synthetic oligonucleotide; GGG chr11 5191691 5191710 5191694 -
actcactatacagtaccaag

SEQ ID NO: 52841 - DNA, 20 bp, Artificial Sequence
  Synthetic oligonucleotide; GGG chr11 5191690 5191709 5191693 -
ctcactatacagtaccaagg

SEQ ID NO: 52842 - DNA, 20 bp, Artificial Sequence
  Synthetic oligonucleotide; TGG chr11 5191686 5191705 5191689 -
ctatacagtaccaaggggga

SEQ ID NO: 52843 - DNA, 20 bp, Artificial Sequence
  Synthetic oligonucleotide; GAG chr11 5191668 5191687 5191671 -
gatggtactaaatcgctgat

SEQ ID NO: 52844 - DNA, 20 bp, Artificial Sequence
  Synthetic oligonucleotide; AAG chr11 5191633 5191652 5191636 -
atgattgaattacctcccac

SEQ ID NO: 52845 - DNA, 20 bp, Artificial Sequence
  Synthetic oligonucleotide; AGG chr11 5191632 5191651 5191635 -
tgattgaattacctcccaca

SEQ ID NO: 52846 - DNA, 20 bp, Artificial Sequence
  Synthetic oligonucleotide; TGG chr11 5191614 5191633 5191617 -
caaggccccacctccaacgc

SEQ ID NO: 52847 - DNA, 20 bp, Artificial Sequence
  Synthetic oligonucleotide; TGG chr11 5191588 5191607 5191591 -
ttataatttaacatgatatt

SEQ ID NO: 52848 - DNA, 20 bp, Artificial Sequence
  Synthetic oligonucleotide; GGG chr11 5191587 5191606 5191590 -
tataatttaacatgatattt

SEQ ID NO: 52849 - DNA, 20 bp, Artificial Sequence
  Synthetic oligonucleotide; TGG chr11 5191584 5191603 5191587 -
aatttaacatgatatttggg

SEQ ID NO: 52850 - DNA, 20 bp, Artificial Sequence
  Synthetic oligonucleotide; CAG chr11 5191576 5191595 5191579 -
atgatatttgggtggtgaca

SEQ ID NO: 52851 - DNA, 20 bp, Artificial Sequence
  Synthetic oligonucleotide; TGG chr11 5191549 5191568 5191552 -
aaaccatatccttccacctc

SEQ ID NO: 52852 - DNA, 20 bp, Artificial Sequence
  Synthetic oligonucleotide; CAG chr11 5191490 5191509 5191493 -
atacaatcattacttcccaa

SEQ ID NO: 52853 - DNA, 20 bp, Artificial Sequence
  Synthetic oligonucleotide; AAG chr11 5191480 5191499 5191483 -
tacttcccaacagtcctaca

SEQ ID NO: 52854 - DNA, 20 bp, Artificial Sequence
  Synthetic oligonucleotide; CAG chr11 5191464 5191483 5191467 -
tacaaagtcttaactcattc

SEQ ID NO: 52855 - DNA, 20 bp, Artificial Sequence
  Synthetic oligonucleotide; AAG chr11 5191450 5191469 5191453 -
tcattccagcattaactcaa

SEQ ID NO: 52856 - DNA, 20 bp, Artificial Sequence
  Synthetic oligonucleotide; AAG chr11 5191443 5191462 5191446 -
agcattaactcaaaagtcca

SEQ ID NO: 52857 - DNA, 20 bp, Artificial Sequence
  Synthetic oligonucleotide; AAG chr11 5191436 5191455 5191439 -
actcaaaagtccaaagtcca

SEQ ID NO: 52858 - DNA, 20 bp, Artificial Sequence
  Synthetic oligonucleotide; AAG chr11 5191425 5191444 5191428 -
caaagtccaaagtcttatcc

SEQ ID NO: 52859 - DNA, 20 bp, Artificial Sequence
  Synthetic oligonucleotide; AAG chr11 5191420 5191439 5191423 -
tccaaagtcttatccaagac

SEQ ID NO: 52860 - DNA, 20 bp, Artificial Sequence
  Synthetic oligonucleotide; AGG chr11 5191419 5191438 5191422 -
ccaaagtcttatccaagaca

SEQ ID NO: 52861 - DNA, 20 bp, Artificial Sequence
  Synthetic oligonucleotide; AAG chr11 5191415 5191434 5191418 -
agtcttatccaagacaaggc

SEQ ID NO: 52862 - DNA, 20 bp, Artificial Sequence
  Synthetic oligonucleotide; GAG chr11 5191398 5191417 5191401 -
ggcaagtcccttcaacctat

SEQ ID NO: 52863 - DNA, 20 bp, Artificial Sequence
  Synthetic oligonucleotide; AAG chr11 5191378 5191397 5191381 -
gagcctgtaaaatcaaaaac

SEQ ID NO: 52864 - DNA, 20 bp, Artificial Sequence
  Synthetic oligonucleotide; TAG chr11 5191374 5191393 5191377 -
ctgtaaaatcaaaaacaagt

SEQ ID NO: 52865 - DNA, 20 bp, Artificial Sequence
  Synthetic oligonucleotide; AAG chr11 5191363 5191382 5191366 -
aaaacaagttagttacttcc

SEQ ID NO: 52866 - DNA, 20 bp, Artificial Sequence
  Synthetic oligonucleotide; TGG chr11 5191354 5191373 5191357 -
tagttacttccaagacataa

SEQ ID NO: 52867 - DNA, 20 bp, Artificial Sequence
  Synthetic oligonucleotide; GAG chr11 5191352 5191371 5191355 -
gttacttccaagacataatg

SEQ ID NO: 52868 - DNA, 20 bp, Artificial Sequence
  Synthetic oligonucleotide; AGG chr11 5191351 5191370 5191354 -
ttacttccaagacataatgg

SEQ ID NO: 52869 - DNA, 20 bp, Artificial Sequence
  Synthetic oligonucleotide; TGG chr11 5191345 5191364 5191348 -
ccaagacataatggaggtac

SEQ ID NO: 52870 - DNA, 20 bp, Artificial Sequence
  Synthetic oligonucleotide; TGG chr11 5191339 5191358 5191342 -
cataatggaggtactggcat

SEQ ID NO: 52871 - DNA, 20 bp, Artificial Sequence
  Synthetic oligonucleotide; GGG chr11 5191338 5191357 5191341 -
ataatggaggtactggcatt

SEQ ID NO: 52872 - DNA, 20 bp, Artificial Sequence
  Synthetic oligonucleotide; AAG chr11 5191317 5191336 5191320 -
ggtacaaattcccattccaa

SEQ ID NO: 52873 - DNA, 20 bp, Artificial Sequence
  Synthetic oligonucleotide; GAG chr11 5191315 5191334 5191318 -
tacaaattcccattccaaaa

SEQ ID NO: 52874 - DNA, 20 bp, Artificial Sequence
  Synthetic oligonucleotide; GAG chr11 5191313 5191332 5191316 -
caaattcccattccaaaaga

SEQ ID NO: 52875 - DNA, 20 bp, Artificial Sequence
  Synthetic oligonucleotide; AAG chr11 5191299 5191318 5191302 -
aaaagagagaaatgcaccaa

SEQ ID NO: 52876 - DNA, 20 bp, Artificial Sequence
  Synthetic oligonucleotide; AAG chr11 5191295 5191314 5191298 -
gagagaaatgcaccaaaaga

SEQ ID NO: 52877 - DNA, 20 bp, Artificial Sequence
  Synthetic oligonucleotide; AGG chr11 5191294 5191313 5191297 -
agagaaatgcaccaaaagaa

SEQ ID NO: 52878 - DNA, 20 bp, Artificial Sequence
  Synthetic oligonucleotide; GGG chr11 5191293 5191312 5191296 -
gagaaatgcaccaaaagaaa

SEQ ID NO: 52879 - DNA, 20 bp, Artificial Sequence
  Synthetic oligonucleotide; GGG chr11 5191292 5191311 5191295 -
agaaatgcaccaaaagaaag

SEQ ID NO: 52880 - DNA, 20 bp, Artificial Sequence
  Synthetic oligonucleotide; AAG chr11 5191286 5191305 5191289 -
gcaccaaaagaaaggggcta

SEQ ID NO: 52881 - DNA, 20 bp, Artificial Sequence
  Synthetic oligonucleotide; GAG chr11 5191274 5191293 5191277 -
aggggctaaagatcccacac

SEQ ID NO: 52882 - DNA, 20 bp, Artificial Sequence
  Synthetic oligonucleotide; TAG chr11 5191271 5191290 5191274 -
ggctaaagatcccacacgag

SEQ ID NO: 52883 - DNA, 20 bp, Artificial Sequence
  Synthetic oligonucleotide; CAG chr11 5191262 5191281 5191265 -
tcccacacgagtagaaaacc

SEQ ID NO: 52884 - DNA, 20 bp, Artificial Sequence
  Synthetic oligonucleotide; CAG chr11 5191259 5191278 5191262 -
cacacgagtagaaaacccag

SEQ ID NO: 52885 - DNA, 20 bp, Artificial Sequence
  Synthetic oligonucleotide; AGG chr11 5191258 5191277 5191261 -
acacgagtagaaaacccagc

SEQ ID NO: 52886 - DNA, 20 bp, Artificial Sequence
  Synthetic oligonucleotide; GGG chr11 5191257 5191276 5191260 -
cacgagtagaaaacccagca

SEQ ID NO: 52887 - DNA, 20 bp, Artificial Sequence
  Synthetic oligonucleotide; CAG chr11 5191254 5191273 5191257 -
gagtagaaaacccagcaggg

SEQ ID NO: 52888 - DNA, 20 bp, Artificial Sequence
  Synthetic oligonucleotide; TGG chr11 5191235 5191254 5191238 -
gcagtcattacaccttgata

SEQ ID NO: 52889 - DNA, 20 bp, Artificial Sequence
  Synthetic oligonucleotide; TGG chr11 5191230 5191249 5191233 -
cattacaccttgatatggtt

SEQ ID NO: 52890 - DNA, 20 bp, Artificial Sequence
  Synthetic oligonucleotide; CAG chr11 5191227 5191246 5191230 -
tacaccttgatatggtttgg

SEQ ID NO: 52891 - DNA, 20 bp, Artificial Sequence
  Synthetic oligonucleotide; TAG chr11 5191198 5191217 5191201 -
cacccaaatttcttcttgaa

SEQ ID NO: 52892 - DNA, 20 bp, Artificial Sequence
  Synthetic oligonucleotide; TAG chr11 5191195 5191214 5191198 -
ccaaatttcttcttgaatag

SEQ ID NO: 52893 - DNA, 20 bp, Artificial Sequence
  Synthetic oligonucleotide; AGG chr11 5191194 5191213 5191197 -
caaatttcttcttgaatagt

SEQ ID NO: 52894 - DNA, 20 bp, Artificial Sequence
  Synthetic oligonucleotide; TGG chr11 5191170 5191189 5191173 -
cccataatccctgcctgtca

SEQ ID NO: 52895 - DNA, 20 bp, Artificial Sequence
  Synthetic oligonucleotide; AAG chr11 5191167 5191186 5191170 -
ataatccctgcctgtcatgg

SEQ ID NO: 52896 - DNA, 20 bp, Artificial Sequence
  Synthetic oligonucleotide; AGG chr11 5191166 5191185 5191169 -
taatccctgcctgtcatgga

SEQ ID NO: 52897 - DNA, 20 bp, Artificial Sequence
  Synthetic oligonucleotide; TGG chr11 5191156 5191175 5191159 -
ctgtcatggaaggaacacac

SEQ ID NO: 52898 - DNA, 20 bp, Artificial Sequence
  Synthetic oligonucleotide; GGG chr11 5191155 5191174 5191158 -
tgtcatggaaggaacacact

SEQ ID NO: 52899 - DNA, 20 bp, Artificial Sequence
  Synthetic oligonucleotide; TGG chr11 5191138 5191157 5191141 -
actgggatgtaattgaatca

SEQ ID NO: 52900 - DNA, 20 bp, Artificial Sequence
  Synthetic oligonucleotide; GGG chr11 5191137 5191156 5191140 -
ctgggatgtaattgaatcat

SEQ ID NO: 52901 - DNA, 20 bp, Artificial Sequence
  Synthetic oligonucleotide; GGG chr11 5191136 5191155 5191139 -
tgggatgtaattgaatcatg

SEQ ID NO: 52902 - DNA, 20 bp, Artificial Sequence
  Synthetic oligonucleotide; GGG chr11 5191135 5191154 5191138 -
gggatgtaattgaatcatgg

SEQ ID NO: 52903 - DNA, 20 bp, Artificial Sequence
  Synthetic oligonucleotide; TAG chr11 5191132 5191151 5191135 -
atgtaattgaatcatggggg

SEQ ID NO: 52904 - DNA, 20 bp, Artificial Sequence
  Synthetic oligonucleotide; AGG chr11 5191131 5191150 5191134 -
tgtaattgaatcatgggggt

SEQ ID NO: 52905 - DNA, 20 bp, Artificial Sequence
  Synthetic oligonucleotide; TAG chr11 5191105 5191124 5191108 -
ttcacatgctgttctcatga

SEQ ID NO: 52906 - DNA, 20 bp, Artificial Sequence
  Synthetic oligonucleotide; GAG chr11 5191101 5191120 5191104 -
catgctgttctcatgatagt

SEQ ID NO: 52907 - DNA, 20 bp, Artificial Sequence
  Synthetic oligonucleotide; AAG chr11 5191097 5191116 5191100 -
ctgttctcatgatagtgagt

SEQ ID NO: 52908 - DNA, 20 bp, Artificial Sequence
  Synthetic oligonucleotide; AAG chr11 5191088 5191107 5191091 -
tgatagtgagtaagtctcac

SEQ ID NO: 52909 - DNA, 20 bp, Artificial Sequence
  Synthetic oligonucleotide; TGG chr11 5191079 5191098 5191082 -
gtaagtctcacaagatctga

SEQ ID NO: 52910 - DNA, 20 bp, Artificial Sequence
  Synthetic oligonucleotide; AAG chr11 5191069 5191088 5191072 -
caagatctgatggttttata

SEQ ID NO: 52911 - DNA, 20 bp, Artificial Sequence
  Synthetic oligonucleotide; AGG chr11 5191068 5191087 5191071 -
aagatctgatggttttataa

SEQ ID NO: 52912 - DNA, 20 bp, Artificial Sequence
  Synthetic oligonucleotide; GGG chr11 5191067 5191086 5191070 -
agatctgatggttttataaa

SEQ ID NO: 52913 - DNA, 20 bp, Artificial Sequence
  Synthetic oligonucleotide; CAG chr11 5191026 5191045 5191029 -
tctcttgcctgccaccatgt

SEQ ID NO: 52914 - DNA, 20 bp, Artificial Sequence
  Synthetic oligonucleotide; AAG chr11 5190984 5191003 5190987 -
tcaccttccaccatgattgt

SEQ ID NO: 52915 - DNA, 20 bp, Artificial Sequence
  Synthetic oligonucleotide; AGG chr11 5190983 5191002 5190986 -
caccttccaccatgattgta

SEQ ID NO: 52916 - DNA, 20 bp, Artificial Sequence
  Synthetic oligonucleotide; CAG chr11 5190974 5190993 5190977 -
ccatgattgtaaggcctccc

SEQ ID NO: 52917 - DNA, 20 bp, Artificial Sequence
  Synthetic oligonucleotide; TGG chr11 5190966 5190985 5190969 -
gtaaggcctccccagcaatg

SEQ ID NO: 52918 - DNA, 20 bp, Artificial Sequence
  Synthetic oligonucleotide; GAG chr11 5190957 5190976 5190960 -
ccccagcaatgtggatctat

SEQ ID NO: 52919 - DNA, 20 bp, Artificial Sequence
  Synthetic oligonucleotide; CAG chr11 5190922 5190941 5190925 -
ctttttctttataaattacc

SEQ ID NO: 52920 - DNA, 20 bp, Artificial Sequence
  Synthetic oligonucleotide; CGG chr11 5190916 5190935 5190919 -
ctttataaattacccagtct

SEQ ID NO: 52921 - DNA, 20 bp, Artificial Sequence
  Synthetic oligonucleotide; GGG chr11 5190915 5190934 5190918 -
tttataaattacccagtctc

SEQ ID NO: 52922 - DNA, 20 bp, Artificial Sequence
  Synthetic oligonucleotide; TAG chr11 5190902 5190921 5190905 -
cagtctcgggtatttcttca

SEQ ID NO: 52923 - DNA, 20 bp, Artificial Sequence
  Synthetic oligonucleotide; CAG chr11 5190899 5190918 5190902 -
tctcgggtatttcttcatag

SEQ ID NO: 52924 - DNA, 20 bp, Artificial Sequence
  Synthetic oligonucleotide; CGG chr11 5190889 5190908 5190892 -
ttcttcatagcagtttaaaa

SEQ ID NO: 52925 - DNA, 20 bp, Artificial Sequence
  Synthetic oligonucleotide; CAG chr11 5190831 5190850 5190834 -
tttgaccccatgtctcatat

SEQ ID NO: 52926 - DNA, 20 bp, Artificial Sequence
  Synthetic oligonucleotide; AGG chr11 5190830 5190849 5190833 -
ttgaccccatgtctcatatc

SEQ ID NO: 52927 - DNA, 20 bp, Artificial Sequence
  Synthetic oligonucleotide; GGG chr11 5190829 5190848 5190832 -
tgaccccatgtctcatatca

SEQ ID NO: 52928 - DNA, 20 bp, Artificial Sequence
  Synthetic oligonucleotide; AAG chr11 5190814 5190833 5190817 -
tatcagggacacactgatgc

SEQ ID NO: 52929 - DNA, 20 bp, Artificial Sequence
  Synthetic oligonucleotide; GAG chr11 5190812 5190831 5190815 -
tcagggacacactgatgcaa

SEQ ID NO: 52930 - DNA, 20 bp, Artificial Sequence
  Synthetic oligonucleotide; AGG chr11 5190811 5190830 5190814 -
cagggacacactgatgcaag

SEQ ID NO: 52931 - DNA, 20 bp, Artificial Sequence
  Synthetic oligonucleotide; TGG chr11 5190808 5190827 5190811 -
ggacacactgatgcaagagg

SEQ ID NO: 52932 - DNA, 20 bp, Artificial Sequence
  Synthetic oligonucleotide; GGG chr11 5190807 5190826 5190810 -
gacacactgatgcaagaggt

SEQ ID NO: 52933 - DNA, 20 bp, Artificial Sequence
  Synthetic oligonucleotide; AAG chr11 5190799 5190818 5190802 -
gatgcaagaggtgggctccc

SEQ ID NO: 52934 - DNA, 20 bp, Artificial Sequence
  Synthetic oligonucleotide; AGG chr11 5190798 5190817 5190801 -
atgcaagaggtgggctccca

SEQ ID NO: 52935 - DNA, 20 bp, Artificial Sequence
  Synthetic oligonucleotide; TGG chr11 5190792 5190811 5190795 -
gaggtgggctcccaaggcct

SEQ ID NO: 52936 - DNA, 20 bp, Artificial Sequence
  Synthetic oligonucleotide; GGG chr11 5190791 5190810 5190794 -
aggtgggctcccaaggcctt

SEQ ID NO: 52937 - DNA, 20 bp, Artificial Sequence
  Synthetic oligonucleotide; CAG chr11 5190788 5190807 5190791 -
tgggctcccaaggccttggg

SEQ ID NO: 52938 - DNA, 20 bp, Artificial Sequence
  Synthetic oligonucleotide; CAG chr11 5190764 5190783 5190767 -
tccacccctattgctttgca

SEQ ID NO: 52939 - DNA, 20 bp, Artificial Sequence
  Synthetic oligonucleotide; TAG chr11 5190759 5190778 5190762 -
ccctattgctttgcacagtt

SEQ ID NO: 52940 - DNA, 20 bp, Artificial Sequence
  Synthetic oligonucleotide; AAG chr11 5190739 5190758 5190742 -
tagcccctgctgctgctctt

SEQ ID NO: 52941 - DNA, 20 bp, Artificial Sequence
  Synthetic oligonucleotide; GAG chr11 5190737 5190756 5190740 -
gcccctgctgctgctcttaa

SEQ ID NO: 52942 - DNA, 20 bp, Artificial Sequence
  Synthetic oligonucleotide; GAG chr11 5190726 5190745 5190729 -
tgctcttaagagattgtatt

SEQ ID NO: 52943 - DNA, 20 bp, Artificial Sequence
  Synthetic oligonucleotide; CAG chr11 5190717 5190736 5190720 -
gagattgtattgagtgtttg

SEQ ID NO: 52944 - DNA, 20 bp, Artificial Sequence
  Synthetic oligonucleotide; TAG chr11 5190708 5190727 5190711 -
ttgagtgtttgcagcttttc

SEQ ID NO: 52945 - DNA, 20 bp, Artificial Sequence
  Synthetic oligonucleotide; AGG chr11 5190707 5190726 5190710 -
tgagtgtttgcagcttttct

SEQ ID NO: 52946 - DNA, 20 bp, Artificial Sequence
  Synthetic oligonucleotide; CGG chr11 5190700 5190719 5190703 -
ttgcagcttttctaggtgca

SEQ ID NO: 52947 - DNA, 20 bp, Artificial Sequence
  Synthetic oligonucleotide; CAG chr11 5190687 5190706 5190690 -
aggtgcacggtgcaaactgt

SEQ ID NO: 52948 - DNA, 20 bp, Artificial Sequence
  Synthetic oligonucleotide; TGG chr11 5190684 5190703 5190687 -
tgcacggtgcaaactgtcag

SEQ ID NO: 52949 - DNA, 20 bp, Artificial Sequence
  Synthetic oligonucleotide; TGG chr11 5190670 5190689 5190673 -
tgtcagtggatctaccattc

SEQ ID NO: 52950 - DNA, 20 bp, Artificial Sequence
  Synthetic oligonucleotide; GGG chr11 5190669 5190688 5190672 -
gtcagtggatctaccattct

SEQ ID NO: 52951 - DNA, 20 bp, Artificial Sequence
  Synthetic oligonucleotide; GGG chr11 5190668 5190687 5190671 -
tcagtggatctaccattctg

SEQ ID NO: 52952 - DNA, 20 bp, Artificial Sequence
  Synthetic oligonucleotide; TGG chr11 5190663 5190682 5190666 -
ggatctaccattctggggtc

SEQ ID NO: 52953 - DNA, 20 bp, Artificial Sequence
  Synthetic oligonucleotide; GAG chr11 5190661 5190680 5190664 -
atctaccattctggggtctg

SEQ ID NO: 52954 - DNA, 20 bp, Artificial Sequence
  Synthetic oligonucleotide; AGG chr11 5190660 5190679 5190663 -
tctaccattctggggtctgg

SEQ ID NO: 52955 - DNA, 20 bp, Artificial Sequence
  Synthetic oligonucleotide; CGG chr11 5190656 5190675 5190659 -
ccattctggggtctggagga

SEQ ID NO: 52956 - DNA, 20 bp, Artificial Sequence
  Synthetic oligonucleotide; TGG chr11 5190653 5190672 5190656 -
ttctggggtctggaggacgg

SEQ ID NO: 52957 - DNA, 20 bp, Artificial Sequence
  Synthetic oligonucleotide; TAG chr11 5190639 5190658 5190642 -
ggacggtggcccttttctca

SEQ ID NO: 52958 - DNA, 20 bp, Artificial Sequence
  Synthetic oligonucleotide; TAG chr11 5190630 5190649 5190633 -
cccttttctcatagctctgc

SEQ ID NO: 52959 - DNA, 20 bp, Artificial Sequence
  Synthetic oligonucleotide; AGG chr11 5190629 5190648 5190632 -
ccttttctcatagctctgct

SEQ ID NO: 52960 - DNA, 20 bp, Artificial Sequence
  Synthetic oligonucleotide; CAG chr11 5190626 5190645 5190629 -
tttctcatagctctgctagg

SEQ ID NO: 52961 - DNA, 20 bp, Artificial Sequence
  Synthetic oligonucleotide; CAG chr11 5190618 5190637 5190621 -
agctctgctaggcagtgccc

SEQ ID NO: 52962 - DNA, 20 bp, Artificial Sequence
  Synthetic oligonucleotide; TGG chr11 5190615 5190634 5190618 -
tctgctaggcagtgccccag

SEQ ID NO: 52963 - DNA, 20 bp, Artificial Sequence
  Synthetic oligonucleotide; GAG chr11 5190613 5190632 5190616 -
tgctaggcagtgccccagtg

SEQ ID NO: 52964 - DNA, 20 bp, Artificial Sequence
  Synthetic oligonucleotide; GAG chr11 5190603 5190622 5190606 -
tgccccagtggagactctgt

SEQ ID NO: 52965 - DNA, 20 bp, Artificial Sequence
  Synthetic oligonucleotide; AGG chr11 5190602 5190621 5190605 -
gccccagtggagactctgtg

SEQ ID NO: 52966 - DNA, 20 bp, Artificial Sequence
  Synthetic oligonucleotide; GGG chr11 5190601 5190620 5190604 -
ccccagtggagactctgtga

SEQ ID NO: 52967 - DNA, 20 bp, Artificial Sequence
  Synthetic oligonucleotide; GGG chr11 5190600 5190619 5190603 -
cccagtggagactctgtgag

SEQ ID NO: 52968 - DNA, 20 bp, Artificial Sequence
  Synthetic oligonucleotide; GGG chr11 5190599 5190618 5190602 -
ccagtggagactctgtgagg

SEQ ID NO: 52969 - DNA, 20 bp, Artificial Sequence
  Synthetic oligonucleotide; TAG chr11 5190561 5190580 5190564 -
tttcctccacattgccctat

SEQ ID NO: 52970 - DNA, 20 bp, Artificial Sequence
  Synthetic oligonucleotide; GAG chr11 5190559 5190578 5190562 -
tcctccacattgccctatta

SEQ ID NO: 52971 - DNA, 20 bp, Artificial Sequence
  Synthetic oligonucleotide; AGG chr11 5190558 5190577 5190561 -
cctccacattgccctattag

SEQ ID NO: 52972 - DNA, 20 bp, Artificial Sequence
  Synthetic oligonucleotide; GAG chr11 5190547 5190566 5190550 -
ccctattagaggttcttcat

SEQ ID NO: 52973 - DNA, 20 bp, Artificial Sequence
  Synthetic oligonucleotide; AGG chr11 5190546 5190565 5190549 -
cctattagaggttcttcatg

SEQ ID NO: 52974 - DNA, 20 bp, Artificial Sequence
  Synthetic oligonucleotide; GGG chr11 5190545 5190564 5190548 -
ctattagaggttcttcatga

SEQ ID NO: 52975 - DNA, 20 bp, Artificial Sequence
  Synthetic oligonucleotide; CAG chr11 5190531 5190550 5190534 -
tcatgagggttctgcccctg

SEQ ID NO: 52976 - DNA, 20 bp, Artificial Sequence
  Synthetic oligonucleotide; AGG chr11 5190530 5190549 5190533 -
catgagggttctgcccctgc

SEQ ID NO: 52977 - DNA, 20 bp, Artificial Sequence
  Synthetic oligonucleotide; GAG chr11 5190528 5190547 5190531 -
tgagggttctgcccctgcag

SEQ ID NO: 52978 - DNA, 20 bp, Artificial Sequence
  Synthetic oligonucleotide; AGG chr11 5190527 5190546 5190530 -
gagggttctgcccctgcagg

SEQ ID NO: 52979 - DNA, 20 bp, Artificial Sequence
  Synthetic oligonucleotide; CAG chr11 5190508 5190527 5190511 -
gaggcttctgcctgaacact

SEQ ID NO: 52980 - DNA, 20 bp, Artificial Sequence
  Synthetic oligonucleotide; AGG chr11 5190507 5190526 5190510 -
aggcttctgcctgaacactc

SEQ ID NO: 52981 - DNA, 20 bp, Artificial Sequence
  Synthetic oligonucleotide; TAG chr11 5190480 5190499 5190483 -
tctacacatcctctgaaatc

SEQ ID NO: 52982 - DNA, 20 bp, Artificial Sequence
  Synthetic oligonucleotide; AGG chr11 5190479 5190498 5190482 -
ctacacatcctctgaaatct

SEQ ID NO: 52983 - DNA, 20 bp, Artificial Sequence
  Synthetic oligonucleotide; TGG chr11 5190476 5190495 5190479 -
cacatcctctgaaatctagg

SEQ ID NO: 52984 - DNA, 20 bp, Artificial Sequence
  Synthetic oligonucleotide; GAG chr11 5190474 5190493 5190477 -
catcctctgaaatctaggtg

SEQ ID NO: 52985 - DNA, 20 bp, Artificial Sequence
  Synthetic oligonucleotide; AGG chr11 5190473 5190492 5190476 -
atcctctgaaatctaggtgg

SEQ ID NO: 52986 - DNA, 20 bp, Artificial Sequence
  Synthetic oligonucleotide; AAG chr11 5190465 5190484 5190468 -
aaatctaggtggaggcttac

SEQ ID NO: 52987 - DNA, 20 bp, Artificial Sequence
  Synthetic oligonucleotide; CAG chr11 5190434 5190453 5190437 -
ttttgacctttgcacactcc

SEQ ID NO: 52988 - DNA, 20 bp, Artificial Sequence
  Synthetic oligonucleotide; TGG chr11 5190418 5190437 5190421 -
ctcccagatttatcaccatg

SEQ ID NO: 52989 - DNA, 20 bp, Artificial Sequence
  Synthetic oligonucleotide; AAG chr11 5190415 5190434 5190418 -
ccagatttatcaccatgtgg

SEQ ID NO: 52990 - DNA, 20 bp, Artificial Sequence
  Synthetic oligonucleotide; AAG chr11 5190407 5190426 5190410 -
atcaccatgtggaagcctcc

SEQ ID NO: 52991 - DNA, 20 bp, Artificial Sequence
  Synthetic oligonucleotide; AGG chr11 5190406 5190425 5190409 -
tcaccatgtggaagcctcca

SEQ ID NO: 52992 - DNA, 20 bp, Artificial Sequence
  Synthetic oligonucleotide; AAG chr11 5190383 5190402 5190386 -
cttatgtcttgcaccctctg

SEQ ID NO: 52993 - DNA, 20 bp, Artificial Sequence
  Synthetic oligonucleotide; CAG chr11 5190380 5190399 5190383 -
atgtcttgcaccctctgaag

SEQ ID NO: 52994 - DNA, 20 bp, Artificial Sequence
  Synthetic oligonucleotide; TGG chr11 5190377 5190396 5190380 -
tcttgcaccctctgaagcag

SEQ ID NO: 52995 - DNA, 20 bp, Artificial Sequence
  Synthetic oligonucleotide; TAG chr11 5190371 5190390 5190374 -
accctctgaagcagtggcct

SEQ ID NO: 52996 - DNA, 20 bp, Artificial Sequence
  Synthetic oligonucleotide; TGG chr11 5190361 5190380 5190364 -
gcagtggccttagctgttct

SEQ ID NO: 52997 - DNA, 20 bp, Artificial Sequence
  Synthetic oligonucleotide; GGG chr11 5190360 5190379 5190363 -
cagtggccttagctgttctt

SEQ ID NO: 52998 - DNA, 20 bp, Artificial Sequence
  Synthetic oligonucleotide; GAG chr11 5190350 5190369 5190353 -
agctgttcttgggccccttt

SEQ ID NO: 52999 - DNA, 20 bp, Artificial Sequence
  Synthetic oligonucleotide; CAG chr11 5190344 5190363 5190347 -
tcttgggcccctttgagcca

SEQ ID NO: 53000 - DNA, 20 bp, Artificial Sequence
  Synthetic oligonucleotide; TGG chr11 5190340 5190359 5190343 -
gggcccctttgagccacagc

SEQ ID NO: 53001 - DNA, 20 bp, Artificial Sequence
  Synthetic oligonucleotide; TGG chr11 5190334 5190353 5190337 -
ctttgagccacagctggtgc

SEQ ID NO: 53002 - DNA, 20 bp, Artificial Sequence
  Synthetic oligonucleotide; GAG chr11 5190332 5190351 5190335 -
ttgagccacagctggtgctg

SEQ ID NO: 53003 - DNA, 20 bp, Artificial Sequence
  Synthetic oligonucleotide; CAG chr11 5190329 5190348 5190332 -
agccacagctggtgctggag

SEQ ID NO: 53004 - DNA, 20 bp, Artificial Sequence
  Synthetic oligonucleotide; CAG chr11 5190325 5190344 5190328 -
acagctggtgctggagcagc

SEQ ID NO: 53005 - DNA, 20 bp, Artificial Sequence
  Synthetic oligonucleotide; AGG chr11 5190324 5190343 5190327 -
cagctggtgctggagcagcc

SEQ ID NO: 53006 - DNA, 20 bp, Artificial Sequence
  Synthetic oligonucleotide; AAG chr11 5190317 5190336 5190320 -
tgctggagcagccaggatgc

SEQ ID NO: 53007 - DNA, 20 bp, Artificial Sequence
  Synthetic oligonucleotide; AGG chr11 5190316 5190335 5190319 -
gctggagcagccaggatgca

SEQ ID NO: 53008 - DNA, 20 bp, Artificial Sequence
  Synthetic oligonucleotide; CAG chr11 5190311 5190330 5190314 -
agcagccaggatgcaaggaa

SEQ ID NO: 53009 - DNA, 20 bp, Artificial Sequence
  Synthetic oligonucleotide; AAG chr11 5190301 5190320 5190304 -
atgcaaggaacagtgtcctg

SEQ ID NO: 53010 - DNA, 20 bp, Artificial Sequence
  Synthetic oligonucleotide; AAG chr11 5190292 5190311 5190295 -
acagtgtcctgaagctgctc

SEQ ID NO: 53011 - DNA, 20 bp, Artificial Sequence
  Synthetic oligonucleotide; AGG chr11 5190291 5190310 5190294 -
cagtgtcctgaagctgctca

SEQ ID NO: 53012 - DNA, 20 bp, Artificial Sequence
  Synthetic oligonucleotide; CAG chr11 5190288 5190307 5190291 -
tgtcctgaagctgctcaagg

SEQ ID NO: 53013 - DNA, 20 bp, Artificial Sequence
  Synthetic oligonucleotide; CAG chr11 5190285 5190304 5190288 -
cctgaagctgctcaaggcag

SEQ ID NO: 53014 - DNA, 20 bp, Artificial Sequence
  Synthetic oligonucleotide; AGG chr11 5190284 5190303 5190287 -
ctgaagctgctcaaggcagc

SEQ ID NO: 53015 - DNA, 20 bp, Artificial Sequence
  Synthetic oligonucleotide; GGG chr11 5190283 5190302 5190286 -
tgaagctgctcaaggcagca

SEQ ID NO: 53016 - DNA, 20 bp, Artificial Sequence
  Synthetic oligonucleotide; CAG chr11 5190254 5190273 5190257 -
atctcacccacaaaatcatt

SEQ ID NO: 53017 - DNA, 20 bp, Artificial Sequence
  Synthetic oligonucleotide; TAG chr11 5190245 5190264 5190248 -
acaaaatcattcagtactcc

SEQ ID NO: 53018 - DNA, 20 bp, Artificial Sequence
  Synthetic oligonucleotide; AGG chr11 5190244 5190263 5190247 -
caaaatcattcagtactcct

SEQ ID NO: 53019 - DNA, 20 bp, Artificial Sequence
  Synthetic oligonucleotide; CAG chr11 5190237 5190256 5190240 -
attcagtactcctaggccac

SEQ ID NO: 53020 - DNA, 20 bp, Artificial Sequence
  Synthetic oligonucleotide; AGG chr11 5190236 5190255 5190239 -
ttcagtactcctaggccacc

SEQ ID NO: 53021 - DNA, 20 bp, Artificial Sequence
  Synthetic oligonucleotide; GAG chr11 5190223 5190242 5190226 -
ggccaccaggcctgtgatgt

SEQ ID NO: 53022 - DNA, 20 bp, Artificial Sequence
  Synthetic oligonucleotide; AGG chr11 5190222 5190241 5190225 -
gccaccaggcctgtgatgtg

SEQ ID NO: 53023 - DNA, 20 bp, Artificial Sequence
  Synthetic oligonucleotide; GGG chr11 5190221 5190240 5190224 -
ccaccaggcctgtgatgtga

SEQ ID NO: 53024 - DNA, 20 bp, Artificial Sequence
  Synthetic oligonucleotide; GGG chr11 5190220 5190239 5190223 -
caccaggcctgtgatgtgag

SEQ ID NO: 53025 - DNA, 20 bp, Artificial Sequence
  Synthetic oligonucleotide; AAG chr11 5190210 5190229 5190213 -
gtgatgtgaggggctgctac

SEQ ID NO: 53026 - DNA, 20 bp, Artificial Sequence
  Synthetic oligonucleotide; AGG chr11 5190209 5190228 5190212 -
tgatgtgaggggctgctaca

SEQ ID NO: 53027 - DNA, 20 bp, Artificial Sequence
  Synthetic oligonucleotide; GGG chr11 5190208 5190227 5190211 -
gatgtgaggggctgctacaa

SEQ ID NO: 53028 - DNA, 20 bp, Artificial Sequence
  Synthetic oligonucleotide; GAG chr11 5190189 5190208 5190192 -
agggtctctgaaatgtcttt

SEQ ID NO: 53029 - DNA, 20 bp, Artificial Sequence
  Synthetic oligonucleotide; AGG chr11 5190188 5190207 5190191 -
gggtctctgaaatgtctttg

SEQ ID NO: 53030 - DNA, 20 bp, Artificial Sequence
  Synthetic oligonucleotide; TGG chr11 5190168 5190187 5190171 -
aggcattctcccctttattt

SEQ ID NO: 53031 - DNA, 20 bp, Artificial Sequence
  Synthetic oligonucleotide; TAG chr11 5190161 5190180 5190164 -
ctcccctttattttggctat

SEQ ID NO: 53032 - DNA, 20 bp, Artificial Sequence
  Synthetic oligonucleotide; CGG chr11 5190154 5190173 5190157 -
ttattttggctattagaact

SEQ ID NO: 53033 - DNA, 20 bp, Artificial Sequence
  Synthetic oligonucleotide; CAG chr11 5190125 5190144 5190128 -
ttcatttatgcaaatttcta

SEQ ID NO: 53034 - DNA, 20 bp, Artificial Sequence
  Synthetic oligonucleotide; GAG chr11 5190096 5190115 5190099 -
tgaattgctcctttgaaaat

SEQ ID NO: 53035 - DNA, 20 bp, Artificial Sequence
  Synthetic oligonucleotide; TGG chr11 5190075 5190094 5190078 -
agcttctgttttctaccaca

SEQ ID NO: 53036 - DNA, 20 bp, Artificial Sequence
  Synthetic oligonucleotide; GAG chr11 5190070 5190089 5190073 -
ctgttttctaccacatggcc

SEQ ID NO: 53037 - DNA, 20 bp, Artificial Sequence
  Synthetic oligonucleotide; CAG chr11 5190067 5190086 5190070 -
ttttctaccacatggccgag

SEQ ID NO: 53038 - DNA, 20 bp, Artificial Sequence
  Synthetic oligonucleotide; AAG chr11 5190022 5190041 5190025 -
tctgcttcccttttaaatat

SEQ ID NO: 53039 - DNA, 20 bp, Artificial Sequence
  Synthetic oligonucleotide; GAG chr11 5189984 5190003 5189987 -
atttctttgctcacacatat

SEQ ID NO: 53040 - DNA, 20 bp, Artificial Sequence
  Synthetic oligonucleotide; TAG chr11 5189979 5189998 5189982 -
tttgctcacacatatgagca

SEQ ID NO: 53041 - DNA, 20 bp, Artificial Sequence
  Synthetic oligonucleotide; AGG chr11 5189978 5189997 5189981 -
ttgctcacacatatgagcat

SEQ ID NO: 53042 - DNA, 20 bp, Artificial Sequence
  Synthetic oligonucleotide; TAG chr11 5189971 5189990 5189974 -
cacatatgagcataggttgt

SEQ ID NO: 53043 - DNA, 20 bp, Artificial Sequence
  Synthetic oligonucleotide; AAG chr11 5189968 5189987 5189971 -
atatgagcataggttgttag

SEQ ID NO: 53044 - DNA, 20 bp, Artificial Sequence
  Synthetic oligonucleotide; CAG chr11 5189965 5189984 5189968 -
tgagcataggttgttagaag

SEQ ID NO: 53045 - DNA, 20 bp, Artificial Sequence
  Synthetic oligonucleotide; CAG chr11 5189961 5189980 5189964 -
cataggttgttagaagcagc

SEQ ID NO: 53046 - DNA, 20 bp, Artificial Sequence
  Synthetic oligonucleotide; AGG chr11 5189960 5189979 5189963 -
ataggttgttagaagcagcc

SEQ ID NO: 53047 - DNA, 20 bp, Artificial Sequence
  Synthetic oligonucleotide; TAG chr11 5189933 5189952 5189936 -
atcttgaacaccttgctgct

SEQ ID NO: 53048 - DNA, 20 bp, Artificial Sequence
  Synthetic oligonucleotide; CAG chr11 5189882 5189901 5189885 -
ttatcaacttcgaatttcca

SEQ ID NO: 53049 - DNA, 20 bp, Artificial Sequence
  Synthetic oligonucleotide; AAG chr11 5189872 5189891 5189875 -
cgaatttccacagattctct

SEQ ID NO: 53050 - DNA, 20 bp, Artificial Sequence
  Synthetic oligonucleotide; AGG chr11 5189871 5189890 5189874 -
gaatttccacagattctcta

SEQ ID NO: 53051 - DNA, 20 bp, Artificial Sequence
  Synthetic oligonucleotide; TAG chr11 5189868 5189887 5189871 -
tttccacagattctctaagg

SEQ ID NO: 53052 - DNA, 20 bp, Artificial Sequence
  Synthetic oligonucleotide; GAG chr11 5189866 5189885 5189869 -
tccacagattctctaaggta

SEQ ID NO: 53053 - DNA, 20 bp, Artificial Sequence
  Synthetic oligonucleotide; AGG chr11 5189865 5189884 5189868 -
ccacagattctctaaggtag

SEQ ID NO: 53054 - DNA, 20 bp, Artificial Sequence
  Synthetic oligonucleotide; CAG chr11 5189860 5189879 5189863 -
gattctctaaggtagaggca

SEQ ID NO: 53055 - DNA, 20 bp, Artificial Sequence
  Synthetic oligonucleotide; CAG chr11 5189855 5189874 5189858 -
tctaaggtagaggcacagtg

SEQ ID NO: 53056 - DNA, 20 bp, Artificial Sequence
  Synthetic oligonucleotide; AAG chr11 5189826 5189845 5189829 -
tctttgctaatgtataacaa

SEQ ID NO: 53057 - DNA, 20 bp, Artificial Sequence
  Synthetic oligonucleotide; CAG chr11 5189811 5189830 5189814 -
aacaaaagtgacctttgctc

SEQ ID NO: 53058 - DNA, 20 bp, Artificial Sequence
  Synthetic oligonucleotide; GAG chr11 5189784 5189803 5189787 -
caataaattcatttccatct

SEQ ID NO: 53059 - DNA, 20 bp, Artificial Sequence
  Synthetic oligonucleotide; CAG chr11 5189774 5189793 5189777 -
atttccatctgagaccacct

SEQ ID NO: 53060 - DNA, 20 bp, Artificial Sequence
  Synthetic oligonucleotide; TGG chr11 5189769 5189788 5189772 -
catctgagaccacctcagcc

SEQ ID NO: 53061 - DNA, 20 bp, Artificial Sequence
  Synthetic oligonucleotide; CAG chr11 5189744 5189763 5189747 -
ttcattgtccatatcactat

SEQ ID NO: 53062 - DNA, 20 bp, Artificial Sequence
  Synthetic oligonucleotide; TGG chr11 5189736 5189755 5189739 -
ccatatcactatcagaattt

SEQ ID NO: 53063 - DNA, 20 bp, Artificial Sequence
  Synthetic oligonucleotide; AAG chr11 5189718 5189737 5189721 -
tttggtcacaaccattccac

SEQ ID NO: 53064 - DNA, 20 bp, Artificial Sequence
  Synthetic oligonucleotide; TAG chr11 5189711 5189730 5189714 -
acaaccattccacaagtctc

SEQ ID NO: 53065 - DNA, 20 bp, Artificial Sequence
  Synthetic oligonucleotide; AAG chr11 5189707 5189726 5189710 -
ccattccacaagtctctaga

SEQ ID NO: 53066 - DNA, 20 bp, Artificial Sequence
  Synthetic oligonucleotide; GAG chr11 5189670 5189689 5189673 -
tcatctccctgtcttcttct

SEQ ID NO: 53067 - DNA, 20 bp, Artificial Sequence
  Synthetic oligonucleotide; AAG chr11 5189626 5189645 5189629 -
ctgcctgttatccaatgcca

SEQ ID NO: 53068 - DNA, 20 bp, Artificial Sequence
  Synthetic oligonucleotide; TAG chr11 5189596 5189615 5189599 -
cacattttcatgtatcttta

SEQ ID NO: 53069 - DNA, 20 bp, Artificial Sequence
  Synthetic oligonucleotide; CAG chr11 5189593 5189612 5189596 -
attttcatgtatctttatag

SEQ ID NO: 53070 - DNA, 20 bp, Artificial Sequence
  Synthetic oligonucleotide; TGG chr11 5189579 5189598 5189582 -
ttatagcagtaccccacttt

SEQ ID NO: 53071 - DNA, 20 bp, Artificial Sequence
  Synthetic oligonucleotide; TGG chr11 5189560 5189579 5189563 -
ttggtaccaattttctgtac

SEQ ID NO: 53072 - DNA, 20 bp, Artificial Sequence
  Synthetic oligonucleotide; AAG chr11 5189538 5189557 5189541 -
gtccattctcatcttgctat

SEQ ID NO: 53073 - DNA, 20 bp, Artificial Sequence
  Synthetic oligonucleotide; AGG chr11 5189537 5189556 5189540 -
tccattctcatcttgctata

SEQ ID NO: 53074 - DNA, 20 bp, Artificial Sequence
  Synthetic oligonucleotide; GAG chr11 5189526 5189545 5189529 -
cttgctataaggaaatacct

SEQ ID NO: 53075 - DNA, 20 bp, Artificial Sequence
  Synthetic oligonucleotide; TGG chr11 5189521 5189540 5189524 -
tataaggaaatacctgagac

SEQ ID NO: 53076 - DNA, 20 bp, Artificial Sequence
  Synthetic oligonucleotide; GGG chr11 5189520 5189539 5189523 -
ataaggaaatacctgagact

SEQ ID NO: 53077 - DNA, 20 bp, Artificial Sequence
  Synthetic oligonucleotide; TGG chr11 5189513 5189532 5189516 -
aatacctgagactgggtaaa

SEQ ID NO: 53078 - DNA, 20 bp, Artificial Sequence
  Synthetic oligonucleotide; AAG chr11 5189508 5189527 5189511 -
ctgagactgggtaaatggtg

SEQ ID NO: 53079 - DNA, 20 bp, Artificial Sequence
  Synthetic oligonucleotide; CAG chr11 5189503 5189522 5189506 -
actgggtaaatggtgaagaa

SEQ ID NO: 53080 - DNA, 20 bp, Artificial Sequence
  Synthetic oligonucleotide; GAG chr11 5189501 5189520 5189504 -
tgggtaaatggtgaagaaca

SEQ ID NO: 53081 - DNA, 20 bp, Artificial Sequence
  Synthetic oligonucleotide; TGG chr11 5189491 5189510 5189494 -
gtgaagaacagagatttaat

SEQ ID NO: 53082 - DNA, 20 bp, Artificial Sequence
  Synthetic oligonucleotide; CAG chr11 5189484 5189503 5189487 -
acagagatttaattggctca

SEQ ID NO: 53083 - DNA, 20 bp, Artificial Sequence
  Synthetic oligonucleotide; AAG chr11 5189476 5189495 5189479 -
ttaattggctcacagttcta

SEQ ID NO: 53084 - DNA, 20 bp, Artificial Sequence
  Synthetic oligonucleotide; AGG chr11 5189475 5189494 5189478 -
taattggctcacagttctaa

SEQ ID NO: 53085 - DNA, 20 bp, Artificial Sequence
  Synthetic oligonucleotide; CAG chr11 5189467 5189486 5189470 -
tcacagttctaaaggctgta

SEQ ID NO: 53086 - DNA, 20 bp, Artificial Sequence
  Synthetic oligonucleotide; AGG chr11 5189466 5189485 5189469 -
cacagttctaaaggctgtac

SEQ ID NO: 53087 - DNA, 20 bp, Artificial Sequence
  Synthetic oligonucleotide; AAG chr11 5189463 5189482 5189466 -
agttctaaaggctgtacagg

SEQ ID NO: 53088 - DNA, 20 bp, Artificial Sequence
  Synthetic oligonucleotide; TGG chr11 5189458 5189477 5189461 -
taaaggctgtacaggaagca

SEQ ID NO: 53089 - DNA, 20 bp, Artificial Sequence
  Synthetic oligonucleotide; CAG chr11 5189444 5189463 5189447 -
gaagcatggcaacgtctgct

SEQ ID NO: 53090 - DNA, 20 bp, Artificial Sequence
  Synthetic oligonucleotide; TAG chr11 5189437 5189456 5189440 -
ggcaacgtctgctcagcttc

SEQ ID NO: 53091 - DNA, 20 bp, Artificial Sequence
  Synthetic oligonucleotide; AGG chr11 5189436 5189455 5189439 -
gcaacgtctgctcagcttct

SEQ ID NO: 53092 - DNA, 20 bp, Artificial Sequence
  Synthetic oligonucleotide; GGG chr11 5189435 5189454 5189438 -
caacgtctgctcagcttcta

SEQ ID NO: 53093 - DNA, 20 bp, Artificial Sequence
  Synthetic oligonucleotide; GAG chr11 5189433 5189452 5189436 -
acgtctgctcagcttctagg

SEQ ID NO: 53094 - DNA, 20 bp, Artificial Sequence
  Synthetic oligonucleotide; AGG chr11 5189432 5189451 5189435 -
cgtctgctcagcttctaggg

SEQ ID NO: 53095 - DNA, 20 bp, Artificial Sequence
  Synthetic oligonucleotide; CAG chr11 5189426 5189445 5189429 -
ctcagcttctagggaggttt

SEQ ID NO: 53096 - DNA, 20 bp, Artificial Sequence
  Synthetic oligonucleotide; AGG chr11 5189425 5189444 5189428 -
tcagcttctagggaggtttc

SEQ ID NO: 53097 - DNA, 20 bp, Artificial Sequence
  Synthetic oligonucleotide; TGG chr11 5189409 5189428 5189412 -
tttcaggaaacttataatca

SEQ ID NO: 53098 - DNA, 20 bp, Artificial Sequence
  Synthetic oligonucleotide; CAG chr11 5189406 5189425 5189409 -
caggaaacttataatcatgg

SEQ ID NO: 53099 - DNA, 20 bp, Artificial Sequence
  Synthetic oligonucleotide; GAG chr11 5189404 5189423 5189407 -
ggaaacttataatcatggca

SEQ ID NO: 53100 - DNA, 20 bp, Artificial Sequence
  Synthetic oligonucleotide; GAG chr11 5189402 5189421 5189405 -
aaacttataatcatggcaga

SEQ ID NO: 53101 - DNA, 20 bp, Artificial Sequence
  Synthetic oligonucleotide; CAG chr11 5189394 5189413 5189397 -
aatcatggcagagagaaaaa

SEQ ID NO: 53102 - DNA, 20 bp, Artificial Sequence
  Synthetic oligonucleotide; AGG chr11 5189393 5189412 5189396 -
atcatggcagagagaaaaac

SEQ ID NO: 53103 - DNA, 20 bp, Artificial Sequence
  Synthetic oligonucleotide; GAG chr11 5189391 5189410 5189394 -
catggcagagagaaaaacag

SEQ ID NO: 53104 - DNA, 20 bp, Artificial Sequence
  Synthetic oligonucleotide; TGG chr11 5189374 5189393 5189377 -
caggagcatgtgtcttcaca

SEQ ID NO: 53105 - DNA, 20 bp, Artificial Sequence
  Synthetic oligonucleotide; TGG chr11 5189370 5189389 5189373 -
agcatgtgtcttcacatggc

SEQ ID NO: 53106 - DNA, 20 bp, Artificial Sequence
  Synthetic oligonucleotide; GAG chr11 5189368 5189387 5189371 -
catgtgtcttcacatggctg

SEQ ID NO: 53107 - DNA, 20 bp, Artificial Sequence
  Synthetic oligonucleotide; CAG chr11 5189365 5189384 5189368 -
gtgtcttcacatggctggag

SEQ ID NO: 53108 - DNA, 20 bp, Artificial Sequence
  Synthetic oligonucleotide; AGG chr11 5189364 5189383 5189367 -
tgtcttcacatggctggagc

SEQ ID NO: 53109 - DNA, 20 bp, Artificial Sequence
  Synthetic oligonucleotide; AAG chr11 5189361 5189380 5189364 -
cttcacatggctggagcagg

SEQ ID NO: 53110 - DNA, 20 bp, Artificial Sequence
  Synthetic oligonucleotide; AAG chr11 5189358 5189377 5189361 -
cacatggctggagcaggaag

SEQ ID NO: 53111 - DNA, 20 bp, Artificial Sequence
  Synthetic oligonucleotide; GAG chr11 5189356 5189375 5189359 -
catggctggagcaggaagaa

SEQ ID NO: 53112 - DNA, 20 bp, Artificial Sequence
  Synthetic oligonucleotide; AGG chr11 5189355 5189374 5189358 -
atggctggagcaggaagaag

SEQ ID NO: 53113 - DNA, 20 bp, Artificial Sequence
  Synthetic oligonucleotide; CAG chr11 5189352 5189371 5189355 -
gctggagcaggaagaagagg

SEQ ID NO: 53114 - DNA, 20 bp, Artificial Sequence
  Synthetic oligonucleotide; AGG chr11 5189351 5189370 5189354 -
ctggagcaggaagaagaggc

SEQ ID NO: 53115 - DNA, 20 bp, Artificial Sequence
  Synthetic oligonucleotide; GGG chr11 5189350 5189369 5189353 -
tggagcaggaagaagaggca

SEQ ID NO: 53116 - DNA, 20 bp, Artificial Sequence
  Synthetic oligonucleotide; GAG chr11 5189348 5189367 5189351 -
gagcaggaagaagaggcagg

SEQ ID NO: 53117 - DNA, 20 bp, Artificial Sequence
  Synthetic oligonucleotide; AGG chr11 5189347 5189366 5189350 -
agcaggaagaagaggcaggg

SEQ ID NO: 53118 - DNA, 20 bp, Artificial Sequence
  Synthetic oligonucleotide; TAG chr11 5189344 5189363 5189347 -
aggaagaagaggcagggagg

SEQ ID NO: 53119 - DNA, 20 bp, Artificial Sequence
  Synthetic oligonucleotide; GAG chr11 5189323 5189342 5189326 -
agtaaacaaccatatctcat

SEQ ID NO: 53120 - DNA, 20 bp, Artificial Sequence
  Synthetic oligonucleotide; AAG chr11 5189297 5189316 5189300 -
tcacccactatacgtaccaa

SEQ ID NO: 53121 - DNA, 20 bp, Artificial Sequence
  Synthetic oligonucleotide; AGG chr11 5189296 5189315 5189299 -
cacccactatacgtaccaaa

SEQ ID NO: 53122 - DNA, 20 bp, Artificial Sequence
  Synthetic oligonucleotide; GGG chr11 5189295 5189314 5189298 -
acccactatacgtaccaaaa

SEQ ID NO: 53123 - DNA, 20 bp, Artificial Sequence
  Synthetic oligonucleotide; AAG chr11 5189283 5189302 5189286 -
taccaaaagggactgatatt

SEQ ID NO: 53124 - DNA, 20 bp, Artificial Sequence
  Synthetic oligonucleotide; CAG chr11 5189237 5189256 5189240 -
atgatccaatcacttcccac

SEQ ID NO: 53125 - DNA, 20 bp, Artificial Sequence
  Synthetic oligonucleotide; AGG chr11 5189236 5189255 5189239 -
tgatccaatcacttcccacc

SEQ ID NO: 53126 - DNA, 20 bp, Artificial Sequence
  Synthetic oligonucleotide; TGG chr11 5189218 5189237 5189221 -
ccaggccccatcttcaacac

SEQ ID NO: 53127 - DNA, 20 bp, Artificial Sequence
  Synthetic oligonucleotide; GGG chr11 5189217 5189236 5189220 -
caggccccatcttcaacact

SEQ ID NO: 53128 - DNA, 20 bp, Artificial Sequence
  Synthetic oligonucleotide; GGG chr11 5189216 5189235 5189219 -
aggccccatcttcaacactg

SEQ ID NO: 53129 - DNA, 20 bp, Artificial Sequence
  Synthetic oligonucleotide; CAG chr11 5189209 5189228 5189212 -
atcttcaacactggggatta

SEQ ID NO: 53130 - DNA, 20 bp, Artificial Sequence
  Synthetic oligonucleotide; GAG chr11 5189198 5189217 5189201 -
tggggattacagctgaacat

SEQ ID NO: 53131 - DNA, 20 bp, Artificial Sequence
  Synthetic oligonucleotide; TAG chr11 5189193 5189212 5189196 -
attacagctgaacatgagat

SEQ ID NO: 53132 - DNA, 20 bp, Artificial Sequence
  Synthetic oligonucleotide; AGG chr11 5189192 5189211 5189195 -
ttacagctgaacatgagatt

SEQ ID NO: 53133 - DNA, 20 bp, Artificial Sequence
  Synthetic oligonucleotide; GGG chr11 5189191 5189210 5189194 -
tacagctgaacatgagatta

SEQ ID NO: 53134 - DNA, 20 bp, Artificial Sequence
  Synthetic oligonucleotide; TGG chr11 5189188 5189207 5189191 -
agctgaacatgagattaggg

SEQ ID NO: 53135 - DNA, 20 bp, Artificial Sequence
  Synthetic oligonucleotide; GAG chr11 5189186 5189205 5189189 -
ctgaacatgagattagggtg

SEQ ID NO: 53136 - DNA, 20 bp, Artificial Sequence
  Synthetic oligonucleotide; CAG chr11 5189180 5189199 5189183 -
atgagattagggtggagaca

SEQ ID NO: 53137 - DNA, 20 bp, Artificial Sequence
  Synthetic oligonucleotide; CAG chr11 5189164 5189183 5189167 -
gacacagatccaaaccatat

SEQ ID NO: 53138 - DNA, 20 bp, Artificial Sequence
  Synthetic oligonucleotide; AGG chr11 5189163 5189182 5189166 -
acacagatccaaaccatatc

SEQ ID NO: 53139 - DNA, 20 bp, Artificial Sequence
  Synthetic oligonucleotide; AAG chr11 5189110 5189129 5189113 -
caacaaaatacataaaatgt

SEQ ID NO: 53140 - DNA, 20 bp, Artificial Sequence
  Synthetic oligonucleotide; AAG chr11 5189060 5189079 5189063 -
aaactttgtttctttaatac

SEQ ID NO: 53141 - DNA, 20 bp, Artificial Sequence
  Synthetic oligonucleotide; CAG chr11 5189057 5189076 5189060 -
ctttgtttctttaatacaag

SEQ ID NO: 53142 - DNA, 20 bp, Artificial Sequence
  Synthetic oligonucleotide; TGG chr11 5189048 5189067 5189051 -
tttaatacaagcagtcgtat

SEQ ID NO: 53143 - DNA, 20 bp, Artificial Sequence
  Synthetic oligonucleotide; AAG chr11 5189036 5189055 5189039 -
agtcgtattggcttctatac

SEQ ID NO: 53144 - DNA, 20 bp, Artificial Sequence
  Synthetic oligonucleotide; TAG chr11 5188999 5189018 5189002 -
acacacatattatgatgtat

SEQ ID NO: 53145 - DNA, 20 bp, Artificial Sequence
  Synthetic oligonucleotide; AAG chr11 5188996 5189015 5188999 -
cacatattatgatgtattag

SEQ ID NO: 53146 - DNA, 20 bp, Artificial Sequence
  Synthetic oligonucleotide; AGG chr11 5188995 5189014 5188998 -
acatattatgatgtattaga

SEQ ID NO: 53147 - DNA, 20 bp, Artificial Sequence
  Synthetic oligonucleotide; AAG chr11 5188992 5189011 5188995 -
tattatgatgtattagaagg

SEQ ID NO: 53148 - DNA, 20 bp, Artificial Sequence
  Synthetic oligonucleotide; AAG chr11 5188977 5188996 5188980 -
gaaggaagataaatgtcatc

SEQ ID NO: 53149 - DNA, 20 bp, Artificial Sequence
  Synthetic oligonucleotide; AAG chr11 5188967 5188986 5188970 -
aaatgtcatcaagccttatt

SEQ ID NO: 53150 - DNA, 20 bp, Artificial Sequence
  Synthetic oligonucleotide; AGG chr11 5188966 5188985 5188969 -
aatgtcatcaagccttatta

SEQ ID NO: 53151 - DNA, 20 bp, Artificial Sequence
  Synthetic oligonucleotide; CAG chr11 5188963 5188982 5188966 -
gtcatcaagccttattaagg

SEQ ID NO: 53152 - DNA, 20 bp, Artificial Sequence
  Synthetic oligonucleotide; AGG chr11 5188962 5188981 5188965 -
tcatcaagccttattaaggc

SEQ ID NO: 53153 - DNA, 20 bp, Artificial Sequence
  Synthetic oligonucleotide; TGG chr11 5188956 5188975 5188959 -
agccttattaaggcaggtcc

SEQ ID NO: 53154 - DNA, 20 bp, Artificial Sequence
  Synthetic oligonucleotide; AAG chr11 5188939 5188958 5188942 -
tcctggtgtatccttcctta

SEQ ID NO: 53155 - DNA, 20 bp, Artificial Sequence
  Synthetic oligonucleotide; AAG chr11 5188934 5188953 5188937 -
gtgtatccttccttaaagaa

SEQ ID NO: 53156 - DNA, 20 bp, Artificial Sequence
  Synthetic oligonucleotide; TAG chr11 5188913 5188932 5188916 -
agtatctaataaccttacgt

SEQ ID NO: 53157 - DNA, 20 bp, Artificial Sequence
  Synthetic oligonucleotide; AAG chr11 5188903 5188922 5188906 -
aaccttacgttagctaaacg

SEQ ID NO: 53158 - DNA, 20 bp, Artificial Sequence
  Synthetic oligonucleotide; GAG chr11 5188901 5188920 5188904 -
ccttacgttagctaaacgaa

SEQ ID NO: 53159 - DNA, 20 bp, Artificial Sequence
  Synthetic oligonucleotide; TAG chr11 5188889 5188908 5188892 -
taaacgaagagataatatat

SEQ ID NO: 53160 - DNA, 20 bp, Artificial Sequence
  Synthetic oligonucleotide; CAG chr11 5188876 5188895 5188879 -
aatatattagtaattcttcc

SEQ ID NO: 53161 - DNA, 20 bp, Artificial Sequence
  Synthetic oligonucleotide; AAG chr11 5188870 5188889 5188873 -
ttagtaattcttcccagata

SEQ ID NO: 53162 - DNA, 20 bp, Artificial Sequence
  Synthetic oligonucleotide; AAG chr11 5188857 5188876 5188860 -
ccagataaagatcatctcta

SEQ ID NO: 53163 - DNA, 20 bp, Artificial Sequence
  Synthetic oligonucleotide; TGG chr11 5188836 5188855 5188839 -
agtaattcacaaactccacc

SEQ ID NO: 53164 - DNA, 20 bp, Artificial Sequence
  Synthetic oligonucleotide; AAG chr11 5188832 5188851 5188835 -
attcacaaactccacctgga

SEQ ID NO: 53165 - DNA, 20 bp, Artificial Sequence
  Synthetic oligonucleotide; AAG chr11 5188829 5188848 5188832 -
cacaaactccacctggaaag

SEQ ID NO: 53166 - DNA, 20 bp, Artificial Sequence
  Synthetic oligonucleotide; GAG chr11 5188827 5188846 5188830 -
caaactccacctggaaagaa

SEQ ID NO: 53167 - DNA, 20 bp, Artificial Sequence
  Synthetic oligonucleotide; TGG chr11 5188824 5188843 5188827 -
actccacctggaaagaagag

SEQ ID NO: 53168 - DNA, 20 bp, Artificial Sequence
  Synthetic oligonucleotide; AAG chr11 5188812 5188831 5188815 -
aagaagagtggctattgctc

SEQ ID NO: 53169 - DNA, 20 bp, Artificial Sequence
  Synthetic oligonucleotide; TGG chr11 5188796 5188815 5188799 -
gctcaagctattcttcaatg

SEQ ID NO: 53170 - DNA, 20 bp, Artificial Sequence
  Synthetic oligonucleotide; CAG chr11 5188793 5188812 5188796 -
caagctattcttcaatgtgg

SEQ ID NO: 53171 - DNA, 20 bp, Artificial Sequence
  Synthetic oligonucleotide; AGG chr11 5188792 5188811 5188795 -
aagctattcttcaatgtggc

SEQ ID NO: 53172 - DNA, 20 bp, Artificial Sequence
  Synthetic oligonucleotide; GGG chr11 5188791 5188810 5188794 -
agctattcttcaatgtggca

SEQ ID NO: 53173 - DNA, 20 bp, Artificial Sequence
  Synthetic oligonucleotide; GGG chr11 5188790 5188809 5188793 -
gctattcttcaatgtggcag

SEQ ID NO: 53174 - DNA, 20 bp, Artificial Sequence
  Synthetic oligonucleotide; AAG chr11 5188773 5188792 5188776 -
caggggaaaaatctttgaaa

SEQ ID NO: 53175 - DNA, 20 bp, Artificial Sequence
  Synthetic oligonucleotide; AAG chr11 5188766 5188785 5188769 -
aaaatctttgaaaaagctac

SEQ ID NO: 53176 - DNA, 20 bp, Artificial Sequence
  Synthetic oligonucleotide; GAG chr11 5188736 5188755 5188739 -
aaatattgattccaaccact

SEQ ID NO: 53177 - DNA, 20 bp, Artificial Sequence
  Synthetic oligonucleotide; CAG chr11 5188725 5188744 5188728 -
ccaaccactgagaaactcta

SEQ ID NO: 53178 - DNA, 20 bp, Artificial Sequence
  Synthetic oligonucleotide; CAG chr11 5188722 5188741 5188725 -
accactgagaaactctacag

SEQ ID NO: 53179 - DNA, 20 bp, Artificial Sequence
  Synthetic oligonucleotide; AGG chr11 5188721 5188740 5188724 -
ccactgagaaactctacagc

SEQ ID NO: 53180 - DNA, 20 bp, Artificial Sequence
  Synthetic oligonucleotide; GGG chr11 5188720 5188739 5188723 -
cactgagaaactctacagca

SEQ ID NO: 53181 - DNA, 20 bp, Artificial Sequence
  Synthetic oligonucleotide; TGG chr11 5188704 5188723 5188707 -
agcagggatgtccaatcttt

SEQ ID NO: 53182 - DNA, 20 bp, Artificial Sequence
  Synthetic oligonucleotide; TGG chr11 5188695 5188714 5188698 -
gtccaatcttttggcttccc

SEQ ID NO: 53183 - DNA, 20 bp, Artificial Sequence
  Synthetic oligonucleotide; GGG chr11 5188694 5188713 5188697 -
tccaatcttttggcttccct

SEQ ID NO: 53184 - DNA, 20 bp, Artificial Sequence
  Synthetic oligonucleotide; CAG chr11 5188662 5188681 5188665 -
aaatatactaacactaatga

SEQ ID NO: 53185 - DNA, 20 bp, Artificial Sequence
  Synthetic oligonucleotide; GAG chr11 5188654 5188673 5188657 -
taacactaatgacagctcat

SEQ ID NO: 53186 - DNA, 20 bp, Artificial Sequence
  Synthetic oligonucleotide; AAG chr11 5188600 5188619 5188603 -
ataaaatctcataatgtttt

SEQ ID NO: 53187 - DNA, 20 bp, Artificial Sequence
  Synthetic oligonucleotide; AAG chr11 5188596 5188615 5188599 -
aatctcataatgttttaaga

SEQ ID NO: 53188 - DNA, 20 bp, Artificial Sequence
  Synthetic oligonucleotide; TGG chr11 5188587 5188606 5188590 -
atgttttaagaaagttgtgt

SEQ ID NO: 53189 - DNA, 20 bp, Artificial Sequence
  Synthetic oligonucleotide; TAG chr11 5188583 5188602 5188586 -
tttaagaaagttgtgttgga

SEQ ID NO: 53190 - DNA, 20 bp, Artificial Sequence
  Synthetic oligonucleotide; AAG chr11 5188574 5188593 5188577 -
gttgtgttggatagcattca

SEQ ID NO: 53191 - DNA, 20 bp, Artificial Sequence
  Synthetic oligonucleotide; TGG chr11 5188565 5188584 5188568 -
gatagcattcaaagccatct

SEQ ID NO: 53192 - DNA, 20 bp, Artificial Sequence
  Synthetic oligonucleotide; GGG chr11 5188564 5188583 5188567 -
atagcattcaaagccatctt

SEQ ID NO: 53193 - DNA, 20 bp, Artificial Sequence
  Synthetic oligonucleotide; CAG chr11 5188554 5188573 5188557 -
aagccatcttgggatgcatg

SEQ ID NO: 53194 - DNA, 20 bp, Artificial Sequence
  Synthetic oligonucleotide; CGG chr11 5188547 5188566 5188550 -
cttgggatgcatgcagccca

SEQ ID NO: 53195 - DNA, 20 bp, Artificial Sequence
  Synthetic oligonucleotide; GGG chr11 5188546 5188565 5188549 -
ttgggatgcatgcagcccac

SEQ ID NO: 53196 - DNA, 20 bp, Artificial Sequence
  Synthetic oligonucleotide; CAG chr11 5188540 5188559 5188543 -
tgcatgcagcccacgggcca

SEQ ID NO: 53197 - DNA, 20 bp, Artificial Sequence
  Synthetic oligonucleotide; AGG chr11 5188539 5188558 5188542 -
gcatgcagcccacgggccac

SEQ ID NO: 53198 - DNA, 20 bp, Artificial Sequence
  Synthetic oligonucleotide; TGG chr11 5188535 5188554 5188538 -
gcagcccacgggccacaggt

SEQ ID NO: 53199 - DNA, 20 bp, Artificial Sequence
  Synthetic oligonucleotide; AAG chr11 5188530 5188549 5188533 -
ccacgggccacaggttggac

SEQ ID NO: 53200 - DNA, 20 bp, Artificial Sequence
  Synthetic oligonucleotide; CAG chr11 5188518 5188537 5188521 -
ggttggacaagcttgctcta

SEQ ID NO: 53201 - DNA, 20 bp, Artificial Sequence
  Synthetic oligonucleotide; AAG chr11 5188506 5188525 5188509 -
ttgctctacagcctacaaac

SEQ ID NO: 53202 - DNA, 20 bp, Artificial Sequence
  Synthetic oligonucleotide; AGG chr11 5188505 5188524 5188508 -
tgctctacagcctacaaaca

SEQ ID NO: 53203 - DNA, 20 bp, Artificial Sequence
  Synthetic oligonucleotide; AAG chr11 5188502 5188521 5188505 -
tctacagcctacaaacaagg

SEQ ID NO: 53204 - DNA, 20 bp, Artificial Sequence
  Synthetic oligonucleotide; TGG chr11 5188470 5188489 5188473 -
aatatttctgttctcttttc

SEQ ID NO: 53205 - DNA, 20 bp, Artificial Sequence
  Synthetic oligonucleotide; CAG chr11 5188457 5188476 5188460 -
tcttttctggcaccaactcc

SEQ ID NO: 53206 - DNA, 20 bp, Artificial Sequence
  Synthetic oligonucleotide; TAG chr11 5188448 5188467 5188451 -
gcaccaactcccagctttac

SEQ ID NO: 53207 - DNA, 20 bp, Artificial Sequence
  Synthetic oligonucleotide; CAG chr11 5188435 5188454 5188438 -
gctttactagcaccaactcc

SEQ ID NO: 53208 - DNA, 20 bp, Artificial Sequence
  Synthetic oligonucleotide; GAG chr11 5188414 5188433 5188417 -
agctttactaacttacaaat

SEQ ID NO: 53209 - DNA, 20 bp, Artificial Sequence
  Synthetic oligonucleotide; AAG chr11 5188411 5188430 5188414 -
tttactaacttacaaatgag

SEQ ID NO: 53210 - DNA, 20 bp, Artificial Sequence
  Synthetic oligonucleotide; CAG chr11 5188404 5188423 5188407 -
acttacaaatgagaagaaac

SEQ ID NO: 53211 - DNA, 20 bp, Artificial Sequence
  Synthetic oligonucleotide; AGG chr11 5188403 5188422 5188406 -
cttacaaatgagaagaaacc

SEQ ID NO: 53212 - DNA, 20 bp, Artificial Sequence
  Synthetic oligonucleotide; AAG chr11 5188372 5188391 5188375 -
tatgccaaattacttgttcg

SEQ ID NO: 53213 - DNA, 20 bp, Artificial Sequence
  Synthetic oligonucleotide; AAG chr11 5188368 5188387 5188371 -
ccaaattacttgttcgaaga

SEQ ID NO: 53214 - DNA, 20 bp, Artificial Sequence
  Synthetic oligonucleotide; AGG chr11 5188367 5188386 5188370 -
caaattacttgttcgaagaa

SEQ ID NO: 53215 - DNA, 20 bp, Artificial Sequence
  Synthetic oligonucleotide; TGG chr11 5188358 5188377 5188361 -
tgttcgaagaaaggatcatc

SEQ ID NO: 53216 - DNA, 20 bp, Artificial Sequence
  Synthetic oligonucleotide; TGG chr11 5188344 5188363 5188347 -
atcatctggaattcttttct

SEQ ID NO: 53217 - DNA, 20 bp, Artificial Sequence
  Synthetic oligonucleotide; AAG chr11 5188328 5188347 5188331 -
ttcttggatttcctccactc

SEQ ID NO: 53218 - DNA, 20 bp, Artificial Sequence
  Synthetic oligonucleotide; TAG chr11 5188320 5188339 5188323 -
tttcctccactcaagtccca

SEQ ID NO: 53219 - DNA, 20 bp, Artificial Sequence
  Synthetic oligonucleotide; AAG chr11 5188316 5188335 5188319 -
ctccactcaagtcccatagt

SEQ ID NO: 53220 - DNA, 20 bp, Artificial Sequence
  Synthetic oligonucleotide; AAG chr11 5188310 5188329 5188313 -
tcaagtcccatagtaagata

SEQ ID NO: 53221 - DNA, 20 bp, Artificial Sequence
  Synthetic oligonucleotide; AGG chr11 5188309 5188328 5188312 -
caagtcccatagtaagataa

SEQ ID NO: 53222 - DNA, 20 bp, Artificial Sequence
  Synthetic oligonucleotide; TGG chr11 5188276 5188295 5188279 -
attgtatctttttcattttt

SEQ ID NO: 53223 - DNA, 20 bp, Artificial Sequence
  Synthetic oligonucleotide; AAG chr11 5188270 5188289 5188273 -
tctttttcattttttggctg

SEQ ID NO: 53224 - DNA, 20 bp, Artificial Sequence
  Synthetic oligonucleotide; TAG chr11 5188264 5188283 5188267 -
tcattttttggctgaagcac

SEQ ID NO: 53225 - DNA, 20 bp, Artificial Sequence
  Synthetic oligonucleotide; CAG chr11 5188257 5188276 5188260 -
ttggctgaagcactagcatc

SEQ ID NO: 53226 - DNA, 20 bp, Artificial Sequence
  Synthetic oligonucleotide; AGG chr11 5188256 5188275 5188259 -
tggctgaagcactagcatcc

SEQ ID NO: 53227 - DNA, 20 bp, Artificial Sequence
  Synthetic oligonucleotide; TAG chr11 5188238 5188257 5188241 -
ccaggacactaatttaccta

SEQ ID NO: 53228 - DNA, 20 bp, Artificial Sequence
  Synthetic oligonucleotide; TAG chr11 5188225 5188244 5188228 -
ttacctatagaacaattatc

SEQ ID NO: 53229 - DNA, 20 bp, Artificial Sequence
  Synthetic oligonucleotide; TAG chr11 5188215 5188234 5188218 -
aacaattatctagactcaat

SEQ ID NO: 53230 - DNA, 20 bp, Artificial Sequence
  Synthetic oligonucleotide; AAG chr11 5188212 5188231 5188215 -
aattatctagactcaattag

SEQ ID NO: 53231 - DNA, 20 bp, Artificial Sequence
  Synthetic oligonucleotide; AAG chr11 5188195 5188214 5188198 -
tagaagtatcttacatattg

SEQ ID NO: 53232 - DNA, 20 bp, Artificial Sequence
  Synthetic oligonucleotide; CAG chr11 5188192 5188211 5188195 -
aagtatcttacatattgaag

SEQ ID NO: 53233 - DNA, 20 bp, Artificial Sequence
  Synthetic oligonucleotide; GAG chr11 5188190 5188209 5188193 -
gtatcttacatattgaagca

SEQ ID NO: 53234 - DNA, 20 bp, Artificial Sequence
  Synthetic oligonucleotide; TAG chr11 5188186 5188205 5188189 -
cttacatattgaagcagagt

SEQ ID NO: 53235 - DNA, 20 bp, Artificial Sequence
  Synthetic oligonucleotide; GAG chr11 5188184 5188203 5188187 -
tacatattgaagcagagtta

SEQ ID NO: 53236 - DNA, 20 bp, Artificial Sequence
  Synthetic oligonucleotide; AAG chr11 5188171 5188190 5188174 -
agagttagagctaaaatctc

SEQ ID NO: 53237 - DNA, 20 bp, Artificial Sequence
  Synthetic oligonucleotide; CAG chr11 5188147 5188166 5188150 -
aatccaacatccttaattta

SEQ ID NO: 53238 - DNA, 20 bp, Artificial Sequence
  Synthetic oligonucleotide; CAG chr11 5188135 5188154 5188138 -
ttaatttacagatactaaat

SEQ ID NO: 53239 - DNA, 20 bp, Artificial Sequence
  Synthetic oligonucleotide; TAG chr11 5188132 5188151 5188135 -
atttacagatactaaatcag

SEQ ID NO: 53240 - DNA, 20 bp, Artificial Sequence
  Synthetic oligonucleotide; AAG chr11 5188126 5188145 5188129 -
agatactaaatcagtagcca

SEQ ID NO: 53241 - DNA, 20 bp, Artificial Sequence
  Synthetic oligonucleotide; TGG chr11 5188105 5188124 5188108 -
agccatttttactgctattt

SEQ ID NO: 53242 - DNA, 20 bp, Artificial Sequence
  Synthetic oligonucleotide; CAG chr11 5188098 5188117 5188101 -
tttactgctattttggttaa

SEQ ID NO: 53243 - DNA, 20 bp, Artificial Sequence
  Synthetic oligonucleotide; AGG chr11 5188097 5188116 5188100 -
ttactgctattttggttaac

SEQ ID NO: 53244 - DNA, 20 bp, Artificial Sequence
  Synthetic oligonucleotide; GGG chr11 5188096 5188115 5188099 -
tactgctattttggttaaca

SEQ ID NO: 53245 - DNA, 20 bp, Artificial Sequence
  Synthetic oligonucleotide; TAG chr11 5188061 5188080 5188064 -
atccatttccttgaaatcca

SEQ ID NO: 53246 - DNA, 20 bp, Artificial Sequence
  Synthetic oligonucleotide; GAG chr11 5188045 5188064 5188048 -
tccatagaaatttaaaaact

SEQ ID NO: 53247 - DNA, 20 bp, Artificial Sequence
  Synthetic oligonucleotide; CAG chr11 5188034 5188053 5188037 -
ttaaaaactgagtcttttaa

SEQ ID NO: 53248 - DNA, 20 bp, Artificial Sequence
  Synthetic oligonucleotide; AAG chr11 5188017 5188036 5188020 -
taacagcacaatctgctcta

SEQ ID NO: 53249 - DNA, 20 bp, Artificial Sequence
  Synthetic oligonucleotide; TGG chr11 5188011 5188030 5188014 -
cacaatctgctctaaagtga

SEQ ID NO: 53250 - DNA, 20 bp, Artificial Sequence
  Synthetic oligonucleotide; GAG chr11 5187985 5188004 5187988 -
tttctgacatgaacttatgt

SEQ ID NO: 53251 - DNA, 20 bp, Artificial Sequence
  Synthetic oligonucleotide; TAG chr11 5187924 5187943 5187927 -
atgttccctgcaaaaatatc

SEQ ID NO: 53252 - DNA, 20 bp, Artificial Sequence
  Synthetic oligonucleotide; AGG chr11 5187923 5187942 5187926 -
tgttccctgcaaaaatatct

SEQ ID NO: 53253 - DNA, 20 bp, Artificial Sequence
  Synthetic oligonucleotide; TAG chr11 5187915 5187934 5187918 -
gcaaaaatatctaggtatat

SEQ ID NO: 53254 - DNA, 20 bp, Artificial Sequence
  Synthetic oligonucleotide; TAG chr11 5187903 5187922 5187906 -
aggtatattagataatcata

SEQ ID NO: 53255 - DNA, 20 bp, Artificial Sequence
  Synthetic oligonucleotide; AAG chr11 5187887 5187906 5187890 -
catatagatatatgattatt

SEQ ID NO: 53256 - DNA, 20 bp, Artificial Sequence
  Synthetic oligonucleotide; AGG chr11 5187886 5187905 5187889 -
atatagatatatgattatta

SEQ ID NO: 53257 - DNA, 20 bp, Artificial Sequence
  Synthetic oligonucleotide; GGG chr11 5187885 5187904 5187888 -
tatagatatatgattattaa

SEQ ID NO: 53258 - DNA, 20 bp, Artificial Sequence
  Synthetic oligonucleotide; GAG chr11 5187876 5187895 5187879 -
atgattattaagggcatacc

SEQ ID NO: 53259 - DNA, 20 bp, Artificial Sequence
  Synthetic oligonucleotide; TGG chr11 5187818 5187837 5187821 -
tatataacattcataaaaat

SEQ ID NO: 53260 - DNA, 20 bp, Artificial Sequence
  Synthetic oligonucleotide; AAG chr11 5187800 5187819 5187803 -
attggaaaattatttttcta

SEQ ID NO: 53261 - DNA, 20 bp, Artificial Sequence
  Synthetic oligonucleotide; TGG chr11 5187793 5187812 5187796 -
aattatttttctaaagcatg

SEQ ID NO: 53262 - DNA, 20 bp, Artificial Sequence
  Synthetic oligonucleotide; AAG chr11 5187786 5187805 5187789 -
tttctaaagcatgtggctca

SEQ ID NO: 53263 - DNA, 20 bp, Artificial Sequence
  Synthetic oligonucleotide; TAG chr11 5187779 5187798 5187782 -
agcatgtggctcaaagactg

SEQ ID NO: 53264 - DNA, 20 bp, Artificial Sequence
  Synthetic oligonucleotide; AAG chr11 5187768 5187787 5187771 -
caaagactgtagacttctat

SEQ ID NO: 53265 - DNA, 20 bp, Artificial Sequence
  Synthetic oligonucleotide; TAG chr11 5187714 5187733 5187717 -
taactattatttcatctgca

SEQ ID NO: 53266 - DNA, 20 bp, Artificial Sequence
  Synthetic oligonucleotide; AAG chr11 5187701 5187720 5187704 -
atctgcatagaatattgctg

SEQ ID NO: 53267 - DNA, 20 bp, Artificial Sequence
  Synthetic oligonucleotide; AGG chr11 5187700 5187719 5187703 -
tctgcatagaatattgctga

SEQ ID NO: 53268 - DNA, 20 bp, Artificial Sequence
  Synthetic oligonucleotide; AAG chr11 5187688 5187707 5187691 -
attgctgaaggtgtgtttta

SEQ ID NO: 53269 - DNA, 20 bp, Artificial Sequence
  Synthetic oligonucleotide; TAG chr11 5187685 5187704 5187688 -
gctgaaggtgtgttttaaag

SEQ ID NO: 53270 - DNA, 20 bp, Artificial Sequence
  Synthetic oligonucleotide; TGG chr11 5187677 5187696 5187680 -
tgtgttttaaagtagtaaca

SEQ ID NO: 53271 - DNA, 20 bp, Artificial Sequence
  Synthetic oligonucleotide; CAG chr11 5187663 5187682 5187666 -
gtaacatggtacttgtatca

SEQ ID NO: 53272 - DNA, 20 bp, Artificial Sequence
  Synthetic oligonucleotide; CAG chr11 5187660 5187679 5187663 -
acatggtacttgtatcacag

SEQ ID NO: 53273 - DNA, 20 bp, Artificial Sequence
  Synthetic oligonucleotide; TAG chr11 5187654 5187673 5187657 -
tacttgtatcacagcagccg

SEQ ID NO: 53274 - DNA, 20 bp, Artificial Sequence
  Synthetic oligonucleotide; TGG chr11 5187649 5187668 5187652 -
gtatcacagcagccgtagtt

SEQ ID NO: 53275 - DNA, 20 bp, Artificial Sequence
  Synthetic oligonucleotide; CAG chr11 5187617 5187636 5187620 -
ctcttgcatattatatttat

SEQ ID NO: 53276 - DNA, 20 bp, Artificial Sequence
  Synthetic oligonucleotide; AAG chr11 5187570 5187589 5187573 -
tgctcaaaaaaaaattcttc

SEQ ID NO: 53277 - DNA, 20 bp, Artificial Sequence
  Synthetic oligonucleotide; TAG chr11 5187564 5187583 5187567 -
aaaaaaaattcttcaagttt

SEQ ID NO: 53278 - DNA, 20 bp, Artificial Sequence
  Synthetic oligonucleotide; GAG chr11 5187562 5187581 5187565 -
aaaaaattcttcaagtttta

SEQ ID NO: 53279 - DNA, 20 bp, Artificial Sequence
  Synthetic oligonucleotide; CAG chr11 5187555 5187574 5187558 -
tcttcaagttttagagtccc

SEQ ID NO: 53280 - DNA, 20 bp, Artificial Sequence
  Synthetic oligonucleotide; AAG chr11 5187534 5187553 5187537 -
agatttaaaaacattataat

SEQ ID NO: 53281 - DNA, 20 bp, Artificial Sequence
  Synthetic oligonucleotide; CAG chr11 5187527 5187546 5187530 -
aaaacattataataagttat

SEQ ID NO: 53282 - DNA, 20 bp, Artificial Sequence
  Synthetic oligonucleotide; CAG chr11 5187524 5187543 5187527 -
acattataataagttatcag

SEQ ID NO: 53283 - DNA, 20 bp, Artificial Sequence
  Synthetic oligonucleotide; GAG chr11 5187522 5187541 5187525 -
attataataagttatcagca

SEQ ID NO: 53284 - DNA, 20 bp, Artificial Sequence
  Synthetic oligonucleotide; TGG chr11 5187510 5187529 5187513 -
tatcagcagagtatacctct

SEQ ID NO: 53285 - DNA, 20 bp, Artificial Sequence
  Synthetic oligonucleotide; CAG chr11 5187478 5187497 5187481 -
tttgttcttcctgtcactat

SEQ ID NO: 53286 - DNA, 20 bp, Artificial Sequence
  Synthetic oligonucleotide; AGG chr11 5187477 5187496 5187480 -
ttgttcttcctgtcactatc

SEQ ID NO: 53287 - DNA, 20 bp, Artificial Sequence
  Synthetic oligonucleotide; TAG chr11 5187474 5187493 5187477 -
ttcttcctgtcactatcagg

SEQ ID NO: 53288 - DNA, 20 bp, Artificial Sequence
  Synthetic oligonucleotide; CAG chr11 5187470 5187489 5187473 -
tcctgtcactatcaggtagt

SEQ ID NO: 53289 - DNA, 20 bp, Artificial Sequence
  Synthetic oligonucleotide; CAG chr11 5187464 5187483 5187467 -
cactatcaggtagtcagatg

SEQ ID NO: 53290 - DNA, 20 bp, Artificial Sequence
  Synthetic oligonucleotide; AAG chr11 5187372 5187391 5187375 -
attcctttaatttcttttcc

SEQ ID NO: 53291 - DNA, 20 bp, Artificial Sequence
  Synthetic oligonucleotide; AGG chr11 5187371 5187390 5187374 -
ttcctttaatttcttttcca

SEQ ID NO: 53292 - DNA, 20 bp, Artificial Sequence
  Synthetic oligonucleotide; TAG chr11 5187367 5187386 5187370 -
tttaatttcttttccaagga

SEQ ID NO: 53293 - DNA, 20 bp, Artificial Sequence
  Synthetic oligonucleotide; AGG chr11 5187366 5187385 5187369 -
ttaatttcttttccaaggat

SEQ ID NO: 53294 - DNA, 20 bp, Artificial Sequence
  Synthetic oligonucleotide; TGG chr11 5187363 5187382 5187366 -
atttcttttccaaggatagg

SEQ ID NO: 53295 - DNA, 20 bp, Artificial Sequence
  Synthetic oligonucleotide; GGG chr11 5187362 5187381 5187365 -
tttcttttccaaggataggt

SEQ ID NO: 53296 - DNA, 20 bp, Artificial Sequence
  Synthetic oligonucleotide; AAG chr11 5187359 5187378 5187362 -
cttttccaaggataggtggg

SEQ ID NO: 53297 - DNA, 20 bp, Artificial Sequence
  Synthetic oligonucleotide; AAG chr11 5187354 5187373 5187357 -
ccaaggataggtgggaagat

SEQ ID NO: 53298 - DNA, 20 bp, Artificial Sequence
  Synthetic oligonucleotide; AAG chr11 5187325 5187344 5187328 -
cctttctttaatgtctaaaa

SEQ ID NO: 53299 - DNA, 20 bp, Artificial Sequence
  Synthetic oligonucleotide; AAG chr11 5187321 5187340 5187324 -
tctttaatgtctaaaaaagc

SEQ ID NO: 53300 - DNA, 20 bp, Artificial Sequence
  Synthetic oligonucleotide; AGG chr11 5187320 5187339 5187323 -
ctttaatgtctaaaaaagca

SEQ ID NO: 53301 - DNA, 20 bp, Artificial Sequence
  Synthetic oligonucleotide; AAG chr11 5187315 5187334 5187318 -
atgtctaaaaaagcaaggtg

SEQ ID NO: 53302 - DNA, 20 bp, Artificial Sequence
  Synthetic oligonucleotide; TGG chr11 5187291 5187310 5187294 -
catccaatttaccctcacta

SEQ ID NO: 53303 - DNA, 20 bp, Artificial Sequence
  Synthetic oligonucleotide; AAG chr11 5187284 5187303 5187287 -
tttaccctcactatggtttc

SEQ ID NO: 53304 - DNA, 20 bp, Artificial Sequence
  Synthetic oligonucleotide; TGG chr11 5187272 5187291 5187275 -
atggtttcaagacctttgaa

SEQ ID NO: 53305 - DNA, 20 bp, Artificial Sequence
  Synthetic oligonucleotide; AAG chr11 5187268 5187287 5187271 -
tttcaagacctttgaatgga

SEQ ID NO: 53306 - DNA, 20 bp, Artificial Sequence
  Synthetic oligonucleotide; TAG chr11 5187224 5187243 5187227 -
ttcttatatctcccaccata

SEQ ID NO: 53307 - DNA, 20 bp, Artificial Sequence
  Synthetic oligonucleotide; TAG chr11 5187187 5187206 5187190 -
taataaaatatgacctctct

SEQ ID NO: 53308 - DNA, 20 bp, Artificial Sequence
  Synthetic oligonucleotide; CAG chr11 5187183 5187202 5187186 -
aaaatatgacctctcttagc

SEQ ID NO: 53309 - DNA, 20 bp, Artificial Sequence
  Synthetic oligonucleotide; GAG chr11 5187179 5187198 5187182 -
tatgacctctcttagccagt

SEQ ID NO: 53310 - DNA, 20 bp, Artificial Sequence
  Synthetic oligonucleotide; AAG chr11 5187172 5187191 5187175 -
tctcttagccagtgagaact

SEQ ID NO: 53311 - DNA, 20 bp, Artificial Sequence
  Synthetic oligonucleotide; TAG chr11 5187164 5187183 5187167 -
ccagtgagaactaagatgcc

SEQ ID NO: 53312 - DNA, 20 bp, Artificial Sequence
  Synthetic oligonucleotide; TGG chr11 5187152 5187171 5187155 -
aagatgcctagatgactgat

SEQ ID NO: 53313 - DNA, 20 bp, Artificial Sequence
  Synthetic oligonucleotide; GAG chr11 5187150 5187169 5187153 -
gatgcctagatgactgattg

SEQ ID NO: 53314 - DNA, 20 bp, Artificial Sequence
  Synthetic oligonucleotide; AGG chr11 5187149 5187168 5187152 -
atgcctagatgactgattgg

SEQ ID NO: 53315 - DNA, 20 bp, Artificial Sequence
  Synthetic oligonucleotide; TGG chr11 5187143 5187162 5187146 -
agatgactgattggaggacc

SEQ ID NO: 53316 - DNA, 20 bp, Artificial Sequence
  Synthetic oligonucleotide; GGG chr11 5187142 5187161 5187145 -
gatgactgattggaggacct

SEQ ID NO: 53317 - DNA, 20 bp, Artificial Sequence
  Synthetic oligonucleotide; TAG chr11 5187131 5187150 5187134 -
ggaggacctgggcacttgcc

SEQ ID NO: 53318 - DNA, 20 bp, Artificial Sequence
  Synthetic oligonucleotide; AAG chr11 5187119 5187138 5187122 -
cacttgcctagcatccaatc

SEQ ID NO: 53319 - DNA, 20 bp, Artificial Sequence
  Synthetic oligonucleotide; CAG chr11 5187110 5187129 5187113 -
agcatccaatcaagatcatc

SEQ ID NO: 53320 - DNA, 20 bp, Artificial Sequence
  Synthetic oligonucleotide; CAG chr11 5187106 5187125 5187109 -
tccaatcaagatcatccagt

SEQ ID NO: 53321 - DNA, 20 bp, Artificial Sequence
  Synthetic oligonucleotide; AGG chr11 5187105 5187124 5187108 -
ccaatcaagatcatccagtc

SEQ ID NO: 53322 - DNA, 20 bp, Artificial Sequence
  Synthetic oligonucleotide; GGG chr11 5187104 5187123 5187107 -
caatcaagatcatccagtca

SEQ ID NO: 53323 - DNA, 20 bp, Artificial Sequence
  Synthetic oligonucleotide; CAG chr11 5187100 5187119 5187103 -
caagatcatccagtcagggt

SEQ ID NO: 53324 - DNA, 20 bp, Artificial Sequence
  Synthetic oligonucleotide; TAG chr11 5187075 5187094 5187078 -
gatgtcaaacatcatattta

SEQ ID NO: 53325 - DNA, 20 bp, Artificial Sequence
  Synthetic oligonucleotide; AGG chr11 5187074 5187093 5187077 -
atgtcaaacatcatatttat

SEQ ID NO: 53326 - DNA, 20 bp, Artificial Sequence
  Synthetic oligonucleotide; GGG chr11 5187073 5187092 5187076 -
tgtcaaacatcatatttata

SEQ ID NO: 53327 - DNA, 20 bp, Artificial Sequence
  Synthetic oligonucleotide; AAG chr11 5187070 5187089 5187073 -
caaacatcatatttataggg

SEQ ID NO: 53328 - DNA, 20 bp, Artificial Sequence
  Synthetic oligonucleotide; AAG chr11 5187047 5187066 5187050 -
ttttactatttttttttact

SEQ ID NO: 53329 - DNA, 20 bp, Artificial Sequence
  Synthetic oligonucleotide; TAG chr11 5187033 5187052 5187036 -
tttactaagttttactacta

SEQ ID NO: 53330 - DNA, 20 bp, Artificial Sequence
  Synthetic oligonucleotide; AGG chr11 5187032 5187051 5187035 -
ttactaagttttactactat

SEQ ID NO: 53331 - DNA, 20 bp, Artificial Sequence
  Synthetic oligonucleotide; AAG chr11 5187023 5187042 5187026 -
tttactactataggtgaaaa

SEQ ID NO: 53332 - DNA, 20 bp, Artificial Sequence
  Synthetic oligonucleotide; TAG chr11 5187016 5187035 5187019 -
ctataggtgaaaaaagcttc

SEQ ID NO: 53333 - DNA, 20 bp, Artificial Sequence
  Synthetic oligonucleotide; AGG chr11 5187015 5187034 5187018 -
tataggtgaaaaaagcttct

SEQ ID NO: 53334 - DNA, 20 bp, Artificial Sequence
  Synthetic oligonucleotide; GGG chr11 5187014 5187033 5187017 -
ataggtgaaaaaagcttcta

SEQ ID NO: 53335 - DNA, 20 bp, Artificial Sequence
  Synthetic oligonucleotide; CAG chr11 5186995 5187014 5186998 -
agggattctttgaaaaatat

SEQ ID NO: 53336 - DNA, 20 bp, Artificial Sequence
  Synthetic oligonucleotide; CAG chr11 5186985 5187004 5186988 -
tgaaaaatatcagaaaatca

SEQ ID NO: 53337 - DNA, 20 bp, Artificial Sequence
  Synthetic oligonucleotide; TGG chr11 5186977 5186996 5186980 -
atcagaaaatcacagatata

SEQ ID NO: 53338 - DNA, 20 bp, Artificial Sequence
  Synthetic oligonucleotide; AAG chr11 5186974 5186993 5186977 -
agaaaatcacagatatatgg

SEQ ID NO: 53339 - DNA, 20 bp, Artificial Sequence
  Synthetic oligonucleotide; AGG chr11 5186973 5186992 5186976 -
gaaaatcacagatatatgga

SEQ ID NO: 53340 - DNA, 20 bp, Artificial Sequence
  Synthetic oligonucleotide; GAG chr11 5186962 5186981 5186965 -
atatatggaaggctccactt

SEQ ID NO: 53341 - DNA, 20 bp, Artificial Sequence
  Synthetic oligonucleotide; GAG chr11 5186960 5186979 5186963 -
atatggaaggctccacttga

SEQ ID NO: 53342 - DNA, 20 bp, Artificial Sequence
  Synthetic oligonucleotide; AAG chr11 5186954 5186973 5186957 -
aaggctccacttgagagaat

SEQ ID NO: 53343 - DNA, 20 bp, Artificial Sequence
  Synthetic oligonucleotide; AGG chr11 5186953 5186972 5186956 -
aggctccacttgagagaata

SEQ ID NO: 53344 - DNA, 20 bp, Artificial Sequence
  Synthetic oligonucleotide; TGG chr11 5186929 5186948 5186932 -
aacatctctctccataaatc

SEQ ID NO: 53345 - DNA, 20 bp, Artificial Sequence
  Synthetic oligonucleotide; CAG chr11 5186921 5186940 5186924 -
tctccataaatctggcttat

SEQ ID NO: 53346 - DNA, 20 bp, Artificial Sequence
  Synthetic oligonucleotide; AAG chr11 5186914 5186933 5186917 -
aaatctggcttatcagtgtg

SEQ ID NO: 53347 - DNA, 20 bp, Artificial Sequence
  Synthetic oligonucleotide; CAG chr11 5186910 5186929 5186913 -
ctggcttatcagtgtgaagc

SEQ ID NO: 53348 - DNA, 20 bp, Artificial Sequence
  Synthetic oligonucleotide; TGG chr11 5186886 5186905 5186889 -
ttttaattccatgaatatca

SEQ ID NO: 53349 - DNA, 20 bp, Artificial Sequence
  Synthetic oligonucleotide; AAG chr11 5186841 5186860 5186844 -
ttcatctgtattcctcatta

SEQ ID NO: 53350 - DNA, 20 bp, Artificial Sequence
  Synthetic oligonucleotide; AAG chr11 5186830 5186849 5186833 -
tcctcattaaagtatccttc

SEQ ID NO: 53351 - DNA, 20 bp, Artificial Sequence
  Synthetic oligonucleotide; GAG chr11 5186828 5186847 5186831 -
ctcattaaagtatccttcaa

SEQ ID NO: 53352 - DNA, 20 bp, Artificial Sequence
  Synthetic oligonucleotide; TGG chr11 5186823 5186842 5186826 -
taaagtatccttcaagagaa

SEQ ID NO: 53353 - DNA, 20 bp, Artificial Sequence
  Synthetic oligonucleotide; GGG chr11 5186822 5186841 5186825 -
aaagtatccttcaagagaat

SEQ ID NO: 53354 - DNA, 20 bp, Artificial Sequence
  Synthetic oligonucleotide; CAG chr11 5186812 5186831 5186815 -
tcaagagaatgggatatcta

SEQ ID NO: 53355 - DNA, 20 bp, Artificial Sequence
  Synthetic oligonucleotide; TAG chr11 5186809 5186828 5186812 -
agagaatgggatatctacag

SEQ ID NO: 53356 - DNA, 20 bp, Artificial Sequence
  Synthetic oligonucleotide; TGG chr11 5186792 5186811 5186795 -
cagtagctaatataatttct

SEQ ID NO: 53357 - DNA, 20 bp, Artificial Sequence
  Synthetic oligonucleotide; CAG chr11 5186784 5186803 5186787 -
aatataatttcttggccctt

SEQ ID NO: 53358 - DNA, 20 bp, Artificial Sequence
  Synthetic oligonucleotide; AAG chr11 5186756 5186775 5186759 -
gacccatttaccatgtgacc

SEQ ID NO: 53359 - DNA, 20 bp, Artificial Sequence
  Synthetic oligonucleotide; AAG chr11 5186750 5186769 5186753 -
tttaccatgtgaccaagaaa

SEQ ID NO: 53360 - DNA, 20 bp, Artificial Sequence
  Synthetic oligonucleotide; CAG chr11 5186747 5186766 5186750 -
accatgtgaccaagaaaaag

SEQ ID NO: 53361 - DNA, 20 bp, Artificial Sequence
  Synthetic oligonucleotide; AGG chr11 5186746 5186765 5186749 -
ccatgtgaccaagaaaaagc

SEQ ID NO: 53362 - DNA, 20 bp, Artificial Sequence
  Synthetic oligonucleotide; GGG chr11 5186745 5186764 5186748 -
catgtgaccaagaaaaagca

SEQ ID NO: 53363 - DNA, 20 bp, Artificial Sequence
  Synthetic oligonucleotide; AAG chr11 5186741 5186760 5186744 -
tgaccaagaaaaagcaggga

SEQ ID NO: 53364 - DNA, 20 bp, Artificial Sequence
  Synthetic oligonucleotide; TAG chr11 5186735 5186754 5186738 -
agaaaaagcagggaaagcaa

SEQ ID NO: 53365 - DNA, 20 bp, Artificial Sequence
  Synthetic oligonucleotide; AAG chr11 5186718 5186737 5186721 -
caatagaaccttaaaaatta

SEQ ID NO: 53366 - DNA, 20 bp, Artificial Sequence
  Synthetic oligonucleotide; AGG chr11 5186717 5186736 5186720 -
aatagaaccttaaaaattaa

SEQ ID NO: 53367 - DNA, 20 bp, Artificial Sequence
  Synthetic oligonucleotide; GGG chr11 5186716 5186735 5186719 -
atagaaccttaaaaattaaa

SEQ ID NO: 53368 - DNA, 20 bp, Artificial Sequence
  Synthetic oligonucleotide; GAG chr11 5186704 5186723 5186707 -
aaattaaagggaaataaaat

SEQ ID NO: 53369 - DNA, 20 bp, Artificial Sequence
  Synthetic oligonucleotide; GAG chr11 5186702 5186721 5186705 -
attaaagggaaataaaatga

SEQ ID NO: 53370 - DNA, 20 bp, Artificial Sequence
  Synthetic oligonucleotide; TAG chr11 5186689 5186708 5186692 -
aaaatgagagaattaacttt

SEQ ID NO: 53371 - DNA, 20 bp, Artificial Sequence
  Synthetic oligonucleotide; AGG chr11 5186688 5186707 5186691 -
aaatgagagaattaactttt

SEQ ID NO: 53372 - DNA, 20 bp, Artificial Sequence
  Synthetic oligonucleotide; AAG chr11 5186677 5186696 5186680 -
ttaacttttaggtgccatct

SEQ ID NO: 53373 - DNA, 20 bp, Artificial Sequence
  Synthetic oligonucleotide; AAG chr11 5186667 5186686 5186670 -
ggtgccatctaagatgtgta

SEQ ID NO: 53374 - DNA, 20 bp, Artificial Sequence
  Synthetic oligonucleotide; TGG chr11 5186623 5186642 5186626 -
ttgcaacctatatttgccaa

SEQ ID NO: 53375 - DNA, 20 bp, Artificial Sequence
  Synthetic oligonucleotide; TGG chr11 5186615 5186634 5186618 -
tatatttgccaatggctcat

SEQ ID NO: 53376 - DNA, 20 bp, Artificial Sequence
  Synthetic oligonucleotide; CAG chr11 5186599 5186618 5186602 -
tcattggaaacaatatatga

SEQ ID NO: 53377 - DNA, 20 bp, Artificial Sequence
  Synthetic oligonucleotide; AGG chr11 5186598 5186617 5186601 -
cattggaaacaatatatgac

SEQ ID NO: 53378 - DNA, 20 bp, Artificial Sequence
  Synthetic oligonucleotide; GGG chr11 5186597 5186616 5186600 -
attggaaacaatatatgaca

SEQ ID NO: 53379 - DNA, 20 bp, Artificial Sequence
  Synthetic oligonucleotide; AAG chr11 5186590 5186609 5186593 -
acaatatatgacagggacaa

SEQ ID NO: 53380 - DNA, 20 bp, Artificial Sequence
  Synthetic oligonucleotide; TGG chr11 5186584 5186603 5186587 -
tatgacagggacaaaagacc

SEQ ID NO: 53381 - DNA, 20 bp, Artificial Sequence
  Synthetic oligonucleotide; TAG chr11 5186576 5186595 5186579 -
ggacaaaagacctggacatg

SEQ ID NO: 53382 - DNA, 20 bp, Artificial Sequence
  Synthetic oligonucleotide; TAG chr11 5186558 5186577 5186561 -
tgtagatgtatgtattaact

SEQ ID NO: 53383 - DNA, 20 bp, Artificial Sequence
  Synthetic oligonucleotide; AGG chr11 5186557 5186576 5186560 -
gtagatgtatgtattaactt

SEQ ID NO: 53384 - DNA, 20 bp, Artificial Sequence
  Synthetic oligonucleotide; CAG chr11 5186551 5186570 5186554 -
gtatgtattaacttaggtgt

SEQ ID NO: 53385 - DNA, 20 bp, Artificial Sequence
  Synthetic oligonucleotide; GAG chr11 5186549 5186568 5186552 -
atgtattaacttaggtgtca

SEQ ID NO: 53386 - DNA, 20 bp, Artificial Sequence
  Synthetic oligonucleotide; GAG chr11 5186547 5186566 5186550 -
gtattaacttaggtgtcaga

SEQ ID NO: 53387 - DNA, 20 bp, Artificial Sequence
  Synthetic oligonucleotide; TGG chr11 5186544 5186563 5186547 -
ttaacttaggtgtcagagag

SEQ ID NO: 53388 - DNA, 20 bp, Artificial Sequence
  Synthetic oligonucleotide; TGG chr11 5186541 5186560 5186544 -
acttaggtgtcagagagtgg

SEQ ID NO: 53389 - DNA, 20 bp, Artificial Sequence
  Synthetic oligonucleotide; AAG chr11 5186535 5186554 5186538 -
gtgtcagagagtggtggctg

SEQ ID NO: 53390 - DNA, 20 bp, Artificial Sequence
  Synthetic oligonucleotide; AAG chr11 5186507 5186526 5186510 -
aaatgcacaaattataatga

SEQ ID NO: 53391 - DNA, 20 bp, Artificial Sequence
  Synthetic oligonucleotide; GAG chr11 5186505 5186524 5186508 -
atgcacaaattataatgaaa

SEQ ID NO: 53392 - DNA, 20 bp, Artificial Sequence
  Synthetic oligonucleotide; CAG chr11 5186498 5186517 5186501 -
aattataatgaaagagaatg

SEQ ID NO: 53393 - DNA, 20 bp, Artificial Sequence
  Synthetic oligonucleotide; TGG chr11 5186481 5186500 5186484 -
atgcagtatgtttctccctg

SEQ ID NO: 53394 - DNA, 20 bp, Artificial Sequence
  Synthetic oligonucleotide; CAG chr11 5186469 5186488 5186472 -
tctccctgtggactatgtac

SEQ ID NO: 53395 - DNA, 20 bp, Artificial Sequence
  Synthetic oligonucleotide; AAG chr11 5186466 5186485 5186469 -
ccctgtggactatgtaccag

SEQ ID NO: 53396 - DNA, 20 bp, Artificial Sequence
  Synthetic oligonucleotide; CAG chr11 5186463 5186482 5186466 -
tgtggactatgtaccagaag

SEQ ID NO: 53397 - DNA, 20 bp, Artificial Sequence
  Synthetic oligonucleotide; TGG chr11 5186440 5186459 5186443 -
ctctgtgtcatctccttcca

SEQ ID NO: 53398 - DNA, 20 bp, Artificial Sequence
  Synthetic oligonucleotide; GGG chr11 5186439 5186458 5186442 -
tctgtgtcatctccttccat

SEQ ID NO: 53399 - DNA, 20 bp, Artificial Sequence
  Synthetic oligonucleotide; GAG chr11 5186437 5186456 5186440 -
tgtgtcatctccttccatgg

SEQ ID NO: 53400 - DNA, 20 bp, Artificial Sequence
  Synthetic oligonucleotide; AGG chr11 5186436 5186455 5186439 -
gtgtcatctccttccatggg

SEQ ID NO: 53401 - DNA, 20 bp, Artificial Sequence
  Synthetic oligonucleotide; GAG chr11 5186434 5186453 5186437 -
gtcatctccttccatgggag

SEQ ID NO: 53402 - DNA, 20 bp, Artificial Sequence
  Synthetic oligonucleotide; AAG chr11 5186415 5186434 5186418 -
ggagtaaaattcgtcctctt

SEQ ID NO: 53403 - DNA, 20 bp, Artificial Sequence
  Synthetic oligonucleotide; TGG chr11 5186402 5186421 5186405 -
tcctcttaagctgaaaacct

SEQ ID NO: 53404 - DNA, 20 bp, Artificial Sequence
  Synthetic oligonucleotide; GGG chr11 5186401 5186420 5186404 -
cctcttaagctgaaaacctt

SEQ ID NO: 53405 - DNA, 20 bp, Artificial Sequence
  Synthetic oligonucleotide; AAG chr11 5186395 5186414 5186398 -
aagctgaaaaccttgggccc

SEQ ID NO: 53406 - DNA, 20 bp, Artificial Sequence
  Synthetic oligonucleotide; AAG chr11 5186381 5186400 5186384 -
gggcccaagacatgctttaa

SEQ ID NO: 53407 - DNA, 20 bp, Artificial Sequence
  Synthetic oligonucleotide; AAG chr11 5186378 5186397 5186381 -
cccaagacatgctttaaaag

SEQ ID NO: 53408 - DNA, 20 bp, Artificial Sequence
  Synthetic oligonucleotide; TAG chr11 5186369 5186388 5186372 -
tgctttaaaagaagtataaa

SEQ ID NO: 53409 - DNA, 20 bp, Artificial Sequence
  Synthetic oligonucleotide; CAG chr11 5186363 5186382 5186366 -
aaaagaagtataaatagttc

SEQ ID NO: 53410 - DNA, 20 bp, Artificial Sequence
  Synthetic oligonucleotide; CAG chr11 5186306 5186325 5186309 -
ctcaacctgctaaatatctt

SEQ ID NO: 53411 - DNA, 20 bp, Artificial Sequence
  Synthetic oligonucleotide; AGG chr11 5186305 5186324 5186308 -
tcaacctgctaaatatcttc

SEQ ID NO: 53412 - DNA, 20 bp, Artificial Sequence
  Synthetic oligonucleotide; TAG chr11 5186298 5186317 5186301 -
gctaaatatcttcaggattc

SEQ ID NO: 53413 - DNA, 20 bp, Artificial Sequence
  Synthetic oligonucleotide; AAG chr11 5186288 5186307 5186291 -
ttcaggattctagaaaatgc

SEQ ID NO: 53414 - DNA, 20 bp, Artificial Sequence
  Synthetic oligonucleotide; AAG chr11 5186284 5186303 5186287 -
ggattctagaaaatgcaagt

SEQ ID NO: 53415 - DNA, 20 bp, Artificial Sequence
  Synthetic oligonucleotide; GAG chr11 5186275 5186294 5186278 -
aaaatgcaagtaagtaaact

SEQ ID NO: 53416 - DNA, 20 bp, Artificial Sequence
  Synthetic oligonucleotide; TAG chr11 5186252 5186271 5186255 -
ttatgctcaatgaaaacttg

SEQ ID NO: 53417 - DNA, 20 bp, Artificial Sequence
  Synthetic oligonucleotide; CAG chr11 5186239 5186258 5186242 -
aaacttgtagaaaataacac

SEQ ID NO: 53418 - DNA, 20 bp, Artificial Sequence
  Synthetic oligonucleotide; AAG chr11 5186228 5186247 5186231 -
aaataacaccagaaaaaaaa

SEQ ID NO: 53419 - DNA, 20 bp, Artificial Sequence
  Synthetic oligonucleotide; AGG chr11 5186227 5186246 5186230 -
aataacaccagaaaaaaaaa

SEQ ID NO: 53420 - DNA, 20 bp, Artificial Sequence
  Synthetic oligonucleotide; AAG chr11 5186223 5186242 5186226 -
acaccagaaaaaaaaaaggc

SEQ ID NO: 53421 - DNA, 20 bp, Artificial Sequence
  Synthetic oligonucleotide; CAG chr11 5186214 5186233 5186217 -
aaaaaaaaggcaagaaactg

SEQ ID NO: 53422 - DNA, 20 bp, Artificial Sequence
  Synthetic oligonucleotide; AAG chr11 5186211 5186230 5186214 -
aaaaaggcaagaaactgcag

SEQ ID NO: 53423 - DNA, 20 bp, Artificial Sequence
  Synthetic oligonucleotide; CAG chr11 5186208 5186227 5186211 -
aaggcaagaaactgcagaag

SEQ ID NO: 53424 - DNA, 20 bp, Artificial Sequence
  Synthetic oligonucleotide; TGG chr11 5186153 5186172 5186156 -
tttccttgatttttgaccca

SEQ ID NO: 53425 - DNA, 20 bp, Artificial Sequence
  Synthetic oligonucleotide; TAG chr11 5186145 5186164 5186148 -
atttttgacccatggaatac

SEQ ID NO: 53426 - DNA, 20 bp, Artificial Sequence
  Synthetic oligonucleotide; TGG chr11 5186139 5186158 5186142 -
gacccatggaatactagact

SEQ ID NO: 53427 - DNA, 20 bp, Artificial Sequence
  Synthetic oligonucleotide; TAG chr11 5186133 5186152 5186136 -
tggaatactagacttggctt

SEQ ID NO: 53428 - DNA, 20 bp, Artificial Sequence
  Synthetic oligonucleotide; TGG chr11 5186129 5186148 5186132 -
atactagacttggctttagc

SEQ ID NO: 53429 - DNA, 20 bp, Artificial Sequence
  Synthetic oligonucleotide; GAG chr11 5186127 5186146 5186130 -
actagacttggctttagctg

SEQ ID NO: 53430 - DNA, 20 bp, Artificial Sequence
  Synthetic oligonucleotide; TAG chr11 5186110 5186129 5186113 -
ctggagttgatttgcaattg

SEQ ID NO: 53431 - DNA, 20 bp, Artificial Sequence
  Synthetic oligonucleotide; AAG chr11 5186086 5186105 5186089 -
attttttgtgttcttgtatt

SEQ ID NO: 53432 - DNA, 20 bp, Artificial Sequence
  Synthetic oligonucleotide; AAG chr11 5186082 5186101 5186085 -
tttgtgttcttgtattaagt

SEQ ID NO: 53433 - DNA, 20 bp, Artificial Sequence
  Synthetic oligonucleotide; AAG chr11 5186068 5186087 5186071 -
ttaagtaagtcattttcaaa

SEQ ID NO: 53434 - DNA, 20 bp, Artificial Sequence
  Synthetic oligonucleotide; TAG chr11 5186058 5186077 5186061 -
cattttcaaaaagaatattt

SEQ ID NO: 53435 - DNA, 20 bp, Artificial Sequence
  Synthetic oligonucleotide; TAG chr11 5186047 5186066 5186050 -
agaatattttagttttctct

SEQ ID NO: 53436 - DNA, 20 bp, Artificial Sequence
  Synthetic oligonucleotide; CAG chr11 5186009 5186028 5186012 -
tgctcattttctttgatatg

SEQ ID NO: 53437 - DNA, 20 bp, Artificial Sequence
  Synthetic oligonucleotide; AAG chr11 5185990 5186009 5185993 -
gcagatttgaatgttgtaca

SEQ ID NO: 53438 - DNA, 20 bp, Artificial Sequence
  Synthetic oligonucleotide; TAG chr11 5185968 5185987 5185971 -
gattcaatgaatttatattc

SEQ ID NO: 53439 - DNA, 20 bp, Artificial Sequence
  Synthetic oligonucleotide; TAG chr11 5185965 5185984 5185968 -
tcaatgaatttatattctag

SEQ ID NO: 53440 - DNA, 20 bp, Artificial Sequence
  Synthetic oligonucleotide; AAG chr11 5185955 5185974 5185958 -
tatattctagtagttaaaac

SEQ ID NO: 53441 - DNA, 20 bp, Artificial Sequence
  Synthetic oligonucleotide; AGG chr11 5185954 5185973 5185957 -
atattctagtagttaaaaca

SEQ ID NO: 53442 - DNA, 20 bp, Artificial Sequence
  Synthetic oligonucleotide; CAG chr11 5185949 5185968 5185952 -
ctagtagttaaaacaaggct

SEQ ID NO: 53443 - DNA, 20 bp, Artificial Sequence
  Synthetic oligonucleotide; TAG chr11 5185933 5185952 5185936 -
ggctcagtaataaaaaattt

SEQ ID NO: 53444 - DNA, 20 bp, Artificial Sequence
  Synthetic oligonucleotide; TAG chr11 5185930 5185949 5185933 -
tcagtaataaaaaattttag

SEQ ID NO: 53445 - DNA, 20 bp, Artificial Sequence
  Synthetic oligonucleotide; TAG chr11 5185896 5185915 5185899 -
tgtgtgtgtgcatcgttctg

SEQ ID NO: 53446 - DNA, 20 bp, Artificial Sequence
  Synthetic oligonucleotide; CAG chr11 5185874 5185893 5185877 -
gtttattgactattactcat

SEQ ID NO: 53447 - DNA, 20 bp, Artificial Sequence
  Synthetic oligonucleotide; AGG chr11 5185873 5185892 5185876 -
tttattgactattactcatc

SEQ ID NO: 53448 - DNA, 20 bp, Artificial Sequence
  Synthetic oligonucleotide; TAG chr11 5185867 5185886 5185870 -
gactattactcatcaggtaa

SEQ ID NO: 53449 - DNA, 20 bp, Artificial Sequence
  Synthetic oligonucleotide; TAG chr11 5185862 5185881 5185865 -
ttactcatcaggtaatagtc

SEQ ID NO: 53450 - DNA, 20 bp, Artificial Sequence
  Synthetic oligonucleotide; AGG chr11 5185861 5185880 5185864 -
tactcatcaggtaatagtct

SEQ ID NO: 53451 - DNA, 20 bp, Artificial Sequence
  Synthetic oligonucleotide; CAG chr11 5185856 5185875 5185859 -
atcaggtaatagtctaggca

SEQ ID NO: 53452 - DNA, 20 bp, Artificial Sequence
  Synthetic oligonucleotide; AAG chr11 5185850 5185869 5185853 -
taatagtctaggcacagatt

SEQ ID NO: 53453 - DNA, 20 bp, Artificial Sequence
  Synthetic oligonucleotide; AAG chr11 5185847 5185866 5185850 -
tagtctaggcacagattaag

SEQ ID NO: 53454 - DNA, 20 bp, Artificial Sequence
  Synthetic oligonucleotide; TGG chr11 5185843 5185862 5185846 -
ctaggcacagattaagaagc

SEQ ID NO: 53455 - DNA, 20 bp, Artificial Sequence
  Synthetic oligonucleotide; AAG chr11 5185804 5185823 5185807 -
actctcttccctatgtaaca

SEQ ID NO: 53456 - DNA, 20 bp, Artificial Sequence
  Synthetic oligonucleotide; TGG chr11 5185792 5185811 5185795 -
atgtaacaaagatattatac

SEQ ID NO: 53457 - DNA, 20 bp, Artificial Sequence
  Synthetic oligonucleotide; TGG chr11 5185786 5185805 5185789 -
caaagatattatactggtga

SEQ ID NO: 53458 - DNA, 20 bp, Artificial Sequence
  Synthetic oligonucleotide; GGG chr11 5185785 5185804 5185788 -
aaagatattatactggtgat

SEQ ID NO: 53459 - DNA, 20 bp, Artificial Sequence
  Synthetic oligonucleotide; GGG chr11 5185784 5185803 5185787 -
aagatattatactggtgatg

SEQ ID NO: 53460 - DNA, 20 bp, Artificial Sequence
  Synthetic oligonucleotide; AAG chr11 5185715 5185734 5185718 -
gaactatttgcaccttataa

SEQ ID NO: 53461 - DNA, 20 bp, Artificial Sequence
  Synthetic oligonucleotide; CAG chr11 5185705 5185724 5185708 -
caccttataaaagtaaatga

SEQ ID NO: 53462 - DNA, 20 bp, Artificial Sequence
  Synthetic oligonucleotide; CAG chr11 5185699 5185718 5185702 -
ataaaagtaaatgacagata

SEQ ID NO: 53463 - DNA, 20 bp, Artificial Sequence
  Synthetic oligonucleotide; AGG chr11 5185698 5185717 5185701 -
taaaagtaaatgacagatac

SEQ ID NO: 53464 - DNA, 20 bp, Artificial Sequence
  Synthetic oligonucleotide; GGG chr11 5185697 5185716 5185700 -
aaaagtaaatgacagataca

SEQ ID NO: 53465 - DNA, 20 bp, Artificial Sequence
  Synthetic oligonucleotide; AAG chr11 5185692 5185711 5185695 -
taaatgacagatacagggtg

SEQ ID NO: 53466 - DNA, 20 bp, Artificial Sequence
  Synthetic oligonucleotide; CAG chr11 5185666 5185685 5185669 -
accaattgataccatgtgcc

SEQ ID NO: 53467 - DNA, 20 bp, Artificial Sequence
  Synthetic oligonucleotide; AAG chr11 5185660 5185679 5185663 -
tgataccatgtgcccagtat

SEQ ID NO: 53468 - DNA, 20 bp, Artificial Sequence
  Synthetic oligonucleotide; TAG chr11 5185631 5185650 5185634 -
attaaaaaaaaatttattcc

SEQ ID NO: 53469 - DNA, 20 bp, Artificial Sequence
  Synthetic oligonucleotide; TGG chr11 5185622 5185641 5185625 -
aaatttattcctagtattta

SEQ ID NO: 53470 - DNA, 20 bp, Artificial Sequence
  Synthetic oligonucleotide; CAG chr11 5185597 5185616 5185600 -
actctaaatcaattcaatct

SEQ ID NO: 53471 - DNA, 20 bp, Artificial Sequence
  Synthetic oligonucleotide; TGG chr11 5185589 5185608 5185592 -
tcaattcaatctcagtttga

SEQ ID NO: 53472 - DNA, 20 bp, Artificial Sequence
  Synthetic oligonucleotide; AAG chr11 5185581 5185600 5185584 -
atctcagtttgatggataat

SEQ ID NO: 53473 - DNA, 20 bp, Artificial Sequence
  Synthetic oligonucleotide; AAG chr11 5185574 5185593 5185577 -
tttgatggataataagcctg

SEQ ID NO: 53474 - DNA, 20 bp, Artificial Sequence
  Synthetic oligonucleotide; AAG chr11 5185565 5185584 5185568 -
taataagcctgaagtcctga

SEQ ID NO: 53475 - DNA, 20 bp, Artificial Sequence
  Synthetic oligonucleotide; CAG chr11 5185550 5185569 5185553 -
cctgaaagttaaacttattc

SEQ ID NO: 53476 - DNA, 20 bp, Artificial Sequence
  Synthetic oligonucleotide; TGG chr11 5185534 5185553 5185537 -
attccagttgacaataattt

SEQ ID NO: 53477 - DNA, 20 bp, Artificial Sequence
  Synthetic oligonucleotide; TAG chr11 5185510 5185529 5185513 -
cttaattgctacaattttgt

SEQ ID NO: 53478 - DNA, 20 bp, Artificial Sequence
  Synthetic oligonucleotide; TGG chr11 5185486 5185505 5185489 -
gtcctgatgtcatctattgt

SEQ ID NO: 53479 - DNA, 20 bp, Artificial Sequence
  Synthetic oligonucleotide; GGG chr11 5185485 5185504 5185488 -
tcctgatgtcatctattgtt

SEQ ID NO: 53480 - DNA, 20 bp, Artificial Sequence
  Synthetic oligonucleotide; TAG chr11 5185481 5185500 5185484 -
gatgtcatctattgttggga

SEQ ID NO: 53481 - DNA, 20 bp, Artificial Sequence
  Synthetic oligonucleotide; GAG chr11 5185479 5185498 5185482 -
tgtcatctattgttgggata

SEQ ID NO: 53482 - DNA, 20 bp, Artificial Sequence
  Synthetic oligonucleotide; TAG chr11 5185460 5185479 5185463 -
agagatataaatgacttatg

SEQ ID NO: 53483 - DNA, 20 bp, Artificial Sequence
  Synthetic oligonucleotide; AAG chr11 5185447 5185466 5185450 -
acttatgtagctaccttcct

SEQ ID NO: 53484 - DNA, 20 bp, Artificial Sequence
  Synthetic oligonucleotide; CAG chr11 5185434 5185453 5185437 -
ccttcctaagacactgactt

SEQ ID NO: 53485 - DNA, 20 bp, Artificial Sequence
  Synthetic oligonucleotide; AAG chr11 5185429 5185448 5185432 -
ctaagacactgacttcagaa

SEQ ID NO: 53486 - DNA, 20 bp, Artificial Sequence
  Synthetic oligonucleotide; TAG chr11 5185398 5185417 5185401 -
tttaaatttatgcttattgt

SEQ ID NO: 53487 - DNA, 20 bp, Artificial Sequence
  Synthetic oligonucleotide; AGG chr11 5185397 5185416 5185400 -
ttaaatttatgcttattgtt

SEQ ID NO: 53488 - DNA, 20 bp, Artificial Sequence
  Synthetic oligonucleotide; AAG chr11 5185386 5185405 5185389 -
cttattgttaggtattttac

SEQ ID NO: 53489 - DNA, 20 bp, Artificial Sequence
  Synthetic oligonucleotide; AAG chr11 5185382 5185401 5185385 -
ttgttaggtattttacaagc

SEQ ID NO: 53490 - DNA, 20 bp, Artificial Sequence
  Synthetic oligonucleotide; GAG chr11 5185380 5185399 5185383 -
gttaggtattttacaagcaa

SEQ ID NO: 53491 - DNA, 20 bp, Artificial Sequence
  Synthetic oligonucleotide; AAG chr11 5185372 5185391 5185375 -
ttttacaagcaagagaacta

SEQ ID NO: 53492 - DNA, 20 bp, Artificial Sequence
  Synthetic oligonucleotide; CAG chr11 5185349 5185368 5185352 -
tttaaattaaatgacgtgtc

SEQ ID NO: 53493 - DNA, 20 bp, Artificial Sequence
  Synthetic oligonucleotide; AGG chr11 5185348 5185367 5185351 -
ttaaattaaatgacgtgtcc

SEQ ID NO: 53494 - DNA, 20 bp, Artificial Sequence
  Synthetic oligonucleotide; GGG chr11 5185347 5185366 5185350 -
taaattaaatgacgtgtcca

SEQ ID NO: 53495 - DNA, 20 bp, Artificial Sequence
  Synthetic oligonucleotide; TAG chr11 5185341 5185360 5185344 -
aaatgacgtgtccagggtca

SEQ ID NO: 53496 - DNA, 20 bp, Artificial Sequence
  Synthetic oligonucleotide; GAG chr11 5185339 5185358 5185342 -
atgacgtgtccagggtcata

SEQ ID NO: 53497 - DNA, 20 bp, Artificial Sequence
  Synthetic oligonucleotide; CAG chr11 5185335 5185354 5185338 -
cgtgtccagggtcatagagt

SEQ ID NO: 53498 - DNA, 20 bp, Artificial Sequence
  Synthetic oligonucleotide; AAG chr11 5185329 5185348 5185332 -
cagggtcatagagtcagaat

SEQ ID NO: 53499 - DNA, 20 bp, Artificial Sequence
  Synthetic oligonucleotide; TAG chr11 5185323 5185342 5185326 -
catagagtcagaataagatt

SEQ ID NO: 53500 - DNA, 20 bp, Artificial Sequence
  Synthetic oligonucleotide; CAG chr11 5185319 5185338 5185322 -
gagtcagaataagatttagc

SEQ ID NO: 53501 - DNA, 20 bp, Artificial Sequence
  Synthetic oligonucleotide; TAG chr11 5185290 5185309 5185293 -
aatacaactatatatgtcct

SEQ ID NO: 53502 - DNA, 20 bp, Artificial Sequence
  Synthetic oligonucleotide; GAG chr11 5185288 5185307 5185291 -
tacaactatatatgtcctta

SEQ ID NO: 53503 - DNA, 20 bp, Artificial Sequence
  Synthetic oligonucleotide; TGG chr11 5185247 5185266 5185250 -
accacactatctttgctccg

SEQ ID NO: 53504 - DNA, 20 bp, Artificial Sequence
  Synthetic oligonucleotide; CAG chr11 5185230 5185249 5185233 -
ccgtggatacattcatgatt

SEQ ID NO: 53505 - DNA, 20 bp, Artificial Sequence
  Synthetic oligonucleotide; CAG chr11 5185226 5185245 5185229 -
ggatacattcatgattcagt

SEQ ID NO: 53506 - DNA, 20 bp, Artificial Sequence
  Synthetic oligonucleotide; CAG chr11 5185213 5185232 5185216 -
attcagtcagaatatgctgt

SEQ ID NO: 53507 - DNA, 20 bp, Artificial Sequence
  Synthetic oligonucleotide; TAG chr11 5185202 5185221 5185205 -
atatgctgtcagaaatatcc

SEQ ID NO: 53508 - DNA, 20 bp, Artificial Sequence
  Synthetic oligonucleotide; AAG chr11 5185188 5185207 5185191 -
atatcctagaataatgctac

SEQ ID NO: 53509 - DNA, 20 bp, Artificial Sequence
  Synthetic oligonucleotide; AGG chr11 5185187 5185206 5185190 -
tatcctagaataatgctaca

SEQ ID NO: 53510 - DNA, 20 bp, Artificial Sequence
  Synthetic oligonucleotide; CAG chr11 5185180 5185199 5185183 -
gaataatgctacaaggaacc

SEQ ID NO: 53511 - DNA, 20 bp, Artificial Sequence
  Synthetic oligonucleotide; AGG chr11 5185179 5185198 5185182 -
aataatgctacaaggaaccc

SEQ ID NO: 53512 - DNA, 20 bp, Artificial Sequence
  Synthetic oligonucleotide; TGG chr11 5185167 5185186 5185170 -
aggaacccaggcctataatt

SEQ ID NO: 53513 - DNA, 20 bp, Artificial Sequence
  Synthetic oligonucleotide; GGG chr11 5185166 5185185 5185169 -
ggaacccaggcctataattt

SEQ ID NO: 53514 - DNA, 20 bp, Artificial Sequence
  Synthetic oligonucleotide; TAG chr11 5185142 5185161 5185145 -
catcacatatgacaatgttt

SEQ ID NO: 53515 - DNA, 20 bp, Artificial Sequence
  Synthetic oligonucleotide; AGG chr11 5185141 5185160 5185144 -
atcacatatgacaatgtttt

SEQ ID NO: 53516 - DNA, 20 bp, Artificial Sequence
  Synthetic oligonucleotide; TAG chr11 5185104 5185123 5185107 -
aaacaaatatttaaaaacca

SEQ ID NO: 53517 - DNA, 20 bp, Artificial Sequence
  Synthetic oligonucleotide; AGG chr11 5185103 5185122 5185106 -
aacaaatatttaaaaaccat

SEQ ID NO: 53518 - DNA, 20 bp, Artificial Sequence
  Synthetic oligonucleotide; AAG chr11 5185092 5185111 5185095 -
aaaaaccataggtatcacaa

SEQ ID NO: 53519 - DNA, 20 bp, Artificial Sequence
  Synthetic oligonucleotide; CAG chr11 5185084 5185103 5185087 -
taggtatcacaaaagatcac

SEQ ID NO: 53520 - DNA, 20 bp, Artificial Sequence
  Synthetic oligonucleotide; AAG chr11 5185071 5185090 5185074 -
agatcaccagaaaaaattta

SEQ ID NO: 53521 - DNA, 20 bp, Artificial Sequence
  Synthetic oligonucleotide; AGG chr11 5185070 5185089 5185073 -
gatcaccagaaaaaatttaa

SEQ ID NO: 53522 - DNA, 20 bp, Artificial Sequence
  Synthetic oligonucleotide; CAG chr11 5185066 5185085 5185069 -
accagaaaaaatttaaaggc

SEQ ID NO: 53523 - DNA, 20 bp, Artificial Sequence
  Synthetic oligonucleotide; TAG chr11 5185012 5185031 5185015 -
tcctgtatttttttttcact

SEQ ID NO: 53524 - DNA, 20 bp, Artificial Sequence
  Synthetic oligonucleotide; AAG chr11 5184978 5184997 5184981 -
ccatccctaatgtcctgatg

SEQ ID NO: 53525 - DNA, 20 bp, Artificial Sequence
  Synthetic oligonucleotide; CAG chr11 5184972 5184991 5184975 -
ctaatgtcctgatgaagccc

SEQ ID NO: 53526 - DNA, 20 bp, Artificial Sequence
  Synthetic oligonucleotide; TGG chr11 5184925 5184944 5184928 -
ctacgcttcactcacatgca

SEQ ID NO: 53527 - DNA, 20 bp, Artificial Sequence
  Synthetic oligonucleotide; TGG chr11 5184919 5184938 5184922 -
ttcactcacatgcatggctc

SEQ ID NO: 53528 - DNA, 20 bp, Artificial Sequence
  Synthetic oligonucleotide; TAG chr11 5184914 5184933 5184917 -
tcacatgcatggctctggcc

SEQ ID NO: 53529 - DNA, 20 bp, Artificial Sequence
  Synthetic oligonucleotide; CAG chr11 5184903 5184922 5184906 -
gctctggcctagaactgtgt

SEQ ID NO: 53530 - DNA, 20 bp, Artificial Sequence
  Synthetic oligonucleotide; AGG chr11 5184902 5184921 5184905 -
ctctggcctagaactgtgtc

SEQ ID NO: 53531 - DNA, 20 bp, Artificial Sequence
  Synthetic oligonucleotide; CAG chr11 5184859 5184878 5184862 -
tcctttctctgaaacatcaa

SEQ ID NO: 53532 - DNA, 20 bp, Artificial Sequence
  Synthetic oligonucleotide; GAG chr11 5184831 5184850 5184834 -
ttaaaatattctaacaatgt

SEQ ID NO: 53533 - DNA, 20 bp, Artificial Sequence
  Synthetic oligonucleotide; TAG chr11 5184816 5184835 5184819 -
aatgtgagatatatattaaa

SEQ ID NO: 53534 - DNA, 20 bp, Artificial Sequence
  Synthetic oligonucleotide; TAG chr11 5184804 5184823 5184807 -
atattaaatagtaaaacaat

SEQ ID NO: 53535 - DNA, 20 bp, Artificial Sequence
  Synthetic oligonucleotide; AAG chr11 5184789 5184808 5184792 -
acaattagtttatgtaaata

SEQ ID NO: 53536 - DNA, 20 bp, Artificial Sequence
  Synthetic oligonucleotide; TAG chr11 5184786 5184805 5184789 -
attagtttatgtaaataaag

SEQ ID NO: 53537 - DNA, 20 bp, Artificial Sequence
  Synthetic oligonucleotide; CAG chr11 5184778 5184797 5184781 -
atgtaaataaagtagatcca

SEQ ID NO: 53538 - DNA, 20 bp, Artificial Sequence
  Synthetic oligonucleotide; GAG chr11 5184776 5184795 5184779 -
gtaaataaagtagatccaca

SEQ ID NO: 53539 - DNA, 20 bp, Artificial Sequence
  Synthetic oligonucleotide; AAG chr11 5184739 5184758 5184742 -
attttatcttaatattttta

SEQ ID NO: 53540 - DNA, 20 bp, Artificial Sequence
  Synthetic oligonucleotide; AAG chr11 5184719 5184738 5184722 -
aagaacctcattccaactta

SEQ ID NO: 53541 - DNA, 20 bp, Artificial Sequence
  Synthetic oligonucleotide; AAG chr11 5184715 5184734 5184718 -
acctcattccaacttaaagc

SEQ ID NO: 53542 - DNA, 20 bp, Artificial Sequence
  Synthetic oligonucleotide; AGG chr11 5184714 5184733 5184717 -
cctcattccaacttaaagca

SEQ ID NO: 53543 - DNA, 20 bp, Artificial Sequence
  Synthetic oligonucleotide; GGG chr11 5184713 5184732 5184716 -
ctcattccaacttaaagcaa

SEQ ID NO: 53544 - DNA, 20 bp, Artificial Sequence
  Synthetic oligonucleotide; CAG chr11 5184701 5184720 5184704 -
taaagcaagggtaaattgct

SEQ ID NO: 53545 - DNA, 20 bp, Artificial Sequence
  Synthetic oligonucleotide; TGG chr11 5184693 5184712 5184696 -
gggtaaattgctcagctgtg

SEQ ID NO: 53546 - DNA, 20 bp, Artificial Sequence
  Synthetic oligonucleotide; GGG chr11 5184692 5184711 5184695 -
ggtaaattgctcagctgtgt

SEQ ID NO: 53547 - DNA, 20 bp, Artificial Sequence
  Synthetic oligonucleotide; TGG chr11 5184658 5184677 5184661 -
ctaaactgtaactcaaaaaa

SEQ ID NO: 53548 - DNA, 20 bp, Artificial Sequence
  Synthetic oligonucleotide; GGG chr11 5184657 5184676 5184660 -
taaactgtaactcaaaaaat

SEQ ID NO: 53549 - DNA, 20 bp, Artificial Sequence
  Synthetic oligonucleotide; GAG chr11 5184626 5184645 5184629 -
atttccatcatataaaattt

SEQ ID NO: 53550 - DNA, 20 bp, Artificial Sequence
  Synthetic oligonucleotide; CAG chr11 5184621 5184640 5184624 -
catcatataaaatttgagac

SEQ ID NO: 53551 - DNA, 20 bp, Artificial Sequence
  Synthetic oligonucleotide; TAG chr11 5184612 5184631 5184615 -
aaatttgagaccagaatatt

SEQ ID NO: 53552 - DNA, 20 bp, Artificial Sequence
  Synthetic oligonucleotide; TAG chr11 5184605 5184624 5184608 -
agaccagaatatttagcact

SEQ ID NO: 53553 - DNA, 20 bp, Artificial Sequence
  Synthetic oligonucleotide; AAG chr11 5184593 5184612 5184596 -
ttagcacttagcaaaaacaa

SEQ ID NO: 53554 - DNA, 20 bp, Artificial Sequence
  Synthetic oligonucleotide; AAG chr11 5184588 5184607 5184591 -
acttagcaaaaacaaaagta

SEQ ID NO: 53555 - DNA, 20 bp, Artificial Sequence
  Synthetic oligonucleotide; AGG chr11 5184587 5184606 5184590 -
cttagcaaaaacaaaagtaa

SEQ ID NO: 53556 - DNA, 20 bp, Artificial Sequence
  Synthetic oligonucleotide; TAG chr11 5184584 5184603 5184587 -
agcaaaaacaaaagtaaagg

SEQ ID NO: 53557 - DNA, 20 bp, Artificial Sequence
  Synthetic oligonucleotide; CAG chr11 5184581 5184600 5184584 -
aaaaacaaaagtaaaggtag

SEQ ID NO: 53558 - DNA, 20 bp, Artificial Sequence
  Synthetic oligonucleotide; CAG chr11 5184560 5184579 5184563 -
agactatgctatacaatgat

SEQ ID NO: 53559 - DNA, 20 bp, Artificial Sequence
  Synthetic oligonucleotide; TGG chr11 5184542 5184561 5184545 -
atcagtatattgaactgtaa

SEQ ID NO: 53560 - DNA, 20 bp, Artificial Sequence
  Synthetic oligonucleotide; AAG chr11 5184535 5184554 5184538 -
tattgaactgtaatggaatc

SEQ ID NO: 53561 - DNA, 20 bp, Artificial Sequence
  Synthetic oligonucleotide; GAG chr11 5184533 5184552 5184536 -
ttgaactgtaatggaatcaa

SEQ ID NO: 53562 - DNA, 20 bp, Artificial Sequence
  Synthetic oligonucleotide; TGG chr11 5184529 5184548 5184532 -
actgtaatggaatcaagaga

SEQ ID NO: 53563 - DNA, 20 bp, Artificial Sequence
  Synthetic oligonucleotide; GGG chr11 5184528 5184547 5184531 -
ctgtaatggaatcaagagat

SEQ ID NO: 53564 - DNA, 20 bp, Artificial Sequence
  Synthetic oligonucleotide; GGG chr11 5184527 5184546 5184530 -
tgtaatggaatcaagagatg

SEQ ID NO: 53565 - DNA, 20 bp, Artificial Sequence
  Synthetic oligonucleotide; GGG chr11 5184526 5184545 5184529 -
gtaatggaatcaagagatgg

SEQ ID NO: 53566 - DNA, 20 bp, Artificial Sequence
  Synthetic oligonucleotide; GAG chr11 5184524 5184543 5184527 -
aatggaatcaagagatgggg

SEQ ID NO: 53567 - DNA, 20 bp, Artificial Sequence
  Synthetic oligonucleotide; CAG chr11 5184521 5184540 5184524 -
ggaatcaagagatgggggag

SEQ ID NO: 53568 - DNA, 20 bp, Artificial Sequence
  Synthetic oligonucleotide; AAG chr11 5184509 5184528 5184512 -
tgggggagcagtcatttctt

SEQ ID NO: 53569 - DNA, 20 bp, Artificial Sequence
  Synthetic oligonucleotide; AAG chr11 5184484 5184503 5184487 -
cctgtgccacctcaaaaaac

SEQ ID NO: 53570 - DNA, 20 bp, Artificial Sequence
  Synthetic oligonucleotide; TAG chr11 5184476 5184495 5184479 -
acctcaaaaaacaagaactt

SEQ ID NO: 53571 - DNA, 20 bp, Artificial Sequence
  Synthetic oligonucleotide; CAG chr11 5184472 5184491 5184475 -
caaaaaacaagaactttagc

SEQ ID NO: 53572 - DNA, 20 bp, Artificial Sequence
  Synthetic oligonucleotide; GAG chr11 5184460 5184479 5184463 -
actttagccagcttttactt

SEQ ID NO: 53573 - DNA, 20 bp, Artificial Sequence
  Synthetic oligonucleotide; AAG chr11 5184456 5184475 5184459 -
tagccagcttttacttgaga

SEQ ID NO: 53574 - DNA, 20 bp, Artificial Sequence
  Synthetic oligonucleotide; AGG chr11 5184455 5184474 5184458 -
agccagcttttacttgagaa

SEQ ID NO: 53575 - DNA, 20 bp, Artificial Sequence
  Synthetic oligonucleotide; GGG chr11 5184454 5184473 5184457 -
gccagcttttacttgagaaa

SEQ ID NO: 53576 - DNA, 20 bp, Artificial Sequence
  Synthetic oligonucleotide; TAG chr11 5184447 5184466 5184450 -
tttacttgagaaagggaact

SEQ ID NO: 53577 - DNA, 20 bp, Artificial Sequence
  Synthetic oligonucleotide; GAG chr11 5184445 5184464 5184448 -
tacttgagaaagggaactta

SEQ ID NO: 53578 - DNA, 20 bp, Artificial Sequence
  Synthetic oligonucleotide; GAG chr11 5184443 5184462 5184446 -
cttgagaaagggaacttaga

SEQ ID NO: 53579 - DNA, 20 bp, Artificial Sequence
  Synthetic oligonucleotide; TAG chr11 5184438 5184457 5184441 -
gaaagggaacttagagagta

SEQ ID NO: 53580 - DNA, 20 bp, Artificial Sequence
  Synthetic oligonucleotide; AAG chr11 5184435 5184454 5184438 -
agggaacttagagagtatag

SEQ ID NO: 53581 - DNA, 20 bp, Artificial Sequence
  Synthetic oligonucleotide; TAG chr11 5184334 5184353 5184337 -
tatctatctatctatctttc

SEQ ID NO: 53582 - DNA, 20 bp, Artificial Sequence
  Synthetic oligonucleotide; TAG chr11 5184330 5184349 5184333 -
tatctatctatctttctagc

SEQ ID NO: 53583 - DNA, 20 bp, Artificial Sequence
  Synthetic oligonucleotide; TAG chr11 5184326 5184345 5184329 -
tatctatctttctagctagc

SEQ ID NO: 53584 - DNA, 20 bp, Artificial Sequence
  Synthetic oligonucleotide; TAG chr11 5184322 5184341 5184325 -
tatctttctagctagctagc

SEQ ID NO: 53585 - DNA, 20 bp, Artificial Sequence
  Synthetic oligonucleotide; TAG chr11 5184318 5184337 5184321 -
tttctagctagctagctagc

SEQ ID NO: 53586 - DNA, 20 bp, Artificial Sequence
  Synthetic oligonucleotide; TAG chr11 5184314 5184333 5184317 -
tagctagctagctagctagc

SEQ ID NO: 53587 - DNA, 20 bp, Artificial Sequence
  Synthetic oligonucleotide; TAG chr11 5184310 5184329 5184313 -
tagctagctagctagctagc

SEQ ID NO: 53588 - DNA, 20 bp, Artificial Sequence
  Synthetic oligonucleotide; TGG chr11 5184265 5184284 5184268 -
tctgtatatgtcacctaccc

SEQ ID NO: 53589 - DNA, 20 bp, Artificial Sequence
  Synthetic oligonucleotide; TAG chr11 5184202 5184221 5184205 -
ttgcttctatccacattttt

SEQ ID NO: 53590 - DNA, 20 bp, Artificial Sequence
  Synthetic oligonucleotide; TAG chr11 5184196 5184215 5184199 -
ctatccacattttttagaac

SEQ ID NO: 53591 - DNA, 20 bp, Artificial Sequence
  Synthetic oligonucleotide; TAG chr11 5184189 5184208 5184192 -
cattttttagaactagtaat

SEQ ID NO: 53592 - DNA, 20 bp, Artificial Sequence
  Synthetic oligonucleotide; AAG chr11 5184179 5184198 5184182 -
aactagtaattagtaataac

SEQ ID NO: 53593 - DNA, 20 bp, Artificial Sequence
  Synthetic oligonucleotide; AAG chr11 5184166 5184185 5184169 -
taataacaagtaatatattg

SEQ ID NO: 53594 - DNA, 20 bp, Artificial Sequence
  Synthetic oligonucleotide; TAG chr11 5184158 5184177 5184161 -
agtaatatattgaagtaata

SEQ ID NO: 53595 - DNA, 20 bp, Artificial Sequence
  Synthetic oligonucleotide; TGG chr11 5184112 5184131 5184115 -
cattaaattacttgctgctg

SEQ ID NO: 53596 - DNA, 20 bp, Artificial Sequence
  Synthetic oligonucleotide; TGG chr11 5184109 5184128 5184112 -
taaattacttgctgctgtgg

SEQ ID NO: 53597 - DNA, 20 bp, Artificial Sequence
  Synthetic oligonucleotide; TAG chr11 5184102 5184121 5184105 -
cttgctgctgtggtggtact

SEQ ID NO: 53598 - DNA, 20 bp, Artificial Sequence
  Synthetic oligonucleotide; CAG chr11 5184061 5184080 5184064 -
attaattattgtctcaattt

SEQ ID NO: 53599 - DNA, 20 bp, Artificial Sequence
  Synthetic oligonucleotide; GAG chr11 5184059 5184078 5184062 -
taattattgtctcaatttca

SEQ ID NO: 53600 - DNA, 20 bp, Artificial Sequence
  Synthetic oligonucleotide; AAG chr11 5184039 5184058 5184042 -
gagcctattatttgtctatt

SEQ ID NO: 53601 - DNA, 20 bp, Artificial Sequence
  Synthetic oligonucleotide; GAG chr11 5184037 5184056 5184040 -
gcctattatttgtctattaa

SEQ ID NO: 53602 - DNA, 20 bp, Artificial Sequence
  Synthetic oligonucleotide; TGG chr11 5184020 5184039 5184023 -
taagagattcaatttctccc

SEQ ID NO: 53603 - DNA, 20 bp, Artificial Sequence
  Synthetic oligonucleotide; TAG chr11 5184015 5184034 5184018 -
gattcaatttctccctggtt

SEQ ID NO: 53604 - DNA, 20 bp, Artificial Sequence
  Synthetic oligonucleotide; TGG chr11 5184009 5184028 5184012 -
atttctccctggtttagtct

SEQ ID NO: 53605 - DNA, 20 bp, Artificial Sequence
  Synthetic oligonucleotide; GGG chr11 5184008 5184027 5184011 -
tttctccctggtttagtctt

SEQ ID NO: 53606 - DNA, 20 bp, Artificial Sequence
  Synthetic oligonucleotide; GAG chr11 5184006 5184025 5184009 -
tctccctggtttagtcttgg

SEQ ID NO: 53607 - DNA, 20 bp, Artificial Sequence
  Synthetic oligonucleotide; AGG chr11 5184005 5184024 5184008 -
ctccctggtttagtcttggg

SEQ ID NO: 53608 - DNA, 20 bp, Artificial Sequence
  Synthetic oligonucleotide; GGG chr11 5184004 5184023 5184007 -
tccctggtttagtcttggga

SEQ ID NO: 53609 - DNA, 20 bp, Artificial Sequence
  Synthetic oligonucleotide; GAG chr11 5183991 5184010 5183994 -
cttgggagggtgtatgtgtc

SEQ ID NO: 53610 - DNA, 20 bp, Artificial Sequence
  Synthetic oligonucleotide; AGG chr11 5183990 5184009 5183993 -
ttgggagggtgtatgtgtcg

SEQ ID NO: 53611 - DNA, 20 bp, Artificial Sequence
  Synthetic oligonucleotide; TAG chr11 5183970 5183989 5183973 -
aggaatttatccatttctac

SEQ ID NO: 53612 - DNA, 20 bp, Artificial Sequence
  Synthetic oligonucleotide; TAG chr11 5183961 5183980 5183964 -
tccatttctactagattttc

SEQ ID NO: 53613 - DNA, 20 bp, Artificial Sequence
  Synthetic oligonucleotide; TAG chr11 5183948 5183967 5183951 -
gattttctagtttatttgcg

SEQ ID NO: 53614 - DNA, 20 bp, Artificial Sequence
  Synthetic oligonucleotide; GAG chr11 5183946 5183965 5183949 -
ttttctagtttatttgcgta

SEQ ID NO: 53615 - DNA, 20 bp, Artificial Sequence
  Synthetic oligonucleotide; AGG chr11 5183945 5183964 5183948 -
tttctagtttatttgcgtag

SEQ ID NO: 53616 - DNA, 20 bp, Artificial Sequence
  Synthetic oligonucleotide; TAG chr11 5183936 5183955 5183939 -
tatttgcgtagaggtgttta

SEQ ID NO: 53617 - DNA, 20 bp, Artificial Sequence
  Synthetic oligonucleotide; TGG chr11 5183923 5183942 5183926 -
gtgtttatagtattctctga

SEQ ID NO: 53618 - DNA, 20 bp, Artificial Sequence
  Synthetic oligonucleotide; TAG chr11 5183920 5183939 5183923 -
tttatagtattctctgatgg

SEQ ID NO: 53619 - DNA, 20 bp, Artificial Sequence
  Synthetic oligonucleotide; TGG chr11 5183905 5183924 5183908 -
gatggtagtttgtatgtctg

SEQ ID NO: 53620 - DNA, 20 bp, Artificial Sequence
  Synthetic oligonucleotide; GGG chr11 5183904 5183923 5183907 -
atggtagtttgtatgtctgt

SEQ ID NO: 53621 - DNA, 20 bp, Artificial Sequence
  Synthetic oligonucleotide; TGG chr11 5183899 5183918 5183902 -
agtttgtatgtctgtgggat

SEQ ID NO: 53622 - DNA, 20 bp, Artificial Sequence
  Synthetic oligonucleotide; TGG chr11 5183896 5183915 5183899 -
ttgtatgtctgtgggattgg

SEQ ID NO: 53623 - DNA, 20 bp, Artificial Sequence
  Synthetic oligonucleotide; GAG chr11 5183857 5183876 5183860 -
atttcttattgcatctattt

SEQ ID NO: 53624 - DNA, 20 bp, Artificial Sequence
  Synthetic oligonucleotide; TAG chr11 5183832 5183851 5183835 -
ttctctcttttcttctttat

SEQ ID NO: 53625 - DNA, 20 bp, Artificial Sequence
  Synthetic oligonucleotide; TAG chr11 5183823 5183842 5183826 -
ttcttctttattagtcttgc

SEQ ID NO: 53626 - DNA, 20 bp, Artificial Sequence
  Synthetic oligonucleotide; CAG chr11 5183820 5183839 5183823 -
ttctttattagtcttgctag

SEQ ID NO: 53627 - DNA, 20 bp, Artificial Sequence
  Synthetic oligonucleotide; CAG chr11 5183786 5183805 5183789 -
tgttgatcttttcaaaaaac

SEQ ID NO: 53628 - DNA, 20 bp, Artificial Sequence
  Synthetic oligonucleotide; TGG chr11 5183779 5183798 5183782 -
cttttcaaaaaaccagctcc

SEQ ID NO: 53629 - DNA, 20 bp, Artificial Sequence
  Synthetic oligonucleotide; AAG chr11 5183760 5183779 5183763 -
ctggattcattgattttttt

SEQ ID NO: 53630 - DNA, 20 bp, Artificial Sequence
  Synthetic oligonucleotide; AGG chr11 5183759 5183778 5183762 -
tggattcattgattttttta

SEQ ID NO: 53631 - DNA, 20 bp, Artificial Sequence
  Synthetic oligonucleotide; GGG chr11 5183758 5183777 5183761 -
ggattcattgatttttttaa

SEQ ID NO: 53632 - DNA, 20 bp, Artificial Sequence
  Synthetic oligonucleotide; TAG chr11 5183695 5183714 5183698 -
acttatttcttgccttccgc

SEQ ID NO: 53633 - DNA, 20 bp, Artificial Sequence
  Synthetic oligonucleotide; AAG chr11 5183685 5183704 5183688 -
tgccttccgctagcttttga

SEQ ID NO: 53634 - DNA, 20 bp, Artificial Sequence
  Synthetic oligonucleotide; TAG chr11 5183664 5183683 5183667 -
agtgtttgctcttgcttctc

SEQ ID NO: 53635 - DNA, 20 bp, Artificial Sequence
  Synthetic oligonucleotide; TAG chr11 5183643 5183662 5183646 -
agttcttttaattgtgatgt

SEQ ID NO: 53636 - DNA, 20 bp, Artificial Sequence
  Synthetic oligonucleotide; AGG chr11 5183642 5183661 5183645 -
gttcttttaattgtgatgtt

SEQ ID NO: 53637 - DNA, 20 bp, Artificial Sequence
  Synthetic oligonucleotide; GGG chr11 5183641 5183660 5183644 -
ttcttttaattgtgatgtta

SEQ ID NO: 53638 - DNA, 20 bp, Artificial Sequence
  Synthetic oligonucleotide; TAG chr11 5183629 5183648 5183632 -
tgatgttagggtgtcaattt

SEQ ID NO: 53639 - DNA, 20 bp, Artificial Sequence
  Synthetic oligonucleotide; TGG chr11 5183606 5183625 5183609 -
atctttcctgctttcttttg

SEQ ID NO: 53640 - DNA, 20 bp, Artificial Sequence
  Synthetic oligonucleotide; GGG chr11 5183605 5183624 5183608 -
tctttcctgctttcttttgt

SEQ ID NO: 53641 - DNA, 20 bp, Artificial Sequence
  Synthetic oligonucleotide; TAG chr11 5183598 5183617 5183601 -
tgctttcttttgtgggcatt

SEQ ID NO: 53642 - DNA, 20 bp, Artificial Sequence
  Synthetic oligonucleotide; CAG chr11 5183555 5183574 5183558 -
acactgctttaaatgtgtcc

SEQ ID NO: 53643 - DNA, 20 bp, Artificial Sequence
  Synthetic oligonucleotide; GAG chr11 5183553 5183572 5183556 -
actgctttaaatgtgtccca

SEQ ID NO: 53644 - DNA, 20 bp, Artificial Sequence
  Synthetic oligonucleotide; TGG chr11 5183521 5183540 5183524 -
tgttgtatctttattctcgt

SEQ ID NO: 53645 - DNA, 20 bp, Artificial Sequence
  Synthetic oligonucleotide; AAG chr11 5183513 5183532 5183516 -
ctttattctcgttggtttca

SEQ ID NO: 53646 - DNA, 20 bp, Artificial Sequence
  Synthetic oligonucleotide; CAG chr11 5183474 5183493 5183477 -
ccttcattttgttatgtacc

SEQ ID NO: 53647 - DNA, 20 bp, Artificial Sequence
  Synthetic oligonucleotide; TAG chr11 5183471 5183490 5183474 -
tcattttgttatgtacccag

SEQ ID NO: 53648 - DNA, 20 bp, Artificial Sequence
  Synthetic oligonucleotide; CAG chr11 5183463 5183482 5183466 -
ttatgtacccagtagtcatt

SEQ ID NO: 53649 - DNA, 20 bp, Artificial Sequence
  Synthetic oligonucleotide; AGG chr11 5183462 5183481 5183465 -
tatgtacccagtagtcattc

SEQ ID NO: 53650 - DNA, 20 bp, Artificial Sequence
  Synthetic oligonucleotide; GAG chr11 5183460 5183479 5183463 -
tgtacccagtagtcattcag

SEQ ID NO: 53651 - DNA, 20 bp, Artificial Sequence
  Synthetic oligonucleotide; CAG chr11 5183457 5183476 5183460 -
acccagtagtcattcaggag

SEQ ID NO: 53652 - DNA, 20 bp, Artificial Sequence
  Synthetic oligonucleotide; AGG chr11 5183456 5183475 5183459 -
cccagtagtcattcaggagc

SEQ ID NO: 53653 - DNA, 20 bp, Artificial Sequence
  Synthetic oligonucleotide; CAG chr11 5183448 5183467 5183451 -
tcattcaggagcaggctgtt

SEQ ID NO: 53654 - DNA, 20 bp, Artificial Sequence
  Synthetic oligonucleotide; TAG chr11 5183437 5183456 5183440 -
caggctgttcagtttccatg

SEQ ID NO: 53655 - DNA, 20 bp, Artificial Sequence
  Synthetic oligonucleotide; GAG chr11 5183432 5183451 5183435 -
tgttcagtttccatgtagtt

SEQ ID NO: 53656 - DNA, 20 bp, Artificial Sequence
  Synthetic oligonucleotide; TGG chr11 5183429 5183448 5183432 -
tcagtttccatgtagttgag

SEQ ID NO: 53657 - DNA, 20 bp, Artificial Sequence
  Synthetic oligonucleotide; GAG chr11 5183422 5183441 5183425 -
ccatgtagttgagtggtttt

SEQ ID NO: 53658 - DNA, 20 bp, Artificial Sequence
  Synthetic oligonucleotide; GAG chr11 5183418 5183437 5183421 -
gtagttgagtggttttgagt

SEQ ID NO: 53659 - DNA, 20 bp, Artificial Sequence
  Synthetic oligonucleotide; GAG chr11 5183403 5183422 5183406 -
tgagtgagtttcttaatcct

SEQ ID NO: 53660 - DNA, 20 bp, Artificial Sequence
  Synthetic oligonucleotide; TAG chr11 5183397 5183416 5183400 -
agtttcttaatcctgagttc

SEQ ID NO: 53661 - DNA, 20 bp, Artificial Sequence
  Synthetic oligonucleotide; TGG chr11 5183381 5183400 5183384 -
gttctagtttgattgcactg

SEQ ID NO: 53662 - DNA, 20 bp, Artificial Sequence
  Synthetic oligonucleotide; GAG chr11 5183375 5183394 5183378 -
gtttgattgcactgtggtct

SEQ ID NO: 53663 - DNA, 20 bp, Artificial Sequence
  Synthetic oligonucleotide; GAG chr11 5183373 5183392 5183376 -
ttgattgcactgtggtctga

SEQ ID NO: 53664 - DNA, 20 bp, Artificial Sequence
  Synthetic oligonucleotide; CAG chr11 5183369 5183388 5183372 -
ttgcactgtggtctgagaga

SEQ ID NO: 53665 - DNA, 20 bp, Artificial Sequence
  Synthetic oligonucleotide; GAG chr11 5183334 5183353 5183337 -
tctgttcttttacgtttgct

SEQ ID NO: 53666 - DNA, 20 bp, Artificial Sequence
  Synthetic oligonucleotide; AGG chr11 5183333 5183352 5183336 -
ctgttcttttacgtttgctg

SEQ ID NO: 53667 - DNA, 20 bp, Artificial Sequence
  Synthetic oligonucleotide; GAG chr11 5183331 5183350 5183334 -
gttcttttacgtttgctgag

SEQ ID NO: 53668 - DNA, 20 bp, Artificial Sequence
  Synthetic oligonucleotide; TGG chr11 5183309 5183328 5183312 -
gtgcttcacttccaactatg

SEQ ID NO: 53669 - DNA, 20 bp, Artificial Sequence
  Synthetic oligonucleotide; TGG chr11 5183301 5183320 5183304 -
cttccaactatgtggtcaac

SEQ ID NO: 53670 - DNA, 20 bp, Artificial Sequence
  Synthetic oligonucleotide; TAG chr11 5183296 5183315 5183299 -
aactatgtggtcaactggaa

SEQ ID NO: 53671 - DNA, 20 bp, Artificial Sequence
  Synthetic oligonucleotide; AGG chr11 5183295 5183314 5183298 -
actatgtggtcaactggaat

SEQ ID NO: 53672 - DNA, 20 bp, Artificial Sequence
  Synthetic oligonucleotide; TGG chr11 5183290 5183309 5183293 -
gtggtcaactggaataggtg

SEQ ID NO: 53673 - DNA, 20 bp, Artificial Sequence
  Synthetic oligonucleotide; TGG chr11 5183285 5183304 5183288 -
caactggaataggtgtggtg

SEQ ID NO: 53674 - DNA, 20 bp, Artificial Sequence
  Synthetic oligonucleotide; GAG chr11 5183278 5183297 5183281 -
aataggtgtggtgtggtgct

SEQ ID NO: 53675 - DNA, 20 bp, Artificial Sequence
  Synthetic oligonucleotide; AAG chr11 5183275 5183294 5183278 -
aggtgtggtgtggtgctgag

SEQ ID NO: 53676 - DNA, 20 bp, Artificial Sequence
  Synthetic oligonucleotide; TGG chr11 5183253 5183272 5183256 -
gaatgtatattctattgatt

SEQ ID NO: 53677 - DNA, 20 bp, Artificial Sequence
  Synthetic oligonucleotide; GGG chr11 5183252 5183271 5183255 -
aatgtatattctattgattt

SEQ ID NO: 53678 - DNA, 20 bp, Artificial Sequence
  Synthetic oligonucleotide; TGG chr11 5183248 5183267 5183251 -
tatattctattgatttggga

SEQ ID NO: 53679 - DNA, 20 bp, Artificial Sequence
  Synthetic oligonucleotide; GAG chr11 5183246 5183265 5183249 -
tattctattgatttgggatg

SEQ ID NO: 53680 - DNA, 20 bp, Artificial Sequence
  Synthetic oligonucleotide; GAG chr11 5183244 5183263 5183247 -
ttctattgatttgggatgga

SEQ ID NO: 53681 - DNA, 20 bp, Artificial Sequence
  Synthetic oligonucleotide; TAG chr11 5183236 5183255 5183239 -
atttgggatggagagttctg

SEQ ID NO: 53682 - DNA, 20 bp, Artificial Sequence
  Synthetic oligonucleotide; TAG chr11 5183225 5183244 5183228 -
agagttctgtagatgtctat

SEQ ID NO: 53683 - DNA, 20 bp, Artificial Sequence
  Synthetic oligonucleotide; AGG chr11 5183224 5183243 5183227 -
gagttctgtagatgtctatt

SEQ ID NO: 53684 - DNA, 20 bp, Artificial Sequence
  Synthetic oligonucleotide; TGG chr11 5183215 5183234 5183218 -
agatgtctattaggtctgct

SEQ ID NO: 53685 - DNA, 20 bp, Artificial Sequence
  Synthetic oligonucleotide; CAG chr11 5183210 5183229 5183213 -
tctattaggtctgcttggtg

SEQ ID NO: 53686 - DNA, 20 bp, Artificial Sequence
  Synthetic oligonucleotide; GAG chr11 5183208 5183227 5183211 -
tattaggtctgcttggtgca

SEQ ID NO: 53687 - DNA, 20 bp, Artificial Sequence
  Synthetic oligonucleotide; TGG chr11 5183191 5183210 5183194 -
gcagagctgaattcaattcc

SEQ ID NO: 53688 - DNA, 20 bp, Artificial Sequence
  Synthetic oligonucleotide; CAG chr11 5183144 5183163 5183147 -
gttgatctgtctaatgttga

SEQ ID NO: 53689 - DNA, 20 bp, Artificial Sequence
  Synthetic oligonucleotide; TGG chr11 5183141 5183160 5183144 -
gatctgtctaatgttgacag

SEQ ID NO: 53690 - DNA, 20 bp, Artificial Sequence
  Synthetic oligonucleotide; GGG chr11 5183140 5183159 5183143 -
atctgtctaatgttgacagt

SEQ ID NO: 53691 - DNA, 20 bp, Artificial Sequence
  Synthetic oligonucleotide; GGG chr11 5183139 5183158 5183142 -
tctgtctaatgttgacagtg

SEQ ID NO: 53692 - DNA, 20 bp, Artificial Sequence
  Synthetic oligonucleotide; AAG chr11 5183131 5183150 5183134 -
atgttgacagtggggtgtta

SEQ ID NO: 53693 - DNA, 20 bp, Artificial Sequence
  Synthetic oligonucleotide; TGG chr11 5183110 5183129 5183113 -
agtctcccattattattgtg

SEQ ID NO: 53694 - DNA, 20 bp, Artificial Sequence
  Synthetic oligonucleotide; GGG chr11 5183109 5183128 5183112 -
gtctcccattattattgtgt

SEQ ID NO: 53695 - DNA, 20 bp, Artificial Sequence
  Synthetic oligonucleotide; GAG chr11 5183107 5183126 5183110 -
ctcccattattattgtgtgg

SEQ ID NO: 53696 - DNA, 20 bp, Artificial Sequence
  Synthetic oligonucleotide; AAG chr11 5183101 5183120 5183104 -
ttattattgtgtgggagtct

SEQ ID NO: 53697 - DNA, 20 bp, Artificial Sequence
  Synthetic oligonucleotide; TAG chr11 5183090 5183109 5183093 -
tgggagtctaagtctctttg

SEQ ID NO: 53698 - DNA, 20 bp, Artificial Sequence
  Synthetic oligonucleotide; AGG chr11 5183089 5183108 5183092 -
gggagtctaagtctctttgt

SEQ ID NO: 53699 - DNA, 20 bp, Artificial Sequence
  Synthetic oligonucleotide; AAG chr11 5183081 5183100 5183084 -
aagtctctttgtaggtctct

SEQ ID NO: 53700 - DNA, 20 bp, Artificial Sequence
  Synthetic oligonucleotide; AGG chr11 5183080 5183099 5183083 -
agtctctttgtaggtctcta

SEQ ID NO: 53701 - DNA, 20 bp, Artificial Sequence
  Synthetic oligonucleotide; TGG chr11 5183061 5183080 5183064 -
aaggacttgctttatgaatc

SEQ ID NO: 53702 - DNA, 20 bp, Artificial Sequence
  Synthetic oligonucleotide; GGG chr11 5183060 5183079 5183063 -
aggacttgctttatgaatct

SEQ ID NO: 53703 - DNA, 20 bp, Artificial Sequence
  Synthetic oligonucleotide; TGG chr11 5183046 5183065 5183049 -
gaatctgggtgctgctgtat

SEQ ID NO: 53704 - DNA, 20 bp, Artificial Sequence
  Synthetic oligonucleotide; GGG chr11 5183045 5183064 5183048 -
aatctgggtgctgctgtatt

SEQ ID NO: 53705 - DNA, 20 bp, Artificial Sequence
  Synthetic oligonucleotide; TAG chr11 5183030 5183049 5183033 -
gtattgggtgcatatatatt

SEQ ID NO: 53706 - DNA, 20 bp, Artificial Sequence
  Synthetic oligonucleotide; AGG chr11 5183029 5183048 5183032 -
tattgggtgcatatatattt

SEQ ID NO: 53707 - DNA, 20 bp, Artificial Sequence
  Synthetic oligonucleotide; TAG chr11 5183025 5183044 5183028 -
gggtgcatatatatttagga

SEQ ID NO: 53708 - DNA, 20 bp, Artificial Sequence
  Synthetic oligonucleotide; TAG chr11 5183021 5183040 5183024 -
gcatatatatttaggatagt

SEQ ID NO: 53709 - DNA, 20 bp, Artificial Sequence
  Synthetic oligonucleotide; CAG chr11 5182991 5183010 5182994 -
tgttgaattgatccctttac

SEQ ID NO: 53710 - DNA, 20 bp, Artificial Sequence
  Synthetic oligonucleotide; TGG chr11 5182981 5183000 5182984 -
atccctttaccagtatgtaa

SEQ ID NO: 53711 - DNA, 20 bp, Artificial Sequence
  Synthetic oligonucleotide; TGG chr11 5182952 5182971 5182955 -
ttgtctcttttgatctttgt

SEQ ID NO: 53712 - DNA, 20 bp, Artificial Sequence
  Synthetic oligonucleotide; AAG chr11 5182945 5182964 5182948 -
ttttgatctttgttggttta

SEQ ID NO: 53713 - DNA, 20 bp, Artificial Sequence
  Synthetic oligonucleotide; CAG chr11 5182932 5182951 5182935 -
tggtttaaagtctgttttat

SEQ ID NO: 53714 - DNA, 20 bp, Artificial Sequence
  Synthetic oligonucleotide; GAG chr11 5182930 5182949 5182933 -
gtttaaagtctgttttatca

SEQ ID NO: 53715 - DNA, 20 bp, Artificial Sequence
  Synthetic oligonucleotide; AAG chr11 5182924 5182943 5182927 -
agtctgttttatcagagact

SEQ ID NO: 53716 - DNA, 20 bp, Artificial Sequence
  Synthetic oligonucleotide; TGG chr11 5182884 5182903 5182887 -
ttttttgttttccatttgct

SEQ ID NO: 53717 - DNA, 20 bp, Artificial Sequence
  Synthetic oligonucleotide; TAG chr11 5182881 5182900 5182884 -
tttgttttccatttgcttgg

SEQ ID NO: 53718 - DNA, 20 bp, Artificial Sequence
  Synthetic oligonucleotide; GAG chr11 5182855 5182874 5182858 -
ttcctccatccctttatttt

SEQ ID NO: 53719 - DNA, 20 bp, Artificial Sequence
  Synthetic oligonucleotide; GAG chr11 5182831 5182850 5182834 -
ctatgtgtgtctctccacat

SEQ ID NO: 53720 - DNA, 20 bp, Artificial Sequence
  Synthetic oligonucleotide; TGG chr11 5182826 5182845 5182829 -
tgtgtctctccacatgagat

SEQ ID NO: 53721 - DNA, 20 bp, Artificial Sequence
  Synthetic oligonucleotide; CAG chr11 5182812 5182831 5182815 -
tgagattggtttcctgaata

SEQ ID NO: 53722 - DNA, 20 bp, Artificial Sequence
  Synthetic oligonucleotide; TAG chr11 5182801 5182820 5182804 -
tcctgaatacagcacactga

SEQ ID NO: 53723 - DNA, 20 bp, Artificial Sequence
  Synthetic oligonucleotide; AGG chr11 5182800 5182819 5182803 -
cctgaatacagcacactgat

SEQ ID NO: 53724 - DNA, 20 bp, Artificial Sequence
  Synthetic oligonucleotide; CAG chr11 5182774 5182793 5182777 -
tgactctttatccaatttgc

SEQ ID NO: 53725 - DNA, 20 bp, Artificial Sequence
  Synthetic oligonucleotide; TGG chr11 5182756 5182775 5182759 -
gccagtctgtgtcttttaat

SEQ ID NO: 53726 - DNA, 20 bp, Artificial Sequence
  Synthetic oligonucleotide; GAG chr11 5182754 5182773 5182757 -
cagtctgtgtcttttaattg

SEQ ID NO: 53727 - DNA, 20 bp, Artificial Sequence
  Synthetic oligonucleotide; TAG chr11 5182747 5182766 5182750 -
tgtcttttaattggagcatt

SEQ ID NO: 53728 - DNA, 20 bp, Artificial Sequence
  Synthetic oligonucleotide; AAG chr11 5182731 5182750 5182734 -
catttagctcatttacattt

SEQ ID NO: 53729 - DNA, 20 bp, Artificial Sequence
  Synthetic oligonucleotide; AGG chr11 5182730 5182749 5182733 -
atttagctcatttacattta

SEQ ID NO: 53730 - DNA, 20 bp, Artificial Sequence
  Synthetic oligonucleotide; GAG chr11 5182712 5182731 5182715 -
taaggttaatattgttatgt

SEQ ID NO: 53731 - DNA, 20 bp, Artificial Sequence
  Synthetic oligonucleotide; TAG chr11 5182685 5182704 5182688 -
tgatcctgtcattatgatgt

SEQ ID NO: 53732 - DNA, 20 bp, Artificial Sequence
  Synthetic oligonucleotide; TGG chr11 5182681 5182700 5182684 -
cctgtcattatgatgttagc

SEQ ID NO: 53733 - DNA, 20 bp, Artificial Sequence
  Synthetic oligonucleotide; TAG chr11 5182665 5182684 5182668 -
tagctggttattttgcttgc

SEQ ID NO: 53734 - DNA, 20 bp, Artificial Sequence
  Synthetic oligonucleotide; CAG chr11 5182656 5182675 5182659 -
attttgcttgctagttgatg

SEQ ID NO: 53735 - DNA, 20 bp, Artificial Sequence
  Synthetic oligonucleotide; TAG chr11 5182645 5182664 5182648 -
tagttgatgcagtttctccc

SEQ ID NO: 53736 - DNA, 20 bp, Artificial Sequence
  Synthetic oligonucleotide; TGG chr11 5182636 5182655 5182639 -
cagtttctccctagccttga

SEQ ID NO: 53737 - DNA, 20 bp, Artificial Sequence
  Synthetic oligonucleotide; TGG chr11 5182622 5182641 5182625 -
ccttgatggtctttacaatt

SEQ ID NO: 53738 - DNA, 20 bp, Artificial Sequence
  Synthetic oligonucleotide; CAG chr11 5182609 5182628 5182612 -
tacaatttggcatgtttttg

SEQ ID NO: 53739 - DNA, 20 bp, Artificial Sequence
  Synthetic oligonucleotide; TGG chr11 5182606 5182625 5182609 -
aatttggcatgtttttgcag

SEQ ID NO: 53740 - DNA, 20 bp, Artificial Sequence
  Synthetic oligonucleotide; TGG chr11 5182602 5182621 5182605 -
tggcatgtttttgcagtggc

SEQ ID NO: 53741 - DNA, 20 bp, Artificial Sequence
  Synthetic oligonucleotide; TGG chr11 5182596 5182615 5182599 -
gtttttgcagtggctggtac

SEQ ID NO: 53742 - DNA, 20 bp, Artificial Sequence
  Synthetic oligonucleotide; CAG chr11 5182564 5182583 5182567 -
tccatgtttactgcttcctt

SEQ ID NO: 53743 - DNA, 20 bp, Artificial Sequence
  Synthetic oligonucleotide; AGG chr11 5182563 5182582 5182566 -
ccatgtttactgcttccttc

SEQ ID NO: 53744 - DNA, 20 bp, Artificial Sequence
  Synthetic oligonucleotide; GAG chr11 5182561 5182580 5182564 -
atgtttactgcttccttcag

SEQ ID NO: 53745 - DNA, 20 bp, Artificial Sequence
  Synthetic oligonucleotide; TAG chr11 5182552 5182571 5182555 -
gcttccttcaggagctcttt

SEQ ID NO: 53746 - DNA, 20 bp, Artificial Sequence
  Synthetic oligonucleotide; AGG chr11 5182551 5182570 5182554 -
cttccttcaggagctctttt

SEQ ID NO: 53747 - DNA, 20 bp, Artificial Sequence
  Synthetic oligonucleotide; GGG chr11 5182550 5182569 5182553 -
ttccttcaggagctctttta

SEQ ID NO: 53748 - DNA, 20 bp, Artificial Sequence
  Synthetic oligonucleotide; CAG chr11 5182547 5182566 5182550 -
cttcaggagctcttttaggg

SEQ ID NO: 53749 - DNA, 20 bp, Artificial Sequence
  Synthetic oligonucleotide; AGG chr11 5182546 5182565 5182549 -
ttcaggagctcttttagggc

SEQ ID NO: 53750 - DNA, 20 bp, Artificial Sequence
  Synthetic oligonucleotide; TGG chr11 5182541 5182560 5182544 -
gagctcttttagggcaggcc

SEQ ID NO: 53751 - DNA, 20 bp, Artificial Sequence
  Synthetic oligonucleotide; TGG chr11 5182538 5182557 5182541 -
ctcttttagggcaggcctgg

SEQ ID NO: 53752 - DNA, 20 bp, Artificial Sequence
  Synthetic oligonucleotide; CAG chr11 5182526 5182545 5182529 -
aggcctggtggtgacaaaat

SEQ ID NO: 53753 - DNA, 20 bp, Artificial Sequence
  Synthetic oligonucleotide; AAG chr11 5182507 5182526 5182510 -
tcagcaattgcttgtctgta

SEQ ID NO: 53754 - DNA, 20 bp, Artificial Sequence
  Synthetic oligonucleotide; AAG chr11 5182480 5182499 5182483 -
ttatttctccttcacttatg

SEQ ID NO: 53755 - DNA, 20 bp, Artificial Sequence
  Synthetic oligonucleotide; AAG chr11 5182462 5182481 5182465 -
tgaagcttaccaaccaaaaa

SEQ ID NO: 53756 - DNA, 20 bp, Artificial Sequence
  Synthetic oligonucleotide; CAG chr11 5182457 5182476 5182460 -
cttaccaaccaaaaaaagtc

SEQ ID NO: 53757 - DNA, 20 bp, Artificial Sequence
  Synthetic oligonucleotide; AGG chr11 5182456 5182475 5182459 -
ttaccaaccaaaaaaagtcc

SEQ ID NO: 53758 - DNA, 20 bp, Artificial Sequence
  Synthetic oligonucleotide; CAG chr11 5182451 5182470 5182454 -
aaccaaaaaaagtccaggac

SEQ ID NO: 53759 - DNA, 20 bp, Artificial Sequence
  Synthetic oligonucleotide; TGG chr11 5182447 5182466 5182450 -
aaaaaaagtccaggaccaga

SEQ ID NO: 53760 - DNA, 20 bp, Artificial Sequence
  Synthetic oligonucleotide; CAG chr11 5182439 5182458 5182442 -
tccaggaccagatggattca

SEQ ID NO: 53761 - DNA, 20 bp, Artificial Sequence
  Synthetic oligonucleotide; CAG chr11 5182425 5182444 5182428 -
gattcacagccgaattctac

SEQ ID NO: 53762 - DNA, 20 bp, Artificial Sequence
  Synthetic oligonucleotide; GAG chr11 5182423 5182442 5182426 -
ttcacagccgaattctacca

SEQ ID NO: 53763 - DNA, 20 bp, Artificial Sequence
  Synthetic oligonucleotide; AGG chr11 5182422 5182441 5182425 -
tcacagccgaattctaccag

SEQ ID NO: 53764 - DNA, 20 bp, Artificial Sequence
  Synthetic oligonucleotide; AAG chr11 5182416 5182435 5182419 -
ccgaattctaccagaggtac

SEQ ID NO: 53765 - DNA, 20 bp, Artificial Sequence
  Synthetic oligonucleotide; AGG chr11 5182415 5182434 5182418 -
cgaattctaccagaggtaca

SEQ ID NO: 53766 - DNA, 20 bp, Artificial Sequence
  Synthetic oligonucleotide; GAG chr11 5182413 5182432 5182416 -
aattctaccagaggtacaag

SEQ ID NO: 53767 - DNA, 20 bp, Artificial Sequence
  Synthetic oligonucleotide; AGG chr11 5182412 5182431 5182415 -
attctaccagaggtacaagg

SEQ ID NO: 53768 - DNA, 20 bp, Artificial Sequence
  Synthetic oligonucleotide; GAG chr11 5182410 5182429 5182413 -
tctaccagaggtacaaggag

SEQ ID NO: 53769 - DNA, 20 bp, Artificial Sequence
  Synthetic oligonucleotide; TGG chr11 5182406 5182425 5182409 -
ccagaggtacaaggaggagc

SEQ ID NO: 53770 - DNA, 20 bp, Artificial Sequence
  Synthetic oligonucleotide; TAG chr11 5182373 5182392 5182376 -
tctgaaactattccaatcaa

SEQ ID NO: 53771 - DNA, 20 bp, Artificial Sequence
  Synthetic oligonucleotide; AAG chr11 5182367 5182386 5182370 -
actattccaatcaatagaaa

SEQ ID NO: 53772 - DNA, 20 bp, Artificial Sequence
  Synthetic oligonucleotide; GAG chr11 5182365 5182384 5182368 -
tattccaatcaatagaaaaa

SEQ ID NO: 53773 - DNA, 20 bp, Artificial Sequence
  Synthetic oligonucleotide; AGG chr11 5182364 5182383 5182367 -
attccaatcaatagaaaaag

SEQ ID NO: 53774 - DNA, 20 bp, Artificial Sequence
  Synthetic oligonucleotide; GGG chr11 5182363 5182382 5182366 -
ttccaatcaatagaaaaaga

SEQ ID NO: 53775 - DNA, 20 bp, Artificial Sequence
  Synthetic oligonucleotide; GAG chr11 5182338 5182357 5182341 -
tcctccctaactcattttat

SEQ ID NO: 53776 - DNA, 20 bp, Artificial Sequence
  Synthetic oligonucleotide; AGG chr11 5182337 5182356 5182340 -
cctccctaactcattttatg

SEQ ID NO: 53777 - DNA, 20 bp, Artificial Sequence
  Synthetic oligonucleotide; CAG chr11 5182333 5182352 5182336 -
cctaactcattttatgaggc

SEQ ID NO: 53778 - DNA, 20 bp, Artificial Sequence
  Synthetic oligonucleotide; AAG chr11 5182314 5182333 5182317 -
ccagcatcatcttgatacca

SEQ ID NO: 53779 - DNA, 20 bp, Artificial Sequence
  Synthetic oligonucleotide; TAG chr11 5182309 5182328 5182312 -
atcatcttgataccaaagcc

SEQ ID NO: 53780 - DNA, 20 bp, Artificial Sequence
  Synthetic oligonucleotide; CAG chr11 5182306 5182325 5182309 -
atcttgataccaaagcctag

SEQ ID NO: 53781 - DNA, 20 bp, Artificial Sequence
  Synthetic oligonucleotide; AAG chr11 5182289 5182308 5182292 -
tagcagacacacaacaaaaa

SEQ ID NO: 53782 - DNA, 20 bp, Artificial Sequence
  Synthetic oligonucleotide; GAG chr11 5182287 5182306 5182290 -
gcagacacacaacaaaaaaa

SEQ ID NO: 53783 - DNA, 20 bp, Artificial Sequence
  Synthetic oligonucleotide; CAG chr11 5182240 5182259 5182243 -
aacatcgatgcaaaaatcct

SEQ ID NO: 53784 - DNA, 20 bp, Artificial Sequence
  Synthetic oligonucleotide; TGG chr11 5182229 5182248 5182232 -
aaaaatcctcagtaaaatac

SEQ ID NO: 53785 - DNA, 20 bp, Artificial Sequence
  Synthetic oligonucleotide; CAG chr11 5182215 5182234 5182218 -
aaatactggcaaaccaaatc

SEQ ID NO: 53786 - DNA, 20 bp, Artificial Sequence
  Synthetic oligonucleotide; AGG chr11 5182214 5182233 5182217 -
aatactggcaaaccaaatcc

SEQ ID NO: 53787 - DNA, 20 bp, Artificial Sequence
  Synthetic oligonucleotide; GAG chr11 5182212 5182231 5182215 -
tactggcaaaccaaatccag

SEQ ID NO: 53788 - DNA, 20 bp, Artificial Sequence
  Synthetic oligonucleotide; AAG chr11 5182200 5182219 5182203 -
aaatccaggagcacatcaaa

SEQ ID NO: 53789 - DNA, 20 bp, Artificial Sequence
  Synthetic oligonucleotide; AAG chr11 5182181 5182200 5182184 -
aaagcttatccaccatgatc

SEQ ID NO: 53790 - DNA, 20 bp, Artificial Sequence
  Synthetic oligonucleotide; TGG chr11 5182178 5182197 5182181 -
gcttatccaccatgatcaag

SEQ ID NO: 53791 - DNA, 20 bp, Artificial Sequence
  Synthetic oligonucleotide; GGG chr11 5182177 5182196 5182180 -
cttatccaccatgatcaagt

SEQ ID NO: 53792 - DNA, 20 bp, Artificial Sequence
  Synthetic oligonucleotide; TGG chr11 5182165 5182184 5182168 -
gatcaagtgggcttcatccc

SEQ ID NO: 53793 - DNA, 20 bp, Artificial Sequence
  Synthetic oligonucleotide; GGG chr11 5182164 5182183 5182167 -
atcaagtgggcttcatccct

SEQ ID NO: 53794 - DNA, 20 bp, Artificial Sequence
  Synthetic oligonucleotide; CAG chr11 5182158 5182177 5182161 -
tgggcttcatccctgggatg

SEQ ID NO: 53795 - DNA, 20 bp, Artificial Sequence
  Synthetic oligonucleotide; AGG chr11 5182157 5182176 5182160 -
gggcttcatccctgggatgc

SEQ ID NO: 53796 - DNA, 20 bp, Artificial Sequence
  Synthetic oligonucleotide; GGG chr11 5182156 5182175 5182159 -
ggcttcatccctgggatgca

SEQ ID NO: 53797 - DNA, 20 bp, Artificial Sequence
  Synthetic oligonucleotide; TGG chr11 5182152 5182171 5182155 -
tcatccctgggatgcagggc

SEQ ID NO: 53798 - DNA, 20 bp, Artificial Sequence
  Synthetic oligonucleotide; CAG chr11 5182119 5182138 5182122 -
gcaaatcaataaacataatc

SEQ ID NO: 53799 - DNA, 20 bp, Artificial Sequence
  Synthetic oligonucleotide; CAG chr11 5182108 5182127 5182111 -
aacataatccagcatataaa

SEQ ID NO: 53800 - DNA, 20 bp, Artificial Sequence
  Synthetic oligonucleotide; AAG chr11 5182100 5182119 5182103 -
ccagcatataaacagaacca

SEQ ID NO: 53801 - DNA, 20 bp, Artificial Sequence
  Synthetic oligonucleotide; TAG chr11 5182073 5182092 5182076 -
aaaccacatgattatctcaa

SEQ ID NO: 53802 - DNA, 20 bp, Artificial Sequence
  Synthetic oligonucleotide; CAG chr11 5182067 5182086 5182070 -
catgattatctcaatagatg

SEQ ID NO: 53803 - DNA, 20 bp, Artificial Sequence
  Synthetic oligonucleotide; AAG chr11 5182062 5182081 5182065 -
ttatctcaatagatgcagaa

SEQ ID NO: 53804 - DNA, 20 bp, Artificial Sequence
  Synthetic oligonucleotide; AGG chr11 5182061 5182080 5182064 -
tatctcaatagatgcagaaa

SEQ ID NO: 53805 - DNA, 20 bp, Artificial Sequence
  Synthetic oligonucleotide; TAG chr11 5182010 5182029 5182013 -
actaaaaactctcaataaat

SEQ ID NO: 53806 - DNA, 20 bp, Artificial Sequence
  Synthetic oligonucleotide; AGG chr11 5182009 5182028 5182012 -
ctaaaaactctcaataaatt

SEQ ID NO: 53807 - DNA, 20 bp, Artificial Sequence
  Synthetic oligonucleotide; TGG chr11 5182000 5182019 5182003 -
ctcaataaattaggtatcga

SEQ ID NO: 53808 - DNA, 20 bp, Artificial Sequence
  Synthetic oligonucleotide; GGG chr11 5181999 5182018 5182002 -
tcaataaattaggtatcgat

SEQ ID NO: 53809 - DNA, 20 bp, Artificial Sequence
  Synthetic oligonucleotide; AAG chr11 5181979 5181998 5181982 -
gggacatatctcaaaataat

SEQ ID NO: 53810 - DNA, 20 bp, Artificial Sequence
  Synthetic oligonucleotide; GAG chr11 5181977 5181996 5181980 -
gacatatctcaaaataataa

SEQ ID NO: 53811 - DNA, 20 bp, Artificial Sequence
  Synthetic oligonucleotide; CAG chr11 5181956 5181975 5181959 -
agctatctatgacaaaccca

SEQ ID NO: 53812 - DNA, 20 bp, Artificial Sequence
  Synthetic oligonucleotide; TGG chr11 5181937 5181956 5181940 -
acagccaatatcatactgaa

SEQ ID NO: 53813 - DNA, 20 bp, Artificial Sequence
  Synthetic oligonucleotide; TGG chr11 5181926 5181945 5181929 -
catactgaatggacaaaaac

SEQ ID NO: 53814 - DNA, 20 bp, Artificial Sequence
  Synthetic oligonucleotide; AAG chr11 5181923 5181942 5181926 -
actgaatggacaaaaactgg

SEQ ID NO: 53815 - DNA, 20 bp, Artificial Sequence
  Synthetic oligonucleotide; TGG chr11 5181904 5181923 5181907 -
gaagcattccctttgaaaac

SEQ ID NO: 53816 - DNA, 20 bp, Artificial Sequence
  Synthetic oligonucleotide; AAG chr11 5181898 5181917 5181901 -
ttccctttgaaaactggcac

SEQ ID NO: 53817 - DNA, 20 bp, Artificial Sequence
  Synthetic oligonucleotide; CAG chr11 5181894 5181913 5181897 -
ctttgaaaactggcacaaga

SEQ ID NO: 53818 - DNA, 20 bp, Artificial Sequence
  Synthetic oligonucleotide; AGG chr11 5181893 5181912 5181896 -
tttgaaaactggcacaagac

SEQ ID NO: 53819 - DNA, 20 bp, Artificial Sequence
  Synthetic oligonucleotide; GGG chr11 5181892 5181911 5181895 -
ttgaaaactggcacaagaca

SEQ ID NO: 53820 - DNA, 20 bp, Artificial Sequence
  Synthetic oligonucleotide; TAG chr11 5181860 5181879 5181863 -
ctcaccactcctattcaaca

SEQ ID NO: 53821 - DNA, 20 bp, Artificial Sequence
  Synthetic oligonucleotide; TGG chr11 5181854 5181873 5181857 -
actcctattcaacatagtgt

SEQ ID NO: 53822 - DNA, 20 bp, Artificial Sequence
  Synthetic oligonucleotide; AAG chr11 5181851 5181870 5181854 -
cctattcaacatagtgttgg

SEQ ID NO: 53823 - DNA, 20 bp, Artificial Sequence
  Synthetic oligonucleotide; TGG chr11 5181845 5181864 5181848 -
caacatagtgttggaagttc

SEQ ID NO: 53824 - DNA, 20 bp, Artificial Sequence
  Synthetic oligonucleotide; CAG chr11 5181841 5181860 5181844 -
atagtgttggaagttctggc

SEQ ID NO: 53825 - DNA, 20 bp, Artificial Sequence
  Synthetic oligonucleotide; AGG chr11 5181840 5181859 5181843 -
tagtgttggaagttctggcc

SEQ ID NO: 53826 - DNA, 20 bp, Artificial Sequence
  Synthetic oligonucleotide; GGG chr11 5181839 5181858 5181842 -
agtgttggaagttctggcca

SEQ ID NO: 53827 - DNA, 20 bp, Artificial Sequence
  Synthetic oligonucleotide; CAG chr11 5181832 5181851 5181835 -
gaagttctggccagggcaat

SEQ ID NO: 53828 - DNA, 20 bp, Artificial Sequence
  Synthetic oligonucleotide; AGG chr11 5181831 5181850 5181834 -
aagttctggccagggcaatc

SEQ ID NO: 53829 - DNA, 20 bp, Artificial Sequence
  Synthetic oligonucleotide; AAG chr11 5181827 5181846 5181830 -
tctggccagggcaatcaggc

SEQ ID NO: 53830 - DNA, 20 bp, Artificial Sequence
  Synthetic oligonucleotide; GAG chr11 5181825 5181844 5181828 -
tggccagggcaatcaggcaa

SEQ ID NO: 53831 - DNA, 20 bp, Artificial Sequence
  Synthetic oligonucleotide; AAG chr11 5181821 5181840 5181824 -
cagggcaatcaggcaagaga

SEQ ID NO: 53832 - DNA, 20 bp, Artificial Sequence
  Synthetic oligonucleotide; AAG chr11 5181813 5181832 5181816 -
tcaggcaagagaaagaaata

SEQ ID NO: 53833 - DNA, 20 bp, Artificial Sequence
  Synthetic oligonucleotide; AGG chr11 5181812 5181831 5181815 -
caggcaagagaaagaaataa

SEQ ID NO: 53834 - DNA, 20 bp, Artificial Sequence
  Synthetic oligonucleotide; GGG chr11 5181811 5181830 5181814 -
aggcaagagaaagaaataaa

SEQ ID NO: 53835 - DNA, 20 bp, Artificial Sequence
  Synthetic oligonucleotide; TAG chr11 5181800 5181819 5181803 -
agaaataaagggcattcaat

SEQ ID NO: 53836 - DNA, 20 bp, Artificial Sequence
  Synthetic oligonucleotide; AGG chr11 5181799 5181818 5181802 -
gaaataaagggcattcaatt

SEQ ID NO: 53837 - DNA, 20 bp, Artificial Sequence
  Synthetic oligonucleotide; AAG chr11 5181794 5181813 5181797 -
aaagggcattcaattaggaa

SEQ ID NO: 53838 - DNA, 20 bp, Artificial Sequence
  Synthetic oligonucleotide; GAG chr11 5181792 5181811 5181795 -
agggcattcaattaggaaaa

SEQ ID NO: 53839 - DNA, 20 bp, Artificial Sequence
  Synthetic oligonucleotide; AGG chr11 5181791 5181810 5181794 -
gggcattcaattaggaaaag

SEQ ID NO: 53840 - DNA, 20 bp, Artificial Sequence
  Synthetic oligonucleotide; AAG chr11 5181788 5181807 5181791 -
cattcaattaggaaaagagg

SEQ ID NO: 53841 - DNA, 20 bp, Artificial Sequence
  Synthetic oligonucleotide; CAG chr11 5181767 5181786 5181770 -
agtgaaattgtccctgtttg

SEQ ID NO: 53842 - DNA, 20 bp, Artificial Sequence
  Synthetic oligonucleotide; TAG chr11 5181746 5181765 5181749 -
agatgacgtgattgtatatc

SEQ ID NO: 53843 - DNA, 20 bp, Artificial Sequence
  Synthetic oligonucleotide; CAG chr11 5181728 5181747 5181731 -
tctagaaaaccccatcgtct

SEQ ID NO: 53844 - DNA, 20 bp, Artificial Sequence
  Synthetic oligonucleotide; AAG chr11 5181711 5181730 5181714 -
tctcagcccaaaatctcctt

SEQ ID NO: 53845 - DNA, 20 bp, Artificial Sequence
  Synthetic oligonucleotide; AAG chr11 5181703 5181722 5181706 -
caaaatctccttaagctgat

SEQ ID NO: 53846 - DNA, 20 bp, Artificial Sequence
  Synthetic oligonucleotide; CAG chr11 5181694 5181713 5181697 -
cttaagctgataagcaactt

SEQ ID NO: 53847 - DNA, 20 bp, Artificial Sequence
  Synthetic oligonucleotide; AAG chr11 5181689 5181708 5181692 -
gctgataagcaacttcagaa

SEQ ID NO: 53848 - DNA, 20 bp, Artificial Sequence
  Synthetic oligonucleotide; CAG chr11 5181683 5181702 5181686 -
aagcaacttcagaaaagtct

SEQ ID NO: 53849 - DNA, 20 bp, Artificial Sequence
  Synthetic oligonucleotide; AAG chr11 5181653 5181672 5181656 -
aatcaatgtgcaaaaatcac

SEQ ID NO: 53850 - DNA, 20 bp, Artificial Sequence
  Synthetic oligonucleotide; CAG chr11 5181631 5181650 5181634 -
gcattcctatacaccaataa

SEQ ID NO: 53851 - DNA, 20 bp, Artificial Sequence
  Synthetic oligonucleotide; CAG chr11 5181623 5181642 5181626 -
atacaccaataacagacaaa

SEQ ID NO: 53852 - DNA, 20 bp, Artificial Sequence
  Synthetic oligonucleotide; GAG chr11 5181621 5181640 5181624 -
acaccaataacagacaaaca

SEQ ID NO: 53853 - DNA, 20 bp, Artificial Sequence
  Synthetic oligonucleotide; GAG chr11 5181619 5181638 5181622 -
accaataacagacaaacaga

SEQ ID NO: 53854 - DNA, 20 bp, Artificial Sequence
  Synthetic oligonucleotide; GAG chr11 5181607 5181626 5181610 -
caaacagagagccaaatcat

SEQ ID NO: 53855 - DNA, 20 bp, Artificial Sequence
  Synthetic oligonucleotide; AAG chr11 5181579 5181598 5181582 -
tcccattcacaattgcctca

SEQ ID NO: 53856 - DNA, 20 bp, Artificial Sequence
  Synthetic oligonucleotide; GAG chr11 5181577 5181596 5181580 -
ccattcacaattgcctcaaa

SEQ ID NO: 53857 - DNA, 20 bp, Artificial Sequence
  Synthetic oligonucleotide; TAG chr11 5181563 5181582 5181566 -
ctcaaagagaataaaatacc

SEQ ID NO: 53858 - DNA, 20 bp, Artificial Sequence
  Synthetic oligonucleotide; AGG chr11 5181562 5181581 5181565 -
tcaaagagaataaaatacct

SEQ ID NO: 53859 - DNA, 20 bp, Artificial Sequence
  Synthetic oligonucleotide; AAG chr11 5181547 5181566 5181550 -
tacctaggaatccaacttac

SEQ ID NO: 53860 - DNA, 20 bp, Artificial Sequence
  Synthetic oligonucleotide; AGG chr11 5181546 5181565 5181549 -
acctaggaatccaacttaca

SEQ ID NO: 53861 - DNA, 20 bp, Artificial Sequence
  Synthetic oligonucleotide; GGG chr11 5181545 5181564 5181548 -
cctaggaatccaacttacaa

SEQ ID NO: 53862 - DNA, 20 bp, Artificial Sequence
  Synthetic oligonucleotide; AAG chr11 5181537 5181556 5181540 -
tccaacttacaagggatgtg

SEQ ID NO: 53863 - DNA, 20 bp, Artificial Sequence
  Synthetic oligonucleotide; AGG chr11 5181536 5181555 5181539 -
ccaacttacaagggatgtga

SEQ ID NO: 53864 - DNA, 20 bp, Artificial Sequence
  Synthetic oligonucleotide; AAG chr11 5181525 5181544 5181528 -
gggatgtgaaggacctcttc

SEQ ID NO: 53865 - DNA, 20 bp, Artificial Sequence
  Synthetic oligonucleotide; AGG chr11 5181524 5181543 5181527 -
ggatgtgaaggacctcttca

SEQ ID NO: 53866 - DNA, 20 bp, Artificial Sequence
  Synthetic oligonucleotide; GAG chr11 5181522 5181541 5181525 -
atgtgaaggacctcttcaag

SEQ ID NO: 53867 - DNA, 20 bp, Artificial Sequence
  Synthetic oligonucleotide; AAG chr11 5181491 5181510 5181494 -
aacactgctcaacgaaataa

SEQ ID NO: 53868 - DNA, 20 bp, Artificial Sequence
  Synthetic oligonucleotide; GAG chr11 5181489 5181508 5181492 -
cactgctcaacgaaataaaa

SEQ ID NO: 53869 - DNA, 20 bp, Artificial Sequence
  Synthetic oligonucleotide; AGG chr11 5181488 5181507 5181491 -
actgctcaacgaaataaaag

SEQ ID NO: 53870 - DNA, 20 bp, Artificial Sequence
  Synthetic oligonucleotide; TGG chr11 5181474 5181493 5181477 -
taaaagaggatacaaacaaa

SEQ ID NO: 53871 - DNA, 20 bp, Artificial Sequence
  Synthetic oligonucleotide; AAG chr11 5181471 5181490 5181474 -
aagaggatacaaacaaatgg

SEQ ID NO: 53872 - DNA, 20 bp, Artificial Sequence
  Synthetic oligonucleotide; TGG chr11 5181453 5181472 5181456 -
ggaagaacattccatgctca

SEQ ID NO: 53873 - DNA, 20 bp, Artificial Sequence
  Synthetic oligonucleotide; TAG chr11 5181449 5181468 5181452 -
gaacattccatgctcatgga

SEQ ID NO: 53874 - DNA, 20 bp, Artificial Sequence
  Synthetic oligonucleotide; AGG chr11 5181448 5181467 5181451 -
aacattccatgctcatggat

SEQ ID NO: 53875 - DNA, 20 bp, Artificial Sequence
  Synthetic oligonucleotide; AAG chr11 5181445 5181464 5181448 -
attccatgctcatggatagg

SEQ ID NO: 53876 - DNA, 20 bp, Artificial Sequence
  Synthetic oligonucleotide; TGG chr11 5181425 5181444 5181428 -
aagaatcaatatcgtgaaaa

SEQ ID NO: 53877 - DNA, 20 bp, Artificial Sequence
  Synthetic oligonucleotide; AAG chr11 5181411 5181430 5181414 -
tgaaaatggccttactgccc

SEQ ID NO: 53878 - DNA, 20 bp, Artificial Sequence
  Synthetic oligonucleotide; AGG chr11 5181410 5181429 5181413 -
gaaaatggccttactgccca

SEQ ID NO: 53879 - DNA, 20 bp, Artificial Sequence
  Synthetic oligonucleotide; TAG chr11 5181400 5181419 5181403 -
ttactgcccaaggtaattta

SEQ ID NO: 53880 - DNA, 20 bp, Artificial Sequence
  Synthetic oligonucleotide; AAG chr11 5181378 5181397 5181381 -
gattcaatgccatccccatc

SEQ ID NO: 53881 - DNA, 20 bp, Artificial Sequence
  Synthetic oligonucleotide; CAG chr11 5181356 5181375 5181359 -
gctaccaatgactttcttca

SEQ ID NO: 53882 - DNA, 20 bp, Artificial Sequence
  Synthetic oligonucleotide; TGG chr11 5181350 5181369 5181353 -
aatgactttcttcacagaat

SEQ ID NO: 53883 - DNA, 20 bp, Artificial Sequence
  Synthetic oligonucleotide; AAG chr11 5181333 5181352 5181336 -
aattggaaaaaactacttta

SEQ ID NO: 53884 - DNA, 20 bp, Artificial Sequence
  Synthetic oligonucleotide; TGG chr11 5181324 5181343 5181327 -
aaactactttaaagttcata

SEQ ID NO: 53885 - DNA, 20 bp, Artificial Sequence
  Synthetic oligonucleotide; AAG chr11 5181313 5181332 5181316 -
aagttcatatggaaccaaaa

SEQ ID NO: 53886 - DNA, 20 bp, Artificial Sequence
  Synthetic oligonucleotide; GAG chr11 5181311 5181330 5181314 -
gttcatatggaaccaaaaaa

SEQ ID NO: 53887 - DNA, 20 bp, Artificial Sequence
  Synthetic oligonucleotide; AAG chr11 5181297 5181316 5181300 -
aaaaaagagcccgcattgac

SEQ ID NO: 53888 - DNA, 20 bp, Artificial Sequence
  Synthetic oligonucleotide; AAG chr11 5181286 5181305 5181289 -
cgcattgacaagtcaatcct

SEQ ID NO: 53889 - DNA, 20 bp, Artificial Sequence
  Synthetic oligonucleotide; AAG chr11 5181279 5181298 5181282 -
acaagtcaatcctaagccaa

SEQ ID NO: 53890 - DNA, 20 bp, Artificial Sequence
  Synthetic oligonucleotide; AAG chr11 5181272 5181291 5181275 -
aatcctaagccaaaagaaca

SEQ ID NO: 53891 - DNA, 20 bp, Artificial Sequence
  Synthetic oligonucleotide; TAG chr11 5181268 5181287 5181271 -
ctaagccaaaagaacaaagc

SEQ ID NO: 53892 - DNA, 20 bp, Artificial Sequence
  Synthetic oligonucleotide; GAG chr11 5181266 5181285 5181269 -
aagccaaaagaacaaagcta

SEQ ID NO: 53893 - DNA, 20 bp, Artificial Sequence
  Synthetic oligonucleotide; AGG chr11 5181265 5181284 5181268 -
agccaaaagaacaaagctag

SEQ ID NO: 53894 - DNA, 20 bp, Artificial Sequence
  Synthetic oligonucleotide; AAG chr11 5181231 5181250 5181234 -
ctgacttcaaactatactac

SEQ ID NO: 53895 - DNA, 20 bp, Artificial Sequence
  Synthetic oligonucleotide; AGG chr11 5181230 5181249 5181233 -
tgacttcaaactatactaca

SEQ ID NO: 53896 - DNA, 20 bp, Artificial Sequence
  Synthetic oligonucleotide; CAG chr11 5181225 5181244 5181228 -
tcaaactatactacaaggta

SEQ ID NO: 53897 - DNA, 20 bp, Artificial Sequence
  Synthetic oligonucleotide; TGG chr11 5181208 5181227 5181211 -
gtacagtaaccaaaacaaca

SEQ ID NO: 53898 - DNA, 20 bp, Artificial Sequence
  Synthetic oligonucleotide; TGG chr11 5181202 5181221 5181205 -
taaccaaaacaacatggtac

SEQ ID NO: 53899 - DNA, 20 bp, Artificial Sequence
  Synthetic oligonucleotide; CAG chr11 5181191 5181210 5181194 -
acatggtactggtaccaaaa

SEQ ID NO: 53900 - DNA, 20 bp, Artificial Sequence
  Synthetic oligonucleotide; GAG chr11 5181189 5181208 5181192 -
atggtactggtaccaaaaca

SEQ ID NO: 53901 - DNA, 20 bp, Artificial Sequence
  Synthetic oligonucleotide; TAG chr11 5181183 5181202 5181186 -
ctggtaccaaaacagagatg

SEQ ID NO: 53902 - DNA, 20 bp, Artificial Sequence
  Synthetic oligonucleotide; TGG chr11 5181175 5181194 5181178 -
aaaacagagatgtagaccaa

SEQ ID NO: 53903 - DNA, 20 bp, Artificial Sequence
  Synthetic oligonucleotide; GAG chr11 5181173 5181192 5181176 -
aacagagatgtagaccaatg

SEQ ID NO: 53904 - DNA, 20 bp, Artificial Sequence
  Synthetic oligonucleotide; CAG chr11 5181170 5181189 5181173 -
agagatgtagaccaatggag

SEQ ID NO: 53905 - DNA, 20 bp, Artificial Sequence
  Synthetic oligonucleotide; CAG chr11 5181165 5181184 5181168 -
tgtagaccaatggagcagaa

SEQ ID NO: 53906 - DNA, 20 bp, Artificial Sequence
  Synthetic oligonucleotide; GAG chr11 5181163 5181182 5181166 -
tagaccaatggagcagaaca

SEQ ID NO: 53907 - DNA, 20 bp, Artificial Sequence
  Synthetic oligonucleotide; CAG chr11 5181156 5181175 5181159 -
atggagcagaacagagctct

SEQ ID NO: 53908 - DNA, 20 bp, Artificial Sequence
  Synthetic oligonucleotide; AAG chr11 5181100 5181119 5181103 -
ttgacaaacctgacaaaaac

SEQ ID NO: 53909 - DNA, 20 bp, Artificial Sequence
  Synthetic oligonucleotide; TGG chr11 5181094 5181113 5181097 -
aacctgacaaaaacaagcaa

SEQ ID NO: 53910 - DNA, 20 bp, Artificial Sequence
  Synthetic oligonucleotide; GGG chr11 5181093 5181112 5181096 -
acctgacaaaaacaagcaat

SEQ ID NO: 53911 - DNA, 20 bp, Artificial Sequence
  Synthetic oligonucleotide; GGG chr11 5181092 5181111 5181095 -
cctgacaaaaacaagcaatg

SEQ ID NO: 53912 - DNA, 20 bp, Artificial Sequence
  Synthetic oligonucleotide; AAG chr11 5181088 5181107 5181091 -
acaaaaacaagcaatgggga

SEQ ID NO: 53913 - DNA, 20 bp, Artificial Sequence
  Synthetic oligonucleotide; AGG chr11 5181087 5181106 5181090 -
caaaaacaagcaatggggaa

SEQ ID NO: 53914 - DNA, 20 bp, Artificial Sequence
  Synthetic oligonucleotide; TGG chr11 5181061 5181080 5181064 -
ccctatttaataaatgatgc

SEQ ID NO: 53915 - DNA, 20 bp, Artificial Sequence
  Synthetic oligonucleotide; GGG chr11 5181060 5181079 5181063 -
cctatttaataaatgatgct

SEQ ID NO: 53916 - DNA, 20 bp, Artificial Sequence
  Synthetic oligonucleotide; TGG chr11 5181052 5181071 5181055 -
ataaatgatgctgggaaaac

SEQ ID NO: 53917 - DNA, 20 bp, Artificial Sequence
  Synthetic oligonucleotide; TAG chr11 5181048 5181067 5181051 -
atgatgctgggaaaactggc

SEQ ID NO: 53918 - DNA, 20 bp, Artificial Sequence
  Synthetic oligonucleotide; TAG chr11 5181038 5181057 5181041 -
gaaaactggctagccatatg

SEQ ID NO: 53919 - DNA, 20 bp, Artificial Sequence
  Synthetic oligonucleotide; AAG chr11 5181034 5181053 5181037 -
actggctagccatatgtaga

SEQ ID NO: 53920 - DNA, 20 bp, Artificial Sequence
  Synthetic oligonucleotide; TGG chr11 5181024 5181043 5181027 -
catatgtagaaagctgaaac

SEQ ID NO: 53921 - DNA, 20 bp, Artificial Sequence
  Synthetic oligonucleotide; AAG chr11 5180987 5181006 5180990 -
ccttatacaaaaattatttc

SEQ ID NO: 53922 - DNA, 20 bp, Artificial Sequence
  Synthetic oligonucleotide; TGG chr11 5180983 5181002 5180986 -
atacaaaaattatttcaaga

SEQ ID NO: 53923 - DNA, 20 bp, Artificial Sequence
  Synthetic oligonucleotide; AAG chr11 5180976 5180995 5180979 -
aattatttcaagatggatta

SEQ ID NO: 53924 - DNA, 20 bp, Artificial Sequence
  Synthetic oligonucleotide; TAG chr11 5180963 5180982 5180966 -
tggattaaagacttacatgt

SEQ ID NO: 53925 - DNA, 20 bp, Artificial Sequence
  Synthetic oligonucleotide; TAG chr11 5180940 5180959 5180943 -
acctaaaaccataaaaacct

SEQ ID NO: 53926 - DNA, 20 bp, Artificial Sequence
  Synthetic oligonucleotide; AAG chr11 5180937 5180956 5180940 -
taaaaccataaaaaccttag

SEQ ID NO: 53927 - DNA, 20 bp, Artificial Sequence
  Synthetic oligonucleotide; AAG chr11 5180927 5180946 5180930 -
aaaaccttagaagaaaacct

SEQ ID NO: 53928 - DNA, 20 bp, Artificial Sequence
  Synthetic oligonucleotide; CAG chr11 5180914 5180933 5180917 -
aaaacctaagcaataccatt

SEQ ID NO: 53929 - DNA, 20 bp, Artificial Sequence
  Synthetic oligonucleotide; AGG chr11 5180913 5180932 5180916 -
aaacctaagcaataccattc

SEQ ID NO: 53930 - DNA, 20 bp, Artificial Sequence
  Synthetic oligonucleotide; TAG chr11 5180907 5180926 5180910 -
aagcaataccattcaggaca

SEQ ID NO: 53931 - DNA, 20 bp, Artificial Sequence
  Synthetic oligonucleotide; AGG chr11 5180906 5180925 5180909 -
agcaataccattcaggacat

SEQ ID NO: 53932 - DNA, 20 bp, Artificial Sequence
  Synthetic oligonucleotide; TGG chr11 5180901 5180920 5180904 -
taccattcaggacataggca

SEQ ID NO: 53933 - DNA, 20 bp, Artificial Sequence
  Synthetic oligonucleotide; GGG chr11 5180900 5180919 5180903 -
accattcaggacataggcat

SEQ ID NO: 53934 - DNA, 20 bp, Artificial Sequence
  Synthetic oligonucleotide; AAG chr11 5180896 5180915 5180899 -
ttcaggacataggcatgggc

SEQ ID NO: 53935 - DNA, 20 bp, Artificial Sequence
  Synthetic oligonucleotide; AGG chr11 5180895 5180914 5180898 -
tcaggacataggcatgggca

SEQ ID NO: 53936 - DNA, 20 bp, Artificial Sequence
  Synthetic oligonucleotide; AAG chr11 5180871 5180890 5180874 -
cttcatgtctaaaacaccaa

SEQ ID NO: 53937 - DNA, 20 bp, Artificial Sequence
  Synthetic oligonucleotide; TGG chr11 5180865 5180884 5180868 -
gtctaaaacaccaaaagcaa

SEQ ID NO: 53938 - DNA, 20 bp, Artificial Sequence
  Synthetic oligonucleotide; AAG chr11 5180856 5180875 5180859 -
accaaaagcaatggcaacaa

SEQ ID NO: 53939 - DNA, 20 bp, Artificial Sequence
  Synthetic oligonucleotide; TGG chr11 5180847 5180866 5180850 -
aatggcaacaaaagacaaaa

SEQ ID NO: 53940 - DNA, 20 bp, Artificial Sequence
  Synthetic oligonucleotide; TGG chr11 5180839 5180858 5180842 -
caaaagacaaaatggacaaa

SEQ ID NO: 53941 - DNA, 20 bp, Artificial Sequence
  Synthetic oligonucleotide; GGG chr11 5180838 5180857 5180841 -
aaaagacaaaatggacaaat

SEQ ID NO: 53942 - DNA, 20 bp, Artificial Sequence
  Synthetic oligonucleotide; AAG chr11 5180821 5180840 5180824 -
aatgggatctaattaaacta

SEQ ID NO: 53943 - DNA, 20 bp, Artificial Sequence
  Synthetic oligonucleotide; GAG chr11 5180819 5180838 5180822 -
tgggatctaattaaactaaa

SEQ ID NO: 53944 - DNA, 20 bp, Artificial Sequence
  Synthetic oligonucleotide; CAG chr11 5180808 5180827 5180811 -
taaactaaagagcttctgca

SEQ ID NO: 53945 - DNA, 20 bp, Artificial Sequence
  Synthetic oligonucleotide; AAG chr11 5180802 5180821 5180805 -
aaagagcttctgcacagcaa

SEQ ID NO: 53946 - DNA, 20 bp, Artificial Sequence
  Synthetic oligonucleotide; CAG chr11 5180789 5180808 5180792 -
acagcaaaagaaactaccat

SEQ ID NO: 53947 - DNA, 20 bp, Artificial Sequence
  Synthetic oligonucleotide; GAG chr11 5180787 5180806 5180790 -
agcaaaagaaactaccatca

SEQ ID NO: 53948 - DNA, 20 bp, Artificial Sequence
  Synthetic oligonucleotide; CAG chr11 5180780 5180799 5180783 -
gaaactaccatcagagtgaa

SEQ ID NO: 53949 - DNA, 20 bp, Artificial Sequence
  Synthetic oligonucleotide; AGG chr11 5180779 5180798 5180782 -
aaactaccatcagagtgaac

SEQ ID NO: 53950 - DNA, 20 bp, Artificial Sequence
  Synthetic oligonucleotide; TGG chr11 5180764 5180783 5180767 -
tgaacaggcaacctacacaa

SEQ ID NO: 53951 - DNA, 20 bp, Artificial Sequence
  Synthetic oligonucleotide; GGG chr11 5180763 5180782 5180766 -
gaacaggcaacctacacaat

SEQ ID NO: 53952 - DNA, 20 bp, Artificial Sequence
  Synthetic oligonucleotide; GAG chr11 5180761 5180780 5180764 -
acaggcaacctacacaatgg

SEQ ID NO: 53953 - DNA, 20 bp, Artificial Sequence
  Synthetic oligonucleotide; AAG chr11 5180730 5180749 5180733 -
tgcaatctactcatctgaca

SEQ ID NO: 53954 - DNA, 20 bp, Artificial Sequence
  Synthetic oligonucleotide; AGG chr11 5180729 5180748 5180732 -
gcaatctactcatctgacaa

SEQ ID NO: 53955 - DNA, 20 bp, Artificial Sequence
  Synthetic oligonucleotide; GGG chr11 5180728 5180747 5180731 -
caatctactcatctgacaaa

SEQ ID NO: 53956 - DNA, 20 bp, Artificial Sequence
  Synthetic oligonucleotide; CAG chr11 5180717 5180736 5180720 -
tctgacaaagggctaatatc

SEQ ID NO: 53957 - DNA, 20 bp, Artificial Sequence
  Synthetic oligonucleotide; AAG chr11 5180686 5180705 5180689 -
atgaactcaaacaaatttac

SEQ ID NO: 53958 - DNA, 20 bp, Artificial Sequence
  Synthetic oligonucleotide; AAG chr11 5180659 5180678 5180662 -
aaacaaacaactgcatcaac

SEQ ID NO: 53959 - DNA, 20 bp, Artificial Sequence
  Synthetic oligonucleotide; AGG chr11 5180658 5180677 5180661 -
aacaaacaactgcatcaaca

SEQ ID NO: 53960 - DNA, 20 bp, Artificial Sequence
  Synthetic oligonucleotide; GGG chr11 5180657 5180676 5180660 -
acaaacaactgcatcaacaa

SEQ ID NO: 53961 - DNA, 20 bp, Artificial Sequence
  Synthetic oligonucleotide; GGG chr11 5180656 5180675 5180659 -
caaacaactgcatcaacaag

SEQ ID NO: 53962 - DNA, 20 bp, Artificial Sequence
  Synthetic oligonucleotide; GGG chr11 5180655 5180674 5180658 -
aaacaactgcatcaacaagg

SEQ ID NO: 53963 - DNA, 20 bp, Artificial Sequence
  Synthetic oligonucleotide; AAG chr11 5180650 5180669 5180653 -
actgcatcaacaagggggtg

SEQ ID NO: 53964 - DNA, 20 bp, Artificial Sequence
  Synthetic oligonucleotide; AGG chr11 5180649 5180668 5180652 -
ctgcatcaacaagggggtga

SEQ ID NO: 53965 - DNA, 20 bp, Artificial Sequence
  Synthetic oligonucleotide; CAG chr11 5180639 5180658 5180642 -
aagggggtgaaggatatgaa

SEQ ID NO: 53966 - DNA, 20 bp, Artificial Sequence
  Synthetic oligonucleotide; AAG chr11 5180625 5180644 5180628 -
tatgaacagacacttctcaa

SEQ ID NO: 53967 - DNA, 20 bp, Artificial Sequence
  Synthetic oligonucleotide; AAG chr11 5180622 5180641 5180625 -
gaacagacacttctcaaaag

SEQ ID NO: 53968 - DNA, 20 bp, Artificial Sequence
  Synthetic oligonucleotide; CAG chr11 5180610 5180629 5180613 -
ctcaaaagaagacatttatg

SEQ ID NO: 53969 - DNA, 20 bp, Artificial Sequence
  Synthetic oligonucleotide; TGG chr11 5180574 5180593 5180577 -
gaaaaaatgctcatcatcac

SEQ ID NO: 53970 - DNA, 20 bp, Artificial Sequence
  Synthetic oligonucleotide; CAG chr11 5180567 5180586 5180570 -
tgctcatcatcactggccat

SEQ ID NO: 53971 - DNA, 20 bp, Artificial Sequence
  Synthetic oligonucleotide; GAG chr11 5180565 5180584 5180568 -
ctcatcatcactggccatca

SEQ ID NO: 53972 - DNA, 20 bp, Artificial Sequence
  Synthetic oligonucleotide; GAG chr11 5180540 5180559 5180543 -
atgcaaatcaaaaccacaat

SEQ ID NO: 53973 - DNA, 20 bp, Artificial Sequence
  Synthetic oligonucleotide; CAG chr11 5180523 5180542 5180526 -
aatgagatatcatctcacac

SEQ ID NO: 53974 - DNA, 20 bp, Artificial Sequence
  Synthetic oligonucleotide; TAG chr11 5180519 5180538 5180522 -
agatatcatctcacaccagt

SEQ ID NO: 53975 - DNA, 20 bp, Artificial Sequence
  Synthetic oligonucleotide; TGG chr11 5180514 5180533 5180517 -
tcatctcacaccagttagaa

SEQ ID NO: 53976 - DNA, 20 bp, Artificial Sequence
  Synthetic oligonucleotide; AAG chr11 5180500 5180519 5180503 -
ttagaatggtgatcattaaa

SEQ ID NO: 53977 - DNA, 20 bp, Artificial Sequence
  Synthetic oligonucleotide; CAG chr11 5180496 5180515 5180499 -
aatggtgatcattaaaaagt

SEQ ID NO: 53978 - DNA, 20 bp, Artificial Sequence
  Synthetic oligonucleotide; AGG chr11 5180495 5180514 5180498 -
atggtgatcattaaaaagtc

SEQ ID NO: 53979 - DNA, 20 bp, Artificial Sequence
  Synthetic oligonucleotide; CAG chr11 5180486 5180505 5180489 -
attaaaaagtcaggaaacca

SEQ ID NO: 53980 - DNA, 20 bp, Artificial Sequence
  Synthetic oligonucleotide; AGG chr11 5180485 5180504 5180488 -
ttaaaaagtcaggaaaccac

SEQ ID NO: 53981 - DNA, 20 bp, Artificial Sequence
  Synthetic oligonucleotide; TGG chr11 5180479 5180498 5180482 -
agtcaggaaaccacaggtgc

SEQ ID NO: 53982 - DNA, 20 bp, Artificial Sequence
  Synthetic oligonucleotide; GAG chr11 5180477 5180496 5180480 -
tcaggaaaccacaggtgctg

SEQ ID NO: 53983 - DNA, 20 bp, Artificial Sequence
  Synthetic oligonucleotide; GAG chr11 5180475 5180494 5180478 -
aggaaaccacaggtgctgga

SEQ ID NO: 53984 - DNA, 20 bp, Artificial Sequence
  Synthetic oligonucleotide; AGG chr11 5180474 5180493 5180477 -
ggaaaccacaggtgctggag

SEQ ID NO: 53985 - DNA, 20 bp, Artificial Sequence
  Synthetic oligonucleotide; TGG chr11 5180468 5180487 5180471 -
cacaggtgctggagaggatg

SEQ ID NO: 53986 - DNA, 20 bp, Artificial Sequence
  Synthetic oligonucleotide; GAG chr11 5180466 5180485 5180469 -
caggtgctggagaggatgtg

SEQ ID NO: 53987 - DNA, 20 bp, Artificial Sequence
  Synthetic oligonucleotide; TAG chr11 5180460 5180479 5180463 -
ctggagaggatgtggagaaa

SEQ ID NO: 53988 - DNA, 20 bp, Artificial Sequence
  Synthetic oligonucleotide; AGG chr11 5180459 5180478 5180462 -
tggagaggatgtggagaaat

SEQ ID NO: 53989 - DNA, 20 bp, Artificial Sequence
  Synthetic oligonucleotide; TGG chr11 5180440 5180459 5180443 -
taggaacacttttacactgt

SEQ ID NO: 53990 - DNA, 20 bp, Artificial Sequence
  Synthetic oligonucleotide; TGG chr11 5180437 5180456 5180440 -
gaacacttttacactgttgg

SEQ ID NO: 53991 - DNA, 20 bp, Artificial Sequence
  Synthetic oligonucleotide; GGG chr11 5180436 5180455 5180439 -
aacacttttacactgttggt

SEQ ID NO: 53992 - DNA, 20 bp, Artificial Sequence
  Synthetic oligonucleotide; TAG chr11 5180424 5180443 5180427 -
ctgttggtgggactataaac

SEQ ID NO: 53993 - DNA, 20 bp, Artificial Sequence
  Synthetic oligonucleotide; TGG chr11 5180410 5180429 5180413 -
ataaactagttcaaccattg

SEQ ID NO: 53994 - DNA, 20 bp, Artificial Sequence
  Synthetic oligonucleotide; AAG chr11 5180407 5180426 5180410 -
aactagttcaaccattgtgg

SEQ ID NO: 53995 - DNA, 20 bp, Artificial Sequence
  Synthetic oligonucleotide; CAG chr11 5180403 5180422 5180406 -
agttcaaccattgtggaagt

SEQ ID NO: 53996 - DNA, 20 bp, Artificial Sequence
  Synthetic oligonucleotide; TGG chr11 5180398 5180417 5180401 -
aaccattgtggaagtcagtg

SEQ ID NO: 53997 - DNA, 20 bp, Artificial Sequence
  Synthetic oligonucleotide; CAG chr11 5180387 5180406 5180390 -
aagtcagtgtggcaattcct

SEQ ID NO: 53998 - DNA, 20 bp, Artificial Sequence
  Synthetic oligonucleotide; AGG chr11 5180386 5180405 5180389 -
agtcagtgtggcaattcctc

SEQ ID NO: 53999 - DNA, 20 bp, Artificial Sequence
  Synthetic oligonucleotide; GGG chr11 5180385 5180404 5180388 -
gtcagtgtggcaattcctca

SEQ ID NO: 54000 - DNA, 20 bp, Artificial Sequence
  Synthetic oligonucleotide; TAG chr11 5180379 5180398 5180382 -
gtggcaattcctcagggatc

SEQ ID NO: 54001 - DNA, 20 bp, Artificial Sequence
  Synthetic oligonucleotide; TAG chr11 5180373 5180392 5180376 -
attcctcagggatctagaac

SEQ ID NO: 54002 - DNA, 20 bp, Artificial Sequence
  Synthetic oligonucleotide; CAG chr11 5180355 5180374 5180358 -
actagaaataccatttgacc

SEQ ID NO: 54003 - DNA, 20 bp, Artificial Sequence
  Synthetic oligonucleotide; TGG chr11 5180340 5180359 5180343 -
tgacccagccatcctattac

SEQ ID NO: 54004 - DNA, 20 bp, Artificial Sequence
  Synthetic oligonucleotide; GGG chr11 5180339 5180358 5180342 -
gacccagccatcctattact

SEQ ID NO: 54005 - DNA, 20 bp, Artificial Sequence
  Synthetic oligonucleotide; AAG chr11 5180326 5180345 5180329 -
tattactgggtatataccca

SEQ ID NO: 54006 - DNA, 20 bp, Artificial Sequence
  Synthetic oligonucleotide; AGG chr11 5180325 5180344 5180328 -
attactgggtatatacccaa

SEQ ID NO: 54007 - DNA, 20 bp, Artificial Sequence
  Synthetic oligonucleotide; AAG chr11 5180301 5180320 5180304 -
atgtaaatcatgctgctata

SEQ ID NO: 54008 - DNA, 20 bp, Artificial Sequence
  Synthetic oligonucleotide; TGG chr11 5180274 5180293 5180277 -
atgcacacgtatgtttattg

SEQ ID NO: 54009 - DNA, 20 bp, Artificial Sequence
  Synthetic oligonucleotide; TAG chr11 5180259 5180278 5180262 -
tattgtggcactattcacaa

SEQ ID NO: 54010 - DNA, 20 bp, Artificial Sequence
  Synthetic oligonucleotide; AAG chr11 5180254 5180273 5180257 -
tggcactattcacaatagca

SEQ ID NO: 54011 - DNA, 20 bp, Artificial Sequence
  Synthetic oligonucleotide; TGG chr11 5180248 5180267 5180251 -
tattcacaatagcaaagact

SEQ ID NO: 54012 - DNA, 20 bp, Artificial Sequence
  Synthetic oligonucleotide; TAG chr11 5180220 5180239 5180223 -
acccaaatgtccaacaatga

SEQ ID NO: 54013 - DNA, 20 bp, Artificial Sequence
  Synthetic oligonucleotide; TGG chr11 5180215 5180234 5180218 -
aatgtccaacaatgatagac

SEQ ID NO: 54014 - DNA, 20 bp, Artificial Sequence
  Synthetic oligonucleotide; AAG chr11 5180209 5180228 5180212 -
caacaatgatagactggatt

SEQ ID NO: 54015 - DNA, 20 bp, Artificial Sequence
  Synthetic oligonucleotide; TGG chr11 5180200 5180219 5180203 -
tagactggattaagaaaatg

SEQ ID NO: 54016 - DNA, 20 bp, Artificial Sequence
  Synthetic oligonucleotide; TGG chr11 5180184 5180203 5180187 -
aatgtggcacatatacatca

SEQ ID NO: 54017 - DNA, 20 bp, Artificial Sequence
  Synthetic oligonucleotide; CAG chr11 5180172 5180191 5180175 -
atacatcatggaatactatg

SEQ ID NO: 54018 - DNA, 20 bp, Artificial Sequence
  Synthetic oligonucleotide; GAG chr11 5180155 5180174 5180158 -
atgcagccataaaaaatgat

SEQ ID NO: 54019 - DNA, 20 bp, Artificial Sequence
  Synthetic oligonucleotide; TAG chr11 5180139 5180158 5180142 -
tgatgagttcatgtcctttg

SEQ ID NO: 54020 - DNA, 20 bp, Artificial Sequence
  Synthetic oligonucleotide; AGG chr11 5180138 5180157 5180141 -
gatgagttcatgtcctttgt

SEQ ID NO: 54021 - DNA, 20 bp, Artificial Sequence
  Synthetic oligonucleotide; GGG chr11 5180137 5180156 5180140 -
atgagttcatgtcctttgta

SEQ ID NO: 54022 - DNA, 20 bp, Artificial Sequence
  Synthetic oligonucleotide; TGG chr11 5180131 5180150 5180134 -
tcatgtcctttgtagggaca

SEQ ID NO: 54023 - DNA, 20 bp, Artificial Sequence
  Synthetic oligonucleotide; TGG chr11 5180121 5180140 5180124 -
tgtagggacatggatgaaac

SEQ ID NO: 54024 - DNA, 20 bp, Artificial Sequence
  Synthetic oligonucleotide; GAG chr11 5180105 5180124 5180108 -
aaactggaaaccatcattct

SEQ ID NO: 54025 - DNA, 20 bp, Artificial Sequence
  Synthetic oligonucleotide; AAG chr11 5180100 5180119 5180103 -
ggaaaccatcattctgagca

SEQ ID NO: 54026 - DNA, 20 bp, Artificial Sequence
  Synthetic oligonucleotide; AAG chr11 5180091 5180110 5180094 -
cattctgagcaaagtatcgc

SEQ ID NO: 54027 - DNA, 20 bp, Artificial Sequence
  Synthetic oligonucleotide; AGG chr11 5180090 5180109 5180093 -
attctgagcaaagtatcgca

SEQ ID NO: 54028 - DNA, 20 bp, Artificial Sequence
  Synthetic oligonucleotide; TAG chr11 5180055 5180074 5180058 -
acaccacatattctcactca

SEQ ID NO: 54029 - DNA, 20 bp, Artificial Sequence
  Synthetic oligonucleotide; AGG chr11 5180054 5180073 5180057 -
caccacatattctcactcat

SEQ ID NO: 54030 - DNA, 20 bp, Artificial Sequence
  Synthetic oligonucleotide; TGG chr11 5180051 5180070 5180054 -
cacatattctcactcatagg

SEQ ID NO: 54031 - DNA, 20 bp, Artificial Sequence
  Synthetic oligonucleotide; GGG chr11 5180050 5180069 5180053 -
acatattctcactcataggt

SEQ ID NO: 54032 - DNA, 20 bp, Artificial Sequence
  Synthetic oligonucleotide; GAG chr11 5180048 5180067 5180051 -
atattctcactcataggtgg

SEQ ID NO: 54033 - DNA, 20 bp, Artificial Sequence
  Synthetic oligonucleotide; GAG chr11 5180036 5180055 5180039 -
ataggtgggagttgaacaat

SEQ ID NO: 54034 - DNA, 20 bp, Artificial Sequence
  Synthetic oligonucleotide; TGG chr11 5180027 5180046 5180030 -
agttgaacaatgagaacatt

SEQ ID NO: 54035 - DNA, 20 bp, Artificial Sequence
  Synthetic oligonucleotide; CAG chr11 5180021 5180040 5180024 -
acaatgagaacatttggaca

SEQ ID NO: 54036 - DNA, 20 bp, Artificial Sequence
  Synthetic oligonucleotide; GAG chr11 5180017 5180036 5180020 -
tgagaacatttggacacagt

SEQ ID NO: 54037 - DNA, 20 bp, Artificial Sequence
  Synthetic oligonucleotide; AGG chr11 5180016 5180035 5180019 -
gagaacatttggacacagtg

SEQ ID NO: 54038 - DNA, 20 bp, Artificial Sequence
  Synthetic oligonucleotide; GGG chr11 5180015 5180034 5180018 -
agaacatttggacacagtga

SEQ ID NO: 54039 - DNA, 20 bp, Artificial Sequence
  Synthetic oligonucleotide; GGG chr11 5180014 5180033 5180017 -
gaacatttggacacagtgag

SEQ ID NO: 54040 - DNA, 20 bp, Artificial Sequence
  Synthetic oligonucleotide; CGG chr11 5179999 5180018 5180002 -
gtgaggggaacatcacacac

SEQ ID NO: 54041 - DNA, 20 bp, Artificial Sequence
  Synthetic oligonucleotide; GGG chr11 5179998 5180017 5180001 -
tgaggggaacatcacacacc

SEQ ID NO: 54042 - DNA, 20 bp, Artificial Sequence
  Synthetic oligonucleotide; GGG chr11 5179997 5180016 5180000 -
gaggggaacatcacacaccg

SEQ ID NO: 54043 - DNA, 20 bp, Artificial Sequence
  Synthetic oligonucleotide; TGG chr11 5179987 5180006 5179990 -
tcacacaccggggcctgttg

SEQ ID NO: 54044 - DNA, 20 bp, Artificial Sequence
  Synthetic oligonucleotide; GGG chr11 5179986 5180005 5179989 -
cacacaccggggcctgttgt

SEQ ID NO: 54045 - DNA, 20 bp, Artificial Sequence
  Synthetic oligonucleotide; GGG chr11 5179985 5180004 5179988 -
acacaccggggcctgttgtg

SEQ ID NO: 54046 - DNA, 20 bp, Artificial Sequence
  Synthetic oligonucleotide; TGG chr11 5179982 5180001 5179985 -
caccggggcctgttgtgggg

SEQ ID NO: 54047 - DNA, 20 bp, Artificial Sequence
  Synthetic oligonucleotide; GGG chr11 5179981 5180000 5179984 -
accggggcctgttgtggggt

SEQ ID NO: 54048 - DNA, 20 bp, Artificial Sequence
  Synthetic oligonucleotide; GGG chr11 5179980 5179999 5179983 -
ccggggcctgttgtggggtg

SEQ ID NO: 54049 - DNA, 20 bp, Artificial Sequence
  Synthetic oligonucleotide; GGG chr11 5179979 5179998 5179982 -
cggggcctgttgtggggtgg

SEQ ID NO: 54050 - DNA, 20 bp, Artificial Sequence
  Synthetic oligonucleotide; CGG chr11 5179975 5179994 5179978 -
gcctgttgtggggtgggggc

SEQ ID NO: 54051 - DNA, 20 bp, Artificial Sequence
  Synthetic oligonucleotide; GGG chr11 5179974 5179993 5179977 -
cctgttgtggggtgggggcc

SEQ ID NO: 54052 - DNA, 20 bp, Artificial Sequence
  Synthetic oligonucleotide; GGG chr11 5179973 5179992 5179976 -
ctgttgtggggtgggggccg

SEQ ID NO: 54053 - DNA, 20 bp, Artificial Sequence
  Synthetic oligonucleotide; GGG chr11 5179972 5179991 5179975 -
tgttgtggggtgggggccgg

SEQ ID NO: 54054 - DNA, 20 bp, Artificial Sequence
  Synthetic oligonucleotide; GGG chr11 5179971 5179990 5179974 -
gttgtggggtgggggccggg

SEQ ID NO: 54055 - DNA, 20 bp, Artificial Sequence
  Synthetic oligonucleotide; GAG chr11 5179969 5179988 5179972 -
tgtggggtgggggccggggg

SEQ ID NO: 54056 - DNA, 20 bp, Artificial Sequence
  Synthetic oligonucleotide; AGG chr11 5179968 5179987 5179971 -
gtggggtgggggccgggggg

SEQ ID NO: 54057 - DNA, 20 bp, Artificial Sequence
  Synthetic oligonucleotide; GGG chr11 5179967 5179986 5179970 -
tggggtgggggccgggggga

SEQ ID NO: 54058 - DNA, 20 bp, Artificial Sequence
  Synthetic oligonucleotide; TAG chr11 5179963 5179982 5179966 -
gtgggggccggggggaggga

SEQ ID NO: 54059 - DNA, 20 bp, Artificial Sequence
  Synthetic oligonucleotide; TAG chr11 5179957 5179976 5179960 -
gccggggggagggatagcat

SEQ ID NO: 54060 - DNA, 20 bp, Artificial Sequence
  Synthetic oligonucleotide; AGG chr11 5179956 5179975 5179959 -
ccggggggagggatagcatt

SEQ ID NO: 54061 - DNA, 20 bp, Artificial Sequence
  Synthetic oligonucleotide; GAG chr11 5179954 5179973 5179957 -
ggggggagggatagcattag

SEQ ID NO: 54062 - DNA, 20 bp, Artificial Sequence
  Synthetic oligonucleotide; GAG chr11 5179931 5179950 5179934 -
atatacctaatgtaaatgac

SEQ ID NO: 54063 - DNA, 20 bp, Artificial Sequence
  Synthetic oligonucleotide; TGG chr11 5179924 5179943 5179927 -
taatgtaaatgacgagttaa

SEQ ID NO: 54064 - DNA, 20 bp, Artificial Sequence
  Synthetic oligonucleotide; GGG chr11 5179923 5179942 5179926 -
aatgtaaatgacgagttaat

SEQ ID NO: 54065 - DNA, 20 bp, Artificial Sequence
  Synthetic oligonucleotide; CAG chr11 5179918 5179937 5179921 -
aaatgacgagttaatgggtg

SEQ ID NO: 54066 - DNA, 20 bp, Artificial Sequence
  Synthetic oligonucleotide; TGG chr11 5179905 5179924 5179908 -
atgggtgcagcacaccaaca

SEQ ID NO: 54067 - DNA, 20 bp, Artificial Sequence
  Synthetic oligonucleotide; TAG chr11 5179855 5179874 5179858 -
catgttgtgcacatgtaccc

SEQ ID NO: 54068 - DNA, 20 bp, Artificial Sequence
  Synthetic oligonucleotide; AAG chr11 5179846 5179865 5179849 -
cacatgtaccctagaactta

SEQ ID NO: 54069 - DNA, 20 bp, Artificial Sequence
  Synthetic oligonucleotide; CAG chr11 5179793 5179812 5179796 -
tgtattgtctcattttcaat

SEQ ID NO: 54070 - DNA, 20 bp, Artificial Sequence
  Synthetic oligonucleotide; AAG chr11 5179784 5179803 5179787 -
tcattttcaatcagtgactg

SEQ ID NO: 54071 - DNA, 20 bp, Artificial Sequence
  Synthetic oligonucleotide; TGG chr11 5179781 5179800 5179784 -
ttttcaatcagtgactgaag

SEQ ID NO: 54072 - DNA, 20 bp, Artificial Sequence
  Synthetic oligonucleotide; AAG chr11 5179777 5179796 5179780 -
caatcagtgactgaagtgga

SEQ ID NO: 54073 - DNA, 20 bp, Artificial Sequence
  Synthetic oligonucleotide; GAG chr11 5179744 5179763 5179747 -
ttttattctttaccacctat

SEQ ID NO: 54074 - DNA, 20 bp, Artificial Sequence
  Synthetic oligonucleotide; AGG chr11 5179743 5179762 5179746 -
tttattctttaccacctatg

SEQ ID NO: 54075 - DNA, 20 bp, Artificial Sequence
  Synthetic oligonucleotide; GAG chr11 5179723 5179742 5179726 -
aggcatatactttttttttt

SEQ ID NO: 54076 - DNA, 20 bp, Artificial Sequence
  Synthetic oligonucleotide; GAG chr11 5179721 5179740 5179724 -
gcatatacttttttttttga

SEQ ID NO: 54077 - DNA, 20 bp, Artificial Sequence
  Synthetic oligonucleotide; AGG chr11 5179720 5179739 5179723 -
catatacttttttttttgag

SEQ ID NO: 54078 - DNA, 20 bp, Artificial Sequence
  Synthetic oligonucleotide; GGG chr11 5179719 5179738 5179722 -
atatacttttttttttgaga

SEQ ID NO: 54079 - DNA, 20 bp, Artificial Sequence
  Synthetic oligonucleotide; GAG chr11 5179717 5179736 5179720 -
atacttttttttttgagagg

SEQ ID NO: 54080 - DNA, 20 bp, Artificial Sequence
  Synthetic oligonucleotide; TAG chr11 5179699 5179718 5179702 -
gggagtctcgctctgtcacc

SEQ ID NO: 54081 - DNA, 20 bp, Artificial Sequence
  Synthetic oligonucleotide; AGG chr11 5179698 5179717 5179701 -
ggagtctcgctctgtcacct

SEQ ID NO: 54082 - DNA, 20 bp, Artificial Sequence
  Synthetic oligonucleotide; TGG chr11 5179694 5179713 5179697 -
tctcgctctgtcacctaggc

SEQ ID NO: 54083 - DNA, 20 bp, Artificial Sequence
  Synthetic oligonucleotide; GAG chr11 5179692 5179711 5179695 -
tcgctctgtcacctaggctg

SEQ ID NO: 54084 - DNA, 20 bp, Artificial Sequence
  Synthetic oligonucleotide; CAG chr11 5179687 5179706 5179690 -
ctgtcacctaggctggagtg

SEQ ID NO: 54085 - DNA, 20 bp, Artificial Sequence
  Synthetic oligonucleotide; CAG chr11 5179649 5179668 5179652 -
tcactgaaacttctgcctcc

SEQ ID NO: 54086 - DNA, 20 bp, Artificial Sequence
  Synthetic oligonucleotide; AGG chr11 5179648 5179667 5179651 -
cactgaaacttctgcctccc

SEQ ID NO: 54087 - DNA, 20 bp, Artificial Sequence
  Synthetic oligonucleotide; AAG chr11 5179642 5179661 5179645 -
aacttctgcctcccaggttc

SEQ ID NO: 54088 - DNA, 20 bp, Artificial Sequence
  Synthetic oligonucleotide; CAG chr11 5179625 5179644 5179628 -
ttcaagcgattctcctgcct

SEQ ID NO: 54089 - DNA, 20 bp, Artificial Sequence
  Synthetic oligonucleotide; GAG chr11 5179616 5179635 5179619 -
ttctcctgcctcagcctctt

SEQ ID NO: 54090 - DNA, 20 bp, Artificial Sequence
  Synthetic oligonucleotide; TAG chr11 5179613 5179632 5179616 -
tcctgcctcagcctcttgag

SEQ ID NO: 54091 - DNA, 20 bp, Artificial Sequence
  Synthetic oligonucleotide; TGG chr11 5179609 5179628 5179612 -
gcctcagcctcttgagtagc

SEQ ID NO: 54092 - DNA, 20 bp, Artificial Sequence
  Synthetic oligonucleotide; GGG chr11 5179608 5179627 5179611 -
cctcagcctcttgagtagct

SEQ ID NO: 54093 - DNA, 20 bp, Artificial Sequence
  Synthetic oligonucleotide; AAG chr11 5179601 5179620 5179604 -
ctcttgagtagctgggatta

SEQ ID NO: 54094 - DNA, 20 bp, Artificial Sequence
  Synthetic oligonucleotide; AGG chr11 5179600 5179619 5179603 -
tcttgagtagctgggattaa

SEQ ID NO: 54095 - DNA, 20 bp, Artificial Sequence
  Synthetic oligonucleotide; CAG chr11 5179581 5179600 5179584 -
aaggtgcacaccactatgcc

SEQ ID NO: 54096 - DNA, 20 bp, Artificial Sequence
  Synthetic oligonucleotide; TAG chr11 5179562 5179581 5179565 -
ccagctaatttttgtatttt

SEQ ID NO: 54097 - DNA, 20 bp, Artificial Sequence
  Synthetic oligonucleotide; TAG chr11 5179559 5179578 5179562 -
gctaatttttgtatttttag

SEQ ID NO: 54098 - DNA, 20 bp, Artificial Sequence
  Synthetic oligonucleotide; GAG chr11 5179557 5179576 5179560 -
taatttttgtatttttagta

SEQ ID NO: 54099 - DNA, 20 bp, Artificial Sequence
  Synthetic oligonucleotide; CGG chr11 5179553 5179572 5179556 -
ttttgtatttttagtagaga

SEQ ID NO: 54100 - DNA, 20 bp, Artificial Sequence
  Synthetic oligonucleotide; GGG chr11 5179552 5179571 5179555 -
tttgtatttttagtagagac

SEQ ID NO: 54101 - DNA, 20 bp, Artificial Sequence
  Synthetic oligonucleotide; GGG chr11 5179551 5179570 5179554 -
ttgtatttttagtagagacg

SEQ ID NO: 54102 - DNA, 20 bp, Artificial Sequence
  Synthetic oligonucleotide; TGG chr11 5179537 5179556 5179540 -
gagacggggtttcattgttt

SEQ ID NO: 54103 - DNA, 20 bp, Artificial Sequence
  Synthetic oligonucleotide; AAG chr11 5179532 5179551 5179535 -
ggggtttcattgttttggtc

SEQ ID NO: 54104 - DNA, 20 bp, Artificial Sequence
  Synthetic oligonucleotide; TGG chr11 5179528 5179547 5179531 -
tttcattgttttggtcaagc

SEQ ID NO: 54105 - DNA, 20 bp, Artificial Sequence
  Synthetic oligonucleotide; TGG chr11 5179523 5179542 5179526 -
ttgttttggtcaagctggtc

SEQ ID NO: 54106 - DNA, 20 bp, Artificial Sequence
  Synthetic oligonucleotide; CAG chr11 5179492 5179511 5179495 -
accttgtgatctacccgcct

SEQ ID NO: 54107 - DNA, 20 bp, Artificial Sequence
  Synthetic oligonucleotide; AAG chr11 5179482 5179501 5179485 -
ctacccgcctcagcctctca

SEQ ID NO: 54108 - DNA, 20 bp, Artificial Sequence
  Synthetic oligonucleotide; TGG chr11 5179476 5179495 5179479 -
gcctcagcctctcaaagtgc

SEQ ID NO: 54109 - DNA, 20 bp, Artificial Sequence
  Synthetic oligonucleotide; GGG chr11 5179475 5179494 5179478 -
cctcagcctctcaaagtgct

SEQ ID NO: 54110 - DNA, 20 bp, Artificial Sequence
  Synthetic oligonucleotide; CAG chr11 5179468 5179487 5179471 -
ctctcaaagtgctgggatta

SEQ ID NO: 54111 - DNA, 20 bp, Artificial Sequence
  Synthetic oligonucleotide; AGG chr11 5179467 5179486 5179470 -
tctcaaagtgctgggattac

SEQ ID NO: 54112 - DNA, 20 bp, Artificial Sequence
  Synthetic oligonucleotide; GAG chr11 5179461 5179480 5179464 -
agtgctgggattacaggtgt

SEQ ID NO: 54113 - DNA, 20 bp, Artificial Sequence
  Synthetic oligonucleotide; CAG chr11 5179449 5179468 5179452 -
acaggtgtgagccaccgtgc

SEQ ID NO: 54114 - DNA, 20 bp, Artificial Sequence
  Synthetic oligonucleotide; AGG chr11 5179448 5179467 5179451 -
caggtgtgagccaccgtgcc

SEQ ID NO: 54115 - DNA, 20 bp, Artificial Sequence
  Synthetic oligonucleotide; TGG chr11 5179444 5179463 5179447 -
tgtgagccaccgtgccaggc

SEQ ID NO: 54116 - DNA, 20 bp, Artificial Sequence
  Synthetic oligonucleotide; TAG chr11 5179437 5179456 5179440 -
caccgtgccaggctggcata

SEQ ID NO: 54117 - DNA, 20 bp, Artificial Sequence
  Synthetic oligonucleotide; CAG chr11 5179423 5179442 5179426 -
ggcatatagatttaaaaacc

SEQ ID NO: 54118 - DNA, 20 bp, Artificial Sequence
  Synthetic oligonucleotide; AAG chr11 5179395 5179414 5179398 -
tctgccattgcaaatatcta

SEQ ID NO: 54119 - DNA, 20 bp, Artificial Sequence
  Synthetic oligonucleotide; GAG chr11 5179366 5179385 5179369 -
atgttttatcctatattttt

SEQ ID NO: 54120 - DNA, 20 bp, Artificial Sequence
  Synthetic oligonucleotide; TAG chr11 5179360 5179379 5179363 -
tatcctatatttttgagaaa

SEQ ID NO: 54121 - DNA, 20 bp, Artificial Sequence
  Synthetic oligonucleotide; TGG chr11 5179351 5179370 5179354 -
tttttgagaaatagattaat

SEQ ID NO: 54122 - DNA, 20 bp, Artificial Sequence
  Synthetic oligonucleotide; CAG chr11 5179348 5179367 5179351 -
ttgagaaatagattaattgg

SEQ ID NO: 54123 - DNA, 20 bp, Artificial Sequence
  Synthetic oligonucleotide; TGG chr11 5179317 5179336 5179320 -
aatttgctgtatgtcttcaa

SEQ ID NO: 54124 - DNA, 20 bp, Artificial Sequence
  Synthetic oligonucleotide; TAG chr11 5179313 5179332 5179316 -
tgctgtatgtcttcaatggc

SEQ ID NO: 54125 - DNA, 20 bp, Artificial Sequence
  Synthetic oligonucleotide; TGG chr11 5179306 5179325 5179309 -
tgtcttcaatggctagcata

SEQ ID NO: 54126 - DNA, 20 bp, Artificial Sequence
  Synthetic oligonucleotide; AAG chr11 5179294 5179313 5179297 -
ctagcatatggcttaacaat

SEQ ID NO: 54127 - DNA, 20 bp, Artificial Sequence
  Synthetic oligonucleotide; AAG chr11 5179289 5179308 5179292 -
atatggcttaacaataagtt

SEQ ID NO: 54128 - DNA, 20 bp, Artificial Sequence
  Synthetic oligonucleotide; AGG chr11 5179288 5179307 5179291 -
tatggcttaacaataagtta

SEQ ID NO: 54129 - DNA, 20 bp, Artificial Sequence
  Synthetic oligonucleotide; TGG chr11 5179275 5179294 5179278 -
taagttaaggccaatcaatg

SEQ ID NO: 54130 - DNA, 20 bp, Artificial Sequence
  Synthetic oligonucleotide; AAG chr11 5179272 5179291 5179275 -
gttaaggccaatcaatgtgg

SEQ ID NO: 54131 - DNA, 20 bp, Artificial Sequence
  Synthetic oligonucleotide; AAG chr11 5179269 5179288 5179272 -
aaggccaatcaatgtggaag

SEQ ID NO: 54132 - DNA, 20 bp, Artificial Sequence
  Synthetic oligonucleotide; AGG chr11 5179268 5179287 5179271 -
aggccaatcaatgtggaaga

SEQ ID NO: 54133 - DNA, 20 bp, Artificial Sequence
  Synthetic oligonucleotide; CAG chr11 5179232 5179251 5179235 -
ttgcttgaaatctattttgt

SEQ ID NO: 54134 - DNA, 20 bp, Artificial Sequence
  Synthetic oligonucleotide; AAG chr11 5179206 5179225 5179209 -
taattccctcccatttctgt

SEQ ID NO: 54135 - DNA, 20 bp, Artificial Sequence
  Synthetic oligonucleotide; CAG chr11 5179203 5179222 5179206 -
ttccctcccatttctgtaag

SEQ ID NO: 54136 - DNA, 20 bp, Artificial Sequence
  Synthetic oligonucleotide; TAG chr11 5179168 5179187 5179171 -
tcataactctctattttcct

SEQ ID NO: 54137 - DNA, 20 bp, Artificial Sequence
  Synthetic oligonucleotide; AGG chr11 5179167 5179186 5179170 -
cataactctctattttcctt

SEQ ID NO: 54138 - DNA, 20 bp, Artificial Sequence
  Synthetic oligonucleotide; GGG chr11 5179166 5179185 5179169 -
ataactctctattttcctta

SEQ ID NO: 54139 - DNA, 20 bp, Artificial Sequence
  Synthetic oligonucleotide; CAG chr11 5179156 5179175 5179159 -
attttccttagggatatgat

SEQ ID NO: 54140 - DNA, 20 bp, Artificial Sequence
  Synthetic oligonucleotide; TAG chr11 5179125 5179144 5179128 -
ttgatgctgcgttttatatc

SEQ ID NO: 54141 - DNA, 20 bp, Artificial Sequence
  Synthetic oligonucleotide; TAG chr11 5179111 5179130 5179114 -
tatatctagttttaccttga

SEQ ID NO: 54142 - DNA, 20 bp, Artificial Sequence
  Synthetic oligonucleotide; AGG chr11 5179110 5179129 5179113 -
atatctagttttaccttgat

SEQ ID NO: 54143 - DNA, 20 bp, Artificial Sequence
  Synthetic oligonucleotide; CAG chr11 5179107 5179126 5179110 -
tctagttttaccttgatagg

SEQ ID NO: 54144 - DNA, 20 bp, Artificial Sequence
  Synthetic oligonucleotide; TGG chr11 5179101 5179120 5179104 -
tttaccttgataggcagcat

SEQ ID NO: 54145 - DNA, 20 bp, Artificial Sequence
  Synthetic oligonucleotide; TGG chr11 5179097 5179116 5179100 -
ccttgataggcagcattgga

SEQ ID NO: 54146 - DNA, 20 bp, Artificial Sequence
  Synthetic oligonucleotide; TAG chr11 5179094 5179113 5179097 -
tgataggcagcattggatgg

SEQ ID NO: 54147 - DNA, 20 bp, Artificial Sequence
  Synthetic oligonucleotide; AAG chr11 5179089 5179108 5179092 -
ggcagcattggatggtagta

SEQ ID NO: 54148 - DNA, 20 bp, Artificial Sequence
  Synthetic oligonucleotide; AAG chr11 5179082 5179101 5179085 -
ttggatggtagtaaagatca

SEQ ID NO: 54149 - DNA, 20 bp, Artificial Sequence
  Synthetic oligonucleotide; CAG chr11 5179075 5179094 5179078 -
gtagtaaagatcaaagcttt

SEQ ID NO: 54150 - DNA, 20 bp, Artificial Sequence
  Synthetic oligonucleotide; CAG chr11 5179048 5179067 5179051 -
atcctgccttactttaaatc

SEQ ID NO: 54151 - DNA, 20 bp, Artificial Sequence
  Synthetic oligonucleotide; TAG chr11 5179045 5179064 5179048 -
ctgccttactttaaatccag

SEQ ID NO: 54152 - DNA, 20 bp, Artificial Sequence
  Synthetic oligonucleotide; AGG chr11 5179044 5179063 5179047 -
tgccttactttaaatccagt

SEQ ID NO: 54153 - DNA, 20 bp, Artificial Sequence
  Synthetic oligonucleotide; GGG chr11 5179043 5179062 5179046 -
gccttactttaaatccagta

SEQ ID NO: 54154 - DNA, 20 bp, Artificial Sequence
  Synthetic oligonucleotide; TAG chr11 5179038 5179057 5179041 -
actttaaatccagtagggcc

SEQ ID NO: 54155 - DNA, 20 bp, Artificial Sequence
  Synthetic oligonucleotide; AGG chr11 5179037 5179056 5179040 -
ctttaaatccagtagggcct

SEQ ID NO: 54156 - DNA, 20 bp, Artificial Sequence
  Synthetic oligonucleotide; GGG chr11 5179036 5179055 5179039 -
tttaaatccagtagggccta

SEQ ID NO: 54157 - DNA, 20 bp, Artificial Sequence
  Synthetic oligonucleotide; AAG chr11 5179032 5179051 5179035 -
aatccagtagggcctagggt

SEQ ID NO: 54158 - DNA, 20 bp, Artificial Sequence
  Synthetic oligonucleotide; GAG chr11 5179030 5179049 5179033 -
tccagtagggcctagggtaa

SEQ ID NO: 54159 - DNA, 20 bp, Artificial Sequence
  Synthetic oligonucleotide; AGG chr11 5179029 5179048 5179032 -
ccagtagggcctagggtaag

SEQ ID NO: 54160 - DNA, 20 bp, Artificial Sequence
  Synthetic oligonucleotide; AAG chr11 5179022 5179041 5179025 -
ggcctagggtaagaggctga

SEQ ID NO: 54161 - DNA, 20 bp, Artificial Sequence
  Synthetic oligonucleotide; TGG chr11 5179015 5179034 5179018 -
ggtaagaggctgaaagtctg

SEQ ID NO: 54162 - DNA, 20 bp, Artificial Sequence
  Synthetic oligonucleotide; GGG chr11 5179014 5179033 5179017 -
gtaagaggctgaaagtctgt

SEQ ID NO: 54163 - DNA, 20 bp, Artificial Sequence
  Synthetic oligonucleotide; TAG chr11 5178996 5179015 5178999 -
gtgggttttttttacatctg

SEQ ID NO: 54164 - DNA, 20 bp, Artificial Sequence
  Synthetic oligonucleotide; TAG chr11 5178987 5179006 5178990 -
ttttacatctgtagaaataa

SEQ ID NO: 54165 - DNA, 20 bp, Artificial Sequence
  Synthetic oligonucleotide; TGG chr11 5178973 5178992 5178976 -
aaataatagtatttatataa

SEQ ID NO: 54166 - DNA, 20 bp, Artificial Sequence
  Synthetic oligonucleotide; AAG chr11 5178963 5178982 5178966 -
atttatataatggttattta

SEQ ID NO: 54167 - DNA, 20 bp, Artificial Sequence
  Synthetic oligonucleotide; AGG chr11 5178962 5178981 5178965 -
tttatataatggttatttaa

SEQ ID NO: 54168 - DNA, 20 bp, Artificial Sequence
  Synthetic oligonucleotide; GGG chr11 5178961 5178980 5178964 -
ttatataatggttatttaaa

SEQ ID NO: 54169 - DNA, 20 bp, Artificial Sequence
  Synthetic oligonucleotide; TAG chr11 5178950 5178969 5178953 -
ttatttaaagggcttttcaa

SEQ ID NO: 54170 - DNA, 20 bp, Artificial Sequence
  Synthetic oligonucleotide; AGG chr11 5178949 5178968 5178952 -
tatttaaagggcttttcaat

SEQ ID NO: 54171 - DNA, 20 bp, Artificial Sequence
  Synthetic oligonucleotide; AAG chr11 5178938 5178957 5178941 -
cttttcaataggttattgtg

SEQ ID NO: 54172 - DNA, 20 bp, Artificial Sequence
  Synthetic oligonucleotide; AAG chr11 5178928 5178947 5178931 -
ggttattgtgaagatttaat

SEQ ID NO: 54173 - DNA, 20 bp, Artificial Sequence
  Synthetic oligonucleotide; AAG chr11 5178913 5178932 5178916 -
ttaataagttaatatttgta

SEQ ID NO: 54174 - DNA, 20 bp, Artificial Sequence
  Synthetic oligonucleotide; TAG chr11 5178910 5178929 5178913 -
ataagttaatatttgtaaag

SEQ ID NO: 54175 - DNA, 20 bp, Artificial Sequence
  Synthetic oligonucleotide; AAG chr11 5178894 5178913 5178897 -
aaagtagtatgacacatatt

SEQ ID NO: 54176 - DNA, 20 bp, Artificial Sequence
  Synthetic oligonucleotide; CAG chr11 5178891 5178910 5178894 -
gtagtatgacacatattaag

SEQ ID NO: 54177 - DNA, 20 bp, Artificial Sequence
  Synthetic oligonucleotide; AAG chr11 5178861 5178880 5178864 -
ataatatctactaatttttt

SEQ ID NO: 54178 - DNA, 20 bp, Artificial Sequence
  Synthetic oligonucleotide; AGG chr11 5178860 5178879 5178863 -
taatatctactaatttttta

SEQ ID NO: 54179 - DNA, 20 bp, Artificial Sequence
  Synthetic oligonucleotide; TGG chr11 5178839 5178858 5178842 -
ggtacaaaaaattaattatt

SEQ ID NO: 54180 - DNA, 20 bp, Artificial Sequence
  Synthetic oligonucleotide; TAG chr11 5178836 5178855 5178839 -
acaaaaaattaattatttgg

SEQ ID NO: 54181 - DNA, 20 bp, Artificial Sequence
  Synthetic oligonucleotide; AGG chr11 5178835 5178854 5178838 -
caaaaaattaattatttggt

SEQ ID NO: 54182 - DNA, 20 bp, Artificial Sequence
  Synthetic oligonucleotide; CGG chr11 5178821 5178840 5178824 -
tttggtaggacttatatatt

SEQ ID NO: 54183 - DNA, 20 bp, Artificial Sequence
  Synthetic oligonucleotide; CAG chr11 5178790 5178809 5178793 -
cccattttactctcctttcc

SEQ ID NO: 54184 - DNA, 20 bp, Artificial Sequence
  Synthetic oligonucleotide; GAG chr11 5178788 5178807 5178791 -
cattttactctcctttccca

SEQ ID NO: 54185 - DNA, 20 bp, Artificial Sequence
  Synthetic oligonucleotide; AAG chr11 5178785 5178804 5178788 -
tttactctcctttcccagag

SEQ ID NO: 54186 - DNA, 20 bp, Artificial Sequence
  Synthetic oligonucleotide; TGG chr11 5178775 5178794 5178778 -
tttcccagagaagaaaacat

SEQ ID NO: 54187 - DNA, 20 bp, Artificial Sequence
  Synthetic oligonucleotide; AAG chr11 5178771 5178790 5178774 -
ccagagaagaaaacattgga

SEQ ID NO: 54188 - DNA, 20 bp, Artificial Sequence
  Synthetic oligonucleotide; GAG chr11 5178754 5178773 5178757 -
ggaaagaaaacaaatctgat

SEQ ID NO: 54189 - DNA, 20 bp, Artificial Sequence
  Synthetic oligonucleotide; CAG chr11 5178743 5178762 5178746 -
aaatctgatgagacctcatt

SEQ ID NO: 54190 - DNA, 20 bp, Artificial Sequence
  Synthetic oligonucleotide; AAG chr11 5178737 5178756 5178740 -
gatgagacctcattcagcct

SEQ ID NO: 54191 - DNA, 20 bp, Artificial Sequence
  Synthetic oligonucleotide; AGG chr11 5178736 5178755 5178739 -
atgagacctcattcagccta

SEQ ID NO: 54192 - DNA, 20 bp, Artificial Sequence
  Synthetic oligonucleotide; TAG chr11 5178733 5178752 5178736 -
agacctcattcagcctaagg

SEQ ID NO: 54193 - DNA, 20 bp, Artificial Sequence
  Synthetic oligonucleotide; TAG chr11 5178708 5178727 5178711 -
tttctaaatcctcaactttg

SEQ ID NO: 54194 - DNA, 20 bp, Artificial Sequence
  Synthetic oligonucleotide; TGG chr11 5178694 5178713 5178697 -
actttgtagtctttcactaa

SEQ ID NO: 54195 - DNA, 20 bp, Artificial Sequence
  Synthetic oligonucleotide; TAG chr11 5178688 5178707 5178691 -
tagtctttcactaatggcac

SEQ ID NO: 54196 - DNA, 20 bp, Artificial Sequence
  Synthetic oligonucleotide; AGG chr11 5178687 5178706 5178690 -
agtctttcactaatggcact

SEQ ID NO: 54197 - DNA, 20 bp, Artificial Sequence
  Synthetic oligonucleotide; TGG chr11 5178682 5178701 5178685 -
ttcactaatggcactaggcc

SEQ ID NO: 54198 - DNA, 20 bp, Artificial Sequence
  Synthetic oligonucleotide; CGG chr11 5178664 5178683 5178667 -
cctggaataaactgtacata

SEQ ID NO: 54199 - DNA, 20 bp, Artificial Sequence
  Synthetic oligonucleotide; CAG chr11 5178632 5178651 5178635 -
ttcgcaatcacactaattcc

SEQ ID NO: 54200 - DNA, 20 bp, Artificial Sequence
  Synthetic oligonucleotide; AGG chr11 5178631 5178650 5178634 -
tcgcaatcacactaattccc

SEQ ID NO: 54201 - DNA, 20 bp, Artificial Sequence
  Synthetic oligonucleotide; TGG chr11 5178623 5178642 5178626 -
acactaattcccaggatgtg

SEQ ID NO: 54202 - DNA, 20 bp, Artificial Sequence
  Synthetic oligonucleotide; TGG chr11 5178610 5178629 5178613 -
ggatgtgtggtatgtcctga

SEQ ID NO: 54203 - DNA, 20 bp, Artificial Sequence
  Synthetic oligonucleotide; GGG chr11 5178609 5178628 5178612 -
gatgtgtggtatgtcctgat

SEQ ID NO: 54204 - DNA, 20 bp, Artificial Sequence
  Synthetic oligonucleotide; CAG chr11 5178601 5178620 5178604 -
gtatgtcctgatgggaatcc

SEQ ID NO: 54205 - DNA, 20 bp, Artificial Sequence
  Synthetic oligonucleotide; AGG chr11 5178600 5178619 5178603 -
tatgtcctgatgggaatccc

SEQ ID NO: 54206 - DNA, 20 bp, Artificial Sequence
  Synthetic oligonucleotide; GGG chr11 5178599 5178618 5178602 -
atgtcctgatgggaatccca

SEQ ID NO: 54207 - DNA, 20 bp, Artificial Sequence
  Synthetic oligonucleotide; TGG chr11 5178595 5178614 5178598 -
cctgatgggaatcccagggc

SEQ ID NO: 54208 - DNA, 20 bp, Artificial Sequence
  Synthetic oligonucleotide; AAG chr11 5178592 5178611 5178595 -
gatgggaatcccagggctgg

SEQ ID NO: 54209 - DNA, 20 bp, Artificial Sequence
  Synthetic oligonucleotide; AGG chr11 5178591 5178610 5178594 -
atgggaatcccagggctgga

SEQ ID NO: 54210 - DNA, 20 bp, Artificial Sequence
  Synthetic oligonucleotide; TGG chr11 5178578 5178597 5178581 -
ggctggaaggcttgcatacc

SEQ ID NO: 54211 - DNA, 20 bp, Artificial Sequence
  Synthetic oligonucleotide; TGG chr11 5178544 5178563 5178547 -
tttttcttttatgtacattg

SEQ ID NO: 54212 - DNA, 20 bp, Artificial Sequence
  Synthetic oligonucleotide; CAG chr11 5178535 5178554 5178538 -
tatgtacattgtggctgttg

SEQ ID NO: 54213 - DNA, 20 bp, Artificial Sequence
  Synthetic oligonucleotide; AGG chr11 5178534 5178553 5178537 -
atgtacattgtggctgttgc

SEQ ID NO: 54214 - DNA, 20 bp, Artificial Sequence
  Synthetic oligonucleotide; GAG chr11 5178500 5178519 5178503 -
tgatcttcctgatcatgact

SEQ ID NO: 54215 - DNA, 20 bp, Artificial Sequence
  Synthetic oligonucleotide; CAG chr11 5178495 5178514 5178498 -
ttcctgatcatgactgagcg

SEQ ID NO: 54216 - DNA, 20 bp, Artificial Sequence
  Synthetic oligonucleotide; GAG chr11 5178485 5178504 5178488 -
tgactgagcgcagtctccat

SEQ ID NO: 54217 - DNA, 20 bp, Artificial Sequence
  Synthetic oligonucleotide; TGG chr11 5178457 5178476 5178460 -
gtatctcttcctatccatgc

SEQ ID NO: 54218 - DNA, 20 bp, Artificial Sequence
  Synthetic oligonucleotide; CAG chr11 5178451 5178470 5178454 -
cttcctatccatgctggcct

SEQ ID NO: 54219 - DNA, 20 bp, Artificial Sequence
  Synthetic oligonucleotide; CAG chr11 5178424 5178443 5178427 -
cttcctgctcgccactgctg

SEQ ID NO: 54220 - DNA, 20 bp, Artificial Sequence
  Synthetic oligonucleotide; AAG chr11 5178416 5178435 5178419 -
tcgccactgctgcagcccct

SEQ ID NO: 54221 - DNA, 20 bp, Artificial Sequence
  Synthetic oligonucleotide; AGG chr11 5178415 5178434 5178418 -
cgccactgctgcagccccta

SEQ ID NO: 54222 - DNA, 20 bp, Artificial Sequence
  Synthetic oligonucleotide; TGG chr11 5178409 5178428 5178412 -
tgctgcagcccctaaggtgc

SEQ ID NO: 54223 - DNA, 20 bp, Artificial Sequence
  Synthetic oligonucleotide; TGG chr11 5178398 5178417 5178401 -
ctaaggtgctggctatcctc

SEQ ID NO: 54224 - DNA, 20 bp, Artificial Sequence
  Synthetic oligonucleotide; TGG chr11 5178385 5178404 5178388 -
tatcctctggttccactcca

SEQ ID NO: 54225 - DNA, 20 bp, Artificial Sequence
  Synthetic oligonucleotide; TGG chr11 5178372 5178391 5178375 -
cactccatggacatatcctt

SEQ ID NO: 54226 - DNA, 20 bp, Artificial Sequence
  Synthetic oligonucleotide; TAG chr11 5178369 5178388 5178372 -
tccatggacatatcctttgg

SEQ ID NO: 54227 - DNA, 20 bp, Artificial Sequence
  Synthetic oligonucleotide; CAG chr11 5178356 5178375 5178359 -
cctttggtagttgtgtgtct

SEQ ID NO: 54228 - DNA, 20 bp, Artificial Sequence
  Synthetic oligonucleotide; TGG chr11 5178328 5178347 5178331 -
cttcatacatttcatctttg

SEQ ID NO: 54229 - DNA, 20 bp, Artificial Sequence
  Synthetic oligonucleotide; CAG chr11 5178325 5178344 5178328 -
catacatttcatctttgtgg

SEQ ID NO: 54230 - DNA, 20 bp, Artificial Sequence
  Synthetic oligonucleotide; TGG chr11 5178307 5178326 5178310 -
ggcagaatctgctattctcc

SEQ ID NO: 54231 - DNA, 20 bp, Artificial Sequence
  Synthetic oligonucleotide; TGG chr11 5178301 5178320 5178304 -
atctgctattctcctggcaa

SEQ ID NO: 54232 - DNA, 20 bp, Artificial Sequence
  Synthetic oligonucleotide; TGG chr11 5178283 5178302 5178286 -
aatggcatttgaccgctatg

SEQ ID NO: 54233 - DNA, 20 bp, Artificial Sequence
  Synthetic oligonucleotide; GAG chr11 5178264 5178283 5178267 -
gtggccatctgttacccact

SEQ ID NO: 54234 - DNA, 20 bp, Artificial Sequence
  Synthetic oligonucleotide; CAG chr11 5178241 5178260 5178244 -
atacaccattttaacctcat

SEQ ID NO: 54235 - DNA, 20 bp, Artificial Sequence
  Synthetic oligonucleotide; CAG chr11 5178234 5178253 5178237 -
attttaacctcatcagccgt

SEQ ID NO: 54236 - DNA, 20 bp, Artificial Sequence
  Synthetic oligonucleotide; AGG chr11 5178233 5178252 5178236 -
ttttaacctcatcagccgtc

SEQ ID NO: 54237 - DNA, 20 bp, Artificial Sequence
  Synthetic oligonucleotide; AAG chr11 5178230 5178249 5178233 -
taacctcatcagccgtcagg

SEQ ID NO: 54238 - DNA, 20 bp, Artificial Sequence
  Synthetic oligonucleotide; TGG chr11 5178225 5178244 5178228 -
tcatcagccgtcaggaagat

SEQ ID NO: 54239 - DNA, 20 bp, Artificial Sequence
  Synthetic oligonucleotide; TAG chr11 5178220 5178239 5178223 -
agccgtcaggaagattggca

SEQ ID NO: 54240 - DNA, 20 bp, Artificial Sequence
  Synthetic oligonucleotide; CAG chr11 5178217 5178236 5178220 -
cgtcaggaagattggcatag

SEQ ID NO: 54241 - DNA, 20 bp, Artificial Sequence
  Synthetic oligonucleotide; TGG chr11 5178211 5178230 5178214 -
gaagattggcatagcagctg

SEQ ID NO: 54242 - DNA, 20 bp, Artificial Sequence
  Synthetic oligonucleotide; CAG chr11 5178207 5178226 5178210 -
attggcatagcagctgtggt

SEQ ID NO: 54243 - DNA, 20 bp, Artificial Sequence
  Synthetic oligonucleotide; AGG chr11 5178206 5178225 5178209 -
ttggcatagcagctgtggtc

SEQ ID NO: 54244 - DNA, 20 bp, Artificial Sequence
  Synthetic oligonucleotide; GAG chr11 5178204 5178223 5178207 -
ggcatagcagctgtggtcag

SEQ ID NO: 54245 - DNA, 20 bp, Artificial Sequence
  Synthetic oligonucleotide; TGG chr11 5178172 5178191 5178175 -
ctgctgtccgttcatcttcc

SEQ ID NO: 54246 - DNA, 20 bp, Artificial Sequence
  Synthetic oligonucleotide; TGG chr11 5178150 5178169 5178153 -
gtataccgacttacatattg

SEQ ID NO: 54247 - DNA, 20 bp, Artificial Sequence
  Synthetic oligonucleotide; GGG chr11 5178149 5178168 5178152 -
tataccgacttacatattgt

SEQ ID NO: 54248 - DNA, 20 bp, Artificial Sequence
  Synthetic oligonucleotide; GAG chr11 5178147 5178166 5178150 -
taccgacttacatattgtgg

SEQ ID NO: 54249 - DNA, 20 bp, Artificial Sequence
  Synthetic oligonucleotide; GAG chr11 5178119 5178138 5178122 -
tcattcctcattcctactgt

SEQ ID NO: 54250 - DNA, 20 bp, Artificial Sequence
  Synthetic oligonucleotide; CAG chr11 5178108 5178127 5178111 -
tcctactgtgagcacattgc

SEQ ID NO: 54251 - DNA, 20 bp, Artificial Sequence
  Synthetic oligonucleotide; TGG chr11 5178103 5178122 5178106 -
ctgtgagcacattgccagat

SEQ ID NO: 54252 - DNA, 20 bp, Artificial Sequence
  Synthetic oligonucleotide; TGG chr11 5178096 5178115 5178099 -
cacattgccagattggcttg

SEQ ID NO: 54253 - DNA, 20 bp, Artificial Sequence
  Synthetic oligonucleotide; TGG chr11 5178069 5178088 5178072 -
atcaatgtcaatatcattta

SEQ ID NO: 54254 - DNA, 20 bp, Artificial Sequence
  Synthetic oligonucleotide; TGG chr11 5178058 5178077 5178061 -
tatcatttatggcctcactg

SEQ ID NO: 54255 - DNA, 20 bp, Artificial Sequence
  Synthetic oligonucleotide; CAG chr11 5178043 5178062 5178046 -
cactgtggccctactctcta

SEQ ID NO: 54256 - DNA, 20 bp, Artificial Sequence
  Synthetic oligonucleotide; AGG chr11 5178042 5178061 5178045 -
actgtggccctactctctac

SEQ ID NO: 54257 - DNA, 20 bp, Artificial Sequence
  Synthetic oligonucleotide; TGG chr11 5178037 5178056 5178040 -
ggccctactctctacaggac

SEQ ID NO: 54258 - DNA, 20 bp, Artificial Sequence
  Synthetic oligonucleotide; TAG chr11 5178031 5178050 5178034 -
actctctacaggactggata

SEQ ID NO: 54259 - DNA, 20 bp, Artificial Sequence
  Synthetic oligonucleotide; CAG chr11 5177992 5178011 5177995 -
ctacacaatgatccttcact

SEQ ID NO: 54260 - DNA, 20 bp, Artificial Sequence
  Synthetic oligonucleotide; CAG chr11 5177984 5178003 5177987 -
tgatccttcactcagtgttt

SEQ ID NO: 54261 - DNA, 20 bp, Artificial Sequence
  Synthetic oligonucleotide; TGG chr11 5177972 5177991 5177975 -
cagtgtttcagatatcttcc

SEQ ID NO: 54262 - DNA, 20 bp, Artificial Sequence
  Synthetic oligonucleotide; GGG chr11 5177971 5177990 5177974 -
agtgtttcagatatcttcct

SEQ ID NO: 54263 - DNA, 20 bp, Artificial Sequence
  Synthetic oligonucleotide; CAG chr11 5177964 5177983 5177967 -
cagatatcttcctgggctgc

SEQ ID NO: 54264 - DNA, 20 bp, Artificial Sequence
  Synthetic oligonucleotide; AGG chr11 5177963 5177982 5177966 -
agatatcttcctgggctgcc

SEQ ID NO: 54265 - DNA, 20 bp, Artificial Sequence
  Synthetic oligonucleotide; AAG chr11 5177957 5177976 5177960 -
cttcctgggctgccaggttc

SEQ ID NO: 54266 - DNA, 20 bp, Artificial Sequence
  Synthetic oligonucleotide; AGG chr11 5177956 5177975 5177959 -
ttcctgggctgccaggttca

SEQ ID NO: 54267 - DNA, 20 bp, Artificial Sequence
  Synthetic oligonucleotide; TAG chr11 5177949 5177968 5177952 -
gctgccaggttcaaggccct

SEQ ID NO: 54268 - DNA, 20 bp, Artificial Sequence
  Synthetic oligonucleotide; CGG chr11 5177940 5177959 5177943 -
ttcaaggcccttagtacgtg

SEQ ID NO: 54269 - DNA, 20 bp, Artificial Sequence
  Synthetic oligonucleotide; CAG chr11 5177902 5177921 5177905 -
catatttatgttctataccc

SEQ ID NO: 54270 - DNA, 20 bp, Artificial Sequence
  Synthetic oligonucleotide; TGG chr11 5177871 5177890 5177874 -
tcatttcttgcccatcgctt

SEQ ID NO: 54271 - DNA, 20 bp, Artificial Sequence
  Synthetic oligonucleotide; GAG chr11 5177869 5177888 5177872 -
atttcttgcccatcgctttg

SEQ ID NO: 54272 - DNA, 20 bp, Artificial Sequence
  Synthetic oligonucleotide; AGG chr11 5177868 5177887 5177871 -
tttcttgcccatcgctttgg

SEQ ID NO: 54273 - DNA, 20 bp, Artificial Sequence
  Synthetic oligonucleotide; TAG chr11 5177836 5177855 5177839 -
ccctcaccacattcacatcc

SEQ ID NO: 54274 - DNA, 20 bp, Artificial Sequence
  Synthetic oligonucleotide; TGG chr11 5177833 5177852 5177836 -
tcaccacattcacatcctag

SEQ ID NO: 54275 - DNA, 20 bp, Artificial Sequence
  Synthetic oligonucleotide; GGG chr11 5177832 5177851 5177835 -
caccacattcacatcctagt

SEQ ID NO: 54276 - DNA, 20 bp, Artificial Sequence
  Synthetic oligonucleotide; CAG chr11 5177829 5177848 5177832 -
cacattcacatcctagtggg

SEQ ID NO: 54277 - DNA, 20 bp, Artificial Sequence
  Synthetic oligonucleotide; TAG chr11 5177815 5177834 5177818 -
agtgggcagtctctatgtgt

SEQ ID NO: 54278 - DNA, 20 bp, Artificial Sequence
  Synthetic oligonucleotide; TGG chr11 5177784 5177803 5177787 -
atgctaaaccccatcattta

SEQ ID NO: 54279 - DNA, 20 bp, Artificial Sequence
  Synthetic oligonucleotide; GGG chr11 5177783 5177802 5177786 -
tgctaaaccccatcatttat

SEQ ID NO: 54280 - DNA, 20 bp, Artificial Sequence
  Synthetic oligonucleotide; GGG chr11 5177782 5177801 5177785 -
gctaaaccccatcatttatg

SEQ ID NO: 54281 - DNA, 20 bp, Artificial Sequence
  Synthetic oligonucleotide; AAG chr11 5177777 5177796 5177780 -
accccatcatttatggggtg

SEQ ID NO: 54282 - DNA, 20 bp, Artificial Sequence
  Synthetic oligonucleotide; AAG chr11 5177761 5177780 5177764 -
ggtgaagaccaaacaaatta

SEQ ID NO: 54283 - DNA, 20 bp, Artificial Sequence
  Synthetic oligonucleotide; GAG chr11 5177755 5177774 5177758 -
gaccaaacaaattaaagatc

SEQ ID NO: 54284 - DNA, 20 bp, Artificial Sequence
  Synthetic oligonucleotide; CAG chr11 5177730 5177749 5177733 -
attttgcttttctctcctat

SEQ ID NO: 54285 - DNA, 20 bp, Artificial Sequence
  Synthetic oligonucleotide; AAG chr11 5177716 5177735 5177719 -
tcctatcagtgtatgctgtt

SEQ ID NO: 54286 - DNA, 20 bp, Artificial Sequence
  Synthetic oligonucleotide; AAG chr11 5177707 5177726 5177710 -
tgtatgctgttaagattaaa

SEQ ID NO: 54287 - DNA, 20 bp, Artificial Sequence
  Synthetic oligonucleotide; TAG chr11 5177697 5177716 5177700 -
taagattaaaaagtctgttt

SEQ ID NO: 54288 - DNA, 20 bp, Artificial Sequence
  Synthetic oligonucleotide; AGG chr11 5177696 5177715 5177699 -
aagattaaaaagtctgtttt

SEQ ID NO: 54289 - DNA, 20 bp, Artificial Sequence
  Synthetic oligonucleotide; GGG chr11 5177695 5177714 5177698 -
agattaaaaagtctgtttta

SEQ ID NO: 54290 - DNA, 20 bp, Artificial Sequence
  Synthetic oligonucleotide; TAG chr11 5177690 5177709 5177693 -
aaaaagtctgttttagggaa

SEQ ID NO: 54291 - DNA, 20 bp, Artificial Sequence
  Synthetic oligonucleotide; TAG chr11 5177672 5177691 5177675 -
aatagaataaatacaatcca

SEQ ID NO: 54292 - DNA, 20 bp, Artificial Sequence
  Synthetic oligonucleotide; TGG chr11 5177644 5177663 5177647 -
ctcaaacacacttaaaatga

SEQ ID NO: 54293 - DNA, 20 bp, Artificial Sequence
  Synthetic oligonucleotide; AAG chr11 5177632 5177651 5177635 -
taaaatgatggtgtctatca

SEQ ID NO: 54294 - DNA, 20 bp, Artificial Sequence
  Synthetic oligonucleotide; CGG chr11 5177623 5177642 5177626 -
ggtgtctatcaaagtgtcca

SEQ ID NO: 54295 - DNA, 20 bp, Artificial Sequence
  Synthetic oligonucleotide; AAG chr11 5177611 5177630 5177614 -
agtgtccacggaattttgct

SEQ ID NO: 54296 - DNA, 20 bp, Artificial Sequence
  Synthetic oligonucleotide; AGG chr11 5177610 5177629 5177613 -
gtgtccacggaattttgcta

SEQ ID NO: 54297 - DNA, 20 bp, Artificial Sequence
  Synthetic oligonucleotide; AAG chr11 5177601 5177620 5177604 -
gaattttgctaaggcactca

SEQ ID NO: 54298 - DNA, 20 bp, Artificial Sequence
  Synthetic oligonucleotide; AAG chr11 5177594 5177613 5177597 -
gctaaggcactcaaagatca

SEQ ID NO: 54299 - DNA, 20 bp, Artificial Sequence
  Synthetic oligonucleotide; AGG chr11 5177593 5177612 5177596 -
ctaaggcactcaaagatcaa

SEQ ID NO: 54300 - DNA, 20 bp, Artificial Sequence
  Synthetic oligonucleotide; CAG chr11 5177549 5177568 5177552 -
aatgaaattctccatttttt

SEQ ID NO: 54301 - DNA, 20 bp, Artificial Sequence
  Synthetic oligonucleotide; AAG chr11 5177508 5177527 5177511 -
ttttaacttaaaaatatata

SEQ ID NO: 54302 - DNA, 20 bp, Artificial Sequence
  Synthetic oligonucleotide; GAG chr11 5177499 5177518 5177502 -
aaaaatatataaagataatc

SEQ ID NO: 54303 - DNA, 20 bp, Artificial Sequence
  Synthetic oligonucleotide; AAG chr11 5177494 5177513 5177497 -
tatataaagataatcgagaa

SEQ ID NO: 54304 - DNA, 20 bp, Artificial Sequence
  Synthetic oligonucleotide; GAG chr11 5177492 5177511 5177495 -
tataaagataatcgagaaaa

SEQ ID NO: 54305 - DNA, 20 bp, Artificial Sequence
  Synthetic oligonucleotide; TAG chr11 5177479 5177498 5177482 -
gagaaaagagaaatatattt

SEQ ID NO: 54306 - DNA, 20 bp, Artificial Sequence
  Synthetic oligonucleotide; AGG chr11 5177478 5177497 5177481 -
agaaaagagaaatatatttt

SEQ ID NO: 54307 - DNA, 20 bp, Artificial Sequence
  Synthetic oligonucleotide; GGG chr11 5177477 5177496 5177480 -
gaaaagagaaatatatttta

SEQ ID NO: 54308 - DNA, 20 bp, Artificial Sequence
  Synthetic oligonucleotide; CAG chr11 5177467 5177486 5177470 -
atatattttagggtttaatc

SEQ ID NO: 54309 - DNA, 20 bp, Artificial Sequence
  Synthetic oligonucleotide; TAG chr11 5177448 5177467 5177451 -
ccagattgacttttcctacg

SEQ ID NO: 54310 - DNA, 20 bp, Artificial Sequence
  Synthetic oligonucleotide; GAG chr11 5177446 5177465 5177449 -
agattgacttttcctacgta

SEQ ID NO: 54311 - DNA, 20 bp, Artificial Sequence
  Synthetic oligonucleotide; TAG chr11 5177442 5177461 5177445 -
tgacttttcctacgtagagc

SEQ ID NO: 54312 - DNA, 20 bp, Artificial Sequence
  Synthetic oligonucleotide; AGG chr11 5177441 5177460 5177444 -
gacttttcctacgtagagct

SEQ ID NO: 54313 - DNA, 20 bp, Artificial Sequence
  Synthetic oligonucleotide; AAG chr11 5177438 5177457 5177441 -
ttttcctacgtagagctagg

SEQ ID NO: 54314 - DNA, 20 bp, Artificial Sequence
  Synthetic oligonucleotide; TGG chr11 5177435 5177454 5177438 -
tcctacgtagagctaggaag

SEQ ID NO: 54315 - DNA, 20 bp, Artificial Sequence
  Synthetic oligonucleotide; GGG chr11 5177434 5177453 5177437 -
cctacgtagagctaggaagt

SEQ ID NO: 54316 - DNA, 20 bp, Artificial Sequence
  Synthetic oligonucleotide; GGG chr11 5177433 5177452 5177436 -
ctacgtagagctaggaagtg

SEQ ID NO: 54317 - DNA, 20 bp, Artificial Sequence
  Synthetic oligonucleotide; GAG chr11 5177426 5177445 5177429 -
gagctaggaagtggggtttt

SEQ ID NO: 54318 - DNA, 20 bp, Artificial Sequence
  Synthetic oligonucleotide; CAG chr11 5177422 5177441 5177425 -
taggaagtggggttttgagt

SEQ ID NO: 54319 - DNA, 20 bp, Artificial Sequence
  Synthetic oligonucleotide; TGG chr11 5177415 5177434 5177418 -
tggggttttgagtcagtcac

SEQ ID NO: 54320 - DNA, 20 bp, Artificial Sequence
  Synthetic oligonucleotide; GGG chr11 5177414 5177433 5177417 -
ggggttttgagtcagtcact

SEQ ID NO: 54321 - DNA, 20 bp, Artificial Sequence
  Synthetic oligonucleotide; TAG chr11 5177404 5177423 5177407 -
gtcagtcactgggcttttta

SEQ ID NO: 54322 - DNA, 20 bp, Artificial Sequence
  Synthetic oligonucleotide; CAG chr11 5177400 5177419 5177403 -
gtcactgggctttttatagt

SEQ ID NO: 54323 - DNA, 20 bp, Artificial Sequence
  Synthetic oligonucleotide; CAG chr11 5177354 5177373 5177357 -
aacactcccgctgtactctg

SEQ ID NO: 54324 - DNA, 20 bp, Artificial Sequence
  Synthetic oligonucleotide; GAG chr11 5177352 5177371 5177355 -
cactcccgctgtactctgca

SEQ ID NO: 54325 - DNA, 20 bp, Artificial Sequence
  Synthetic oligonucleotide; AAG chr11 5177331 5177350 5177334 -
agacttgaaccaataacatg

SEQ ID NO: 54326 - DNA, 20 bp, Artificial Sequence
  Synthetic oligonucleotide; AAG chr11 5177295 5177314 5177298 -
tttgtcaacacctgttactt

SEQ ID NO: 54327 - DNA, 20 bp, Artificial Sequence
  Synthetic oligonucleotide; TAG chr11 5177277 5177296 5177280 -
ttaagttaaaatgttatccc

SEQ ID NO: 54328 - DNA, 20 bp, Artificial Sequence
  Synthetic oligonucleotide; AAG chr11 5177245 5177264 5177248 -
taactcactgacatctcaca

SEQ ID NO: 54329 - DNA, 20 bp, Artificial Sequence
  Synthetic oligonucleotide; TGG chr11 5177233 5177252 5177236 -
atctcacaaagtctcttgta

SEQ ID NO: 54330 - DNA, 20 bp, Artificial Sequence
  Synthetic oligonucleotide; TAG chr11 5177228 5177247 5177231 -
acaaagtctcttgtatggaa

SEQ ID NO: 54331 - DNA, 20 bp, Artificial Sequence
  Synthetic oligonucleotide; AAG chr11 5177201 5177220 5177204 -
ataatacatatgtattcaac

SEQ ID NO: 54332 - DNA, 20 bp, Artificial Sequence
  Synthetic oligonucleotide; TAG chr11 5177191 5177210 5177194 -
tgtattcaacaagtgaataa

SEQ ID NO: 54333 - DNA, 20 bp, Artificial Sequence
  Synthetic oligonucleotide; AAG chr11 5177181 5177200 5177184 -
aagtgaataatagtgaatta

SEQ ID NO: 54334 - DNA, 20 bp, Artificial Sequence
  Synthetic oligonucleotide; GAG chr11 5177146 5177165 5177149 -
aatattaaattaacaaatat

SEQ ID NO: 54335 - DNA, 20 bp, Artificial Sequence
  Synthetic oligonucleotide; TGG chr11 5177137 5177156 5177140 -
ttaacaaatatgagattgcc

SEQ ID NO: 54336 - DNA, 20 bp, Artificial Sequence
  Synthetic oligonucleotide; TAG chr11 5177102 5177121 5177105 -
ctgatacacatttcccccta

SEQ ID NO: 54337 - DNA, 20 bp, Artificial Sequence
  Synthetic oligonucleotide; TGG chr11 5177099 5177118 5177102 -
atacacatttccccctatag

SEQ ID NO: 54338 - DNA, 20 bp, Artificial Sequence
  Synthetic oligonucleotide; GAG chr11 5177097 5177116 5177100 -
acacatttccccctatagtg

SEQ ID NO: 54339 - DNA, 20 bp, Artificial Sequence
  Synthetic oligonucleotide; TAG chr11 5177090 5177109 5177093 -
tccccctatagtggagattt

SEQ ID NO: 54340 - DNA, 20 bp, Artificial Sequence
  Synthetic oligonucleotide; AAG chr11 5177083 5177102 5177086 -
atagtggagattttagaccc

SEQ ID NO: 54341 - DNA, 20 bp, Artificial Sequence
  Synthetic oligonucleotide; TGG chr11 5177073 5177092 5177076 -
ttttagacccaagtcatcaa

SEQ ID NO: 54342 - DNA, 20 bp, Artificial Sequence
  Synthetic oligonucleotide; GAG chr11 5177071 5177090 5177074 -
ttagacccaagtcatcaatg

SEQ ID NO: 54343 - DNA, 20 bp, Artificial Sequence
  Synthetic oligonucleotide; TGG chr11 5177063 5177082 5177066 -
aagtcatcaatggagcatca

SEQ ID NO: 54344 - DNA, 20 bp, Artificial Sequence
  Synthetic oligonucleotide; CAG chr11 5177054 5177073 5177057 -
atggagcatcatggcatcaa

SEQ ID NO: 54345 - DNA, 20 bp, Artificial Sequence
  Synthetic oligonucleotide; AAG chr11 5177040 5177059 5177043 -
catcaacagaaacatcactg

SEQ ID NO: 54346 - DNA, 20 bp, Artificial Sequence
  Synthetic oligonucleotide; AAG chr11 5177037 5177056 5177040 -
caacagaaacatcactgaag

SEQ ID NO: 54347 - DNA, 20 bp, Artificial Sequence
  Synthetic oligonucleotide; TGG chr11 5177009 5177028 5177012 -
tgattgaaaatttctatacc

SEQ ID NO: 54348 - DNA, 20 bp, Artificial Sequence
  Synthetic oligonucleotide; GGG chr11 5177008 5177027 5177011 -
gattgaaaatttctatacct

SEQ ID NO: 54349 - DNA, 20 bp, Artificial Sequence
  Synthetic oligonucleotide; AAG chr11 5176970 5176989 5176973 -
taaaataaacattttttaaa

SEQ ID NO: 54350 - DNA, 20 bp, Artificial Sequence
  Synthetic oligonucleotide; TAG chr11 5176966 5176985 5176969 -
ataaacattttttaaaaagc

SEQ ID NO: 54351 - DNA, 20 bp, Artificial Sequence
  Synthetic oligonucleotide; GAG chr11 5176964 5176983 5176967 -
aaacattttttaaaaagcta

SEQ ID NO: 54352 - DNA, 20 bp, Artificial Sequence
  Synthetic oligonucleotide; AAG chr11 5176961 5176980 5176964 -
cattttttaaaaagctagag

SEQ ID NO: 54353 - DNA, 20 bp, Artificial Sequence
  Synthetic oligonucleotide; AAG chr11 5176955 5176974 5176958 -
ttaaaaagctagagaagatt

SEQ ID NO: 54354 - DNA, 20 bp, Artificial Sequence
  Synthetic oligonucleotide; AGG chr11 5176954 5176973 5176957 -
taaaaagctagagaagatta

SEQ ID NO: 54355 - DNA, 20 bp, Artificial Sequence
  Synthetic oligonucleotide; GAG chr11 5176952 5176971 5176955 -
aaaagctagagaagattaag

SEQ ID NO: 54356 - DNA, 20 bp, Artificial Sequence
  Synthetic oligonucleotide; AAG chr11 5176939 5176958 5176942 -
gattaaggagaatattttcc

SEQ ID NO: 54357 - DNA, 20 bp, Artificial Sequence
  Synthetic oligonucleotide; AAG chr11 5176922 5176941 5176925 -
tccaagaaacttaaataaaa

SEQ ID NO: 54358 - DNA, 20 bp, Artificial Sequence
  Synthetic oligonucleotide; CAG chr11 5176909 5176928 5176912 -
aataaaaaagaatgtaatcc

SEQ ID NO: 54359 - DNA, 20 bp, Artificial Sequence
  Synthetic oligonucleotide; AAG chr11 5176903 5176922 5176906 -
aaagaatgtaatcccagcaa

SEQ ID NO: 54360 - DNA, 20 bp, Artificial Sequence
  Synthetic oligonucleotide; CAG chr11 5176878 5176897 5176881 -
attatctatgatattatcta

SEQ ID NO: 54361 - DNA, 20 bp, Artificial Sequence
  Synthetic oligonucleotide; AAG chr11 5176820 5176839 5176823 -
ttacaatctctccttcttaa

SEQ ID NO: 54362 - DNA, 20 bp, Artificial Sequence
  Synthetic oligonucleotide; TAG chr11 5176815 5176834 5176818 -
atctctccttcttaaaagcc

SEQ ID NO: 54363 - DNA, 20 bp, Artificial Sequence
  Synthetic oligonucleotide; GAG chr11 5176801 5176820 5176804 -
aaagcctagaacaatgccat

SEQ ID NO: 54364 - DNA, 20 bp, Artificial Sequence
  Synthetic oligonucleotide; AAG chr11 5176767 5176786 5176770 -
aatgaccttatttacaccta

SEQ ID NO: 54365 - DNA, 20 bp, Artificial Sequence
  Synthetic oligonucleotide; AAG chr11 5176763 5176782 5176766 -
accttatttacacctaaaga

SEQ ID NO: 54366 - DNA, 20 bp, Artificial Sequence
  Synthetic oligonucleotide; GAG chr11 5176744 5176763 5176747 -
aaagacaaaaaaaaaacttt

SEQ ID NO: 54367 - DNA, 20 bp, Artificial Sequence
  Synthetic oligonucleotide; GAG chr11 5176735 5176754 5176738 -
aaaaaaactttgagaaatct

SEQ ID NO: 54368 - DNA, 20 bp, Artificial Sequence
  Synthetic oligonucleotide; AGG chr11 5176734 5176753 5176737 -
aaaaaactttgagaaatctg

SEQ ID NO: 54369 - DNA, 20 bp, Artificial Sequence
  Synthetic oligonucleotide; TGG chr11 5176698 5176717 5176701 -
acttgaaatctactcatgct

SEQ ID NO: 54370 - DNA, 20 bp, Artificial Sequence
  Synthetic oligonucleotide; TAG chr11 5176687 5176706 5176690 -
actcatgcttggcttatgct

SEQ ID NO: 54371 - DNA, 20 bp, Artificial Sequence
  Synthetic oligonucleotide; TAG chr11 5176666 5176685 5176669 -
agctttttctgtgattttta

SEQ ID NO: 54372 - DNA, 20 bp, Artificial Sequence
  Synthetic oligonucleotide; TAG chr11 5176640 5176659 5176643 -
tttatacatgtattaacact

SEQ ID NO: 54373 - DNA, 20 bp, Artificial Sequence
  Synthetic oligonucleotide; TGG chr11 5176597 5176616 5176600 -
aatttatctacatttatatg

SEQ ID NO: 54374 - DNA, 20 bp, Artificial Sequence
  Synthetic oligonucleotide; AAG chr11 5176508 5176527 5176511 -
acacacacgtttgtgcacca

SEQ ID NO: 54375 - DNA, 20 bp, Artificial Sequence
  Synthetic oligonucleotide; AAG chr11 5176502 5176521 5176505 -
acgtttgtgcaccaaagaat

SEQ ID NO: 54376 - DNA, 20 bp, Artificial Sequence
  Synthetic oligonucleotide; AAG chr11 5176498 5176517 5176501 -
ttgtgcaccaaagaataaga

SEQ ID NO: 54377 - DNA, 20 bp, Artificial Sequence
  Synthetic oligonucleotide; TAG chr11 5176494 5176513 5176497 -
gcaccaaagaataagaaagt

SEQ ID NO: 54378 - DNA, 20 bp, Artificial Sequence
  Synthetic oligonucleotide; TAG chr11 5176488 5176507 5176491 -
aagaataagaaagttagaaa

SEQ ID NO: 54379 - DNA, 20 bp, Artificial Sequence
  Synthetic oligonucleotide; CAG chr11 5176477 5176496 5176480 -
agttagaaatagacttccta

SEQ ID NO: 54380 - DNA, 20 bp, Artificial Sequence
  Synthetic oligonucleotide; TGG chr11 5176462 5176481 5176465 -
tcctacagtatttccattat

SEQ ID NO: 54381 - DNA, 20 bp, Artificial Sequence
  Synthetic oligonucleotide; GGG chr11 5176461 5176480 5176464 -
cctacagtatttccattatt

SEQ ID NO: 54382 - DNA, 20 bp, Artificial Sequence
  Synthetic oligonucleotide; AAG chr11 5176458 5176477 5176461 -
acagtatttccattattggg

SEQ ID NO: 54383 - DNA, 20 bp, Artificial Sequence
  Synthetic oligonucleotide; AGG chr11 5176457 5176476 5176460 -
cagtatttccattattggga

SEQ ID NO: 54384 - DNA, 20 bp, Artificial Sequence
  Synthetic oligonucleotide; GGG chr11 5176456 5176475 5176459 -
agtatttccattattgggaa

SEQ ID NO: 54385 - DNA, 20 bp, Artificial Sequence
  Synthetic oligonucleotide; GAG chr11 5176454 5176473 5176457 -
tatttccattattgggaagg

SEQ ID NO: 54386 - DNA, 20 bp, Artificial Sequence
  Synthetic oligonucleotide; TAG chr11 5176408 5176427 5176411 -
tctaattaatttgtttctgc

SEQ ID NO: 54387 - DNA, 20 bp, Artificial Sequence
  Synthetic oligonucleotide; AAG chr11 5176388 5176407 5176391 -
tagtactacactaaatattt

SEQ ID NO: 54388 - DNA, 20 bp, Artificial Sequence
  Synthetic oligonucleotide; CAG chr11 5176348 5176367 5176351 -
ttcaaaatatttgcatttct

SEQ ID NO: 54389 - DNA, 20 bp, Artificial Sequence
  Synthetic oligonucleotide; TAG chr11 5176325 5176344 5176328 -
tacatctgttaaacttcata

SEQ ID NO: 54390 - DNA, 20 bp, Artificial Sequence
  Synthetic oligonucleotide; TGG chr11 5176295 5176314 5176298 -
ttctactctacacaatgttt

SEQ ID NO: 54391 - DNA, 20 bp, Artificial Sequence
  Synthetic oligonucleotide; CAG chr11 5176268 5176287 5176271 -
tctaatgtgaaatttacact

SEQ ID NO: 54392 - DNA, 20 bp, Artificial Sequence
  Synthetic oligonucleotide; AAG chr11 5176247 5176266 5176250 -
agcgttgcatttctccataa

SEQ ID NO: 54393 - DNA, 20 bp, Artificial Sequence
  Synthetic oligonucleotide; TGG chr11 5176233 5176252 5176236 -
ccataaaagtaataatatga

SEQ ID NO: 54394 - DNA, 20 bp, Artificial Sequence
  Synthetic oligonucleotide; GAG chr11 5176225 5176244 5176228 -
gtaataatatgatggaaaat

SEQ ID NO: 54395 - DNA, 20 bp, Artificial Sequence
  Synthetic oligonucleotide; AGG chr11 5176224 5176243 5176227 -
taataatatgatggaaaatg

SEQ ID NO: 54396 - DNA, 20 bp, Artificial Sequence
  Synthetic oligonucleotide; GGG chr11 5176223 5176242 5176226 -
aataatatgatggaaaatga

SEQ ID NO: 54397 - DNA, 20 bp, Artificial Sequence
  Synthetic oligonucleotide; TAG chr11 5176218 5176237 5176221 -
tatgatggaaaatgagggaa

SEQ ID NO: 54398 - DNA, 20 bp, Artificial Sequence
  Synthetic oligonucleotide; TAG chr11 5176214 5176233 5176217 -
atggaaaatgagggaataga

SEQ ID NO: 54399 - DNA, 20 bp, Artificial Sequence
  Synthetic oligonucleotide; CAG chr11 5176207 5176226 5176210 -
atgagggaatagatagattg

SEQ ID NO: 54400 - DNA, 20 bp, Artificial Sequence
  Synthetic oligonucleotide; CAG chr11 5176196 5176215 5176199 -
gatagattgcagtatgatga

SEQ ID NO: 54401 - DNA, 20 bp, Artificial Sequence
  Synthetic oligonucleotide; GAG chr11 5176194 5176213 5176197 -
tagattgcagtatgatgaca

SEQ ID NO: 54402 - DNA, 20 bp, Artificial Sequence
  Synthetic oligonucleotide; AGG chr11 5176193 5176212 5176196 -
agattgcagtatgatgacag

SEQ ID NO: 54403 - DNA, 20 bp, Artificial Sequence
  Synthetic oligonucleotide; AAG chr11 5176180 5176199 5176183 -
atgacagaggatttgactga

SEQ ID NO: 54404 - DNA, 20 bp, Artificial Sequence
  Synthetic oligonucleotide; AGG chr11 5176179 5176198 5176182 -
tgacagaggatttgactgaa

SEQ ID NO: 54405 - DNA, 20 bp, Artificial Sequence
  Synthetic oligonucleotide; TAG chr11 5176176 5176195 5176179 -
cagaggatttgactgaaagg

SEQ ID NO: 54406 - DNA, 20 bp, Artificial Sequence
  Synthetic oligonucleotide; AGG chr11 5176175 5176194 5176178 -
agaggatttgactgaaaggt

SEQ ID NO: 54407 - DNA, 20 bp, Artificial Sequence
  Synthetic oligonucleotide; AAG chr11 5176172 5176191 5176175 -
ggatttgactgaaaggtagg

SEQ ID NO: 54408 - DNA, 20 bp, Artificial Sequence
  Synthetic oligonucleotide; TAG chr11 5176151 5176170 5176154 -
agattttgtatacttgattt

SEQ ID NO: 54409 - DNA, 20 bp, Artificial Sequence
  Synthetic oligonucleotide; CAG chr11 5176148 5176167 5176151 -
ttttgtatacttgattttag

SEQ ID NO: 54410 - DNA, 20 bp, Artificial Sequence
  Synthetic oligonucleotide; TGG chr11 5176145 5176164 5176148 -
tgtatacttgattttagcag

SEQ ID NO: 54411 - DNA, 20 bp, Artificial Sequence
  Synthetic oligonucleotide; GGG chr11 5176144 5176163 5176147 -
gtatacttgattttagcagt

SEQ ID NO: 54412 - DNA, 20 bp, Artificial Sequence
  Synthetic oligonucleotide; GGG chr11 5176143 5176162 5176146 -
tatacttgattttagcagtg

SEQ ID NO: 54413 - DNA, 20 bp, Artificial Sequence
  Synthetic oligonucleotide; GAG chr11 5176141 5176160 5176144 -
tacttgattttagcagtggg

SEQ ID NO: 54414 - DNA, 20 bp, Artificial Sequence
  Synthetic oligonucleotide; AAG chr11 5176136 5176155 5176139 -
gattttagcagtggggagct

SEQ ID NO: 54415 - DNA, 20 bp, Artificial Sequence
  Synthetic oligonucleotide; TAG chr11 5176086 5176105 5176089 -
atgcaacatgatatcttaaa

SEQ ID NO: 54416 - DNA, 20 bp, Artificial Sequence
  Synthetic oligonucleotide; AGG chr11 5176085 5176104 5176088 -
tgcaacatgatatcttaaat

SEQ ID NO: 54417 - DNA, 20 bp, Artificial Sequence
  Synthetic oligonucleotide; TAG chr11 5176050 5176069 5176053 -
tataatcatatatacatata

SEQ ID NO: 54418 - DNA, 20 bp, Artificial Sequence
  Synthetic oligonucleotide; CAG chr11 5176042 5176061 5176045 -
tatatacatatatagctaca

SEQ ID NO: 54419 - DNA, 20 bp, Artificial Sequence
  Synthetic oligonucleotide; CAG chr11 5176017 5176036 5176020 -
acatatacatgtcattttga

SEQ ID NO: 54420 - DNA, 20 bp, Artificial Sequence
  Synthetic oligonucleotide; TGG chr11 5176008 5176027 5176011 -
tgtcattttgacagttaaaa

SEQ ID NO: 54421 - DNA, 20 bp, Artificial Sequence
  Synthetic oligonucleotide; TAG chr11 5176005 5176024 5176008 -
cattttgacagttaaaatgg

SEQ ID NO: 54422 - DNA, 20 bp, Artificial Sequence
  Synthetic oligonucleotide; AAG chr11 5176002 5176021 5176005 -
tttgacagttaaaatggtag

SEQ ID NO: 54423 - DNA, 20 bp, Artificial Sequence
  Synthetic oligonucleotide; CAG chr11 5175962 5175981 5175965 -
acaatctctaaataaacttt

SEQ ID NO: 54424 - DNA, 20 bp, Artificial Sequence
  Synthetic oligonucleotide; GAG chr11 5175957 5175976 5175960 -
ctctaaataaactttcagtt

SEQ ID NO: 54425 - DNA, 20 bp, Artificial Sequence
  Synthetic oligonucleotide; CAG chr11 5175950 5175969 5175953 -
taaactttcagttgagcact

SEQ ID NO: 54426 - DNA, 20 bp, Artificial Sequence
  Synthetic oligonucleotide; AAG chr11 5175940 5175959 5175943 -
gttgagcactcagattctga

SEQ ID NO: 54427 - DNA, 20 bp, Artificial Sequence
  Synthetic oligonucleotide; AGG chr11 5175939 5175958 5175942 -
ttgagcactcagattctgaa

SEQ ID NO: 54428 - DNA, 20 bp, Artificial Sequence
  Synthetic oligonucleotide; TAG chr11 5175933 5175952 5175936 -
actcagattctgaaaggatt

SEQ ID NO: 54429 - DNA, 20 bp, Artificial Sequence
  Synthetic oligonucleotide; AGG chr11 5175932 5175951 5175935 -
ctcagattctgaaaggattt

SEQ ID NO: 54430 - DNA, 20 bp, Artificial Sequence
  Synthetic oligonucleotide; TGG chr11 5175926 5175945 5175929 -
ttctgaaaggatttaggaaa

SEQ ID NO: 54431 - DNA, 20 bp, Artificial Sequence
  Synthetic oligonucleotide; CAG chr11 5175912 5175931 5175915 -
aggaaatggctgttgctatg

SEQ ID NO: 54432 - DNA, 20 bp, Artificial Sequence
  Synthetic oligonucleotide; GAG chr11 5175889 5175908 5175892 -
ctgctgaatttaacattact

SEQ ID NO: 54433 - DNA, 20 bp, Artificial Sequence
  Synthetic oligonucleotide; TGG chr11 5175877 5175896 5175880 -
acattactgagccattgccc

SEQ ID NO: 54434 - DNA, 20 bp, Artificial Sequence
  Synthetic oligonucleotide; GAG chr11 5175870 5175889 5175873 -
tgagccattgccctggacat

SEQ ID NO: 54435 - DNA, 20 bp, Artificial Sequence
  Synthetic oligonucleotide; AAG chr11 5175867 5175886 5175870 -
gccattgccctggacatgag

SEQ ID NO: 54436 - DNA, 20 bp, Artificial Sequence
  Synthetic oligonucleotide; AAG chr11 5175864 5175883 5175867 -
attgccctggacatgagaag

SEQ ID NO: 54437 - DNA, 20 bp, Artificial Sequence
  Synthetic oligonucleotide; CAG chr11 5175835 5175854 5175838 -
tgttctactgtctccttaac

SEQ ID NO: 54438 - DNA, 20 bp, Artificial Sequence
  Synthetic oligonucleotide; CAG chr11 5175824 5175843 5175827 -
ctccttaaccagtaatcctt

SEQ ID NO: 54439 - DNA, 20 bp, Artificial Sequence
  Synthetic oligonucleotide; CAG chr11 5175821 5175840 5175824 -
cttaaccagtaatccttcag

SEQ ID NO: 54440 - DNA, 20 bp, Artificial Sequence
  Synthetic oligonucleotide; AGG chr11 5175820 5175839 5175823 -
ttaaccagtaatccttcagc

SEQ ID NO: 54441 - DNA, 20 bp, Artificial Sequence
  Synthetic oligonucleotide; AAG chr11 5175817 5175836 5175820 -
accagtaatccttcagcagg

SEQ ID NO: 54442 - DNA, 20 bp, Artificial Sequence
  Synthetic oligonucleotide; AGG chr11 5175816 5175835 5175819 -
ccagtaatccttcagcagga

SEQ ID NO: 54443 - DNA, 20 bp, Artificial Sequence
  Synthetic oligonucleotide; GGG chr11 5175815 5175834 5175818 -
cagtaatccttcagcaggaa

SEQ ID NO: 54444 - DNA, 20 bp, Artificial Sequence
  Synthetic oligonucleotide; AAG chr11 5175811 5175830 5175814 -
aatccttcagcaggaaggga

SEQ ID NO: 54445 - DNA, 20 bp, Artificial Sequence
  Synthetic oligonucleotide; AGG chr11 5175810 5175829 5175813 -
atccttcagcaggaagggaa

SEQ ID NO: 54446 - DNA, 20 bp, Artificial Sequence
  Synthetic oligonucleotide; GGG chr11 5175809 5175828 5175812 -
tccttcagcaggaagggaaa

SEQ ID NO: 54447 - DNA, 20 bp, Artificial Sequence
  Synthetic oligonucleotide; AAG chr11 5175805 5175824 5175808 -
tcagcaggaagggaaaggga

SEQ ID NO: 54448 - DNA, 20 bp, Artificial Sequence
  Synthetic oligonucleotide; AGG chr11 5175804 5175823 5175807 -
cagcaggaagggaaagggaa

SEQ ID NO: 54449 - DNA, 20 bp, Artificial Sequence
  Synthetic oligonucleotide; GGG chr11 5175803 5175822 5175806 -
agcaggaagggaaagggaaa

SEQ ID NO: 54450 - DNA, 20 bp, Artificial Sequence
  Synthetic oligonucleotide; AAG chr11 5175799 5175818 5175802 -
ggaagggaaagggaaaggga

SEQ ID NO: 54451 - DNA, 20 bp, Artificial Sequence
  Synthetic oligonucleotide; AGG chr11 5175798 5175817 5175801 -
gaagggaaagggaaagggaa

SEQ ID NO: 54452 - DNA, 20 bp, Artificial Sequence
  Synthetic oligonucleotide; GGG chr11 5175797 5175816 5175800 -
aagggaaagggaaagggaaa

SEQ ID NO: 54453 - DNA, 20 bp, Artificial Sequence
  Synthetic oligonucleotide; AAG chr11 5175793 5175812 5175796 -
gaaagggaaagggaaaggga

SEQ ID NO: 54454 - DNA, 20 bp, Artificial Sequence
  Synthetic oligonucleotide; AGG chr11 5175792 5175811 5175795 -
aaagggaaagggaaagggaa

SEQ ID NO: 54455 - DNA, 20 bp, Artificial Sequence
  Synthetic oligonucleotide; GGG chr11 5175791 5175810 5175794 -
aagggaaagggaaagggaaa

SEQ ID NO: 54456 - DNA, 20 bp, Artificial Sequence
  Synthetic oligonucleotide; AAG chr11 5175787 5175806 5175790 -
gaaagggaaagggaaaggga

SEQ ID NO: 54457 - DNA, 20 bp, Artificial Sequence
  Synthetic oligonucleotide; AGG chr11 5175786 5175805 5175789 -
aaagggaaagggaaagggaa

SEQ ID NO: 54458 - DNA, 20 bp, Artificial Sequence
  Synthetic oligonucleotide; GGG chr11 5175785 5175804 5175788 -
aagggaaagggaaagggaaa

SEQ ID NO: 54459 - DNA, 20 bp, Artificial Sequence
  Synthetic oligonucleotide; AAG chr11 5175781 5175800 5175784 -
gaaagggaaagggaaaggga

SEQ ID NO: 54460 - DNA, 20 bp, Artificial Sequence
  Synthetic oligonucleotide; AGG chr11 5175780 5175799 5175783 -
aaagggaaagggaaagggaa

SEQ ID NO: 54461 - DNA, 20 bp, Artificial Sequence
  Synthetic oligonucleotide; GGG chr11 5175779 5175798 5175782 -
aagggaaagggaaagggaaa

SEQ ID NO: 54462 - DNA, 20 bp, Artificial Sequence
  Synthetic oligonucleotide; GAG chr11 5175777 5175796 5175780 -
gggaaagggaaagggaaagg

SEQ ID NO: 54463 - DNA, 20 bp, Artificial Sequence
  Synthetic oligonucleotide; AGG chr11 5175776 5175795 5175779 -
ggaaagggaaagggaaaggg

SEQ ID NO: 54464 - DNA, 20 bp, Artificial Sequence
  Synthetic oligonucleotide; GGG chr11 5175775 5175794 5175778 -
gaaagggaaagggaaaggga

SEQ ID NO: 54465 - DNA, 20 bp, Artificial Sequence
  Synthetic oligonucleotide; AAG chr11 5175772 5175791 5175775 -
agggaaagggaaagggaggg

SEQ ID NO: 54466 - DNA, 20 bp, Artificial Sequence
  Synthetic oligonucleotide; AGG chr11 5175771 5175790 5175774 -
gggaaagggaaagggaggga

SEQ ID NO: 54467 - DNA, 20 bp, Artificial Sequence
  Synthetic oligonucleotide; GGG chr11 5175770 5175789 5175773 -
ggaaagggaaagggagggaa

SEQ ID NO: 54468 - DNA, 20 bp, Artificial Sequence
  Synthetic oligonucleotide; AAG chr11 5175766 5175785 5175769 -
agggaaagggagggaaggga

SEQ ID NO: 54469 - DNA, 20 bp, Artificial Sequence
  Synthetic oligonucleotide; AGG chr11 5175765 5175784 5175768 -
gggaaagggagggaagggaa

SEQ ID NO: 54470 - DNA, 20 bp, Artificial Sequence
  Synthetic oligonucleotide; AAG chr11 5175761 5175780 5175764 -
aagggagggaagggaaagga

SEQ ID NO: 54471 - DNA, 20 bp, Artificial Sequence
  Synthetic oligonucleotide; AGG chr11 5175760 5175779 5175763 -
agggagggaagggaaaggaa

SEQ ID NO: 54472 - DNA, 20 bp, Artificial Sequence
  Synthetic oligonucleotide; GGG chr11 5175759 5175778 5175762 -
gggagggaagggaaaggaaa

SEQ ID NO: 54473 - DNA, 20 bp, Artificial Sequence
  Synthetic oligonucleotide; AAG chr11 5175756 5175775 5175759 -
agggaagggaaaggaaaggg

SEQ ID NO: 54474 - DNA, 20 bp, Artificial Sequence
  Synthetic oligonucleotide; AGG chr11 5175755 5175774 5175758 -
gggaagggaaaggaaaggga

SEQ ID NO: 54475 - DNA, 20 bp, Artificial Sequence
  Synthetic oligonucleotide; GGG chr11 5175754 5175773 5175757 -
ggaagggaaaggaaagggaa

SEQ ID NO: 54476 - DNA, 20 bp, Artificial Sequence
  Synthetic oligonucleotide; AAG chr11 5175751 5175770 5175754 -
agggaaaggaaagggaaggg

SEQ ID NO: 54477 - DNA, 20 bp, Artificial Sequence
  Synthetic oligonucleotide; AGG chr11 5175750 5175769 5175753 -
gggaaaggaaagggaaggga

SEQ ID NO: 54478 - DNA, 20 bp, Artificial Sequence
  Synthetic oligonucleotide; AAG chr11 5175746 5175765 5175749 -
aaggaaagggaagggaagga

SEQ ID NO: 54479 - DNA, 20 bp, Artificial Sequence
  Synthetic oligonucleotide; AGG chr11 5175745 5175764 5175748 -
aggaaagggaagggaaggaa

SEQ ID NO: 54480 - DNA, 20 bp, Artificial Sequence
  Synthetic oligonucleotide; AAG chr11 5175741 5175760 5175744 -
aagggaagggaaggaaagga

SEQ ID NO: 54481 - DNA, 20 bp, Artificial Sequence
  Synthetic oligonucleotide; AGG chr11 5175740 5175759 5175743 -
agggaagggaaggaaaggaa

SEQ ID NO: 54482 - DNA, 20 bp, Artificial Sequence
  Synthetic oligonucleotide; AAG chr11 5175734 5175753 5175737 -
gggaaggaaaggaaaggaaa

SEQ ID NO: 54483 - DNA, 20 bp, Artificial Sequence
  Synthetic oligonucleotide; AGG chr11 5175733 5175752 5175736 -
ggaaggaaaggaaaggaaaa

SEQ ID NO: 54484 - DNA, 20 bp, Artificial Sequence
  Synthetic oligonucleotide; AAG chr11 5175729 5175748 5175732 -
ggaaaggaaaggaaaaagga

SEQ ID NO: 54485 - DNA, 20 bp, Artificial Sequence
  Synthetic oligonucleotide; AGG chr11 5175728 5175747 5175731 -
gaaaggaaaggaaaaaggaa

SEQ ID NO: 54486 - DNA, 20 bp, Artificial Sequence
  Synthetic oligonucleotide; AAG chr11 5175724 5175743 5175727 -
ggaaaggaaaaaggaaagga

SEQ ID NO: 54487 - DNA, 20 bp, Artificial Sequence
  Synthetic oligonucleotide; AGG chr11 5175723 5175742 5175726 -
gaaaggaaaaaggaaaggaa

SEQ ID NO: 54488 - DNA, 20 bp, Artificial Sequence
  Synthetic oligonucleotide; AAG chr11 5175719 5175738 5175722 -
ggaaaaaggaaaggaaagga

SEQ ID NO: 54489 - DNA, 20 bp, Artificial Sequence
  Synthetic oligonucleotide; AGG chr11 5175718 5175737 5175721 -
gaaaaaggaaaggaaaggaa

SEQ ID NO: 54490 - DNA, 20 bp, Artificial Sequence
  Synthetic oligonucleotide; AAG chr11 5175714 5175733 5175717 -
aaggaaaggaaaggaaagga

SEQ ID NO: 54491 - DNA, 20 bp, Artificial Sequence
  Synthetic oligonucleotide; AGG chr11 5175713 5175732 5175716 -
aggaaaggaaaggaaaggaa

SEQ ID NO: 54492 - DNA, 20 bp, Artificial Sequence
  Synthetic oligonucleotide; AAG chr11 5175709 5175728 5175712 -
aaggaaaggaaaggaaagga

SEQ ID NO: 54493 - DNA, 20 bp, Artificial Sequence
  Synthetic oligonucleotide; AGG chr11 5175708 5175727 5175711 -
aggaaaggaaaggaaaggaa

SEQ ID NO: 54494 - DNA, 20 bp, Artificial Sequence
  Synthetic oligonucleotide; AAG chr11 5175704 5175723 5175707 -
aaggaaaggaaaggaaagga

SEQ ID NO: 54495 - DNA, 20 bp, Artificial Sequence
  Synthetic oligonucleotide; AGG chr11 5175703 5175722 5175706 -
aggaaaggaaaggaaaggaa

SEQ ID NO: 54496 - DNA, 20 bp, Artificial Sequence
  Synthetic oligonucleotide; AAG chr11 5175699 5175718 5175702 -
aaggaaaggaaaggaaagga

SEQ ID NO: 54497 - DNA, 20 bp, Artificial Sequence
  Synthetic oligonucleotide; AGG chr11 5175698 5175717 5175701 -
aggaaaggaaaggaaaggaa

SEQ ID NO: 54498 - DNA, 20 bp, Artificial Sequence
  Synthetic oligonucleotide; AAG chr11 5175694 5175713 5175697 -
aaggaaaggaaaggaaagga

SEQ ID NO: 54499 - DNA, 20 bp, Artificial Sequence
  Synthetic oligonucleotide; AGG chr11 5175693 5175712 5175696 -
aggaaaggaaaggaaaggaa

SEQ ID NO: 54500 - DNA, 20 bp, Artificial Sequence
  Synthetic oligonucleotide; AAG chr11 5175683 5175702 5175686 -
aggaaaggaaaggtccaaaa

SEQ ID NO: 54501 - DNA, 20 bp, Artificial Sequence
  Synthetic oligonucleotide; AGG chr11 5175682 5175701 5175685 -
ggaaaggaaaggtccaaaaa

SEQ ID NO: 54502 - DNA, 20 bp, Artificial Sequence
  Synthetic oligonucleotide; GGG chr11 5175681 5175700 5175684 -
gaaaggaaaggtccaaaaaa

SEQ ID NO: 54503 - DNA, 20 bp, Artificial Sequence
  Synthetic oligonucleotide; CAG chr11 5175678 5175697 5175681 -
aggaaaggtccaaaaaaggg

SEQ ID NO: 54504 - DNA, 20 bp, Artificial Sequence
  Synthetic oligonucleotide; AAG chr11 5175659 5175678 5175662 -
gcagaaaccaaacaatttta

SEQ ID NO: 54505 - DNA, 20 bp, Artificial Sequence
  Synthetic oligonucleotide; CAG chr11 5175656 5175675 5175659 -
gaaaccaaacaattttaaag

SEQ ID NO: 54506 - DNA, 20 bp, Artificial Sequence
  Synthetic oligonucleotide; AGG chr11 5175655 5175674 5175658 -
aaaccaaacaattttaaagc

SEQ ID NO: 54507 - DNA, 20 bp, Artificial Sequence
  Synthetic oligonucleotide; GGG chr11 5175654 5175673 5175657 -
aaccaaacaattttaaagca

SEQ ID NO: 54508 - DNA, 20 bp, Artificial Sequence
  Synthetic oligonucleotide; GAG chr11 5175652 5175671 5175655 -
ccaaacaattttaaagcagg

SEQ ID NO: 54509 - DNA, 20 bp, Artificial Sequence
  Synthetic oligonucleotide; TGG chr11 5175646 5175665 5175649 -
aattttaaagcagggagttt

SEQ ID NO: 54510 - DNA, 20 bp, Artificial Sequence
  Synthetic oligonucleotide; AAG chr11 5175643 5175662 5175646 -
tttaaagcagggagttttgg

SEQ ID NO: 54511 - DNA, 20 bp, Artificial Sequence
  Synthetic oligonucleotide; TAG chr11 5175636 5175655 5175639 -
cagggagttttggaagcact

SEQ ID NO: 54512 - DNA, 20 bp, Artificial Sequence
  Synthetic oligonucleotide; TGG chr11 5175621 5175640 5175624 -
gcacttagctaaaactgata

SEQ ID NO: 54513 - DNA, 20 bp, Artificial Sequence
  Synthetic oligonucleotide; TAG chr11 5175613 5175632 5175616 -
ctaaaactgatatggtgttc

SEQ ID NO: 54514 - DNA, 20 bp, Artificial Sequence
  Synthetic oligonucleotide; CAG chr11 5175609 5175628 5175612 -
aactgatatggtgttctaga

SEQ ID NO: 54515 - DNA, 20 bp, Artificial Sequence
  Synthetic oligonucleotide; TAG chr11 5175603 5175622 5175606 -
tatggtgttctagacagaat

SEQ ID NO: 54516 - DNA, 20 bp, Artificial Sequence
  Synthetic oligonucleotide; AAG chr11 5175584 5175603 5175587 -
ttagcaaaaacaaaaaacaa

SEQ ID NO: 54517 - DNA, 20 bp, Artificial Sequence
  Synthetic oligonucleotide; AGG chr11 5175583 5175602 5175586 -
tagcaaaaacaaaaaacaaa

SEQ ID NO: 54518 - DNA, 20 bp, Artificial Sequence
  Synthetic oligonucleotide; CAG chr11 5175578 5175597 5175581 -
aaaacaaaaaacaaaaggta

SEQ ID NO: 54519 - DNA, 20 bp, Artificial Sequence
  Synthetic oligonucleotide; AGG chr11 5175577 5175596 5175580 -
aaacaaaaaacaaaaggtac

SEQ ID NO: 54520 - DNA, 20 bp, Artificial Sequence
  Synthetic oligonucleotide; GGG chr11 5175576 5175595 5175579 -
aacaaaaaacaaaaggtaca

SEQ ID NO: 54521 - DNA, 20 bp, Artificial Sequence
  Synthetic oligonucleotide; AAG chr11 5175569 5175588 5175572 -
aacaaaaggtacagggtgct

SEQ ID NO: 54522 - DNA, 20 bp, Artificial Sequence
  Synthetic oligonucleotide; AAG chr11 5175558 5175577 5175561 -
cagggtgctaagtgattgat

SEQ ID NO: 54523 - DNA, 20 bp, Artificial Sequence
  Synthetic oligonucleotide; AGG chr11 5175557 5175576 5175560 -
agggtgctaagtgattgata

SEQ ID NO: 54524 - DNA, 20 bp, Artificial Sequence
  Synthetic oligonucleotide; GAG chr11 5175553 5175572 5175556 -
tgctaagtgattgataaggt

SEQ ID NO: 54525 - DNA, 20 bp, Artificial Sequence
  Synthetic oligonucleotide; TAG chr11 5175548 5175567 5175551 -
agtgattgataaggtgagaa

SEQ ID NO: 54526 - DNA, 20 bp, Artificial Sequence
  Synthetic oligonucleotide; GAG chr11 5175535 5175554 5175538 -
gtgagaatagtatttcaaat

SEQ ID NO: 54527 - DNA, 20 bp, Artificial Sequence
  Synthetic oligonucleotide; AAG chr11 5175531 5175550 5175534 -
gaatagtatttcaaatgagc

SEQ ID NO: 54528 - DNA, 20 bp, Artificial Sequence
  Synthetic oligonucleotide; GAG chr11 5175529 5175548 5175532 -
atagtatttcaaatgagcaa

SEQ ID NO: 54529 - DNA, 20 bp, Artificial Sequence
  Synthetic oligonucleotide; AAG chr11 5175522 5175541 5175525 -
ttcaaatgagcaagagatcc

SEQ ID NO: 54530 - DNA, 20 bp, Artificial Sequence
  Synthetic oligonucleotide; CAG chr11 5175517 5175536 5175520 -
atgagcaagagatccaagac

SEQ ID NO: 54531 - DNA, 20 bp, Artificial Sequence
  Synthetic oligonucleotide; CAG chr11 5175506 5175525 5175509 -
atccaagaccagtaccacta

SEQ ID NO: 54532 - DNA, 20 bp, Artificial Sequence
  Synthetic oligonucleotide; GAG chr11 5175486 5175505 5175489 -
cagactattgttttataact

SEQ ID NO: 54533 - DNA, 20 bp, Artificial Sequence
  Synthetic oligonucleotide; AGG chr11 5175485 5175504 5175488 -
agactattgttttataactg

SEQ ID NO: 54534 - DNA, 20 bp, Artificial Sequence
  Synthetic oligonucleotide; TAG chr11 5175479 5175498 5175482 -
ttgttttataactgaggtct

SEQ ID NO: 54535 - DNA, 20 bp, Artificial Sequence
  Synthetic oligonucleotide; AAG chr11 5175464 5175483 5175467 -
ggtcttagttaatatcaatc

SEQ ID NO: 54536 - DNA, 20 bp, Artificial Sequence
  Synthetic oligonucleotide; CGG chr11 5175447 5175466 5175450 -
atcaagcaaaattttgattt

SEQ ID NO: 54537 - DNA, 20 bp, Artificial Sequence
  Synthetic oligonucleotide; GGG chr11 5175446 5175465 5175449 -
tcaagcaaaattttgatttc

SEQ ID NO: 54538 - DNA, 20 bp, Artificial Sequence
  Synthetic oligonucleotide; GGG chr11 5175445 5175464 5175448 -
caagcaaaattttgatttcg

SEQ ID NO: 54539 - DNA, 20 bp, Artificial Sequence
  Synthetic oligonucleotide; GGG chr11 5175444 5175463 5175447 -
aagcaaaattttgatttcgg

SEQ ID NO: 54540 - DNA, 20 bp, Artificial Sequence
  Synthetic oligonucleotide; GGG chr11 5175443 5175462 5175446 -
agcaaaattttgatttcggg

SEQ ID NO: 54541 - DNA, 20 bp, Artificial Sequence
  Synthetic oligonucleotide; GAG chr11 5175441 5175460 5175444 -
caaaattttgatttcggggg

SEQ ID NO: 54542 - DNA, 20 bp, Artificial Sequence
  Synthetic oligonucleotide; AAG chr11 5175434 5175453 5175437 -
ttgatttcggggggagaaaa

SEQ ID NO: 54543 - DNA, 20 bp, Artificial Sequence
  Synthetic oligonucleotide; TGG chr11 5175417 5175436 5175420 -
aaaaagaccaaattgtaatc

SEQ ID NO: 54544 - DNA, 20 bp, Artificial Sequence
  Synthetic oligonucleotide; GGG chr11 5175416 5175435 5175419 -
aaaagaccaaattgtaatct

SEQ ID NO: 54545 - DNA, 20 bp, Artificial Sequence
  Synthetic oligonucleotide; GGG chr11 5175415 5175434 5175418 -
aaagaccaaattgtaatctg

SEQ ID NO: 54546 - DNA, 20 bp, Artificial Sequence
  Synthetic oligonucleotide; AAG chr11 5175346 5175365 5175349 -
tgtatatgatatgatcattt

SEQ ID NO: 54547 - DNA, 20 bp, Artificial Sequence
  Synthetic oligonucleotide; AAG chr11 5175340 5175359 5175343 -
tgatatgatcatttaagtat

SEQ ID NO: 54548 - DNA, 20 bp, Artificial Sequence
  Synthetic oligonucleotide; AAG chr11 5175329 5175348 5175332 -
tttaagtataagtcacctga

SEQ ID NO: 54549 - DNA, 20 bp, Artificial Sequence
  Synthetic oligonucleotide; AAG chr11 5175322 5175341 5175325 -
ataagtcacctgaaagtaaa

SEQ ID NO: 54550 - DNA, 20 bp, Artificial Sequence
  Synthetic oligonucleotide; GAG chr11 5175320 5175339 5175323 -
aagtcacctgaaagtaaaaa

SEQ ID NO: 54551 - DNA, 20 bp, Artificial Sequence
  Synthetic oligonucleotide; AAG chr11 5175311 5175330 5175314 -
gaaagtaaaaagagttatat

SEQ ID NO: 54552 - DNA, 20 bp, Artificial Sequence
  Synthetic oligonucleotide; AGG chr11 5175310 5175329 5175313 -
aaagtaaaaagagttatata

SEQ ID NO: 54553 - DNA, 20 bp, Artificial Sequence
  Synthetic oligonucleotide; AAG chr11 5175272 5175291 5175275 -
ataatgttttatgcaactgc

SEQ ID NO: 54554 - DNA, 20 bp, Artificial Sequence
  Synthetic oligonucleotide; TAG chr11 5175263 5175282 5175266 -
tatgcaactgcaagaaccaa

SEQ ID NO: 54555 - DNA, 20 bp, Artificial Sequence
  Synthetic oligonucleotide; AGG chr11 5175262 5175281 5175265 -
atgcaactgcaagaaccaat

SEQ ID NO: 54556 - DNA, 20 bp, Artificial Sequence
  Synthetic oligonucleotide; TAG chr11 5175255 5175274 5175258 -
tgcaagaaccaataggaaaa

SEQ ID NO: 54557 - DNA, 20 bp, Artificial Sequence
  Synthetic oligonucleotide; TGG chr11 5175250 5175269 5175253 -
gaaccaataggaaaatagaa

SEQ ID NO: 54558 - DNA, 20 bp, Artificial Sequence
  Synthetic oligonucleotide; GGG chr11 5175249 5175268 5175252 -
aaccaataggaaaatagaat

SEQ ID NO: 54559 - DNA, 20 bp, Artificial Sequence
  Synthetic oligonucleotide; TAG chr11 5175221 5175240 5175224 -
tgtcacattcaaaatgatga

SEQ ID NO: 54560 - DNA, 20 bp, Artificial Sequence
  Synthetic oligonucleotide; GAG chr11 5175219 5175238 5175222 -
tcacattcaaaatgatgata

SEQ ID NO: 54561 - DNA, 20 bp, Artificial Sequence
  Synthetic oligonucleotide; AGG chr11 5175218 5175237 5175221 -
cacattcaaaatgatgatag

SEQ ID NO: 54562 - DNA, 20 bp, Artificial Sequence
  Synthetic oligonucleotide; CAG chr11 5175214 5175233 5175217 -
ttcaaaatgatgatagaggc

SEQ ID NO: 54563 - DNA, 20 bp, Artificial Sequence
  Synthetic oligonucleotide; TGG chr11 5175208 5175227 5175211 -
atgatgatagaggccagacg

SEQ ID NO: 54564 - DNA, 20 bp, Artificial Sequence
  Synthetic oligonucleotide; TGG chr11 5175205 5175224 5175208 -
atgatagaggccagacgtgg

SEQ ID NO: 54565 - DNA, 20 bp, Artificial Sequence
  Synthetic oligonucleotide; CAG chr11 5175186 5175205 5175189 -
gtggcgcacacctgtaatcc

SEQ ID NO: 54566 - DNA, 20 bp, Artificial Sequence
  Synthetic oligonucleotide; TGG chr11 5175178 5175197 5175181 -
cacctgtaatcccagctaca

SEQ ID NO: 54567 - DNA, 20 bp, Artificial Sequence
  Synthetic oligonucleotide; GGG chr11 5175177 5175196 5175180 -
acctgtaatcccagctacat

SEQ ID NO: 54568 - DNA, 20 bp, Artificial Sequence
  Synthetic oligonucleotide; GAG chr11 5175175 5175194 5175178 -
ctgtaatcccagctacatgg

SEQ ID NO: 54569 - DNA, 20 bp, Artificial Sequence
  Synthetic oligonucleotide; AGG chr11 5175174 5175193 5175177 -
tgtaatcccagctacatggg

SEQ ID NO: 54570 - DNA, 20 bp, Artificial Sequence
  Synthetic oligonucleotide; GAG chr11 5175169 5175188 5175172 -
tcccagctacatgggaggct

SEQ ID NO: 54571 - DNA, 20 bp, Artificial Sequence
  Synthetic oligonucleotide; AGG chr11 5175168 5175187 5175171 -
cccagctacatgggaggctg

SEQ ID NO: 54572 - DNA, 20 bp, Artificial Sequence
  Synthetic oligonucleotide; CAG chr11 5175165 5175184 5175168 -
agctacatgggaggctgagg

SEQ ID NO: 54573 - DNA, 20 bp, Artificial Sequence
  Synthetic oligonucleotide; AGG chr11 5175164 5175183 5175167 -
gctacatgggaggctgaggc

SEQ ID NO: 54574 - DNA, 20 bp, Artificial Sequence
  Synthetic oligonucleotide; GAG chr11 5175162 5175181 5175165 -
tacatgggaggctgaggcag

SEQ ID NO: 54575 - DNA, 20 bp, Artificial Sequence
  Synthetic oligonucleotide; TGG chr11 5175145 5175164 5175148 -
caggagaatgatttgaattc

SEQ ID NO: 54576 - DNA, 20 bp, Artificial Sequence
  Synthetic oligonucleotide; GAG chr11 5175143 5175162 5175146 -
ggagaatgatttgaattctg

SEQ ID NO: 54577 - DNA, 20 bp, Artificial Sequence
  Synthetic oligonucleotide; AGG chr11 5175142 5175161 5175145 -
gagaatgatttgaattctgg

SEQ ID NO: 54578 - DNA, 20 bp, Artificial Sequence
  Synthetic oligonucleotide; CGG chr11 5175139 5175158 5175142 -
aatgatttgaattctggagg

SEQ ID NO: 54579 - DNA, 20 bp, Artificial Sequence
  Synthetic oligonucleotide; GAG chr11 5175137 5175156 5175140 -
tgatttgaattctggaggcg

SEQ ID NO: 54580 - DNA, 20 bp, Artificial Sequence
  Synthetic oligonucleotide; AGG chr11 5175136 5175155 5175139 -
gatttgaattctggaggcgg

SEQ ID NO: 54581 - DNA, 20 bp, Artificial Sequence
  Synthetic oligonucleotide; CAG chr11 5175130 5175149 5175133 -
aattctggaggcggaggttg

SEQ ID NO: 54582 - DNA, 20 bp, Artificial Sequence
  Synthetic oligonucleotide; GAG chr11 5175126 5175145 5175129 -
ctggaggcggaggttgcagt

SEQ ID NO: 54583 - DNA, 20 bp, Artificial Sequence
  Synthetic oligonucleotide; GAG chr11 5175121 5175140 5175124 -
ggcggaggttgcagtgagcc

SEQ ID NO: 54584 - DNA, 20 bp, Artificial Sequence
  Synthetic oligonucleotide; TAG chr11 5175101 5175120 5175104 -
gagatcgcgtcacctcactc

SEQ ID NO: 54585 - DNA, 20 bp, Artificial Sequence
  Synthetic oligonucleotide; TGG chr11 5175096 5175115 5175099 -
cgcgtcacctcactctagcc

SEQ ID NO: 54586 - DNA, 20 bp, Artificial Sequence
  Synthetic oligonucleotide; CAG chr11 5175089 5175108 5175092 -
cctcactctagcctggacca

SEQ ID NO: 54587 - DNA, 20 bp, Artificial Sequence
  Synthetic oligonucleotide; GAG chr11 5175087 5175106 5175090 -
tcactctagcctggaccaca

SEQ ID NO: 54588 - DNA, 20 bp, Artificial Sequence
  Synthetic oligonucleotide; GAG chr11 5175085 5175104 5175088 -
actctagcctggaccacaga

SEQ ID NO: 54589 - DNA, 20 bp, Artificial Sequence
  Synthetic oligonucleotide; GAG chr11 5175083 5175102 5175086 -
tctagcctggaccacagaga

SEQ ID NO: 54590 - DNA, 20 bp, Artificial Sequence
  Synthetic oligonucleotide; AAG chr11 5175037 5175056 5175040 -
atacgtaaaacaaaaacaaa

SEQ ID NO: 54591 - DNA, 20 bp, Artificial Sequence
  Synthetic oligonucleotide; TAG chr11 5175004 5175023 5175007 -
aataaaacccaaaatgataa

SEQ ID NO: 54592 - DNA, 20 bp, Artificial Sequence
  Synthetic oligonucleotide; CAG chr11 5174933 5174952 5174936 -
gtttattgtaacaattctct

SEQ ID NO: 54593 - DNA, 20 bp, Artificial Sequence
  Synthetic oligonucleotide; AAG chr11 5174845 5174864 5174848 -
tttccatttttattgtgata

SEQ ID NO: 54594 - DNA, 20 bp, Artificial Sequence
  Synthetic oligonucleotide; AAG chr11 5174799 5174818 5174802 -
accgtatatcatatataata

SEQ ID NO: 54595 - DNA, 20 bp, Artificial Sequence
  Synthetic oligonucleotide; AAG chr11 5174775 5174794 5174778 -
tcaccatattaaccattttt

SEQ ID NO: 54596 - DNA, 20 bp, Artificial Sequence
  Synthetic oligonucleotide; TGG chr11 5174762 5174781 5174765 -
catttttaagtataattatg

SEQ ID NO: 54597 - DNA, 20 bp, Artificial Sequence
  Synthetic oligonucleotide; AAG chr11 5174692 5174711 5174695 -
ccaaaactttttcatcatcc

SEQ ID NO: 54598 - DNA, 20 bp, Artificial Sequence
  Synthetic oligonucleotide; CAG chr11 5174689 5174708 5174692 -
aaactttttcatcatccaag

SEQ ID NO: 54599 - DNA, 20 bp, Artificial Sequence
  Synthetic oligonucleotide; TAG chr11 5174671 5174690 5174674 -
agcagaaatgctatacttgt

SEQ ID NO: 54600 - DNA, 20 bp, Artificial Sequence
  Synthetic oligonucleotide; AGG chr11 5174670 5174689 5174673 -
gcagaaatgctatacttgtt

SEQ ID NO: 54601 - DNA, 20 bp, Artificial Sequence
  Synthetic oligonucleotide; CAG chr11 5174667 5174686 5174670 -
gaaatgctatacttgttagg

SEQ ID NO: 54602 - DNA, 20 bp, Artificial Sequence
  Synthetic oligonucleotide; CAG chr11 5174656 5174675 5174659 -
cttgttaggcagtaactccc

SEQ ID NO: 54603 - DNA, 20 bp, Artificial Sequence
  Synthetic oligonucleotide; TAG chr11 5174648 5174667 5174651 -
gcagtaactccccagtccca

SEQ ID NO: 54604 - DNA, 20 bp, Artificial Sequence
  Synthetic oligonucleotide; CAG chr11 5174613 5174632 5174616 -
tactatatgtttctctaaat

SEQ ID NO: 54605 - DNA, 20 bp, Artificial Sequence
  Synthetic oligonucleotide; TAG chr11 5174603 5174622 5174606 -
ttctctaaatcagtctattt

SEQ ID NO: 54606 - DNA, 20 bp, Artificial Sequence
  Synthetic oligonucleotide; TAG chr11 5174586 5174605 5174589 -
ttttagataattcatataaa

SEQ ID NO: 54607 - DNA, 20 bp, Artificial Sequence
  Synthetic oligonucleotide; TGG chr11 5174555 5174574 5174558 -
aatatttgttgttttgtgtc

SEQ ID NO: 54608 - DNA, 20 bp, Artificial Sequence
  Synthetic oligonucleotide; AAG chr11 5174535 5174554 5174538 -
tggcttattttacccaacat

SEQ ID NO: 54609 - DNA, 20 bp, Artificial Sequence
  Synthetic oligonucleotide; AGG chr11 5174534 5174553 5174537 -
ggcttattttacccaacata

SEQ ID NO: 54610 - DNA, 20 bp, Artificial Sequence
  Synthetic oligonucleotide; AAG chr11 5174526 5174545 5174529 -
ttacccaacataaggtttca

SEQ ID NO: 54611 - DNA, 20 bp, Artificial Sequence
  Synthetic oligonucleotide; TAG chr11 5174501 5174520 5174504 -
catccatgccataacatgta

SEQ ID NO: 54612 - DNA, 20 bp, Artificial Sequence
  Synthetic oligonucleotide; TGG chr11 5174498 5174517 5174501 -
ccatgccataacatgtatag

SEQ ID NO: 54613 - DNA, 20 bp, Artificial Sequence
  Synthetic oligonucleotide; AAG chr11 5174494 5174513 5174497 -
gccataacatgtatagtggt

SEQ ID NO: 54614 - DNA, 20 bp, Artificial Sequence
  Synthetic oligonucleotide; TAG chr11 5174467 5174486 5174470 -
tgcttaatgttgtccattca

SEQ ID NO: 54615 - DNA, 20 bp, Artificial Sequence
  Synthetic oligonucleotide; TGG chr11 5174459 5174478 5174462 -
gttgtccattcatagattct

SEQ ID NO: 54616 - DNA, 20 bp, Artificial Sequence
  Synthetic oligonucleotide; AAG chr11 5174443 5174462 5174446 -
ttcttggaaactgaaacttt

SEQ ID NO: 54617 - DNA, 20 bp, Artificial Sequence
  Synthetic oligonucleotide; AAG chr11 5174438 5174457 5174441 -
ggaaactgaaactttaagcc

SEQ ID NO: 54618 - DNA, 20 bp, Artificial Sequence
  Synthetic oligonucleotide; CAG chr11 5174399 5174418 5174402 -
ccattttttttctcatctaa

SEQ ID NO: 54619 - DNA, 20 bp, Artificial Sequence
  Synthetic oligonucleotide; TGG chr11 5174393 5174412 5174396 -
tttttctcatctaacagtgt

SEQ ID NO: 54620 - DNA, 20 bp, Artificial Sequence
  Synthetic oligonucleotide; CAG chr11 5174384 5174403 5174387 -
tctaacagtgttggctaaaa

SEQ ID NO: 54621 - DNA, 20 bp, Artificial Sequence
  Synthetic oligonucleotide; GAG chr11 5174373 5174392 5174376 -
tggctaaaacagtgttattt

SEQ ID NO: 54622 - DNA, 20 bp, Artificial Sequence
  Synthetic oligonucleotide; AGG chr11 5174372 5174391 5174375 -
ggctaaaacagtgttatttg

SEQ ID NO: 54623 - DNA, 20 bp, Artificial Sequence
  Synthetic oligonucleotide; AAG chr11 5174345 5174364 5174348 -
gttttacatcatttcactta

SEQ ID NO: 54624 - DNA, 20 bp, Artificial Sequence
  Synthetic oligonucleotide; AAG chr11 5174307 5174326 5174310 -
acctattcatgacattaaat

SEQ ID NO: 54625 - DNA, 20 bp, Artificial Sequence
  Synthetic oligonucleotide; AGG chr11 5174306 5174325 5174309 -
cctattcatgacattaaata

SEQ ID NO: 54626 - DNA, 20 bp, Artificial Sequence
  Synthetic oligonucleotide; TGG chr11 5174203 5174222 5174206 -
tcatctgtttatgtacattc

SEQ ID NO: 54627 - DNA, 20 bp, Artificial Sequence
  Synthetic oligonucleotide; TGG chr11 5174186 5174205 5174189 -
ttctggttgtttccaccttt

SEQ ID NO: 54628 - DNA, 20 bp, Artificial Sequence
  Synthetic oligonucleotide; CAG chr11 5174153 5174172 5174156 -
taatgctacaatgaacattt

SEQ ID NO: 54629 - DNA, 20 bp, Artificial Sequence
  Synthetic oligonucleotide; AAG chr11 5174147 5174166 5174150 -
tacaatgaacatttcagtac

SEQ ID NO: 54630 - DNA, 20 bp, Artificial Sequence
  Synthetic oligonucleotide; TAG chr11 5174105 5174124 5174108 -
atatatttttaatatatacc

SEQ ID NO: 54631 - DNA, 20 bp, Artificial Sequence
  Synthetic oligonucleotide; AGG chr11 5174104 5174123 5174107 -
tatatttttaatatatacct

SEQ ID NO: 54632 - DNA, 20 bp, Artificial Sequence
  Synthetic oligonucleotide; GAG chr11 5174102 5174121 5174105 -
tatttttaatatatacctag

SEQ ID NO: 54633 - DNA, 20 bp, Artificial Sequence
  Synthetic oligonucleotide; GAG chr11 5174100 5174119 5174103 -
tttttaatatatacctagga

SEQ ID NO: 54634 - DNA, 20 bp, Artificial Sequence
  Synthetic oligonucleotide; AGG chr11 5174099 5174118 5174102 -
ttttaatatatacctaggag

SEQ ID NO: 54635 - DNA, 20 bp, Artificial Sequence
  Synthetic oligonucleotide; TGG chr11 5174091 5174110 5174094 -
tatacctaggagaggaattt

SEQ ID NO: 54636 - DNA, 20 bp, Artificial Sequence
  Synthetic oligonucleotide; GGG chr11 5174090 5174109 5174093 -
atacctaggagaggaatttt

SEQ ID NO: 54637 - DNA, 20 bp, Artificial Sequence
  Synthetic oligonucleotide; GGG chr11 5174089 5174108 5174092 -
tacctaggagaggaattttg

SEQ ID NO: 54638 - DNA, 20 bp, Artificial Sequence
  Synthetic oligonucleotide; CAG chr11 5174074 5174093 5174077 -
ttttggggtcatatgttatt

SEQ ID NO: 54639 - DNA, 20 bp, Artificial Sequence
  Synthetic oligonucleotide; AAG chr11 5174066 5174085 5174069 -
tcatatgttattcagtgcct

SEQ ID NO: 54640 - DNA, 20 bp, Artificial Sequence
  Synthetic oligonucleotide; AAG chr11 5174057 5174076 5174060 -
attcagtgcctaagtttttg

SEQ ID NO: 54641 - DNA, 20 bp, Artificial Sequence
  Synthetic oligonucleotide; CAG chr11 5174034 5174053 5174037 -
aactgtcaaaatattttcta

SEQ ID NO: 54642 - DNA, 20 bp, Artificial Sequence
  Synthetic oligonucleotide; AAG chr11 5174031 5174050 5174034 -
tgtcaaaatattttctacag

SEQ ID NO: 54643 - DNA, 20 bp, Artificial Sequence
  Synthetic oligonucleotide; TAG chr11 5174009 5174028 5174012 -
gttgcaccacttaacatttt

SEQ ID NO: 54644 - DNA, 20 bp, Artificial Sequence
  Synthetic oligonucleotide; CAG chr11 5174006 5174025 5174009 -
gcaccacttaacatttttag

SEQ ID NO: 54645 - DNA, 20 bp, Artificial Sequence
  Synthetic oligonucleotide; GAG chr11 5173995 5174014 5173998 -
catttttagcagcaatatat

SEQ ID NO: 54646 - DNA, 20 bp, Artificial Sequence
  Synthetic oligonucleotide; AGG chr11 5173994 5174013 5173997 -
atttttagcagcaatatatg

SEQ ID NO: 54647 - DNA, 20 bp, Artificial Sequence
  Synthetic oligonucleotide; AAG chr11 5173930 5173949 5173933 -
catttgttttgtttctctta

SEQ ID NO: 54648 - DNA, 20 bp, Artificial Sequence
  Synthetic oligonucleotide; TAG chr11 5173925 5173944 5173928 -
gttttgtttctcttaaagta

SEQ ID NO: 54649 - DNA, 20 bp, Artificial Sequence
  Synthetic oligonucleotide; TAG chr11 5173916 5173935 5173919 -
ctcttaaagtatagacattc

SEQ ID NO: 54650 - DNA, 20 bp, Artificial Sequence
  Synthetic oligonucleotide; AAG chr11 5173912 5173931 5173915 -
taaagtatagacattctagt

SEQ ID NO: 54651 - DNA, 20 bp, Artificial Sequence
  Synthetic oligonucleotide; AAG chr11 5173905 5173924 5173908 -
tagacattctagtaagtttg

SEQ ID NO: 54652 - DNA, 20 bp, Artificial Sequence
  Synthetic oligonucleotide; TAG chr11 5173902 5173921 5173905 -
acattctagtaagtttgaag

SEQ ID NO: 54653 - DNA, 20 bp, Artificial Sequence
  Synthetic oligonucleotide; TGG chr11 5173889 5173908 5173892 -
tttgaagtagtgtcttattg

SEQ ID NO: 54654 - DNA, 20 bp, Artificial Sequence
  Synthetic oligonucleotide; TGG chr11 5173883 5173902 5173886 -
gtagtgtcttattgtggttt

SEQ ID NO: 54655 - DNA, 20 bp, Artificial Sequence
  Synthetic oligonucleotide; TAG chr11 5173838 5173857 5173841 -
tcatttgtatatcttctttc

SEQ ID NO: 54656 - DNA, 20 bp, Artificial Sequence
  Synthetic oligonucleotide; GAG chr11 5173798 5173817 5173801 -
catttgcatatttttaaatt

SEQ ID NO: 54657 - DNA, 20 bp, Artificial Sequence
  Synthetic oligonucleotide; GAG chr11 5173775 5173794 5173778 -
ttgtttgtctttttgttttt

SEQ ID NO: 54658 - DNA, 20 bp, Artificial Sequence
  Synthetic oligonucleotide; TAG chr11 5173769 5173788 5173772 -
gtctttttgtttttgagttg

SEQ ID NO: 54659 - DNA, 20 bp, Artificial Sequence
  Synthetic oligonucleotide; AGG chr11 5173768 5173787 5173771 -
tctttttgtttttgagttgt

SEQ ID NO: 54660 - DNA, 20 bp, Artificial Sequence
  Synthetic oligonucleotide; TGG chr11 5173749 5173768 5173752 -
taggactttttcatacattc

SEQ ID NO: 54661 - DNA, 20 bp, Artificial Sequence
  Synthetic oligonucleotide; AAG chr11 5173716 5173735 5173719 -
tatgaaatacataatttgca

SEQ ID NO: 54662 - DNA, 20 bp, Artificial Sequence
  Synthetic oligonucleotide; TAG chr11 5173697 5173716 5173700 -
aaagatgttctctcatctta

SEQ ID NO: 54663 - DNA, 20 bp, Artificial Sequence
  Synthetic oligonucleotide; AGG chr11 5173696 5173715 5173699 -
aagatgttctctcatcttat

SEQ ID NO: 54664 - DNA, 20 bp, Artificial Sequence
  Synthetic oligonucleotide; AAG chr11 5173674 5173693 5173677 -
gttgtctttttactttctta

SEQ ID NO: 54665 - DNA, 20 bp, Artificial Sequence
  Synthetic oligonucleotide; AAG chr11 5173591 5173610 5173594 -
atactttttgtgtcatatct

SEQ ID NO: 54666 - DNA, 20 bp, Artificial Sequence
  Synthetic oligonucleotide; AAG chr11 5173571 5173590 5173574 -
aagaatctattgtaaaatca

SEQ ID NO: 54667 - DNA, 20 bp, Artificial Sequence
  Synthetic oligonucleotide; AAG chr11 5173562 5173581 5173565 -
ttgtaaaatcaaagttcatg

SEQ ID NO: 54668 - DNA, 20 bp, Artificial Sequence
  Synthetic oligonucleotide; GAG chr11 5173539 5173558 5173542 -
atttacccatgcttccttcc

SEQ ID NO: 54669 - DNA, 20 bp, Artificial Sequence
  Synthetic oligonucleotide; AGG chr11 5173538 5173557 5173541 -
tttacccatgcttccttccg

SEQ ID NO: 54670 - DNA, 20 bp, Artificial Sequence
  Synthetic oligonucleotide; GGG chr11 5173537 5173556 5173540 -
ttacccatgcttccttccga

SEQ ID NO: 54671 - DNA, 20 bp, Artificial Sequence
  Synthetic oligonucleotide; TGG chr11 5173529 5173548 5173532 -
gcttccttccgagggtgtta

SEQ ID NO: 54672 - DNA, 20 bp, Artificial Sequence
  Synthetic oligonucleotide; TAG chr11 5173523 5173542 5173526 -
ttccgagggtgttatggctt

SEQ ID NO: 54673 - DNA, 20 bp, Artificial Sequence
  Synthetic oligonucleotide; TAG chr11 5173513 5173532 5173516 -
gttatggctttagttcaatt

SEQ ID NO: 54674 - DNA, 20 bp, Artificial Sequence
  Synthetic oligonucleotide; AGG chr11 5173512 5173531 5173515 -
ttatggctttagttcaattt

SEQ ID NO: 54675 - DNA, 20 bp, Artificial Sequence
  Synthetic oligonucleotide; TGG chr11 5173485 5173504 5173488 -
tacacaatttttatgcatgc

SEQ ID NO: 54676 - DNA, 20 bp, Artificial Sequence
  Synthetic oligonucleotide; AAG chr11 5173464 5173483 5173467 -
ggcttttaatccttatttga

SEQ ID NO: 54677 - DNA, 20 bp, Artificial Sequence
  Synthetic oligonucleotide; AAG chr11 5173455 5173474 5173458 -
tccttatttgaaagaataca

SEQ ID NO: 54678 - DNA, 20 bp, Artificial Sequence
  Synthetic oligonucleotide; TAG chr11 5173451 5173470 5173454 -
tatttgaaagaatacaaagt

SEQ ID NO: 54679 - DNA, 20 bp, Artificial Sequence
  Synthetic oligonucleotide; TAG chr11 5173432 5173451 5173435 -
ttagcatgacaacaaaaata

SEQ ID NO: 54680 - DNA, 20 bp, Artificial Sequence
  Synthetic oligonucleotide; AAG chr11 5173411 5173430 5173414 -
agcttgaccaattgaatatg

SEQ ID NO: 54681 - DNA, 20 bp, Artificial Sequence
  Synthetic oligonucleotide; CAG chr11 5173395 5173414 5173398 -
tatgaagttgtatataaaaa

SEQ ID NO: 54682 - DNA, 20 bp, Artificial Sequence
  Synthetic oligonucleotide; AAG chr11 5173389 5173408 5173392 -
gttgtatataaaaacagaat

SEQ ID NO: 54683 - DNA, 20 bp, Artificial Sequence
  Synthetic oligonucleotide; CGG chr11 5173384 5173403 5173387 -
atataaaaacagaataagaa

SEQ ID NO: 54684 - DNA, 20 bp, Artificial Sequence
  Synthetic oligonucleotide; CAG chr11 5173381 5173400 5173384 -
taaaaacagaataagaacgg

SEQ ID NO: 54685 - DNA, 20 bp, Artificial Sequence
  Synthetic oligonucleotide; TGG chr11 5173368 5173387 5173371 -
agaacggcagtatgtgcatg

SEQ ID NO: 54686 - DNA, 20 bp, Artificial Sequence
  Synthetic oligonucleotide; AAG chr11 5173361 5173380 5173364 -
cagtatgtgcatgtggcaaa

SEQ ID NO: 54687 - DNA, 20 bp, Artificial Sequence
  Synthetic oligonucleotide; AGG chr11 5173360 5173379 5173363 -
agtatgtgcatgtggcaaaa

SEQ ID NO: 54688 - DNA, 20 bp, Artificial Sequence
  Synthetic oligonucleotide; CAG chr11 5173354 5173373 5173357 -
tgcatgtggcaaaaaggaca

SEQ ID NO: 54689 - DNA, 20 bp, Artificial Sequence
  Synthetic oligonucleotide; CAG chr11 5173342 5173361 5173345 -
aaaggacacagatcaaacaa

SEQ ID NO: 54690 - DNA, 20 bp, Artificial Sequence
  Synthetic oligonucleotide; CAG chr11 5173335 5173354 5173338 -
acagatcaaacaacagaaaa

SEQ ID NO: 54691 - DNA, 20 bp, Artificial Sequence
  Synthetic oligonucleotide; TAG chr11 5173330 5173349 5173333 -
tcaaacaacagaaaacagtc

SEQ ID NO: 54692 - DNA, 20 bp, Artificial Sequence
  Synthetic oligonucleotide; TAG chr11 5173324 5173343 5173327 -
aacagaaaacagtctagaat

SEQ ID NO: 54693 - DNA, 20 bp, Artificial Sequence
  Synthetic oligonucleotide; TGG chr11 5173267 5173286 5173270 -
atgtaatccctcatcatgct

SEQ ID NO: 54694 - DNA, 20 bp, Artificial Sequence
  Synthetic oligonucleotide; GAG chr11 5173265 5173284 5173268 -
gtaatccctcatcatgcttg

SEQ ID NO: 54695 - DNA, 20 bp, Artificial Sequence
  Synthetic oligonucleotide; TGG chr11 5173241 5173260 5173244 -
ccaacccttgatcttatact

SEQ ID NO: 54696 - DNA, 20 bp, Artificial Sequence
  Synthetic oligonucleotide; TAG chr11 5173235 5173254 5173238 -
cttgatcttatacttggtat

SEQ ID NO: 54697 - DNA, 20 bp, Artificial Sequence
  Synthetic oligonucleotide; GAG chr11 5173213 5173232 5173216 -
gaaaaattgtttatatgttt

SEQ ID NO: 54698 - DNA, 20 bp, Artificial Sequence
  Synthetic oligonucleotide; AAG chr11 5173203 5173222 5173206 -
ttatatgtttgagaatactt

SEQ ID NO: 54699 - DNA, 20 bp, Artificial Sequence
  Synthetic oligonucleotide; AAG chr11 5173183 5173202 5173186 -
aagtaaaattctaattaccc

SEQ ID NO: 54700 - DNA, 20 bp, Artificial Sequence
  Synthetic oligonucleotide; CAG chr11 5173164 5173183 5173167 -
caagtcccccaaacaaattt

SEQ ID NO: 54701 - DNA, 20 bp, Artificial Sequence
  Synthetic oligonucleotide; AGG chr11 5173163 5173182 5173166 -
aagtcccccaaacaaatttc

SEQ ID NO: 54702 - DNA, 20 bp, Artificial Sequence
  Synthetic oligonucleotide; TGG chr11 5173160 5173179 5173163 -
tcccccaaacaaatttcagg

SEQ ID NO: 54703 - DNA, 20 bp, Artificial Sequence
  Synthetic oligonucleotide; AAG chr11 5173153 5173172 5173156 -
aacaaatttcaggtggaatc

SEQ ID NO: 54704 - DNA, 20 bp, Artificial Sequence
  Synthetic oligonucleotide; CAG chr11 5173064 5173083 5173067 -
tacaccactatccctatctg

SEQ ID NO: 54705 - DNA, 20 bp, Artificial Sequence
  Synthetic oligonucleotide; TAG chr11 5173052 5173071 5173055 -
cctatctgcagttccgtctc

SEQ ID NO: 54706 - DNA, 20 bp, Artificial Sequence
  Synthetic oligonucleotide; TAG chr11 5173046 5173065 5173049 -
tgcagttccgtctctagctc

SEQ ID NO: 54707 - DNA, 20 bp, Artificial Sequence
  Synthetic oligonucleotide; TGG chr11 5173006 5173025 5173009 -
tccactttttactttgtata

SEQ ID NO: 54708 - DNA, 20 bp, Artificial Sequence
  Synthetic oligonucleotide; TAG chr11 5173001 5173020 5173004 -
tttttactttgtatatggaa

SEQ ID NO: 54709 - DNA, 20 bp, Artificial Sequence
  Synthetic oligonucleotide; AAG chr11 5172992 5173011 5172995 -
tgtatatggaatagcttctt

SEQ ID NO: 54710 - DNA, 20 bp, Artificial Sequence
  Synthetic oligonucleotide; AAG chr11 5172983 5173002 5172986 -
aatagcttcttaagaatgaa

SEQ ID NO: 54711 - DNA, 20 bp, Artificial Sequence
  Synthetic oligonucleotide; AAG chr11 5172939 5172958 5172942 -
atgttaacctgactacataa

SEQ ID NO: 54712 - DNA, 20 bp, Artificial Sequence
  Synthetic oligonucleotide; AAG chr11 5172903 5172922 5172906 -
tgtgtatgaaaaaattaatg

SEQ ID NO: 54713 - DNA, 20 bp, Artificial Sequence
  Synthetic oligonucleotide; AAG chr11 5172898 5172917 5172901 -
atgaaaaaattaatgaagat

SEQ ID NO: 54714 - DNA, 20 bp, Artificial Sequence
  Synthetic oligonucleotide; CGG chr11 5172892 5172911 5172895 -
aaattaatgaagataagatg

SEQ ID NO: 54715 - DNA, 20 bp, Artificial Sequence
  Synthetic oligonucleotide; GGG chr11 5172891 5172910 5172894 -
aattaatgaagataagatgc

SEQ ID NO: 54716 - DNA, 20 bp, Artificial Sequence
  Synthetic oligonucleotide; GGG chr11 5172890 5172909 5172893 -
attaatgaagataagatgcg

SEQ ID NO: 54717 - DNA, 20 bp, Artificial Sequence
  Synthetic oligonucleotide; GGG chr11 5172889 5172908 5172892 -
ttaatgaagataagatgcgg

SEQ ID NO: 54718 - DNA, 20 bp, Artificial Sequence
  Synthetic oligonucleotide; AAG chr11 5172886 5172905 5172889 -
atgaagataagatgcggggg

SEQ ID NO: 54719 - DNA, 20 bp, Artificial Sequence
  Synthetic oligonucleotide; AAG chr11 5172878 5172897 5172881 -
aagatgcgggggaagtatat

SEQ ID NO: 54720 - DNA, 20 bp, Artificial Sequence
  Synthetic oligonucleotide; TGG chr11 5172808 5172827 5172811 -
gtaactattttatgtttatt

SEQ ID NO: 54721 - DNA, 20 bp, Artificial Sequence
  Synthetic oligonucleotide; GGG chr11 5172807 5172826 5172810 -
taactattttatgtttattt

SEQ ID NO: 54722 - DNA, 20 bp, Artificial Sequence
  Synthetic oligonucleotide; TGG chr11 5172790 5172809 5172793 -
tttgggttttgcattgacat

SEQ ID NO: 54723 - DNA, 20 bp, Artificial Sequence
  Synthetic oligonucleotide; CAG chr11 5172764 5172783 5172767 -
gttcttatgtatactctctc

SEQ ID NO: 54724 - DNA, 20 bp, Artificial Sequence
  Synthetic oligonucleotide; CAG chr11 5172752 5172771 5172755 -
actctctccagcatgcttct

SEQ ID NO: 54725 - DNA, 20 bp, Artificial Sequence
  Synthetic oligonucleotide; AGG chr11 5172751 5172770 5172754 -
ctctctccagcatgcttctc

SEQ ID NO: 54726 - DNA, 20 bp, Artificial Sequence
  Synthetic oligonucleotide; AAG chr11 5172716 5172735 5172719 -
ctttctctctaatacacccg

SEQ ID NO: 54727 - DNA, 20 bp, Artificial Sequence
  Synthetic oligonucleotide; TGG chr11 5172709 5172728 5172712 -
tctaatacacccgaagtttc

SEQ ID NO: 54728 - DNA, 20 bp, Artificial Sequence
  Synthetic oligonucleotide; GGG chr11 5172708 5172727 5172711 -
ctaatacacccgaagtttct

SEQ ID NO: 54729 - DNA, 20 bp, Artificial Sequence
  Synthetic oligonucleotide; TGG chr11 5172693 5172712 5172696 -
tttctgggaataattattct

SEQ ID NO: 54730 - DNA, 20 bp, Artificial Sequence
  Synthetic oligonucleotide; GAG chr11 5172677 5172696 5172680 -
ttcttggttaattgcttctt

SEQ ID NO: 54731 - DNA, 20 bp, Artificial Sequence
  Synthetic oligonucleotide; AGG chr11 5172676 5172695 5172679 -
tcttggttaattgcttcttg

SEQ ID NO: 54732 - DNA, 20 bp, Artificial Sequence
  Synthetic oligonucleotide; GGG chr11 5172675 5172694 5172678 -
cttggttaattgcttcttga

SEQ ID NO: 54733 - DNA, 20 bp, Artificial Sequence
  Synthetic oligonucleotide; CAG chr11 5172643 5172662 5172646 -
cattctgtctctatgtcctc

SEQ ID NO: 54734 - DNA, 20 bp, Artificial Sequence
  Synthetic oligonucleotide; AAG chr11 5172634 5172653 5172637 -
tctatgtcctccagtcaact

SEQ ID NO: 54735 - DNA, 20 bp, Artificial Sequence
  Synthetic oligonucleotide; CAG chr11 5172623 5172642 5172626 -
cagtcaactaagcacatata

SEQ ID NO: 54736 - DNA, 20 bp, Artificial Sequence
  Synthetic oligonucleotide; AGG chr11 5172622 5172641 5172625 -
agtcaactaagcacatatac

SEQ ID NO: 54737 - DNA, 20 bp, Artificial Sequence
  Synthetic oligonucleotide; GGG chr11 5172621 5172640 5172624 -
gtcaactaagcacatataca

SEQ ID NO: 54738 - DNA, 20 bp, Artificial Sequence
  Synthetic oligonucleotide; GAG chr11 5172619 5172638 5172622 -
caactaagcacatatacagg

SEQ ID NO: 54739 - DNA, 20 bp, Artificial Sequence
  Synthetic oligonucleotide; AGG chr11 5172618 5172637 5172621 -
aactaagcacatatacaggg

SEQ ID NO: 54740 - DNA, 20 bp, Artificial Sequence
  Synthetic oligonucleotide; TAG chr11 5172615 5172634 5172618 -
taagcacatatacagggagg

SEQ ID NO: 54741 - DNA, 20 bp, Artificial Sequence
  Synthetic oligonucleotide; CAG chr11 5172600 5172619 5172603 -
ggaggtagtaactatgtcca

SEQ ID NO: 54742 - DNA, 20 bp, Artificial Sequence
  Synthetic oligonucleotide; CAG chr11 5172595 5172614 5172598 -
tagtaactatgtccacagcc

SEQ ID NO: 54743 - DNA, 20 bp, Artificial Sequence
  Synthetic oligonucleotide; AAG chr11 5172588 5172607 5172591 -
tatgtccacagcccagttga

SEQ ID NO: 54744 - DNA, 20 bp, Artificial Sequence
  Synthetic oligonucleotide; CAG chr11 5172581 5172600 5172584 -
acagcccagttgaaagtaaa

SEQ ID NO: 54745 - DNA, 20 bp, Artificial Sequence
  Synthetic oligonucleotide; TAG chr11 5172571 5172590 5172574 -
tgaaagtaaacagtaacaaa

SEQ ID NO: 54746 - DNA, 20 bp, Artificial Sequence
  Synthetic oligonucleotide; TGG chr11 5172562 5172581 5172565 -
acagtaacaaatagtatgca

SEQ ID NO: 54747 - DNA, 20 bp, Artificial Sequence
  Synthetic oligonucleotide; TGG chr11 5172552 5172571 5172555 -
atagtatgcatggattgatg

SEQ ID NO: 54748 - DNA, 20 bp, Artificial Sequence
  Synthetic oligonucleotide; TAG chr11 5172549 5172568 5172552 -
gtatgcatggattgatgtgg

SEQ ID NO: 54749 - DNA, 20 bp, Artificial Sequence
  Synthetic oligonucleotide; CAG chr11 5172542 5172561 5172545 -
tggattgatgtggtagctct

SEQ ID NO: 54750 - DNA, 20 bp, Artificial Sequence
  Synthetic oligonucleotide; TAG chr11 5172532 5172551 5172535 -
tggtagctctcagttccacc

SEQ ID NO: 54751 - DNA, 20 bp, Artificial Sequence
  Synthetic oligonucleotide; AGG chr11 5172531 5172550 5172534 -
ggtagctctcagttccacct

SEQ ID NO: 54752 - DNA, 20 bp, Artificial Sequence
  Synthetic oligonucleotide; AAG chr11 5172527 5172546 5172530 -
gctctcagttccacctaggt

SEQ ID NO: 54753 - DNA, 20 bp, Artificial Sequence
  Synthetic oligonucleotide; GAG chr11 5172519 5172538 5172522 -
ttccacctaggtaagtatct

SEQ ID NO: 54754 - DNA, 20 bp, Artificial Sequence
  Synthetic oligonucleotide; AGG chr11 5172518 5172537 5172521 -
tccacctaggtaagtatctg

SEQ ID NO: 54755 - DNA, 20 bp, Artificial Sequence
  Synthetic oligonucleotide; TAG chr11 5172513 5172532 5172516 -
ctaggtaagtatctgaggtc

SEQ ID NO: 54756 - DNA, 20 bp, Artificial Sequence
  Synthetic oligonucleotide; AGG chr11 5172512 5172531 5172515 -
taggtaagtatctgaggtct

SEQ ID NO: 54757 - DNA, 20 bp, Artificial Sequence
  Synthetic oligonucleotide; TAG chr11 5172501 5172520 5172504 -
ctgaggtctaggatcaacta

SEQ ID NO: 54758 - DNA, 20 bp, Artificial Sequence
  Synthetic oligonucleotide; TGG chr11 5172488 5172507 5172491 -
tcaactatagttatgcctaa

SEQ ID NO: 54759 - DNA, 20 bp, Artificial Sequence
  Synthetic oligonucleotide; TGG chr11 5172475 5172494 5172478 -
tgcctaatggtataatgtgc

SEQ ID NO: 54760 - DNA, 20 bp, Artificial Sequence
  Synthetic oligonucleotide; CAG chr11 5172465 5172484 5172468 -
tataatgtgctggcttgcac

SEQ ID NO: 54761 - DNA, 20 bp, Artificial Sequence
  Synthetic oligonucleotide; TAG chr11 5172460 5172479 5172463 -
tgtgctggcttgcaccagct

SEQ ID NO: 54762 - DNA, 20 bp, Artificial Sequence
  Synthetic oligonucleotide; AGG chr11 5172459 5172478 5172462 -
gtgctggcttgcaccagctt

SEQ ID NO: 54763 - DNA, 20 bp, Artificial Sequence
  Synthetic oligonucleotide; AAG chr11 5172455 5172474 5172458 -
tggcttgcaccagcttagga

SEQ ID NO: 54764 - DNA, 20 bp, Artificial Sequence
  Synthetic oligonucleotide; CAG chr11 5172436 5172455 5172439 -
aaagctgattatgctcatct

SEQ ID NO: 54765 - DNA, 20 bp, Artificial Sequence
  Synthetic oligonucleotide; TAG chr11 5172421 5172440 5172424 -
catctcagctctgcatttaa

SEQ ID NO: 54766 - DNA, 20 bp, Artificial Sequence
  Synthetic oligonucleotide; TGG chr11 5172410 5172429 5172413 -
tgcatttaatagcatctctt

SEQ ID NO: 54767 - DNA, 20 bp, Artificial Sequence
  Synthetic oligonucleotide; TAG chr11 5172407 5172426 5172410 -
atttaatagcatctctttgg

SEQ ID NO: 54768 - DNA, 20 bp, Artificial Sequence
  Synthetic oligonucleotide; TGG chr11 5172390 5172409 5172393 -
tggtagtctgaaattgatca

SEQ ID NO: 54769 - DNA, 20 bp, Artificial Sequence
  Synthetic oligonucleotide; TAG chr11 5172387 5172406 5172390 -
tagtctgaaattgatcatgg

SEQ ID NO: 54770 - DNA, 20 bp, Artificial Sequence
  Synthetic oligonucleotide; AGG chr11 5172386 5172405 5172389 -
agtctgaaattgatcatggt

SEQ ID NO: 54771 - DNA, 20 bp, Artificial Sequence
  Synthetic oligonucleotide; GAG chr11 5172384 5172403 5172387 -
tctgaaattgatcatggtag

SEQ ID NO: 54772 - DNA, 20 bp, Artificial Sequence
  Synthetic oligonucleotide; CGG chr11 5172362 5172381 5172365 -
gtcattaaaacacaaaaaat

SEQ ID NO: 54773 - DNA, 20 bp, Artificial Sequence
  Synthetic oligonucleotide; TGG chr11 5172355 5172374 5172358 -
aaacacaaaaaatcggtaac

SEQ ID NO: 54774 - DNA, 20 bp, Artificial Sequence
  Synthetic oligonucleotide; CAG chr11 5172345 5172364 5172348 -
aatcggtaactggtaaaaat

SEQ ID NO: 54775 - DNA, 20 bp, Artificial Sequence
  Synthetic oligonucleotide; AGG chr11 5172344 5172363 5172347 -
atcggtaactggtaaaaatc

SEQ ID NO: 54776 - DNA, 20 bp, Artificial Sequence
  Synthetic oligonucleotide; GGG chr11 5172343 5172362 5172346 -
tcggtaactggtaaaaatca

SEQ ID NO: 54777 - DNA, 20 bp, Artificial Sequence
  Synthetic oligonucleotide; TGG chr11 5172330 5172349 5172333 -
aaaatcagggcatttttatt

SEQ ID NO: 54778 - DNA, 20 bp, Artificial Sequence
  Synthetic oligonucleotide; AAG chr11 5172291 5172310 5172294 -
cccactgattatgcctaacg

SEQ ID NO: 54779 - DNA, 20 bp, Artificial Sequence
  Synthetic oligonucleotide; GAG chr11 5172289 5172308 5172292 -
cactgattatgcctaacgaa

SEQ ID NO: 54780 - DNA, 20 bp, Artificial Sequence
  Synthetic oligonucleotide; TGG chr11 5172283 5172302 5172286 -
ttatgcctaacgaagagccc

SEQ ID NO: 54781 - DNA, 20 bp, Artificial Sequence
  Synthetic oligonucleotide; CGG chr11 5172273 5172292 5172276 -
cgaagagccctggcccaaca

SEQ ID NO: 54782 - DNA, 20 bp, Artificial Sequence
  Synthetic oligonucleotide; GGG chr11 5172272 5172291 5172275 -
gaagagccctggcccaacac

SEQ ID NO: 54783 - DNA, 20 bp, Artificial Sequence
  Synthetic oligonucleotide; AAG chr11 5172269 5172288 5172272 -
gagccctggcccaacacggg

SEQ ID NO: 54784 - DNA, 20 bp, Artificial Sequence
  Synthetic oligonucleotide; AAG chr11 5172266 5172285 5172269 -
ccctggcccaacacgggaag

SEQ ID NO: 54785 - DNA, 20 bp, Artificial Sequence
  Synthetic oligonucleotide; GAG chr11 5172264 5172283 5172267 -
ctggcccaacacgggaagaa

SEQ ID NO: 54786 - DNA, 20 bp, Artificial Sequence
  Synthetic oligonucleotide; CAG chr11 5172259 5172278 5172262 -
ccaacacgggaagaagagtt

SEQ ID NO: 54787 - DNA, 20 bp, Artificial Sequence
  Synthetic oligonucleotide; TGG chr11 5172253 5172272 5172256 -
cgggaagaagagttcagcct

SEQ ID NO: 54788 - DNA, 20 bp, Artificial Sequence
  Synthetic oligonucleotide; GAG chr11 5172234 5172253 5172237 -
ttggtcacattcttatttct

SEQ ID NO: 54789 - DNA, 20 bp, Artificial Sequence
  Synthetic oligonucleotide; TGG chr11 5172210 5172229 5172213 -
cccatcctgaattccatttc

SEQ ID NO: 54790 - DNA, 20 bp, Artificial Sequence
  Synthetic oligonucleotide; AAG chr11 5172189 5172208 5172192 -
ggcctccaacgttaatacct

SEQ ID NO: 54791 - DNA, 20 bp, Artificial Sequence
  Synthetic oligonucleotide; AGG chr11 5172188 5172207 5172191 -
gcctccaacgttaataccta

SEQ ID NO: 54792 - DNA, 20 bp, Artificial Sequence
  Synthetic oligonucleotide; CAG chr11 5172177 5172196 5172180 -
taatacctaaggctctgctg

SEQ ID NO: 54793 - DNA, 20 bp, Artificial Sequence
  Synthetic oligonucleotide; AAG chr11 5172172 5172191 5172175 -
cctaaggctctgctgcagat

SEQ ID NO: 54794 - DNA, 20 bp, Artificial Sequence
  Synthetic oligonucleotide; TGG chr11 5172169 5172188 5172172 -
aaggctctgctgcagataag

SEQ ID NO: 54795 - DNA, 20 bp, Artificial Sequence
  Synthetic oligonucleotide; TAG chr11 5172161 5172180 5172164 -
gctgcagataagtggaactt

SEQ ID NO: 54796 - DNA, 20 bp, Artificial Sequence
  Synthetic oligonucleotide; CAG chr11 5172140 5172159 5172143 -
agtgttaataaacttgttcc

SEQ ID NO: 54797 - DNA, 20 bp, Artificial Sequence
  Synthetic oligonucleotide; AAG chr11 5172125 5172144 5172128 -
gttcccagataaatatctct

SEQ ID NO: 54798 - DNA, 20 bp, Artificial Sequence
  Synthetic oligonucleotide; TAG chr11 5172113 5172132 5172116 -
atatctctaagcctgtaccc

SEQ ID NO: 54799 - DNA, 20 bp, Artificial Sequence
  Synthetic oligonucleotide; GAG chr11 5172087 5172106 5172090 -
caccatcacatgtgacttgt

SEQ ID NO: 54800 - DNA, 20 bp, Artificial Sequence
  Synthetic oligonucleotide; CGG chr11 5172053 5172072 5172056 -
tctgatcttgctccctgacc

SEQ ID NO: 54801 - DNA, 20 bp, Artificial Sequence
  Synthetic oligonucleotide; CAG chr11 5172047 5172066 5172050 -
cttgctccctgacccggttc

SEQ ID NO: 54802 - DNA, 20 bp, Artificial Sequence
  Synthetic oligonucleotide; CAG chr11 5172044 5172063 5172047 -
gctccctgacccggttccag

SEQ ID NO: 54803 - DNA, 20 bp, Artificial Sequence
  Synthetic oligonucleotide; AAG chr11 5172041 5172060 5172044 -
ccctgacccggttccagcag

SEQ ID NO: 54804 - DNA, 20 bp, Artificial Sequence
  Synthetic oligonucleotide; CAG chr11 5172018 5172037 5172021 -
actgacccttctgcaaaata

SEQ ID NO: 54805 - DNA, 20 bp, Artificial Sequence
  Synthetic oligonucleotide; GAG chr11 5172016 5172035 5172019 -
tgacccttctgcaaaataca

SEQ ID NO: 54806 - DNA, 20 bp, Artificial Sequence
  Synthetic oligonucleotide; AGG chr11 5172015 5172034 5172018 -
gacccttctgcaaaatacag

SEQ ID NO: 54807 - DNA, 20 bp, Artificial Sequence
  Synthetic oligonucleotide; GAG chr11 5172013 5172032 5172016 -
cccttctgcaaaatacagag

SEQ ID NO: 54808 - DNA, 20 bp, Artificial Sequence
  Synthetic oligonucleotide; TGG chr11 5171997 5172016 5172000 -
agaggagcttttctaatcta

SEQ ID NO: 54809 - DNA, 20 bp, Artificial Sequence
  Synthetic oligonucleotide; TAG chr11 5171993 5172012 5171996 -
gagcttttctaatctatgga

SEQ ID NO: 54810 - DNA, 20 bp, Artificial Sequence
  Synthetic oligonucleotide; CAG chr11 5171990 5172009 5171993 -
cttttctaatctatggatag

SEQ ID NO: 54811 - DNA, 20 bp, Artificial Sequence
  Synthetic oligonucleotide; AGG chr11 5171989 5172008 5171992 -
ttttctaatctatggatagc

SEQ ID NO: 54812 - DNA, 20 bp, Artificial Sequence
  Synthetic oligonucleotide; TGG chr11 5171986 5172005 5171989 -
tctaatctatggatagcagg

SEQ ID NO: 54813 - DNA, 20 bp, Artificial Sequence
  Synthetic oligonucleotide; GAG chr11 5171984 5172003 5171987 -
taatctatggatagcaggtg

SEQ ID NO: 54814 - DNA, 20 bp, Artificial Sequence
  Synthetic oligonucleotide; AAG chr11 5171980 5171999 5171983 -
ctatggatagcaggtggaga

SEQ ID NO: 54815 - DNA, 20 bp, Artificial Sequence
  Synthetic oligonucleotide; GAG chr11 5171978 5171997 5171981 -
atggatagcaggtggagaaa

SEQ ID NO: 54816 - DNA, 20 bp, Artificial Sequence
  Synthetic oligonucleotide; TGG chr11 5171970 5171989 5171973 -
caggtggagaaagagtgaac

SEQ ID NO: 54817 - DNA, 20 bp, Artificial Sequence
  Synthetic oligonucleotide; AAG chr11 5171966 5171985 5171969 -
tggagaaagagtgaactggt

SEQ ID NO: 54818 - DNA, 20 bp, Artificial Sequence
  Synthetic oligonucleotide; AAG chr11 5171960 5171979 5171963 -
aagagtgaactggtaagtta

SEQ ID NO: 54819 - DNA, 20 bp, Artificial Sequence
  Synthetic oligonucleotide; TGG chr11 5171950 5171969 5171953 -
tggtaagttaaagaaaaaaa

SEQ ID NO: 54820 - DNA, 20 bp, Artificial Sequence
  Synthetic oligonucleotide; TAG chr11 5171933 5171952 5171936 -
aaatggaaaatactttattc

SEQ ID NO: 54821 - DNA, 20 bp, Artificial Sequence
  Synthetic oligonucleotide; AGG chr11 5171932 5171951 5171935 -
aatggaaaatactttattct

SEQ ID NO: 54822 - DNA, 20 bp, Artificial Sequence
  Synthetic oligonucleotide; GAG chr11 5171930 5171949 5171933 -
tggaaaatactttattctag

SEQ ID NO: 54823 - DNA, 20 bp, Artificial Sequence
  Synthetic oligonucleotide; TAG chr11 5171801 5171820 5171804 -
aaatactattattgtcttta

SEQ ID NO: 54824 - DNA, 20 bp, Artificial Sequence
  Synthetic oligonucleotide; TGG chr11 5171790 5171809 5171793 -
ttgtctttatagcaaatatc

SEQ ID NO: 54825 - DNA, 20 bp, Artificial Sequence
  Synthetic oligonucleotide; GGG chr11 5171789 5171808 5171792 -
tgtctttatagcaaatatct

SEQ ID NO: 54826 - DNA, 20 bp, Artificial Sequence
  Synthetic oligonucleotide; CAG chr11 5171783 5171802 5171786 -
tatagcaaatatctgggtct

SEQ ID NO: 54827 - DNA, 20 bp, Artificial Sequence
  Synthetic oligonucleotide; AAG chr11 5171744 5171763 5171747 -
atcaactttaatataatccc

SEQ ID NO: 54828 - DNA, 20 bp, Artificial Sequence
  Synthetic oligonucleotide; TAG chr11 5171721 5171740 5171724 -
attacacgtcaattaaatgt

SEQ ID NO: 54829 - DNA, 20 bp, Artificial Sequence
  Synthetic oligonucleotide; TAG chr11 5171699 5171718 5171702 -
gaaccatcaatactctttat

SEQ ID NO: 54830 - DNA, 20 bp, Artificial Sequence
  Synthetic oligonucleotide; TAG chr11 5171683 5171702 5171686 -
ttattagtgttatattactt

SEQ ID NO: 54831 - DNA, 20 bp, Artificial Sequence
  Synthetic oligonucleotide; AAG chr11 5171650 5171669 5171653 -
actctctttataaacactac

SEQ ID NO: 54832 - DNA, 20 bp, Artificial Sequence
  Synthetic oligonucleotide; TAG chr11 5171646 5171665 5171649 -
tctttataaacactacaagt

SEQ ID NO: 54833 - DNA, 20 bp, Artificial Sequence
  Synthetic oligonucleotide; CAG chr11 5171643 5171662 5171646 -
ttataaacactacaagttag

SEQ ID NO: 54834 - DNA, 20 bp, Artificial Sequence
  Synthetic oligonucleotide; CAG chr11 5171634 5171653 5171637 -
ctacaagttagcagtttctt

SEQ ID NO: 54835 - DNA, 20 bp, Artificial Sequence
  Synthetic oligonucleotide; TAG chr11 5171572 5171591 5171575 -
ttaactgtttttcactgcca

SEQ ID NO: 54836 - DNA, 20 bp, Artificial Sequence
  Synthetic oligonucleotide; GAG chr11 5171557 5171576 5171560 -
tgccatagatgacccaactt

SEQ ID NO: 54837 - DNA, 20 bp, Artificial Sequence
  Synthetic oligonucleotide; TGG chr11 5171534 5171553 5171537 -
atttctattaatgccttatc

SEQ ID NO: 54838 - DNA, 20 bp, Artificial Sequence
  Synthetic oligonucleotide; TAG chr11 5171527 5171546 5171530 -
ttaatgccttatctggcata

SEQ ID NO: 54839 - DNA, 20 bp, Artificial Sequence
  Synthetic oligonucleotide; AGG chr11 5171526 5171545 5171529 -
taatgccttatctggcatat

SEQ ID NO: 54840 - DNA, 20 bp, Artificial Sequence
  Synthetic oligonucleotide; TGG chr11 5171517 5171536 5171520 -
atctggcatataggctatgt

SEQ ID NO: 54841 - DNA, 20 bp, Artificial Sequence
  Synthetic oligonucleotide; TAG chr11 5171492 5171511 5171495 -
tacttttctgcatgacccat

SEQ ID NO: 54842 - DNA, 20 bp, Artificial Sequence
  Synthetic oligonucleotide; AGG chr11 5171491 5171510 5171494 -
acttttctgcatgacccatt

SEQ ID NO: 54843 - DNA, 20 bp, Artificial Sequence
  Synthetic oligonucleotide; TGG chr11 5171470 5171489 5171473 -
ggtttctcttccactcactg

SEQ ID NO: 54844 - DNA, 20 bp, Artificial Sequence
  Synthetic oligonucleotide; CAG chr11 5171448 5171467 5171451 -
gcttacctgtgcccttgttt

SEQ ID NO: 54845 - DNA, 20 bp, Artificial Sequence
  Synthetic oligonucleotide; GAG chr11 5171420 5171439 5171423 -
aattttttatccctttttct

SEQ ID NO: 54846 - DNA, 20 bp, Artificial Sequence
  Synthetic oligonucleotide; AGG chr11 5171419 5171438 5171422 -
attttttatccctttttctg

SEQ ID NO: 54847 - DNA, 20 bp, Artificial Sequence
  Synthetic oligonucleotide; TAG chr11 5171408 5171427 5171411 -
ctttttctgaggaaatgtct

SEQ ID NO: 54848 - DNA, 20 bp, Artificial Sequence
  Synthetic oligonucleotide; TAG chr11 5171395 5171414 5171398 -
aatgtcttagatatgactgt

SEQ ID NO: 54849 - DNA, 20 bp, Artificial Sequence
  Synthetic oligonucleotide; CAG chr11 5171390 5171409 5171393 -
cttagatatgactgttagct

SEQ ID NO: 54850 - DNA, 20 bp, Artificial Sequence
  Synthetic oligonucleotide; GAG chr11 5171368 5171387 5171371 -
gaacttgatgtgcaataact

SEQ ID NO: 54851 - DNA, 20 bp, Artificial Sequence
  Synthetic oligonucleotide; TAG chr11 5171365 5171384 5171368 -
cttgatgtgcaataactgag

SEQ ID NO: 54852 - DNA, 20 bp, Artificial Sequence
  Synthetic oligonucleotide; CAG chr11 5171348 5171367 5171351 -
gagtagaaacttatatattc

SEQ ID NO: 54853 - DNA, 20 bp, Artificial Sequence
  Synthetic oligonucleotide; CAG chr11 5171321 5171340 5171324 -
catgtgcttctcaatatctt

SEQ ID NO: 54854 - DNA, 20 bp, Artificial Sequence
  Synthetic oligonucleotide; GAG chr11 5171319 5171338 5171322 -
tgtgcttctcaatatcttca

SEQ ID NO: 54855 - DNA, 20 bp, Artificial Sequence
  Synthetic oligonucleotide; AGG chr11 5171318 5171337 5171321 -
gtgcttctcaatatcttcag

SEQ ID NO: 54856 - DNA, 20 bp, Artificial Sequence
  Synthetic oligonucleotide; AAG chr11 5171315 5171334 5171318 -
cttctcaatatcttcagagg

SEQ ID NO: 54857 - DNA, 20 bp, Artificial Sequence
  Synthetic oligonucleotide; TGG chr11 5171253 5171272 5171256 -
cctacaacattcactctcgt

SEQ ID NO: 54858 - DNA, 20 bp, Artificial Sequence
  Synthetic oligonucleotide; CGG chr11 5171245 5171264 5171248 -
attcactctcgttggcatcc

SEQ ID NO: 54859 - DNA, 20 bp, Artificial Sequence
  Synthetic oligonucleotide; GGG chr11 5171244 5171263 5171247 -
ttcactctcgttggcatccc

SEQ ID NO: 54860 - DNA, 20 bp, Artificial Sequence
  Synthetic oligonucleotide; TGG chr11 5171239 5171258 5171242 -
tctcgttggcatcccgggac

SEQ ID NO: 54861 - DNA, 20 bp, Artificial Sequence
  Synthetic oligonucleotide; GAG chr11 5171237 5171256 5171240 -
tcgttggcatcccgggactg

SEQ ID NO: 54862 - DNA, 20 bp, Artificial Sequence
  Synthetic oligonucleotide; AGG chr11 5171236 5171255 5171239 -
cgttggcatcccgggactgg

SEQ ID NO: 54863 - DNA, 20 bp, Artificial Sequence
  Synthetic oligonucleotide; CAG chr11 5171233 5171252 5171236 -
tggcatcccgggactggagg

SEQ ID NO: 54864 - DNA, 20 bp, Artificial Sequence
  Synthetic oligonucleotide; TGG chr11 5171221 5171240 5171224 -
actggaggcagaacattatg

SEQ ID NO: 54865 - DNA, 20 bp, Artificial Sequence
  Synthetic oligonucleotide; CGG chr11 5171178 5171197 5171181 -
gatatacaccatcatctttc

SEQ ID NO: 54866 - DNA, 20 bp, Artificial Sequence
  Synthetic oligonucleotide; GGG chr11 5171177 5171196 5171180 -
atatacaccatcatctttcc

SEQ ID NO: 54867 - DNA, 20 bp, Artificial Sequence
  Synthetic oligonucleotide; TGG chr11 5171171 5171190 5171174 -
accatcatctttccgggaaa

SEQ ID NO: 54868 - DNA, 20 bp, Artificial Sequence
  Synthetic oligonucleotide; TGG chr11 5171109 5171128 5171112 -
ccaacccatgtactattttc

SEQ ID NO: 54869 - DNA, 20 bp, Artificial Sequence
  Synthetic oligonucleotide; CGG chr11 5171100 5171119 5171103 -
gtactattttctggccatgc

SEQ ID NO: 54870 - DNA, 20 bp, Artificial Sequence
  Synthetic oligonucleotide; TGG chr11 5171084 5171103 5171087 -
atgccggcctttgttgaact

SEQ ID NO: 54871 - DNA, 20 bp, Artificial Sequence
  Synthetic oligonucleotide; AAG chr11 5171051 5171070 5171054 -
tccaccatgcccactgtgtt

SEQ ID NO: 54872 - DNA, 20 bp, Artificial Sequence
  Synthetic oligonucleotide; TGG chr11 5171036 5171055 5171039 -
gtgttaagcatattcctctt

SEQ ID NO: 54873 - DNA, 20 bp, Artificial Sequence
  Synthetic oligonucleotide; CAG chr11 5171021 5171040 5171024 -
ctctttggcattaacgatgt

SEQ ID NO: 54874 - DNA, 20 bp, Artificial Sequence
  Synthetic oligonucleotide; TGG chr11 5171015 5171034 5171018 -
ggcattaacgatgtcagttt

SEQ ID NO: 54875 - DNA, 20 bp, Artificial Sequence
  Synthetic oligonucleotide; TGG chr11 5171012 5171031 5171015 -
attaacgatgtcagttttgg

SEQ ID NO: 54876 - DNA, 20 bp, Artificial Sequence
  Synthetic oligonucleotide; CAG chr11 5170999 5171018 5171002 -
gttttggtggttgcctgctc

SEQ ID NO: 54877 - DNA, 20 bp, Artificial Sequence
  Synthetic oligonucleotide; TGG chr11 5170968 5170987 5170971 -
tatgcactctttcactctta

SEQ ID NO: 54878 - DNA, 20 bp, Artificial Sequence
  Synthetic oligonucleotide; GAG chr11 5170966 5170985 5170969 -
tgcactctttcactcttatg

SEQ ID NO: 54879 - DNA, 20 bp, Artificial Sequence
  Synthetic oligonucleotide; CAG chr11 5170962 5170981 5170965 -
ctctttcactcttatggagt

SEQ ID NO: 54880 - DNA, 20 bp, Artificial Sequence
  Synthetic oligonucleotide; AGG chr11 5170961 5170980 5170964 -
tctttcactcttatggagtc

SEQ ID NO: 54881 - DNA, 20 bp, Artificial Sequence
  Synthetic oligonucleotide; TGG chr11 5170950 5170969 5170953 -
tatggagtcaggtgtccttc

SEQ ID NO: 54882 - DNA, 20 bp, Artificial Sequence
  Synthetic oligonucleotide; CAG chr11 5170941 5170960 5170944 -
aggtgtccttctggcaatgt

SEQ ID NO: 54883 - DNA, 20 bp, Artificial Sequence
  Synthetic oligonucleotide; TGG chr11 5170938 5170957 5170941 -
tgtccttctggcaatgtcag

SEQ ID NO: 54884 - DNA, 20 bp, Artificial Sequence
  Synthetic oligonucleotide; TGG chr11 5170926 5170945 5170929 -
aatgtcagtggaccgctttg

SEQ ID NO: 54885 - DNA, 20 bp, Artificial Sequence
  Synthetic oligonucleotide; CAG chr11 5170916 5170935 5170919 -
gaccgctttgtggccatcta

SEQ ID NO: 54886 - DNA, 20 bp, Artificial Sequence
  Synthetic oligonucleotide; TGG chr11 5170871 5170890 5170874 -
ctgacaattgcctgcatttc

SEQ ID NO: 54887 - DNA, 20 bp, Artificial Sequence
  Synthetic oligonucleotide; GGG chr11 5170870 5170889 5170873 -
tgacaattgcctgcatttct

SEQ ID NO: 54888 - DNA, 20 bp, Artificial Sequence
  Synthetic oligonucleotide; CGG chr11 5170866 5170885 5170869 -
aattgcctgcatttctggga

SEQ ID NO: 54889 - DNA, 20 bp, Artificial Sequence
  Synthetic oligonucleotide; GGG chr11 5170865 5170884 5170868 -
attgcctgcatttctgggac

SEQ ID NO: 54890 - DNA, 20 bp, Artificial Sequence
  Synthetic oligonucleotide; CAG chr11 5170844 5170863 5170847 -
ggtgccgccattgccttgcg

SEQ ID NO: 54891 - DNA, 20 bp, Artificial Sequence
  Synthetic oligonucleotide; GAG chr11 5170808 5170827 5170811 -
ctcccactgctctttctcct

SEQ ID NO: 54892 - DNA, 20 bp, Artificial Sequence
  Synthetic oligonucleotide; AGG chr11 5170807 5170826 5170810 -
tcccactgctctttctcctg

SEQ ID NO: 54893 - DNA, 20 bp, Artificial Sequence
  Synthetic oligonucleotide; TGG chr11 5170790 5170809 5170793 -
ctgaggcgtctgcctttctg

SEQ ID NO: 54894 - DNA, 20 bp, Artificial Sequence
  Synthetic oligonucleotide; CAG chr11 5170752 5170771 5170755 -
acactcttattgcctccact

SEQ ID NO: 54895 - DNA, 20 bp, Artificial Sequence
  Synthetic oligonucleotide; TGG chr11 5170730 5170749 5170733 -
gatctgatcaaattgccctg

SEQ ID NO: 54896 - DNA, 20 bp, Artificial Sequence
  Synthetic oligonucleotide; GAG chr11 5170728 5170747 5170731 -
tctgatcaaattgccctgtg

SEQ ID NO: 54897 - DNA, 20 bp, Artificial Sequence
  Synthetic oligonucleotide; TAG chr11 5170712 5170731 5170715 -
tgtggagacacacgtcccaa

SEQ ID NO: 54898 - DNA, 20 bp, Artificial Sequence
  Synthetic oligonucleotide; TGG chr11 5170704 5170723 5170707 -
cacacgtcccaatagcatcc

SEQ ID NO: 54899 - DNA, 20 bp, Artificial Sequence
  Synthetic oligonucleotide; TGG chr11 5170676 5170695 5170679 -
tttgtcattaccttcacatt

SEQ ID NO: 54900 - DNA, 20 bp, Artificial Sequence
  Synthetic oligonucleotide; TGG chr11 5170671 5170690 5170674 -
cattaccttcacatttggac

SEQ ID NO: 54901 - DNA, 20 bp, Artificial Sequence
  Synthetic oligonucleotide; TGG chr11 5170653 5170672 5170656 -
actggacttattgttcattg

SEQ ID NO: 54902 - DNA, 20 bp, Artificial Sequence
  Synthetic oligonucleotide; CAG chr11 5170626 5170645 5170629 -
ttatgtgctgattcttcata

SEQ ID NO: 54903 - DNA, 20 bp, Artificial Sequence
  Synthetic oligonucleotide; TGG chr11 5170620 5170639 5170623 -
gctgattcttcatacagtac

SEQ ID NO: 54904 - DNA, 20 bp, Artificial Sequence
  Synthetic oligonucleotide; TAG chr11 5170614 5170633 5170617 -
tcttcatacagtactggaaa

SEQ ID NO: 54905 - DNA, 20 bp, Artificial Sequence
  Synthetic oligonucleotide; TGG chr11 5170607 5170626 5170610 -
acagtactggaaatagcttc

SEQ ID NO: 54906 - DNA, 20 bp, Artificial Sequence
  Synthetic oligonucleotide; GAG chr11 5170605 5170624 5170608 -
agtactggaaatagcttctg

SEQ ID NO: 54907 - DNA, 20 bp, Artificial Sequence
  Synthetic oligonucleotide; CAG chr11 5170602 5170621 5170605 -
actggaaatagcttctggag

SEQ ID NO: 54908 - DNA, 20 bp, Artificial Sequence
  Synthetic oligonucleotide; AGG chr11 5170601 5170620 5170604 -
ctggaaatagcttctggagc

SEQ ID NO: 54909 - DNA, 20 bp, Artificial Sequence
  Synthetic oligonucleotide; GGG chr11 5170600 5170619 5170603 -
tggaaatagcttctggagca

SEQ ID NO: 54910 - DNA, 20 bp, Artificial Sequence
  Synthetic oligonucleotide; CGG chr11 5170597 5170616 5170600 -
aaatagcttctggagcaggg

SEQ ID NO: 54911 - DNA, 20 bp, Artificial Sequence
  Synthetic oligonucleotide; TGG chr11 5170594 5170613 5170597 -
tagcttctggagcagggcgg

SEQ ID NO: 54912 - DNA, 20 bp, Artificial Sequence
  Synthetic oligonucleotide; CAG chr11 5170591 5170610 5170594 -
cttctggagcagggcggtgg

SEQ ID NO: 54913 - DNA, 20 bp, Artificial Sequence
  Synthetic oligonucleotide; AGG chr11 5170590 5170609 5170593 -
ttctggagcagggcggtggc

SEQ ID NO: 54914 - DNA, 20 bp, Artificial Sequence
  Synthetic oligonucleotide; CAG chr11 5170529 5170548 5170532 -
gtgtactatgtgcccatgat

SEQ ID NO: 54915 - DNA, 20 bp, Artificial Sequence
  Synthetic oligonucleotide; TGG chr11 5170505 5170524 5170508 -
ctctccctgatgcaccgctt

SEQ ID NO: 54916 - DNA, 20 bp, Artificial Sequence
  Synthetic oligonucleotide; CGG chr11 5170501 5170520 5170504 -
ccctgatgcaccgctttgga

SEQ ID NO: 54917 - DNA, 20 bp, Artificial Sequence
  Synthetic oligonucleotide; CAG chr11 5170480 5170499 5170483 -
ggcatttacctccacttttc

SEQ ID NO: 54918 - DNA, 20 bp, Artificial Sequence
  Synthetic oligonucleotide; CGG chr11 5170470 5170489 5170473 -
tccacttttccagactgtca

SEQ ID NO: 54919 - DNA, 20 bp, Artificial Sequence
  Synthetic oligonucleotide; TGG chr11 5170440 5170459 5170443 -
ttacctcttttttcctcctg

SEQ ID NO: 54920 - DNA, 20 bp, Artificial Sequence
  Synthetic oligonucleotide; TAG chr11 5170421 5170440 5170424 -
gtggtcaaccccattgtcta

SEQ ID NO: 54921 - DNA, 20 bp, Artificial Sequence
  Synthetic oligonucleotide; AAG chr11 5170407 5170426 5170410 -
tgtctatagtatcaaaatca

SEQ ID NO: 54922 - DNA, 20 bp, Artificial Sequence
  Synthetic oligonucleotide; CAG chr11 5170394 5170413 5170397 -
aaaatcaaagaaattcgcaa

SEQ ID NO: 54923 - DNA, 20 bp, Artificial Sequence
  Synthetic oligonucleotide; CAG chr11 5170373 5170392 5170376 -
agcgttgttcttacactatc

SEQ ID NO: 54924 - DNA, 20 bp, Artificial Sequence
  Synthetic oligonucleotide; AGG chr11 5170372 5170391 5170375 -
gcgttgttcttacactatcc

SEQ ID NO: 54925 - DNA, 20 bp, Artificial Sequence
  Synthetic oligonucleotide; AAG chr11 5170369 5170388 5170372 -
ttgttcttacactatccagg

SEQ ID NO: 54926 - DNA, 20 bp, Artificial Sequence
  Synthetic oligonucleotide; GAG chr11 5170367 5170386 5170370 -
gttcttacactatccaggaa

SEQ ID NO: 54927 - DNA, 20 bp, Artificial Sequence
  Synthetic oligonucleotide; AGG chr11 5170366 5170385 5170369 -
ttcttacactatccaggaag

SEQ ID NO: 54928 - DNA, 20 bp, Artificial Sequence
  Synthetic oligonucleotide; GGG chr11 5170365 5170384 5170368 -
tcttacactatccaggaaga

SEQ ID NO: 54929 - DNA, 20 bp, Artificial Sequence
  Synthetic oligonucleotide; GGG chr11 5170364 5170383 5170367 -
cttacactatccaggaagag

SEQ ID NO: 54930 - DNA, 20 bp, Artificial Sequence
  Synthetic oligonucleotide; GAG chr11 5170360 5170379 5170363 -
cactatccaggaagaggggt

SEQ ID NO: 54931 - DNA, 20 bp, Artificial Sequence
  Synthetic oligonucleotide; TGG chr11 5170351 5170370 5170354 -
ggaagaggggtgagttctaa

SEQ ID NO: 54932 - DNA, 20 bp, Artificial Sequence
  Synthetic oligonucleotide; GAG chr11 5170349 5170368 5170352 -
aagaggggtgagttctaatg

SEQ ID NO: 54933 - DNA, 20 bp, Artificial Sequence
  Synthetic oligonucleotide; AAG chr11 5170342 5170361 5170345 -
gtgagttctaatggagactg

SEQ ID NO: 54934 - DNA, 20 bp, Artificial Sequence
  Synthetic oligonucleotide; CAG chr11 5170330 5170349 5170333 -
ggagactgaagataccctga

SEQ ID NO: 54935 - DNA, 20 bp, Artificial Sequence
  Synthetic oligonucleotide; CAG chr11 5170325 5170344 5170328 -
ctgaagataccctgacagca

SEQ ID NO: 54936 - DNA, 20 bp, Artificial Sequence
  Synthetic oligonucleotide; AGG chr11 5170324 5170343 5170327 -
tgaagataccctgacagcac

SEQ ID NO: 54937 - DNA, 20 bp, Artificial Sequence
  Synthetic oligonucleotide; TAG chr11 5170317 5170336 5170320 -
accctgacagcacaggcact

SEQ ID NO: 54938 - DNA, 20 bp, Artificial Sequence
  Synthetic oligonucleotide; CAG chr11 5170312 5170331 5170315 -
gacagcacaggcacttagat

SEQ ID NO: 54939 - DNA, 20 bp, Artificial Sequence
  Synthetic oligonucleotide; AGG chr11 5170311 5170330 5170314 -
acagcacaggcacttagatc

SEQ ID NO: 54940 - DNA, 20 bp, Artificial Sequence
  Synthetic oligonucleotide; TAG chr11 5170291 5170310 5170294 -
aggctttattacctgaatat

SEQ ID NO: 54941 - DNA, 20 bp, Artificial Sequence
  Synthetic oligonucleotide; TGG chr11 5170265 5170284 5170268 -
tgcaaatatgaaaaattcca

SEQ ID NO: 54942 - DNA, 20 bp, Artificial Sequence
  Synthetic oligonucleotide; GAG chr11 5170243 5170262 5170246 -
gcttattattgcttgttaat

SEQ ID NO: 54943 - DNA, 20 bp, Artificial Sequence
  Synthetic oligonucleotide; TAG chr11 5170227 5170246 5170230 -
taatgagctttaacattttg

SEQ ID NO: 54944 - DNA, 20 bp, Artificial Sequence
  Synthetic oligonucleotide; AAG chr11 5170221 5170240 5170224 -
gctttaacattttgtagatg

SEQ ID NO: 54945 - DNA, 20 bp, Artificial Sequence
  Synthetic oligonucleotide; CAG chr11 5170210 5170229 5170213 -
ttgtagatgaagaaaaaaaa

SEQ ID NO: 54946 - DNA, 20 bp, Artificial Sequence
  Synthetic oligonucleotide; GAG chr11 5170191 5170210 5170194 -
acagttttatatatttccct

SEQ ID NO: 54947 - DNA, 20 bp, Artificial Sequence
  Synthetic oligonucleotide; TAG chr11 5170186 5170205 5170189 -
tttatatatttccctgagaa

SEQ ID NO: 54948 - DNA, 20 bp, Artificial Sequence
  Synthetic oligonucleotide; AGG chr11 5170185 5170204 5170188 -
ttatatatttccctgagaat

SEQ ID NO: 54949 - DNA, 20 bp, Artificial Sequence
  Synthetic oligonucleotide; TGG chr11 5170179 5170198 5170182 -
atttccctgagaataggaaa

SEQ ID NO: 54950 - DNA, 20 bp, Artificial Sequence
  Synthetic oligonucleotide; TGG chr11 5170155 5170174 5170158 -
attactctgaaataaaattg

SEQ ID NO: 54951 - DNA, 20 bp, Artificial Sequence
  Synthetic oligonucleotide; GGG chr11 5170154 5170173 5170157 -
ttactctgaaataaaattgt

SEQ ID NO: 54952 - DNA, 20 bp, Artificial Sequence
  Synthetic oligonucleotide; GAG chr11 5170152 5170171 5170155 -
actctgaaataaaattgtgg

SEQ ID NO: 54953 - DNA, 20 bp, Artificial Sequence
  Synthetic oligonucleotide; AGG chr11 5170151 5170170 5170154 -
ctctgaaataaaattgtggg

SEQ ID NO: 54954 - DNA, 20 bp, Artificial Sequence
  Synthetic oligonucleotide; GAG chr11 5170149 5170168 5170152 -
ctgaaataaaattgtgggag

SEQ ID NO: 54955 - DNA, 20 bp, Artificial Sequence
  Synthetic oligonucleotide; AGG chr11 5170148 5170167 5170151 -
tgaaataaaattgtgggagg

SEQ ID NO: 54956 - DNA, 20 bp, Artificial Sequence
  Synthetic oligonucleotide; TAG chr11 5170143 5170162 5170146 -
taaaattgtgggaggaggca

SEQ ID NO: 54957 - DNA, 20 bp, Artificial Sequence
  Synthetic oligonucleotide; CAG chr11 5170136 5170155 5170139 -
gtgggaggaggcatagaaca

SEQ ID NO: 54958 - DNA, 20 bp, Artificial Sequence
  Synthetic oligonucleotide; AGG chr11 5170135 5170154 5170138 -
tgggaggaggcatagaacac

SEQ ID NO: 54959 - DNA, 20 bp, Artificial Sequence
  Synthetic oligonucleotide; TGG chr11 5170124 5170143 5170127 -
atagaacacaggctttgtcc

SEQ ID NO: 54960 - DNA, 20 bp, Artificial Sequence
  Synthetic oligonucleotide; CAG chr11 5170080 5170099 5170083 -
gaatccttgaatactcaatt

SEQ ID NO: 54961 - DNA, 20 bp, Artificial Sequence
  Synthetic oligonucleotide; TGG chr11 5170070 5170089 5170073 -
atactcaattcagtgacatt

SEQ ID NO: 54962 - DNA, 20 bp, Artificial Sequence
  Synthetic oligonucleotide; TGG chr11 5170064 5170083 5170067 -
aattcagtgacatttggttc

SEQ ID NO: 54963 - DNA, 20 bp, Artificial Sequence
  Synthetic oligonucleotide; GGG chr11 5170063 5170082 5170066 -
attcagtgacatttggttct

SEQ ID NO: 54964 - DNA, 20 bp, Artificial Sequence
  Synthetic oligonucleotide; TAG chr11 5170054 5170073 5170057 -
catttggttctgggaatatg

SEQ ID NO: 54965 - DNA, 20 bp, Artificial Sequence
  Synthetic oligonucleotide; AAG chr11 5170050 5170069 5170053 -
tggttctgggaatatgtaga

SEQ ID NO: 54966 - DNA, 20 bp, Artificial Sequence
  Synthetic oligonucleotide; GAG chr11 5170048 5170067 5170051 -
gttctgggaatatgtagaaa

SEQ ID NO: 54967 - DNA, 20 bp, Artificial Sequence
  Synthetic oligonucleotide; TGG chr11 5170042 5170061 5170045 -
ggaatatgtagaaagagtct

SEQ ID NO: 54968 - DNA, 20 bp, Artificial Sequence
  Synthetic oligonucleotide; GGG chr11 5170041 5170060 5170044 -
gaatatgtagaaagagtctt

SEQ ID NO: 54969 - DNA, 20 bp, Artificial Sequence
  Synthetic oligonucleotide; GGG chr11 5170040 5170059 5170043 -
aatatgtagaaagagtcttg

SEQ ID NO: 54970 - DNA, 20 bp, Artificial Sequence
  Synthetic oligonucleotide; GAG chr11 5170038 5170057 5170041 -
tatgtagaaagagtcttggg

SEQ ID NO: 54971 - DNA, 20 bp, Artificial Sequence
  Synthetic oligonucleotide; AGG chr11 5170037 5170056 5170040 -
atgtagaaagagtcttgggg

SEQ ID NO: 54972 - DNA, 20 bp, Artificial Sequence
  Synthetic oligonucleotide; AAG chr11 5170031 5170050 5170034 -
aaagagtcttggggaggttt

SEQ ID NO: 54973 - DNA, 20 bp, Artificial Sequence
  Synthetic oligonucleotide; TGG chr11 5170024 5170043 5170027 -
cttggggaggtttaagtttc

SEQ ID NO: 54974 - DNA, 20 bp, Artificial Sequence
  Synthetic oligonucleotide; TAG chr11 5170009 5170028 5170012 -
gtttctggttatattaaaat

SEQ ID NO: 54975 - DNA, 20 bp, Artificial Sequence
  Synthetic oligonucleotide; AAG chr11 5169991 5170010 5169994 -
attagtgatacatacttgtg

SEQ ID NO: 54976 - DNA, 20 bp, Artificial Sequence
  Synthetic oligonucleotide; AGG chr11 5169990 5170009 5169993 -
ttagtgatacatacttgtga

SEQ ID NO: 54977 - DNA, 20 bp, Artificial Sequence
  Synthetic oligonucleotide; CAG chr11 5169979 5169998 5169982 -
tacttgtgaaggaaaataat

SEQ ID NO: 54978 - DNA, 20 bp, Artificial Sequence
  Synthetic oligonucleotide; AGG chr11 5169978 5169997 5169981 -
acttgtgaaggaaaataatc

SEQ ID NO: 54979 - DNA, 20 bp, Artificial Sequence
  Synthetic oligonucleotide; AAG chr11 5169969 5169988 5169972 -
ggaaaataatcaggacacaa

SEQ ID NO: 54980 - DNA, 20 bp, Artificial Sequence
  Synthetic oligonucleotide; GAG chr11 5169967 5169986 5169970 -
aaaataatcaggacacaaaa

SEQ ID NO: 54981 - DNA, 20 bp, Artificial Sequence
  Synthetic oligonucleotide; TAG chr11 5169939 5169958 5169942 -
attgtattattttgtttgta

SEQ ID NO: 54982 - DNA, 20 bp, Artificial Sequence
  Synthetic oligonucleotide; CAG chr11 5169933 5169952 5169936 -
ttattttgtttgtatagttt

SEQ ID NO: 54983 - DNA, 20 bp, Artificial Sequence
  Synthetic oligonucleotide; CAG chr11 5169899 5169918 5169902 -
ctaatttaatgtcaaaaaat

SEQ ID NO: 54984 - DNA, 20 bp, Artificial Sequence
  Synthetic oligonucleotide; TGG chr11 5169878 5169897 5169881 -
agaaccctgcttacctctga

SEQ ID NO: 54985 - DNA, 20 bp, Artificial Sequence
  Synthetic oligonucleotide; AAG chr11 5169870 5169889 5169873 -
gcttacctctgatggatata

SEQ ID NO: 54986 - DNA, 20 bp, Artificial Sequence
  Synthetic oligonucleotide; TGG chr11 5169866 5169885 5169869 -
acctctgatggatataaaga

SEQ ID NO: 54987 - DNA, 20 bp, Artificial Sequence
  Synthetic oligonucleotide; AAG chr11 5169863 5169882 5169866 -
tctgatggatataaagatgg

SEQ ID NO: 54988 - DNA, 20 bp, Artificial Sequence
  Synthetic oligonucleotide; TGG chr11 5169858 5169877 5169861 -
tggatataaagatggaagaa

SEQ ID NO: 54989 - DNA, 20 bp, Artificial Sequence
  Synthetic oligonucleotide; GGG chr11 5169857 5169876 5169860 -
ggatataaagatggaagaat

SEQ ID NO: 54990 - DNA, 20 bp, Artificial Sequence
  Synthetic oligonucleotide; GGG chr11 5169856 5169875 5169859 -
gatataaagatggaagaatg

SEQ ID NO: 54991 - DNA, 20 bp, Artificial Sequence
  Synthetic oligonucleotide; GAG chr11 5169854 5169873 5169857 -
tataaagatggaagaatggg

SEQ ID NO: 54992 - DNA, 20 bp, Artificial Sequence
  Synthetic oligonucleotide; GAG chr11 5169852 5169871 5169855 -
taaagatggaagaatgggga

SEQ ID NO: 54993 - DNA, 20 bp, Artificial Sequence
  Synthetic oligonucleotide; GAG chr11 5169845 5169864 5169848 -
ggaagaatggggagagacat

SEQ ID NO: 54994 - DNA, 20 bp, Artificial Sequence
  Synthetic oligonucleotide; AGG chr11 5169844 5169863 5169847 -
gaagaatggggagagacatg

SEQ ID NO: 54995 - DNA, 20 bp, Artificial Sequence
  Synthetic oligonucleotide; TGG chr11 5169834 5169853 5169837 -
gagagacatgaggcaatttc

SEQ ID NO: 54996 - DNA, 20 bp, Artificial Sequence
  Synthetic oligonucleotide; GGG chr11 5169833 5169852 5169836 -
agagacatgaggcaatttct

SEQ ID NO: 54997 - DNA, 20 bp, Artificial Sequence
  Synthetic oligonucleotide; GGG chr11 5169832 5169851 5169835 -
gagacatgaggcaatttctg

SEQ ID NO: 54998 - DNA, 20 bp, Artificial Sequence
  Synthetic oligonucleotide; GAG chr11 5169830 5169849 5169833 -
gacatgaggcaatttctggg

SEQ ID NO: 54999 - DNA, 20 bp, Artificial Sequence
  Synthetic oligonucleotide; TGG chr11 5169826 5169845 5169829 -
tgaggcaatttctggggaga

SEQ ID NO: 55000 - DNA, 20 bp, Artificial Sequence
  Synthetic oligonucleotide; TAG chr11 5169807 5169826 5169810 -
atggaaatattttgttgtgt

SEQ ID NO: 55001 - DNA, 20 bp, Artificial Sequence
  Synthetic oligonucleotide; AGG chr11 5169806 5169825 5169809 -
tggaaatattttgttgtgtt

SEQ ID NO: 55002 - DNA, 20 bp, Artificial Sequence
  Synthetic oligonucleotide; GGG chr11 5169805 5169824 5169808 -
ggaaatattttgttgtgtta

SEQ ID NO: 55003 - DNA, 20 bp, Artificial Sequence
  Synthetic oligonucleotide; TGG chr11 5169799 5169818 5169802 -
attttgttgtgttagggatg

SEQ ID NO: 55004 - DNA, 20 bp, Artificial Sequence
  Synthetic oligonucleotide; CGG chr11 5169769 5169788 5169772 -
gttttgtcaatttgtcaaaa

SEQ ID NO: 55005 - DNA, 20 bp, Artificial Sequence
  Synthetic oligonucleotide; CAG chr11 5169764 5169783 5169767 -
gtcaatttgtcaaaacggta

SEQ ID NO: 55006 - DNA, 20 bp, Artificial Sequence
  Synthetic oligonucleotide; AAG chr11 5169759 5169778 5169762 -
tttgtcaaaacggtacagct

SEQ ID NO: 55007 - DNA, 20 bp, Artificial Sequence
  Synthetic oligonucleotide; TAG chr11 5169743 5169762 5169746 -
agctaagatttgcacatttc

SEQ ID NO: 55008 - DNA, 20 bp, Artificial Sequence
  Synthetic oligonucleotide; AGG chr11 5169742 5169761 5169745 -
gctaagatttgcacatttct

SEQ ID NO: 55009 - DNA, 20 bp, Artificial Sequence
  Synthetic oligonucleotide; AAG chr11 5169694 5169713 5169697 -
tgaatgataataataacaaa

SEQ ID NO: 55010 - DNA, 20 bp, Artificial Sequence
  Synthetic oligonucleotide; AGG chr11 5169693 5169712 5169696 -
gaatgataataataacaaaa

SEQ ID NO: 55011 - DNA, 20 bp, Artificial Sequence
  Synthetic oligonucleotide; TAG chr11 5169686 5169705 5169689 -
aataataacaaaaaggaaaa

SEQ ID NO: 55012 - DNA, 20 bp, Artificial Sequence
  Synthetic oligonucleotide; CAG chr11 5169672 5169691 5169675 -
ggaaaatagtaataataata

SEQ ID NO: 55013 - DNA, 20 bp, Artificial Sequence
  Synthetic oligonucleotide; TAG chr11 5169664 5169683 5169667 -
gtaataataatacagatgat

SEQ ID NO: 55014 - DNA, 20 bp, Artificial Sequence
  Synthetic oligonucleotide; TAG chr11 5169655 5169674 5169658 -
atacagatgattagatttca

SEQ ID NO: 55015 - DNA, 20 bp, Artificial Sequence
  Synthetic oligonucleotide; AAG chr11 5169645 5169664 5169648 -
ttagatttcatagtgaatac

SEQ ID NO: 55016 - DNA, 20 bp, Artificial Sequence
  Synthetic oligonucleotide; TGG chr11 5169640 5169659 5169643 -
tttcatagtgaatacaagtg

SEQ ID NO: 55017 - DNA, 20 bp, Artificial Sequence
  Synthetic oligonucleotide; AAG chr11 5169630 5169649 5169633 -
aatacaagtgtggaaaatac

SEQ ID NO: 55018 - DNA, 20 bp, Artificial Sequence
  Synthetic oligonucleotide; TGG chr11 5169625 5169644 5169628 -
aagtgtggaaaatacaagaa

SEQ ID NO: 55019 - DNA, 20 bp, Artificial Sequence
  Synthetic oligonucleotide; AAG chr11 5169602 5169621 5169605 -
tgtaatgttgataattgttg

SEQ ID NO: 55020 - DNA, 20 bp, Artificial Sequence
  Synthetic oligonucleotide; TGG chr11 5169591 5169610 5169594 -
taattgttgaagttgtgtca

SEQ ID NO: 55021 - DNA, 20 bp, Artificial Sequence
  Synthetic oligonucleotide; GGG chr11 5169590 5169609 5169593 -
aattgttgaagttgtgtcat

SEQ ID NO: 55022 - DNA, 20 bp, Artificial Sequence
  Synthetic oligonucleotide; TGG chr11 5169583 5169602 5169586 -
gaagttgtgtcatgggtgcc

SEQ ID NO: 55023 - DNA, 20 bp, Artificial Sequence
  Synthetic oligonucleotide; TAG chr11 5169549 5169568 5169552 -
aatattctgtttactttgtg

SEQ ID NO: 55024 - DNA, 20 bp, Artificial Sequence
  Synthetic oligonucleotide; AAG chr11 5169526 5169545 5169529 -
tttacaatttctgtaataaa

SEQ ID NO: 55025 - DNA, 20 bp, Artificial Sequence
  Synthetic oligonucleotide; CAG chr11 5169503 5169522 5169506 -
attcttaaaaaaattatact

SEQ ID NO: 55026 - DNA, 20 bp, Artificial Sequence
  Synthetic oligonucleotide; AAG chr11 5169463 5169482 5169466 -
ttaattgaatatgcaccatg

SEQ ID NO: 55027 - DNA, 20 bp, Artificial Sequence
  Synthetic oligonucleotide; CAG chr11 5169460 5169479 5169463 -
attgaatatgcaccatgaag

SEQ ID NO: 55028 - DNA, 20 bp, Artificial Sequence
  Synthetic oligonucleotide; GAG chr11 5169458 5169477 5169461 -
tgaatatgcaccatgaagca

SEQ ID NO: 55029 - DNA, 20 bp, Artificial Sequence
  Synthetic oligonucleotide; TGG chr11 5169443 5169462 5169446 -
aagcagagataacttttaac

SEQ ID NO: 55030 - DNA, 20 bp, Artificial Sequence
  Synthetic oligonucleotide; CAG chr11 5169439 5169458 5169442 -
agagataacttttaactggt

SEQ ID NO: 55031 - DNA, 20 bp, Artificial Sequence
  Synthetic oligonucleotide; AGG chr11 5169438 5169457 5169441 -
gagataacttttaactggtc

SEQ ID NO: 55032 - DNA, 20 bp, Artificial Sequence
  Synthetic oligonucleotide; GAG chr11 5169436 5169455 5169439 -
gataacttttaactggtcag

SEQ ID NO: 55033 - DNA, 20 bp, Artificial Sequence
  Synthetic oligonucleotide; AGG chr11 5169435 5169454 5169438 -
ataacttttaactggtcagg

SEQ ID NO: 55034 - DNA, 20 bp, Artificial Sequence
  Synthetic oligonucleotide; TGG chr11 5169424 5169443 5169427 -
ctggtcaggaggaaactgtt

SEQ ID NO: 55035 - DNA, 20 bp, Artificial Sequence
  Synthetic oligonucleotide; TAG chr11 5169418 5169437 5169421 -
aggaggaaactgtttggctt

SEQ ID NO: 55036 - DNA, 20 bp, Artificial Sequence
  Synthetic oligonucleotide; AAG chr11 5169414 5169433 5169417 -
ggaaactgtttggctttaga

SEQ ID NO: 55037 - DNA, 20 bp, Artificial Sequence
  Synthetic oligonucleotide; GAG chr11 5169395 5169414 5169398 -
aaagctattttatttttaat

SEQ ID NO: 55038 - DNA, 20 bp, Artificial Sequence
  Synthetic oligonucleotide; TAG chr11 5169384 5169403 5169387 -
atttttaatgagttcaatac

SEQ ID NO: 55039 - DNA, 20 bp, Artificial Sequence
  Synthetic oligonucleotide; AAG chr11 5169380 5169399 5169383 -
ttaatgagttcaatactaga

SEQ ID NO: 55040 - DNA, 20 bp, Artificial Sequence
  Synthetic oligonucleotide; TAG chr11 5169344 5169363 5169347 -
actacttgaaaatactgttt

SEQ ID NO: 55041 - DNA, 20 bp, Artificial Sequence
  Synthetic oligonucleotide; AAG chr11 5169341 5169360 5169344 -
acttgaaaatactgttttag

SEQ ID NO: 55042 - DNA, 20 bp, Artificial Sequence
  Synthetic oligonucleotide; CAG chr11 5169323 5169342 5169326 -
agaagaaaataactaaaaaa

SEQ ID NO: 55043 - DNA, 20 bp, Artificial Sequence
  Synthetic oligonucleotide; AAG chr11 5169317 5169336 5169320 -
aaataactaaaaaacagaaa

SEQ ID NO: 55044 - DNA, 20 bp, Artificial Sequence
  Synthetic oligonucleotide; AAG chr11 5169313 5169332 5169316 -
aactaaaaaacagaaaaagc

SEQ ID NO: 55045 - DNA, 20 bp, Artificial Sequence
  Synthetic oligonucleotide; AGG chr11 5169312 5169331 5169315 -
actaaaaaacagaaaaagca

SEQ ID NO: 55046 - DNA, 20 bp, Artificial Sequence
  Synthetic oligonucleotide; TAG chr11 5169296 5169315 5169299 -
agcaaggcctactcctgcaa

SEQ ID NO: 55047 - DNA, 20 bp, Artificial Sequence
  Synthetic oligonucleotide; TGG chr11 5169289 5169308 5169292 -
cctactcctgcaatagtctt

SEQ ID NO: 55048 - DNA, 20 bp, Artificial Sequence
  Synthetic oligonucleotide; CGG chr11 5169272 5169291 5169275 -
ctttggtgacatcaatcact

SEQ ID NO: 55049 - DNA, 20 bp, Artificial Sequence
  Synthetic oligonucleotide; TAG chr11 5169269 5169288 5169272 -
tggtgacatcaatcactcgg

SEQ ID NO: 55050 - DNA, 20 bp, Artificial Sequence
  Synthetic oligonucleotide; TAG chr11 5169266 5169285 5169269 -
tgacatcaatcactcggtag

SEQ ID NO: 55051 - DNA, 20 bp, Artificial Sequence
  Synthetic oligonucleotide; AAG chr11 5169261 5169280 5169264 -
tcaatcactcggtagtagac

SEQ ID NO: 55052 - DNA, 20 bp, Artificial Sequence
  Synthetic oligonucleotide; AAG chr11 5169243 5169262 5169246 -
acaagcttctgacaaacaaa

SEQ ID NO: 55053 - DNA, 20 bp, Artificial Sequence
  Synthetic oligonucleotide; AGG chr11 5169242 5169261 5169245 -
caagcttctgacaaacaaaa

SEQ ID NO: 55054 - DNA, 20 bp, Artificial Sequence
  Synthetic oligonucleotide; TAG chr11 5169239 5169258 5169242 -
gcttctgacaaacaaaaagg

SEQ ID NO: 55055 - DNA, 20 bp, Artificial Sequence
  Synthetic oligonucleotide; AGG chr11 5169238 5169257 5169241 -
cttctgacaaacaaaaaggt

SEQ ID NO: 55056 - DNA, 20 bp, Artificial Sequence
  Synthetic oligonucleotide; GGG chr11 5169237 5169256 5169240 -
ttctgacaaacaaaaaggta

SEQ ID NO: 55057 - DNA, 20 bp, Artificial Sequence
  Synthetic oligonucleotide; GAG chr11 5169235 5169254 5169238 -
ctgacaaacaaaaaggtagg

SEQ ID NO: 55058 - DNA, 20 bp, Artificial Sequence
  Synthetic oligonucleotide; AGG chr11 5169234 5169253 5169237 -
tgacaaacaaaaaggtaggg

SEQ ID NO: 55059 - DNA, 20 bp, Artificial Sequence
  Synthetic oligonucleotide; CAG chr11 5169229 5169248 5169232 -
aacaaaaaggtagggaggac

SEQ ID NO: 55060 - DNA, 20 bp, Artificial Sequence
  Synthetic oligonucleotide; AAG chr11 5169226 5169245 5169229 -
aaaaaggtagggaggaccag

SEQ ID NO: 55061 - DNA, 20 bp, Artificial Sequence
  Synthetic oligonucleotide; TAG chr11 5169218 5169237 5169221 -
agggaggaccagaagaattc

SEQ ID NO: 55062 - DNA, 20 bp, Artificial Sequence
  Synthetic oligonucleotide; CAG chr11 5169206 5169225 5169209 -
aagaattctagaaaatccct

SEQ ID NO: 55063 - DNA, 20 bp, Artificial Sequence
  Synthetic oligonucleotide; CAG chr11 5169202 5169221 5169205 -
attctagaaaatccctcaga

SEQ ID NO: 55064 - DNA, 20 bp, Artificial Sequence
  Synthetic oligonucleotide; AGG chr11 5169201 5169220 5169204 -
ttctagaaaatccctcagac

SEQ ID NO: 55065 - DNA, 20 bp, Artificial Sequence
  Synthetic oligonucleotide; GGG chr11 5169200 5169219 5169203 -
tctagaaaatccctcagaca

SEQ ID NO: 55066 - DNA, 20 bp, Artificial Sequence
  Synthetic oligonucleotide; CAG chr11 5169193 5169212 5169196 -
aatccctcagacagggattg

SEQ ID NO: 55067 - DNA, 20 bp, Artificial Sequence
  Synthetic oligonucleotide; GAG chr11 5169191 5169210 5169194 -
tccctcagacagggattgca

SEQ ID NO: 55068 - DNA, 20 bp, Artificial Sequence
  Synthetic oligonucleotide; CAG chr11 5169169 5169188 5169172 -
gcccaactttttgttttctt

SEQ ID NO: 55069 - DNA, 20 bp, Artificial Sequence
  Synthetic oligonucleotide; CAG chr11 5169142 5169161 5169145 -
ttttgaatttccatgaacca

SEQ ID NO: 55070 - DNA, 20 bp, Artificial Sequence
  Synthetic oligonucleotide; CAG chr11 5169118 5169137 5169121 -
gaatatcctattaaaccaca

SEQ ID NO: 55071 - DNA, 20 bp, Artificial Sequence
  Synthetic oligonucleotide; GAG chr11 5169111 5169130 5169114 -
ctattaaaccacacagtctt

SEQ ID NO: 55072 - DNA, 20 bp, Artificial Sequence
  Synthetic oligonucleotide; CAG chr11 5169101 5169120 5169104 -
acacagtcttgagtgattat

SEQ ID NO: 55073 - DNA, 20 bp, Artificial Sequence
  Synthetic oligonucleotide; AAG chr11 5169092 5169111 5169095 -
tgagtgattatcagccaacc

SEQ ID NO: 55074 - DNA, 20 bp, Artificial Sequence
  Synthetic oligonucleotide; TAG chr11 5169082 5169101 5169085 -
tcagccaaccaagtaactaa

SEQ ID NO: 55075 - DNA, 20 bp, Artificial Sequence
  Synthetic oligonucleotide; AAG chr11 5169079 5169098 5169082 -
gccaaccaagtaactaatag

SEQ ID NO: 55076 - DNA, 20 bp, Artificial Sequence
  Synthetic oligonucleotide; AGG chr11 5169078 5169097 5169081 -
ccaaccaagtaactaataga

SEQ ID NO: 55077 - DNA, 20 bp, Artificial Sequence
  Synthetic oligonucleotide; TGG chr11 5169073 5169092 5169076 -
caagtaactaatagaaggtt

SEQ ID NO: 55078 - DNA, 20 bp, Artificial Sequence
  Synthetic oligonucleotide; AAG chr11 5169051 5169070 5169054 -
gtcaaataaaaatatgtatc

SEQ ID NO: 55079 - DNA, 20 bp, Artificial Sequence
  Synthetic oligonucleotide; GAG chr11 5169044 5169063 5169047 -
aaaaatatgtatcaagtaat

SEQ ID NO: 55080 - DNA, 20 bp, Artificial Sequence
  Synthetic oligonucleotide; TGG chr11 5169041 5169060 5169044 -
aatatgtatcaagtaatgag

SEQ ID NO: 55081 - DNA, 20 bp, Artificial Sequence
  Synthetic oligonucleotide; TGG chr11 5168997 5169016 5169000 -
ttttcctcgaaattaattta

SEQ ID NO: 55082 - DNA, 20 bp, Artificial Sequence
  Synthetic oligonucleotide; AAG chr11 5168959 5168978 5168962 -
aatgtatgaaacacctttga

SEQ ID NO: 55083 - DNA, 20 bp, Artificial Sequence
  Synthetic oligonucleotide; TAG chr11 5168947 5168966 5168950 -
acctttgaaagtgttcaatg

SEQ ID NO: 55084 - DNA, 20 bp, Artificial Sequence
  Synthetic oligonucleotide; AAG chr11 5168942 5168961 5168945 -
tgaaagtgttcaatgtagtg

SEQ ID NO: 55085 - DNA, 20 bp, Artificial Sequence
  Synthetic oligonucleotide; TGG chr11 5168925 5168944 5168928 -
gtgaagtcataaaaacaaca

SEQ ID NO: 55086 - DNA, 20 bp, Artificial Sequence
  Synthetic oligonucleotide; GGG chr11 5168924 5168943 5168927 -
tgaagtcataaaaacaacat

SEQ ID NO: 55087 - DNA, 20 bp, Artificial Sequence
  Synthetic oligonucleotide; CAG chr11 5168896 5168915 5168899 -
aaaaaaaattctcaaaattt

SEQ ID NO: 55088 - DNA, 20 bp, Artificial Sequence
  Synthetic oligonucleotide; GAG chr11 5168894 5168913 5168897 -
aaaaaattctcaaaatttca

SEQ ID NO: 55089 - DNA, 20 bp, Artificial Sequence
  Synthetic oligonucleotide; TAG chr11 5168886 5168905 5168889 -
ctcaaaatttcagagtaatt

SEQ ID NO: 55090 - DNA, 20 bp, Artificial Sequence
  Synthetic oligonucleotide; AAG chr11 5168883 5168902 5168886 -
aaaatttcagagtaatttag

SEQ ID NO: 55091 - DNA, 20 bp, Artificial Sequence
  Synthetic oligonucleotide; TGG chr11 5168859 5168878 5168862 -
ccttccttaacaataattat

SEQ ID NO: 55092 - DNA, 20 bp, Artificial Sequence
  Synthetic oligonucleotide; CAG chr11 5168844 5168863 5168847 -
attattggtaacctccatta

SEQ ID NO: 55093 - DNA, 20 bp, Artificial Sequence
  Synthetic oligonucleotide; TGG chr11 5168822 5168841 5168825 -
gtcctgtattactattctta

SEQ ID NO: 55094 - DNA, 20 bp, Artificial Sequence
  Synthetic oligonucleotide; AAG chr11 5168803 5168822 5168806 -
atggtatacatgaaaaaact

SEQ ID NO: 55095 - DNA, 20 bp, Artificial Sequence
  Synthetic oligonucleotide; GAG chr11 5168801 5168820 5168804 -
ggtatacatgaaaaaactaa

SEQ ID NO: 55096 - DNA, 20 bp, Artificial Sequence
  Synthetic oligonucleotide; AAG chr11 5168778 5168797 5168781 -
ataatttttgtaactttatc

SEQ ID NO: 55097 - DNA, 20 bp, Artificial Sequence
  Synthetic oligonucleotide; TGG chr11 5168766 5168785 5168769 -
actttatcaagttcacacaa

SEQ ID NO: 55098 - DNA, 20 bp, Artificial Sequence
  Synthetic oligonucleotide; AAG chr11 5168748 5168767 5168751 -
aatggaaaacttgtacaccc

SEQ ID NO: 55099 - DNA, 20 bp, Artificial Sequence
  Synthetic oligonucleotide; GAG chr11 5168746 5168765 5168749 -
tggaaaacttgtacacccaa

SEQ ID NO: 55100 - DNA, 20 bp, Artificial Sequence
  Synthetic oligonucleotide; AAG chr11 5168741 5168760 5168744 -
aacttgtacacccaagagcc

SEQ ID NO: 55101 - DNA, 20 bp, Artificial Sequence
  Synthetic oligonucleotide; CAG chr11 5168734 5168753 5168737 -
acacccaagagccaagtcct

SEQ ID NO: 55102 - DNA, 20 bp, Artificial Sequence
  Synthetic oligonucleotide; CAG chr11 5168710 5168729 5168713 -
gtgatgttatacacttgaac

SEQ ID NO: 55103 - DNA, 20 bp, Artificial Sequence
  Synthetic oligonucleotide; TAG chr11 5168700 5168719 5168703 -
acacttgaaccagatgtacc

SEQ ID NO: 55104 - DNA, 20 bp, Artificial Sequence
  Synthetic oligonucleotide; AGG chr11 5168699 5168718 5168702 -
cacttgaaccagatgtacct

SEQ ID NO: 55105 - DNA, 20 bp, Artificial Sequence
  Synthetic oligonucleotide; TAG chr11 5168687 5168706 5168690 -
atgtacctaggttgaaatct

SEQ ID NO: 55106 - DNA, 20 bp, Artificial Sequence
  Synthetic oligonucleotide; TAG chr11 5168672 5168691 5168675 -
aatcttagctatcttgctat

SEQ ID NO: 55107 - DNA, 20 bp, Artificial Sequence
  Synthetic oligonucleotide; TGG chr11 5168663 5168682 5168666 -
tatcttgctattagtaattg

SEQ ID NO: 55108 - DNA, 20 bp, Artificial Sequence
  Synthetic oligonucleotide; GGG chr11 5168662 5168681 5168665 -
atcttgctattagtaattgt

SEQ ID NO: 55109 - DNA, 20 bp, Artificial Sequence
  Synthetic oligonucleotide; TAG chr11 5168652 5168671 5168655 -
tagtaattgtgggatcttgc

SEQ ID NO: 55110 - DNA, 20 bp, Artificial Sequence
  Synthetic oligonucleotide; TAG chr11 5168649 5168668 5168652 -
taattgtgggatcttgctag

SEQ ID NO: 55111 - DNA, 20 bp, Artificial Sequence
  Synthetic oligonucleotide; AAG chr11 5168605 5168624 5168608 -
ttattcatttataaatgaat

SEQ ID NO: 55112 - DNA, 20 bp, Artificial Sequence
  Synthetic oligonucleotide; CAG chr11 5168591 5168610 5168594 -
atgaataagaaaataaaatc

SEQ ID NO: 55113 - DNA, 20 bp, Artificial Sequence
  Synthetic oligonucleotide; AAG chr11 5168574 5168593 5168577 -
atccagcttttatgatcttg

SEQ ID NO: 55114 - DNA, 20 bp, Artificial Sequence
  Synthetic oligonucleotide; TGG chr11 5168560 5168579 5168563 -
atcttgaagattaaatgaaa

SEQ ID NO: 55115 - DNA, 20 bp, Artificial Sequence
  Synthetic oligonucleotide; AAG chr11 5168549 5168568 5168552 -
taaatgaaatggtgcacatt

SEQ ID NO: 55116 - DNA, 20 bp, Artificial Sequence
  Synthetic oligonucleotide; TAG chr11 5168542 5168561 5168545 -
aatggtgcacattaagcaat

SEQ ID NO: 55117 - DNA, 20 bp, Artificial Sequence
  Synthetic oligonucleotide; AAG chr11 5168537 5168556 5168540 -
tgcacattaagcaattagca

SEQ ID NO: 55118 - DNA, 20 bp, Artificial Sequence
  Synthetic oligonucleotide; TAG chr11 5168530 5168549 5168533 -
taagcaattagcaaagttcc

SEQ ID NO: 55119 - DNA, 20 bp, Artificial Sequence
  Synthetic oligonucleotide; AAG chr11 5168512 5168531 5168515 -
cctagtaaaatttgctcaat

SEQ ID NO: 55120 - DNA, 20 bp, Artificial Sequence
  Synthetic oligonucleotide; AAG chr11 5168494 5168513 5168497 -
ataagtaattatattttatt

SEQ ID NO: 55121 - DNA, 20 bp, Artificial Sequence
  Synthetic oligonucleotide; CAG chr11 5168449 5168468 5168452 -
gactacaatacgtgaataca

SEQ ID NO: 55122 - DNA, 20 bp, Artificial Sequence
  Synthetic oligonucleotide; CAG chr11 5168426 5168445 5168429 -
tcaaatttcacaattcctga

SEQ ID NO: 55123 - DNA, 20 bp, Artificial Sequence
  Synthetic oligonucleotide; AAG chr11 5168397 5168416 5168400 -
taaatgctaattttaaactc

SEQ ID NO: 55124 - DNA, 20 bp, Artificial Sequence
  Synthetic oligonucleotide; AAG chr11 5168381 5168400 5168384 -
actcaagtacataaaaatta

SEQ ID NO: 55125 - DNA, 20 bp, Artificial Sequence
  Synthetic oligonucleotide; GAG chr11 5168359 5168378 5168362 -
gtcacaaatttctctgtcac

SEQ ID NO: 55126 - DNA, 20 bp, Artificial Sequence
  Synthetic oligonucleotide; TAG chr11 5168353 5168372 5168356 -
aatttctctgtcacgagcta

SEQ ID NO: 55127 - DNA, 20 bp, Artificial Sequence
  Synthetic oligonucleotide; AAG chr11 5168339 5168358 5168342 -
gagctatagtgtaccatact

SEQ ID NO: 55128 - DNA, 20 bp, Artificial Sequence
  Synthetic oligonucleotide; TAG chr11 5168327 5168346 5168330 -
accatactaagtgatttata

SEQ ID NO: 55129 - DNA, 20 bp, Artificial Sequence
  Synthetic oligonucleotide; TAG chr11 5168322 5168341 5168325 -
actaagtgatttatatagat

SEQ ID NO: 55130 - DNA, 20 bp, Artificial Sequence
  Synthetic oligonucleotide; CGG chr11 5168306 5168325 5168309 -
agattagttcatttaatcca

SEQ ID NO: 55131 - DNA, 20 bp, Artificial Sequence
  Synthetic oligonucleotide; AAG chr11 5168291 5168310 5168294 -
atccacggaacaaatatatg

SEQ ID NO: 55132 - DNA, 20 bp, Artificial Sequence
  Synthetic oligonucleotide; CAG chr11 5168281 5168300 5168284 -
caaatatatgaagaaattat

SEQ ID NO: 55133 - DNA, 20 bp, Artificial Sequence
  Synthetic oligonucleotide; TAG chr11 5168257 5168276 5168260 -
ttgtctacatgttacaaatg

SEQ ID NO: 55134 - DNA, 20 bp, Artificial Sequence
  Synthetic oligonucleotide; CAG chr11 5168251 5168270 5168254 -
acatgttacaaatgtagaaa

SEQ ID NO: 55135 - DNA, 20 bp, Artificial Sequence
  Synthetic oligonucleotide; TAG chr11 5168243 5168262 5168246 -
caaatgtagaaacagaaaca

SEQ ID NO: 55136 - DNA, 20 bp, Artificial Sequence
  Synthetic oligonucleotide; GAG chr11 5168241 5168260 5168244 -
aatgtagaaacagaaacata

SEQ ID NO: 55137 - DNA, 20 bp, Artificial Sequence
  Synthetic oligonucleotide; AAG chr11 5168238 5168257 5168241 -
gtagaaacagaaacatagag

SEQ ID NO: 55138 - DNA, 20 bp, Artificial Sequence
  Synthetic oligonucleotide; AAG chr11 5168233 5168252 5168236 -
aacagaaacatagagaagtc

SEQ ID NO: 55139 - DNA, 20 bp, Artificial Sequence
  Synthetic oligonucleotide; AAG chr11 5168218 5168237 5168221 -
aagtcaagtcatcatgcccc

SEQ ID NO: 55140 - DNA, 20 bp, Artificial Sequence
  Synthetic oligonucleotide; AAG chr11 5168212 5168231 5168215 -
agtcatcatgccccaagtca

SEQ ID NO: 55141 - DNA, 20 bp, Artificial Sequence
  Synthetic oligonucleotide; GAG chr11 5168210 5168229 5168213 -
tcatcatgccccaagtcaaa

SEQ ID NO: 55142 - DNA, 20 bp, Artificial Sequence
  Synthetic oligonucleotide; AAG chr11 5168202 5168221 5168205 -
ccccaagtcaaagagttaat

SEQ ID NO: 55143 - DNA, 20 bp, Artificial Sequence
  Synthetic oligonucleotide; TGG chr11 5168199 5168218 5168202 -
caagtcaaagagttaataag

SEQ ID NO: 55144 - DNA, 20 bp, Artificial Sequence
  Synthetic oligonucleotide; CAG chr11 5168196 5168215 5168199 -
gtcaaagagttaataagtgg

SEQ ID NO: 55145 - DNA, 20 bp, Artificial Sequence
  Synthetic oligonucleotide; CAG chr11 5168177 5168196 5168180 -
gcagaatcacaactcaaaac

SEQ ID NO: 55146 - DNA, 20 bp, Artificial Sequence
  Synthetic oligonucleotide; TAG chr11 5168148 5168167 5168151 -
caactaaaaacctgattctt

SEQ ID NO: 55147 - DNA, 20 bp, Artificial Sequence
  Synthetic oligonucleotide; CAG chr11 5168132 5168151 5168135 -
tctttagcccaccatattat

SEQ ID NO: 55148 - DNA, 20 bp, Artificial Sequence
  Synthetic oligonucleotide; TGG chr11 5168129 5168148 5168132 -
ttagcccaccatattatcag

SEQ ID NO: 55149 - DNA, 20 bp, Artificial Sequence
  Synthetic oligonucleotide; CAG chr11 5168109 5168128 5168112 -
tggtcccataacttaaaatt

SEQ ID NO: 55150 - DNA, 20 bp, Artificial Sequence
  Synthetic oligonucleotide; TGG chr11 5168091 5168110 5168094 -
ttcagatttgactttaaaat

SEQ ID NO: 55151 - DNA, 20 bp, Artificial Sequence
  Synthetic oligonucleotide; AAG chr11 5168082 5168101 5168085 -
gactttaaaattggaatctg

SEQ ID NO: 55152 - DNA, 20 bp, Artificial Sequence
  Synthetic oligonucleotide; AAG chr11 5168073 5168092 5168076 -
attggaatctgaagaacacc

SEQ ID NO: 55153 - DNA, 20 bp, Artificial Sequence
  Synthetic oligonucleotide; GAG chr11 5168044 5168063 5168047 -
tgtaaaccattttctccttt

SEQ ID NO: 55154 - DNA, 20 bp, Artificial Sequence
  Synthetic oligonucleotide; GAG chr11 5168035 5168054 5168038 -
ttttctcctttgagattcat

SEQ ID NO: 55155 - DNA, 20 bp, Artificial Sequence
  Synthetic oligonucleotide; AGG chr11 5168034 5168053 5168037 -
tttctcctttgagattcatg

SEQ ID NO: 55156 - DNA, 20 bp, Artificial Sequence
  Synthetic oligonucleotide; TAG chr11 5167998 5168017 5168001 -
acctctgtttcctctaatta

SEQ ID NO: 55157 - DNA, 20 bp, Artificial Sequence
  Synthetic oligonucleotide; AAG chr11 5167975 5167994 5167978 -
tcatatattaataatgtata

SEQ ID NO: 55158 - DNA, 20 bp, Artificial Sequence
  Synthetic oligonucleotide; AGG chr11 5167974 5167993 5167977 -
catatattaataatgtataa

SEQ ID NO: 55159 - DNA, 20 bp, Artificial Sequence
  Synthetic oligonucleotide; AAG chr11 5167964 5167983 5167967 -
taatgtataaaggttttctc

SEQ ID NO: 55160 - DNA, 20 bp, Artificial Sequence
  Synthetic oligonucleotide; GAG chr11 5167962 5167981 5167965 -
atgtataaaggttttctcaa

SEQ ID NO: 55161 - DNA, 20 bp, Artificial Sequence
  Synthetic oligonucleotide; AGG chr11 5167961 5167980 5167964 -
tgtataaaggttttctcaag

SEQ ID NO: 55162 - DNA, 20 bp, Artificial Sequence
  Synthetic oligonucleotide; AAG chr11 5167948 5167967 5167951 -
tctcaagaggatctttataa

SEQ ID NO: 55163 - DNA, 20 bp, Artificial Sequence
  Synthetic oligonucleotide; AGG chr11 5167947 5167966 5167950 -
ctcaagaggatctttataaa

SEQ ID NO: 55164 - DNA, 20 bp, Artificial Sequence
  Synthetic oligonucleotide; GGG chr11 5167946 5167965 5167949 -
tcaagaggatctttataaaa

SEQ ID NO: 55165 - DNA, 20 bp, Artificial Sequence
  Synthetic oligonucleotide; GGG chr11 5167945 5167964 5167948 -
caagaggatctttataaaag

SEQ ID NO: 55166 - DNA, 20 bp, Artificial Sequence
  Synthetic oligonucleotide; TAG chr11 5167931 5167950 5167934 -
taaaaggggccttcccacat

SEQ ID NO: 55167 - DNA, 20 bp, Artificial Sequence
  Synthetic oligonucleotide; TAG chr11 5167918 5167937 5167921 -
cccacattagtttaactgct

SEQ ID NO: 55168 - DNA, 20 bp, Artificial Sequence
  Synthetic oligonucleotide; AGG chr11 5167917 5167936 5167920 -
ccacattagtttaactgctt

SEQ ID NO: 55169 - DNA, 20 bp, Artificial Sequence
  Synthetic oligonucleotide; TAG chr11 5167879 5167898 5167882 -
acttcctcaaccaacacttt

SEQ ID NO: 55170 - DNA, 20 bp, Artificial Sequence
  Synthetic oligonucleotide; AAG chr11 5167865 5167884 5167868 -
cacttttagaactatcatct

SEQ ID NO: 55171 - DNA, 20 bp, Artificial Sequence
  Synthetic oligonucleotide; CGG chr11 5167855 5167874 5167858 -
actatcatctaagattacat

SEQ ID NO: 55172 - DNA, 20 bp, Artificial Sequence
  Synthetic oligonucleotide; AAG chr11 5167814 5167833 5167817 -
acaataaataaatacttttt

SEQ ID NO: 55173 - DNA, 20 bp, Artificial Sequence
  Synthetic oligonucleotide; CAG chr11 5167810 5167829 5167813 -
taaataaatactttttaagc

SEQ ID NO: 55174 - DNA, 20 bp, Artificial Sequence
  Synthetic oligonucleotide; AAG chr11 5167762 5167781 5167765 -
tattacatattattcattct

SEQ ID NO: 55175 - DNA, 20 bp, Artificial Sequence
  Synthetic oligonucleotide; TAG chr11 5167757 5167776 5167760 -
catattattcattctaagtg

SEQ ID NO: 55176 - DNA, 20 bp, Artificial Sequence
  Synthetic oligonucleotide; TAG chr11 5167751 5167770 5167754 -
attcattctaagtgtagtcc

SEQ ID NO: 55177 - DNA, 20 bp, Artificial Sequence
  Synthetic oligonucleotide; TAG chr11 5167745 5167764 5167748 -
tctaagtgtagtcctagata

SEQ ID NO: 55178 - DNA, 20 bp, Artificial Sequence
  Synthetic oligonucleotide; TAG chr11 5167742 5167761 5167745 -
aagtgtagtcctagatatag

SEQ ID NO: 55179 - DNA, 20 bp, Artificial Sequence
  Synthetic oligonucleotide; GAG chr11 5167740 5167759 5167743 -
gtgtagtcctagatatagta

SEQ ID NO: 55180 - DNA, 20 bp, Artificial Sequence
  Synthetic oligonucleotide; AAG chr11 5167728 5167747 5167731 -
atatagtagagtactacgcc

SEQ ID NO: 55181 - DNA, 20 bp, Artificial Sequence
  Synthetic oligonucleotide; CAG chr11 5167721 5167740 5167724 -
agagtactacgccaagacat

SEQ ID NO: 55182 - DNA, 20 bp, Artificial Sequence
  Synthetic oligonucleotide; AGG chr11 5167720 5167739 5167723 -
gagtactacgccaagacatc

SEQ ID NO: 55183 - DNA, 20 bp, Artificial Sequence
  Synthetic oligonucleotide; AAG chr11 5167715 5167734 5167718 -
ctacgccaagacatcaggtc

SEQ ID NO: 55184 - DNA, 20 bp, Artificial Sequence
  Synthetic oligonucleotide; AGG chr11 5167714 5167733 5167717 -
tacgccaagacatcaggtca

SEQ ID NO: 55185 - DNA, 20 bp, Artificial Sequence
  Synthetic oligonucleotide; AAG chr11 5167706 5167725 5167709 -
gacatcaggtcaaggacaaa

SEQ ID NO: 55186 - DNA, 20 bp, Artificial Sequence
  Synthetic oligonucleotide; AAG chr11 5167693 5167712 5167696 -
ggacaaaaagatgatcctaa

SEQ ID NO: 55187 - DNA, 20 bp, Artificial Sequence
  Synthetic oligonucleotide; CAG chr11 5167690 5167709 5167693 -
caaaaagatgatcctaaaag

SEQ ID NO: 55188 - DNA, 20 bp, Artificial Sequence
  Synthetic oligonucleotide; AAG chr11 5167687 5167706 5167690 -
aaagatgatcctaaaagcag

SEQ ID NO: 55189 - DNA, 20 bp, Artificial Sequence
  Synthetic oligonucleotide; GAG chr11 5167685 5167704 5167688 -
agatgatcctaaaagcagaa

SEQ ID NO: 55190 - DNA, 20 bp, Artificial Sequence
  Synthetic oligonucleotide; GAG chr11 5167680 5167699 5167683 -
atcctaaaagcagaagagat

SEQ ID NO: 55191 - DNA, 20 bp, Artificial Sequence
  Synthetic oligonucleotide; TAG chr11 5167670 5167689 5167673 -
cagaagagatgagaaacaaa

SEQ ID NO: 55192 - DNA, 20 bp, Artificial Sequence
  Synthetic oligonucleotide; AAG chr11 5167661 5167680 5167664 -
tgagaaacaaatagcatata

SEQ ID NO: 55193 - DNA, 20 bp, Artificial Sequence
  Synthetic oligonucleotide; AGG chr11 5167660 5167679 5167663 -
gagaaacaaatagcatataa

SEQ ID NO: 55194 - DNA, 20 bp, Artificial Sequence
  Synthetic oligonucleotide; GAG chr11 5167658 5167677 5167661 -
gaaacaaatagcatataaag

SEQ ID NO: 55195 - DNA, 20 bp, Artificial Sequence
  Synthetic oligonucleotide; TAG chr11 5167625 5167644 5167628 -
tgtgacaacaaacatctcaa

SEQ ID NO: 55196 - DNA, 20 bp, Artificial Sequence
  Synthetic oligonucleotide; CAG chr11 5167614 5167633 5167617 -
acatctcaatagaaatcaca

SEQ ID NO: 55197 - DNA, 20 bp, Artificial Sequence
  Synthetic oligonucleotide; AAG chr11 5167608 5167627 5167611 -
caatagaaatcacacagtcc

SEQ ID NO: 55198 - DNA, 20 bp, Artificial Sequence
  Synthetic oligonucleotide; GAG chr11 5167606 5167625 5167609 -
atagaaatcacacagtccaa

SEQ ID NO: 55199 - DNA, 20 bp, Artificial Sequence
  Synthetic oligonucleotide; GAG chr11 5167604 5167623 5167607 -
agaaatcacacagtccaaga

SEQ ID NO: 55200 - DNA, 20 bp, Artificial Sequence
  Synthetic oligonucleotide; GAG chr11 5167602 5167621 5167605 -
aaatcacacagtccaagaga

SEQ ID NO: 55201 - DNA, 20 bp, Artificial Sequence
  Synthetic oligonucleotide; AAG chr11 5167583 5167602 5167586 -
agagtcgaatgaaattttca

SEQ ID NO: 55202 - DNA, 20 bp, Artificial Sequence
  Synthetic oligonucleotide; CAG chr11 5167576 5167595 5167579 -
aatgaaattttcaaagcgct

SEQ ID NO: 55203 - DNA, 20 bp, Artificial Sequence
  Synthetic oligonucleotide; AGG chr11 5167575 5167594 5167578 -
atgaaattttcaaagcgctc

SEQ ID NO: 55204 - DNA, 20 bp, Artificial Sequence
  Synthetic oligonucleotide; GGG chr11 5167574 5167593 5167577 -
tgaaattttcaaagcgctca

SEQ ID NO: 55205 - DNA, 20 bp, Artificial Sequence
  Synthetic oligonucleotide; AAG chr11 5167567 5167586 5167570 -
ttcaaagcgctcagggataa

SEQ ID NO: 55206 - DNA, 20 bp, Artificial Sequence
  Synthetic oligonucleotide; AAG chr11 5167551 5167570 5167554 -
ataaaagaaaactgatattc

SEQ ID NO: 55207 - DNA, 20 bp, Artificial Sequence
  Synthetic oligonucleotide; TAG chr11 5167539 5167558 5167542 -
tgatattcaagaatatttta

SEQ ID NO: 55208 - DNA, 20 bp, Artificial Sequence
  Synthetic oligonucleotide; AGG chr11 5167538 5167557 5167541 -
gatattcaagaatattttat

SEQ ID NO: 55209 - DNA, 20 bp, Artificial Sequence
  Synthetic oligonucleotide; GGG chr11 5167537 5167556 5167540 -
atattcaagaatattttata

SEQ ID NO: 55210 - DNA, 20 bp, Artificial Sequence
  Synthetic oligonucleotide; AAG chr11 5167514 5167533 5167517 -
taaaactgttattcaaatat

SEQ ID NO: 55211 - DNA, 20 bp, Artificial Sequence
  Synthetic oligonucleotide; AAG chr11 5167502 5167521 5167505 -
tcaaatataagcaatatata

SEQ ID NO: 55212 - DNA, 20 bp, Artificial Sequence
  Synthetic oligonucleotide; CAG chr11 5167492 5167511 5167495 -
gcaatatataaagtctttcc

SEQ ID NO: 55213 - DNA, 20 bp, Artificial Sequence
  Synthetic oligonucleotide; AAG chr11 5167481 5167500 5167484 -
agtctttcccagacaaacaa

SEQ ID NO: 55214 - DNA, 20 bp, Artificial Sequence
  Synthetic oligonucleotide; GAG chr11 5167476 5167495 5167479 -
ttcccagacaaacaaaagtt

SEQ ID NO: 55215 - DNA, 20 bp, Artificial Sequence
  Synthetic oligonucleotide; GAG chr11 5167474 5167493 5167477 -
cccagacaaacaaaagttga

SEQ ID NO: 55216 - DNA, 20 bp, Artificial Sequence
  Synthetic oligonucleotide; CAG chr11 5167458 5167477 5167461 -
ttgagagaattcaccaacac

SEQ ID NO: 55217 - DNA, 20 bp, Artificial Sequence
  Synthetic oligonucleotide; AAG chr11 5167434 5167453 5167437 -
ccatcttgcaaaaaatgcta

SEQ ID NO: 55218 - DNA, 20 bp, Artificial Sequence
  Synthetic oligonucleotide; AGG chr11 5167433 5167452 5167436 -
catcttgcaaaaaatgctaa

SEQ ID NO: 55219 - DNA, 20 bp, Artificial Sequence
  Synthetic oligonucleotide; GGG chr11 5167432 5167451 5167435 -
atcttgcaaaaaatgctaaa

SEQ ID NO: 55220 - DNA, 20 bp, Artificial Sequence
  Synthetic oligonucleotide; GAG chr11 5167430 5167449 5167433 -
cttgcaaaaaatgctaaagg

SEQ ID NO: 55221 - DNA, 20 bp, Artificial Sequence
  Synthetic oligonucleotide; AAG chr11 5167414 5167433 5167417 -
aagggagttatgcaatctga

SEQ ID NO: 55222 - DNA, 20 bp, Artificial Sequence
  Synthetic oligonucleotide; AAG chr11 5167407 5167426 5167410 -
ttatgcaatctgaaagaaaa

SEQ ID NO: 55223 - DNA, 20 bp, Artificial Sequence
  Synthetic oligonucleotide; AAG chr11 5167390 5167409 5167393 -
aaaaagacattaacatgcaa

SEQ ID NO: 55224 - DNA, 20 bp, Artificial Sequence
  Synthetic oligonucleotide; AAG chr11 5167376 5167395 5167379 -
atgcaaaagaaaacttttca

SEQ ID NO: 55225 - DNA, 20 bp, Artificial Sequence
  Synthetic oligonucleotide; TGG chr11 5167361 5167380 5167364 -
tttcaaagtatgaaacccac

SEQ ID NO: 55226 - DNA, 20 bp, Artificial Sequence
  Synthetic oligonucleotide; AAG chr11 5167351 5167370 5167354 -
tgaaacccactggtaaaatt

SEQ ID NO: 55227 - DNA, 20 bp, Artificial Sequence
  Synthetic oligonucleotide; TAG chr11 5167344 5167363 5167347 -
cactggtaaaattaagtaca

SEQ ID NO: 55228 - DNA, 20 bp, Artificial Sequence
  Synthetic oligonucleotide; TAG chr11 5167334 5167353 5167337 -
attaagtacatagacaaacc

SEQ ID NO: 55229 - DNA, 20 bp, Artificial Sequence
  Synthetic oligonucleotide; TGG chr11 5167309 5167328 5167312 -
taccccattactgtattttt

SEQ ID NO: 55230 - DNA, 20 bp, Artificial Sequence
  Synthetic oligonucleotide; CAG chr11 5167293 5167312 5167296 -
tttttggtgtgcaatccaca

SEQ ID NO: 55231 - DNA, 20 bp, Artificial Sequence
  Synthetic oligonucleotide; CAG chr11 5167285 5167304 5167288 -
gtgcaatccacacagaactc

SEQ ID NO: 55232 - DNA, 20 bp, Artificial Sequence
  Synthetic oligonucleotide; CAG chr11 5167251 5167270 5167254 -
aaaaacaaatctttcaaaaa

SEQ ID NO: 55233 - DNA, 20 bp, Artificial Sequence
  Synthetic oligonucleotide; TAG chr11 5167245 5167264 5167248 -
aaatctttcaaaaacagtaa

SEQ ID NO: 55234 - DNA, 20 bp, Artificial Sequence
  Synthetic oligonucleotide; TAG chr11 5167239 5167258 5167242 -
ttcaaaaacagtaatagcta

SEQ ID NO: 55235 - DNA, 20 bp, Artificial Sequence
  Synthetic oligonucleotide; AAG chr11 5167227 5167246 5167230 -
aatagctatagcaacctttt

SEQ ID NO: 55236 - DNA, 20 bp, Artificial Sequence
  Synthetic oligonucleotide; TAG chr11 5167221 5167240 5167224 -
tatagcaaccttttaagatg

SEQ ID NO: 55237 - DNA, 20 bp, Artificial Sequence
  Synthetic oligonucleotide; AGG chr11 5167220 5167239 5167223 -
atagcaaccttttaagatgt

SEQ ID NO: 55238 - DNA, 20 bp, Artificial Sequence
  Synthetic oligonucleotide; GAG chr11 5167197 5167216 5167200 -
taatataaaatatgtaaaat

SEQ ID NO: 55239 - DNA, 20 bp, Artificial Sequence
  Synthetic oligonucleotide; AAG chr11 5167190 5167209 5167193 -
aaatatgtaaaatgagacaa

SEQ ID NO: 55240 - DNA, 20 bp, Artificial Sequence
  Synthetic oligonucleotide; TGG chr11 5167179 5167198 5167182 -
atgagacaaaagtcaaaatg

SEQ ID NO: 55241 - DNA, 20 bp, Artificial Sequence
  Synthetic oligonucleotide; GGG chr11 5167178 5167197 5167181 -
tgagacaaaagtcaaaatgt

SEQ ID NO: 55242 - DNA, 20 bp, Artificial Sequence
  Synthetic oligonucleotide; GGG chr11 5167177 5167196 5167180 -
gagacaaaagtcaaaatgtg

SEQ ID NO: 55243 - DNA, 20 bp, Artificial Sequence
  Synthetic oligonucleotide; GGG chr11 5167176 5167195 5167179 -
agacaaaagtcaaaatgtgg

SEQ ID NO: 55244 - DNA, 20 bp, Artificial Sequence
  Synthetic oligonucleotide; TGG chr11 5167173 5167192 5167176 -
caaaagtcaaaatgtggggg

SEQ ID NO: 55245 - DNA, 20 bp, Artificial Sequence
  Synthetic oligonucleotide; GAG chr11 5167171 5167190 5167174 -
aaagtcaaaatgtgggggtg

SEQ ID NO: 55246 - DNA, 20 bp, Artificial Sequence
  Synthetic oligonucleotide; TGG chr11 5167168 5167187 5167171 -
gtcaaaatgtgggggtggag

SEQ ID NO: 55247 - DNA, 20 bp, Artificial Sequence
  Synthetic oligonucleotide; GAG chr11 5167166 5167185 5167169 -
caaaatgtgggggtggagtg

SEQ ID NO: 55248 - DNA, 20 bp, Artificial Sequence
  Synthetic oligonucleotide; AAG chr11 5167160 5167179 5167163 -
gtgggggtggagtggagtta

SEQ ID NO: 55249 - DNA, 20 bp, Artificial Sequence
  Synthetic oligonucleotide; TAG chr11 5167155 5167174 5167158 -
ggtggagtggagttaaagtg

SEQ ID NO: 55250 - DNA, 20 bp, Artificial Sequence
  Synthetic oligonucleotide; AAG chr11 5167102 5167121 5167105 -
tattcctttatttgcgatct

SEQ ID NO: 55251 - DNA, 20 bp, Artificial Sequence
  Synthetic oligonucleotide; AAG chr11 5167061 5167080 5167064 -
aaataacttgctatatttat

SEQ ID NO: 55252 - DNA, 20 bp, Artificial Sequence
  Synthetic oligonucleotide; AAG chr11 5167047 5167066 5167050 -
atttataagatgtttcttgt

SEQ ID NO: 55253 - DNA, 20 bp, Artificial Sequence
  Synthetic oligonucleotide; TGG chr11 5167039 5167058 5167042 -
gatgtttcttgtaagcccca

SEQ ID NO: 55254 - DNA, 20 bp, Artificial Sequence
  Synthetic oligonucleotide; CAG chr11 5167030 5167049 5167033 -
tgtaagccccatggtaacca

SEQ ID NO: 55255 - DNA, 20 bp, Artificial Sequence
  Synthetic oligonucleotide; TAG chr11 5167012 5167031 5167015 -
cacagcacaaaaatctataa

SEQ ID NO: 55256 - DNA, 20 bp, Artificial Sequence
  Synthetic oligonucleotide; AAG chr11 5166993 5167012 5166996 -
atagatttactaaaaataaa

SEQ ID NO: 55257 - DNA, 20 bp, Artificial Sequence
  Synthetic oligonucleotide; CAG chr11 5166969 5166988 5166972 -
aacaaattaaaatatgctac

SEQ ID NO: 55258 - DNA, 20 bp, Artificial Sequence
  Synthetic oligonucleotide; GAG chr11 5166967 5166986 5166970 -
caaattaaaatatgctacca

SEQ ID NO: 55259 - DNA, 20 bp, Artificial Sequence
  Synthetic oligonucleotide; AAG chr11 5166947 5166966 5166950 -
gagataatcacataaccatg

SEQ ID NO: 55260 - DNA, 20 bp, Artificial Sequence
  Synthetic oligonucleotide; AGG chr11 5166946 5166965 5166949 -
agataatcacataaccatga

SEQ ID NO: 55261 - DNA, 20 bp, Artificial Sequence
  Synthetic oligonucleotide; AAG chr11 5166937 5166956 5166940 -
cataaccatgaaggaaaaaa

SEQ ID NO: 55262 - DNA, 20 bp, Artificial Sequence
  Synthetic oligonucleotide; AGG chr11 5166936 5166955 5166939 -
ataaccatgaaggaaaaaaa

SEQ ID NO: 55263 - DNA, 20 bp, Artificial Sequence
  Synthetic oligonucleotide; AAG chr11 5166933 5166952 5166936 -
accatgaaggaaaaaaaagg

SEQ ID NO: 55264 - DNA, 20 bp, Artificial Sequence
  Synthetic oligonucleotide; GAG chr11 5166931 5166950 5166934 -
catgaaggaaaaaaaaggaa

SEQ ID NO: 55265 - DNA, 20 bp, Artificial Sequence
  Synthetic oligonucleotide; GAG chr11 5166929 5166948 5166932 -
tgaaggaaaaaaaaggaaga

SEQ ID NO: 55266 - DNA, 20 bp, Artificial Sequence
  Synthetic oligonucleotide; AGG chr11 5166928 5166947 5166931 -
gaaggaaaaaaaaggaagag

SEQ ID NO: 55267 - DNA, 20 bp, Artificial Sequence
  Synthetic oligonucleotide; GAG chr11 5166926 5166945 5166929 -
aggaaaaaaaaggaagagag

SEQ ID NO: 55268 - DNA, 20 bp, Artificial Sequence
  Synthetic oligonucleotide; CAG chr11 5166915 5166934 5166918 -
ggaagagaggagtctccata

SEQ ID NO: 55269 - DNA, 20 bp, Artificial Sequence
  Synthetic oligonucleotide; AAG chr11 5166904 5166923 5166907 -
gtctccatacagccaaaaat

SEQ ID NO: 55270 - DNA, 20 bp, Artificial Sequence
  Synthetic oligonucleotide; AAG chr11 5166877 5166896 5166880 -
aaaaaaaaaaaaaaaaaaaa

SEQ ID NO: 55271 - DNA, 20 bp, Artificial Sequence
  Synthetic oligonucleotide; AGG chr11 5166876 5166895 5166879 -
aaaaaaaaaaaaaaaaaaaa

SEQ ID NO: 55272 - DNA, 20 bp, Artificial Sequence
  Synthetic oligonucleotide; TAG chr11 5166862 5166881 5166865 -
aaaaaaaggaaatccttact

SEQ ID NO: 55273 - DNA, 20 bp, Artificial Sequence
  Synthetic oligonucleotide; GAG chr11 5166849 5166868 5166852 -
ccttacttagtaactacact

SEQ ID NO: 55274 - DNA, 20 bp, Artificial Sequence
  Synthetic oligonucleotide; TAG chr11 5166840 5166859 5166843 -
gtaactacactgagtgtaaa

SEQ ID NO: 55275 - DNA, 20 bp, Artificial Sequence
  Synthetic oligonucleotide; CAG chr11 5166834 5166853 5166837 -
acactgagtgtaaatagtct

SEQ ID NO: 55276 - DNA, 20 bp, Artificial Sequence
  Synthetic oligonucleotide; AAG chr11 5166819 5166838 5166822 -
agtctcagttccccaattaa

SEQ ID NO: 55277 - DNA, 20 bp, Artificial Sequence
  Synthetic oligonucleotide; TAG chr11 5166813 5166832 5166816 -
agttccccaattaaaagtaa

SEQ ID NO: 55278 - DNA, 20 bp, Artificial Sequence
  Synthetic oligonucleotide; TGG chr11 5166808 5166827 5166811 -
cccaattaaaagtaatagaa

SEQ ID NO: 55279 - DNA, 20 bp, Artificial Sequence
  Synthetic oligonucleotide; TGG chr11 5166801 5166820 5166804 -
aaaagtaatagaatggtaaa

SEQ ID NO: 55280 - DNA, 20 bp, Artificial Sequence
  Synthetic oligonucleotide; AAG chr11 5166795 5166814 5166798 -
aatagaatggtaaatggata

SEQ ID NO: 55281 - DNA, 20 bp, Artificial Sequence
  Synthetic oligonucleotide; AAG chr11 5166764 5166783 5166767 -
tccaactttatgcgatcttc

SEQ ID NO: 55282 - DNA, 20 bp, Artificial Sequence
  Synthetic oligonucleotide; AAG chr11 5166743 5166762 5166746 -
agaaacccacttcacctata

SEQ ID NO: 55283 - DNA, 20 bp, Artificial Sequence
  Synthetic oligonucleotide; AGG chr11 5166742 5166761 5166745 -
gaaacccacttcacctataa

SEQ ID NO: 55284 - DNA, 20 bp, Artificial Sequence
  Synthetic oligonucleotide; AAG chr11 5166726 5166745 5166729 -
ataaaggcacacataaatga

SEQ ID NO: 55285 - DNA, 20 bp, Artificial Sequence
  Synthetic oligonucleotide; AAG chr11 5166721 5166740 5166724 -
ggcacacataaatgaaagtg

SEQ ID NO: 55286 - DNA, 20 bp, Artificial Sequence
  Synthetic oligonucleotide; AGG chr11 5166720 5166739 5166723 -
gcacacataaatgaaagtga

SEQ ID NO: 55287 - DNA, 20 bp, Artificial Sequence
  Synthetic oligonucleotide; GGG chr11 5166719 5166738 5166722 -
cacacataaatgaaagtgaa

SEQ ID NO: 55288 - DNA, 20 bp, Artificial Sequence
  Synthetic oligonucleotide; TGG chr11 5166715 5166734 5166718 -
cataaatgaaagtgaagggt

SEQ ID NO: 55289 - DNA, 20 bp, Artificial Sequence
  Synthetic oligonucleotide; TGG chr11 5166695 5166714 5166698 -
tggaaaaaaattccatgaac

SEQ ID NO: 55290 - DNA, 20 bp, Artificial Sequence
  Synthetic oligonucleotide; CAG chr11 5166688 5166707 5166691 -
aaattccatgaactggaaac

SEQ ID NO: 55291 - DNA, 20 bp, Artificial Sequence
  Synthetic oligonucleotide; AAG chr11 5166684 5166703 5166687 -
tccatgaactggaaaccaga

SEQ ID NO: 55292 - DNA, 20 bp, Artificial Sequence
  Synthetic oligonucleotide; GAG chr11 5166682 5166701 5166685 -
catgaactggaaaccagaaa

SEQ ID NO: 55293 - DNA, 20 bp, Artificial Sequence
  Synthetic oligonucleotide; CAG chr11 5166679 5166698 5166682 -
gaactggaaaccagaaagag

SEQ ID NO: 55294 - DNA, 20 bp, Artificial Sequence
  Synthetic oligonucleotide; TAG chr11 5166676 5166695 5166679 -
ctggaaaccagaaagagcag

SEQ ID NO: 55295 - DNA, 20 bp, Artificial Sequence
  Synthetic oligonucleotide; CAG chr11 5166658 5166677 5166661 -
agtagtaattgtacttaaat

SEQ ID NO: 55296 - DNA, 20 bp, Artificial Sequence
  Synthetic oligonucleotide; TAG chr11 5166649 5166668 5166652 -
tgtacttaaatcagataaaa

SEQ ID NO: 55297 - DNA, 20 bp, Artificial Sequence
  Synthetic oligonucleotide; AAG chr11 5166626 5166645 5166629 -
actacaaatttaaaaactgt

SEQ ID NO: 55298 - DNA, 20 bp, Artificial Sequence
  Synthetic oligonucleotide; AAG chr11 5166621 5166640 5166624 -
aaatttaaaaactgtaagaa

SEQ ID NO: 55299 - DNA, 20 bp, Artificial Sequence
  Synthetic oligonucleotide; AAG chr11 5166616 5166635 5166619 -
taaaaactgtaagaaaagat

SEQ ID NO: 55300 - DNA, 20 bp, Artificial Sequence
  Synthetic oligonucleotide; AGG chr11 5166615 5166634 5166618 -
aaaaactgtaagaaaagata

SEQ ID NO: 55301 - DNA, 20 bp, Artificial Sequence
  Synthetic oligonucleotide; GAG chr11 5166613 5166632 5166616 -
aaactgtaagaaaagataag

SEQ ID NO: 55302 - DNA, 20 bp, Artificial Sequence
  Synthetic oligonucleotide; AGG chr11 5166612 5166631 5166615 -
aactgtaagaaaagataagg

SEQ ID NO: 55303 - DNA, 20 bp, Artificial Sequence
  Synthetic oligonucleotide; GGG chr11 5166611 5166630 5166614 -
actgtaagaaaagataagga

SEQ ID NO: 55304 - DNA, 20 bp, Artificial Sequence
  Synthetic oligonucleotide; AAG chr11 5166592 5166611 5166595 -
agggtcactgtataataata

SEQ ID NO: 55305 - DNA, 20 bp, Artificial Sequence
  Synthetic oligonucleotide; AGG chr11 5166591 5166610 5166594 -
gggtcactgtataataataa

SEQ ID NO: 55306 - DNA, 20 bp, Artificial Sequence
  Synthetic oligonucleotide; GGG chr11 5166590 5166609 5166593 -
ggtcactgtataataataaa

SEQ ID NO: 55307 - DNA, 20 bp, Artificial Sequence
  Synthetic oligonucleotide; GGG chr11 5166589 5166608 5166592 -
gtcactgtataataataaag

SEQ ID NO: 55308 - DNA, 20 bp, Artificial Sequence
  Synthetic oligonucleotide; CAG chr11 5166580 5166599 5166583 -
taataataaaggggtcaatt

SEQ ID NO: 55309 - DNA, 20 bp, Artificial Sequence
  Synthetic oligonucleotide; AAG chr11 5166576 5166595 5166579 -
aataaaggggtcaattcagc

SEQ ID NO: 55310 - DNA, 20 bp, Artificial Sequence
  Synthetic oligonucleotide; GAG chr11 5166574 5166593 5166577 -
taaaggggtcaattcagcaa

SEQ ID NO: 55311 - DNA, 20 bp, Artificial Sequence
  Synthetic oligonucleotide; AGG chr11 5166573 5166592 5166576 -
aaaggggtcaattcagcaag

SEQ ID NO: 55312 - DNA, 20 bp, Artificial Sequence
  Synthetic oligonucleotide; AAG chr11 5166537 5166556 5166540 -
tattgatgtatccaacatca

SEQ ID NO: 55313 - DNA, 20 bp, Artificial Sequence
  Synthetic oligonucleotide; AAG chr11 5166529 5166548 5166532 -
tatccaacatcaaagttccc

SEQ ID NO: 55314 - DNA, 20 bp, Artificial Sequence
  Synthetic oligonucleotide; AAG chr11 5166521 5166540 5166524 -
atcaaagttcccaagtatat

SEQ ID NO: 55315 - DNA, 20 bp, Artificial Sequence
  Synthetic oligonucleotide; AGG chr11 5166520 5166539 5166523 -
tcaaagttcccaagtatata

SEQ ID NO: 55316 - DNA, 20 bp, Artificial Sequence
  Synthetic oligonucleotide; TAG chr11 5166507 5166526 5166510 -
gtatataaggaaaacattaa

SEQ ID NO: 55317 - DNA, 20 bp, Artificial Sequence
  Synthetic oligonucleotide; AAG chr11 5166499 5166518 5166502 -
ggaaaacattaatagtccta

SEQ ID NO: 55318 - DNA, 20 bp, Artificial Sequence
  Synthetic oligonucleotide; AGG chr11 5166498 5166517 5166501 -
gaaaacattaatagtcctaa

SEQ ID NO: 55319 - DNA, 20 bp, Artificial Sequence
  Synthetic oligonucleotide; GGG chr11 5166497 5166516 5166500 -
aaaacattaatagtcctaaa

SEQ ID NO: 55320 - DNA, 20 bp, Artificial Sequence
  Synthetic oligonucleotide; GAG chr11 5166493 5166512 5166496 -
cattaatagtcctaaagggc

SEQ ID NO: 55321 - DNA, 20 bp, Artificial Sequence
  Synthetic oligonucleotide; CAG chr11 5166489 5166508 5166492 -
aatagtcctaaagggcgaga

SEQ ID NO: 55322 - DNA, 20 bp, Artificial Sequence
  Synthetic oligonucleotide; TAG chr11 5166471 5166490 5166474 -
gacagactgcaatacaataa

SEQ ID NO: 55323 - DNA, 20 bp, Artificial Sequence
  Synthetic oligonucleotide; TAG chr11 5166468 5166487 5166471 -
agactgcaatacaataatag

SEQ ID NO: 55324 - DNA, 20 bp, Artificial Sequence
  Synthetic oligonucleotide; AGG chr11 5166467 5166486 5166470 -
gactgcaatacaataatagt

SEQ ID NO: 55325 - DNA, 20 bp, Artificial Sequence
  Synthetic oligonucleotide; GGG chr11 5166466 5166485 5166469 -
actgcaatacaataatagta

SEQ ID NO: 55326 - DNA, 20 bp, Artificial Sequence
  Synthetic oligonucleotide; CAG chr11 5166449 5166468 5166452 -
gtagggaactttaaacactt

SEQ ID NO: 55327 - DNA, 20 bp, Artificial Sequence
  Synthetic oligonucleotide; CAG chr11 5166443 5166462 5166446 -
aactttaaacacttcagtct

SEQ ID NO: 55328 - DNA, 20 bp, Artificial Sequence
  Synthetic oligonucleotide; CAG chr11 5166433 5166452 5166436 -
acttcagtctcagtaatgaa

SEQ ID NO: 55329 - DNA, 20 bp, Artificial Sequence
  Synthetic oligonucleotide; CGG chr11 5166428 5166447 5166431 -
agtctcagtaatgaacagat

SEQ ID NO: 55330 - DNA, 20 bp, Artificial Sequence
  Synthetic oligonucleotide; CAG chr11 5166424 5166443 5166427 -
tcagtaatgaacagatcggc

SEQ ID NO: 55331 - DNA, 20 bp, Artificial Sequence
  Synthetic oligonucleotide; CAG chr11 5166396 5166415 5166399 -
aaatcaacaaatgaacaaca

SEQ ID NO: 55332 - DNA, 20 bp, Artificial Sequence
  Synthetic oligonucleotide; TAG chr11 5166371 5166390 5166374 -
aatgtacccactatatctaa

SEQ ID NO: 55333 - DNA, 20 bp, Artificial Sequence
  Synthetic oligonucleotide; CAG chr11 5166352 5166371 5166355 -
atagacccaactgacattaa

SEQ ID NO: 55334 - DNA, 20 bp, Artificial Sequence
  Synthetic oligonucleotide; AAG chr11 5166329 5166348 5166332 -
aacttgtcccccaactgctg

SEQ ID NO: 55335 - DNA, 20 bp, Artificial Sequence
  Synthetic oligonucleotide; AAG chr11 5166326 5166345 5166329 -
ttgtcccccaactgctgaag

SEQ ID NO: 55336 - DNA, 20 bp, Artificial Sequence
  Synthetic oligonucleotide; AAG chr11 5166310 5166329 5166313 -
gaagaagatacatttcttta

SEQ ID NO: 55337 - DNA, 20 bp, Artificial Sequence
  Synthetic oligonucleotide; CAG chr11 5166307 5166326 5166310 -
gaagatacatttctttaaag

SEQ ID NO: 55338 - DNA, 20 bp, Artificial Sequence
  Synthetic oligonucleotide; AAG chr11 5166282 5166301 5166285 -
tgtacaacattttcctaaat

SEQ ID NO: 55339 - DNA, 20 bp, Artificial Sequence
  Synthetic oligonucleotide; AGG chr11 5166281 5166300 5166284 -
gtacaacattttcctaaata

SEQ ID NO: 55340 - DNA, 20 bp, Artificial Sequence
  Synthetic oligonucleotide; TAG chr11 5166270 5166289 5166273 -
tcctaaataaggccatatgt

SEQ ID NO: 55341 - DNA, 20 bp, Artificial Sequence
  Synthetic oligonucleotide; AGG chr11 5166269 5166288 5166272 -
cctaaataaggccatatgtt

SEQ ID NO: 55342 - DNA, 20 bp, Artificial Sequence
  Synthetic oligonucleotide; AAG chr11 5166262 5166281 5166265 -
aaggccatatgttaggccac

SEQ ID NO: 55343 - DNA, 20 bp, Artificial Sequence
  Synthetic oligonucleotide; AGG chr11 5166261 5166280 5166264 -
aggccatatgttaggccaca

SEQ ID NO: 55344 - DNA, 20 bp, Artificial Sequence
  Synthetic oligonucleotide; AAG chr11 5166257 5166276 5166260 -
catatgttaggccacaaggt

SEQ ID NO: 55345 - DNA, 20 bp, Artificial Sequence
  Synthetic oligonucleotide; CAG chr11 5166239 5166258 5166242 -
gtaagtttgtacaaattttt

SEQ ID NO: 55346 - DNA, 20 bp, Artificial Sequence
  Synthetic oligonucleotide; AAG chr11 5166236 5166255 5166239 -
agtttgtacaaatttttcag

SEQ ID NO: 55347 - DNA, 20 bp, Artificial Sequence
  Synthetic oligonucleotide; TAG chr11 5166233 5166252 5166236 -
ttgtacaaatttttcagaag

SEQ ID NO: 55348 - DNA, 20 bp, Artificial Sequence
  Synthetic oligonucleotide; AAG chr11 5166220 5166239 5166223 -
tcagaagtagaaattttatc

SEQ ID NO: 55349 - DNA, 20 bp, Artificial Sequence
  Synthetic oligonucleotide; CAG chr11 5166202 5166221 5166205 -
tcaagtatattttctgacca

SEQ ID NO: 55350 - DNA, 20 bp, Artificial Sequence
  Synthetic oligonucleotide; TGG chr11 5166199 5166218 5166202 -
agtatattttctgaccacag

SEQ ID NO: 55351 - DNA, 20 bp, Artificial Sequence
  Synthetic oligonucleotide; TAG chr11 5166188 5166207 5166191 -
tgaccacagtggaataaaac

SEQ ID NO: 55352 - DNA, 20 bp, Artificial Sequence
  Synthetic oligonucleotide; AAG chr11 5166174 5166193 5166177 -
taaaactagaaatgaataac

SEQ ID NO: 55353 - DNA, 20 bp, Artificial Sequence
  Synthetic oligonucleotide; AAG chr11 5166171 5166190 5166174 -
aactagaaatgaataacaag

SEQ ID NO: 55354 - DNA, 20 bp, Artificial Sequence
  Synthetic oligonucleotide; CAG chr11 5166163 5166182 5166166 -
atgaataacaagaagatcat

SEQ ID NO: 55355 - DNA, 20 bp, Artificial Sequence
  Synthetic oligonucleotide; TAG chr11 5166154 5166173 5166157 -
aagaagatcatcagaaaata

SEQ ID NO: 55356 - DNA, 20 bp, Artificial Sequence
  Synthetic oligonucleotide; TGG chr11 5166144 5166163 5166147 -
tcagaaaatatagaaacata

SEQ ID NO: 55357 - DNA, 20 bp, Artificial Sequence
  Synthetic oligonucleotide; CAG chr11 5166133 5166152 5166136 -
agaaacatatggaaatcaaa

SEQ ID NO: 55358 - DNA, 20 bp, Artificial Sequence
  Synthetic oligonucleotide; CAG chr11 5166115 5166134 5166118 -
aacagtatgctcctgaatgt

SEQ ID NO: 55359 - DNA, 20 bp, Artificial Sequence
  Synthetic oligonucleotide; AGG chr11 5166114 5166133 5166117 -
acagtatgctcctgaatgtc

SEQ ID NO: 55360 - DNA, 20 bp, Artificial Sequence
  Synthetic oligonucleotide; GAG chr11 5166106 5166125 5166109 -
ctcctgaatgtcaggcctct

SEQ ID NO: 55361 - DNA, 20 bp, Artificial Sequence
  Synthetic oligonucleotide; AAG chr11 5166100 5166119 5166103 -
aatgtcaggcctctgagccc

SEQ ID NO: 55362 - DNA, 20 bp, Artificial Sequence
  Synthetic oligonucleotide; AAG chr11 5166095 5166114 5166098 -
caggcctctgagcccaagct

SEQ ID NO: 55363 - DNA, 20 bp, Artificial Sequence
  Synthetic oligonucleotide; CAG chr11 5166058 5166077 5166061 -
gtgacctgcatatacacata

SEQ ID NO: 55364 - DNA, 20 bp, Artificial Sequence
  Synthetic oligonucleotide; TGG chr11 5166054 5166073 5166057 -
cctgcatatacacatacaga

SEQ ID NO: 55365 - DNA, 20 bp, Artificial Sequence
  Synthetic oligonucleotide; CAG chr11 5166050 5166069 5166053 -
catatacacatacagatggc

SEQ ID NO: 55366 - DNA, 20 bp, Artificial Sequence
  Synthetic oligonucleotide; AAG chr11 5166015 5166034 5166018 -
ctgatgacattccaccacaa

SEQ ID NO: 55367 - DNA, 20 bp, Artificial Sequence
  Synthetic oligonucleotide; AAG chr11 5166012 5166031 5166015 -
atgacattccaccacaaaag

SEQ ID NO: 55368 - DNA, 20 bp, Artificial Sequence
  Synthetic oligonucleotide; TGG chr11 5166003 5166022 5166006 -
caccacaaaagaagtgaaaa

SEQ ID NO: 55369 - DNA, 20 bp, Artificial Sequence
  Synthetic oligonucleotide; TGG chr11 5165952 5165971 5165955 -
tcttgtgaaattccttctcc

SEQ ID NO: 55370 - DNA, 20 bp, Artificial Sequence
  Synthetic oligonucleotide; TGG chr11 5165942 5165961 5165945 -
ttccttctcctggctcatcc

SEQ ID NO: 55371 - DNA, 20 bp, Artificial Sequence
  Synthetic oligonucleotide; AAG chr11 5165934 5165953 5165937 -
cctggctcatcctggctcaa

SEQ ID NO: 55372 - DNA, 20 bp, Artificial Sequence
  Synthetic oligonucleotide; GAG chr11 5165921 5165940 5165924 -
ggctcaaaagctcccctact

SEQ ID NO: 55373 - DNA, 20 bp, Artificial Sequence
  Synthetic oligonucleotide; CAG chr11 5165891 5165910 5165894 -
tgacccccactcctgcccgc

SEQ ID NO: 55374 - DNA, 20 bp, Artificial Sequence
  Synthetic oligonucleotide; GAG chr11 5165889 5165908 5165892 -
acccccactcctgcccgcca

SEQ ID NO: 55375 - DNA, 20 bp, Artificial Sequence
  Synthetic oligonucleotide; CAG chr11 5165834 5165853 5165837 -
cctacccaaatcttataaaa

SEQ ID NO: 55376 - DNA, 20 bp, Artificial Sequence
  Synthetic oligonucleotide; TGG chr11 5165797 5165816 5165800 -
ccctttgctgactctctttt

SEQ ID NO: 55377 - DNA, 20 bp, Artificial Sequence
  Synthetic oligonucleotide; CAG chr11 5165791 5165810 5165794 -
gctgactctctttttggact

SEQ ID NO: 55378 - DNA, 20 bp, Artificial Sequence
  Synthetic oligonucleotide; CAG chr11 5165776 5165795 5165779 -
ggactcagcctgcctgcacc

SEQ ID NO: 55379 - DNA, 20 bp, Artificial Sequence
  Synthetic oligonucleotide; AGG chr11 5165775 5165794 5165778 -
gactcagcctgcctgcaccc

SEQ ID NO: 55380 - DNA, 20 bp, Artificial Sequence
  Synthetic oligonucleotide; CAG chr11 5165763 5165782 5165766 -
ctgcacccaggtgaaataaa

SEQ ID NO: 55381 - DNA, 20 bp, Artificial Sequence
  Synthetic oligonucleotide; AAG chr11 5165744 5165763 5165747 -
acagccttgttgcttacaca

SEQ ID NO: 55382 - DNA, 20 bp, Artificial Sequence
  Synthetic oligonucleotide; TGG chr11 5165735 5165754 5165738 -
ttgcttacacaaagcctgtt

SEQ ID NO: 55383 - DNA, 20 bp, Artificial Sequence
  Synthetic oligonucleotide; TAG chr11 5165732 5165751 5165735 -
cttacacaaagcctgtttgg

SEQ ID NO: 55384 - DNA, 20 bp, Artificial Sequence
  Synthetic oligonucleotide; TGG chr11 5165719 5165738 5165722 -
tgtttggtagtctcttcata

SEQ ID NO: 55385 - DNA, 20 bp, Artificial Sequence
  Synthetic oligonucleotide; TGG chr11 5165702 5165721 5165705 -
atatggacgcgcatgaaatt

SEQ ID NO: 55386 - DNA, 20 bp, Artificial Sequence
  Synthetic oligonucleotide; CAG chr11 5165689 5165708 5165692 -
tgaaatttggtgccgtgact

SEQ ID NO: 55387 - DNA, 20 bp, Artificial Sequence
  Synthetic oligonucleotide; TGG chr11 5165684 5165703 5165687 -
tttggtgccgtgactcagat

SEQ ID NO: 55388 - DNA, 20 bp, Artificial Sequence
  Synthetic oligonucleotide; GGG chr11 5165683 5165702 5165686 -
ttggtgccgtgactcagatt

SEQ ID NO: 55389 - DNA, 20 bp, Artificial Sequence
  Synthetic oligonucleotide; GGG chr11 5165682 5165701 5165685 -
tggtgccgtgactcagattg

SEQ ID NO: 55390 - DNA, 20 bp, Artificial Sequence
  Synthetic oligonucleotide; GGG chr11 5165681 5165700 5165684 -
ggtgccgtgactcagattgg

SEQ ID NO: 55391 - DNA, 20 bp, Artificial Sequence
  Synthetic oligonucleotide; TGG chr11 5165670 5165689 5165673 -
tcagattgggggacctccct

SEQ ID NO: 55392 - DNA, 20 bp, Artificial Sequence
  Synthetic oligonucleotide; GGG chr11 5165669 5165688 5165672 -
cagattgggggacctccctt

SEQ ID NO: 55393 - DNA, 20 bp, Artificial Sequence
  Synthetic oligonucleotide; GAG chr11 5165667 5165686 5165670 -
gattgggggacctcccttgg

SEQ ID NO: 55394 - DNA, 20 bp, Artificial Sequence
  Synthetic oligonucleotide; GAG chr11 5165631 5165650 5165634 -
cctcctgctctttgctccgt

SEQ ID NO: 55395 - DNA, 20 bp, Artificial Sequence
  Synthetic oligonucleotide; AAG chr11 5165627 5165646 5165630 -
ctgctctttgctccgtgaga

SEQ ID NO: 55396 - DNA, 20 bp, Artificial Sequence
  Synthetic oligonucleotide; CAG chr11 5165609 5165628 5165612 -
gaaagatccacctacgacct

SEQ ID NO: 55397 - DNA, 20 bp, Artificial Sequence
  Synthetic oligonucleotide; AGG chr11 5165608 5165627 5165611 -
aaagatccacctacgacctc

SEQ ID NO: 55398 - DNA, 20 bp, Artificial Sequence
  Synthetic oligonucleotide; CAG chr11 5165592 5165611 5165595 -
cctcaggtcctcaaactgac

SEQ ID NO: 55399 - DNA, 20 bp, Artificial Sequence
  Synthetic oligonucleotide; AAG chr11 5165586 5165605 5165589 -
gtcctcaaactgaccagccc

SEQ ID NO: 55400 - DNA, 20 bp, Artificial Sequence
  Synthetic oligonucleotide; CGG chr11 5165560 5165579 5165563 -
catttcaccaatttcaaatc

SEQ ID NO: 55401 - DNA, 20 bp, Artificial Sequence
  Synthetic oligonucleotide; AAG chr11 5165556 5165575 5165559 -
tcaccaatttcaaatccggt

SEQ ID NO: 55402 - DNA, 20 bp, Artificial Sequence
  Synthetic oligonucleotide; TGG chr11 5165553 5165572 5165556 -
ccaatttcaaatccggtaag

SEQ ID NO: 55403 - DNA, 20 bp, Artificial Sequence
  Synthetic oligonucleotide; TGG chr11 5165487 5165506 5165490 -
cttctttctcctttcaatct

SEQ ID NO: 55404 - DNA, 20 bp, Artificial Sequence
  Synthetic oligonucleotide; CAG chr11 5165434 5165453 5165437 -
tttcaattcctttcattttc

SEQ ID NO: 55405 - DNA, 20 bp, Artificial Sequence
  Synthetic oligonucleotide; TAG chr11 5165431 5165450 5165434 -
caattcctttcattttccag

SEQ ID NO: 55406 - DNA, 20 bp, Artificial Sequence
  Synthetic oligonucleotide; GAG chr11 5165429 5165448 5165432 -
attcctttcattttccagta

SEQ ID NO: 55407 - DNA, 20 bp, Artificial Sequence
  Synthetic oligonucleotide; AAG chr11 5165423 5165442 5165426 -
ttcattttccagtagagaca

SEQ ID NO: 55408 - DNA, 20 bp, Artificial Sequence
  Synthetic oligonucleotide; AGG chr11 5165422 5165441 5165425 -
tcattttccagtagagacaa

SEQ ID NO: 55409 - DNA, 20 bp, Artificial Sequence
  Synthetic oligonucleotide; GAG chr11 5165420 5165439 5165423 -
attttccagtagagacaaag

SEQ ID NO: 55410 - DNA, 20 bp, Artificial Sequence
  Synthetic oligonucleotide; TGG chr11 5165403 5165422 5165406 -
aaggagacatgttttatccg

SEQ ID NO: 55411 - DNA, 20 bp, Artificial Sequence
  Synthetic oligonucleotide; CGG chr11 5165389 5165408 5165392 -
tatccgtggacccaaaactc

SEQ ID NO: 55412 - DNA, 20 bp, Artificial Sequence
  Synthetic oligonucleotide; CAG chr11 5165383 5165402 5165386 -
tggacccaaaactccggtgc

SEQ ID NO: 55413 - DNA, 20 bp, Artificial Sequence
  Synthetic oligonucleotide; CGG chr11 5165377 5165396 5165380 -
caaaactccggtgccagtca

SEQ ID NO: 55414 - DNA, 20 bp, Artificial Sequence
  Synthetic oligonucleotide; TGG chr11 5165372 5165391 5165375 -
ctccggtgccagtcacggac

SEQ ID NO: 55415 - DNA, 20 bp, Artificial Sequence
  Synthetic oligonucleotide; GGG chr11 5165371 5165390 5165374 -
tccggtgccagtcacggact

SEQ ID NO: 55416 - DNA, 20 bp, Artificial Sequence
  Synthetic oligonucleotide; AAG chr11 5165368 5165387 5165371 -
ggtgccagtcacggactggg

SEQ ID NO: 55417 - DNA, 20 bp, Artificial Sequence
  Synthetic oligonucleotide; AGG chr11 5165367 5165386 5165370 -
gtgccagtcacggactggga

SEQ ID NO: 55418 - DNA, 20 bp, Artificial Sequence
  Synthetic oligonucleotide; CAG chr11 5165364 5165383 5165367 -
ccagtcacggactgggaagg

SEQ ID NO: 55419 - DNA, 20 bp, Artificial Sequence
  Synthetic oligonucleotide; TGG chr11 5165353 5165372 5165356 -
ctgggaaggcagccttccct

SEQ ID NO: 55420 - DNA, 20 bp, Artificial Sequence
  Synthetic oligonucleotide; CAG chr11 5165337 5165356 5165340 -
cccttggtgtttaatcattg

SEQ ID NO: 55421 - DNA, 20 bp, Artificial Sequence
  Synthetic oligonucleotide; AGG chr11 5165336 5165355 5165339 -
ccttggtgtttaatcattgc

SEQ ID NO: 55422 - DNA, 20 bp, Artificial Sequence
  Synthetic oligonucleotide; GGG chr11 5165335 5165354 5165338 -
cttggtgtttaatcattgca

SEQ ID NO: 55423 - DNA, 20 bp, Artificial Sequence
  Synthetic oligonucleotide; CAG chr11 5165304 5165323 5165307 -
ctgattattaaaccatgttt

SEQ ID NO: 55424 - DNA, 20 bp, Artificial Sequence
  Synthetic oligonucleotide; GAG chr11 5165302 5165321 5165305 -
gattattaaaccatgtttca

SEQ ID NO: 55425 - DNA, 20 bp, Artificial Sequence
  Synthetic oligonucleotide; AGG chr11 5165301 5165320 5165304 -
attattaaaccatgtttcag

SEQ ID NO: 55426 - DNA, 20 bp, Artificial Sequence
  Synthetic oligonucleotide; CAG chr11 5165295 5165314 5165298 -
aaaccatgtttcagaggtgt

SEQ ID NO: 55427 - DNA, 20 bp, Artificial Sequence
  Synthetic oligonucleotide; CAG chr11 5165286 5165305 5165289 -
ttcagaggtgtcagaccacg

SEQ ID NO: 55428 - DNA, 20 bp, Artificial Sequence
  Synthetic oligonucleotide; AGG chr11 5165285 5165304 5165288 -
tcagaggtgtcagaccacgc

SEQ ID NO: 55429 - DNA, 20 bp, Artificial Sequence
  Synthetic oligonucleotide; GGG chr11 5165284 5165303 5165287 -
cagaggtgtcagaccacgca

SEQ ID NO: 55430 - DNA, 20 bp, Artificial Sequence
  Synthetic oligonucleotide; TGG chr11 5165271 5165290 5165274 -
ccacgcagggatgcctgcct

SEQ ID NO: 55431 - DNA, 20 bp, Artificial Sequence
  Synthetic oligonucleotide; TAG chr11 5165257 5165276 5165260 -
ctgccttggtccttcaccct

SEQ ID NO: 55432 - DNA, 20 bp, Artificial Sequence
  Synthetic oligonucleotide; CGG chr11 5165254 5165273 5165257 -
ccttggtccttcacccttag

SEQ ID NO: 55433 - DNA, 20 bp, Artificial Sequence
  Synthetic oligonucleotide; TGG chr11 5165236 5165255 5165239 -
agcggcaaatcccacttttc

SEQ ID NO: 55434 - DNA, 20 bp, Artificial Sequence
  Synthetic oligonucleotide; GAG chr11 5165234 5165253 5165237 -
cggcaaatcccacttttctg

SEQ ID NO: 55435 - DNA, 20 bp, Artificial Sequence
  Synthetic oligonucleotide; AGG chr11 5165233 5165252 5165236 -
ggcaaatcccacttttctgg

SEQ ID NO: 55436 - DNA, 20 bp, Artificial Sequence
  Synthetic oligonucleotide; GGG chr11 5165232 5165251 5165235 -
gcaaatcccacttttctgga

SEQ ID NO: 55437 - DNA, 20 bp, Artificial Sequence
  Synthetic oligonucleotide; GGG chr11 5165231 5165250 5165234 -
caaatcccacttttctggag

SEQ ID NO: 55438 - DNA, 20 bp, Artificial Sequence
  Synthetic oligonucleotide; GGG chr11 5165230 5165249 5165233 -
aaatcccacttttctggagg

SEQ ID NO: 55439 - DNA, 20 bp, Artificial Sequence
  Synthetic oligonucleotide; GGG chr11 5165229 5165248 5165232 -
aatcccacttttctggaggg

SEQ ID NO: 55440 - DNA, 20 bp, Artificial Sequence
  Synthetic oligonucleotide; AAG chr11 5165225 5165244 5165228 -
ccacttttctggaggggggt

SEQ ID NO: 55441 - DNA, 20 bp, Artificial Sequence
  Synthetic oligonucleotide; TGG chr11 5165176 5165195 5165179 -
ctgccccttcactgcttttc

SEQ ID NO: 55442 - DNA, 20 bp, Artificial Sequence
  Synthetic oligonucleotide; GGG chr11 5165175 5165194 5165178 -
tgccccttcactgcttttct

SEQ ID NO: 55443 - DNA, 20 bp, Artificial Sequence
  Synthetic oligonucleotide; GGG chr11 5165174 5165193 5165177 -
gccccttcactgcttttctg

SEQ ID NO: 55444 - DNA, 20 bp, Artificial Sequence
  Synthetic oligonucleotide; GGG chr11 5165173 5165192 5165176 -
ccccttcactgcttttctgg

SEQ ID NO: 55445 - DNA, 20 bp, Artificial Sequence
  Synthetic oligonucleotide; AAG chr11 5165169 5165188 5165172 -
ttcactgcttttctgggggc

SEQ ID NO: 55446 - DNA, 20 bp, Artificial Sequence
  Synthetic oligonucleotide; CAG chr11 5165127 5165146 5165130 -
tgtgccccaacctcttatct

SEQ ID NO: 55447 - DNA, 20 bp, Artificial Sequence
  Synthetic oligonucleotide; TGG chr11 5164869 5164888 5164872 -
caaccccttgcccatttttc

SEQ ID NO: 55448 - DNA, 20 bp, Artificial Sequence
  Synthetic oligonucleotide; GAG chr11 5164865 5164884 5164868 -
cccttgcccatttttctggt

SEQ ID NO: 55449 - DNA, 20 bp, Artificial Sequence
  Synthetic oligonucleotide; AAG chr11 5164861 5164880 5164864 -
tgcccatttttctggtgagt

SEQ ID NO: 55450 - DNA, 20 bp, Artificial Sequence
  Synthetic oligonucleotide; TGG chr11 5164813 5164832 5164816 -
tctgtactctttcttttctc

SEQ ID NO: 55451 - DNA, 20 bp, Artificial Sequence
  Synthetic oligonucleotide; GGG chr11 5164812 5164831 5164815 -
ctgtactctttcttttctct

SEQ ID NO: 55452 - DNA, 20 bp, Artificial Sequence
  Synthetic oligonucleotide; TAG chr11 5164795 5164814 5164798 -
tctgggcttgcctccttcac

SEQ ID NO: 55453 - DNA, 20 bp, Artificial Sequence
  Synthetic oligonucleotide; AGG chr11 5164794 5164813 5164797 -
ctgggcttgcctccttcact

SEQ ID NO: 55454 - DNA, 20 bp, Artificial Sequence
  Synthetic oligonucleotide; GGG chr11 5164793 5164812 5164796 -
tgggcttgcctccttcacta

SEQ ID NO: 55455 - DNA, 20 bp, Artificial Sequence
  Synthetic oligonucleotide; GGG chr11 5164792 5164811 5164795 -
gggcttgcctccttcactag

SEQ ID NO: 55456 - DNA, 20 bp, Artificial Sequence
  Synthetic oligonucleotide; TAG chr11 5164757 5164776 5164760 -
ctccattcctccctctccct

SEQ ID NO: 55457 - DNA, 20 bp, Artificial Sequence
  Synthetic oligonucleotide; AAG chr11 5164743 5164762 5164746 -
ctcccttagcctgtgctctc

SEQ ID NO: 55458 - DNA, 20 bp, Artificial Sequence
  Synthetic oligonucleotide; AAG chr11 5164680 5164699 5164683 -
aatgccttattttcttctgc

SEQ ID NO: 55459 - DNA, 20 bp, Artificial Sequence
  Synthetic oligonucleotide; AGG chr11 5164679 5164698 5164682 -
atgccttattttcttctgca

SEQ ID NO: 55460 - DNA, 20 bp, Artificial Sequence
  Synthetic oligonucleotide; CAG chr11 5164651 5164670 5164654 -
tgactccaatacaaactcga

SEQ ID NO: 55461 - DNA, 20 bp, Artificial Sequence
  Synthetic oligonucleotide; TGG chr11 5164648 5164667 5164651 -
ctccaatacaaactcgacag

SEQ ID NO: 55462 - DNA, 20 bp, Artificial Sequence
  Synthetic oligonucleotide; TAG chr11 5164638 5164657 5164641 -
aactcgacagtggttccaaa

SEQ ID NO: 55463 - DNA, 20 bp, Artificial Sequence
  Synthetic oligonucleotide; CAG chr11 5164634 5164653 5164637 -
cgacagtggttccaaatagc

SEQ ID NO: 55464 - DNA, 20 bp, Artificial Sequence
  Synthetic oligonucleotide; TGG chr11 5164627 5164646 5164630 -
ggttccaaatagccagaaaa

SEQ ID NO: 55465 - DNA, 20 bp, Artificial Sequence
  Synthetic oligonucleotide; AAG chr11 5164601 5164620 5164604 -
tttcaatttttccattcttc

SEQ ID NO: 55466 - DNA, 20 bp, Artificial Sequence
  Synthetic oligonucleotide; CAG chr11 5164574 5164593 5164577 -
aaataatttttgtcgtaaaa

SEQ ID NO: 55467 - DNA, 20 bp, Artificial Sequence
  Synthetic oligonucleotide; AGG chr11 5164573 5164592 5164576 -
aataatttttgtcgtaaaac

SEQ ID NO: 55468 - DNA, 20 bp, Artificial Sequence
  Synthetic oligonucleotide; CAG chr11 5164566 5164585 5164569 -
tttgtcgtaaaacaggcaaa

SEQ ID NO: 55469 - DNA, 20 bp, Artificial Sequence
  Synthetic oligonucleotide; GAG chr11 5164560 5164579 5164563 -
gtaaaacaggcaaacagtct

SEQ ID NO: 55470 - DNA, 20 bp, Artificial Sequence
  Synthetic oligonucleotide; AGG chr11 5164559 5164578 5164562 -
taaaacaggcaaacagtctg

SEQ ID NO: 55471 - DNA, 20 bp, Artificial Sequence
  Synthetic oligonucleotide; CAG chr11 5164545 5164564 5164548 -
agtctgaggtgcctgacgtc

SEQ ID NO: 55472 - DNA, 20 bp, Artificial Sequence
  Synthetic oligonucleotide; AGG chr11 5164544 5164563 5164547 -
gtctgaggtgcctgacgtcc

SEQ ID NO: 55473 - DNA, 20 bp, Artificial Sequence
  Synthetic oligonucleotide; TGG chr11 5164526 5164545 5164529 -
ccaggcattcttttacacat

SEQ ID NO: 55474 - DNA, 20 bp, Artificial Sequence
  Synthetic oligonucleotide; TAG chr11 5164515 5164534 5164518 -
tttacacattggtccctccc

SEQ ID NO: 55475 - DNA, 20 bp, Artificial Sequence
  Synthetic oligonucleotide; CAG chr11 5164455 5164474 5164458 -
ttccctcccgcctgtcccct

SEQ ID NO: 55476 - DNA, 20 bp, Artificial Sequence
  Synthetic oligonucleotide; AAG chr11 5164442 5164461 5164445 -
gtcccctcagtcccaactcc

SEQ ID NO: 55477 - DNA, 20 bp, Artificial Sequence
  Synthetic oligonucleotide; GAG chr11 5164432 5164451 5164435 -
tcccaactccaagcgtcgct

SEQ ID NO: 55478 - DNA, 20 bp, Artificial Sequence
  Synthetic oligonucleotide; CAG chr11 5164407 5164426 5164410 -
tttctaatcttccttttcta

SEQ ID NO: 55479 - DNA, 20 bp, Artificial Sequence
  Synthetic oligonucleotide; CAG chr11 5164378 5164397 5164381 -
ctgacgtctcccctcctccc

SEQ ID NO: 55480 - DNA, 20 bp, Artificial Sequence
  Synthetic oligonucleotide; AGG chr11 5164377 5164396 5164380 -
tgacgtctcccctcctcccc

SEQ ID NO: 55481 - DNA, 20 bp, Artificial Sequence
  Synthetic oligonucleotide; CAG chr11 5164363 5164382 5164366 -
ctccccaggctgctccttgc

SEQ ID NO: 55482 - DNA, 20 bp, Artificial Sequence
  Synthetic oligonucleotide; AGG chr11 5164362 5164381 5164365 -
tccccaggctgctccttgcc

SEQ ID NO: 55483 - DNA, 20 bp, Artificial Sequence
  Synthetic oligonucleotide; GAG chr11 5164357 5164376 5164360 -
aggctgctccttgccaggcc

SEQ ID NO: 55484 - DNA, 20 bp, Artificial Sequence
  Synthetic oligonucleotide; TAG chr11 5164353 5164372 5164356 -
tgctccttgccaggccgagc

SEQ ID NO: 55485 - DNA, 20 bp, Artificial Sequence
  Synthetic oligonucleotide; AGG chr11 5164352 5164371 5164355 -
gctccttgccaggccgagct

SEQ ID NO: 55486 - DNA, 20 bp, Artificial Sequence
  Synthetic oligonucleotide; CAG chr11 5164335 5164354 5164338 -
gctaggtcccaaatcttcct

SEQ ID NO: 55487 - DNA, 20 bp, Artificial Sequence
  Synthetic oligonucleotide; CAG chr11 5164329 5164348 5164332 -
tcccaaatcttcctcagcct

SEQ ID NO: 55488 - DNA, 20 bp, Artificial Sequence
  Synthetic oligonucleotide; CGG chr11 5164282 5164301 5164285 -
tcacctcccctcctcacacc

SEQ ID NO: 55489 - DNA, 20 bp, Artificial Sequence
  Synthetic oligonucleotide; CGG chr11 5164277 5164296 5164280 -
tcccctcctcacacccggtc

SEQ ID NO: 55490 - DNA, 20 bp, Artificial Sequence
  Synthetic oligonucleotide; CAG chr11 5164270 5164289 5164273 -
ctcacacccggtccggttta

SEQ ID NO: 55491 - DNA, 20 bp, Artificial Sequence
  Synthetic oligonucleotide; TAG chr11 5164253 5164272 5164256 -
ttacagtttcattccgtgac

SEQ ID NO: 55492 - DNA, 20 bp, Artificial Sequence
  Synthetic oligonucleotide; CAG chr11 5164234 5164253 5164237 -
ctagccctccccaacctgcc

SEQ ID NO: 55493 - DNA, 20 bp, Artificial Sequence
  Synthetic oligonucleotide; AAG chr11 5164219 5164238 5164222 -
ctgcccagcaatttcctatt

SEQ ID NO: 55494 - DNA, 20 bp, Artificial Sequence
  Synthetic oligonucleotide; AAG chr11 5164216 5164235 5164219 -
cccagcaatttcctattaag

SEQ ID NO: 55495 - DNA, 20 bp, Artificial Sequence
  Synthetic oligonucleotide; AGG chr11 5164215 5164234 5164218 -
ccagcaatttcctattaaga

SEQ ID NO: 55496 - DNA, 20 bp, Artificial Sequence
  Synthetic oligonucleotide; TGG chr11 5164212 5164231 5164215 -
gcaatttcctattaagaagg

SEQ ID NO: 55497 - DNA, 20 bp, Artificial Sequence
  Synthetic oligonucleotide; AAG chr11 5164206 5164225 5164209 -
tcctattaagaaggtggctg

SEQ ID NO: 55498 - DNA, 20 bp, Artificial Sequence
  Synthetic oligonucleotide; AAG chr11 5164200 5164219 5164203 -
taagaaggtggctgaagcta

SEQ ID NO: 55499 - DNA, 20 bp, Artificial Sequence
  Synthetic oligonucleotide; AGG chr11 5164199 5164218 5164202 -
aagaaggtggctgaagctaa

SEQ ID NO: 55500 - DNA, 20 bp, Artificial Sequence
  Synthetic oligonucleotide; TAG chr11 5164194 5164213 5164197 -
ggtggctgaagctaaaggcg

SEQ ID NO: 55501 - DNA, 20 bp, Artificial Sequence
  Synthetic oligonucleotide; AAG chr11 5164189 5164208 5164192 -
ctgaagctaaaggcgtagtc

SEQ ID NO: 55502 - DNA, 20 bp, Artificial Sequence
  Synthetic oligonucleotide; AGG chr11 5164188 5164207 5164191 -
tgaagctaaaggcgtagtca

SEQ ID NO: 55503 - DNA, 20 bp, Artificial Sequence
  Synthetic oligonucleotide; CAG chr11 5164148 5164167 5164151 -
ttatccgacctctcccgaat

SEQ ID NO: 55504 - DNA, 20 bp, Artificial Sequence
  Synthetic oligonucleotide; GAG chr11 5164146 5164165 5164149 -
atccgacctctcccgaatca

SEQ ID NO: 55505 - DNA, 20 bp, Artificial Sequence
  Synthetic oligonucleotide; TAG chr11 5164139 5164158 5164142 -
ctctcccgaatcagagcgtt

SEQ ID NO: 55506 - DNA, 20 bp, Artificial Sequence
  Synthetic oligonucleotide; AGG chr11 5164138 5164157 5164141 -
tctcccgaatcagagcgttt

SEQ ID NO: 55507 - DNA, 20 bp, Artificial Sequence
  Synthetic oligonucleotide; CAG chr11 5164111 5164130 5164114 -
ttcatcaaatatgaaaaacc

SEQ ID NO: 55508 - DNA, 20 bp, Artificial Sequence
  Synthetic oligonucleotide; CAG chr11 5164106 5164125 5164109 -
caaatatgaaaaacccagcc

SEQ ID NO: 55509 - DNA, 20 bp, Artificial Sequence
  Synthetic oligonucleotide; TGG chr11 5164099 5164118 5164102 -
gaaaaacccagcccagttca

SEQ ID NO: 55510 - DNA, 20 bp, Artificial Sequence
  Synthetic oligonucleotide; CGG chr11 5164090 5164109 5164093 -
agcccagttcatggctcgtt

SEQ ID NO: 55511 - DNA, 20 bp, Artificial Sequence
  Synthetic oligonucleotide; CAG chr11 5164087 5164106 5164090 -
ccagttcatggctcgttcgg

SEQ ID NO: 55512 - DNA, 20 bp, Artificial Sequence
  Synthetic oligonucleotide; GAG chr11 5164077 5164096 5164080 -
gctcgttcggcagcaaccct

SEQ ID NO: 55513 - DNA, 20 bp, Artificial Sequence
  Synthetic oligonucleotide; CAG chr11 5164066 5164085 5164069 -
agcaaccctgagacgcttta

SEQ ID NO: 55514 - DNA, 20 bp, Artificial Sequence
  Synthetic oligonucleotide; TAG chr11 5164060 5164079 5164063 -
cctgagacgctttacagccc

SEQ ID NO: 55515 - DNA, 20 bp, Artificial Sequence
  Synthetic oligonucleotide; AAG chr11 5164050 5164069 5164053 -
tttacagccctagaccctaa

SEQ ID NO: 55516 - DNA, 20 bp, Artificial Sequence
  Synthetic oligonucleotide; AGG chr11 5164049 5164068 5164052 -
ttacagccctagaccctaaa

SEQ ID NO: 55517 - DNA, 20 bp, Artificial Sequence
  Synthetic oligonucleotide; AAG chr11 5164042 5164061 5164045 -
cctagaccctaaaaggacaa

SEQ ID NO: 55518 - DNA, 20 bp, Artificial Sequence
  Synthetic oligonucleotide; AGG chr11 5164041 5164060 5164044 -
ctagaccctaaaaggacaaa

SEQ ID NO: 55519 - DNA, 20 bp, Artificial Sequence
  Synthetic oligonucleotide; TGG chr11 5163964 5163983 5163967 -
aaactccaaaaattaaattc

SEQ ID NO: 55520 - DNA, 20 bp, Artificial Sequence
  Synthetic oligonucleotide; CAG chr11 5163945 5163964 5163948 -
ctggacctcaaaccccacaa

SEQ ID NO: 55521 - DNA, 20 bp, Artificial Sequence
  Synthetic oligonucleotide; AGG chr11 5163944 5163963 5163947 -
tggacctcaaaccccacaac

SEQ ID NO: 55522 - DNA, 20 bp, Artificial Sequence
  Synthetic oligonucleotide; AAG chr11 5163921 5163940 5163924 -
actcaattaacctcaccttc

SEQ ID NO: 55523 - DNA, 20 bp, Artificial Sequence
  Synthetic oligonucleotide; AGG chr11 5163920 5163939 5163923 -
ctcaattaacctcaccttca

SEQ ID NO: 55524 - DNA, 20 bp, Artificial Sequence
  Synthetic oligonucleotide; TAG chr11 5163907 5163926 5163910 -
accttcaaggtgtacaataa

SEQ ID NO: 55525 - DNA, 20 bp, Artificial Sequence
  Synthetic oligonucleotide; GAG chr11 5163905 5163924 5163908 -
cttcaaggtgtacaataata

SEQ ID NO: 55526 - DNA, 20 bp, Artificial Sequence
  Synthetic oligonucleotide; TAG chr11 5163902 5163921 5163905 -
caaggtgtacaataatagag

SEQ ID NO: 55527 - DNA, 20 bp, Artificial Sequence
  Synthetic oligonucleotide; GAG chr11 5163900 5163919 5163903 -
aggtgtacaataatagagta

SEQ ID NO: 55528 - DNA, 20 bp, Artificial Sequence
  Synthetic oligonucleotide; AGG chr11 5163899 5163918 5163902 -
ggtgtacaataatagagtag

SEQ ID NO: 55529 - DNA, 20 bp, Artificial Sequence
  Synthetic oligonucleotide; CAG chr11 5163896 5163915 5163899 -
gtacaataatagagtagagg

SEQ ID NO: 55530 - DNA, 20 bp, Artificial Sequence
  Synthetic oligonucleotide; AAG chr11 5163891 5163910 5163894 -
ataatagagtagaggcagcc

SEQ ID NO: 55531 - DNA, 20 bp, Artificial Sequence
  Synthetic oligonucleotide; TAG chr11 5163888 5163907 5163891 -
atagagtagaggcagccaag

SEQ ID NO: 55532 - DNA, 20 bp, Artificial Sequence
  Synthetic oligonucleotide; GAG chr11 5163873 5163892 5163876 -
ccaagtagcaacatattttt

SEQ ID NO: 55533 - DNA, 20 bp, Artificial Sequence
  Synthetic oligonucleotide; GAG chr11 5163847 5163866 5163850 -
caattccttgcctccactgt

SEQ ID NO: 55534 - DNA, 20 bp, Artificial Sequence
  Synthetic oligonucleotide; CAG chr11 5163836 5163855 5163839 -
ctccactgtgagacaaaccc

SEQ ID NO: 55535 - DNA, 20 bp, Artificial Sequence
  Synthetic oligonucleotide; CAG chr11 5163824 5163843 5163827 -
acaaaccccagccacatctc

SEQ ID NO: 55536 - DNA, 20 bp, Artificial Sequence
  Synthetic oligonucleotide; AAG chr11 5163816 5163835 5163819 -
cagccacatctccagcacac

SEQ ID NO: 55537 - DNA, 20 bp, Artificial Sequence
  Synthetic oligonucleotide; CAG chr11 5163792 5163811 5163795 -
acttccaaatgcctaaaccg

SEQ ID NO: 55538 - DNA, 20 bp, Artificial Sequence
  Synthetic oligonucleotide; TGG chr11 5163789 5163808 5163792 -
tccaaatgcctaaaccgcag

SEQ ID NO: 55539 - DNA, 20 bp, Artificial Sequence
  Synthetic oligonucleotide; CAG chr11 5163785 5163804 5163788 -
aatgcctaaaccgcagtggc

SEQ ID NO: 55540 - DNA, 20 bp, Artificial Sequence
  Synthetic oligonucleotide; AGG chr11 5163784 5163803 5163787 -
atgcctaaaccgcagtggcc

SEQ ID NO: 55541 - DNA, 20 bp, Artificial Sequence
  Synthetic oligonucleotide; CGG chr11 5163773 5163792 5163776 -
gcagtggccaggcgttcctc

SEQ ID NO: 55542 - DNA, 20 bp, Artificial Sequence
  Synthetic oligonucleotide; CAG chr11 5163758 5163777 5163761 -
tcctccggaaccacctcccc

SEQ ID NO: 55543 - DNA, 20 bp, Artificial Sequence
  Synthetic oligonucleotide; AGG chr11 5163757 5163776 5163760 -
cctccggaaccacctccccc

SEQ ID NO: 55544 - DNA, 20 bp, Artificial Sequence
  Synthetic oligonucleotide; GAG chr11 5163755 5163774 5163758 -
tccggaaccacctcccccag

SEQ ID NO: 55545 - DNA, 20 bp, Artificial Sequence
  Synthetic oligonucleotide; AAG chr11 5163744 5163763 5163747 -
ctcccccaggagcttgctac

SEQ ID NO: 55546 - DNA, 20 bp, Artificial Sequence
  Synthetic oligonucleotide; CAG chr11 5163738 5163757 5163741 -
caggagcttgctacaagtgc

SEQ ID NO: 55547 - DNA, 20 bp, Artificial Sequence
  Synthetic oligonucleotide; TGG chr11 5163730 5163749 5163733 -
tgctacaagtgccagaaatc

SEQ ID NO: 55548 - DNA, 20 bp, Artificial Sequence
  Synthetic oligonucleotide; CAG chr11 5163723 5163742 5163726 -
agtgccagaaatctggccac

SEQ ID NO: 55549 - DNA, 20 bp, Artificial Sequence
  Synthetic oligonucleotide; AGG chr11 5163722 5163741 5163725 -
gtgccagaaatctggccacc

SEQ ID NO: 55550 - DNA, 20 bp, Artificial Sequence
  Synthetic oligonucleotide; AAG chr11 5163717 5163736 5163720 -
agaaatctggccaccaggcc

SEQ ID NO: 55551 - DNA, 20 bp, Artificial Sequence
  Synthetic oligonucleotide; AGG chr11 5163716 5163735 5163719 -
gaaatctggccaccaggcca

SEQ ID NO: 55552 - DNA, 20 bp, Artificial Sequence
  Synthetic oligonucleotide; CAG chr11 5163705 5163724 5163708 -
accaggccaaggaatgcccg

SEQ ID NO: 55553 - DNA, 20 bp, Artificial Sequence
  Synthetic oligonucleotide; CAG chr11 5163700 5163719 5163703 -
gccaaggaatgcccgcagcc

SEQ ID NO: 55554 - DNA, 20 bp, Artificial Sequence
  Synthetic oligonucleotide; AGG chr11 5163699 5163718 5163702 -
ccaaggaatgcccgcagccc

SEQ ID NO: 55555 - DNA, 20 bp, Artificial Sequence
  Synthetic oligonucleotide; AAG chr11 5163687 5163706 5163690 -
cgcagcccaggattcctcct

SEQ ID NO: 55556 - DNA, 20 bp, Artificial Sequence
  Synthetic oligonucleotide; CAG chr11 5163668 5163687 5163671 -
taagccgtgtcccatctgtg

SEQ ID NO: 55557 - DNA, 20 bp, Artificial Sequence
  Synthetic oligonucleotide; AGG chr11 5163667 5163686 5163670 -
aagccgtgtcccatctgtgc

SEQ ID NO: 55558 - DNA, 20 bp, Artificial Sequence
  Synthetic oligonucleotide; TAG chr11 5163657 5163676 5163660 -
ccatctgtgcaggaccccac

SEQ ID NO: 55559 - DNA, 20 bp, Artificial Sequence
  Synthetic oligonucleotide; CGG chr11 5163650 5163669 5163653 -
tgcaggaccccactagaaat

SEQ ID NO: 55560 - DNA, 20 bp, Artificial Sequence
  Synthetic oligonucleotide; TGG chr11 5163632 5163651 5163635 -
atcggactgttcaactcacc

SEQ ID NO: 55561 - DNA, 20 bp, Artificial Sequence
  Synthetic oligonucleotide; CAG chr11 5163629 5163648 5163632 -
ggactgttcaactcacctgg

SEQ ID NO: 55562 - DNA, 20 bp, Artificial Sequence
  Synthetic oligonucleotide; TAG chr11 5163619 5163638 5163622 -
actcacctggcagccactcc

SEQ ID NO: 55563 - DNA, 20 bp, Artificial Sequence
  Synthetic oligonucleotide; GAG chr11 5163617 5163636 5163620 -
tcacctggcagccactccta

SEQ ID NO: 55564 - DNA, 20 bp, Artificial Sequence
  Synthetic oligonucleotide; TGG chr11 5163610 5163629 5163613 -
gcagccactcctagagcccc

SEQ ID NO: 55565 - DNA, 20 bp, Artificial Sequence
  Synthetic oligonucleotide; TGG chr11 5163602 5163621 5163605 -
tcctagagcccctggaactc

SEQ ID NO: 55566 - DNA, 20 bp, Artificial Sequence
  Synthetic oligonucleotide; AAG chr11 5163596 5163615 5163599 -
agcccctggaactctggccc

SEQ ID NO: 55567 - DNA, 20 bp, Artificial Sequence
  Synthetic oligonucleotide; AGG chr11 5163595 5163614 5163598 -
gcccctggaactctggccca

SEQ ID NO: 55568 - DNA, 20 bp, Artificial Sequence
  Synthetic oligonucleotide; CAG chr11 5163572 5163591 5163575 -
ctccctgactgactccttcc

SEQ ID NO: 55569 - DNA, 20 bp, Artificial Sequence
  Synthetic oligonucleotide; CGG chr11 5163562 5163581 5163565 -
gactccttcccagatcttct

SEQ ID NO: 55570 - DNA, 20 bp, Artificial Sequence
  Synthetic oligonucleotide; CAG chr11 5163554 5163573 5163557 -
cccagatcttctcggctttg

SEQ ID NO: 55571 - DNA, 20 bp, Artificial Sequence
  Synthetic oligonucleotide; AAG chr11 5163548 5163567 5163551 -
tcttctcggctttgcagctg

SEQ ID NO: 55572 - DNA, 20 bp, Artificial Sequence
  Synthetic oligonucleotide; CGG chr11 5163524 5163543 5163527 -
ctgccactgcctgatcgcct

SEQ ID NO: 55573 - DNA, 20 bp, Artificial Sequence
  Synthetic oligonucleotide; AAG chr11 5163521 5163540 5163524 -
ccactgcctgatcgcctcgg

SEQ ID NO: 55574 - DNA, 20 bp, Artificial Sequence
  Synthetic oligonucleotide; TAG chr11 5163513 5163532 5163516 -
tgatcgcctcggaagccctg

SEQ ID NO: 55575 - DNA, 20 bp, Artificial Sequence
  Synthetic oligonucleotide; CAG chr11 5163503 5163522 5163506 -
ggaagccctgtagaccatca

SEQ ID NO: 55576 - DNA, 20 bp, Artificial Sequence
  Synthetic oligonucleotide; GAG chr11 5163495 5163514 5163498 -
tgtagaccatcacagacacc

SEQ ID NO: 55577 - DNA, 20 bp, Artificial Sequence
  Synthetic oligonucleotide; TAG chr11 5163489 5163508 5163492 -
ccatcacagacaccgagctt

SEQ ID NO: 55578 - DNA, 20 bp, Artificial Sequence
  Synthetic oligonucleotide; AGG chr11 5163488 5163507 5163491 -
catcacagacaccgagcttt

SEQ ID NO: 55579 - DNA, 20 bp, Artificial Sequence
  Synthetic oligonucleotide; CAG chr11 5163476 5163495 5163479 -
cgagctttaggtaattctca

SEQ ID NO: 55580 - DNA, 20 bp, Artificial Sequence
  Synthetic oligonucleotide; TGG chr11 5163473 5163492 5163476 -
gctttaggtaattctcacag

SEQ ID NO: 55581 - DNA, 20 bp, Artificial Sequence
  Synthetic oligonucleotide; GAG chr11 5163471 5163490 5163474 -
tttaggtaattctcacagtg

SEQ ID NO: 55582 - DNA, 20 bp, Artificial Sequence
  Synthetic oligonucleotide; AGG chr11 5163470 5163489 5163473 -
ttaggtaattctcacagtgg

SEQ ID NO: 55583 - DNA, 20 bp, Artificial Sequence
  Synthetic oligonucleotide; GGG chr11 5163469 5163488 5163472 -
taggtaattctcacagtgga

SEQ ID NO: 55584 - DNA, 20 bp, Artificial Sequence
  Synthetic oligonucleotide; AAG chr11 5163465 5163484 5163468 -
taattctcacagtggagggt

SEQ ID NO: 55585 - DNA, 20 bp, Artificial Sequence
  Synthetic oligonucleotide; CAG chr11 5163445 5163464 5163448 -
aagtctgtacccttcttaat

SEQ ID NO: 55586 - DNA, 20 bp, Artificial Sequence
  Synthetic oligonucleotide; TGG chr11 5163440 5163459 5163443 -
tgtacccttcttaatcagta

SEQ ID NO: 55587 - DNA, 20 bp, Artificial Sequence
  Synthetic oligonucleotide; GAG chr11 5163438 5163457 5163441 -
tacccttcttaatcagtatg

SEQ ID NO: 55588 - DNA, 20 bp, Artificial Sequence
  Synthetic oligonucleotide; AGG chr11 5163437 5163456 5163440 -
acccttcttaatcagtatgg

SEQ ID NO: 55589 - DNA, 20 bp, Artificial Sequence
  Synthetic oligonucleotide; AAG chr11 5163406 5163425 5163409 -
tccacattaccttcttttca

SEQ ID NO: 55590 - DNA, 20 bp, Artificial Sequence
  Synthetic oligonucleotide; AGG chr11 5163405 5163424 5163408 -
ccacattaccttcttttcaa

SEQ ID NO: 55591 - DNA, 20 bp, Artificial Sequence
  Synthetic oligonucleotide; TAG chr11 5163374 5163393 5163377 -
ccttgcctccataactgttg

SEQ ID NO: 55592 - DNA, 20 bp, Artificial Sequence
  Synthetic oligonucleotide; AGG chr11 5163373 5163392 5163376 -
cttgcctccataactgttgt

SEQ ID NO: 55593 - DNA, 20 bp, Artificial Sequence
  Synthetic oligonucleotide; TGG chr11 5163364 5163383 5163367 -
ataactgttgtaggtattga

SEQ ID NO: 55594 - DNA, 20 bp, Artificial Sequence
  Synthetic oligonucleotide; CAG chr11 5163360 5163379 5163363 -
ctgttgtaggtattgatggc

SEQ ID NO: 55595 - DNA, 20 bp, Artificial Sequence
  Synthetic oligonucleotide; AGG chr11 5163359 5163378 5163362 -
tgttgtaggtattgatggcc

SEQ ID NO: 55596 - DNA, 20 bp, Artificial Sequence
  Synthetic oligonucleotide; TGG chr11 5163327 5163346 5163330 -
ctcttaaaattccccaactc

SEQ ID NO: 55597 - DNA, 20 bp, Artificial Sequence
  Synthetic oligonucleotide; GAG chr11 5163316 5163335 5163319 -
ccccaactctggtgctaacc

SEQ ID NO: 55598 - DNA, 20 bp, Artificial Sequence
  Synthetic oligonucleotide; AAG chr11 5163300 5163319 5163303 -
aaccgagacgatactctttt

SEQ ID NO: 55599 - DNA, 20 bp, Artificial Sequence
  Synthetic oligonucleotide; CAG chr11 5163270 5163289 5163273 -
ttttcattatccccacctgc

SEQ ID NO: 55600 - DNA, 20 bp, Artificial Sequence
  Synthetic oligonucleotide; TAG chr11 5163258 5163277 5163261 -
ccacctgccagttcccttat

SEQ ID NO: 55601 - DNA, 20 bp, Artificial Sequence
  Synthetic oligonucleotide; AGG chr11 5163257 5163276 5163260 -
cacctgccagttcccttatt

SEQ ID NO: 55602 - DNA, 20 bp, Artificial Sequence
  Synthetic oligonucleotide; GAG chr11 5163252 5163271 5163255 -
gccagttcccttattaggcc

SEQ ID NO: 55603 - DNA, 20 bp, Artificial Sequence
  Synthetic oligonucleotide; TGG chr11 5163212 5163231 5163215 -
tctgcttccctgactattcc

SEQ ID NO: 55604 - DNA, 20 bp, Artificial Sequence
  Synthetic oligonucleotide; GGG chr11 5163211 5163230 5163214 -
ctgcttccctgactattcct

SEQ ID NO: 55605 - DNA, 20 bp, Artificial Sequence
  Synthetic oligonucleotide; CAG chr11 5163205 5163224 5163208 -
ccctgactattcctgggcta

SEQ ID NO: 55606 - DNA, 20 bp, Artificial Sequence
  Synthetic oligonucleotide; CAG chr11 5163176 5163195 5163179 -
ctcattgccatgttttcccc

SEQ ID NO: 55607 - DNA, 20 bp, Artificial Sequence
  Synthetic oligonucleotide; AAG chr11 5163169 5163188 5163172 -
ccatgttttcccccagttca

SEQ ID NO: 55608 - DNA, 20 bp, Artificial Sequence
  Synthetic oligonucleotide; AAG chr11 5163123 5163142 5163126 -
atctccccaccttaatccac

SEQ ID NO: 55609 - DNA, 20 bp, Artificial Sequence
  Synthetic oligonucleotide; AAG chr11 5163117 5163136 5163120 -
ccaccttaatccacaagtat

SEQ ID NO: 55610 - DNA, 20 bp, Artificial Sequence
  Synthetic oligonucleotide; CAG chr11 5163031 5163050 5163034 -
actcttaccccgctcaatgc

SEQ ID NO: 55611 - DNA, 20 bp, Artificial Sequence
  Synthetic oligonucleotide; CAG chr11 5163016 5163035 5163019 -
aatgccagtatcccatccca

SEQ ID NO: 55612 - DNA, 20 bp, Artificial Sequence
  Synthetic oligonucleotide; AAG chr11 5163003 5163022 5163006 -
catcccacagcatgctttga

SEQ ID NO: 55613 - DNA, 20 bp, Artificial Sequence
  Synthetic oligonucleotide; AGG chr11 5163002 5163021 5163005 -
atcccacagcatgctttgaa

SEQ ID NO: 55614 - DNA, 20 bp, Artificial Sequence
  Synthetic oligonucleotide; AAG chr11 5162995 5163014 5162998 -
agcatgctttgaaaggatta

SEQ ID NO: 55615 - DNA, 20 bp, Artificial Sequence
  Synthetic oligonucleotide; CAG chr11 5162971 5162990 5162974 -
ctgttattacttgcctgtta

SEQ ID NO: 55616 - DNA, 20 bp, Artificial Sequence
  Synthetic oligonucleotide; TGG chr11 5162966 5162985 5162969 -
attacttgcctgttacagca

SEQ ID NO: 55617 - DNA, 20 bp, Artificial Sequence
  Synthetic oligonucleotide; AAG chr11 5162956 5162975 5162959 -
tgttacagcatggcctttta

SEQ ID NO: 55618 - DNA, 20 bp, Artificial Sequence
  Synthetic oligonucleotide; CAG chr11 5162907 5162926 5162910 -
cattttacctgtcctaaaac

SEQ ID NO: 55619 - DNA, 20 bp, Artificial Sequence
  Synthetic oligonucleotide; AAG chr11 5162902 5162921 5162905 -
tacctgtcctaaaaccagac

SEQ ID NO: 55620 - DNA, 20 bp, Artificial Sequence
  Synthetic oligonucleotide; CAG chr11 5162894 5162913 5162897 -
ctaaaaccagacaagcctta

SEQ ID NO: 55621 - DNA, 20 bp, Artificial Sequence
  Synthetic oligonucleotide; AGG chr11 5162893 5162912 5162896 -
taaaaccagacaagccttac

SEQ ID NO: 55622 - DNA, 20 bp, Artificial Sequence
  Synthetic oligonucleotide; TAG chr11 5162889 5162908 5162892 -
accagacaagccttacaggt

SEQ ID NO: 55623 - DNA, 20 bp, Artificial Sequence
  Synthetic oligonucleotide; CAG chr11 5162884 5162903 5162887 -
acaagccttacaggttagtt

SEQ ID NO: 55624 - DNA, 20 bp, Artificial Sequence
  Synthetic oligonucleotide; TGG chr11 5162838 5162857 5162841 -
tgttttgcctatccacccca

SEQ ID NO: 55625 - DNA, 20 bp, Artificial Sequence
  Synthetic oligonucleotide; TGG chr11 5162775 5162794 5162778 -
tataacccattattctgttc

SEQ ID NO: 55626 - DNA, 20 bp, Artificial Sequence
  Synthetic oligonucleotide; CAG chr11 5162728 5162747 5162731 -
ttcctttgcacccttcattc

SEQ ID NO: 55627 - DNA, 20 bp, Artificial Sequence
  Synthetic oligonucleotide; TGG chr11 5162707 5162726 5162710 -
agcctctcttcgctttcact

SEQ ID NO: 55628 - DNA, 20 bp, Artificial Sequence
  Synthetic oligonucleotide; TAG chr11 5162686 5162705 5162689 -
ggactgacactgacacccat

SEQ ID NO: 55629 - DNA, 20 bp, Artificial Sequence
  Synthetic oligonucleotide; AGG chr11 5162685 5162704 5162688 -
gactgacactgacacccatt

SEQ ID NO: 55630 - DNA, 20 bp, Artificial Sequence
  Synthetic oligonucleotide; CAG chr11 5162680 5162699 5162683 -
acactgacacccattaggct

SEQ ID NO: 55631 - DNA, 20 bp, Artificial Sequence
  Synthetic oligonucleotide; TGG chr11 5162668 5162687 5162671 -
attaggctcagcaaattacc

SEQ ID NO: 55632 - DNA, 20 bp, Artificial Sequence
  Synthetic oligonucleotide; GGG chr11 5162667 5162686 5162670 -
ttaggctcagcaaattacct

SEQ ID NO: 55633 - DNA, 20 bp, Artificial Sequence
  Synthetic oligonucleotide; AAG chr11 5162652 5162671 5162655 -
tacctgggctgtactgctgc

SEQ ID NO: 55634 - DNA, 20 bp, Artificial Sequence
  Synthetic oligonucleotide; AGG chr11 5162651 5162670 5162654 -
acctgggctgtactgctgca

SEQ ID NO: 55635 - DNA, 20 bp, Artificial Sequence
  Synthetic oligonucleotide; CAG chr11 5162643 5162662 5162646 -
tgtactgctgcaaggcttca

SEQ ID NO: 55636 - DNA, 20 bp, Artificial Sequence
  Synthetic oligonucleotide; CAG chr11 5162639 5162658 5162642 -
ctgctgcaaggcttcacaga

SEQ ID NO: 55637 - DNA, 20 bp, Artificial Sequence
  Synthetic oligonucleotide; CAG chr11 5162624 5162643 5162627 -
acagacagaccccattactt

SEQ ID NO: 55638 - DNA, 20 bp, Artificial Sequence
  Synthetic oligonucleotide; AAG chr11 5162619 5162638 5162622 -
cagaccccattacttcagtc

SEQ ID NO: 55639 - DNA, 20 bp, Artificial Sequence
  Synthetic oligonucleotide; CGG chr11 5162585 5162604 5162588 -
tcctcatgtgttacctatct

SEQ ID NO: 55640 - DNA, 20 bp, Artificial Sequence
  Synthetic oligonucleotide; TAG chr11 5162482 5162501 5162485 -
acaacaactcctttccttcc

SEQ ID NO: 55641 - DNA, 20 bp, Artificial Sequence
  Synthetic oligonucleotide; AGG chr11 5162481 5162500 5162484 -
caacaactcctttccttcct

SEQ ID NO: 55642 - DNA, 20 bp, Artificial Sequence
  Synthetic oligonucleotide; TAG chr11 5162476 5162495 5162479 -
actcctttccttcctaggca

SEQ ID NO: 55643 - DNA, 20 bp, Artificial Sequence
  Synthetic oligonucleotide; TAG chr11 5162472 5162491 5162475 -
ctttccttcctaggcatagt

SEQ ID NO: 55644 - DNA, 20 bp, Artificial Sequence
  Synthetic oligonucleotide; CGG chr11 5162467 5162486 5162470 -
cttcctaggcatagttagtg

SEQ ID NO: 55645 - DNA, 20 bp, Artificial Sequence
  Synthetic oligonucleotide; CAG chr11 5162463 5162482 5162466 -
ctaggcatagttagtgcggt

SEQ ID NO: 55646 - DNA, 20 bp, Artificial Sequence
  Synthetic oligonucleotide; AAG chr11 5162449 5162468 5162452 -
tgcggtcagaattcttacac

SEQ ID NO: 55647 - DNA, 20 bp, Artificial Sequence
  Synthetic oligonucleotide; CAG chr11 5162443 5162462 5162446 -
cagaattcttacacaagatc

SEQ ID NO: 55648 - DNA, 20 bp, Artificial Sequence
  Synthetic oligonucleotide; AGG chr11 5162442 5162461 5162445 -
agaattcttacacaagatcc

SEQ ID NO: 55649 - DNA, 20 bp, Artificial Sequence
  Synthetic oligonucleotide; TAG chr11 5162428 5162447 5162431 -
agatccaggactgcaccctg

SEQ ID NO: 55650 - DNA, 20 bp, Artificial Sequence
  Synthetic oligonucleotide; TAG chr11 5162392 5162411 5162395 -
ataacttgaccttactgttt

SEQ ID NO: 55651 - DNA, 20 bp, Artificial Sequence
  Synthetic oligonucleotide; TAG chr11 5162387 5162406 5162390 -
ttgaccttactgttttagcc

SEQ ID NO: 55652 - DNA, 20 bp, Artificial Sequence
  Synthetic oligonucleotide; CAG chr11 5162380 5162399 5162383 -
tactgttttagcctagccct

SEQ ID NO: 55653 - DNA, 20 bp, Artificial Sequence
  Synthetic oligonucleotide; AGG chr11 5162379 5162398 5162382 -
actgttttagcctagccctc

SEQ ID NO: 55654 - DNA, 20 bp, Artificial Sequence
  Synthetic oligonucleotide; CAG chr11 5162368 5162387 5162371 -
ctagccctcaggtctgcatg

SEQ ID NO: 55655 - DNA, 20 bp, Artificial Sequence
  Synthetic oligonucleotide; TGG chr11 5162365 5162384 5162368 -
gccctcaggtctgcatgcag

SEQ ID NO: 55656 - DNA, 20 bp, Artificial Sequence
  Synthetic oligonucleotide; TAG chr11 5162341 5162360 5162344 -
tgccgctgctttaatacttt

SEQ ID NO: 55657 - DNA, 20 bp, Artificial Sequence
  Synthetic oligonucleotide; GAG chr11 5162339 5162358 5162342 -
ccgctgctttaatactttta

SEQ ID NO: 55658 - DNA, 20 bp, Artificial Sequence
  Synthetic oligonucleotide; AGG chr11 5162338 5162357 5162341 -
cgctgctttaatacttttag

SEQ ID NO: 55659 - DNA, 20 bp, Artificial Sequence
  Synthetic oligonucleotide; TAG chr11 5162312 5162331 5162315 -
taaaaatcacaaactatgct

SEQ ID NO: 55660 - DNA, 20 bp, Artificial Sequence
  Synthetic oligonucleotide; CGG chr11 5162234 5162253 5162237 -
tgcatatactttctgatccc

SEQ ID NO: 55661 - DNA, 20 bp, Artificial Sequence
  Synthetic oligonucleotide; CAG chr11 5162225 5162244 5162228 -
tttctgatccccggctcctt

SEQ ID NO: 55662 - DNA, 20 bp, Artificial Sequence
  Synthetic oligonucleotide; AAG chr11 5162204 5162223 5162207 -
agctgtactcactctttgtt

SEQ ID NO: 55663 - DNA, 20 bp, Artificial Sequence
  Synthetic oligonucleotide; TGG chr11 5162186 5162205 5162189 -
ttaagtcccacaattaccat

SEQ ID NO: 55664 - DNA, 20 bp, Artificial Sequence
  Synthetic oligonucleotide; TGG chr11 5162180 5162199 5162183 -
cccacaattaccattggtcc

SEQ ID NO: 55665 - DNA, 20 bp, Artificial Sequence
  Synthetic oligonucleotide; CGG chr11 5162175 5162194 5162178 -
aattaccattggtcctggcc

SEQ ID NO: 55666 - DNA, 20 bp, Artificial Sequence
  Synthetic oligonucleotide; CGG chr11 5162163 5162182 5162166 -
tcctggcccggacttcaatc

SEQ ID NO: 55667 - DNA, 20 bp, Artificial Sequence
  Synthetic oligonucleotide; TGG chr11 5162022 5162041 5162025 -
gatcacacttgatttattga

SEQ ID NO: 55668 - DNA, 20 bp, Artificial Sequence
  Synthetic oligonucleotide; CAG chr11 5162010 5162029 5162013 -
tttattgatggccgttccac

SEQ ID NO: 55669 - DNA, 20 bp, Artificial Sequence
  Synthetic oligonucleotide; AGG chr11 5162009 5162028 5162012 -
ttattgatggccgttccacc

SEQ ID NO: 55670 - DNA, 20 bp, Artificial Sequence
  Synthetic oligonucleotide; TAG chr11 5162001 5162020 5162004 -
ggccgttccaccaggcctaa

SEQ ID NO: 55671 - DNA, 20 bp, Artificial Sequence
  Synthetic oligonucleotide; CAG chr11 5161990 5162009 5161993 -
caggcctaatagccacacac

SEQ ID NO: 55672 - DNA, 20 bp, Artificial Sequence
  Synthetic oligonucleotide; AAG chr11 5161985 5162004 5161988 -
ctaatagccacacaccagca

SEQ ID NO: 55673 - DNA, 20 bp, Artificial Sequence
  Synthetic oligonucleotide; AGG chr11 5161984 5162003 5161987 -
taatagccacacaccagcaa

SEQ ID NO: 55674 - DNA, 20 bp, Artificial Sequence
  Synthetic oligonucleotide; CAG chr11 5161981 5162000 5161984 -
tagccacacaccagcaaagg

SEQ ID NO: 55675 - DNA, 20 bp, Artificial Sequence
  Synthetic oligonucleotide; AGG chr11 5161980 5161999 5161983 -
agccacacaccagcaaaggc

SEQ ID NO: 55676 - DNA, 20 bp, Artificial Sequence
  Synthetic oligonucleotide; TAG chr11 5161969 5161988 5161972 -
agcaaaggcaggctatgcta

SEQ ID NO: 55677 - DNA, 20 bp, Artificial Sequence
  Synthetic oligonucleotide; TAG chr11 5161956 5161975 5161959 -
tatgctatagtacaaaccac

SEQ ID NO: 55678 - DNA, 20 bp, Artificial Sequence
  Synthetic oligonucleotide; TAG chr11 5161918 5161937 5161921 -
ctctcatttcctttccatcg

SEQ ID NO: 55679 - DNA, 20 bp, Artificial Sequence
  Synthetic oligonucleotide; AAG chr11 5161902 5161921 5161905 -
atcgtagaaatctatcctca

SEQ ID NO: 55680 - DNA, 20 bp, Artificial Sequence
  Synthetic oligonucleotide; CAG chr11 5161888 5161907 5161891 -
tcctcaaagaaataacttct

SEQ ID NO: 55681 - DNA, 20 bp, Artificial Sequence
  Synthetic oligonucleotide; CAG chr11 5161858 5161877 5161861 -
tctgctattctgctactcct

SEQ ID NO: 55682 - DNA, 20 bp, Artificial Sequence
  Synthetic oligonucleotide; AGG chr11 5161857 5161876 5161860 -
ctgctattctgctactcctc

SEQ ID NO: 55683 - DNA, 20 bp, Artificial Sequence
  Synthetic oligonucleotide; GGG chr11 5161856 5161875 5161859 -
tgctattctgctactcctca

SEQ ID NO: 55684 - DNA, 20 bp, Artificial Sequence
  Synthetic oligonucleotide; CAG chr11 5161847 5161866 5161850 -
gctactcctcagggattatt

SEQ ID NO: 55685 - DNA, 20 bp, Artificial Sequence
  Synthetic oligonucleotide; AGG chr11 5161846 5161865 5161849 -
ctactcctcagggattattc

SEQ ID NO: 55686 - DNA, 20 bp, Artificial Sequence
  Synthetic oligonucleotide; AAG chr11 5161821 5161840 5161824 -
ccctcccttccctacacatc

SEQ ID NO: 55687 - DNA, 20 bp, Artificial Sequence
  Synthetic oligonucleotide; GAG chr11 5161815 5161834 5161818 -
cttccctacacatcaagctc

SEQ ID NO: 55688 - DNA, 20 bp, Artificial Sequence
  Synthetic oligonucleotide; AGG chr11 5161814 5161833 5161817 -
ttccctacacatcaagctcg

SEQ ID NO: 55689 - DNA, 20 bp, Artificial Sequence
  Synthetic oligonucleotide; CAG chr11 5161798 5161817 5161801 -
ctcgaggatttgcccccacc

SEQ ID NO: 55690 - DNA, 20 bp, Artificial Sequence
  Synthetic oligonucleotide; AGG chr11 5161797 5161816 5161800 -
tcgaggatttgcccccaccc

SEQ ID NO: 55691 - DNA, 20 bp, Artificial Sequence
  Synthetic oligonucleotide; TGG chr11 5161792 5161811 5161795 -
gatttgcccccacccaggac

SEQ ID NO: 55692 - DNA, 20 bp, Artificial Sequence
  Synthetic oligonucleotide; TAG chr11 5161784 5161803 5161787 -
cccacccaggactggcaaat

SEQ ID NO: 55693 - DNA, 20 bp, Artificial Sequence
  Synthetic oligonucleotide; GAG chr11 5161763 5161782 5161766 -
agatttactcaacatgccct

SEQ ID NO: 55694 - DNA, 20 bp, Artificial Sequence
  Synthetic oligonucleotide; CAG chr11 5161759 5161778 5161762 -
ttactcaacatgccctgagt

SEQ ID NO: 55695 - DNA, 20 bp, Artificial Sequence
  Synthetic oligonucleotide; TAG chr11 5161739 5161758 5161742 -
cagataactaaaatacctct

SEQ ID NO: 55696 - DNA, 20 bp, Artificial Sequence
  Synthetic oligonucleotide; TAG chr11 5161734 5161753 5161737 -
aactaaaatacctcttagtc

SEQ ID NO: 55697 - DNA, 20 bp, Artificial Sequence
  Synthetic oligonucleotide; AGG chr11 5161733 5161752 5161736 -
actaaaatacctcttagtct

SEQ ID NO: 55698 - DNA, 20 bp, Artificial Sequence
  Synthetic oligonucleotide; TAG chr11 5161730 5161749 5161733 -
aaaatacctcttagtctagg

SEQ ID NO: 55699 - DNA, 20 bp, Artificial Sequence
  Synthetic oligonucleotide; TGG chr11 5161717 5161736 5161720 -
gtctaggtagacactttcac

SEQ ID NO: 55700 - DNA, 20 bp, Artificial Sequence
  Synthetic oligonucleotide; AAG chr11 5161712 5161731 5161715 -
ggtagacactttcactggat

SEQ ID NO: 55701 - DNA, 20 bp, Artificial Sequence
  Synthetic oligonucleotide; TAG chr11 5161709 5161728 5161712 -
agacactttcactggataag

SEQ ID NO: 55702 - DNA, 20 bp, Artificial Sequence
  Synthetic oligonucleotide; GAG chr11 5161707 5161726 5161710 -
acactttcactggataagta

SEQ ID NO: 55703 - DNA, 20 bp, Artificial Sequence
  Synthetic oligonucleotide; AGG chr11 5161706 5161725 5161709 -
cactttcactggataagtag

SEQ ID NO: 55704 - DNA, 20 bp, Artificial Sequence
  Synthetic oligonucleotide; CAG chr11 5161694 5161713 5161697 -
ataagtagaggtctttccta

SEQ ID NO: 55705 - DNA, 20 bp, Artificial Sequence
  Synthetic oligonucleotide; AGG chr11 5161693 5161712 5161696 -
taagtagaggtctttcctac

SEQ ID NO: 55706 - DNA, 20 bp, Artificial Sequence
  Synthetic oligonucleotide; GGG chr11 5161692 5161711 5161695 -
aagtagaggtctttcctaca

SEQ ID NO: 55707 - DNA, 20 bp, Artificial Sequence
  Synthetic oligonucleotide; GAG chr11 5161686 5161705 5161689 -
aggtctttcctacagggtct

SEQ ID NO: 55708 - DNA, 20 bp, Artificial Sequence
  Synthetic oligonucleotide; AAG chr11 5161683 5161702 5161686 -
tctttcctacagggtctgag

SEQ ID NO: 55709 - DNA, 20 bp, Artificial Sequence
  Synthetic oligonucleotide; AGG chr11 5161682 5161701 5161685 -
ctttcctacagggtctgaga

SEQ ID NO: 55710 - DNA, 20 bp, Artificial Sequence
  Synthetic oligonucleotide; CAG chr11 5161673 5161692 5161676 -
agggtctgagaaggccaccg

SEQ ID NO: 55711 - DNA, 20 bp, Artificial Sequence
  Synthetic oligonucleotide; CAG chr11 5161652 5161671 5161655 -
agtcatttcttcccttctgt

SEQ ID NO: 55712 - DNA, 20 bp, Artificial Sequence
  Synthetic oligonucleotide; CAG chr11 5161638 5161657 5161641 -
ttctgtcagacataattcct

SEQ ID NO: 55713 - DNA, 20 bp, Artificial Sequence
  Synthetic oligonucleotide; TAG chr11 5161633 5161652 5161636 -
tcagacataattcctcagtt

SEQ ID NO: 55714 - DNA, 20 bp, Artificial Sequence
  Synthetic oligonucleotide; CAG chr11 5161614 5161633 5161617 -
ttagccttcctacctctata

SEQ ID NO: 55715 - DNA, 20 bp, Artificial Sequence
  Synthetic oligonucleotide; CAG chr11 5161603 5161622 5161606 -
acctctatacagtctgataa

SEQ ID NO: 55716 - DNA, 20 bp, Artificial Sequence
  Synthetic oligonucleotide; CAG chr11 5161598 5161617 5161601 -
tatacagtctgataacagac

SEQ ID NO: 55717 - DNA, 20 bp, Artificial Sequence
  Synthetic oligonucleotide; TAG chr11 5161588 5161607 5161591 -
gataacagaccagcctttat

SEQ ID NO: 55718 - DNA, 20 bp, Artificial Sequence
  Synthetic oligonucleotide; CAG chr11 5161579 5161598 5161582 -
ccagcctttattagtcaaat

SEQ ID NO: 55719 - DNA, 20 bp, Artificial Sequence
  Synthetic oligonucleotide; AAG chr11 5161574 5161593 5161577 -
ctttattagtcaaatcagcc

SEQ ID NO: 55720 - DNA, 20 bp, Artificial Sequence
  Synthetic oligonucleotide; CAG chr11 5161571 5161590 5161574 -
tattagtcaaatcagccaag

SEQ ID NO: 55721 - DNA, 20 bp, Artificial Sequence
  Synthetic oligonucleotide; CAG chr11 5161563 5161582 5161566 -
aaatcagccaagcagttttt

SEQ ID NO: 55722 - DNA, 20 bp, Artificial Sequence
  Synthetic oligonucleotide; AGG chr11 5161562 5161581 5161565 -
aatcagccaagcagtttttc

SEQ ID NO: 55723 - DNA, 20 bp, Artificial Sequence
  Synthetic oligonucleotide; TAG chr11 5161555 5161574 5161558 -
caagcagtttttcaggctct

SEQ ID NO: 55724 - DNA, 20 bp, Artificial Sequence
  Synthetic oligonucleotide; CAG chr11 5161548 5161567 5161551 -
tttttcaggctcttagtatt

SEQ ID NO: 55725 - DNA, 20 bp, Artificial Sequence
  Synthetic oligonucleotide; CGG chr11 5161525 5161544 5161528 -
taaaacctttatatccctta

SEQ ID NO: 55726 - DNA, 20 bp, Artificial Sequence
  Synthetic oligonucleotide; CAG chr11 5161511 5161530 5161514 -
cccttacggtcctccgtctt

SEQ ID NO: 55727 - DNA, 20 bp, Artificial Sequence
  Synthetic oligonucleotide; AGG chr11 5161510 5161529 5161513 -
ccttacggtcctccgtcttc

SEQ ID NO: 55728 - DNA, 20 bp, Artificial Sequence
  Synthetic oligonucleotide; AAG chr11 5161505 5161524 5161508 -
cggtcctccgtcttcaggaa

SEQ ID NO: 55729 - DNA, 20 bp, Artificial Sequence
  Synthetic oligonucleotide; TAG chr11 5161502 5161521 5161505 -
tcctccgtcttcaggaaaag

SEQ ID NO: 55730 - DNA, 20 bp, Artificial Sequence
  Synthetic oligonucleotide; CGG chr11 5161497 5161516 5161500 -
cgtcttcaggaaaagtagaa

SEQ ID NO: 55731 - DNA, 20 bp, Artificial Sequence
  Synthetic oligonucleotide; AAG chr11 5161464 5161483 5161467 -
ttttaaaaacacacctcacc

SEQ ID NO: 55732 - DNA, 20 bp, Artificial Sequence
  Synthetic oligonucleotide; CAG chr11 5161459 5161478 5161462 -
aaaacacacctcaccaagct

SEQ ID NO: 55733 - DNA, 20 bp, Artificial Sequence
  Synthetic oligonucleotide; AAG chr11 5161443 5161462 5161446 -
agctcagccaccaacttaaa

SEQ ID NO: 55734 - DNA, 20 bp, Artificial Sequence
  Synthetic oligonucleotide; AGG chr11 5161442 5161461 5161445 -
gctcagccaccaacttaaaa

SEQ ID NO: 55735 - DNA, 20 bp, Artificial Sequence
  Synthetic oligonucleotide; TGG chr11 5161437 5161456 5161440 -
gccaccaacttaaaaaggac

SEQ ID NO: 55736 - DNA, 20 bp, Artificial Sequence
  Synthetic oligonucleotide; CAG chr11 5161408 5161427 5161411 -
cttttaccacttttctttct

SEQ ID NO: 55737 - DNA, 20 bp, Artificial Sequence
  Synthetic oligonucleotide; AAG chr11 5161405 5161424 5161408 -
ttaccacttttctttctcag

SEQ ID NO: 55738 - DNA, 20 bp, Artificial Sequence
  Synthetic oligonucleotide; CAG chr11 5161401 5161420 5161404 -
cacttttctttctcagaagt

SEQ ID NO: 55739 - DNA, 20 bp, Artificial Sequence
  Synthetic oligonucleotide; CAG chr11 5161389 5161408 5161392 -
tcagaagtcagacctgtcct

SEQ ID NO: 55740 - DNA, 20 bp, Artificial Sequence
  Synthetic oligonucleotide; CAG chr11 5161379 5161398 5161382 -
gacctgtcctcagaatgcta

SEQ ID NO: 55741 - DNA, 20 bp, Artificial Sequence
  Synthetic oligonucleotide; AGG chr11 5161378 5161397 5161381 -
acctgtcctcagaatgctac

SEQ ID NO: 55742 - DNA, 20 bp, Artificial Sequence
  Synthetic oligonucleotide; GGG chr11 5161377 5161396 5161380 -
cctgtcctcagaatgctaca

SEQ ID NO: 55743 - DNA, 20 bp, Artificial Sequence
  Synthetic oligonucleotide; CAG chr11 5161372 5161391 5161375 -
cctcagaatgctacagggta

SEQ ID NO: 55744 - DNA, 20 bp, Artificial Sequence
  Synthetic oligonucleotide; GAG chr11 5161362 5161381 5161365 -
ctacagggtacagcccattt

SEQ ID NO: 55745 - DNA, 20 bp, Artificial Sequence
  Synthetic oligonucleotide; TAG chr11 5161351 5161370 5161354 -
agcccatttgagctcctgta

SEQ ID NO: 55746 - DNA, 20 bp, Artificial Sequence
  Synthetic oligonucleotide; TAG chr11 5161334 5161353 5161337 -
gtatagatttgcctttttat

SEQ ID NO: 55747 - DNA, 20 bp, Artificial Sequence
  Synthetic oligonucleotide; AGG chr11 5161333 5161352 5161336 -
tatagatttgcctttttatt

SEQ ID NO: 55748 - DNA, 20 bp, Artificial Sequence
  Synthetic oligonucleotide; CAG chr11 5161327 5161346 5161330 -
tttgcctttttattaggccc

SEQ ID NO: 55749 - DNA, 20 bp, Artificial Sequence
  Synthetic oligonucleotide; CAG chr11 5161316 5161335 5161319 -
attaggccccagtctaattc

SEQ ID NO: 55750 - DNA, 20 bp, Artificial Sequence
  Synthetic oligonucleotide; CAG chr11 5161309 5161328 5161312 -
cccagtctaattccagacac

SEQ ID NO: 55751 - DNA, 20 bp, Artificial Sequence
  Synthetic oligonucleotide; TAG chr11 5161299 5161318 5161302 -
ttccagacaccagaccaact

SEQ ID NO: 55752 - DNA, 20 bp, Artificial Sequence
  Synthetic oligonucleotide; TAG chr11 5161254 5161273 5161257 -
catccctgctatcttctgtc

SEQ ID NO: 55753 - DNA, 20 bp, Artificial Sequence
  Synthetic oligonucleotide; CGG chr11 5161192 5161211 5161195 -
cctgctcttgtttacactgc

SEQ ID NO: 55754 - DNA, 20 bp, Artificial Sequence
  Synthetic oligonucleotide; AAG chr11 5161173 5161192 5161176 -
ccggtttacactgtttttcc

SEQ ID NO: 55755 - DNA, 20 bp, Artificial Sequence
  Synthetic oligonucleotide; CAG chr11 5161164 5161183 5161167 -
actgtttttccaagccatca

SEQ ID NO: 55756 - DNA, 20 bp, Artificial Sequence
  Synthetic oligonucleotide; TGG chr11 5161150 5161169 5161153 -
ccatcacagctgatatctcc

SEQ ID NO: 55757 - DNA, 20 bp, Artificial Sequence
  Synthetic oligonucleotide; AAG chr11 5161115 5161134 5161118 -
actgccactcttaactcttg

SEQ ID NO: 55758 - DNA, 20 bp, Artificial Sequence
  Synthetic oligonucleotide; TGG chr11 5161094 5161113 5161097 -
agtaaataaataatctttgc

SEQ ID NO: 55759 - DNA, 20 bp, Artificial Sequence
  Synthetic oligonucleotide; CAG chr11 5161091 5161110 5161094 -
aaataaataatctttgctgg

SEQ ID NO: 55760 - DNA, 20 bp, Artificial Sequence
  Synthetic oligonucleotide; AGG chr11 5161090 5161109 5161093 -
aataaataatctttgctggc

SEQ ID NO: 55761 - DNA, 20 bp, Artificial Sequence
  Synthetic oligonucleotide; TAG chr11 5161070 5161089 5161073 -
aggactatgttgaatctcct

SEQ ID NO: 55762 - DNA, 20 bp, Artificial Sequence
  Synthetic oligonucleotide; AGG chr11 5161069 5161088 5161072 -
ggactatgttgaatctcctt

SEQ ID NO: 55763 - DNA, 20 bp, Artificial Sequence
  Synthetic oligonucleotide; CAG chr11 5161055 5161074 5161058 -
ctccttaggcactctttaat

SEQ ID NO: 55764 - DNA, 20 bp, Artificial Sequence
  Synthetic oligonucleotide; TAG chr11 5161046 5161065 5161049 -
cactctttaatcagatgtcc

SEQ ID NO: 55765 - DNA, 20 bp, Artificial Sequence
  Synthetic oligonucleotide; AGG chr11 5161045 5161064 5161048 -
actctttaatcagatgtcct

SEQ ID NO: 55766 - DNA, 20 bp, Artificial Sequence
  Synthetic oligonucleotide; TAG chr11 5161029 5161048 5161032 -
tcctaggtcctcccacttct

SEQ ID NO: 55767 - DNA, 20 bp, Artificial Sequence
  Synthetic oligonucleotide; TGG chr11 5160988 5161007 5160991 -
tctccttctcttattccatt

SEQ ID NO: 55768 - DNA, 20 bp, Artificial Sequence
  Synthetic oligonucleotide; CAG chr11 5160959 5160978 5160962 -
aatccatacaaaaccgtatc

SEQ ID NO: 55769 - DNA, 20 bp, Artificial Sequence
  Synthetic oligonucleotide; AGG chr11 5160958 5160977 5160961 -
atccatacaaaaccgtatcc

SEQ ID NO: 55770 - DNA, 20 bp, Artificial Sequence
  Synthetic oligonucleotide; CAG chr11 5160877 5160896 5160880 -
cttaccacaaaatcttcctt

SEQ ID NO: 55771 - DNA, 20 bp, Artificial Sequence
  Synthetic oligonucleotide; TAG chr11 5160857 5160876 5160860 -
cagcttaatctctcccactc

SEQ ID NO: 55772 - DNA, 20 bp, Artificial Sequence
  Synthetic oligonucleotide; AGG chr11 5160856 5160875 5160859 -
agcttaatctctcccactct

SEQ ID NO: 55773 - DNA, 20 bp, Artificial Sequence
  Synthetic oligonucleotide; AAG chr11 5160826 5160845 5160829 -
gccgcccctaatcccgctcg

SEQ ID NO: 55774 - DNA, 20 bp, Artificial Sequence
  Synthetic oligonucleotide; CAG chr11 5160823 5160842 5160826 -
gcccctaatcccgctcgaag

SEQ ID NO: 55775 - DNA, 20 bp, Artificial Sequence
  Synthetic oligonucleotide; GAG chr11 5160816 5160835 5160819 -
atcccgctcgaagcagccct

SEQ ID NO: 55776 - DNA, 20 bp, Artificial Sequence
  Synthetic oligonucleotide; AAG chr11 5160721 5160740 5160724 -
tttatttttcttattaatat

SEQ ID NO: 55777 - DNA, 20 bp, Artificial Sequence
  Synthetic oligonucleotide; AAG chr11 5160718 5160737 5160721 -
atttttcttattaatataag

SEQ ID NO: 55778 - DNA, 20 bp, Artificial Sequence
  Synthetic oligonucleotide; CAG chr11 5160714 5160733 5160717 -
ttcttattaatataagaaga

SEQ ID NO: 55779 - DNA, 20 bp, Artificial Sequence
  Synthetic oligonucleotide; AGG chr11 5160713 5160732 5160716 -
tcttattaatataagaagac

SEQ ID NO: 55780 - DNA, 20 bp, Artificial Sequence
  Synthetic oligonucleotide; CAG chr11 5160705 5160724 5160708 -
atataagaagacaggaatgt

SEQ ID NO: 55781 - DNA, 20 bp, Artificial Sequence
  Synthetic oligonucleotide; AGG chr11 5160704 5160723 5160707 -
tataagaagacaggaatgtc

SEQ ID NO: 55782 - DNA, 20 bp, Artificial Sequence
  Synthetic oligonucleotide; GAG chr11 5160696 5160715 5160699 -
gacaggaatgtcaggcctct

SEQ ID NO: 55783 - DNA, 20 bp, Artificial Sequence
  Synthetic oligonucleotide; AAG chr11 5160690 5160709 5160693 -
aatgtcaggcctctgagccc

SEQ ID NO: 55784 - DNA, 20 bp, Artificial Sequence
  Synthetic oligonucleotide; AAG chr11 5160685 5160704 5160688 -
caggcctctgagcccaagct

SEQ ID NO: 55785 - DNA, 20 bp, Artificial Sequence
  Synthetic oligonucleotide; CAG chr11 5160660 5160679 5160663 -
atcatgtcccctgtgacctg

SEQ ID NO: 55786 - DNA, 20 bp, Artificial Sequence
  Synthetic oligonucleotide; AGG chr11 5160659 5160678 5160662 -
tcatgtcccctgtgacctgc

SEQ ID NO: 55787 - DNA, 20 bp, Artificial Sequence
  Synthetic oligonucleotide; CAG chr11 5160648 5160667 5160651 -
gtgacctgcaggtacacata

SEQ ID NO: 55788 - DNA, 20 bp, Artificial Sequence
  Synthetic oligonucleotide; TGG chr11 5160644 5160663 5160647 -
cctgcaggtacacatacaga

SEQ ID NO: 55789 - DNA, 20 bp, Artificial Sequence
  Synthetic oligonucleotide; CAG chr11 5160640 5160659 5160643 -
caggtacacatacagatggc

SEQ ID NO: 55790 - DNA, 20 bp, Artificial Sequence
  Synthetic oligonucleotide; AAG chr11 5160605 5160624 5160608 -
ctgatgacattccaccacaa

SEQ ID NO: 55791 - DNA, 20 bp, Artificial Sequence
  Synthetic oligonucleotide; AAG chr11 5160602 5160621 5160605 -
atgacattccaccacaaaag

SEQ ID NO: 55792 - DNA, 20 bp, Artificial Sequence
  Synthetic oligonucleotide; TGG chr11 5160593 5160612 5160596 -
caccacaaaagaagtgaaaa

SEQ ID NO: 55793 - DNA, 20 bp, Artificial Sequence
  Synthetic oligonucleotide; AAG chr11 5160554 5160573 5160557 -
ctgatgacattgtcttgtga

SEQ ID NO: 55794 - DNA, 20 bp, Artificial Sequence
  Synthetic oligonucleotide; TGG chr11 5160542 5160561 5160545 -
tcttgtgaaagtccttctcc

SEQ ID NO: 55795 - DNA, 20 bp, Artificial Sequence
  Synthetic oligonucleotide; TGG chr11 5160532 5160551 5160535 -
gtccttctcctggctcatcc

SEQ ID NO: 55796 - DNA, 20 bp, Artificial Sequence
  Synthetic oligonucleotide; AAG chr11 5160524 5160543 5160527 -
cctggctcatcctggctcaa

SEQ ID NO: 55797 - DNA, 20 bp, Artificial Sequence
  Synthetic oligonucleotide; GAG chr11 5160511 5160530 5160514 -
ggctcaaaagctcccctact

SEQ ID NO: 55798 - DNA, 20 bp, Artificial Sequence
  Synthetic oligonucleotide; CAG chr11 5160480 5160499 5160483 -
gaccccccactcctgcccgc

SEQ ID NO: 55799 - DNA, 20 bp, Artificial Sequence
  Synthetic oligonucleotide; GAG chr11 5160478 5160497 5160481 -
ccccccactcctgcccgcca

SEQ ID NO: 55800 - DNA, 20 bp, Artificial Sequence
  Synthetic oligonucleotide; CAG chr11 5160423 5160442 5160426 -
cctacccaaatcttataaaa

SEQ ID NO: 55801 - DNA, 20 bp, Artificial Sequence
  Synthetic oligonucleotide; CGG chr11 5160386 5160405 5160389 -
ccctttgctgactctctttt

SEQ ID NO: 55802 - DNA, 20 bp, Artificial Sequence
  Synthetic oligonucleotide; CAG chr11 5160380 5160399 5160383 -
gctgactctcttttcggact

SEQ ID NO: 55803 - DNA, 20 bp, Artificial Sequence
  Synthetic oligonucleotide; CAG chr11 5160365 5160384 5160368 -
ggactcagcccgcctgcacc

SEQ ID NO: 55804 - DNA, 20 bp, Artificial Sequence
  Synthetic oligonucleotide; AGG chr11 5160364 5160383 5160367 -
gactcagcccgcctgcaccc

SEQ ID NO: 55805 - DNA, 20 bp, Artificial Sequence
  Synthetic oligonucleotide; AAG chr11 5160354 5160373 5160357 -
gcctgcacccaggtgataaa

SEQ ID NO: 55806 - DNA, 20 bp, Artificial Sequence
  Synthetic oligonucleotide; AAG chr11 5160335 5160354 5160338 -
aaagctttattgctcacaca

SEQ ID NO: 55807 - DNA, 20 bp, Artificial Sequence
  Synthetic oligonucleotide; TGG chr11 5160326 5160345 5160329 -
ttgctcacacaaagcctgtt

SEQ ID NO: 55808 - DNA, 20 bp, Artificial Sequence
  Synthetic oligonucleotide; TAG chr11 5160323 5160342 5160326 -
ctcacacaaagcctgtttgg

SEQ ID NO: 55809 - DNA, 20 bp, Artificial Sequence
  Synthetic oligonucleotide; CAG chr11 5160312 5160331 5160315 -
cctgtttggtagtctcctca

SEQ ID NO: 55810 - DNA, 20 bp, Artificial Sequence
  Synthetic oligonucleotide; AGG chr11 5160311 5160330 5160314 -
ctgtttggtagtctcctcac

SEQ ID NO: 55811 - DNA, 20 bp, Artificial Sequence
  Synthetic oligonucleotide; GGG chr11 5160310 5160329 5160313 -
tgtttggtagtctcctcaca

SEQ ID NO: 55812 - DNA, 20 bp, Artificial Sequence
  Synthetic oligonucleotide; GAG chr11 5160282 5160301 5160285 -
catgaaactgaataaccaat

SEQ ID NO: 55813 - DNA, 20 bp, Artificial Sequence
  Synthetic oligonucleotide; AAG chr11 5160273 5160292 5160276 -
gaataaccaatgagtcacta

SEQ ID NO: 55814 - DNA, 20 bp, Artificial Sequence
  Synthetic oligonucleotide; AAG chr11 5160265 5160284 5160268 -
aatgagtcactaaagaaatt

SEQ ID NO: 55815 - DNA, 20 bp, Artificial Sequence
  Synthetic oligonucleotide; AAG chr11 5160262 5160281 5160265 -
gagtcactaaagaaattaag

SEQ ID NO: 55816 - DNA, 20 bp, Artificial Sequence
  Synthetic oligonucleotide; AGG chr11 5160261 5160280 5160264 -
agtcactaaagaaattaaga

SEQ ID NO: 55817 - DNA, 20 bp, Artificial Sequence
  Synthetic oligonucleotide; AAG chr11 5160236 5160255 5160239 -
attttaaaacttcttgaaac

SEQ ID NO: 55818 - DNA, 20 bp, Artificial Sequence
  Synthetic oligonucleotide; TGG chr11 5160227 5160246 5160230 -
cttcttgaaacaagtgaaaa

SEQ ID NO: 55819 - DNA, 20 bp, Artificial Sequence
  Synthetic oligonucleotide; CAG chr11 5160202 5160221 5160205 -
atacaacataccaaaaccta

SEQ ID NO: 55820 - DNA, 20 bp, Artificial Sequence
  Synthetic oligonucleotide; AGG chr11 5160201 5160220 5160204 -
tacaacataccaaaacctac

SEQ ID NO: 55821 - DNA, 20 bp, Artificial Sequence
  Synthetic oligonucleotide; TGG chr11 5160195 5160214 5160198 -
ataccaaaacctacaggata

SEQ ID NO: 55822 - DNA, 20 bp, Artificial Sequence
  Synthetic oligonucleotide; AAG chr11 5160189 5160208 5160192 -
aaacctacaggatatggcaa

SEQ ID NO: 55823 - DNA, 20 bp, Artificial Sequence
  Synthetic oligonucleotide; CAG chr11 5160186 5160205 5160189 -
cctacaggatatggcaaaag

SEQ ID NO: 55824 - DNA, 20 bp, Artificial Sequence
  Synthetic oligonucleotide; TAG chr11 5160179 5160198 5160182 -
gatatggcaaaagcagtact

SEQ ID NO: 55825 - DNA, 20 bp, Artificial Sequence
  Synthetic oligonucleotide; GAG chr11 5160177 5160196 5160180 -
tatggcaaaagcagtactta

SEQ ID NO: 55826 - DNA, 20 bp, Artificial Sequence
  Synthetic oligonucleotide; AGG chr11 5160176 5160195 5160179 -
atggcaaaagcagtacttag

SEQ ID NO: 55827 - DNA, 20 bp, Artificial Sequence
  Synthetic oligonucleotide; GGG chr11 5160175 5160194 5160178 -
tggcaaaagcagtacttaga

SEQ ID NO: 55828 - DNA, 20 bp, Artificial Sequence
  Synthetic oligonucleotide; AAG chr11 5160172 5160191 5160175 -
caaaagcagtacttagaggg

SEQ ID NO: 55829 - DNA, 20 bp, Artificial Sequence
  Synthetic oligonucleotide; TAG chr11 5160165 5160184 5160168 -
agtacttagagggaagttca

SEQ ID NO: 55830 - DNA, 20 bp, Artificial Sequence
  Synthetic oligonucleotide; AAG chr11 5160140 5160159 5160143 -
ataaacacctatatccaaaa

SEQ ID NO: 55831 - DNA, 20 bp, Artificial Sequence
  Synthetic oligonucleotide; TAG chr11 5160137 5160156 5160140 -
aacacctatatccaaaaaag

SEQ ID NO: 55832 - DNA, 20 bp, Artificial Sequence
  Synthetic oligonucleotide; AAG chr11 5160133 5160152 5160136 -
cctatatccaaaaaagtaga

SEQ ID NO: 55833 - DNA, 20 bp, Artificial Sequence
  Synthetic oligonucleotide; AGG chr11 5160132 5160151 5160135 -
ctatatccaaaaaagtagaa

SEQ ID NO: 55834 - DNA, 20 bp, Artificial Sequence
  Synthetic oligonucleotide; AAG chr11 5160121 5160140 5160124 -
aaagtagaaaggcttcaact

SEQ ID NO: 55835 - DNA, 20 bp, Artificial Sequence
  Synthetic oligonucleotide; AAG chr11 5160099 5160118 5160102 -
gcaaccaaacaatgtacctc

SEQ ID NO: 55836 - DNA, 20 bp, Artificial Sequence
  Synthetic oligonucleotide; AGG chr11 5160098 5160117 5160101 -
caaccaaacaatgtacctca

SEQ ID NO: 55837 - DNA, 20 bp, Artificial Sequence
  Synthetic oligonucleotide; TAG chr11 5160092 5160111 5160095 -
aacaatgtacctcaaggaaa

SEQ ID NO: 55838 - DNA, 20 bp, Artificial Sequence
  Synthetic oligonucleotide; AGG chr11 5160091 5160110 5160094 -
acaatgtacctcaaggaaat

SEQ ID NO: 55839 - DNA, 20 bp, Artificial Sequence
  Synthetic oligonucleotide; AAG chr11 5160087 5160106 5160090 -
tgtacctcaaggaaatagga

SEQ ID NO: 55840 - DNA, 20 bp, Artificial Sequence
  Synthetic oligonucleotide; AAG chr11 5160083 5160102 5160086 -
cctcaaggaaataggaaagc

SEQ ID NO: 55841 - DNA, 20 bp, Artificial Sequence
  Synthetic oligonucleotide; TAG chr11 5160058 5160077 5160061 -
caaaccaaatgcaaaattaa

SEQ ID NO: 55842 - DNA, 20 bp, Artificial Sequence
  Synthetic oligonucleotide; AAG chr11 5160055 5160074 5160058 -
accaaatgcaaaattaatag

SEQ ID NO: 55843 - DNA, 20 bp, Artificial Sequence
  Synthetic oligonucleotide; AGG chr11 5160054 5160073 5160057 -
ccaaatgcaaaattaataga

SEQ ID NO: 55844 - DNA, 20 bp, Artificial Sequence
  Synthetic oligonucleotide; GGG chr11 5160053 5160072 5160056 -
caaatgcaaaattaatagaa

SEQ ID NO: 55845 - DNA, 20 bp, Artificial Sequence
  Synthetic oligonucleotide; GGG chr11 5160052 5160071 5160055 -
aaatgcaaaattaatagaag

SEQ ID NO: 55846 - DNA, 20 bp, Artificial Sequence
  Synthetic oligonucleotide; GAG chr11 5160050 5160069 5160053 -
atgcaaaattaatagaaggg

SEQ ID NO: 55847 - DNA, 20 bp, Artificial Sequence
  Synthetic oligonucleotide; AAG chr11 5160043 5160062 5160046 -
attaatagaaggggagaaat

SEQ ID NO: 55848 - DNA, 20 bp, Artificial Sequence
  Synthetic oligonucleotide; AAG chr11 5160039 5160058 5160042 -
atagaaggggagaaataaga

SEQ ID NO: 55849 - DNA, 20 bp, Artificial Sequence
  Synthetic oligonucleotide; CAG chr11 5160034 5160053 5160037 -
aggggagaaataagaaagat

SEQ ID NO: 55850 - DNA, 20 bp, Artificial Sequence
  Synthetic oligonucleotide; GAG chr11 5160032 5160051 5160035 -
gggagaaataagaaagatca

SEQ ID NO: 55851 - DNA, 20 bp, Artificial Sequence
  Synthetic oligonucleotide; AAG chr11 5160029 5160048 5160032 -
agaaataagaaagatcagag

SEQ ID NO: 55852 - DNA, 20 bp, Artificial Sequence
  Synthetic oligonucleotide; GAG chr11 5160012 5160031 5160015 -
gagaagaaacaaatgaaatt

SEQ ID NO: 55853 - DNA, 20 bp, Artificial Sequence
  Synthetic oligonucleotide; CAG chr11 5159998 5160017 5160001 -
gaaattgagaccaaaaaata

SEQ ID NO: 55854 - DNA, 20 bp, Artificial Sequence
  Synthetic oligonucleotide; CAG chr11 5159977 5159996 5159980 -
agaaaatcattaaaaacaaa

SEQ ID NO: 55855 - DNA, 20 bp, Artificial Sequence
  Synthetic oligonucleotide; TGG chr11 5159965 5159984 5159968 -
aaaacaaacagttgctttct

SEQ ID NO: 55856 - DNA, 20 bp, Artificial Sequence
  Synthetic oligonucleotide; AAG chr11 5159961 5159980 5159964 -
caaacagttgctttcttgga

SEQ ID NO: 55857 - DNA, 20 bp, Artificial Sequence
  Synthetic oligonucleotide; AGG chr11 5159960 5159979 5159963 -
aaacagttgctttcttggaa

SEQ ID NO: 55858 - DNA, 20 bp, Artificial Sequence
  Synthetic oligonucleotide; AAG chr11 5159935 5159954 5159938 -
aacaaaatcaacaaaacttt

SEQ ID NO: 55859 - DNA, 20 bp, Artificial Sequence
  Synthetic oligonucleotide; AAG chr11 5159928 5159947 5159931 -
tcaacaaaactttaagaaaa

SEQ ID NO: 55860 - DNA, 20 bp, Artificial Sequence
  Synthetic oligonucleotide; GAG chr11 5159926 5159945 5159929 -
aacaaaactttaagaaaaaa

SEQ ID NO: 55861 - DNA, 20 bp, Artificial Sequence
  Synthetic oligonucleotide; TAG chr11 5159912 5159931 5159915 -
aaaaaagagtcaaataaaat

SEQ ID NO: 55862 - DNA, 20 bp, Artificial Sequence
  Synthetic oligonucleotide; AAG chr11 5159900 5159919 5159903 -
aataaaattagaaaatgaaa

SEQ ID NO: 55863 - DNA, 20 bp, Artificial Sequence
  Synthetic oligonucleotide; GAG chr11 5159898 5159917 5159901 -
taaaattagaaaatgaaaaa

SEQ ID NO: 55864 - DNA, 20 bp, Artificial Sequence
  Synthetic oligonucleotide; AGG chr11 5159897 5159916 5159900 -
aaaattagaaaatgaaaaag

SEQ ID NO: 55865 - DNA, 20 bp, Artificial Sequence
  Synthetic oligonucleotide; GAG chr11 5159883 5159902 5159886 -
aaaaagaggatataacaatt

SEQ ID NO: 55866 - DNA, 20 bp, Artificial Sequence
  Synthetic oligonucleotide; CAG chr11 5159876 5159895 5159879 -
ggatataacaattgagacct

SEQ ID NO: 55867 - DNA, 20 bp, Artificial Sequence
  Synthetic oligonucleotide; AAG chr11 5159866 5159885 5159869 -
attgagacctcagcaacaca

SEQ ID NO: 55868 - DNA, 20 bp, Artificial Sequence
  Synthetic oligonucleotide; TAG chr11 5159857 5159876 5159860 -
tcagcaacacaaagactcat

SEQ ID NO: 55869 - DNA, 20 bp, Artificial Sequence
  Synthetic oligonucleotide; TGG chr11 5159822 5159841 5159825 -
acaactgtattccaacaaat

SEQ ID NO: 55870 - DNA, 20 bp, Artificial Sequence
  Synthetic oligonucleotide; TAG chr11 5159813 5159832 5159816 -
ttccaacaaattggaaaatc

SEQ ID NO: 55871 - DNA, 20 bp, Artificial Sequence
  Synthetic oligonucleotide; TGG chr11 5159804 5159823 5159807 -
attggaaaatctagaataaa

SEQ ID NO: 55872 - DNA, 20 bp, Artificial Sequence
  Synthetic oligonucleotide; TGG chr11 5159792 5159811 5159795 -
agaataaatggataaattcc

SEQ ID NO: 55873 - DNA, 20 bp, Artificial Sequence
  Synthetic oligonucleotide; CAG chr11 5159782 5159801 5159785 -
gataaattcctggacacata

SEQ ID NO: 55874 - DNA, 20 bp, Artificial Sequence
  Synthetic oligonucleotide; TAG chr11 5159777 5159796 5159780 -
attcctggacacatacagcc

SEQ ID NO: 55875 - DNA, 20 bp, Artificial Sequence
  Synthetic oligonucleotide; AAG chr11 5159773 5159792 5159776 -
ctggacacatacagcctagc

SEQ ID NO: 55876 - DNA, 20 bp, Artificial Sequence
  Synthetic oligonucleotide; AAG chr11 5159766 5159785 5159769 -
catacagcctagcaagactg

SEQ ID NO: 55877 - DNA, 20 bp, Artificial Sequence
  Synthetic oligonucleotide; TAG chr11 5159759 5159778 5159762 -
cctagcaagactgaagcatg

SEQ ID NO: 55878 - DNA, 20 bp, Artificial Sequence
  Synthetic oligonucleotide; CAG chr11 5159753 5159772 5159756 -
aagactgaagcatgtagaaa

SEQ ID NO: 55879 - DNA, 20 bp, Artificial Sequence
  Synthetic oligonucleotide; TAG chr11 5159740 5159759 5159743 -
gtagaaacagaaaacctcaa

SEQ ID NO: 55880 - DNA, 20 bp, Artificial Sequence
  Synthetic oligonucleotide; AAG chr11 5159721 5159740 5159724 -
atagaacaataatgaataac

SEQ ID NO: 55881 - DNA, 20 bp, Artificial Sequence
  Synthetic oligonucleotide; AAG chr11 5159714 5159733 5159717 -
aataatgaataacaagatta

SEQ ID NO: 55882 - DNA, 20 bp, Artificial Sequence
  Synthetic oligonucleotide; AAG chr11 5159701 5159720 5159704 -
aagattaaagttgtaatata

SEQ ID NO: 55883 - DNA, 20 bp, Artificial Sequence
  Synthetic oligonucleotide; AAG chr11 5159688 5159707 5159691 -
taatataaagtttcctatta

SEQ ID NO: 55884 - DNA, 20 bp, Artificial Sequence
  Synthetic oligonucleotide; AAG chr11 5159683 5159702 5159686 -
taaagtttcctattaaagaa

SEQ ID NO: 55885 - DNA, 20 bp, Artificial Sequence
  Synthetic oligonucleotide; CAG chr11 5159678 5159697 5159681 -
tttcctattaaagaaaagcc

SEQ ID NO: 55886 - DNA, 20 bp, Artificial Sequence
  Synthetic oligonucleotide; AGG chr11 5159677 5159696 5159680 -
ttcctattaaagaaaagccc

SEQ ID NO: 55887 - DNA, 20 bp, Artificial Sequence
  Synthetic oligonucleotide; TGG chr11 5159668 5159687 5159671 -
aagaaaagcccaggactcga

SEQ ID NO: 55888 - DNA, 20 bp, Artificial Sequence
  Synthetic oligonucleotide; GGG chr11 5159667 5159686 5159670 -
agaaaagcccaggactcgat

SEQ ID NO: 55889 - DNA, 20 bp, Artificial Sequence
  Synthetic oligonucleotide; AAG chr11 5159650 5159669 5159653 -
gatgggctaccaaacatttc

SEQ ID NO: 55890 - DNA, 20 bp, Artificial Sequence
  Synthetic oligonucleotide; TAG chr11 5159647 5159666 5159650 -
gggctaccaaacatttcaag

SEQ ID NO: 55891 - DNA, 20 bp, Artificial Sequence
  Synthetic oligonucleotide; AAG chr11 5159589 5159608 5159592 -
acaaacaaataaaaactgaa

SEQ ID NO: 55892 - DNA, 20 bp, Artificial Sequence
  Synthetic oligonucleotide; AAG chr11 5159586 5159605 5159589 -
aacaaataaaaactgaaaag

SEQ ID NO: 55893 - DNA, 20 bp, Artificial Sequence
  Synthetic oligonucleotide; AGG chr11 5159585 5159604 5159588 -
acaaataaaaactgaaaaga

SEQ ID NO: 55894 - DNA, 20 bp, Artificial Sequence
  Synthetic oligonucleotide; GGG chr11 5159584 5159603 5159587 -
caaataaaaactgaaaagaa

SEQ ID NO: 55895 - DNA, 20 bp, Artificial Sequence
  Synthetic oligonucleotide; GAG chr11 5159559 5159578 5159562 -
tacttctaaacttattctat

SEQ ID NO: 55896 - DNA, 20 bp, Artificial Sequence
  Synthetic oligonucleotide; AGG chr11 5159558 5159577 5159561 -
acttctaaacttattctatg

SEQ ID NO: 55897 - DNA, 20 bp, Artificial Sequence
  Synthetic oligonucleotide; AAG chr11 5159554 5159573 5159557 -
ctaaacttattctatgaggc

SEQ ID NO: 55898 - DNA, 20 bp, Artificial Sequence
  Synthetic oligonucleotide; CAG chr11 5159529 5159548 5159532 -
ttactctaatatacccaaac

SEQ ID NO: 55899 - DNA, 20 bp, Artificial Sequence
  Synthetic oligonucleotide; CAG chr11 5159524 5159543 5159527 -
ctaatatacccaaaccagac

SEQ ID NO: 55900 - DNA, 20 bp, Artificial Sequence
  Synthetic oligonucleotide; AGG chr11 5159523 5159542 5159526 -
taatatacccaaaccagacc

SEQ ID NO: 55901 - DNA, 20 bp, Artificial Sequence
  Synthetic oligonucleotide; AAG chr11 5159498 5159517 5159501 -
acaacaacaaatgcacctca

SEQ ID NO: 55902 - DNA, 20 bp, Artificial Sequence
  Synthetic oligonucleotide; AGG chr11 5159497 5159516 5159500 -
caacaacaaatgcacctcaa

SEQ ID NO: 55903 - DNA, 20 bp, Artificial Sequence
  Synthetic oligonucleotide; GAG chr11 5159495 5159514 5159498 -
acaacaaatgcacctcaaag

SEQ ID NO: 55904 - DNA, 20 bp, Artificial Sequence
  Synthetic oligonucleotide; AGG chr11 5159494 5159513 5159497 -
caacaaatgcacctcaaagg

SEQ ID NO: 55905 - DNA, 20 bp, Artificial Sequence
  Synthetic oligonucleotide; CAG chr11 5159489 5159508 5159492 -
aatgcacctcaaaggaggta

SEQ ID NO: 55906 - DNA, 20 bp, Artificial Sequence
  Synthetic oligonucleotide; TAG chr11 5159486 5159505 5159489 -
gcacctcaaaggaggtacag

SEQ ID NO: 55907 - DNA, 20 bp, Artificial Sequence
  Synthetic oligonucleotide; AGG chr11 5159485 5159504 5159488 -
cacctcaaaggaggtacagt

SEQ ID NO: 55908 - DNA, 20 bp, Artificial Sequence
  Synthetic oligonucleotide; TAG chr11 5159454 5159473 5159457 -
tcaaaataataaaaaccata

SEQ ID NO: 55909 - DNA, 20 bp, Artificial Sequence
  Synthetic oligonucleotide; AGG chr11 5159453 5159472 5159456 -
caaaataataaaaaccatat

SEQ ID NO: 55910 - DNA, 20 bp, Artificial Sequence
  Synthetic oligonucleotide; AAG chr11 5159443 5159462 5159446 -
aaaaccatataggacaaacc

SEQ ID NO: 55911 - DNA, 20 bp, Artificial Sequence
  Synthetic oligonucleotide; CAG chr11 5159422 5159441 5159425 -
agtgctaacattatgctgaa

SEQ ID NO: 55912 - DNA, 20 bp, Artificial Sequence
  Synthetic oligonucleotide; GAG chr11 5159420 5159439 5159423 -
tgctaacattatgctgaaca

SEQ ID NO: 55913 - DNA, 20 bp, Artificial Sequence
  Synthetic oligonucleotide; AAG chr11 5159409 5159428 5159412 -
tgctgaacagagaaacattg

SEQ ID NO: 55914 - DNA, 20 bp, Artificial Sequence
  Synthetic oligonucleotide; AGG chr11 5159408 5159427 5159411 -
gctgaacagagaaacattga

SEQ ID NO: 55915 - DNA, 20 bp, Artificial Sequence
  Synthetic oligonucleotide; AAG chr11 5159395 5159414 5159398 -
acattgaaggcctttcctct

SEQ ID NO: 55916 - DNA, 20 bp, Artificial Sequence
  Synthetic oligonucleotide; AGG chr11 5159394 5159413 5159397 -
cattgaaggcctttcctcta

SEQ ID NO: 55917 - DNA, 20 bp, Artificial Sequence
  Synthetic oligonucleotide; AAG chr11 5159383 5159402 5159386 -
tttcctctaaggactgaaat

SEQ ID NO: 55918 - DNA, 20 bp, Artificial Sequence
  Synthetic oligonucleotide; AGG chr11 5159382 5159401 5159385 -
ttcctctaaggactgaaata

SEQ ID NO: 55919 - DNA, 20 bp, Artificial Sequence
  Synthetic oligonucleotide; AAG chr11 5159378 5159397 5159381 -
tctaaggactgaaataaggc

SEQ ID NO: 55920 - DNA, 20 bp, Artificial Sequence
  Synthetic oligonucleotide; TGG chr11 5159339 5159358 5159342 -
gccattatttaacataatat

SEQ ID NO: 55921 - DNA, 20 bp, Artificial Sequence
  Synthetic oligonucleotide; AAG chr11 5159336 5159355 5159339 -
attatttaacataatattgg

SEQ ID NO: 55922 - DNA, 20 bp, Artificial Sequence
  Synthetic oligonucleotide; TGG chr11 5159330 5159349 5159333 -
taacataatattggaagtct

SEQ ID NO: 55923 - DNA, 20 bp, Artificial Sequence
  Synthetic oligonucleotide; AAG chr11 5159326 5159345 5159329 -
ataatattggaagtcttgga

SEQ ID NO: 55924 - DNA, 20 bp, Artificial Sequence
  Synthetic oligonucleotide; GAG chr11 5159324 5159343 5159327 -
aatattggaagtcttggaaa

SEQ ID NO: 55925 - DNA, 20 bp, Artificial Sequence
  Synthetic oligonucleotide; CAG chr11 5159316 5159335 5159319 -
aagtcttggaaagagaaatt

SEQ ID NO: 55926 - DNA, 20 bp, Artificial Sequence
  Synthetic oligonucleotide; AGG chr11 5159315 5159334 5159318 -
agtcttggaaagagaaattc

SEQ ID NO: 55927 - DNA, 20 bp, Artificial Sequence
  Synthetic oligonucleotide; AAG chr11 5159312 5159331 5159315 -
cttggaaagagaaattcagg

SEQ ID NO: 55928 - DNA, 20 bp, Artificial Sequence
  Synthetic oligonucleotide; GAG chr11 5159310 5159329 5159313 -
tggaaagagaaattcaggaa

SEQ ID NO: 55929 - DNA, 20 bp, Artificial Sequence
  Synthetic oligonucleotide; AAG chr11 5159306 5159325 5159309 -
aagagaaattcaggaagaga

SEQ ID NO: 55930 - DNA, 20 bp, Artificial Sequence
  Synthetic oligonucleotide; AAG chr11 5159302 5159321 5159305 -
gaaattcaggaagagaaaga

SEQ ID NO: 55931 - DNA, 20 bp, Artificial Sequence
  Synthetic oligonucleotide; TGG chr11 5159288 5159307 5159291 -
gaaagaaagtgcatccaaat

SEQ ID NO: 55932 - DNA, 20 bp, Artificial Sequence
  Synthetic oligonucleotide; AAG chr11 5159284 5159303 5159287 -
gaaagtgcatccaaattgga

SEQ ID NO: 55933 - DNA, 20 bp, Artificial Sequence
  Synthetic oligonucleotide; AGG chr11 5159283 5159302 5159286 -
aaagtgcatccaaattggaa

SEQ ID NO: 55934 - DNA, 20 bp, Artificial Sequence
  Synthetic oligonucleotide; AAG chr11 5159280 5159299 5159283 -
gtgcatccaaattggaaagg

SEQ ID NO: 55935 - DNA, 20 bp, Artificial Sequence
  Synthetic oligonucleotide; AAG chr11 5159277 5159296 5159280 -
catccaaattggaaaggaag

SEQ ID NO: 55936 - DNA, 20 bp, Artificial Sequence
  Synthetic oligonucleotide; TAG chr11 5159268 5159287 5159271 -
tggaaaggaagaagttaaat

SEQ ID NO: 55937 - DNA, 20 bp, Artificial Sequence
  Synthetic oligonucleotide; TAG chr11 5159263 5159282 5159266 -
aggaagaagttaaattagcc

SEQ ID NO: 55938 - DNA, 20 bp, Artificial Sequence
  Synthetic oligonucleotide; TAG chr11 5159256 5159275 5159259 -
agttaaattagcctagtttg

SEQ ID NO: 55939 - DNA, 20 bp, Artificial Sequence
  Synthetic oligonucleotide; TAG chr11 5159235 5159254 5159238 -
agatgacatgatcttatact

SEQ ID NO: 55940 - DNA, 20 bp, Artificial Sequence
  Synthetic oligonucleotide; AAG chr11 5159178 5159197 5159181 -
acgatttaaaaaaatcaata

SEQ ID NO: 55941 - DNA, 20 bp, Artificial Sequence
  Synthetic oligonucleotide; CAG chr11 5159172 5159191 5159175 -
taaaaaaatcaataaagtta

SEQ ID NO: 55942 - DNA, 20 bp, Artificial Sequence
  Synthetic oligonucleotide; AGG chr11 5159171 5159190 5159174 -
aaaaaaatcaataaagttac

SEQ ID NO: 55943 - DNA, 20 bp, Artificial Sequence
  Synthetic oligonucleotide; CAG chr11 5159146 5159165 5159149 -
atgaaataaaaatacaaaat

SEQ ID NO: 55944 - DNA, 20 bp, Artificial Sequence
  Synthetic oligonucleotide; TAG chr11 5159143 5159162 5159146 -
aaataaaaatacaaaatcag

SEQ ID NO: 55945 - DNA, 20 bp, Artificial Sequence
  Synthetic oligonucleotide; AAG chr11 5159125 5159144 5159128 -
agtagcatttcatatataaa

SEQ ID NO: 55946 - DNA, 20 bp, Artificial Sequence
  Synthetic oligonucleotide; TAG chr11 5159078 5159097 5159081 -
taaaacaatcttatttacaa

SEQ ID NO: 55947 - DNA, 20 bp, Artificial Sequence
  Synthetic oligonucleotide; CAG chr11 5159055 5159074 5159058 -
caataaaaatataaaatacc

SEQ ID NO: 55948 - DNA, 20 bp, Artificial Sequence
  Synthetic oligonucleotide; AGG chr11 5159054 5159073 5159057 -
aataaaaatataaaataccc

SEQ ID NO: 55949 - DNA, 20 bp, Artificial Sequence
  Synthetic oligonucleotide; GAG chr11 5159052 5159071 5159055 -
taaaaatataaaatacccag

SEQ ID NO: 55950 - DNA, 20 bp, Artificial Sequence
  Synthetic oligonucleotide; AAG chr11 5159037 5159056 5159040 -
cccaggagtcaatctaaccc

SEQ ID NO: 55951 - DNA, 20 bp, Artificial Sequence
  Synthetic oligonucleotide; AAG chr11 5159034 5159053 5159037 -
aggagtcaatctaacccaag

SEQ ID NO: 55952 - DNA, 20 bp, Artificial Sequence
  Synthetic oligonucleotide; AAG chr11 5159028 5159047 5159031 -
caatctaacccaagaagtaa

SEQ ID NO: 55953 - DNA, 20 bp, Artificial Sequence
  Synthetic oligonucleotide; AAG chr11 5159017 5159036 5159020 -
aagaagtaaaagatctctat

SEQ ID NO: 55954 - DNA, 20 bp, Artificial Sequence
  Synthetic oligonucleotide; TGG chr11 5158998 5159017 5159001 -
taagaaaaattataaaactc

SEQ ID NO: 55955 - DNA, 20 bp, Artificial Sequence
  Synthetic oligonucleotide; AAG chr11 5158992 5159011 5158995 -
aaattataaaactctggtga

SEQ ID NO: 55956 - DNA, 20 bp, Artificial Sequence
  Synthetic oligonucleotide; TAG chr11 5158986 5159005 5158989 -
taaaactctggtgaaagaaa

SEQ ID NO: 55957 - DNA, 20 bp, Artificial Sequence
  Synthetic oligonucleotide; AAG chr11 5158983 5159002 5158986 -
aactctggtgaaagaaatag

SEQ ID NO: 55958 - DNA, 20 bp, Artificial Sequence
  Synthetic oligonucleotide; GAG chr11 5158981 5159000 5158984 -
ctctggtgaaagaaatagaa

SEQ ID NO: 55959 - DNA, 20 bp, Artificial Sequence
  Synthetic oligonucleotide; AGG chr11 5158980 5158999 5158983 -
tctggtgaaagaaatagaag

SEQ ID NO: 55960 - DNA, 20 bp, Artificial Sequence
  Synthetic oligonucleotide; GGG chr11 5158979 5158998 5158982 -
ctggtgaaagaaatagaaga

SEQ ID NO: 55961 - DNA, 20 bp, Artificial Sequence
  Synthetic oligonucleotide; TGG chr11 5158963 5158982 5158966 -
aagagggcacacaaataaaa

SEQ ID NO: 55962 - DNA, 20 bp, Artificial Sequence
  Synthetic oligonucleotide; TAG chr11 5158937 5158956 5158940 -
gatattccatgctcatgaac

SEQ ID NO: 55963 - DNA, 20 bp, Artificial Sequence
  Synthetic oligonucleotide; AAG chr11 5158934 5158953 5158937 -
attccatgctcatgaactag

SEQ ID NO: 55964 - DNA, 20 bp, Artificial Sequence
  Synthetic oligonucleotide; AAG chr11 5158902 5158921 5158905 -
taaaatgacaatactaccca

SEQ ID NO: 55965 - DNA, 20 bp, Artificial Sequence
  Synthetic oligonucleotide; CAG chr11 5158892 5158911 5158895 -
atactacccaaagcaatgta

SEQ ID NO: 55966 - DNA, 20 bp, Artificial Sequence
  Synthetic oligonucleotide; CAG chr11 5158886 5158905 5158889 -
cccaaagcaatgtacagatt

SEQ ID NO: 55967 - DNA, 20 bp, Artificial Sequence
  Synthetic oligonucleotide; TGG chr11 5158860 5158879 5158863 -
aatttctgtcaaaataccaa

SEQ ID NO: 55968 - DNA, 20 bp, Artificial Sequence
  Synthetic oligonucleotide; CAG chr11 5158851 5158870 5158854 -
caaaataccaatggcattca

SEQ ID NO: 55969 - DNA, 20 bp, Artificial Sequence
  Synthetic oligonucleotide; TAG chr11 5158845 5158864 5158848 -
accaatggcattcacagaaa

SEQ ID NO: 55970 - DNA, 20 bp, Artificial Sequence
  Synthetic oligonucleotide; TGG chr11 5158820 5158839 5158823 -
aaacaatcctaatatttata

SEQ ID NO: 55971 - DNA, 20 bp, Artificial Sequence
  Synthetic oligonucleotide; AAG chr11 5158809 5158828 5158812 -
atatttatatggaaccacaa

SEQ ID NO: 55972 - DNA, 20 bp, Artificial Sequence
  Synthetic oligonucleotide; TAG chr11 5158798 5158817 5158801 -
gaaccacaaaagatccccaa

SEQ ID NO: 55973 - DNA, 20 bp, Artificial Sequence
  Synthetic oligonucleotide; AAG chr11 5158792 5158811 5158795 -
caaaagatccccaatagcta

SEQ ID NO: 55974 - DNA, 20 bp, Artificial Sequence
  Synthetic oligonucleotide; GAG chr11 5158782 5158801 5158785 -
ccaatagctaaagcaatcct

SEQ ID NO: 55975 - DNA, 20 bp, Artificial Sequence
  Synthetic oligonucleotide; AAG chr11 5158775 5158794 5158778 -
ctaaagcaatcctgagcaaa

SEQ ID NO: 55976 - DNA, 20 bp, Artificial Sequence
  Synthetic oligonucleotide; AAG chr11 5158762 5158781 5158765 -
gagcaaaaagaacaaaacca

SEQ ID NO: 55977 - DNA, 20 bp, Artificial Sequence
  Synthetic oligonucleotide; AAG chr11 5158726 5158745 5158729 -
tgacttcaaaatctactaca

SEQ ID NO: 55978 - DNA, 20 bp, Artificial Sequence
  Synthetic oligonucleotide; CAG chr11 5158720 5158739 5158723 -
caaaatctactacaaagcta

SEQ ID NO: 55979 - DNA, 20 bp, Artificial Sequence
  Synthetic oligonucleotide; TAG chr11 5158717 5158736 5158720 -
aatctactacaaagctacag

SEQ ID NO: 55980 - DNA, 20 bp, Artificial Sequence
  Synthetic oligonucleotide; CAG chr11 5158709 5158728 5158712 -
acaaagctacagtagccaaa

SEQ ID NO: 55981 - DNA, 20 bp, Artificial Sequence
  Synthetic oligonucleotide; CAG chr11 5158704 5158723 5158707 -
gctacagtagccaaacagca

SEQ ID NO: 55982 - DNA, 20 bp, Artificial Sequence
  Synthetic oligonucleotide; AAG chr11 5158692 5158711 5158695 -
aaacagcacagtactgcata

SEQ ID NO: 55983 - DNA, 20 bp, Artificial Sequence
  Synthetic oligonucleotide; CAG chr11 5158688 5158707 5158691 -
agcacagtactgcataaaga

SEQ ID NO: 55984 - DNA, 20 bp, Artificial Sequence
  Synthetic oligonucleotide; CAG chr11 5158680 5158699 5158683 -
actgcataaagacagacata

SEQ ID NO: 55985 - DNA, 20 bp, Artificial Sequence
  Synthetic oligonucleotide; TGG chr11 5158672 5158691 5158675 -
aagacagacatacagcccaa

SEQ ID NO: 55986 - DNA, 20 bp, Artificial Sequence
  Synthetic oligonucleotide; CAG chr11 5158667 5158686 5158670 -
agacatacagcccaatggaa

SEQ ID NO: 55987 - DNA, 20 bp, Artificial Sequence
  Synthetic oligonucleotide; TAG chr11 5158662 5158681 5158665 -
tacagcccaatggaacagca

SEQ ID NO: 55988 - DNA, 20 bp, Artificial Sequence
  Synthetic oligonucleotide; GAG chr11 5158660 5158679 5158663 -
cagcccaatggaacagcata

SEQ ID NO: 55989 - DNA, 20 bp, Artificial Sequence
  Synthetic oligonucleotide; CAG chr11 5158653 5158672 5158656 -
atggaacagcatagagaacc

SEQ ID NO: 55990 - DNA, 20 bp, Artificial Sequence
  Synthetic oligonucleotide; CAG chr11 5158641 5158660 5158644 -
agagaacccagatgcaaatc

SEQ ID NO: 55991 - DNA, 20 bp, Artificial Sequence
  Synthetic oligonucleotide; AGG chr11 5158640 5158659 5158643 -
gagaacccagatgcaaatcc

SEQ ID NO: 55992 - DNA, 20 bp, Artificial Sequence
  Synthetic oligonucleotide; AAG chr11 5158625 5158644 5158628 -
aatccaggcacttaacaacc

SEQ ID NO: 55993 - DNA, 20 bp, Artificial Sequence
  Synthetic oligonucleotide; AAG chr11 5158610 5158629 5158613 -
caaccaagtcatctttaaca

SEQ ID NO: 55994 - DNA, 20 bp, Artificial Sequence
  Synthetic oligonucleotide; AGG chr11 5158609 5158628 5158612 -
aaccaagtcatctttaacaa

SEQ ID NO: 55995 - DNA, 20 bp, Artificial Sequence
  Synthetic oligonucleotide; AAG chr11 5158602 5158621 5158605 -
tcatctttaacaaaggcatc

SEQ ID NO: 55996 - DNA, 20 bp, Artificial Sequence
  Synthetic oligonucleotide; TAG chr11 5158589 5158608 5158592 -
aggcatcaagaacataaaaa

SEQ ID NO: 55997 - DNA, 20 bp, Artificial Sequence
  Synthetic oligonucleotide; AGG chr11 5158588 5158607 5158591 -
ggcatcaagaacataaaaat

SEQ ID NO: 55998 - DNA, 20 bp, Artificial Sequence
  Synthetic oligonucleotide; TGG chr11 5158579 5158598 5158582 -
aacataaaaataggaacaaa

SEQ ID NO: 55999 - DNA, 20 bp, Artificial Sequence
  Synthetic oligonucleotide; GGG chr11 5158578 5158597 5158581 -
acataaaaataggaacaaat

SEQ ID NO: 56000 - DNA, 20 bp, Artificial Sequence
  Synthetic oligonucleotide; CAG chr11 5158574 5158593 5158577 -
aaaaataggaacaaatgggc

SEQ ID NO: 56001 - DNA, 20 bp, Artificial Sequence
  Synthetic oligonucleotide; AGG chr11 5158573 5158592 5158576 -
aaaataggaacaaatgggcc

SEQ ID NO: 56002 - DNA, 20 bp, Artificial Sequence
  Synthetic oligonucleotide; CAG chr11 5158568 5158587 5158571 -
aggaacaaatgggccaggtg

SEQ ID NO: 56003 - DNA, 20 bp, Artificial Sequence
  Synthetic oligonucleotide; TGG chr11 5158565 5158584 5158568 -
aacaaatgggccaggtgcag

SEQ ID NO: 56004 - DNA, 20 bp, Artificial Sequence
  Synthetic oligonucleotide; CAG chr11 5158546 5158565 5158549 -
gtggctcacacctgtaatcc

SEQ ID NO: 56005 - DNA, 20 bp, Artificial Sequence
  Synthetic oligonucleotide; GAG chr11 5158535 5158554 5158538 -
ctgtaatcccagcactttgt

SEQ ID NO: 56006 - DNA, 20 bp, Artificial Sequence
  Synthetic oligonucleotide; AGG chr11 5158534 5158553 5158537 -
tgtaatcccagcactttgtg

SEQ ID NO: 56007 - DNA, 20 bp, Artificial Sequence
  Synthetic oligonucleotide; GAG chr11 5158529 5158548 5158532 -
tcccagcactttgtgaggct

SEQ ID NO: 56008 - DNA, 20 bp, Artificial Sequence
  Synthetic oligonucleotide; AGG chr11 5158528 5158547 5158531 -
cccagcactttgtgaggctg

SEQ ID NO: 56009 - DNA, 20 bp, Artificial Sequence
  Synthetic oligonucleotide; TGG chr11 5158525 5158544 5158528 -
agcactttgtgaggctgagg

SEQ ID NO: 56010 - DNA, 20 bp, Artificial Sequence
  Synthetic oligonucleotide; GGG chr11 5158524 5158543 5158527 -
gcactttgtgaggctgaggt

SEQ ID NO: 56011 - DNA, 20 bp, Artificial Sequence
  Synthetic oligonucleotide; GGG chr11 5158523 5158542 5158526 -
cactttgtgaggctgaggtg

SEQ ID NO: 56012 - DNA, 20 bp, Artificial Sequence
  Synthetic oligonucleotide; GGG chr11 5158522 5158541 5158525 -
actttgtgaggctgaggtgg

SEQ ID NO: 56013 - DNA, 20 bp, Artificial Sequence
  Synthetic oligonucleotide; GGG chr11 5158521 5158540 5158524 -
ctttgtgaggctgaggtggg

SEQ ID NO: 56014 - DNA, 20 bp, Artificial Sequence
  Synthetic oligonucleotide; GAG chr11 5158513 5158532 5158516 -
ggctgaggtggggggatcac

SEQ ID NO: 56015 - DNA, 20 bp, Artificial Sequence
  Synthetic oligonucleotide; AGG chr11 5158512 5158531 5158515 -
gctgaggtggggggatcacg

SEQ ID NO: 56016 - DNA, 20 bp, Artificial Sequence
  Synthetic oligonucleotide; CAG chr11 5158508 5158527 5158511 -
aggtggggggatcacgaggt

SEQ ID NO: 56017 - DNA, 20 bp, Artificial Sequence
  Synthetic oligonucleotide; AGG chr11 5158507 5158526 5158510 -
ggtggggggatcacgaggtc

SEQ ID NO: 56018 - DNA, 20 bp, Artificial Sequence
  Synthetic oligonucleotide; GAG chr11 5158505 5158524 5158508 -
tggggggatcacgaggtcag

SEQ ID NO: 56019 - DNA, 20 bp, Artificial Sequence
  Synthetic oligonucleotide; AAG chr11 5158499 5158518 5158502 -
gatcacgaggtcaggagttc

SEQ ID NO: 56020 - DNA, 20 bp, Artificial Sequence
  Synthetic oligonucleotide; CAG chr11 5158494 5158513 5158497 -
cgaggtcaggagttcaagac

SEQ ID NO: 56021 - DNA, 20 bp, Artificial Sequence
  Synthetic oligonucleotide; TGG chr11 5158480 5158499 5158483 -
caagaccagcctgaccaacg

SEQ ID NO: 56022 - DNA, 20 bp, Artificial Sequence
  Synthetic oligonucleotide; TAG chr11 5158445 5158464 5158448 -
tctactaaaaatacaaaaat

SEQ ID NO: 56023 - DNA, 20 bp, Artificial Sequence
  Synthetic oligonucleotide; CAG chr11 5158441 5158460 5158444 -
ctaaaaatacaaaaattagc

SEQ ID NO: 56024 - DNA, 20 bp, Artificial Sequence
  Synthetic oligonucleotide; AGG chr11 5158440 5158459 5158443 -
taaaaatacaaaaattagcc

SEQ ID NO: 56025 - DNA, 20 bp, Artificial Sequence
  Synthetic oligonucleotide; TGG chr11 5158435 5158454 5158438 -
atacaaaaattagccaggca

SEQ ID NO: 56026 - DNA, 20 bp, Artificial Sequence
  Synthetic oligonucleotide; TGG chr11 5158432 5158451 5158435 -
caaaaattagccaggcatgg

SEQ ID NO: 56027 - DNA, 20 bp, Artificial Sequence
  Synthetic oligonucleotide; GGG chr11 5158431 5158450 5158434 -
aaaaattagccaggcatggt

SEQ ID NO: 56028 - DNA, 20 bp, Artificial Sequence
  Synthetic oligonucleotide; GGG chr11 5158430 5158449 5158433 -
aaaattagccaggcatggtg

SEQ ID NO: 56029 - DNA, 20 bp, Artificial Sequence
  Synthetic oligonucleotide; CAG chr11 5158413 5158432 5158416 -
gtggggcgctcctgtaatcc

SEQ ID NO: 56030 - DNA, 20 bp, Artificial Sequence
  Synthetic oligonucleotide; CAG chr11 5158405 5158424 5158408 -
ctcctgtaatcccagatact

SEQ ID NO: 56031 - DNA, 20 bp, Artificial Sequence
  Synthetic oligonucleotide; AGG chr11 5158404 5158423 5158407 -
tcctgtaatcccagatactc

SEQ ID NO: 56032 - DNA, 20 bp, Artificial Sequence
  Synthetic oligonucleotide; GAG chr11 5158402 5158421 5158405 -
ctgtaatcccagatactcag

SEQ ID NO: 56033 - DNA, 20 bp, Artificial Sequence
  Synthetic oligonucleotide; AGG chr11 5158401 5158420 5158404 -
tgtaatcccagatactcagg

SEQ ID NO: 56034 - DNA, 20 bp, Artificial Sequence
  Synthetic oligonucleotide; GAG chr11 5158396 5158415 5158399 -
tcccagatactcaggaggct

SEQ ID NO: 56035 - DNA, 20 bp, Artificial Sequence
  Synthetic oligonucleotide; AGG chr11 5158395 5158414 5158398 -
cccagatactcaggaggctg

SEQ ID NO: 56036 - DNA, 20 bp, Artificial Sequence
  Synthetic oligonucleotide; CAG chr11 5158392 5158411 5158395 -
agatactcaggaggctgagg

SEQ ID NO: 56037 - DNA, 20 bp, Artificial Sequence
  Synthetic oligonucleotide; AGG chr11 5158391 5158410 5158394 -
gatactcaggaggctgaggc

SEQ ID NO: 56038 - DNA, 20 bp, Artificial Sequence
  Synthetic oligonucleotide; GAG chr11 5158389 5158408 5158392 -
tactcaggaggctgaggcag

SEQ ID NO: 56039 - DNA, 20 bp, Artificial Sequence
  Synthetic oligonucleotide; TGG chr11 5158373 5158392 5158376 -
gcaggagaatcgcttgaacc

SEQ ID NO: 56040 - DNA, 20 bp, Artificial Sequence
  Synthetic oligonucleotide; GGG chr11 5158372 5158391 5158375 -
caggagaatcgcttgaacct

SEQ ID NO: 56041 - DNA, 20 bp, Artificial Sequence
  Synthetic oligonucleotide; GAG chr11 5158370 5158389 5158373 -
ggagaatcgcttgaacctgg

SEQ ID NO: 56042 - DNA, 20 bp, Artificial Sequence
  Synthetic oligonucleotide; AGG chr11 5158369 5158388 5158372 -
gagaatcgcttgaacctggg

SEQ ID NO: 56043 - DNA, 20 bp, Artificial Sequence
  Synthetic oligonucleotide; CAG chr11 5158366 5158385 5158369 -
aatcgcttgaacctgggagg

SEQ ID NO: 56044 - DNA, 20 bp, Artificial Sequence
  Synthetic oligonucleotide; AAG chr11 5158363 5158382 5158366 -
cgcttgaacctgggaggcag

SEQ ID NO: 56045 - DNA, 20 bp, Artificial Sequence
  Synthetic oligonucleotide; CAG chr11 5158357 5158376 5158360 -
aacctgggaggcagaagttg

SEQ ID NO: 56046 - DNA, 20 bp, Artificial Sequence
  Synthetic oligonucleotide; AAG chr11 5158348 5158367 5158351 -
ggcagaagttgcagtgatcc

SEQ ID NO: 56047 - DNA, 20 bp, Artificial Sequence
  Synthetic oligonucleotide; CAG chr11 5158325 5158344 5158328 -
attgtgctgccactgcactc

SEQ ID NO: 56048 - DNA, 20 bp, Artificial Sequence
  Synthetic oligonucleotide; TGG chr11 5158320 5158339 5158323 -
gctgccactgcactccagcc

SEQ ID NO: 56049 - DNA, 20 bp, Artificial Sequence
  Synthetic oligonucleotide; GGG chr11 5158319 5158338 5158322 -
ctgccactgcactccagcct

SEQ ID NO: 56050 - DNA, 20 bp, Artificial Sequence
  Synthetic oligonucleotide; CAG chr11 5158313 5158332 5158316 -
ctgcactccagcctgggcaa

SEQ ID NO: 56051 - DNA, 20 bp, Artificial Sequence
  Synthetic oligonucleotide; GAG chr11 5158309 5158328 5158312 -
actccagcctgggcaacagt

SEQ ID NO: 56052 - DNA, 20 bp, Artificial Sequence
  Synthetic oligonucleotide; AAG chr11 5158280 5158299 5158283 -
tctcaaaaaaaaaaaaaaaa

SEQ ID NO: 56053 - DNA, 20 bp, Artificial Sequence
  Synthetic oligonucleotide; AGG chr11 5158279 5158298 5158282 -
ctcaaaaaaaaaaaaaaaaa

SEQ ID NO: 56054 - DNA, 20 bp, Artificial Sequence
  Synthetic oligonucleotide; CAG chr11 5158270 5158289 5158273 -
aaaaaaaaaaaaggtacaaa

SEQ ID NO: 56055 - DNA, 20 bp, Artificial Sequence
  Synthetic oligonucleotide; AAG chr11 5158260 5158279 5158263 -
aaggtacaaacagtcttttc

SEQ ID NO: 56056 - DNA, 20 bp, Artificial Sequence
  Synthetic oligonucleotide; CAG chr11 5158254 5158273 5158257 -
caaacagtcttttcaagaaa

SEQ ID NO: 56057 - DNA, 20 bp, Artificial Sequence
  Synthetic oligonucleotide; TAG chr11 5158248 5158267 5158251 -
gtcttttcaagaaacagtgc

SEQ ID NO: 56058 - DNA, 20 bp, Artificial Sequence
  Synthetic oligonucleotide; AGG chr11 5158247 5158266 5158250 -
tcttttcaagaaacagtgct

SEQ ID NO: 56059 - DNA, 20 bp, Artificial Sequence
  Synthetic oligonucleotide; TGG chr11 5158239 5158258 5158242 -
agaaacagtgctaggaaaac

SEQ ID NO: 56060 - DNA, 20 bp, Artificial Sequence
  Synthetic oligonucleotide; AAG chr11 5158222 5158241 5158225 -
aactggatatccatttgcaa

SEQ ID NO: 56061 - DNA, 20 bp, Artificial Sequence
  Synthetic oligonucleotide; GAG chr11 5158220 5158239 5158223 -
ctggatatccatttgcaaaa

SEQ ID NO: 56062 - DNA, 20 bp, Artificial Sequence
  Synthetic oligonucleotide; CGG chr11 5158211 5158230 5158214 -
catttgcaaaagagtaaaat

SEQ ID NO: 56063 - DNA, 20 bp, Artificial Sequence
  Synthetic oligonucleotide; AAG chr11 5158174 5158193 5158177 -
ctatatacaaaaatcaaatc

SEQ ID NO: 56064 - DNA, 20 bp, Artificial Sequence
  Synthetic oligonucleotide; TGG chr11 5158170 5158189 5158173 -
atacaaaaatcaaatcaaga

SEQ ID NO: 56065 - DNA, 20 bp, Artificial Sequence
  Synthetic oligonucleotide; AAG chr11 5158163 5158182 5158166 -
aatcaaatcaagatggatta

SEQ ID NO: 56066 - DNA, 20 bp, Artificial Sequence
  Synthetic oligonucleotide; TGG chr11 5158127 5158146 5158130 -
acctgaaattatgaaactac

SEQ ID NO: 56067 - DNA, 20 bp, Artificial Sequence
  Synthetic oligonucleotide; AAG chr11 5158124 5158143 5158127 -
tgaaattatgaaactactgg

SEQ ID NO: 56068 - DNA, 20 bp, Artificial Sequence
  Synthetic oligonucleotide; CAG chr11 5158117 5158136 5158120 -
atgaaactactggaagaaaa

SEQ ID NO: 56069 - DNA, 20 bp, Artificial Sequence
  Synthetic oligonucleotide; TGG chr11 5158114 5158133 5158117 -
aaactactggaagaaaacag

SEQ ID NO: 56070 - DNA, 20 bp, Artificial Sequence
  Synthetic oligonucleotide; GGG chr11 5158113 5158132 5158116 -
aactactggaagaaaacagt

SEQ ID NO: 56071 - DNA, 20 bp, Artificial Sequence
  Synthetic oligonucleotide; GGG chr11 5158112 5158131 5158115 -
actactggaagaaaacagtg

SEQ ID NO: 56072 - DNA, 20 bp, Artificial Sequence
  Synthetic oligonucleotide; CAG chr11 5158101 5158120 5158104 -
aaaacagtggggaaaccctc

SEQ ID NO: 56073 - DNA, 20 bp, Artificial Sequence
  Synthetic oligonucleotide; AGG chr11 5158100 5158119 5158103 -
aaacagtggggaaaccctcc

SEQ ID NO: 56074 - DNA, 20 bp, Artificial Sequence
  Synthetic oligonucleotide; GGG chr11 5158099 5158118 5158102 -
aacagtggggaaaccctcca

SEQ ID NO: 56075 - DNA, 20 bp, Artificial Sequence
  Synthetic oligonucleotide; TGG chr11 5158084 5158103 5158087 -
ctccagggcattcattgatt

SEQ ID NO: 56076 - DNA, 20 bp, Artificial Sequence
  Synthetic oligonucleotide; GGG chr11 5158083 5158102 5158086 -
tccagggcattcattgattt

SEQ ID NO: 56077 - DNA, 20 bp, Artificial Sequence
  Synthetic oligonucleotide; GAG chr11 5158066 5158085 5158069 -
tttgggcaaatactgtctat

SEQ ID NO: 56078 - DNA, 20 bp, Artificial Sequence
  Synthetic oligonucleotide; AAG chr11 5158056 5158075 5158059 -
tactgtctatgagacttcaa

SEQ ID NO: 56079 - DNA, 20 bp, Artificial Sequence
  Synthetic oligonucleotide; TAG chr11 5158032 5158051 5158035 -
acaaataaccaaaacaaaaa

SEQ ID NO: 56080 - DNA, 20 bp, Artificial Sequence
  Synthetic oligonucleotide; TGG chr11 5158024 5158043 5158027 -
ccaaaacaaaaatagacaat

SEQ ID NO: 56081 - DNA, 20 bp, Artificial Sequence
  Synthetic oligonucleotide; GGG chr11 5158023 5158042 5158026 -
caaaacaaaaatagacaatt

SEQ ID NO: 56082 - DNA, 20 bp, Artificial Sequence
  Synthetic oligonucleotide; AAG chr11 5158012 5158031 5158015 -
tagacaattgggattgtttg

SEQ ID NO: 56083 - DNA, 20 bp, Artificial Sequence
  Synthetic oligonucleotide; CAG chr11 5158002 5158021 5158005 -
ggattgtttgaagctctgca

SEQ ID NO: 56084 - DNA, 20 bp, Artificial Sequence
  Synthetic oligonucleotide; AAG chr11 5157997 5158016 5158000 -
gtttgaagctctgcacagca

SEQ ID NO: 56085 - DNA, 20 bp, Artificial Sequence
  Synthetic oligonucleotide; AAG chr11 5157985 5158004 5157988 -
gcacagcaaagaaaataata

SEQ ID NO: 56086 - DNA, 20 bp, Artificial Sequence
  Synthetic oligonucleotide; AAG chr11 5157980 5157999 5157983 -
gcaaagaaaataataaagtg

SEQ ID NO: 56087 - DNA, 20 bp, Artificial Sequence
  Synthetic oligonucleotide; GAG chr11 5157978 5157997 5157981 -
aaagaaaataataaagtgaa

SEQ ID NO: 56088 - DNA, 20 bp, Artificial Sequence
  Synthetic oligonucleotide; AAG chr11 5157967 5157986 5157970 -
taaagtgaagagacaaccca

SEQ ID NO: 56089 - DNA, 20 bp, Artificial Sequence
  Synthetic oligonucleotide; TGG chr11 5157962 5157981 5157965 -
tgaagagacaacccaaagaa

SEQ ID NO: 56090 - DNA, 20 bp, Artificial Sequence
  Synthetic oligonucleotide; GGG chr11 5157961 5157980 5157964 -
gaagagacaacccaaagaat

SEQ ID NO: 56091 - DNA, 20 bp, Artificial Sequence
  Synthetic oligonucleotide; GAG chr11 5157959 5157978 5157962 -
agagacaacccaaagaatgg

SEQ ID NO: 56092 - DNA, 20 bp, Artificial Sequence
  Synthetic oligonucleotide; AAG chr11 5157929 5157948 5157932 -
ttgcaaactatatattttac

SEQ ID NO: 56093 - DNA, 20 bp, Artificial Sequence
  Synthetic oligonucleotide; AGG chr11 5157928 5157947 5157931 -
tgcaaactatatattttaca

SEQ ID NO: 56094 - DNA, 20 bp, Artificial Sequence
  Synthetic oligonucleotide; CAG chr11 5157915 5157934 5157918 -
ttttacaaggaattgataac

SEQ ID NO: 56095 - DNA, 20 bp, Artificial Sequence
  Synthetic oligonucleotide; AAG chr11 5157905 5157924 5157908 -
aattgataaccagaatatgc

SEQ ID NO: 56096 - DNA, 20 bp, Artificial Sequence
  Synthetic oligonucleotide; AAG chr11 5157896 5157915 5157899 -
ccagaatatgcaagaaactc

SEQ ID NO: 56097 - DNA, 20 bp, Artificial Sequence
  Synthetic oligonucleotide; CAG chr11 5157885 5157904 5157888 -
aagaaactcaagcaactcaa

SEQ ID NO: 56098 - DNA, 20 bp, Artificial Sequence
  Synthetic oligonucleotide; TGG chr11 5157859 5157878 5157862 -
ataaataaataaataaataa

SEQ ID NO: 56099 - DNA, 20 bp, Artificial Sequence
  Synthetic oligonucleotide; AAG chr11 5157852 5157871 5157855 -
aataaataaataatggccaa

SEQ ID NO: 56100 - DNA, 20 bp, Artificial Sequence
  Synthetic oligonucleotide; TAG chr11 5157842 5157861 5157845 -
taatggccaaaagacctgaa

SEQ ID NO: 56101 - DNA, 20 bp, Artificial Sequence
  Synthetic oligonucleotide; AAG chr11 5157828 5157847 5157831 -
cctgaatagatatttctcaa

SEQ ID NO: 56102 - DNA, 20 bp, Artificial Sequence
  Synthetic oligonucleotide; AAG chr11 5157825 5157844 5157828 -
gaatagatatttctcaaaag

SEQ ID NO: 56103 - DNA, 20 bp, Artificial Sequence
  Synthetic oligonucleotide; TGG chr11 5157813 5157832 5157816 -
ctcaaaagaagccatacaaa

SEQ ID NO: 56104 - DNA, 20 bp, Artificial Sequence
  Synthetic oligonucleotide; CAG chr11 5157808 5157827 5157811 -
aagaagccatacaaatggcc

SEQ ID NO: 56105 - DNA, 20 bp, Artificial Sequence
  Synthetic oligonucleotide; GAG chr11 5157806 5157825 5157809 -
gaagccatacaaatggccca

SEQ ID NO: 56106 - DNA, 20 bp, Artificial Sequence
  Synthetic oligonucleotide; AGG chr11 5157805 5157824 5157808 -
aagccatacaaatggcccag

SEQ ID NO: 56107 - DNA, 20 bp, Artificial Sequence
  Synthetic oligonucleotide; CAG chr11 5157770 5157789 5157773 -
tgttcaatatcactaatcac

SEQ ID NO: 56108 - DNA, 20 bp, Artificial Sequence
  Synthetic oligonucleotide; TAG chr11 5157732 5157751 5157735 -
aatgtgatatcatctcacct

SEQ ID NO: 56109 - DNA, 20 bp, Artificial Sequence
  Synthetic oligonucleotide; TAG chr11 5157723 5157742 5157726 -
tcatctcaccttagttaaaa

SEQ ID NO: 56110 - DNA, 20 bp, Artificial Sequence
  Synthetic oligonucleotide; AAG chr11 5157705 5157724 5157708 -
aatagcttataacaaaacaa

SEQ ID NO: 56111 - DNA, 20 bp, Artificial Sequence
  Synthetic oligonucleotide; AGG chr11 5157704 5157723 5157707 -
atagcttataacaaaacaaa

SEQ ID NO: 56112 - DNA, 20 bp, Artificial Sequence
  Synthetic oligonucleotide; CAG chr11 5157695 5157714 5157698 -
aacaaaacaaaaggaaataa

SEQ ID NO: 56113 - DNA, 20 bp, Artificial Sequence
  Synthetic oligonucleotide; TGG chr11 5157683 5157702 5157686 -
ggaaataacagatgcttgtg

SEQ ID NO: 56114 - DNA, 20 bp, Artificial Sequence
  Synthetic oligonucleotide; TGG chr11 5157677 5157696 5157680 -
aacagatgcttgtgtggatg

SEQ ID NO: 56115 - DNA, 20 bp, Artificial Sequence
  Synthetic oligonucleotide; AAG chr11 5157671 5157690 5157674 -
tgcttgtgtggatgtggaca

SEQ ID NO: 56116 - DNA, 20 bp, Artificial Sequence
  Synthetic oligonucleotide; AGG chr11 5157670 5157689 5157673 -
gcttgtgtggatgtggacaa

SEQ ID NO: 56117 - DNA, 20 bp, Artificial Sequence
  Synthetic oligonucleotide; GGG chr11 5157669 5157688 5157672 -
cttgtgtggatgtggacaaa

SEQ ID NO: 56118 - DNA, 20 bp, Artificial Sequence
  Synthetic oligonucleotide; TGG chr11 5157649 5157668 5157652 -
gggaaaccctcttacactgt

SEQ ID NO: 56119 - DNA, 20 bp, Artificial Sequence
  Synthetic oligonucleotide; TGG chr11 5157646 5157665 5157649 -
aaaccctcttacactgttgg

SEQ ID NO: 56120 - DNA, 20 bp, Artificial Sequence
  Synthetic oligonucleotide; GGG chr11 5157645 5157664 5157648 -
aaccctcttacactgttggt

SEQ ID NO: 56121 - DNA, 20 bp, Artificial Sequence
  Synthetic oligonucleotide; GAG chr11 5157643 5157662 5157646 -
ccctcttacactgttggtgg

SEQ ID NO: 56122 - DNA, 20 bp, Artificial Sequence
  Synthetic oligonucleotide; TGG chr11 5157633 5157652 5157636 -
ctgttggtgggagtacaaat

SEQ ID NO: 56123 - DNA, 20 bp, Artificial Sequence
  Synthetic oligonucleotide; CAG chr11 5157628 5157647 5157631 -
ggtgggagtacaaattggta

SEQ ID NO: 56124 - DNA, 20 bp, Artificial Sequence
  Synthetic oligonucleotide; AAG chr11 5157617 5157636 5157620 -
aaattggtacagcaattatg

SEQ ID NO: 56125 - DNA, 20 bp, Artificial Sequence
  Synthetic oligonucleotide; AGG chr11 5157616 5157635 5157619 -
aattggtacagcaattatga

SEQ ID NO: 56126 - DNA, 20 bp, Artificial Sequence
  Synthetic oligonucleotide; CAG chr11 5157612 5157631 5157615 -
ggtacagcaattatgaagga

SEQ ID NO: 56127 - DNA, 20 bp, Artificial Sequence
  Synthetic oligonucleotide; TGG chr11 5157607 5157626 5157610 -
agcaattatgaaggacagta

SEQ ID NO: 56128 - DNA, 20 bp, Artificial Sequence
  Synthetic oligonucleotide; GAG chr11 5157605 5157624 5157608 -
caattatgaaggacagtatg

SEQ ID NO: 56129 - DNA, 20 bp, Artificial Sequence
  Synthetic oligonucleotide; AAG chr11 5157586 5157605 5157589 -
ggagatttgtcaaaaatgta

SEQ ID NO: 56130 - DNA, 20 bp, Artificial Sequence
  Synthetic oligonucleotide; TAG chr11 5157583 5157602 5157586 -
gatttgtcaaaaatgtaaag

SEQ ID NO: 56131 - DNA, 20 bp, Artificial Sequence
  Synthetic oligonucleotide; CAG chr11 5157565 5157584 5157568 -
agtagaactaccatatgatc

SEQ ID NO: 56132 - DNA, 20 bp, Artificial Sequence
  Synthetic oligonucleotide; TAG chr11 5157550 5157569 5157553 -
tgatccagcaatatcactcc

SEQ ID NO: 56133 - DNA, 20 bp, Artificial Sequence
  Synthetic oligonucleotide; AGG chr11 5157549 5157568 5157552 -
gatccagcaatatcactcct

SEQ ID NO: 56134 - DNA, 20 bp, Artificial Sequence
  Synthetic oligonucleotide; AAG chr11 5157533 5157552 5157536 -
tcctaggtatatacccttaa

SEQ ID NO: 56135 - DNA, 20 bp, Artificial Sequence
  Synthetic oligonucleotide; TAG chr11 5157523 5157542 5157526 -
atacccttaaaagaataaat

SEQ ID NO: 56136 - DNA, 20 bp, Artificial Sequence
  Synthetic oligonucleotide; AAG chr11 5157513 5157532 5157516 -
aagaataaattagtatgtcg

SEQ ID NO: 56137 - DNA, 20 bp, Artificial Sequence
  Synthetic oligonucleotide; CAG chr11 5157504 5157523 5157507 -
ttagtatgtcgaagatatat

SEQ ID NO: 56138 - DNA, 20 bp, Artificial Sequence
  Synthetic oligonucleotide; TAG chr11 5157484 5157503 5157487 -
cagtactcccatctttatta

SEQ ID NO: 56139 - DNA, 20 bp, Artificial Sequence
  Synthetic oligonucleotide; AAG chr11 5157464 5157483 5157467 -
tagcactattcacaaacgcc

SEQ ID NO: 56140 - DNA, 20 bp, Artificial Sequence
  Synthetic oligonucleotide; CAG chr11 5157433 5157452 5157436 -
tcaactgatgtattcgtcaa

SEQ ID NO: 56141 - DNA, 20 bp, Artificial Sequence
  Synthetic oligonucleotide; TGG chr11 5157425 5157444 5157428 -
tgtattcgtcaacagataaa

SEQ ID NO: 56142 - DNA, 20 bp, Artificial Sequence
  Synthetic oligonucleotide; AAG chr11 5157419 5157438 5157422 -
cgtcaacagataaatggata

SEQ ID NO: 56143 - DNA, 20 bp, Artificial Sequence
  Synthetic oligonucleotide; TGG chr11 5157378 5157397 5157381 -
acacacacacacacacacaa

SEQ ID NO: 56144 - DNA, 20 bp, Artificial Sequence
  Synthetic oligonucleotide; AAG chr11 5157355 5157374 5157358 -
aatattattcaaccataaaa

SEQ ID NO: 56145 - DNA, 20 bp, Artificial Sequence
  Synthetic oligonucleotide; CAG chr11 5157333 5157352 5157336 -
gaatgaaatattatcaatta

SEQ ID NO: 56146 - DNA, 20 bp, Artificial Sequence
  Synthetic oligonucleotide; TGG chr11 5157321 5157340 5157324 -
atcaattacagtaacataaa

SEQ ID NO: 56147 - DNA, 20 bp, Artificial Sequence
  Synthetic oligonucleotide; AAG chr11 5157312 5157331 5157315 -
agtaacataaatggtactga

SEQ ID NO: 56148 - DNA, 20 bp, Artificial Sequence
  Synthetic oligonucleotide; AAG chr11 5157299 5157318 5157302 -
gtactgaaagcaattacgtt

SEQ ID NO: 56149 - DNA, 20 bp, Artificial Sequence
  Synthetic oligonucleotide; AAG chr11 5157290 5157309 5157293 -
gcaattacgttaagtgaaat

SEQ ID NO: 56150 - DNA, 20 bp, Artificial Sequence
  Synthetic oligonucleotide; AAG chr11 5157285 5157304 5157288 -
tacgttaagtgaaataagcc

SEQ ID NO: 56151 - DNA, 20 bp, Artificial Sequence
  Synthetic oligonucleotide; CAG chr11 5157280 5157299 5157283 -
taagtgaaataagccaagca

SEQ ID NO: 56152 - DNA, 20 bp, Artificial Sequence
  Synthetic oligonucleotide; AAG chr11 5157276 5157295 5157279 -
tgaaataagccaagcacaga

SEQ ID NO: 56153 - DNA, 20 bp, Artificial Sequence
  Synthetic oligonucleotide; TGG chr11 5157247 5157266 5157250 -
atcacatgttctaactcgtg

SEQ ID NO: 56154 - DNA, 20 bp, Artificial Sequence
  Synthetic oligonucleotide; AAG chr11 5157244 5157263 5157247 -
acatgttctaactcgtgtgg

SEQ ID NO: 56155 - DNA, 20 bp, Artificial Sequence
  Synthetic oligonucleotide; TGG chr11 5157232 5157251 5157235 -
tcgtgtggaagttaaaaacg

SEQ ID NO: 56156 - DNA, 20 bp, Artificial Sequence
  Synthetic oligonucleotide; AAG chr11 5157221 5157240 5157224 -
ttaaaaacgtggatcttatg

SEQ ID NO: 56157 - DNA, 20 bp, Artificial Sequence
  Synthetic oligonucleotide; CAG chr11 5157217 5157236 5157220 -
aaacgtggatcttatgaaga

SEQ ID NO: 56158 - DNA, 20 bp, Artificial Sequence
  Synthetic oligonucleotide; GAG chr11 5157215 5157234 5157218 -
acgtggatcttatgaagaca

SEQ ID NO: 56159 - DNA, 20 bp, Artificial Sequence
  Synthetic oligonucleotide; GAG chr11 5157213 5157232 5157216 -
gtggatcttatgaagacaga

SEQ ID NO: 56160 - DNA, 20 bp, Artificial Sequence
  Synthetic oligonucleotide; TAG chr11 5157210 5157229 5157213 -
gatcttatgaagacagagag

SEQ ID NO: 56161 - DNA, 20 bp, Artificial Sequence
  Synthetic oligonucleotide; TGG chr11 5157205 5157224 5157208 -
tatgaagacagagagtagat

SEQ ID NO: 56162 - DNA, 20 bp, Artificial Sequence
  Synthetic oligonucleotide; TAG chr11 5157202 5157221 5157205 -
gaagacagagagtagattgg

SEQ ID NO: 56163 - DNA, 20 bp, Artificial Sequence
  Synthetic oligonucleotide; CGG chr11 5157195 5157214 5157198 -
gagagtagattggtagttac

SEQ ID NO: 56164 - DNA, 20 bp, Artificial Sequence
  Synthetic oligonucleotide; CGG chr11 5157192 5157211 5157195 -
agtagattggtagttaccgg

SEQ ID NO: 56165 - DNA, 20 bp, Artificial Sequence
  Synthetic oligonucleotide; CGG chr11 5157189 5157208 5157192 -
agattggtagttaccggcgg

SEQ ID NO: 56166 - DNA, 20 bp, Artificial Sequence
  Synthetic oligonucleotide; GGG chr11 5157188 5157207 5157191 -
gattggtagttaccggcggc

SEQ ID NO: 56167 - DNA, 20 bp, Artificial Sequence
  Synthetic oligonucleotide; GAG chr11 5157186 5157205 5157189 -
ttggtagttaccggcggcgg

SEQ ID NO: 56168 - DNA, 20 bp, Artificial Sequence
  Synthetic oligonucleotide; AGG chr11 5157185 5157204 5157188 -
tggtagttaccggcggcggg

SEQ ID NO: 56169 - DNA, 20 bp, Artificial Sequence
  Synthetic oligonucleotide; GGG chr11 5157184 5157203 5157187 -
ggtagttaccggcggcggga

SEQ ID NO: 56170 - DNA, 20 bp, Artificial Sequence
  Synthetic oligonucleotide; AAG chr11 5157181 5157200 5157184 -
agttaccggcggcgggaggg

SEQ ID NO: 56171 - DNA, 20 bp, Artificial Sequence
  Synthetic oligonucleotide; AAG chr11 5157177 5157196 5157180 -
accggcggcgggagggaaga

SEQ ID NO: 56172 - DNA, 20 bp, Artificial Sequence
  Synthetic oligonucleotide; AGG chr11 5157176 5157195 5157179 -
ccggcggcgggagggaagaa

SEQ ID NO: 56173 - DNA, 20 bp, Artificial Sequence
  Synthetic oligonucleotide; GAG chr11 5157170 5157189 5157173 -
gcgggagggaagaaaggaat

SEQ ID NO: 56174 - DNA, 20 bp, Artificial Sequence
  Synthetic oligonucleotide; AAG chr11 5157162 5157181 5157165 -
gaagaaaggaatgagaaatc

SEQ ID NO: 56175 - DNA, 20 bp, Artificial Sequence
  Synthetic oligonucleotide; TGG chr11 5157004 5157023 5157007 -
ctgaaccgtacactcaaaaa

SEQ ID NO: 56176 - DNA, 20 bp, Artificial Sequence
  Synthetic oligonucleotide; AAG chr11 5156999 5157018 5157002 -
ccgtacactcaaaaatggta

SEQ ID NO: 56177 - DNA, 20 bp, Artificial Sequence
  Synthetic oligonucleotide; TGG chr11 5156995 5157014 5156998 -
acactcaaaaatggtaaaga

SEQ ID NO: 56178 - DNA, 20 bp, Artificial Sequence
  Synthetic oligonucleotide; GGG chr11 5156994 5157013 5156997 -
cactcaaaaatggtaaagat

SEQ ID NO: 56179 - DNA, 20 bp, Artificial Sequence
  Synthetic oligonucleotide; TGG chr11 5156990 5157009 5156993 -
caaaaatggtaaagatgggc

SEQ ID NO: 56180 - DNA, 20 bp, Artificial Sequence
  Synthetic oligonucleotide; GGG chr11 5156989 5157008 5156992 -
aaaaatggtaaagatgggct

SEQ ID NO: 56181 - DNA, 20 bp, Artificial Sequence
  Synthetic oligonucleotide; CGG chr11 5156984 5157003 5156987 -
tggtaaagatgggctgggtg

SEQ ID NO: 56182 - DNA, 20 bp, Artificial Sequence
  Synthetic oligonucleotide; TGG chr11 5156981 5157000 5156984 -
taaagatgggctgggtgcgg

SEQ ID NO: 56183 - DNA, 20 bp, Artificial Sequence
  Synthetic oligonucleotide; CAG chr11 5156962 5156981 5156965 -
gtggccaatgcctgtaatct

SEQ ID NO: 56184 - DNA, 20 bp, Artificial Sequence
  Synthetic oligonucleotide; TGG chr11 5156954 5156973 5156957 -
tgcctgtaatctcagcactt

SEQ ID NO: 56185 - DNA, 20 bp, Artificial Sequence
  Synthetic oligonucleotide; GGG chr11 5156953 5156972 5156956 -
gcctgtaatctcagcacttt

SEQ ID NO: 56186 - DNA, 20 bp, Artificial Sequence
  Synthetic oligonucleotide; GAG chr11 5156951 5156970 5156954 -
ctgtaatctcagcactttgg

SEQ ID NO: 56187 - DNA, 20 bp, Artificial Sequence
  Synthetic oligonucleotide; AGG chr11 5156950 5156969 5156953 -
tgtaatctcagcactttggg

SEQ ID NO: 56188 - DNA, 20 bp, Artificial Sequence
  Synthetic oligonucleotide; AAG chr11 5156945 5156964 5156948 -
tctcagcactttgggaggcc

SEQ ID NO: 56189 - DNA, 20 bp, Artificial Sequence
  Synthetic oligonucleotide; AGG chr11 5156944 5156963 5156947 -
ctcagcactttgggaggcca

SEQ ID NO: 56190 - DNA, 20 bp, Artificial Sequence
  Synthetic oligonucleotide; CAG chr11 5156941 5156960 5156944 -
agcactttgggaggccaagg

SEQ ID NO: 56191 - DNA, 20 bp, Artificial Sequence
  Synthetic oligonucleotide; AGG chr11 5156940 5156959 5156943 -
gcactttgggaggccaaggc

SEQ ID NO: 56192 - DNA, 20 bp, Artificial Sequence
  Synthetic oligonucleotide; TGG chr11 5156937 5156956 5156940 -
ctttgggaggccaaggcagg

SEQ ID NO: 56193 - DNA, 20 bp, Artificial Sequence
  Synthetic oligonucleotide; GAG chr11 5156929 5156948 5156932 -
ggccaaggcaggtggatcat

SEQ ID NO: 56194 - DNA, 20 bp, Artificial Sequence
  Synthetic oligonucleotide; AGG chr11 5156928 5156947 5156931 -
gccaaggcaggtggatcatg

SEQ ID NO: 56195 - DNA, 20 bp, Artificial Sequence
  Synthetic oligonucleotide; CAG chr11 5156924 5156943 5156927 -
aggcaggtggatcatgaggt

SEQ ID NO: 56196 - DNA, 20 bp, Artificial Sequence
  Synthetic oligonucleotide; AGG chr11 5156923 5156942 5156926 -
ggcaggtggatcatgaggtc

SEQ ID NO: 56197 - DNA, 20 bp, Artificial Sequence
  Synthetic oligonucleotide; GAG chr11 5156921 5156940 5156924 -
caggtggatcatgaggtcag

SEQ ID NO: 56198 - DNA, 20 bp, Artificial Sequence
  Synthetic oligonucleotide; AAG chr11 5156915 5156934 5156918 -
gatcatgaggtcaggagtcc

SEQ ID NO: 56199 - DNA, 20 bp, Artificial Sequence
  Synthetic oligonucleotide; CAG chr11 5156910 5156929 5156913 -
tgaggtcaggagtccaagac

SEQ ID NO: 56200 - DNA, 20 bp, Artificial Sequence
  Synthetic oligonucleotide; TGG chr11 5156896 5156915 5156899 -
caagaccagcctgaccaaca

SEQ ID NO: 56201 - DNA, 20 bp, Artificial Sequence
  Synthetic oligonucleotide; TAG chr11 5156860 5156879 5156863 -
ctactaaaaatacaaaaaat

SEQ ID NO: 56202 - DNA, 20 bp, Artificial Sequence
  Synthetic oligonucleotide; CAG chr11 5156856 5156875 5156859 -
taaaaatacaaaaaattagc

SEQ ID NO: 56203 - DNA, 20 bp, Artificial Sequence
  Synthetic oligonucleotide; AGG chr11 5156855 5156874 5156858 -
aaaaatacaaaaaattagcc

SEQ ID NO: 56204 - DNA, 20 bp, Artificial Sequence
  Synthetic oligonucleotide; TGG chr11 5156850 5156869 5156853 -
tacaaaaaattagccaggcg

SEQ ID NO: 56205 - DNA, 20 bp, Artificial Sequence
  Synthetic oligonucleotide; TGG chr11 5156847 5156866 5156850 -
aaaaaattagccaggcgtgg

SEQ ID NO: 56206 - DNA, 20 bp, Artificial Sequence
  Synthetic oligonucleotide; CAG chr11 5156844 5156863 5156847 -
aaattagccaggcgtggtgg

SEQ ID NO: 56207 - DNA, 20 bp, Artificial Sequence
  Synthetic oligonucleotide; AGG chr11 5156843 5156862 5156846 -
aattagccaggcgtggtggc

SEQ ID NO: 56208 - DNA, 20 bp, Artificial Sequence
  Synthetic oligonucleotide; TGG chr11 5156820 5156839 5156823 -
cgcctgtaatcccacctact

SEQ ID NO: 56209 - DNA, 20 bp, Artificial Sequence
  Synthetic oligonucleotide; GGG chr11 5156819 5156838 5156822 -
gcctgtaatcccacctactt

SEQ ID NO: 56210 - DNA, 20 bp, Artificial Sequence
  Synthetic oligonucleotide; GAG chr11 5156817 5156836 5156820 -
ctgtaatcccacctacttgg

SEQ ID NO: 56211 - DNA, 20 bp, Artificial Sequence
  Synthetic oligonucleotide; AGG chr11 5156816 5156835 5156819 -
tgtaatcccacctacttggg

SEQ ID NO: 56212 - DNA, 20 bp, Artificial Sequence
  Synthetic oligonucleotide; TGG chr11 5156811 5156830 5156814 -
tcccacctacttgggaggct

SEQ ID NO: 56213 - DNA, 20 bp, Artificial Sequence
  Synthetic oligonucleotide; GGG chr11 5156810 5156829 5156813 -
cccacctacttgggaggctt

SEQ ID NO: 56214 - DNA, 20 bp, Artificial Sequence
  Synthetic oligonucleotide; CAG chr11 5156807 5156826 5156810 -
acctacttgggaggcttggg

SEQ ID NO: 56215 - DNA, 20 bp, Artificial Sequence
  Synthetic oligonucleotide; AGG chr11 5156806 5156825 5156809 -
cctacttgggaggcttgggc

SEQ ID NO: 56216 - DNA, 20 bp, Artificial Sequence
  Synthetic oligonucleotide; GAG chr11 5156804 5156823 5156807 -
tacttgggaggcttgggcag

SEQ ID NO: 56217 - DNA, 20 bp, Artificial Sequence
  Synthetic oligonucleotide; TGG chr11 5156788 5156807 5156791 -
gcaggagaatcgcttgaacc

SEQ ID NO: 56218 - DNA, 20 bp, Artificial Sequence
  Synthetic oligonucleotide; TGG chr11 5156785 5156804 5156788 -
ggagaatcgcttgaacctgg

SEQ ID NO: 56219 - DNA, 20 bp, Artificial Sequence
  Synthetic oligonucleotide; GGG chr11 5156784 5156803 5156787 -
gagaatcgcttgaacctggt

SEQ ID NO: 56220 - DNA, 20 bp, Artificial Sequence
  Synthetic oligonucleotide; GGG chr11 5156783 5156802 5156786 -
agaatcgcttgaacctggtg

SEQ ID NO: 56221 - DNA, 20 bp, Artificial Sequence
  Synthetic oligonucleotide; GGG chr11 5156782 5156801 5156785 -
gaatcgcttgaacctggtgg

SEQ ID NO: 56222 - DNA, 20 bp, Artificial Sequence
  Synthetic oligonucleotide; CGG chr11 5156779 5156798 5156782 -
tcgcttgaacctggtggggg

SEQ ID NO: 56223 - DNA, 20 bp, Artificial Sequence
  Synthetic oligonucleotide; GAG chr11 5156777 5156796 5156780 -
gcttgaacctggtgggggcg

SEQ ID NO: 56224 - DNA, 20 bp, Artificial Sequence
  Synthetic oligonucleotide; AGG chr11 5156776 5156795 5156779 -
cttgaacctggtgggggcgg

SEQ ID NO: 56225 - DNA, 20 bp, Artificial Sequence
  Synthetic oligonucleotide; CAG chr11 5156770 5156789 5156773 -
cctggtgggggcggaggttg

SEQ ID NO: 56226 - DNA, 20 bp, Artificial Sequence
  Synthetic oligonucleotide; GAG chr11 5156766 5156785 5156769 -
gtgggggcggaggttgcagt

SEQ ID NO: 56227 - DNA, 20 bp, Artificial Sequence
  Synthetic oligonucleotide; AAG chr11 5156761 5156780 5156764 -
ggcggaggttgcagtgagcc

SEQ ID NO: 56228 - DNA, 20 bp, Artificial Sequence
  Synthetic oligonucleotide; CAG chr11 5156741 5156760 5156744 -
aagatcctaccactgcactc

SEQ ID NO: 56229 - DNA, 20 bp, Artificial Sequence
  Synthetic oligonucleotide; TGG chr11 5156736 5156755 5156739 -
cctaccactgcactccagcc

SEQ ID NO: 56230 - DNA, 20 bp, Artificial Sequence
  Synthetic oligonucleotide; CGG chr11 5156729 5156748 5156732 -
ctgcactccagcctggatga

SEQ ID NO: 56231 - DNA, 20 bp, Artificial Sequence
  Synthetic oligonucleotide; GAG chr11 5156727 5156746 5156730 -
gcactccagcctggatgacg

SEQ ID NO: 56232 - DNA, 20 bp, Artificial Sequence
  Synthetic oligonucleotide; GAG chr11 5156723 5156742 5156726 -
tccagcctggatgacggagc

SEQ ID NO: 56233 - DNA, 20 bp, Artificial Sequence
  Synthetic oligonucleotide; AAG chr11 5156710 5156729 5156713 -
acggagcgagactccgtctc

SEQ ID NO: 56234 - DNA, 20 bp, Artificial Sequence
  Synthetic oligonucleotide; AGG chr11 5156709 5156728 5156712 -
cggagcgagactccgtctca

SEQ ID NO: 56235 - DNA, 20 bp, Artificial Sequence
  Synthetic oligonucleotide; AAG chr11 5156697 5156716 5156700 -
ccgtctcaaggaaaaaaaaa

SEQ ID NO: 56236 - DNA, 20 bp, Artificial Sequence
  Synthetic oligonucleotide; AAG chr11 5156692 5156711 5156695 -
tcaaggaaaaaaaaaaagta

SEQ ID NO: 56237 - DNA, 20 bp, Artificial Sequence
  Synthetic oligonucleotide; CGG chr11 5156688 5156707 5156691 -
ggaaaaaaaaaaagtaaaga

SEQ ID NO: 56238 - DNA, 20 bp, Artificial Sequence
  Synthetic oligonucleotide; CAG chr11 5156634 5156653 5156637 -
aaataaatttaaaaaatatt

SEQ ID NO: 56239 - DNA, 20 bp, Artificial Sequence
  Synthetic oligonucleotide; TAG chr11 5156631 5156650 5156634 -
taaatttaaaaaatattcag

SEQ ID NO: 56240 - DNA, 20 bp, Artificial Sequence
  Synthetic oligonucleotide; AGG chr11 5156630 5156649 5156633 -
aaatttaaaaaatattcagt

SEQ ID NO: 56241 - DNA, 20 bp, Artificial Sequence
  Synthetic oligonucleotide; CGG chr11 5156626 5156645 5156629 -
ttaaaaaatattcagtaggc

SEQ ID NO: 56242 - DNA, 20 bp, Artificial Sequence
  Synthetic oligonucleotide; GGG chr11 5156625 5156644 5156628 -
taaaaaatattcagtaggcc

SEQ ID NO: 56243 - DNA, 20 bp, Artificial Sequence
  Synthetic oligonucleotide; CAG chr11 5156620 5156639 5156623 -
aatattcagtaggccgggtg

SEQ ID NO: 56244 - DNA, 20 bp, Artificial Sequence
  Synthetic oligonucleotide; TGG chr11 5156617 5156636 5156620 -
attcagtaggccgggtgcag

SEQ ID NO: 56245 - DNA, 20 bp, Artificial Sequence
  Synthetic oligonucleotide; CAG chr11 5156598 5156617 5156601 -
gtggctcacgcctgtgatcc

SEQ ID NO: 56246 - DNA, 20 bp, Artificial Sequence
  Synthetic oligonucleotide; TGG chr11 5156590 5156609 5156593 -
cgcctgtgatcccagcactt

SEQ ID NO: 56247 - DNA, 20 bp, Artificial Sequence
  Synthetic oligonucleotide; GGG chr11 5156589 5156608 5156592 -
gcctgtgatcccagcacttt

SEQ ID NO: 56248 - DNA, 20 bp, Artificial Sequence
  Synthetic oligonucleotide; GAG chr11 5156587 5156606 5156590 -
ctgtgatcccagcactttgg

SEQ ID NO: 56249 - DNA, 20 bp, Artificial Sequence
  Synthetic oligonucleotide; AGG chr11 5156586 5156605 5156589 -
tgtgatcccagcactttggg

SEQ ID NO: 56250 - DNA, 20 bp, Artificial Sequence
  Synthetic oligonucleotide; CGG chr11 5156583 5156602 5156586 -
gatcccagcactttgggagg

SEQ ID NO: 56251 - DNA, 20 bp, Artificial Sequence
  Synthetic oligonucleotide; GAG chr11 5156581 5156600 5156584 -
tcccagcactttgggaggcg

SEQ ID NO: 56252 - DNA, 20 bp, Artificial Sequence
  Synthetic oligonucleotide; AGG chr11 5156580 5156599 5156583 -
cccagcactttgggaggcgg

SEQ ID NO: 56253 - DNA, 20 bp, Artificial Sequence
  Synthetic oligonucleotide; CGG chr11 5156577 5156596 5156580 -
agcactttgggaggcggagg

SEQ ID NO: 56254 - DNA, 20 bp, Artificial Sequence
  Synthetic oligonucleotide; GGG chr11 5156576 5156595 5156579 -
gcactttgggaggcggaggc

SEQ ID NO: 56255 - DNA, 20 bp, Artificial Sequence
  Synthetic oligonucleotide; TGG chr11 5156573 5156592 5156576 -
ctttgggaggcggaggcggg

SEQ ID NO: 56256 - DNA, 20 bp, Artificial Sequence
  Synthetic oligonucleotide; GAG chr11 5156565 5156584 5156568 -
ggcggaggcgggtggatcac

SEQ ID NO: 56257 - DNA, 20 bp, Artificial Sequence
  Synthetic oligonucleotide; AGG chr11 5156564 5156583 5156567 -
gcggaggcgggtggatcacg

SEQ ID NO: 56258 - DNA, 20 bp, Artificial Sequence
  Synthetic oligonucleotide; GAG chr11 5156557 5156576 5156560 -
cgggtggatcacgaggtcgc

SEQ ID NO: 56259 - DNA, 20 bp, Artificial Sequence
  Synthetic oligonucleotide; GAG chr11 5156551 5156570 5156554 -
gatcacgaggtcgcgagatc

SEQ ID NO: 56260 - DNA, 20 bp, Artificial Sequence
  Synthetic oligonucleotide; TGG chr11 5156541 5156560 5156544 -
tcgcgagatcgagaccatcc

SEQ ID NO: 56261 - DNA, 20 bp, Artificial Sequence
  Synthetic oligonucleotide; CAG chr11 5156532 5156551 5156535 -
cgagaccatcctggctaaca

SEQ ID NO: 56262 - DNA, 20 bp, Artificial Sequence
  Synthetic oligonucleotide; TAG chr11 5156494 5156513 5156497 -
actaaaaaaatacaaaaaat

SEQ ID NO: 56263 - DNA, 20 bp, Artificial Sequence
  Synthetic oligonucleotide; CGG chr11 5156490 5156509 5156493 -
aaaaaatacaaaaaattagc

SEQ ID NO: 56264 - DNA, 20 bp, Artificial Sequence
  Synthetic oligonucleotide; GGG chr11 5156489 5156508 5156492 -
aaaaatacaaaaaattagcc

SEQ ID NO: 56265 - DNA, 20 bp, Artificial Sequence
  Synthetic oligonucleotide; TGG chr11 5156484 5156503 5156487 -
tacaaaaaattagccgggct

SEQ ID NO: 56266 - DNA, 20 bp, Artificial Sequence
  Synthetic oligonucleotide; TGG chr11 5156481 5156500 5156484 -
aaaaaattagccgggcttgg

SEQ ID NO: 56267 - DNA, 20 bp, Artificial Sequence
  Synthetic oligonucleotide; CGG chr11 5156478 5156497 5156481 -
aaattagccgggcttggtgg

SEQ ID NO: 56268 - DNA, 20 bp, Artificial Sequence
  Synthetic oligonucleotide; GGG chr11 5156477 5156496 5156480 -
aattagccgggcttggtggc

SEQ ID NO: 56269 - DNA, 20 bp, Artificial Sequence
  Synthetic oligonucleotide; TAG chr11 5156468 5156487 5156471 -
ggcttggtggcgggtgcctg

SEQ ID NO: 56270 - DNA, 20 bp, Artificial Sequence
  Synthetic oligonucleotide; CAG chr11 5156462 5156481 5156465 -
gtggcgggtgcctgtagtcc

SEQ ID NO: 56271 - DNA, 20 bp, Artificial Sequence
  Synthetic oligonucleotide; TGG chr11 5156453 5156472 5156456 -
gcctgtagtcccagctacta

SEQ ID NO: 56272 - DNA, 20 bp, Artificial Sequence
  Synthetic oligonucleotide; GAG chr11 5156451 5156470 5156454 -
ctgtagtcccagctactatg

SEQ ID NO: 56273 - DNA, 20 bp, Artificial Sequence
  Synthetic oligonucleotide; AGG chr11 5156450 5156469 5156453 -
tgtagtcccagctactatgg

SEQ ID NO: 56274 - DNA, 20 bp, Artificial Sequence
  Synthetic oligonucleotide; GAG chr11 5156445 5156464 5156448 -
tcccagctactatggaggct

SEQ ID NO: 56275 - DNA, 20 bp, Artificial Sequence
  Synthetic oligonucleotide; AGG chr11 5156444 5156463 5156447 -
cccagctactatggaggctg

SEQ ID NO: 56276 - DNA, 20 bp, Artificial Sequence
  Synthetic oligonucleotide; CGG chr11 5156441 5156460 5156444 -
agctactatggaggctgagg

SEQ ID NO: 56277 - DNA, 20 bp, Artificial Sequence
  Synthetic oligonucleotide; GGG chr11 5156440 5156459 5156443 -
gctactatggaggctgaggc

SEQ ID NO: 56278 - DNA, 20 bp, Artificial Sequence
  Synthetic oligonucleotide; GAG chr11 5156438 5156457 5156441 -
tactatggaggctgaggcgg

SEQ ID NO: 56279 - DNA, 20 bp, Artificial Sequence
  Synthetic oligonucleotide; TGG chr11 5156433 5156452 5156436 -
tggaggctgaggcgggagaa

SEQ ID NO: 56280 - DNA, 20 bp, Artificial Sequence
  Synthetic oligonucleotide; CGG chr11 5156422 5156441 5156425 -
gcgggagaatggcgtgaacg

SEQ ID NO: 56281 - DNA, 20 bp, Artificial Sequence
  Synthetic oligonucleotide; GGG chr11 5156421 5156440 5156424 -
cgggagaatggcgtgaacgc

SEQ ID NO: 56282 - DNA, 20 bp, Artificial Sequence
  Synthetic oligonucleotide; GGG chr11 5156420 5156439 5156423 -
gggagaatggcgtgaacgcg

SEQ ID NO: 56283 - DNA, 20 bp, Artificial Sequence
  Synthetic oligonucleotide; GGG chr11 5156419 5156438 5156422 -
ggagaatggcgtgaacgcgg

SEQ ID NO: 56284 - DNA, 20 bp, Artificial Sequence
  Synthetic oligonucleotide; GGG chr11 5156418 5156437 5156421 -
gagaatggcgtgaacgcggg

SEQ ID NO: 56285 - DNA, 20 bp, Artificial Sequence
  Synthetic oligonucleotide; CGG chr11 5156415 5156434 5156418 -
aatggcgtgaacgcgggggg

SEQ ID NO: 56286 - DNA, 20 bp, Artificial Sequence
  Synthetic oligonucleotide; GAG chr11 5156413 5156432 5156416 -
tggcgtgaacgcggggggcg

SEQ ID NO: 56287 - DNA, 20 bp, Artificial Sequence
  Synthetic oligonucleotide; CAG chr11 5156406 5156425 5156409 -
aacgcggggggcggagcttg

SEQ ID NO: 56288 - DNA, 20 bp, Artificial Sequence
  Synthetic oligonucleotide; GAG chr11 5156402 5156421 5156405 -
cggggggcggagcttgcagt

SEQ ID NO: 56289 - DNA, 20 bp, Artificial Sequence
  Synthetic oligonucleotide; CAG chr11 5156399 5156418 5156402 -
ggggcggagcttgcagtgag

SEQ ID NO: 56290 - DNA, 20 bp, Artificial Sequence
  Synthetic oligonucleotide; GAG chr11 5156397 5156416 5156400 -
ggcggagcttgcagtgagca

SEQ ID NO: 56291 - DNA, 20 bp, Artificial Sequence
  Synthetic oligonucleotide; CAG chr11 5156392 5156411 5156395 -
agcttgcagtgagcagagat

SEQ ID NO: 56292 - DNA, 20 bp, Artificial Sequence
  Synthetic oligonucleotide; AGG chr11 5156391 5156410 5156394 -
gcttgcagtgagcagagatc

SEQ ID NO: 56293 - DNA, 20 bp, Artificial Sequence
  Synthetic oligonucleotide; GGG chr11 5156390 5156409 5156393 -
cttgcagtgagcagagatca

SEQ ID NO: 56294 - DNA, 20 bp, Artificial Sequence
  Synthetic oligonucleotide; GGG chr11 5156389 5156408 5156392 -
ttgcagtgagcagagatcag

SEQ ID NO: 56295 - DNA, 20 bp, Artificial Sequence
  Synthetic oligonucleotide; CAG chr11 5156375 5156394 5156378 -
gatcaggggccactgcactc

SEQ ID NO: 56296 - DNA, 20 bp, Artificial Sequence
  Synthetic oligonucleotide; TGG chr11 5156370 5156389 5156373 -
ggggccactgcactccagcc

SEQ ID NO: 56297 - DNA, 20 bp, Artificial Sequence
  Synthetic oligonucleotide; GGG chr11 5156369 5156388 5156372 -
gggccactgcactccagcct

SEQ ID NO: 56298 - DNA, 20 bp, Artificial Sequence
  Synthetic oligonucleotide; CAG chr11 5156363 5156382 5156366 -
ctgcactccagcctgggcga

SEQ ID NO: 56299 - DNA, 20 bp, Artificial Sequence
  Synthetic oligonucleotide; GAG chr11 5156361 5156380 5156364 -
gcactccagcctgggcgaca

SEQ ID NO: 56300 - DNA, 20 bp, Artificial Sequence
  Synthetic oligonucleotide; GAG chr11 5156359 5156378 5156362 -
actccagcctgggcgacaga

SEQ ID NO: 56301 - DNA, 20 bp, Artificial Sequence
  Synthetic oligonucleotide; GAG chr11 5156357 5156376 5156360 -
tccagcctgggcgacagaga

SEQ ID NO: 56302 - DNA, 20 bp, Artificial Sequence
  Synthetic oligonucleotide; AAG chr11 5156338 5156357 5156341 -
agagactctgtctcaaaaaa

SEQ ID NO: 56303 - DNA, 20 bp, Artificial Sequence
  Synthetic oligonucleotide; TAG chr11 5156323 5156342 5156326 -
aaaaaaagaaaaaaaaaatt

SEQ ID NO: 56304 - DNA, 20 bp, Artificial Sequence
  Synthetic oligonucleotide; TAG chr11 5156320 5156339 5156323 -
aaaagaaaaaaaaaatttag

SEQ ID NO: 56305 - DNA, 20 bp, Artificial Sequence
  Synthetic oligonucleotide; TAG chr11 5156315 5156334 5156318 -
aaaaaaaaaatttagtagac

SEQ ID NO: 56306 - DNA, 20 bp, Artificial Sequence
  Synthetic oligonucleotide; CAG chr11 5156301 5156320 5156304 -
gtagactagctaaaaaaatc

SEQ ID NO: 56307 - DNA, 20 bp, Artificial Sequence
  Synthetic oligonucleotide; GAG chr11 5156299 5156318 5156302 -
agactagctaaaaaaatcca

SEQ ID NO: 56308 - DNA, 20 bp, Artificial Sequence
  Synthetic oligonucleotide; TAG chr11 5156295 5156314 5156298 -
tagctaaaaaaatccagaga

SEQ ID NO: 56309 - DNA, 20 bp, Artificial Sequence
  Synthetic oligonucleotide; AAG chr11 5156274 5156293 5156277 -
agttattgatgcatatgtaa

SEQ ID NO: 56310 - DNA, 20 bp, Artificial Sequence
  Synthetic oligonucleotide; AAG chr11 5156256 5156275 5156259 -
aaaagtcttccaatatttac

SEQ ID NO: 56311 - DNA, 20 bp, Artificial Sequence
  Synthetic oligonucleotide; AAG chr11 5156225 5156244 5156228 -
aaaaaaaataaccttgaatt

SEQ ID NO: 56312 - DNA, 20 bp, Artificial Sequence
  Synthetic oligonucleotide; TAG chr11 5156220 5156239 5156223 -
aaataaccttgaattaagtg

SEQ ID NO: 56313 - DNA, 20 bp, Artificial Sequence
  Synthetic oligonucleotide; AAG chr11 5156197 5156216 5156200 -
aactcattgacaatgtttca

SEQ ID NO: 56314 - DNA, 20 bp, Artificial Sequence
  Synthetic oligonucleotide; AGG chr11 5156196 5156215 5156199 -
actcattgacaatgtttcaa

SEQ ID NO: 56315 - DNA, 20 bp, Artificial Sequence
  Synthetic oligonucleotide; GAG chr11 5156189 5156208 5156192 -
gacaatgtttcaaaggatgt

SEQ ID NO: 56316 - DNA, 20 bp, Artificial Sequence
  Synthetic oligonucleotide; AGG chr11 5156188 5156207 5156191 -
acaatgtttcaaaggatgtg

SEQ ID NO: 56317 - DNA, 20 bp, Artificial Sequence
  Synthetic oligonucleotide; GGG chr11 5156187 5156206 5156190 -
caatgtttcaaaggatgtga

SEQ ID NO: 56318 - DNA, 20 bp, Artificial Sequence
  Synthetic oligonucleotide; TGG chr11 5156171 5156190 5156174 -
gtgagggataaactaaaatt

SEQ ID NO: 56319 - DNA, 20 bp, Artificial Sequence
  Synthetic oligonucleotide; GGG chr11 5156170 5156189 5156173 -
tgagggataaactaaaattt

SEQ ID NO: 56320 - DNA, 20 bp, Artificial Sequence
  Synthetic oligonucleotide; CAG chr11 5156167 5156186 5156170 -
gggataaactaaaatttggg

SEQ ID NO: 56321 - DNA, 20 bp, Artificial Sequence
  Synthetic oligonucleotide; TGG chr11 5156143 5156162 5156146 -
acatgctgttcctgtgtact

SEQ ID NO: 56322 - DNA, 20 bp, Artificial Sequence
  Synthetic oligonucleotide; CAG chr11 5156138 5156157 5156141 -
ctgttcctgtgtacttggaa

SEQ ID NO: 56323 - DNA, 20 bp, Artificial Sequence
  Synthetic oligonucleotide; GAG chr11 5156136 5156155 5156139 -
gttcctgtgtacttggaaca

SEQ ID NO: 56324 - DNA, 20 bp, Artificial Sequence
  Synthetic oligonucleotide; AGG chr11 5156135 5156154 5156138 -
ttcctgtgtacttggaacag

SEQ ID NO: 56325 - DNA, 20 bp, Artificial Sequence
  Synthetic oligonucleotide; GGG chr11 5156134 5156153 5156137 -
tcctgtgtacttggaacaga

SEQ ID NO: 56326 - DNA, 20 bp, Artificial Sequence
  Synthetic oligonucleotide; GAG chr11 5156132 5156151 5156135 -
ctgtgtacttggaacagagg

SEQ ID NO: 56327 - DNA, 20 bp, Artificial Sequence
  Synthetic oligonucleotide; TGG chr11 5156123 5156142 5156126 -
tggaacagagggagaaaatc

SEQ ID NO: 56328 - DNA, 20 bp, Artificial Sequence
  Synthetic oligonucleotide; GGG chr11 5156122 5156141 5156125 -
ggaacagagggagaaaatct

SEQ ID NO: 56329 - DNA, 20 bp, Artificial Sequence
  Synthetic oligonucleotide; TGG chr11 5156118 5156137 5156121 -
cagagggagaaaatctgggc

SEQ ID NO: 56330 - DNA, 20 bp, Artificial Sequence
  Synthetic oligonucleotide; TAG chr11 5156104 5156123 5156107 -
ctgggctggaaatattgtta

SEQ ID NO: 56331 - DNA, 20 bp, Artificial Sequence
  Synthetic oligonucleotide; AGG chr11 5156103 5156122 5156106 -
tgggctggaaatattgttat

SEQ ID NO: 56332 - DNA, 20 bp, Artificial Sequence
  Synthetic oligonucleotide; GAG chr11 5156101 5156120 5156104 -
ggctggaaatattgttatag

SEQ ID NO: 56333 - DNA, 20 bp, Artificial Sequence
  Synthetic oligonucleotide; TAG chr11 5156097 5156116 5156100 -
ggaaatattgttataggagt

SEQ ID NO: 56334 - DNA, 20 bp, Artificial Sequence
  Synthetic oligonucleotide; AAG chr11 5156088 5156107 5156091 -
gttataggagttagcacatg

SEQ ID NO: 56335 - DNA, 20 bp, Artificial Sequence
  Synthetic oligonucleotide; AGG chr11 5156087 5156106 5156090 -
ttataggagttagcacatga

SEQ ID NO: 56336 - DNA, 20 bp, Artificial Sequence
  Synthetic oligonucleotide; TGG chr11 5156068 5156087 5156071 -
aaggtgacaactaaattatt

SEQ ID NO: 56337 - DNA, 20 bp, Artificial Sequence
  Synthetic oligonucleotide; GAG chr11 5156066 5156085 5156069 -
ggtgacaactaaattatttg

SEQ ID NO: 56338 - DNA, 20 bp, Artificial Sequence
  Synthetic oligonucleotide; TAG chr11 5156063 5156082 5156066 -
gacaactaaattatttggag

SEQ ID NO: 56339 - DNA, 20 bp, Artificial Sequence
  Synthetic oligonucleotide; TGG chr11 5156059 5156078 5156062 -
actaaattatttggagtaga

SEQ ID NO: 56340 - DNA, 20 bp, Artificial Sequence
  Synthetic oligonucleotide; GAG chr11 5156057 5156076 5156060 -
taaattatttggagtagatg

SEQ ID NO: 56341 - DNA, 20 bp, Artificial Sequence
  Synthetic oligonucleotide; CAG chr11 5156050 5156069 5156053 -
tttggagtagatggagtcac

SEQ ID NO: 56342 - DNA, 20 bp, Artificial Sequence
  Synthetic oligonucleotide; TAG chr11 5156037 5156056 5156040 -
gagtcaccagcacatgtgaa

SEQ ID NO: 56343 - DNA, 20 bp, Artificial Sequence
  Synthetic oligonucleotide; TAG chr11 5156031 5156050 5156034 -
ccagcacatgtgaatagttt

SEQ ID NO: 56344 - DNA, 20 bp, Artificial Sequence
  Synthetic oligonucleotide; AAG chr11 5156015 5156034 5156018 -
gttttagaatgaaatgaccc

SEQ ID NO: 56345 - DNA, 20 bp, Artificial Sequence
  Synthetic oligonucleotide; TAG chr11 5156011 5156030 5156014 -
tagaatgaaatgacccaaga

SEQ ID NO: 56346 - DNA, 20 bp, Artificial Sequence
  Synthetic oligonucleotide; TGG chr11 5156003 5156022 5156006 -
aatgacccaagatagaactt

SEQ ID NO: 56347 - DNA, 20 bp, Artificial Sequence
  Synthetic oligonucleotide; GAG chr11 5156001 5156020 5156004 -
tgacccaagatagaactttg

SEQ ID NO: 56348 - DNA, 20 bp, Artificial Sequence
  Synthetic oligonucleotide; GAG chr11 5155999 5156018 5156002 -
acccaagatagaactttgga

SEQ ID NO: 56349 - DNA, 20 bp, Artificial Sequence
  Synthetic oligonucleotide; CAG chr11 5155976 5155995 5155979 -
cccccaaatttaaataaaat

SEQ ID NO: 56350 - DNA, 20 bp, Artificial Sequence
  Synthetic oligonucleotide; AAG chr11 5155970 5155989 5155973 -
aatttaaataaaatcagtat

SEQ ID NO: 56351 - DNA, 20 bp, Artificial Sequence
  Synthetic oligonucleotide; GAG chr11 5155968 5155987 5155971 -
tttaaataaaatcagtataa

SEQ ID NO: 56352 - DNA, 20 bp, Artificial Sequence
  Synthetic oligonucleotide; AAG chr11 5155965 5155984 5155968 -
aaataaaatcagtataagag

SEQ ID NO: 56353 - DNA, 20 bp, Artificial Sequence
  Synthetic oligonucleotide; GAG chr11 5155963 5155982 5155966 -
ataaaatcagtataagagaa

SEQ ID NO: 56354 - DNA, 20 bp, Artificial Sequence
  Synthetic oligonucleotide; AGG chr11 5155962 5155981 5155965 -
taaaatcagtataagagaag

SEQ ID NO: 56355 - DNA, 20 bp, Artificial Sequence
  Synthetic oligonucleotide; AAG chr11 5155959 5155978 5155962 -
aatcagtataagagaagagg

SEQ ID NO: 56356 - DNA, 20 bp, Artificial Sequence
  Synthetic oligonucleotide; TGG chr11 5155948 5155967 5155951 -
gagaagaggaagaaaccaaa

SEQ ID NO: 56357 - DNA, 20 bp, Artificial Sequence
  Synthetic oligonucleotide; TAG chr11 5155940 5155959 5155943 -
gaagaaaccaaatggtatac

SEQ ID NO: 56358 - DNA, 20 bp, Artificial Sequence
  Synthetic oligonucleotide; TAG chr11 5155923 5155942 5155926 -
tactagtctaaattgtttct

SEQ ID NO: 56359 - DNA, 20 bp, Artificial Sequence
  Synthetic oligonucleotide; AAG chr11 5155914 5155933 5155917 -
aaattgtttcttagtgacaa

SEQ ID NO: 56360 - DNA, 20 bp, Artificial Sequence
  Synthetic oligonucleotide; TAG chr11 5155897 5155916 5155900 -
caaaagaataacctgaatat

SEQ ID NO: 56361 - DNA, 20 bp, Artificial Sequence
  Synthetic oligonucleotide; TAG chr11 5155892 5155911 5155895 -
gaataacctgaatattagat

SEQ ID NO: 56362 - DNA, 20 bp, Artificial Sequence
  Synthetic oligonucleotide; CAG chr11 5155848 5155867 5155851 -
caatttcattcaacatgcaa

SEQ ID NO: 56363 - DNA, 20 bp, Artificial Sequence
  Synthetic oligonucleotide; CAG chr11 5155822 5155841 5155825 -
tattgttttatgctccttca

SEQ ID NO: 56364 - DNA, 20 bp, Artificial Sequence
  Synthetic oligonucleotide; GAG chr11 5155820 5155839 5155823 -
ttgttttatgctccttcaca

SEQ ID NO: 56365 - DNA, 20 bp, Artificial Sequence
  Synthetic oligonucleotide; AGG chr11 5155819 5155838 5155822 -
tgttttatgctccttcacag

SEQ ID NO: 56366 - DNA, 20 bp, Artificial Sequence
  Synthetic oligonucleotide; TGG chr11 5155810 5155829 5155813 -
ctccttcacagaggaaattc

SEQ ID NO: 56367 - DNA, 20 bp, Artificial Sequence
  Synthetic oligonucleotide; AAG chr11 5155806 5155825 5155809 -
ttcacagaggaaattctgga

SEQ ID NO: 56368 - DNA, 20 bp, Artificial Sequence
  Synthetic oligonucleotide; GAG chr11 5155804 5155823 5155807 -
cacagaggaaattctggaaa

SEQ ID NO: 56369 - DNA, 20 bp, Artificial Sequence
  Synthetic oligonucleotide; TGG chr11 5155797 5155816 5155800 -
gaaattctggaaagagcaca

SEQ ID NO: 56370 - DNA, 20 bp, Artificial Sequence
  Synthetic oligonucleotide; GGG chr11 5155796 5155815 5155799 -
aaattctggaaagagcacat

SEQ ID NO: 56371 - DNA, 20 bp, Artificial Sequence
  Synthetic oligonucleotide; GGG chr11 5155795 5155814 5155798 -
aattctggaaagagcacatg

SEQ ID NO: 56372 - DNA, 20 bp, Artificial Sequence
  Synthetic oligonucleotide; TGG chr11 5155758 5155777 5155761 -
atctgtattccttgttctcc

SEQ ID NO: 56373 - DNA, 20 bp, Artificial Sequence
  Synthetic oligonucleotide; TAG chr11 5155728 5155747 5155731 -
ttataaatattctccaccat

SEQ ID NO: 56374 - DNA, 20 bp, Artificial Sequence
  Synthetic oligonucleotide; AAG chr11 5155687 5155706 5155690 -
caatgtctaaacattatatc

SEQ ID NO: 56375 - DNA, 20 bp, Artificial Sequence
  Synthetic oligonucleotide; TAG chr11 5155677 5155696 5155680 -
acattatatcaagtgtctct

SEQ ID NO: 56376 - DNA, 20 bp, Artificial Sequence
  Synthetic oligonucleotide; AAG chr11 5155666 5155685 5155669 -
agtgtctcttagctacattc

SEQ ID NO: 56377 - DNA, 20 bp, Artificial Sequence
  Synthetic oligonucleotide; AAG chr11 5155662 5155681 5155665 -
tctcttagctacattcaaga

SEQ ID NO: 56378 - DNA, 20 bp, Artificial Sequence
  Synthetic oligonucleotide; TAG chr11 5155657 5155676 5155660 -
tagctacattcaagaaagcc

SEQ ID NO: 56379 - DNA, 20 bp, Artificial Sequence
  Synthetic oligonucleotide; CAG chr11 5155650 5155669 5155653 -
attcaagaaagcctagaaac

SEQ ID NO: 56380 - DNA, 20 bp, Artificial Sequence
  Synthetic oligonucleotide; AAG chr11 5155635 5155654 5155638 -
gaaaccagctgtaaaatgtc

SEQ ID NO: 56381 - DNA, 20 bp, Artificial Sequence
  Synthetic oligonucleotide; AGG chr11 5155634 5155653 5155637 -
aaaccagctgtaaaatgtca

SEQ ID NO: 56382 - DNA, 20 bp, Artificial Sequence
  Synthetic oligonucleotide; GAG chr11 5155632 5155651 5155635 -
accagctgtaaaatgtcaag

SEQ ID NO: 56383 - DNA, 20 bp, Artificial Sequence
  Synthetic oligonucleotide; TAG chr11 5155627 5155646 5155630 -
ctgtaaaatgtcaaggagaa

SEQ ID NO: 56384 - DNA, 20 bp, Artificial Sequence
  Synthetic oligonucleotide; AAG chr11 5155612 5155631 5155615 -
gagaatagtgtcatatgcat

SEQ ID NO: 56385 - DNA, 20 bp, Artificial Sequence
  Synthetic oligonucleotide; TAG chr11 5155602 5155621 5155605 -
tcatatgcataagtcttgct

SEQ ID NO: 56386 - DNA, 20 bp, Artificial Sequence
  Synthetic oligonucleotide; CAG chr11 5155592 5155611 5155595 -
aagtcttgcttagaatttat

SEQ ID NO: 56387 - DNA, 20 bp, Artificial Sequence
  Synthetic oligonucleotide; AAG chr11 5155534 5155553 5155537 -
cccattttactaataattta

SEQ ID NO: 56388 - DNA, 20 bp, Artificial Sequence
  Synthetic oligonucleotide; AGG chr11 5155533 5155552 5155536 -
ccattttactaataatttaa

SEQ ID NO: 56389 - DNA, 20 bp, Artificial Sequence
  Synthetic oligonucleotide; AAG chr11 5155529 5155548 5155532 -
tttactaataatttaaaggt

SEQ ID NO: 56390 - DNA, 20 bp, Artificial Sequence
  Synthetic oligonucleotide; TAG chr11 5155503 5155522 5155506 -
ataatttttttcatttcatt

SEQ ID NO: 56391 - DNA, 20 bp, Artificial Sequence
  Synthetic oligonucleotide; TAG chr11 5155476 5155495 5155479 -
tataacatctcactcataaa

SEQ ID NO: 56392 - DNA, 20 bp, Artificial Sequence
  Synthetic oligonucleotide; TAG chr11 5155473 5155492 5155476 -
aacatctcactcataaatag

SEQ ID NO: 56393 - DNA, 20 bp, Artificial Sequence
  Synthetic oligonucleotide; AGG chr11 5155472 5155491 5155475 -
acatctcactcataaatagt

SEQ ID NO: 56394 - DNA, 20 bp, Artificial Sequence
  Synthetic oligonucleotide; AAG chr11 5155448 5155467 5155451 -
atataatgactgttttttga

SEQ ID NO: 56395 - DNA, 20 bp, Artificial Sequence
  Synthetic oligonucleotide; AAG chr11 5155442 5155461 5155445 -
tgactgttttttgaaagaaa

SEQ ID NO: 56396 - DNA, 20 bp, Artificial Sequence
  Synthetic oligonucleotide; AAG chr11 5155439 5155458 5155442 -
ctgttttttgaaagaaaaag

SEQ ID NO: 56397 - DNA, 20 bp, Artificial Sequence
  Synthetic oligonucleotide; AGG chr11 5155438 5155457 5155441 -
tgttttttgaaagaaaaaga

SEQ ID NO: 56398 - DNA, 20 bp, Artificial Sequence
  Synthetic oligonucleotide; AAG chr11 5155435 5155454 5155438 -
tttttgaaagaaaaagaagg

SEQ ID NO: 56399 - DNA, 20 bp, Artificial Sequence
  Synthetic oligonucleotide; AGG chr11 5155434 5155453 5155437 -
ttttgaaagaaaaagaagga

SEQ ID NO: 56400 - DNA, 20 bp, Artificial Sequence
  Synthetic oligonucleotide; AAG chr11 5155430 5155449 5155433 -
gaaagaaaaagaaggaagga

SEQ ID NO: 56401 - DNA, 20 bp, Artificial Sequence
  Synthetic oligonucleotide; AAG chr11 5155423 5155442 5155426 -
aaagaaggaaggaaagtaac

SEQ ID NO: 56402 - DNA, 20 bp, Artificial Sequence
  Synthetic oligonucleotide; AGG chr11 5155422 5155441 5155425 -
aagaaggaaggaaagtaaca

SEQ ID NO: 56403 - DNA, 20 bp, Artificial Sequence
  Synthetic oligonucleotide; AAG chr11 5155419 5155438 5155422 -
aaggaaggaaagtaacaagg

SEQ ID NO: 56404 - DNA, 20 bp, Artificial Sequence
  Synthetic oligonucleotide; AAG chr11 5155415 5155434 5155418 -
aaggaaagtaacaaggaaga

SEQ ID NO: 56405 - DNA, 20 bp, Artificial Sequence
  Synthetic oligonucleotide; GAG chr11 5155413 5155432 5155416 -
ggaaagtaacaaggaagaaa

SEQ ID NO: 56406 - DNA, 20 bp, Artificial Sequence
  Synthetic oligonucleotide; GAG chr11 5155411 5155430 5155414 -
aaagtaacaaggaagaaaga

SEQ ID NO: 56407 - DNA, 20 bp, Artificial Sequence
  Synthetic oligonucleotide; AAG chr11 5155406 5155425 5155409 -
aacaaggaagaaagagagaa

SEQ ID NO: 56408 - DNA, 20 bp, Artificial Sequence
  Synthetic oligonucleotide; GAG chr11 5155404 5155423 5155407 -
caaggaagaaagagagaaaa

SEQ ID NO: 56409 - DNA, 20 bp, Artificial Sequence
  Synthetic oligonucleotide; AGG chr11 5155403 5155422 5155406 -
aaggaagaaagagagaaaag

SEQ ID NO: 56410 - DNA, 20 bp, Artificial Sequence
  Synthetic oligonucleotide; TGG chr11 5155397 5155416 5155400 -
gaaagagagaaaagaggaaa

SEQ ID NO: 56411 - DNA, 20 bp, Artificial Sequence
  Synthetic oligonucleotide; CAG chr11 5155390 5155409 5155393 -
agaaaagaggaaatggatac

SEQ ID NO: 56412 - DNA, 20 bp, Artificial Sequence
  Synthetic oligonucleotide; CAG chr11 5155359 5155378 5155362 -
aatgttcaacaacttgcttc

SEQ ID NO: 56413 - DNA, 20 bp, Artificial Sequence
  Synthetic oligonucleotide; TAG chr11 5155345 5155364 5155348 -
tgcttccagctttacatttg

SEQ ID NO: 56414 - DNA, 20 bp, Artificial Sequence
  Synthetic oligonucleotide; AGG chr11 5155344 5155363 5155347 -
gcttccagctttacatttgt

SEQ ID NO: 56415 - DNA, 20 bp, Artificial Sequence
  Synthetic oligonucleotide; TAG chr11 5155338 5155357 5155341 -
agctttacatttgtaggact

SEQ ID NO: 56416 - DNA, 20 bp, Artificial Sequence
  Synthetic oligonucleotide; AAG chr11 5155309 5155328 5155312 -
ccattataatttgtcactat

SEQ ID NO: 56417 - DNA, 20 bp, Artificial Sequence
  Synthetic oligonucleotide; AAG chr11 5155286 5155305 5155289 -
aatgttacttaatttactaa

SEQ ID NO: 56418 - DNA, 20 bp, Artificial Sequence
  Synthetic oligonucleotide; TGG chr11 5155257 5155276 5155260 -
aaaacttcaataaaataaaa

SEQ ID NO: 56419 - DNA, 20 bp, Artificial Sequence
  Synthetic oligonucleotide; GGG chr11 5155256 5155275 5155259 -
aaacttcaataaaataaaat

SEQ ID NO: 56420 - DNA, 20 bp, Artificial Sequence
  Synthetic oligonucleotide; AAG chr11 5155253 5155272 5155256 -
cttcaataaaataaaatggg

SEQ ID NO: 56421 - DNA, 20 bp, Artificial Sequence
  Synthetic oligonucleotide; GAG chr11 5155247 5155266 5155250 -
taaaataaaatgggaagaat

SEQ ID NO: 56422 - DNA, 20 bp, Artificial Sequence
  Synthetic oligonucleotide; AAG chr11 5155240 5155259 5155243 -
aaatgggaagaatgagactg

SEQ ID NO: 56423 - DNA, 20 bp, Artificial Sequence
  Synthetic oligonucleotide; AAG chr11 5155237 5155256 5155240 -
tgggaagaatgagactgaag

SEQ ID NO: 56424 - DNA, 20 bp, Artificial Sequence
  Synthetic oligonucleotide; GAG chr11 5155231 5155250 5155234 -
gaatgagactgaagaagact

SEQ ID NO: 56425 - DNA, 20 bp, Artificial Sequence
  Synthetic oligonucleotide; AGG chr11 5155230 5155249 5155233 -
aatgagactgaagaagactg

SEQ ID NO: 56426 - DNA, 20 bp, Artificial Sequence
  Synthetic oligonucleotide; AAG chr11 5155227 5155246 5155230 -
gagactgaagaagactgagg

SEQ ID NO: 56427 - DNA, 20 bp, Artificial Sequence
  Synthetic oligonucleotide; TGG chr11 5155216 5155235 5155219 -
agactgaggaagtaattgtg

SEQ ID NO: 56428 - DNA, 20 bp, Artificial Sequence
  Synthetic oligonucleotide; AAG chr11 5155209 5155228 5155212 -
ggaagtaattgtgtggtaaa

SEQ ID NO: 56429 - DNA, 20 bp, Artificial Sequence
  Synthetic oligonucleotide; TAG chr11 5155206 5155225 5155209 -
agtaattgtgtggtaaaaag

SEQ ID NO: 56430 - DNA, 20 bp, Artificial Sequence
  Synthetic oligonucleotide; CAG chr11 5155194 5155213 5155197 -
gtaaaaagtagttatgaata

SEQ ID NO: 56431 - DNA, 20 bp, Artificial Sequence
  Synthetic oligonucleotide; AAG chr11 5155171 5155190 5155174 -
atttttcttttctgaataaa

SEQ ID NO: 56432 - DNA, 20 bp, Artificial Sequence
  Synthetic oligonucleotide; GAG chr11 5155169 5155188 5155172 -
ttttcttttctgaataaaaa

SEQ ID NO: 56433 - DNA, 20 bp, Artificial Sequence
  Synthetic oligonucleotide; CAG chr11 5155153 5155172 5155156 -
aaaagagaaaaaccttgcct

SEQ ID NO: 56434 - DNA, 20 bp, Artificial Sequence
  Synthetic oligonucleotide; AAG chr11 5155137 5155156 5155140 -
gcctcagtgaaaatgtcacc

SEQ ID NO: 56435 - DNA, 20 bp, Artificial Sequence
  Synthetic oligonucleotide; TAG chr11 5155121 5155140 5155124 -
caccaagatatttatttaaa

SEQ ID NO: 56436 - DNA, 20 bp, Artificial Sequence
  Synthetic oligonucleotide; AGG chr11 5155120 5155139 5155123 -
accaagatatttatttaaat

SEQ ID NO: 56437 - DNA, 20 bp, Artificial Sequence
  Synthetic oligonucleotide; TGG chr11 5155114 5155133 5155117 -
atatttatttaaataggaat

SEQ ID NO: 56438 - DNA, 20 bp, Artificial Sequence
  Synthetic oligonucleotide; TAG chr11 5155109 5155128 5155112 -
tatttaaataggaattggca

SEQ ID NO: 56439 - DNA, 20 bp, Artificial Sequence
  Synthetic oligonucleotide; TGG chr11 5155088 5155107 5155091 -
agaaacatgtttgcattaaa

SEQ ID NO: 56440 - DNA, 20 bp, Artificial Sequence
  Synthetic oligonucleotide; GGG chr11 5155087 5155106 5155090 -
gaaacatgtttgcattaaat

SEQ ID NO: 56441 - DNA, 20 bp, Artificial Sequence
  Synthetic oligonucleotide; TAG chr11 5155081 5155100 5155084 -
tgtttgcattaaatgggctt

SEQ ID NO: 56442 - DNA, 20 bp, Artificial Sequence
  Synthetic oligonucleotide; TAG chr11 5155067 5155086 5155070 -
gggctttagaattttgcaaa

SEQ ID NO: 56443 - DNA, 20 bp, Artificial Sequence
  Synthetic oligonucleotide; TGG chr11 5155061 5155080 5155064 -
tagaattttgcaaatagaaa

SEQ ID NO: 56444 - DNA, 20 bp, Artificial Sequence
  Synthetic oligonucleotide; CAG chr11 5155058 5155077 5155061 -
aattttgcaaatagaaatgg

SEQ ID NO: 56445 - DNA, 20 bp, Artificial Sequence
  Synthetic oligonucleotide; AAG chr11 5155053 5155072 5155056 -
tgcaaatagaaatggcagaa

SEQ ID NO: 56446 - DNA, 20 bp, Artificial Sequence
  Synthetic oligonucleotide; AGG chr11 5155052 5155071 5155055 -
gcaaatagaaatggcagaaa

SEQ ID NO: 56447 - DNA, 20 bp, Artificial Sequence
  Synthetic oligonucleotide; TAG chr11 5155045 5155064 5155048 -
gaaatggcagaaaaggaaca

SEQ ID NO: 56448 - DNA, 20 bp, Artificial Sequence
  Synthetic oligonucleotide; TAG chr11 5155003 5155022 5155006 -
catatgaattattctgcatt

SEQ ID NO: 56449 - DNA, 20 bp, Artificial Sequence
  Synthetic oligonucleotide; TGG chr11 5154996 5155015 5154999 -
attattctgcatttagcctg

SEQ ID NO: 56450 - DNA, 20 bp, Artificial Sequence
  Synthetic oligonucleotide; GGG chr11 5154995 5155014 5154998 -
ttattctgcatttagcctgt

SEQ ID NO: 56451 - DNA, 20 bp, Artificial Sequence
  Synthetic oligonucleotide; AAG chr11 5154990 5155009 5154993 -
ctgcatttagcctgtgggaa

SEQ ID NO: 56452 - DNA, 20 bp, Artificial Sequence
  Synthetic oligonucleotide; GAG chr11 5154988 5155007 5154991 -
gcatttagcctgtgggaaaa

SEQ ID NO: 56453 - DNA, 20 bp, Artificial Sequence
  Synthetic oligonucleotide; AAG chr11 5154982 5155001 5154985 -
agcctgtgggaaaagagaaa

SEQ ID NO: 56454 - DNA, 20 bp, Artificial Sequence
  Synthetic oligonucleotide; GAG chr11 5154980 5154999 5154983 -
cctgtgggaaaagagaaaaa

SEQ ID NO: 56455 - DNA, 20 bp, Artificial Sequence
  Synthetic oligonucleotide; GAG chr11 5154978 5154997 5154981 -
tgtgggaaaagagaaaaaga

SEQ ID NO: 56456 - DNA, 20 bp, Artificial Sequence
  Synthetic oligonucleotide; AAG chr11 5154974 5154993 5154977 -
ggaaaagagaaaaagagaga

SEQ ID NO: 56457 - DNA, 20 bp, Artificial Sequence
  Synthetic oligonucleotide; AGG chr11 5154973 5154992 5154976 -
gaaaagagaaaaagagagaa

SEQ ID NO: 56458 - DNA, 20 bp, Artificial Sequence
  Synthetic oligonucleotide; GAG chr11 5154971 5154990 5154974 -
aaagagaaaaagagagaaag

SEQ ID NO: 56459 - DNA, 20 bp, Artificial Sequence
  Synthetic oligonucleotide; AAG chr11 5154960 5154979 5154963 -
gagagaaaggagatttctgc

SEQ ID NO: 56460 - DNA, 20 bp, Artificial Sequence
  Synthetic oligonucleotide; TAG chr11 5154955 5154974 5154958 -
aaaggagatttctgcaagtg

SEQ ID NO: 56461 - DNA, 20 bp, Artificial Sequence
  Synthetic oligonucleotide; CGG chr11 5154943 5154962 5154946 -
tgcaagtgtagaaataatta

SEQ ID NO: 56462 - DNA, 20 bp, Artificial Sequence
  Synthetic oligonucleotide; GGG chr11 5154942 5154961 5154945 -
gcaagtgtagaaataattac

SEQ ID NO: 56463 - DNA, 20 bp, Artificial Sequence
  Synthetic oligonucleotide; GGG chr11 5154941 5154960 5154944 -
caagtgtagaaataattacg

SEQ ID NO: 56464 - DNA, 20 bp, Artificial Sequence
  Synthetic oligonucleotide; TAG chr11 5154934 5154953 5154937 -
agaaataattacggggatat

SEQ ID NO: 56465 - DNA, 20 bp, Artificial Sequence
  Synthetic oligonucleotide; AGG chr11 5154933 5154952 5154936 -
gaaataattacggggatatt

SEQ ID NO: 56466 - DNA, 20 bp, Artificial Sequence
  Synthetic oligonucleotide; CAG chr11 5154927 5154946 5154930 -
attacggggatattaggtgc

SEQ ID NO: 56467 - DNA, 20 bp, Artificial Sequence
  Synthetic oligonucleotide; AAG chr11 5154917 5154936 5154920 -
tattaggtgccagtgaaccc

SEQ ID NO: 56468 - DNA, 20 bp, Artificial Sequence
  Synthetic oligonucleotide; GAG chr11 5154915 5154934 5154918 -
ttaggtgccagtgaacccaa

SEQ ID NO: 56469 - DNA, 20 bp, Artificial Sequence
  Synthetic oligonucleotide; AGG chr11 5154914 5154933 5154917 -
taggtgccagtgaacccaag

SEQ ID NO: 56470 - DNA, 20 bp, Artificial Sequence
  Synthetic oligonucleotide; GGG chr11 5154913 5154932 5154916 -
aggtgccagtgaacccaaga

SEQ ID NO: 56471 - DNA, 20 bp, Artificial Sequence
  Synthetic oligonucleotide; TGG chr11 5154894 5154913 5154897 -
agggctgacttaaaatttgc

SEQ ID NO: 56472 - DNA, 20 bp, Artificial Sequence
  Synthetic oligonucleotide; GGG chr11 5154893 5154912 5154896 -
gggctgacttaaaatttgct

SEQ ID NO: 56473 - DNA, 20 bp, Artificial Sequence
  Synthetic oligonucleotide; TGG chr11 5154883 5154902 5154886 -
aaaatttgctgggtccctcg

SEQ ID NO: 56474 - DNA, 20 bp, Artificial Sequence
  Synthetic oligonucleotide; TGG chr11 5154877 5154896 5154880 -
tgctgggtccctcgtggttt

SEQ ID NO: 56475 - DNA, 20 bp, Artificial Sequence
  Synthetic oligonucleotide; TAG chr11 5154866 5154885 5154869 -
tcgtggttttggctatcaac

SEQ ID NO: 56476 - DNA, 20 bp, Artificial Sequence
  Synthetic oligonucleotide; AGG chr11 5154865 5154884 5154868 -
cgtggttttggctatcaact

SEQ ID NO: 56477 - DNA, 20 bp, Artificial Sequence
  Synthetic oligonucleotide; AAG chr11 5154811 5154830 5154814 -
tacttctccacacattcata

SEQ ID NO: 56478 - DNA, 20 bp, Artificial Sequence
  Synthetic oligonucleotide; AGG chr11 5154810 5154829 5154813 -
acttctccacacattcataa

SEQ ID NO: 56479 - DNA, 20 bp, Artificial Sequence
  Synthetic oligonucleotide; TGG chr11 5154797 5154816 5154800 -
ttcataaaggaatattaaat

SEQ ID NO: 56480 - DNA, 20 bp, Artificial Sequence
  Synthetic oligonucleotide; TGG chr11 5154794 5154813 5154797 -
ataaaggaatattaaattgg

SEQ ID NO: 56481 - DNA, 20 bp, Artificial Sequence
  Synthetic oligonucleotide; TAG chr11 5154790 5154809 5154793 -
aggaatattaaattggtgga

SEQ ID NO: 56482 - DNA, 20 bp, Artificial Sequence
  Synthetic oligonucleotide; GAG chr11 5154768 5154787 5154771 -
gccacttttttctccaattt

SEQ ID NO: 56483 - DNA, 20 bp, Artificial Sequence
  Synthetic oligonucleotide; CAG chr11 5154742 5154761 5154745 -
aataaattcatcccgtgttt

SEQ ID NO: 56484 - DNA, 20 bp, Artificial Sequence
  Synthetic oligonucleotide; CAG chr11 5154732 5154751 5154735 -
tcccgtgtttcagaatgcta

SEQ ID NO: 56485 - DNA, 20 bp, Artificial Sequence
  Synthetic oligonucleotide; GAG chr11 5154719 5154738 5154722 -
aatgctacagacctcactat

SEQ ID NO: 56486 - DNA, 20 bp, Artificial Sequence
  Synthetic oligonucleotide; TGG chr11 5154710 5154729 5154713 -
gacctcactatgagttttac

SEQ ID NO: 56487 - DNA, 20 bp, Artificial Sequence
  Synthetic oligonucleotide; GGG chr11 5154709 5154728 5154712 -
acctcactatgagttttact

SEQ ID NO: 56488 - DNA, 20 bp, Artificial Sequence
  Synthetic oligonucleotide; GGG chr11 5154708 5154727 5154711 -
cctcactatgagttttactg

SEQ ID NO: 56489 - DNA, 20 bp, Artificial Sequence
  Synthetic oligonucleotide; GGG chr11 5154707 5154726 5154710 -
ctcactatgagttttactgg

SEQ ID NO: 56490 - DNA, 20 bp, Artificial Sequence
  Synthetic oligonucleotide; GAG chr11 5154702 5154721 5154705 -
tatgagttttactgggggat

SEQ ID NO: 56491 - DNA, 20 bp, Artificial Sequence
  Synthetic oligonucleotide; AAG chr11 5154693 5154712 5154696 -
tactgggggatgagcacaca

SEQ ID NO: 56492 - DNA, 20 bp, Artificial Sequence
  Synthetic oligonucleotide; TGG chr11 5154689 5154708 5154692 -
gggggatgagcacacaaaga

SEQ ID NO: 56493 - DNA, 20 bp, Artificial Sequence
  Synthetic oligonucleotide; GAG chr11 5154683 5154702 5154686 -
tgagcacacaaagatggtct

SEQ ID NO: 56494 - DNA, 20 bp, Artificial Sequence
  Synthetic oligonucleotide; CAG chr11 5154679 5154698 5154682 -
cacacaaagatggtctgaga

SEQ ID NO: 56495 - DNA, 20 bp, Artificial Sequence
  Synthetic oligonucleotide; CAG chr11 5154671 5154690 5154674 -
gatggtctgagacagacttc

SEQ ID NO: 56496 - DNA, 20 bp, Artificial Sequence
  Synthetic oligonucleotide; AAG chr11 5154668 5154687 5154671 -
ggtctgagacagacttccag

SEQ ID NO: 56497 - DNA, 20 bp, Artificial Sequence
  Synthetic oligonucleotide; AAG chr11 5154665 5154684 5154668 -
ctgagacagacttccagaag

SEQ ID NO: 56498 - DNA, 20 bp, Artificial Sequence
  Synthetic oligonucleotide; AAG chr11 5154662 5154681 5154665 -
agacagacttccagaagaag

SEQ ID NO: 56499 - DNA, 20 bp, Artificial Sequence
  Synthetic oligonucleotide; AAG chr11 5154659 5154678 5154662 -
cagacttccagaagaagaag

SEQ ID NO: 56500 - DNA, 20 bp, Artificial Sequence
  Synthetic oligonucleotide; TAG chr11 5154646 5154665 5154649 -
gaagaagaagatgtccgtgt

SEQ ID NO: 56501 - DNA, 20 bp, Artificial Sequence
  Synthetic oligonucleotide; GAG chr11 5154644 5154663 5154647 -
agaagaagatgtccgtgtta

SEQ ID NO: 56502 - DNA, 20 bp, Artificial Sequence
  Synthetic oligonucleotide; AAG chr11 5154632 5154651 5154635 -
ccgtgttagagataaatgaa

SEQ ID NO: 56503 - DNA, 20 bp, Artificial Sequence
  Synthetic oligonucleotide; AAG chr11 5154623 5154642 5154626 -
agataaatgaaaagtgtaaa

SEQ ID NO: 56504 - DNA, 20 bp, Artificial Sequence
  Synthetic oligonucleotide; CAG chr11 5154602 5154621 5154605 -
agtcatctgcaaaatgtcca

SEQ ID NO: 56505 - DNA, 20 bp, Artificial Sequence
  Synthetic oligonucleotide; TGG chr11 5154589 5154608 5154592 -
atgtccacagtatattatat

SEQ ID NO: 56506 - DNA, 20 bp, Artificial Sequence
  Synthetic oligonucleotide; TGG chr11 5154577 5154596 5154580 -
tattatattggcacatatcc

SEQ ID NO: 56507 - DNA, 20 bp, Artificial Sequence
  Synthetic oligonucleotide; CAG chr11 5154567 5154586 5154570 -
gcacatatcctggcaccaaa

SEQ ID NO: 56508 - DNA, 20 bp, Artificial Sequence
  Synthetic oligonucleotide; GAG chr11 5154565 5154584 5154568 -
acatatcctggcaccaaaca

SEQ ID NO: 56509 - DNA, 20 bp, Artificial Sequence
  Synthetic oligonucleotide; TAG chr11 5154547 5154566 5154550 -
cagagtaaaatttatgacat

SEQ ID NO: 56510 - DNA, 20 bp, Artificial Sequence
  Synthetic oligonucleotide; TGG chr11 5154543 5154562 5154546 -
gtaaaatttatgacattagc

SEQ ID NO: 56511 - DNA, 20 bp, Artificial Sequence
  Synthetic oligonucleotide; CAG chr11 5154529 5154548 5154532 -
attagctggatgctgttaca

SEQ ID NO: 56512 - DNA, 20 bp, Artificial Sequence
  Synthetic oligonucleotide; GAG chr11 5154527 5154546 5154530 -
tagctggatgctgttacaca

SEQ ID NO: 56513 - DNA, 20 bp, Artificial Sequence
  Synthetic oligonucleotide; CAG chr11 5154522 5154541 5154525 -
ggatgctgttacacagagtg

SEQ ID NO: 56514 - DNA, 20 bp, Artificial Sequence
  Synthetic oligonucleotide; CAG chr11 5154518 5154537 5154521 -
gctgttacacagagtgcaga

SEQ ID NO: 56515 - DNA, 20 bp, Artificial Sequence
  Synthetic oligonucleotide; AAG chr11 5154514 5154533 5154517 -
ttacacagagtgcagacaga

SEQ ID NO: 56516 - DNA, 20 bp, Artificial Sequence
  Synthetic oligonucleotide; TAG chr11 5154511 5154530 5154514 -
cacagagtgcagacagaaag

SEQ ID NO: 56517 - DNA, 20 bp, Artificial Sequence
  Synthetic oligonucleotide; GAG chr11 5154509 5154528 5154512 -
cagagtgcagacagaaagta

SEQ ID NO: 56518 - DNA, 20 bp, Artificial Sequence
  Synthetic oligonucleotide; CAG chr11 5154500 5154519 5154503 -
gacagaaagtagagccatca

SEQ ID NO: 56519 - DNA, 20 bp, Artificial Sequence
  Synthetic oligonucleotide; AAG chr11 5154485 5154504 5154488 -
catcacagaacccacaactt

SEQ ID NO: 56520 - DNA, 20 bp, Artificial Sequence
  Synthetic oligonucleotide; AGG chr11 5154484 5154503 5154487 -
atcacagaacccacaactta

SEQ ID NO: 56521 - DNA, 20 bp, Artificial Sequence
  Synthetic oligonucleotide; GGG chr11 5154483 5154502 5154486 -
tcacagaacccacaacttaa

SEQ ID NO: 56522 - DNA, 20 bp, Artificial Sequence
  Synthetic oligonucleotide; AAG chr11 5154476 5154495 5154479 -
acccacaacttaagggaatg

SEQ ID NO: 56523 - DNA, 20 bp, Artificial Sequence
  Synthetic oligonucleotide; TGG chr11 5154472 5154491 5154475 -
acaacttaagggaatgaagc

SEQ ID NO: 56524 - DNA, 20 bp, Artificial Sequence
  Synthetic oligonucleotide; TGG chr11 5154463 5154482 5154466 -
gggaatgaagctggaatcct

SEQ ID NO: 56525 - DNA, 20 bp, Artificial Sequence
  Synthetic oligonucleotide; GAG chr11 5154461 5154480 5154464 -
gaatgaagctggaatccttg

SEQ ID NO: 56526 - DNA, 20 bp, Artificial Sequence
  Synthetic oligonucleotide; AAG chr11 5154458 5154477 5154461 -
tgaagctggaatccttggag

SEQ ID NO: 56527 - DNA, 20 bp, Artificial Sequence
  Synthetic oligonucleotide; TGG chr11 5154449 5154468 5154452 -
aatccttggagaagaaaaat

SEQ ID NO: 56528 - DNA, 20 bp, Artificial Sequence
  Synthetic oligonucleotide; GAG chr11 5154445 5154464 5154448 -
cttggagaagaaaaattggt

SEQ ID NO: 56529 - DNA, 20 bp, Artificial Sequence
  Synthetic oligonucleotide; AAG chr11 5154432 5154451 5154435 -
aattggtgagtgatgaatga

SEQ ID NO: 56530 - DNA, 20 bp, Artificial Sequence
  Synthetic oligonucleotide; TGG chr11 5154417 5154436 5154420 -
aatgaaagtgttatgaaaaa

SEQ ID NO: 56531 - DNA, 20 bp, Artificial Sequence
  Synthetic oligonucleotide; CAG chr11 5154403 5154422 5154406 -
gaaaaatggacaatattctt

SEQ ID NO: 56532 - DNA, 20 bp, Artificial Sequence
  Synthetic oligonucleotide; AGG chr11 5154402 5154421 5154405 -
aaaaatggacaatattcttc

SEQ ID NO: 56533 - DNA, 20 bp, Artificial Sequence
  Synthetic oligonucleotide; TGG chr11 5154395 5154414 5154398 -
gacaatattcttcaggtatc

SEQ ID NO: 56534 - DNA, 20 bp, Artificial Sequence
  Synthetic oligonucleotide; AAG chr11 5154391 5154410 5154394 -
atattcttcaggtatctggt

SEQ ID NO: 56535 - DNA, 20 bp, Artificial Sequence
  Synthetic oligonucleotide; GAG chr11 5154389 5154408 5154392 -
attcttcaggtatctggtaa

SEQ ID NO: 56536 - DNA, 20 bp, Artificial Sequence
  Synthetic oligonucleotide; CAG chr11 5154380 5154399 5154383 -
gtatctggtaagagcaaaac

SEQ ID NO: 56537 - DNA, 20 bp, Artificial Sequence
  Synthetic oligonucleotide; GAG chr11 5154362 5154381 5154365 -
accagctctcaataataatt

SEQ ID NO: 56538 - DNA, 20 bp, Artificial Sequence
  Synthetic oligonucleotide; AGG chr11 5154361 5154380 5154364 -
ccagctctcaataataattg

SEQ ID NO: 56539 - DNA, 20 bp, Artificial Sequence
  Synthetic oligonucleotide; GAG chr11 5154359 5154378 5154362 -
agctctcaataataattgag

SEQ ID NO: 56540 - DNA, 20 bp, Artificial Sequence
  Synthetic oligonucleotide; AAG chr11 5154355 5154374 5154358 -
ctcaataataattgaggagt

SEQ ID NO: 56541 - DNA, 20 bp, Artificial Sequence
  Synthetic oligonucleotide; AAG chr11 5154340 5154359 5154343 -
ggagtaagtctcacgattcc

SEQ ID NO: 56542 - DNA, 20 bp, Artificial Sequence
  Synthetic oligonucleotide; CAG chr11 5154314 5154333 5154317 -
cctctccataatttaattac

SEQ ID NO: 56543 - DNA, 20 bp, Artificial Sequence
  Synthetic oligonucleotide; CAG chr11 5154278 5154297 5154281 -
aatcactctatccaactaac

SEQ ID NO: 56544 - DNA, 20 bp, Artificial Sequence
  Synthetic oligonucleotide; AGG chr11 5154277 5154296 5154280 -
atcactctatccaactaacc

SEQ ID NO: 56545 - DNA, 20 bp, Artificial Sequence
  Synthetic oligonucleotide; CAG chr11 5154230 5154249 5154233 -
accctgctatctgtgcctgt

SEQ ID NO: 56546 - DNA, 20 bp, Artificial Sequence
  Synthetic oligonucleotide; AGG chr11 5154229 5154248 5154232 -
ccctgctatctgtgcctgtc

SEQ ID NO: 56547 - DNA, 20 bp, Artificial Sequence
  Synthetic oligonucleotide; TAG chr11 5154226 5154245 5154229 -
tgctatctgtgcctgtcagg

SEQ ID NO: 56548 - DNA, 20 bp, Artificial Sequence
  Synthetic oligonucleotide; CAG chr11 5154212 5154231 5154215 -
gtcaggtagtactcacatgt

SEQ ID NO: 56549 - DNA, 20 bp, Artificial Sequence
  Synthetic oligonucleotide; TGG chr11 5154204 5154223 5154207 -
gtactcacatgtcagctctt

SEQ ID NO: 56550 - DNA, 20 bp, Artificial Sequence
  Synthetic oligonucleotide; AAG chr11 5154193 5154212 5154196 -
tcagctctttggtcttgaat

SEQ ID NO: 56551 - DNA, 20 bp, Artificial Sequence
  Synthetic oligonucleotide; CAG chr11 5154189 5154208 5154192 -
ctctttggtcttgaataagt

SEQ ID NO: 56552 - DNA, 20 bp, Artificial Sequence
  Synthetic oligonucleotide; AAG chr11 5154168 5154187 5154171 -
agacattgtgattgccatta

SEQ ID NO: 56553 - DNA, 20 bp, Artificial Sequence
  Synthetic oligonucleotide; AGG chr11 5154167 5154186 5154170 -
gacattgtgattgccattaa

SEQ ID NO: 56554 - DNA, 20 bp, Artificial Sequence
  Synthetic oligonucleotide; TGG chr11 5154138 5154157 5154141 -
attctaattgtgattatctt

SEQ ID NO: 56555 - DNA, 20 bp, Artificial Sequence
  Synthetic oligonucleotide; GAG chr11 5154136 5154155 5154139 -
tctaattgtgattatctttg

SEQ ID NO: 56556 - DNA, 20 bp, Artificial Sequence
  Synthetic oligonucleotide; AAG chr11 5154133 5154152 5154136 -
aattgtgattatctttggag

SEQ ID NO: 56557 - DNA, 20 bp, Artificial Sequence
  Synthetic oligonucleotide; TAG chr11 5154113 5154132 5154116 -
aagaaaaaatttgcccctat

SEQ ID NO: 56558 - DNA, 20 bp, Artificial Sequence
  Synthetic oligonucleotide; AAG chr11 5154107 5154126 5154110 -
aaatttgcccctattagaaa

SEQ ID NO: 56559 - DNA, 20 bp, Artificial Sequence
  Synthetic oligonucleotide; CAG chr11 5154103 5154122 5154106 -
ttgcccctattagaaaaagc

SEQ ID NO: 56560 - DNA, 20 bp, Artificial Sequence
  Synthetic oligonucleotide; TGG chr11 5154093 5154112 5154096 -
tagaaaaagccagtgactta

SEQ ID NO: 56561 - DNA, 20 bp, Artificial Sequence
  Synthetic oligonucleotide; TGG chr11 5154089 5154108 5154092 -
aaaagccagtgacttatgga

SEQ ID NO: 56562 - DNA, 20 bp, Artificial Sequence
  Synthetic oligonucleotide; GGG chr11 5154088 5154107 5154091 -
aaagccagtgacttatggat

SEQ ID NO: 56563 - DNA, 20 bp, Artificial Sequence
  Synthetic oligonucleotide; GAG chr11 5154086 5154105 5154089 -
agccagtgacttatggatgg

SEQ ID NO: 56564 - DNA, 20 bp, Artificial Sequence
  Synthetic oligonucleotide; AAG chr11 5154071 5154090 5154074 -
gatgggagtgtcataaaact

SEQ ID NO: 56565 - DNA, 20 bp, Artificial Sequence
  Synthetic oligonucleotide; TGG chr11 5154065 5154084 5154068 -
agtgtcataaaactaagcat

SEQ ID NO: 56566 - DNA, 20 bp, Artificial Sequence
  Synthetic oligonucleotide; GGG chr11 5154064 5154083 5154067 -
gtgtcataaaactaagcatt

SEQ ID NO: 56567 - DNA, 20 bp, Artificial Sequence
  Synthetic oligonucleotide; GGG chr11 5154063 5154082 5154066 -
tgtcataaaactaagcattg

SEQ ID NO: 56568 - DNA, 20 bp, Artificial Sequence
  Synthetic oligonucleotide; TGG chr11 5154050 5154069 5154053 -
agcattggggatcaaatctg

SEQ ID NO: 56569 - DNA, 20 bp, Artificial Sequence
  Synthetic oligonucleotide; AAG chr11 5154041 5154060 5154044 -
gatcaaatctgtggaaatca

SEQ ID NO: 56570 - DNA, 20 bp, Artificial Sequence
  Synthetic oligonucleotide; TAG chr11 5154022 5154041 5154025 -
aaagtatttaattgacctac

SEQ ID NO: 56571 - DNA, 20 bp, Artificial Sequence
  Synthetic oligonucleotide; CGG chr11 5154015 5154034 5154018 -
ttaattgacctactagttta

SEQ ID NO: 56572 - DNA, 20 bp, Artificial Sequence
  Synthetic oligonucleotide; TAG chr11 5154001 5154020 5154004 -
agtttacggtaaatgtatgt

SEQ ID NO: 56573 - DNA, 20 bp, Artificial Sequence
  Synthetic oligonucleotide; CAG chr11 5153992 5154011 5153995 -
taaatgtatgttagctgata

SEQ ID NO: 56574 - DNA, 20 bp, Artificial Sequence
  Synthetic oligonucleotide; TGG chr11 5153958 5153977 5153961 -
tgaaatgtcctctgctgatt

SEQ ID NO: 56575 - DNA, 20 bp, Artificial Sequence
  Synthetic oligonucleotide; AAG chr11 5153943 5153962 5153946 -
tgatttggttctttcatttg

SEQ ID NO: 56576 - DNA, 20 bp, Artificial Sequence
  Synthetic oligonucleotide; TAG chr11 5153938 5153957 5153941 -
tggttctttcatttgaagtt

SEQ ID NO: 56577 - DNA, 20 bp, Artificial Sequence
  Synthetic oligonucleotide; CAG chr11 5153935 5153954 5153938 -
ttctttcatttgaagtttag

SEQ ID NO: 56578 - DNA, 20 bp, Artificial Sequence
  Synthetic oligonucleotide; CAG chr11 5153932 5153951 5153935 -
tttcatttgaagtttagcag

SEQ ID NO: 56579 - DNA, 20 bp, Artificial Sequence
  Synthetic oligonucleotide; GAG chr11 5153905 5153924 5153908 -
acatttgttgttgaatattt

SEQ ID NO: 56580 - DNA, 20 bp, Artificial Sequence
  Synthetic oligonucleotide; AAG chr11 5153822 5153841 5153825 -
caaaaaaaaaaaaaaaaaaa

SEQ ID NO: 56581 - DNA, 20 bp, Artificial Sequence
  Synthetic oligonucleotide; AAG chr11 5153804 5153823 5153807 -
aaaagctgctttttctttca

SEQ ID NO: 56582 - DNA, 20 bp, Artificial Sequence
  Synthetic oligonucleotide; CAG chr11 5153799 5153818 5153802 -
ctgctttttctttcaaagaa

SEQ ID NO: 56583 - DNA, 20 bp, Artificial Sequence
  Synthetic oligonucleotide; CAG chr11 5153780 5153799 5153783 -
acagctacttcctgaatttc

SEQ ID NO: 56584 - DNA, 20 bp, Artificial Sequence
  Synthetic oligonucleotide; TGG chr11 5153772 5153791 5153775 -
ttcctgaatttccagcatat

SEQ ID NO: 56585 - DNA, 20 bp, Artificial Sequence
  Synthetic oligonucleotide; AAG chr11 5153762 5153781 5153765 -
tccagcatattggtgacatg

SEQ ID NO: 56586 - DNA, 20 bp, Artificial Sequence
  Synthetic oligonucleotide; CGG chr11 5153755 5153774 5153758 -
tattggtgacatgaagcata

SEQ ID NO: 56587 - DNA, 20 bp, Artificial Sequence
  Synthetic oligonucleotide; TAG chr11 5153751 5153770 5153754 -
ggtgacatgaagcatacggt

SEQ ID NO: 56588 - DNA, 20 bp, Artificial Sequence
  Synthetic oligonucleotide; GAG chr11 5153739 5153758 5153742 -
catacggttagctgattcat

SEQ ID NO: 56589 - DNA, 20 bp, Artificial Sequence
  Synthetic oligonucleotide; GAG chr11 5153730 5153749 5153733 -
agctgattcatgagcttact

SEQ ID NO: 56590 - DNA, 20 bp, Artificial Sequence
  Synthetic oligonucleotide; AAG chr11 5153710 5153729 5153713 -
gagataaaacaactttattg

SEQ ID NO: 56591 - DNA, 20 bp, Artificial Sequence
  Synthetic oligonucleotide; TAG chr11 5153703 5153722 5153706 -
aacaactttattgaagtgtc

SEQ ID NO: 56592 - DNA, 20 bp, Artificial Sequence
  Synthetic oligonucleotide; AGG chr11 5153702 5153721 5153705 -
acaactttattgaagtgtct

SEQ ID NO: 56593 - DNA, 20 bp, Artificial Sequence
  Synthetic oligonucleotide; AAG chr11 5153698 5153717 5153701 -
ctttattgaagtgtctagga

SEQ ID NO: 56594 - DNA, 20 bp, Artificial Sequence
  Synthetic oligonucleotide; AAG chr11 5153691 5153710 5153694 -
gaagtgtctaggaaagaatg

SEQ ID NO: 56595 - DNA, 20 bp, Artificial Sequence
  Synthetic oligonucleotide; TAG chr11 5153646 5153665 5153649 -
acaaacatttctctaatgta

SEQ ID NO: 56596 - DNA, 20 bp, Artificial Sequence
  Synthetic oligonucleotide; TAG chr11 5153610 5153629 5153613 -
gattcaaaatatgtaatttt

SEQ ID NO: 56597 - DNA, 20 bp, Artificial Sequence
  Synthetic oligonucleotide; CAG chr11 5153590 5153609 5153593 -
tagaaaataactattttgat

SEQ ID NO: 56598 - DNA, 20 bp, Artificial Sequence
  Synthetic oligonucleotide; GAG chr11 5153588 5153607 5153591 -
gaaaataactattttgatca

SEQ ID NO: 56599 - DNA, 20 bp, Artificial Sequence
  Synthetic oligonucleotide; AAG chr11 5153573 5153592 5153576 -
gatcagagaacttttatata

SEQ ID NO: 56600 - DNA, 20 bp, Artificial Sequence
  Synthetic oligonucleotide; AAG chr11 5153567 5153586 5153570 -
agaacttttatataaagcat

SEQ ID NO: 56601 - DNA, 20 bp, Artificial Sequence
  Synthetic oligonucleotide; GAG chr11 5153565 5153584 5153568 -
aacttttatataaagcataa

SEQ ID NO: 56602 - DNA, 20 bp, Artificial Sequence
  Synthetic oligonucleotide; CAG chr11 5153560 5153579 5153563 -
ttatataaagcataagagcc

SEQ ID NO: 56603 - DNA, 20 bp, Artificial Sequence
  Synthetic oligonucleotide; AGG chr11 5153559 5153578 5153562 -
tatataaagcataagagccc

SEQ ID NO: 56604 - DNA, 20 bp, Artificial Sequence
  Synthetic oligonucleotide; CAG chr11 5153551 5153570 5153554 -
gcataagagcccaggttttt

SEQ ID NO: 56605 - DNA, 20 bp, Artificial Sequence
  Synthetic oligonucleotide; CAG chr11 5153535 5153554 5153538 -
ttttcagaaaattcaatcat

SEQ ID NO: 56606 - DNA, 20 bp, Artificial Sequence
  Synthetic oligonucleotide; AAG chr11 5153522 5153541 5153525 -
caatcatcagtgaaattgaa

SEQ ID NO: 56607 - DNA, 20 bp, Artificial Sequence
  Synthetic oligonucleotide; TGG chr11 5153504 5153523 5153507 -
aaaagtgactaaattttctt

SEQ ID NO: 56608 - DNA, 20 bp, Artificial Sequence
  Synthetic oligonucleotide; TAG chr11 5153494 5153513 5153497 -
aaattttctttggttattca

SEQ ID NO: 56609 - DNA, 20 bp, Artificial Sequence
  Synthetic oligonucleotide; TAG chr11 5153476 5153495 5153479 -
catagtgctttcctcaattt

SEQ ID NO: 56610 - DNA, 20 bp, Artificial Sequence
  Synthetic oligonucleotide; AAG chr11 5153466 5153485 5153469 -
tcctcaattttagtctcccc

SEQ ID NO: 56611 - DNA, 20 bp, Artificial Sequence
  Synthetic oligonucleotide; TAG chr11 5153443 5153462 5153446 -
tttgtcctgtcttccctgtc

SEQ ID NO: 56612 - DNA, 20 bp, Artificial Sequence
  Synthetic oligonucleotide; AAG chr11 5153420 5153439 5153423 -
ttctacatttgacttcttct

SEQ ID NO: 56613 - DNA, 20 bp, Artificial Sequence
  Synthetic oligonucleotide; TAG chr11 5153405 5153424 5153408 -
cttctaagaaatctgtcctt

SEQ ID NO: 56614 - DNA, 20 bp, Artificial Sequence
  Synthetic oligonucleotide; CAG chr11 5153374 5153393 5153377 -
tttttactaatttcttatgt

SEQ ID NO: 56615 - DNA, 20 bp, Artificial Sequence
  Synthetic oligonucleotide; GAG chr11 5153372 5153391 5153375 -
tttactaatttcttatgtca

SEQ ID NO: 56616 - DNA, 20 bp, Artificial Sequence
  Synthetic oligonucleotide; AAG chr11 5153354 5153373 5153357 -
cagagctcacaaaattatat

SEQ ID NO: 56617 - DNA, 20 bp, Artificial Sequence
  Synthetic oligonucleotide; AAG chr11 5153331 5153350 5153334 -
catctcacctatatttcatt

SEQ ID NO: 56618 - DNA, 20 bp, Artificial Sequence
  Synthetic oligonucleotide; GAG chr11 5153321 5153340 5153324 -
atatttcattaagaactaat

SEQ ID NO: 56619 - DNA, 20 bp, Artificial Sequence
  Synthetic oligonucleotide; TGG chr11 5153311 5153330 5153314 -
aagaactaatgagcctttat

SEQ ID NO: 56620 - DNA, 20 bp, Artificial Sequence
  Synthetic oligonucleotide; GGG chr11 5153310 5153329 5153313 -
agaactaatgagcctttatt

SEQ ID NO: 56621 - DNA, 20 bp, Artificial Sequence
  Synthetic oligonucleotide; CAG chr11 5153269 5153288 5153272 -
aactctgaacattttaaaac

SEQ ID NO: 56622 - DNA, 20 bp, Artificial Sequence
  Synthetic oligonucleotide; AGG chr11 5153268 5153287 5153271 -
actctgaacattttaaaacc

SEQ ID NO: 56623 - DNA, 20 bp, Artificial Sequence
  Synthetic oligonucleotide; TGG chr11 5153261 5153280 5153264 -
acattttaaaaccaggaaac

SEQ ID NO: 56624 - DNA, 20 bp, Artificial Sequence
  Synthetic oligonucleotide; TGG chr11 5153249 5153268 5153252 -
caggaaactggactctattc

SEQ ID NO: 56625 - DNA, 20 bp, Artificial Sequence
  Synthetic oligonucleotide; CAG chr11 5153221 5153240 5153224 -
tgattcatttgcccattatt

SEQ ID NO: 56626 - DNA, 20 bp, Artificial Sequence
  Synthetic oligonucleotide; TGG chr11 5153212 5153231 5153215 -
tgcccattattcagtatctg

SEQ ID NO: 56627 - DNA, 20 bp, Artificial Sequence
  Synthetic oligonucleotide; CAG chr11 5153204 5153223 5153207 -
attcagtatctgtggtttat

SEQ ID NO: 56628 - DNA, 20 bp, Artificial Sequence
  Synthetic oligonucleotide; AGG chr11 5153203 5153222 5153206 -
ttcagtatctgtggtttatc

SEQ ID NO: 56629 - DNA, 20 bp, Artificial Sequence
  Synthetic oligonucleotide; GAG chr11 5153201 5153220 5153204 -
cagtatctgtggtttatcag

SEQ ID NO: 56630 - DNA, 20 bp, Artificial Sequence
  Synthetic oligonucleotide; AAG chr11 5153197 5153216 5153200 -
atctgtggtttatcaggagc

SEQ ID NO: 56631 - DNA, 20 bp, Artificial Sequence
  Synthetic oligonucleotide; TAG chr11 5153183 5153202 5153186 -
aggagcaagttctcttgccg

SEQ ID NO: 56632 - DNA, 20 bp, Artificial Sequence
  Synthetic oligonucleotide; AGG chr11 5153182 5153201 5153185 -
ggagcaagttctcttgccgt

SEQ ID NO: 56633 - DNA, 20 bp, Artificial Sequence
  Synthetic oligonucleotide; TAG chr11 5153154 5153173 5153157 -
ctgctgctcatcttgtccct

SEQ ID NO: 56634 - DNA, 20 bp, Artificial Sequence
  Synthetic oligonucleotide; CAG chr11 5153151 5153170 5153154 -
ctgctcatcttgtcccttag

SEQ ID NO: 56635 - DNA, 20 bp, Artificial Sequence
  Synthetic oligonucleotide; TAG chr11 5153137 5153156 5153140 -
ccttagcagttccttctctc

SEQ ID NO: 56636 - DNA, 20 bp, Artificial Sequence
  Synthetic oligonucleotide; AAG chr11 5153124 5153143 5153127 -
ttctctctagatattccata

SEQ ID NO: 56637 - DNA, 20 bp, Artificial Sequence
  Synthetic oligonucleotide; AAG chr11 5153091 5153110 5153094 -
ttttaaactcacaacatttc

SEQ ID NO: 56638 - DNA, 20 bp, Artificial Sequence
  Synthetic oligonucleotide; GAG chr11 5153089 5153108 5153092 -
ttaaactcacaacatttcaa

SEQ ID NO: 56639 - DNA, 20 bp, Artificial Sequence
  Synthetic oligonucleotide; CAG chr11 5153083 5153102 5153086 -
tcacaacatttcaagagttt

SEQ ID NO: 56640 - DNA, 20 bp, Artificial Sequence
  Synthetic oligonucleotide; TAG chr11 5153066 5153085 5153069 -
tttcagctgtttaaaatata

SEQ ID NO: 56641 - DNA, 20 bp, Artificial Sequence
  Synthetic oligonucleotide; AGG chr11 5153065 5153084 5153068 -
ttcagctgtttaaaatatat

SEQ ID NO: 56642 - DNA, 20 bp, Artificial Sequence
  Synthetic oligonucleotide; AAG chr11 5153036 5153055 5153039 -
tataattccctttaacttta

SEQ ID NO: 56643 - DNA, 20 bp, Artificial Sequence
  Synthetic oligonucleotide; AAG chr11 5153024 5153043 5153027 -
taactttaaagaaatataaa

SEQ ID NO: 56644 - DNA, 20 bp, Artificial Sequence
  Synthetic oligonucleotide; CAG chr11 5153017 5153036 5153020 -
aaagaaatataaaaagcaac

SEQ ID NO: 56645 - DNA, 20 bp, Artificial Sequence
  Synthetic oligonucleotide; AGG chr11 5153016 5153035 5153019 -
aagaaatataaaaagcaacc

SEQ ID NO: 56646 - DNA, 20 bp, Artificial Sequence
  Synthetic oligonucleotide; GAG chr11 5153014 5153033 5153017 -
gaaatataaaaagcaaccag

SEQ ID NO: 56647 - DNA, 20 bp, Artificial Sequence
  Synthetic oligonucleotide; TGG chr11 5153008 5153027 5153011 -
taaaaagcaaccaggagctt

SEQ ID NO: 56648 - DNA, 20 bp, Artificial Sequence
  Synthetic oligonucleotide; CAG chr11 5153003 5153022 5153006 -
agcaaccaggagctttggct

SEQ ID NO: 56649 - DNA, 20 bp, Artificial Sequence
  Synthetic oligonucleotide; AAG chr11 5152991 5153010 5152994 -
ctttggctcagatttgtcaa

SEQ ID NO: 56650 - DNA, 20 bp, Artificial Sequence
  Synthetic oligonucleotide; AAG chr11 5152984 5153003 5152987 -
tcagatttgtcaaaagtata

SEQ ID NO: 56651 - DNA, 20 bp, Artificial Sequence
  Synthetic oligonucleotide; AAG chr11 5152965 5152984 5152968 -
aaagatttcaattatttcta

SEQ ID NO: 56652 - DNA, 20 bp, Artificial Sequence
  Synthetic oligonucleotide; AAG chr11 5152933 5152952 5152936 -
tacattattctgaatataaa

SEQ ID NO: 56653 - DNA, 20 bp, Artificial Sequence
  Synthetic oligonucleotide; TGG chr11 5152914 5152933 5152917 -
aaagaaatatattatgttct

SEQ ID NO: 56654 - DNA, 20 bp, Artificial Sequence
  Synthetic oligonucleotide; GGG chr11 5152913 5152932 5152916 -
aagaaatatattatgttctt

SEQ ID NO: 56655 - DNA, 20 bp, Artificial Sequence
  Synthetic oligonucleotide; TGG chr11 5152878 5152897 5152881 -
ctacctctattctctttcat

SEQ ID NO: 56656 - DNA, 20 bp, Artificial Sequence
  Synthetic oligonucleotide; GGG chr11 5152877 5152896 5152880 -
tacctctattctctttcatt

SEQ ID NO: 56657 - DNA, 20 bp, Artificial Sequence
  Synthetic oligonucleotide; TGG chr11 5152854 5152873 5152857 -
aatcttttacaccaatgtac

SEQ ID NO: 56658 - DNA, 20 bp, Artificial Sequence
  Synthetic oligonucleotide; CAG chr11 5152850 5152869 5152853 -
ttttacaccaatgtactggt

SEQ ID NO: 56659 - DNA, 20 bp, Artificial Sequence
  Synthetic oligonucleotide; GAG chr11 5152848 5152867 5152851 -
ttacaccaatgtactggtca

SEQ ID NO: 56660 - DNA, 20 bp, Artificial Sequence
  Synthetic oligonucleotide; AAG chr11 5152814 5152833 5152817 -
gcttgtctaaaatgttctta

SEQ ID NO: 56661 - DNA, 20 bp, Artificial Sequence
  Synthetic oligonucleotide; TGG chr11 5152806 5152825 5152809 -
aaaatgttcttaaagaaaat

SEQ ID NO: 56662 - DNA, 20 bp, Artificial Sequence
  Synthetic oligonucleotide; TAG chr11 5152800 5152819 5152803 -
ttcttaaagaaaattggaaa

SEQ ID NO: 56663 - DNA, 20 bp, Artificial Sequence
  Synthetic oligonucleotide; TAG chr11 5152789 5152808 5152792 -
aattggaaatagttaaatac

SEQ ID NO: 56664 - DNA, 20 bp, Artificial Sequence
  Synthetic oligonucleotide; GAG chr11 5152787 5152806 5152790 -
ttggaaatagttaaatacta

SEQ ID NO: 56665 - DNA, 20 bp, Artificial Sequence
  Synthetic oligonucleotide; AGG chr11 5152786 5152805 5152789 -
tggaaatagttaaatactag

SEQ ID NO: 56666 - DNA, 20 bp, Artificial Sequence
  Synthetic oligonucleotide; TAG chr11 5152781 5152800 5152784 -
atagttaaatactagaggaa

SEQ ID NO: 56667 - DNA, 20 bp, Artificial Sequence
  Synthetic oligonucleotide; TGG chr11 5152763 5152782 5152766 -
aatagctgaaatgtgaaata

SEQ ID NO: 56668 - DNA, 20 bp, Artificial Sequence
  Synthetic oligonucleotide; GAG chr11 5152761 5152780 5152764 -
tagctgaaatgtgaaatatg

SEQ ID NO: 56669 - DNA, 20 bp, Artificial Sequence
  Synthetic oligonucleotide; GAG chr11 5152759 5152778 5152762 -
gctgaaatgtgaaatatgga

SEQ ID NO: 56670 - DNA, 20 bp, Artificial Sequence
  Synthetic oligonucleotide; AGG chr11 5152758 5152777 5152761 -
ctgaaatgtgaaatatggag

SEQ ID NO: 56671 - DNA, 20 bp, Artificial Sequence
  Synthetic oligonucleotide; CAG chr11 5152694 5152713 5152697 -
cttctttttttttttgtcca

SEQ ID NO: 56672 - DNA, 20 bp, Artificial Sequence
  Synthetic oligonucleotide; AGG chr11 5152693 5152712 5152696 -
ttctttttttttttgtccac

SEQ ID NO: 56673 - DNA, 20 bp, Artificial Sequence
  Synthetic oligonucleotide; TGG chr11 5152688 5152707 5152691 -
tttttttttgtccacaggtc

SEQ ID NO: 56674 - DNA, 20 bp, Artificial Sequence
  Synthetic oligonucleotide; AAG chr11 5152684 5152703 5152687 -
tttttgtccacaggtctgga

SEQ ID NO: 56675 - DNA, 20 bp, Artificial Sequence
  Synthetic oligonucleotide; CAG chr11 5152675 5152694 5152678 -
acaggtctggaaagaaataa

SEQ ID NO: 56676 - DNA, 20 bp, Artificial Sequence
  Synthetic oligonucleotide; TGG chr11 5152670 5152689 5152673 -
tctggaaagaaataacagac

SEQ ID NO: 56677 - DNA, 20 bp, Artificial Sequence
  Synthetic oligonucleotide; CAG chr11 5152666 5152685 5152669 -
gaaagaaataacagactggc

SEQ ID NO: 56678 - DNA, 20 bp, Artificial Sequence
  Synthetic oligonucleotide; TAG chr11 5152663 5152682 5152666 -
agaaataacagactggccag

SEQ ID NO: 56679 - DNA, 20 bp, Artificial Sequence
  Synthetic oligonucleotide; CAG chr11 5152646 5152665 5152649 -
cagtagtccaatcccctgtc

SEQ ID NO: 56680 - DNA, 20 bp, Artificial Sequence
  Synthetic oligonucleotide; AGG chr11 5152645 5152664 5152648 -
agtagtccaatcccctgtcc

SEQ ID NO: 56681 - DNA, 20 bp, Artificial Sequence
  Synthetic oligonucleotide; TGG chr11 5152633 5152652 5152636 -
ccctgtccaggtgattttgc

SEQ ID NO: 56682 - DNA, 20 bp, Artificial Sequence
  Synthetic oligonucleotide; TGG chr11 5152618 5152637 5152621 -
tttgctggttctaatgtatt

SEQ ID NO: 56683 - DNA, 20 bp, Artificial Sequence
  Synthetic oligonucleotide; TGG chr11 5152589 5152608 5152592 -
atgcacataacatcctatta

SEQ ID NO: 56684 - DNA, 20 bp, Artificial Sequence
  Synthetic oligonucleotide; CAG chr11 5152584 5152603 5152587 -
cataacatcctattatggca

SEQ ID NO: 56685 - DNA, 20 bp, Artificial Sequence
  Synthetic oligonucleotide; CAG chr11 5152556 5152575 5152559 -
gtgaatgccccacctgaaaa

SEQ ID NO: 56686 - DNA, 20 bp, Artificial Sequence
  Synthetic oligonucleotide; AAG chr11 5152508 5152527 5152511 -
ttcctttcaaaactgtgaat

SEQ ID NO: 56687 - DNA, 20 bp, Artificial Sequence
  Synthetic oligonucleotide; TGG chr11 5152504 5152523 5152507 -
tttcaaaactgtgaataaga

SEQ ID NO: 56688 - DNA, 20 bp, Artificial Sequence
  Synthetic oligonucleotide; TAG chr11 5152494 5152513 5152497 -
gtgaataagatggatgattt

SEQ ID NO: 56689 - DNA, 20 bp, Artificial Sequence
  Synthetic oligonucleotide; GAG chr11 5152492 5152511 5152495 -
gaataagatggatgatttta

SEQ ID NO: 56690 - DNA, 20 bp, Artificial Sequence
  Synthetic oligonucleotide; CAG chr11 5152477 5152496 5152480 -
ttttagagttatacccaaat

SEQ ID NO: 56691 - DNA, 20 bp, Artificial Sequence
  Synthetic oligonucleotide; CAG chr11 5152473 5152492 5152476 -
agagttatacccaaatcaga

SEQ ID NO: 56692 - DNA, 20 bp, Artificial Sequence
  Synthetic oligonucleotide; GAG chr11 5152458 5152477 5152461 -
tcagacagactcaatataat

SEQ ID NO: 56693 - DNA, 20 bp, Artificial Sequence
  Synthetic oligonucleotide; TGG chr11 5152453 5152472 5152456 -
cagactcaatataatgagtt

SEQ ID NO: 56694 - DNA, 20 bp, Artificial Sequence
  Synthetic oligonucleotide; GAG chr11 5152451 5152470 5152454 -
gactcaatataatgagtttg

SEQ ID NO: 56695 - DNA, 20 bp, Artificial Sequence
  Synthetic oligonucleotide; CAG chr11 5152443 5152462 5152446 -
ataatgagtttggagaaaat

SEQ ID NO: 56696 - DNA, 20 bp, Artificial Sequence
  Synthetic oligonucleotide; AAG chr11 5152439 5152458 5152442 -
tgagtttggagaaaatcaga

SEQ ID NO: 56697 - DNA, 20 bp, Artificial Sequence
  Synthetic oligonucleotide; CAG chr11 5152436 5152455 5152439 -
gtttggagaaaatcagaaag

SEQ ID NO: 56698 - DNA, 20 bp, Artificial Sequence
  Synthetic oligonucleotide; AAG chr11 5152433 5152452 5152436 -
tggagaaaatcagaaagcag

SEQ ID NO: 56699 - DNA, 20 bp, Artificial Sequence
  Synthetic oligonucleotide; GAG chr11 5152431 5152450 5152434 -
gagaaaatcagaaagcagaa

SEQ ID NO: 56700 - DNA, 20 bp, Artificial Sequence
  Synthetic oligonucleotide; AGG chr11 5152430 5152449 5152433 -
agaaaatcagaaagcagaag

SEQ ID NO: 56701 - DNA, 20 bp, Artificial Sequence
  Synthetic oligonucleotide; CAG chr11 5152425 5152444 5152428 -
atcagaaagcagaagaggaa

SEQ ID NO: 56702 - DNA, 20 bp, Artificial Sequence
  Synthetic oligonucleotide; GAG chr11 5152411 5152430 5152414 -
gaggaacagtaacactgact

SEQ ID NO: 56703 - DNA, 20 bp, Artificial Sequence
  Synthetic oligonucleotide; CAG chr11 5152389 5152408 5152392 -
gaaacttcttttgtttgcat

SEQ ID NO: 56704 - DNA, 20 bp, Artificial Sequence
  Synthetic oligonucleotide; AGG chr11 5152388 5152407 5152391 -
aaacttcttttgtttgcatc

SEQ ID NO: 56705 - DNA, 20 bp, Artificial Sequence
  Synthetic oligonucleotide; GAG chr11 5152386 5152405 5152389 -
acttcttttgtttgcatcag

SEQ ID NO: 56706 - DNA, 20 bp, Artificial Sequence
  Synthetic oligonucleotide; CAG chr11 5152351 5152370 5152354 -
tatgtccatttccaacatca

SEQ ID NO: 56707 - DNA, 20 bp, Artificial Sequence
  Synthetic oligonucleotide; TAG chr11 5152324 5152343 5152327 -
catgccctctgtgttgacac

SEQ ID NO: 56708 - DNA, 20 bp, Artificial Sequence
  Synthetic oligonucleotide; TAG chr11 5152321 5152340 5152324 -
gccctctgtgttgacactag

SEQ ID NO: 56709 - DNA, 20 bp, Artificial Sequence
  Synthetic oligonucleotide; AGG chr11 5152320 5152339 5152323 -
ccctctgtgttgacactagt

SEQ ID NO: 56710 - DNA, 20 bp, Artificial Sequence
  Synthetic oligonucleotide; GGG chr11 5152319 5152338 5152322 -
cctctgtgttgacactagta

SEQ ID NO: 56711 - DNA, 20 bp, Artificial Sequence
  Synthetic oligonucleotide; CAG chr11 5152312 5152331 5152315 -
gttgacactagtagggatcc

SEQ ID NO: 56712 - DNA, 20 bp, Artificial Sequence
  Synthetic oligonucleotide; AGG chr11 5152311 5152330 5152314 -
ttgacactagtagggatccc

SEQ ID NO: 56713 - DNA, 20 bp, Artificial Sequence
  Synthetic oligonucleotide; TAG chr11 5152306 5152325 5152309 -
actagtagggatcccaggcc

SEQ ID NO: 56714 - DNA, 20 bp, Artificial Sequence
  Synthetic oligonucleotide; CAG chr11 5152295 5152314 5152298 -
tcccaggcctagaatctgtg

SEQ ID NO: 56715 - DNA, 20 bp, Artificial Sequence
  Synthetic oligonucleotide; TGG chr11 5152289 5152308 5152292 -
gcctagaatctgtgcagtgc

SEQ ID NO: 56716 - DNA, 20 bp, Artificial Sequence
  Synthetic oligonucleotide; TGG chr11 5152284 5152303 5152287 -
gaatctgtgcagtgctggat

SEQ ID NO: 56717 - DNA, 20 bp, Artificial Sequence
  Synthetic oligonucleotide; GGG chr11 5152283 5152302 5152286 -
aatctgtgcagtgctggatt

SEQ ID NO: 56718 - DNA, 20 bp, Artificial Sequence
  Synthetic oligonucleotide; TGG chr11 5152245 5152264 5152248 -
atttatctcattgctatgat

SEQ ID NO: 56719 - DNA, 20 bp, Artificial Sequence
  Synthetic oligonucleotide; GAG chr11 5152227 5152246 5152230 -
attggaaattccttgcttct

SEQ ID NO: 56720 - DNA, 20 bp, Artificial Sequence
  Synthetic oligonucleotide; GAG chr11 5152211 5152230 5152214 -
ttctgagcatcatcaaatct

SEQ ID NO: 56721 - DNA, 20 bp, Artificial Sequence
  Synthetic oligonucleotide; CAG chr11 5152206 5152225 5152209 -
agcatcatcaaatctgagcg

SEQ ID NO: 56722 - DNA, 20 bp, Artificial Sequence
  Synthetic oligonucleotide; GAG chr11 5152196 5152215 5152199 -
aatctgagcgcagtctccat

SEQ ID NO: 56723 - DNA, 20 bp, Artificial Sequence
  Synthetic oligonucleotide; TAG chr11 5152177 5152196 5152180 -
tgagcccttgtacattttct

SEQ ID NO: 56724 - DNA, 20 bp, Artificial Sequence
  Synthetic oligonucleotide; AGG chr11 5152176 5152195 5152179 -
gagcccttgtacattttctt

SEQ ID NO: 56725 - DNA, 20 bp, Artificial Sequence
  Synthetic oligonucleotide; TAG chr11 5152168 5152187 5152171 -
gtacattttcttaggcatgc

SEQ ID NO: 56726 - DNA, 20 bp, Artificial Sequence
  Synthetic oligonucleotide; AGG chr11 5152167 5152186 5152170 -
tacattttcttaggcatgct

SEQ ID NO: 56727 - DNA, 20 bp, Artificial Sequence
  Synthetic oligonucleotide; GAG chr11 5152165 5152184 5152168 -
cattttcttaggcatgctag

SEQ ID NO: 56728 - DNA, 20 bp, Artificial Sequence
  Synthetic oligonucleotide; CAG chr11 5152159 5152178 5152162 -
cttaggcatgctaggagcca

SEQ ID NO: 56729 - DNA, 20 bp, Artificial Sequence
  Synthetic oligonucleotide; TAG chr11 5152143 5152162 5152146 -
gccacagacattgcacttgc

SEQ ID NO: 56730 - DNA, 20 bp, Artificial Sequence
  Synthetic oligonucleotide; CAG chr11 5152140 5152159 5152143 -
acagacattgcacttgctag

SEQ ID NO: 56731 - DNA, 20 bp, Artificial Sequence
  Synthetic oligonucleotide; AAG chr11 5152127 5152146 5152130 -
ttgctagcagcattatgcca

SEQ ID NO: 56732 - DNA, 20 bp, Artificial Sequence
  Synthetic oligonucleotide; TGG chr11 5152119 5152138 5152122 -
agcattatgccaaagatgct

SEQ ID NO: 56733 - DNA, 20 bp, Artificial Sequence
  Synthetic oligonucleotide; TGG chr11 5152109 5152128 5152112 -
caaagatgcttggaatattc

SEQ ID NO: 56734 - DNA, 20 bp, Artificial Sequence
  Synthetic oligonucleotide; TGG chr11 5152061 5152080 5152064 -
attcctgcttgcttcaaatg

SEQ ID NO: 56735 - DNA, 20 bp, Artificial Sequence
  Synthetic oligonucleotide; CAG chr11 5152043 5152062 5152046 -
tgtggttcatccacacattg

SEQ ID NO: 56736 - DNA, 20 bp, Artificial Sequence
  Synthetic oligonucleotide; AGG chr11 5152042 5152061 5152045 -
gtggttcatccacacattgc

SEQ ID NO: 56737 - DNA, 20 bp, Artificial Sequence
  Synthetic oligonucleotide; GGG chr11 5152041 5152060 5152044 -
tggttcatccacacattgca

SEQ ID NO: 56738 - DNA, 20 bp, Artificial Sequence
  Synthetic oligonucleotide; TAG chr11 5152036 5152055 5152039 -
catccacacattgcagggta

SEQ ID NO: 56739 - DNA, 20 bp, Artificial Sequence
  Synthetic oligonucleotide; GAG chr11 5152034 5152053 5152037 -
tccacacattgcagggtata

SEQ ID NO: 56740 - DNA, 20 bp, Artificial Sequence
  Synthetic oligonucleotide; CAG chr11 5152030 5152049 5152033 -
cacattgcagggtatagagt

SEQ ID NO: 56741 - DNA, 20 bp, Artificial Sequence
  Synthetic oligonucleotide; AGG chr11 5152029 5152048 5152032 -
acattgcagggtatagagtc

SEQ ID NO: 56742 - DNA, 20 bp, Artificial Sequence
  Synthetic oligonucleotide; TGG chr11 5152018 5152037 5152021 -
tatagagtcaggcatccttg

SEQ ID NO: 56743 - DNA, 20 bp, Artificial Sequence
  Synthetic oligonucleotide; TGG chr11 5152012 5152031 5152015 -
gtcaggcatccttgtggcca

SEQ ID NO: 56744 - DNA, 20 bp, Artificial Sequence
  Synthetic oligonucleotide; TGG chr11 5152006 5152025 5152009 -
catccttgtggccatggccc

SEQ ID NO: 56745 - DNA, 20 bp, Artificial Sequence
  Synthetic oligonucleotide; TGG chr11 5151994 5152013 5151997 -
catggccctggaccgttatg

SEQ ID NO: 56746 - DNA, 20 bp, Artificial Sequence
  Synthetic oligonucleotide; AAG chr11 5151975 5151994 5151978 -
gtggccatctgttatccact

SEQ ID NO: 56747 - DNA, 20 bp, Artificial Sequence
  Synthetic oligonucleotide; CAG chr11 5151950 5151969 5151953 -
atgccaacatcttcacccac

SEQ ID NO: 56748 - DNA, 20 bp, Artificial Sequence
  Synthetic oligonucleotide; CAG chr11 5151938 5151957 5151941 -
tcacccaccagcttgtcatt

SEQ ID NO: 56749 - DNA, 20 bp, Artificial Sequence
  Synthetic oligonucleotide; TAG chr11 5151934 5151953 5151937 -
ccaccagcttgtcattcaga

SEQ ID NO: 56750 - DNA, 20 bp, Artificial Sequence
  Synthetic oligonucleotide; AGG chr11 5151933 5151952 5151936 -
caccagcttgtcattcagat

SEQ ID NO: 56751 - DNA, 20 bp, Artificial Sequence
  Synthetic oligonucleotide; TGG chr11 5151925 5151944 5151928 -
tgtcattcagataggaacta

SEQ ID NO: 56752 - DNA, 20 bp, Artificial Sequence
  Synthetic oligonucleotide; CAG chr11 5151915 5151934 5151918 -
ataggaactatggtcgtact

SEQ ID NO: 56753 - DNA, 20 bp, Artificial Sequence
  Synthetic oligonucleotide; AGG chr11 5151914 5151933 5151917 -
taggaactatggtcgtactc

SEQ ID NO: 56754 - DNA, 20 bp, Artificial Sequence
  Synthetic oligonucleotide; GGG chr11 5151913 5151932 5151916 -
aggaactatggtcgtactca

SEQ ID NO: 56755 - DNA, 20 bp, Artificial Sequence
  Synthetic oligonucleotide; TAG chr11 5151898 5151917 5151901 -
actcagggctgctattcttg

SEQ ID NO: 56756 - DNA, 20 bp, Artificial Sequence
  Synthetic oligonucleotide; TAG chr11 5151886 5151905 5151889 -
tattcttgtagccccatgcc

SEQ ID NO: 56757 - DNA, 20 bp, Artificial Sequence
  Synthetic oligonucleotide; AAG chr11 5151875 5151894 5151878 -
ccccatgcctagtactgata

SEQ ID NO: 56758 - DNA, 20 bp, Artificial Sequence
  Synthetic oligonucleotide; CGG chr11 5151869 5151888 5151872 -
gcctagtactgataaagtgc

SEQ ID NO: 56759 - DNA, 20 bp, Artificial Sequence
  Synthetic oligonucleotide; CAG chr11 5151847 5151866 5151850 -
gtttcaattttatcacacaa

SEQ ID NO: 56760 - DNA, 20 bp, Artificial Sequence
  Synthetic oligonucleotide; GAG chr11 5151824 5151843 5151827 -
tcatctcccactcctactgt

SEQ ID NO: 56761 - DNA, 20 bp, Artificial Sequence
  Synthetic oligonucleotide; TGG chr11 5151817 5151836 5151820 -
ccactcctactgtgagcata

SEQ ID NO: 56762 - DNA, 20 bp, Artificial Sequence
  Synthetic oligonucleotide; TAG chr11 5151802 5151821 5151805 -
gcatatggccattgtgaaac

SEQ ID NO: 56763 - DNA, 20 bp, Artificial Sequence
  Synthetic oligonucleotide; CAG chr11 5151799 5151818 5151802 -
tatggccattgtgaaactag

SEQ ID NO: 56764 - DNA, 20 bp, Artificial Sequence
  Synthetic oligonucleotide; CAG chr11 5151796 5151815 5151799 -
ggccattgtgaaactagcag

SEQ ID NO: 56765 - DNA, 20 bp, Artificial Sequence
  Synthetic oligonucleotide; AAG chr11 5151784 5151803 5151787 -
actagcagcagcaaatgttc

SEQ ID NO: 56766 - DNA, 20 bp, Artificial Sequence
  Synthetic oligonucleotide; TGG chr11 5151768 5151787 5151771 -
gttcaagtcaacaaaatcta

SEQ ID NO: 56767 - DNA, 20 bp, Artificial Sequence
  Synthetic oligonucleotide; TGG chr11 5151757 5151776 5151760 -
caaaatctatggtttgtttg

SEQ ID NO: 56768 - DNA, 20 bp, Artificial Sequence
  Synthetic oligonucleotide; TAG chr11 5151745 5151764 5151748 -
tttgtttgtggccttcactg

SEQ ID NO: 56769 - DNA, 20 bp, Artificial Sequence
  Synthetic oligonucleotide; CAG chr11 5151742 5151761 5151745 -
gtttgtggccttcactgtag

SEQ ID NO: 56770 - DNA, 20 bp, Artificial Sequence
  Synthetic oligonucleotide; AGG chr11 5151741 5151760 5151744 -
tttgtggccttcactgtagc

SEQ ID NO: 56771 - DNA, 20 bp, Artificial Sequence
  Synthetic oligonucleotide; CAG chr11 5151704 5151723 5151707 -
tcatcacattgtcctacatc

SEQ ID NO: 56772 - DNA, 20 bp, Artificial Sequence
  Synthetic oligonucleotide; CAG chr11 5151691 5151710 5151694 -
ctacatccagatatttatca

SEQ ID NO: 56773 - DNA, 20 bp, Artificial Sequence
  Synthetic oligonucleotide; CAG chr11 5151674 5151693 5151677 -
tcacagtttttcgtttgccc

SEQ ID NO: 56774 - DNA, 20 bp, Artificial Sequence
  Synthetic oligonucleotide; AAG chr11 5151671 5151690 5151674 -
cagtttttcgtttgccccag

SEQ ID NO: 56775 - DNA, 20 bp, Artificial Sequence
  Synthetic oligonucleotide; AGG chr11 5151670 5151689 5151673 -
agtttttcgtttgccccaga

SEQ ID NO: 56776 - DNA, 20 bp, Artificial Sequence
  Synthetic oligonucleotide; GAG chr11 5151668 5151687 5151671 -
tttttcgtttgccccagaag

SEQ ID NO: 56777 - DNA, 20 bp, Artificial Sequence
  Synthetic oligonucleotide; AGG chr11 5151667 5151686 5151670 -
ttttcgtttgccccagaagg

SEQ ID NO: 56778 - DNA, 20 bp, Artificial Sequence
  Synthetic oligonucleotide; TAG chr11 5151663 5151682 5151666 -
cgtttgccccagaaggaggc

SEQ ID NO: 56779 - DNA, 20 bp, Artificial Sequence
  Synthetic oligonucleotide; AGG chr11 5151662 5151681 5151665 -
gtttgccccagaaggaggct

SEQ ID NO: 56780 - DNA, 20 bp, Artificial Sequence
  Synthetic oligonucleotide; AAG chr11 5151655 5151674 5151658 -
ccagaaggaggctaggttta

SEQ ID NO: 56781 - DNA, 20 bp, Artificial Sequence
  Synthetic oligonucleotide; CAG chr11 5151614 5151633 5151617 -
ctcacatctgtgtcttcctc

SEQ ID NO: 56782 - DNA, 20 bp, Artificial Sequence
  Synthetic oligonucleotide; TAG chr11 5151576 5151595 5151579 -
ttcttctccttcttcacaca

SEQ ID NO: 56783 - DNA, 20 bp, Artificial Sequence
  Synthetic oligonucleotide; AGG chr11 5151575 5151594 5151578 -
tcttctccttcttcacacat

SEQ ID NO: 56784 - DNA, 20 bp, Artificial Sequence
  Synthetic oligonucleotide; TGG chr11 5151570 5151589 5151573 -
tccttcttcacacataggtt

SEQ ID NO: 56785 - DNA, 20 bp, Artificial Sequence
  Synthetic oligonucleotide; GGG chr11 5151569 5151588 5151572 -
ccttcttcacacataggttt

SEQ ID NO: 56786 - DNA, 20 bp, Artificial Sequence
  Synthetic oligonucleotide; TAG chr11 5151531 5151550 5151534 -
tatatccatattctcttttc

SEQ ID NO: 56787 - DNA, 20 bp, Artificial Sequence
  Synthetic oligonucleotide; TGG chr11 5151517 5151536 5151520 -
cttttctagcatttacttgc

SEQ ID NO: 56788 - DNA, 20 bp, Artificial Sequence
  Synthetic oligonucleotide; TGG chr11 5151486 5151505 5151489 -
tttctcaatccacttgtcta

SEQ ID NO: 56789 - DNA, 20 bp, Artificial Sequence
  Synthetic oligonucleotide; AAG chr11 5151479 5151498 5151482 -
atccacttgtctatggtgca

SEQ ID NO: 56790 - DNA, 20 bp, Artificial Sequence
  Synthetic oligonucleotide; CAG chr11 5151470 5151489 5151473 -
tctatggtgcaaagaccaca

SEQ ID NO: 56791 - DNA, 20 bp, Artificial Sequence
  Synthetic oligonucleotide; TGG chr11 5151454 5151473 5151457 -
cacacagattcgcattcatg

SEQ ID NO: 56792 - DNA, 20 bp, Artificial Sequence
  Synthetic oligonucleotide; CAG chr11 5151392 5151411 5151395 -
ctacatgcttttttcttttg

SEQ ID NO: 56793 - DNA, 20 bp, Artificial Sequence
  Synthetic oligonucleotide; TAG chr11 5151389 5151408 5151392 -
catgcttttttcttttgcag

SEQ ID NO: 56794 - DNA, 20 bp, Artificial Sequence
  Synthetic oligonucleotide; GAG chr11 5151350 5151369 5151353 -
aaacaaaaaacatattattt

SEQ ID NO: 56795 - DNA, 20 bp, Artificial Sequence
  Synthetic oligonucleotide; TGG chr11 5151343 5151362 5151346 -
aaacatattatttgagatgc

SEQ ID NO: 56796 - DNA, 20 bp, Artificial Sequence
  Synthetic oligonucleotide; GGG chr11 5151342 5151361 5151345 -
aacatattatttgagatgct

SEQ ID NO: 56797 - DNA, 20 bp, Artificial Sequence
  Synthetic oligonucleotide; CAG chr11 5151325 5151344 5151328 -
gctgggtttgtgaaatctgc

SEQ ID NO: 56798 - DNA, 20 bp, Artificial Sequence
  Synthetic oligonucleotide; TAG chr11 5151317 5151336 5151320 -
tgtgaaatctgccagcacaa

SEQ ID NO: 56799 - DNA, 20 bp, Artificial Sequence
  Synthetic oligonucleotide; TGG chr11 5151313 5151332 5151316 -
aaatctgccagcacaatagc

SEQ ID NO: 56800 - DNA, 20 bp, Artificial Sequence
  Synthetic oligonucleotide; TAG chr11 5151307 5151326 5151310 -
gccagcacaatagctggttt

SEQ ID NO: 56801 - DNA, 20 bp, Artificial Sequence
  Synthetic oligonucleotide; TGG chr11 5151297 5151316 5151300 -
tagctggttttagatcatca

SEQ ID NO: 56802 - DNA, 20 bp, Artificial Sequence
  Synthetic oligonucleotide; CAG chr11 5151283 5151302 5151286 -
tcatcatggctcatatcaat

SEQ ID NO: 56803 - DNA, 20 bp, Artificial Sequence
  Synthetic oligonucleotide; TGG chr11 5151280 5151299 5151283 -
tcatggctcatatcaatcag

SEQ ID NO: 56804 - DNA, 20 bp, Artificial Sequence
  Synthetic oligonucleotide; GGG chr11 5151279 5151298 5151282 -
catggctcatatcaatcagt

SEQ ID NO: 56805 - DNA, 20 bp, Artificial Sequence
  Synthetic oligonucleotide; AAG chr11 5151251 5151270 5151254 -
gaattctacgtgactaatga

SEQ ID NO: 56806 - DNA, 20 bp, Artificial Sequence
  Synthetic oligonucleotide; GAG chr11 5151247 5151266 5151250 -
tctacgtgactaatgaaagt

SEQ ID NO: 56807 - DNA, 20 bp, Artificial Sequence
  Synthetic oligonucleotide; AAG chr11 5151244 5151263 5151247 -
acgtgactaatgaaagtgag

SEQ ID NO: 56808 - DNA, 20 bp, Artificial Sequence
  Synthetic oligonucleotide; GAG chr11 5151233 5151252 5151236 -
gaaagtgagaagtgtgaaat

SEQ ID NO: 56809 - DNA, 20 bp, Artificial Sequence
  Synthetic oligonucleotide; AAG chr11 5151228 5151247 5151231 -
tgagaagtgtgaaatgagtg

SEQ ID NO: 56810 - DNA, 20 bp, Artificial Sequence
  Synthetic oligonucleotide; TAG chr11 5151225 5151244 5151228 -
gaagtgtgaaatgagtgaag

SEQ ID NO: 56811 - DNA, 20 bp, Artificial Sequence
  Synthetic oligonucleotide; TAG chr11 5151190 5151209 5151193 -
attttttctcttttattctt

SEQ ID NO: 56812 - DNA, 20 bp, Artificial Sequence
  Synthetic oligonucleotide; TGG chr11 5151183 5151202 5151186 -
ctcttttattctttagcccc

SEQ ID NO: 56813 - DNA, 20 bp, Artificial Sequence
  Synthetic oligonucleotide; GAG chr11 5151178 5151197 5151181 -
ttattctttagcccctggtt

SEQ ID NO: 56814 - DNA, 20 bp, Artificial Sequence
  Synthetic oligonucleotide; AAG chr11 5151165 5151184 5151168 -
cctggttgagttattcttct

SEQ ID NO: 56815 - DNA, 20 bp, Artificial Sequence
  Synthetic oligonucleotide; CAG chr11 5151152 5151171 5151155 -
ttcttctaagaatatttctc

SEQ ID NO: 56816 - DNA, 20 bp, Artificial Sequence
  Synthetic oligonucleotide; AGG chr11 5151151 5151170 5151154 -
tcttctaagaatatttctcc

SEQ ID NO: 56817 - DNA, 20 bp, Artificial Sequence
  Synthetic oligonucleotide; GAG chr11 5151149 5151168 5151152 -
ttctaagaatatttctccag

SEQ ID NO: 56818 - DNA, 20 bp, Artificial Sequence
  Synthetic oligonucleotide; AGG chr11 5151148 5151167 5151151 -
tctaagaatatttctccagg

SEQ ID NO: 56819 - DNA, 20 bp, Artificial Sequence
  Synthetic oligonucleotide; AAG chr11 5151104 5151123 5151107 -
cactgaatttaaatgcacct

SEQ ID NO: 56820 - DNA, 20 bp, Artificial Sequence
  Synthetic oligonucleotide; AGG chr11 5151103 5151122 5151106 -
actgaatttaaatgcaccta

SEQ ID NO: 56821 - DNA, 20 bp, Artificial Sequence
  Synthetic oligonucleotide; CAG chr11 5151081 5151100 5151084 -
gctcgttgttctgaaacatc

SEQ ID NO: 56822 - DNA, 20 bp, Artificial Sequence
  Synthetic oligonucleotide; AGG chr11 5151080 5151099 5151083 -
ctcgttgttctgaaacatcc

SEQ ID NO: 56823 - DNA, 20 bp, Artificial Sequence
  Synthetic oligonucleotide; GGG chr11 5151079 5151098 5151082 -
tcgttgttctgaaacatcca

SEQ ID NO: 56824 - DNA, 20 bp, Artificial Sequence
  Synthetic oligonucleotide; AAG chr11 5151063 5151082 5151066 -
tccagggactcaatgaaaac

SEQ ID NO: 56825 - DNA, 20 bp, Artificial Sequence
  Synthetic oligonucleotide; AAG chr11 5151011 5151030 5151014 -
tgccttaaaaaaaaaaatca

SEQ ID NO: 56826 - DNA, 20 bp, Artificial Sequence
  Synthetic oligonucleotide; AGG chr11 5151010 5151029 5151013 -
gccttaaaaaaaaaaatcaa

SEQ ID NO: 56827 - DNA, 20 bp, Artificial Sequence
  Synthetic oligonucleotide; AAG chr11 5151007 5151026 5151010 -
ttaaaaaaaaaaatcaaagg

SEQ ID NO: 56828 - DNA, 20 bp, Artificial Sequence
  Synthetic oligonucleotide; AAG chr11 5150980 5150999 5150983 -
tgttaactgtgttcttgtca

SEQ ID NO: 56829 - DNA, 20 bp, Artificial Sequence
  Synthetic oligonucleotide; AAG chr11 5150960 5150979 5150963 -
aagaaaatcttatgaatatc

SEQ ID NO: 56830 - DNA, 20 bp, Artificial Sequence
  Synthetic oligonucleotide; GAG chr11 5150958 5150977 5150961 -
gaaaatcttatgaatatcaa

SEQ ID NO: 56831 - DNA, 20 bp, Artificial Sequence
  Synthetic oligonucleotide; AAG chr11 5150949 5150968 5150952 -
atgaatatcaagagacaata

SEQ ID NO: 56832 - DNA, 20 bp, Artificial Sequence
  Synthetic oligonucleotide; CAG chr11 5150924 5150943 5150927 -
taaaaatttaaatacatttt

SEQ ID NO: 56833 - DNA, 20 bp, Artificial Sequence
  Synthetic oligonucleotide; GAG chr11 5150922 5150941 5150925 -
aaaatttaaatacattttca

SEQ ID NO: 56834 - DNA, 20 bp, Artificial Sequence
  Synthetic oligonucleotide; AAG chr11 5150913 5150932 5150916 -
atacattttcagagtcatac

SEQ ID NO: 56835 - DNA, 20 bp, Artificial Sequence
  Synthetic oligonucleotide; AGG chr11 5150912 5150931 5150915 -
tacattttcagagtcataca

SEQ ID NO: 56836 - DNA, 20 bp, Artificial Sequence
  Synthetic oligonucleotide; CAG chr11 5150904 5150923 5150907 -
cagagtcatacaaggaatta

SEQ ID NO: 56837 - DNA, 20 bp, Artificial Sequence
  Synthetic oligonucleotide; AGG chr11 5150903 5150922 5150906 -
agagtcatacaaggaattac

SEQ ID NO: 56838 - DNA, 20 bp, Artificial Sequence
  Synthetic oligonucleotide; TAG chr11 5150891 5150910 5150894 -
ggaattacaggcacaaaaat

SEQ ID NO: 56839 - DNA, 20 bp, Artificial Sequence
  Synthetic oligonucleotide; CAG chr11 5150885 5150904 5150888 -
acaggcacaaaaattagaac

SEQ ID NO: 56840 - DNA, 20 bp, Artificial Sequence
  Synthetic oligonucleotide; AGG chr11 5150884 5150903 5150887 -
caggcacaaaaattagaacc

SEQ ID NO: 56841 - DNA, 20 bp, Artificial Sequence
  Synthetic oligonucleotide; CAG chr11 5150768 5150787 5150771 -
atattaaaaatactatacta

SEQ ID NO: 56842 - DNA, 20 bp, Artificial Sequence
  Synthetic oligonucleotide; TAG chr11 5150752 5150771 5150755 -
actacagaatcgtgacataa

SEQ ID NO: 56843 - DNA, 20 bp, Artificial Sequence
  Synthetic oligonucleotide; TGG chr11 5150743 5150762 5150746 -
tcgtgacataatagtaaatc

SEQ ID NO: 56844 - DNA, 20 bp, Artificial Sequence
  Synthetic oligonucleotide; CAG chr11 5150738 5150757 5150741 -
acataatagtaaatctggca

SEQ ID NO: 56845 - DNA, 20 bp, Artificial Sequence
  Synthetic oligonucleotide; GAG chr11 5150721 5150740 5150724 -
gcacagtgaataattctcat

SEQ ID NO: 56846 - DNA, 20 bp, Artificial Sequence
  Synthetic oligonucleotide; TGG chr11 5150700 5150719 5150703 -
agtttgtacctatgtaattc

SEQ ID NO: 56847 - DNA, 20 bp, Artificial Sequence
  Synthetic oligonucleotide; AAG chr11 5150695 5150714 5150698 -
gtacctatgtaattctggaa

SEQ ID NO: 56848 - DNA, 20 bp, Artificial Sequence
  Synthetic oligonucleotide; GAG chr11 5150693 5150712 5150696 -
acctatgtaattctggaaaa

SEQ ID NO: 56849 - DNA, 20 bp, Artificial Sequence
  Synthetic oligonucleotide; GAG chr11 5150691 5150710 5150694 -
ctatgtaattctggaaaaga

SEQ ID NO: 56850 - DNA, 20 bp, Artificial Sequence
  Synthetic oligonucleotide; AAG chr11 5150683 5150702 5150686 -
ttctggaaaagagagactga

SEQ ID NO: 56851 - DNA, 20 bp, Artificial Sequence
  Synthetic oligonucleotide; AGG chr11 5150682 5150701 5150685 -
tctggaaaagagagactgaa

SEQ ID NO: 56852 - DNA, 20 bp, Artificial Sequence
  Synthetic oligonucleotide; AAG chr11 5150679 5150698 5150682 -
ggaaaagagagactgaaagg

SEQ ID NO: 56853 - DNA, 20 bp, Artificial Sequence
  Synthetic oligonucleotide; GAG chr11 5150677 5150696 5150680 -
aaaagagagactgaaaggaa

SEQ ID NO: 56854 - DNA, 20 bp, Artificial Sequence
  Synthetic oligonucleotide; GAG chr11 5150675 5150694 5150678 -
aagagagactgaaaggaaga

SEQ ID NO: 56855 - DNA, 20 bp, Artificial Sequence
  Synthetic oligonucleotide; AGG chr11 5150674 5150693 5150677 -
agagagactgaaaggaagag

SEQ ID NO: 56856 - DNA, 20 bp, Artificial Sequence
  Synthetic oligonucleotide; TGG chr11 5150671 5150690 5150674 -
gagactgaaaggaagagagg

SEQ ID NO: 56857 - DNA, 20 bp, Artificial Sequence
  Synthetic oligonucleotide; GGG chr11 5150670 5150689 5150673 -
agactgaaaggaagagaggt

SEQ ID NO: 56858 - DNA, 20 bp, Artificial Sequence
  Synthetic oligonucleotide; GGG chr11 5150669 5150688 5150672 -
gactgaaaggaagagaggtg

SEQ ID NO: 56859 - DNA, 20 bp, Artificial Sequence
  Synthetic oligonucleotide; TGG chr11 5150664 5150683 5150667 -
aaaggaagagaggtggggaa

SEQ ID NO: 56860 - DNA, 20 bp, Artificial Sequence
  Synthetic oligonucleotide; GGG chr11 5150663 5150682 5150666 -
aaggaagagaggtggggaat

SEQ ID NO: 56861 - DNA, 20 bp, Artificial Sequence
  Synthetic oligonucleotide; CAG chr11 5150660 5150679 5150663 -
gaagagaggtggggaatggg

SEQ ID NO: 56862 - DNA, 20 bp, Artificial Sequence
  Synthetic oligonucleotide; AGG chr11 5150659 5150678 5150662 -
aagagaggtggggaatgggc

SEQ ID NO: 56863 - DNA, 20 bp, Artificial Sequence
  Synthetic oligonucleotide; AAG chr11 5150655 5150674 5150658 -
gaggtggggaatgggcaggc

SEQ ID NO: 56864 - DNA, 20 bp, Artificial Sequence
  Synthetic oligonucleotide; AGG chr11 5150654 5150673 5150657 -
aggtggggaatgggcaggca

SEQ ID NO: 56865 - DNA, 20 bp, Artificial Sequence
  Synthetic oligonucleotide; GGG chr11 5150653 5150672 5150656 -
ggtggggaatgggcaggcaa

SEQ ID NO: 56866 - DNA, 20 bp, Artificial Sequence
  Synthetic oligonucleotide; AAG chr11 5150649 5150668 5150652 -
gggaatgggcaggcaaggga

SEQ ID NO: 56867 - DNA, 20 bp, Artificial Sequence
  Synthetic oligonucleotide; AAG chr11 5150646 5150665 5150649 -
aatgggcaggcaagggaaag

SEQ ID NO: 56868 - DNA, 20 bp, Artificial Sequence
  Synthetic oligonucleotide; GAG chr11 5150644 5150663 5150647 -
tgggcaggcaagggaaagaa

SEQ ID NO: 56869 - DNA, 20 bp, Artificial Sequence
  Synthetic oligonucleotide; GAG chr11 5150642 5150661 5150645 -
ggcaggcaagggaaagaaga

SEQ ID NO: 56870 - DNA, 20 bp, Artificial Sequence
  Synthetic oligonucleotide; AAG chr11 5150632 5150651 5150635 -
ggaaagaagagagaaataac

SEQ ID NO: 56871 - DNA, 20 bp, Artificial Sequence
  Synthetic oligonucleotide; TAG chr11 5150621 5150640 5150624 -
agaaataacaagtgtacaca

SEQ ID NO: 56872 - DNA, 20 bp, Artificial Sequence
  Synthetic oligonucleotide; AGG chr11 5150620 5150639 5150623 -
gaaataacaagtgtacacat

SEQ ID NO: 56873 - DNA, 20 bp, Artificial Sequence
  Synthetic oligonucleotide; TGG chr11 5150614 5150633 5150617 -
acaagtgtacacataggatg

SEQ ID NO: 56874 - DNA, 20 bp, Artificial Sequence
  Synthetic oligonucleotide; GAG chr11 5150612 5150631 5150615 -
aagtgtacacataggatgtg

SEQ ID NO: 56875 - DNA, 20 bp, Artificial Sequence
  Synthetic oligonucleotide; CAG chr11 5150607 5150626 5150610 -
tacacataggatgtggagtt

SEQ ID NO: 56876 - DNA, 20 bp, Artificial Sequence
  Synthetic oligonucleotide; GAG chr11 5150605 5150624 5150608 -
cacataggatgtggagttca

SEQ ID NO: 56877 - DNA, 20 bp, Artificial Sequence
  Synthetic oligonucleotide; GAG chr11 5150603 5150622 5150606 -
cataggatgtggagttcaga

SEQ ID NO: 56878 - DNA, 20 bp, Artificial Sequence
  Synthetic oligonucleotide; AAG chr11 5150596 5150615 5150599 -
tgtggagttcagagagaatg

SEQ ID NO: 56879 - DNA, 20 bp, Artificial Sequence
  Synthetic oligonucleotide; AAG chr11 5150577 5150596 5150580 -
gaagcattgaaatctaacca

SEQ ID NO: 56880 - DNA, 20 bp, Artificial Sequence
  Synthetic oligonucleotide; CAG chr11 5150574 5150593 5150577 -
gcattgaaatctaaccaaag

SEQ ID NO: 56881 - DNA, 20 bp, Artificial Sequence
  Synthetic oligonucleotide; AGG chr11 5150573 5150592 5150576 -
cattgaaatctaaccaaagc

SEQ ID NO: 56882 - DNA, 20 bp, Artificial Sequence
  Synthetic oligonucleotide; GGG chr11 5150572 5150591 5150575 -
attgaaatctaaccaaagca

SEQ ID NO: 56883 - DNA, 20 bp, Artificial Sequence
  Synthetic oligonucleotide; GGG chr11 5150571 5150590 5150574 -
ttgaaatctaaccaaagcag

SEQ ID NO: 56884 - DNA, 20 bp, Artificial Sequence
  Synthetic oligonucleotide; GAG chr11 5150569 5150588 5150572 -
gaaatctaaccaaagcaggg

SEQ ID NO: 56885 - DNA, 20 bp, Artificial Sequence
  Synthetic oligonucleotide; TGG chr11 5150542 5150561 5150545 -
atttattgtattttgttttt

SEQ ID NO: 56886 - DNA, 20 bp, Artificial Sequence
  Synthetic oligonucleotide; TAG chr11 5150538 5150557 5150541 -
attgtattttgttttttggt

SEQ ID NO: 56887 - DNA, 20 bp, Artificial Sequence
  Synthetic oligonucleotide; AGG chr11 5150537 5150556 5150540 -
ttgtattttgttttttggtt

SEQ ID NO: 56888 - DNA, 20 bp, Artificial Sequence
  Synthetic oligonucleotide; TAG chr11 5150534 5150553 5150537 -
tattttgttttttggttagg

SEQ ID NO: 56889 - DNA, 20 bp, Artificial Sequence
  Synthetic oligonucleotide; GAG chr11 5150516 5150535 5150519 -
ggtagttacctctgattctt

SEQ ID NO: 56890 - DNA, 20 bp, Artificial Sequence
  Synthetic oligonucleotide; AGG chr11 5150515 5150534 5150518 -
gtagttacctctgattcttg

SEQ ID NO: 56891 - DNA, 20 bp, Artificial Sequence
  Synthetic oligonucleotide; TGG chr11 5150507 5150526 5150510 -
ctctgattcttgaggaatga

SEQ ID NO: 56892 - DNA, 20 bp, Artificial Sequence
  Synthetic oligonucleotide; GAG chr11 5150502 5150521 5150505 -
attcttgaggaatgatggat

SEQ ID NO: 56893 - DNA, 20 bp, Artificial Sequence
  Synthetic oligonucleotide; TAG chr11 5150499 5150518 5150502 -
cttgaggaatgatggatgag

SEQ ID NO: 56894 - DNA, 20 bp, Artificial Sequence
  Synthetic oligonucleotide; AAG chr11 5150494 5150513 5150497 -
ggaatgatggatgagtagcc

SEQ ID NO: 56895 - DNA, 20 bp, Artificial Sequence
  Synthetic oligonucleotide; AGG chr11 5150493 5150512 5150496 -
gaatgatggatgagtagcca

SEQ ID NO: 56896 - DNA, 20 bp, Artificial Sequence
  Synthetic oligonucleotide; AAG chr11 5150490 5150509 5150493 -
tgatggatgagtagccaagg

SEQ ID NO: 56897 - DNA, 20 bp, Artificial Sequence
  Synthetic oligonucleotide; AAG chr11 5150486 5150505 5150489 -
ggatgagtagccaaggaagt

SEQ ID NO: 56898 - DNA, 20 bp, Artificial Sequence
  Synthetic oligonucleotide; CAG chr11 5150471 5150490 5150474 -
gaagtaagaacacatcatgc

SEQ ID NO: 56899 - DNA, 20 bp, Artificial Sequence
  Synthetic oligonucleotide; AGG chr11 5150470 5150489 5150473 -
aagtaagaacacatcatgcc

SEQ ID NO: 56900 - DNA, 20 bp, Artificial Sequence
  Synthetic oligonucleotide; TAG chr11 5150467 5150486 5150470 -
taagaacacatcatgccagg

SEQ ID NO: 56901 - DNA, 20 bp, Artificial Sequence
  Synthetic oligonucleotide; TAG chr11 5150463 5150482 5150466 -
aacacatcatgccaggtaga

SEQ ID NO: 56902 - DNA, 20 bp, Artificial Sequence
  Synthetic oligonucleotide; TAG chr11 5150460 5150479 5150463 -
acatcatgccaggtagatag

SEQ ID NO: 56903 - DNA, 20 bp, Artificial Sequence
  Synthetic oligonucleotide; GAG chr11 5150458 5150477 5150461 -
atcatgccaggtagatagta

SEQ ID NO: 56904 - DNA, 20 bp, Artificial Sequence
  Synthetic oligonucleotide; AGG chr11 5150457 5150476 5150460 -
tcatgccaggtagatagtag

SEQ ID NO: 56905 - DNA, 20 bp, Artificial Sequence
  Synthetic oligonucleotide; GAG chr11 5150455 5150474 5150458 -
atgccaggtagatagtagag

SEQ ID NO: 56906 - DNA, 20 bp, Artificial Sequence
  Synthetic oligonucleotide; TAG chr11 5150444 5150463 5150447 -
atagtagaggagatttaaac

SEQ ID NO: 56907 - DNA, 20 bp, Artificial Sequence
  Synthetic oligonucleotide; TAG chr11 5150435 5150454 5150438 -
gagatttaaactagataatg

SEQ ID NO: 56908 - DNA, 20 bp, Artificial Sequence
  Synthetic oligonucleotide; AAG chr11 5150429 5150448 5150432 -
taaactagataatgtagttt

SEQ ID NO: 56909 - DNA, 20 bp, Artificial Sequence
  Synthetic oligonucleotide; AGG chr11 5150428 5150447 5150431 -
aaactagataatgtagttta

SEQ ID NO: 56910 - DNA, 20 bp, Artificial Sequence
  Synthetic oligonucleotide; TAG chr11 5150419 5150438 5150422 -
aatgtagtttaaggtaactc

SEQ ID NO: 56911 - DNA, 20 bp, Artificial Sequence
  Synthetic oligonucleotide; TGG chr11 5150405 5150424 5150408 -
taactctagttttttcaata

SEQ ID NO: 56912 - DNA, 20 bp, Artificial Sequence
  Synthetic oligonucleotide; GAG chr11 5150399 5150418 5150402 -
tagttttttcaatatggtat

SEQ ID NO: 56913 - DNA, 20 bp, Artificial Sequence
  Synthetic oligonucleotide; AAG chr11 5150393 5150412 5150396 -
tttcaatatggtatgagtgc

SEQ ID NO: 56914 - DNA, 20 bp, Artificial Sequence
  Synthetic oligonucleotide; AGG chr11 5150392 5150411 5150395 -
ttcaatatggtatgagtgca

SEQ ID NO: 56915 - DNA, 20 bp, Artificial Sequence
  Synthetic oligonucleotide; TAG chr11 5150389 5150408 5150392 -
aatatggtatgagtgcaagg

SEQ ID NO: 56916 - DNA, 20 bp, Artificial Sequence
  Synthetic oligonucleotide; TGG chr11 5150382 5150401 5150385 -
tatgagtgcaaggtagaact

SEQ ID NO: 56917 - DNA, 20 bp, Artificial Sequence
  Synthetic oligonucleotide; GGG chr11 5150381 5150400 5150384 -
atgagtgcaaggtagaactt

SEQ ID NO: 56918 - DNA, 20 bp, Artificial Sequence
  Synthetic oligonucleotide; GGG chr11 5150380 5150399 5150383 -
tgagtgcaaggtagaacttg

SEQ ID NO: 56919 - DNA, 20 bp, Artificial Sequence
  Synthetic oligonucleotide; GAG chr11 5150378 5150397 5150381 -
agtgcaaggtagaacttggg

SEQ ID NO: 56920 - DNA, 20 bp, Artificial Sequence
  Synthetic oligonucleotide; AAG chr11 5150373 5150392 5150376 -
aaggtagaacttggggagac

SEQ ID NO: 56921 - DNA, 20 bp, Artificial Sequence
  Synthetic oligonucleotide; AGG chr11 5150372 5150391 5150375 -
aggtagaacttggggagaca

SEQ ID NO: 56922 - DNA, 20 bp, Artificial Sequence
  Synthetic oligonucleotide; TGG chr11 5150350 5150369 5150353 -
gaaaatatgaatatcaaaaa

SEQ ID NO: 56923 - DNA, 20 bp, Artificial Sequence
  Synthetic oligonucleotide; CAG chr11 5150333 5150352 5150336 -
aaatggctattaatgttgtg

SEQ ID NO: 56924 - DNA, 20 bp, Artificial Sequence
  Synthetic oligonucleotide; GAG chr11 5150331 5150350 5150334 -
atggctattaatgttgtgca

SEQ ID NO: 56925 - DNA, 20 bp, Artificial Sequence
  Synthetic oligonucleotide; TGG chr11 5150324 5150343 5150327 -
ttaatgttgtgcagagttgc

SEQ ID NO: 56926 - DNA, 20 bp, Artificial Sequence
  Synthetic oligonucleotide; AAG chr11 5150309 5150328 5150312 -
gttgctggactttattccaa

SEQ ID NO: 56927 - DNA, 20 bp, Artificial Sequence
  Synthetic oligonucleotide; TGG chr11 5150292 5150311 5150295 -
caaaagctataatgtgccat

SEQ ID NO: 56928 - DNA, 20 bp, Artificial Sequence
  Synthetic oligonucleotide; GAG chr11 5150290 5150309 5150293 -
aaagctataatgtgccattg

SEQ ID NO: 56929 - DNA, 20 bp, Artificial Sequence
  Synthetic oligonucleotide; GAG chr11 5150288 5150307 5150291 -
agctataatgtgccattgga

SEQ ID NO: 56930 - DNA, 20 bp, Artificial Sequence
  Synthetic oligonucleotide; AAG chr11 5150259 5150278 5150262 -
tttgtttgcttgtgttctac

SEQ ID NO: 56931 - DNA, 20 bp, Artificial Sequence
  Synthetic oligonucleotide; AAG chr11 5150255 5150274 5150258 -
tttgcttgtgttctacaagt

SEQ ID NO: 56932 - DNA, 20 bp, Artificial Sequence
  Synthetic oligonucleotide; TGG chr11 5150209 5150228 5150212 -
tgtgtgtgtgtgtgtctgct

SEQ ID NO: 56933 - DNA, 20 bp, Artificial Sequence
  Synthetic oligonucleotide; GGG chr11 5150208 5150227 5150211 -
gtgtgtgtgtgtgtctgctt

SEQ ID NO: 56934 - DNA, 20 bp, Artificial Sequence
  Synthetic oligonucleotide; TGG chr11 5150201 5150220 5150204 -
tgtgtgtctgcttgggcatg

SEQ ID NO: 56935 - DNA, 20 bp, Artificial Sequence
  Synthetic oligonucleotide; CAG chr11 5150198 5150217 5150201 -
gtgtctgcttgggcatgtgg

SEQ ID NO: 56936 - DNA, 20 bp, Artificial Sequence
  Synthetic oligonucleotide; CAG chr11 5150186 5150205 5150189 -
gcatgtggcagcataccaca

SEQ ID NO: 56937 - DNA, 20 bp, Artificial Sequence
  Synthetic oligonucleotide; AAG chr11 5150172 5150191 5150175 -
accacacagcaaatataaat

SEQ ID NO: 56938 - DNA, 20 bp, Artificial Sequence
  Synthetic oligonucleotide; TAG chr11 5150167 5150186 5150170 -
acagcaaatataaataagtc

SEQ ID NO: 56939 - DNA, 20 bp, Artificial Sequence
  Synthetic oligonucleotide; AGG chr11 5150166 5150185 5150169 -
cagcaaatataaataagtct

SEQ ID NO: 56940 - DNA, 20 bp, Artificial Sequence
  Synthetic oligonucleotide; GGG chr11 5150165 5150184 5150168 -
agcaaatataaataagtcta

SEQ ID NO: 56941 - DNA, 20 bp, Artificial Sequence
  Synthetic oligonucleotide; TAG chr11 5150153 5150172 5150156 -
taagtctagggctattgtgt

SEQ ID NO: 56942 - DNA, 20 bp, Artificial Sequence
  Synthetic oligonucleotide; AAG chr11 5150148 5150167 5150151 -
ctagggctattgtgttagtg

SEQ ID NO: 56943 - DNA, 20 bp, Artificial Sequence
  Synthetic oligonucleotide; GAG chr11 5150146 5150165 5150149 -
agggctattgtgttagtgaa

SEQ ID NO: 56944 - DNA, 20 bp, Artificial Sequence
  Synthetic oligonucleotide; AGG chr11 5150145 5150164 5150148 -
gggctattgtgttagtgaag

SEQ ID NO: 56945 - DNA, 20 bp, Artificial Sequence
  Synthetic oligonucleotide; GAG chr11 5150143 5150162 5150146 -
gctattgtgttagtgaagag

SEQ ID NO: 56946 - DNA, 20 bp, Artificial Sequence
  Synthetic oligonucleotide; AGG chr11 5150142 5150161 5150145 -
ctattgtgttagtgaagagg

SEQ ID NO: 56947 - DNA, 20 bp, Artificial Sequence
  Synthetic oligonucleotide; TAG chr11 5150122 5150141 5150125 -
aggactatattgtctaaaat

SEQ ID NO: 56948 - DNA, 20 bp, Artificial Sequence
  Synthetic oligonucleotide; TGG chr11 5150119 5150138 5150122 -
actatattgtctaaaattag

SEQ ID NO: 56949 - DNA, 20 bp, Artificial Sequence
  Synthetic oligonucleotide; AAG chr11 5150113 5150132 5150116 -
ttgtctaaaattagtggcat

SEQ ID NO: 56950 - DNA, 20 bp, Artificial Sequence
  Synthetic oligonucleotide; CGG chr11 5150104 5150123 5150107 -
attagtggcataagaattta

SEQ ID NO: 56951 - DNA, 20 bp, Artificial Sequence
  Synthetic oligonucleotide; TAG chr11 5150100 5150119 5150103 -
gtggcataagaatttacggc

SEQ ID NO: 56952 - DNA, 20 bp, Artificial Sequence
  Synthetic oligonucleotide; CAG chr11 5150076 5150095 5150079 -
caattgttcttgaaaaacct

SEQ ID NO: 56953 - DNA, 20 bp, Artificial Sequence
  Synthetic oligonucleotide; AGG chr11 5150075 5150094 5150078 -
aattgttcttgaaaaacctc

SEQ ID NO: 56954 - DNA, 20 bp, Artificial Sequence
  Synthetic oligonucleotide; TAG chr11 5150069 5150088 5150072 -
tcttgaaaaacctcaggtca

SEQ ID NO: 56955 - DNA, 20 bp, Artificial Sequence
  Synthetic oligonucleotide; AAG chr11 5150054 5150073 5150057 -
ggtcatagatcatttttttc

SEQ ID NO: 56956 - DNA, 20 bp, Artificial Sequence
  Synthetic oligonucleotide; AGG chr11 5150053 5150072 5150056 -
gtcatagatcatttttttca

SEQ ID NO: 56957 - DNA, 20 bp, Artificial Sequence
  Synthetic oligonucleotide; TGG chr11 5150047 5150066 5150050 -
gatcatttttttcaaggtta

SEQ ID NO: 56958 - DNA, 20 bp, Artificial Sequence
  Synthetic oligonucleotide; TGG chr11 5150030 5150049 5150033 -
ttatggaaaatattcacata

SEQ ID NO: 56959 - DNA, 20 bp, Artificial Sequence
  Synthetic oligonucleotide; GGG chr11 5150029 5150048 5150032 -
tatggaaaatattcacatat

SEQ ID NO: 56960 - DNA, 20 bp, Artificial Sequence
  Synthetic oligonucleotide; CAG chr11 5150026 5150045 5150029 -
ggaaaatattcacatatggg

SEQ ID NO: 56961 - DNA, 20 bp, Artificial Sequence
  Synthetic oligonucleotide; CAG chr11 5150003 5150022 5150006 -
atgtccatactttgatttac

SEQ ID NO: 56962 - DNA, 20 bp, Artificial Sequence
  Synthetic oligonucleotide; GTGAAT chr11 5150013 5150032 5150029 +
gtatggacatctgcccatat

SEQ ID NO: 56963 - DNA, 20 bp, Artificial Sequence
  Synthetic oligonucleotide; ATGAAT chr11 5150258 5150277 5150274 +
tgtagaacacaagcaaacaa

SEQ ID NO: 56964 - DNA, 20 bp, Artificial Sequence
  Synthetic oligonucleotide; TGGAAT chr11 5150290 5150309 5150306 +
caatggcacattatagcttt

SEQ ID NO: 56965 - DNA, 20 bp, Artificial Sequence
  Synthetic oligonucleotide; TAGAGT chr11 5150397 5150416 5150413 +
tcataccatattgaaaaaac

SEQ ID NO: 56966 - DNA, 20 bp, Artificial Sequence
  Synthetic oligonucleotide; AAGAAT chr11 5150496 5150515 5150512 +
ctactcatccatcattcctc

SEQ ID NO: 56967 - DNA, 20 bp, Artificial Sequence
  Synthetic oligonucleotide; CAGAAT chr11 5150678 5150697 5150694 +
tcctttcagtctctcttttc

SEQ ID NO: 56968 - DNA, 20 bp, Artificial Sequence
  Synthetic oligonucleotide; GAGAAT chr11 5150703 5150722 5150719 +
ttacataggtacaaactcat

SEQ ID NO: 56969 - DNA, 20 bp, Artificial Sequence
  Synthetic oligonucleotide; ATGAAT chr11 5150788 5150807 5150804 +
tgcaggtttttgataaaatg

SEQ ID NO: 56970 - DNA, 20 bp, Artificial Sequence
  Synthetic oligonucleotide; AGGGAT chr11 5151010 5151029 5151026 +
ttgatttttttttttaaggc

SEQ ID NO: 56971 - DNA, 20 bp, Artificial Sequence
  Synthetic oligonucleotide; GAGAGT chr11 5151028 5151047 5151044 +
gcagggatgatcaagaaaat

SEQ ID NO: 56972 - DNA, 20 bp, Artificial Sequence
  Synthetic oligonucleotide; TTGAGT chr11 5151050 5151069 5151066 +
gagtcaacaacttgttttca

SEQ ID NO: 56973 - DNA, 20 bp, Artificial Sequence
  Synthetic oligonucleotide; CTGGAT chr11 5151058 5151077 5151074 +
aacttgttttcattgagtcc

SEQ ID NO: 56974 - DNA, 20 bp, Artificial Sequence
  Synthetic oligonucleotide; AAGAAT chr11 5151147 5151166 5151163 +
tcctggagaaatattcttag

SEQ ID NO: 56975 - DNA, 20 bp, Artificial Sequence
  Synthetic oligonucleotide; AAGAAT chr11 5151170 5151189 5151186 +
aataactcaaccaggggcta

SEQ ID NO: 56976 - DNA, 20 bp, Artificial Sequence
  Synthetic oligonucleotide; TAGAAT chr11 5151243 5151262 5151259 +
tctcactttcattagtcacg

SEQ ID NO: 56977 - DNA, 20 bp, Artificial Sequence
  Synthetic oligonucleotide; GTGGAT chr11 5151404 5151423 5151420 +
gcatgtaggcattaattaag

SEQ ID NO: 56978 - DNA, 20 bp, Artificial Sequence
  Synthetic oligonucleotide; ATGAAT chr11 5151435 5151454 5151451 +
gaacagaacatttttaccac

SEQ ID NO: 56979 - DNA, 20 bp, Artificial Sequence
  Synthetic oligonucleotide; GCGAAT chr11 5151441 5151460 5151457 +
aacatttttaccacatgaat

SEQ ID NO: 56980 - DNA, 20 bp, Artificial Sequence
  Synthetic oligonucleotide; GTGGAT chr11 5151473 5151492 5151489 +
ggtctttgcaccatagacaa

SEQ ID NO: 56981 - DNA, 20 bp, Artificial Sequence
  Synthetic oligonucleotide; GAGAAT chr11 5151516 5151535 5151532 +
agcaagtaaatgctagaaaa

SEQ ID NO: 56982 - DNA, 20 bp, Artificial Sequence
  Synthetic oligonucleotide; ATGGAT chr11 5151522 5151541 5151538 +
taaatgctagaaaagagaat

SEQ ID NO: 56983 - DNA, 20 bp, Artificial Sequence
  Synthetic oligonucleotide; TTGAAT chr11 5151625 5151644 5151641 +
agatgtgagcaatgcaggta

SEQ ID NO: 56984 - DNA, 20 bp, Artificial Sequence
  Synthetic oligonucleotide; CTGGAT chr11 5151681 5151700 5151697 +
cgaaaaactgtgataaatat

SEQ ID NO: 56985 - DNA, 20 bp, Artificial Sequence
  Synthetic oligonucleotide; ATGAAT chr11 5151700 5151719 5151716 +
tctggatgtaggacaatgtg

SEQ ID NO: 56986 - DNA, 20 bp, Artificial Sequence
  Synthetic oligonucleotide; AGGAGT chr11 5151809 5151828 5151825 +
aatggccatatgctcacagt

SEQ ID NO: 56987 - DNA, 20 bp, Artificial Sequence
  Synthetic oligonucleotide; AAGAAT chr11 5151879 5151898 5151895 +
agtactaggcatggggctac

SEQ ID NO: 56988 - DNA, 20 bp, Artificial Sequence
  Synthetic oligonucleotide; CTGAGT chr11 5151892 5151911 5151908 +
gggctacaagaatagcagcc

SEQ ID NO: 56989 - DNA, 20 bp, Artificial Sequence
  Synthetic oligonucleotide; CTGAAT chr11 5151915 5151934 5151931 +
agtacgaccatagttcctat

SEQ ID NO: 56990 - DNA, 20 bp, Artificial Sequence
  Synthetic oligonucleotide; GTGGGT chr11 5151930 5151949 5151946 +
cctatctgaatgacaagctg

SEQ ID NO: 56991 - DNA, 20 bp, Artificial Sequence
  Synthetic oligonucleotide; GTGGAT chr11 5151956 5151975 5151972 +
gaagatgttggcatgtctta

SEQ ID NO: 56992 - DNA, 20 bp, Artificial Sequence
  Synthetic oligonucleotide; AAGGAT chr11 5151999 5152018 5152015 +
cggtccagggccatggccac

SEQ ID NO: 56993 - DNA, 20 bp, Artificial Sequence
  Synthetic oligonucleotide; GTGGAT chr11 5152029 5152048 5152045 +
gactctataccctgcaatgt

SEQ ID NO: 56994 - DNA, 20 bp, Artificial Sequence
  Synthetic oligonucleotide; AGGAAT chr11 5152055 5152074 5152071 +
gaaccacatttgaagcaagc

SEQ ID NO: 56995 - DNA, 20 bp, Artificial Sequence
  Synthetic oligonucleotide; CAGAAT chr11 5152087 5152106 5152103 +
agatttcaggcacattaaac

SEQ ID NO: 56996 - DNA, 20 bp, Artificial Sequence
  Synthetic oligonucleotide; AGGAAT chr11 5152214 5152233 5152230 +
tttgatgatgctcagaagca

SEQ ID NO: 56997 - DNA, 20 bp, Artificial Sequence
  Synthetic oligonucleotide; CAGAAT chr11 5152249 5152268 5152265 +
tagcaatgagataaatggca

SEQ ID NO: 56998 - DNA, 20 bp, Artificial Sequence
  Synthetic oligonucleotide; TGGAAT chr11 5152254 5152273 5152270 +
atgagataaatggcacagaa

SEQ ID NO: 56999 - DNA, 20 bp, Artificial Sequence
  Synthetic oligonucleotide; TGGGAT chr11 5152290 5152309 5152306 +
cactgcacagattctaggcc

SEQ ID NO: 57000 - DNA, 20 bp, Artificial Sequence
  Synthetic oligonucleotide; TTGGGT chr11 5152357 5152376 5152373 +
tggaaatggacatagtgtcg

SEQ ID NO: 57001 - DNA, 20 bp, Artificial Sequence
  Synthetic oligonucleotide; TTGAGT chr11 5152444 5152463 5152460 +
ttttctccaaactcattata

SEQ ID NO: 57002 - DNA, 20 bp, Artificial Sequence
  Synthetic oligonucleotide; TTGGGT chr11 5152459 5152478 5152475 +
ttatattgagtctgtctgat

SEQ ID NO: 57003 - DNA, 20 bp, Artificial Sequence
  Synthetic oligonucleotide; ATGGAT chr11 5152511 5152530 5152527 +
cacagttttgaaaggaaaag

SEQ ID NO: 57004 - DNA, 20 bp, Artificial Sequence
  Synthetic oligonucleotide; TAGGAT chr11 5152572 5152591 5152588 +
tcacaggcactgtgccataa

SEQ ID NO: 57005 - DNA, 20 bp, Artificial Sequence
  Synthetic oligonucleotide; GGGGAT chr11 5152630 5152649 5152646 +
ccagcaaaatcacctggaca

SEQ ID NO: 57006 - DNA, 20 bp, Artificial Sequence
  Synthetic oligonucleotide; GAGAAT chr11 5152864 5152883 5152880 +
gtaaaagattcccaatgaaa

SEQ ID NO: 57007 - DNA, 20 bp, Artificial Sequence
  Synthetic oligonucleotide; CAGAAT chr11 5152921 5152940 5152937 +
aatatatttctttttatatt

SEQ ID NO: 57008 - DNA, 20 bp, Artificial Sequence
  Synthetic oligonucleotide; GAGAAT chr11 5152935 5152954 5152951 +
tatattcagaataatgtaaa

SEQ ID NO: 57009 - DNA, 20 bp, Artificial Sequence
  Synthetic oligonucleotide; GGGAAT chr11 5153026 5153045 5153042 +
tatatttctttaaagttaaa

SEQ ID NO: 57010 - DNA, 20 bp, Artificial Sequence
  Synthetic oligonucleotide; GTGAGT chr11 5153079 5153098 5153095 +
gctgaaactcttgaaatgtt

SEQ ID NO: 57011 - DNA, 20 bp, Artificial Sequence
  Synthetic oligonucleotide; TGGAAT chr11 5153106 5153125 5153122 +
taaaattttaatacacttta

SEQ ID NO: 57012 - DNA, 20 bp, Artificial Sequence
  Synthetic oligonucleotide; CTGAAT chr11 5153198 5153217 5153214 +
ctcctgataaaccacagata

SEQ ID NO: 57013 - DNA, 20 bp, Artificial Sequence
  Synthetic oligonucleotide; ATGAAT chr11 5153213 5153232 5153229 +
agatactgaataatgggcaa

SEQ ID NO: 57014 - DNA, 20 bp, Artificial Sequence
  Synthetic oligonucleotide; CAGAAT chr11 5153227 5153246 5153243 +
gggcaaatgaatcatttagc

SEQ ID NO: 57015 - DNA, 20 bp, Artificial Sequence
  Synthetic oligonucleotide; TAGAGT chr11 5153232 5153251 5153248 +
aatgaatcatttagccagaa

SEQ ID NO: 57016 - DNA, 20 bp, Artificial Sequence
  Synthetic oligonucleotide; CAGAGT chr11 5153262 5153281 5153278 +
tttcctggttttaaaatgtt

SEQ ID NO: 57017 - DNA, 20 bp, Artificial Sequence
  Synthetic oligonucleotide; ATGAAT chr11 5153473 5153492 5153489 +
ctaaaattgaggaaagcact

SEQ ID NO: 57018 - DNA, 20 bp, Artificial Sequence
  Synthetic oligonucleotide; TTGAAT chr11 5153519 5153538 5153535 +
cttttcaatttcactgatga

SEQ ID NO: 57019 - DNA, 20 bp, Artificial Sequence
  Synthetic oligonucleotide; TTGAAT chr11 5153603 5153622 5153619 +
ttttctaaaaattacatatt

SEQ ID NO: 57020 - DNA, 20 bp, Artificial Sequence
  Synthetic oligonucleotide; ATGAAT chr11 5153719 5153738 5153735 +
tgttttatctcagtaagctc

SEQ ID NO: 57021 - DNA, 20 bp, Artificial Sequence
  Synthetic oligonucleotide; ATGGAT chr11 5153867 5153886 5153883 +
gaagaaagagaaaagaggaa

SEQ ID NO: 57022 - DNA, 20 bp, Artificial Sequence
  Synthetic oligonucleotide; TAGAAT chr11 5154132 5154151 5154148 +
tctccaaagataatcacaat

SEQ ID NO: 57023 - DNA, 20 bp, Artificial Sequence
  Synthetic oligonucleotide; AAGAAT chr11 5154138 5154157 5154154 +
aagataatcacaattagaat

SEQ ID NO: 57024 - DNA, 20 bp, Artificial Sequence
  Synthetic oligonucleotide; GTGAGT chr11 5154196 5154215 5154212 +
caagaccaaagagctgacat

SEQ ID NO: 57025 - DNA, 20 bp, Artificial Sequence
  Synthetic oligonucleotide; CAGGGT chr11 5154224 5154243 5154240 +
tacctgacaggcacagatag

SEQ ID NO: 57026 - DNA, 20 bp, Artificial Sequence
  Synthetic oligonucleotide; TTGGAT chr11 5154263 5154282 5154279 +
gtatgtaagttcctggttag

SEQ ID NO: 57027 - DNA, 20 bp, Artificial Sequence
  Synthetic oligonucleotide; TAGAGT chr11 5154268 5154287 5154284 +
taagttcctggttagttgga

SEQ ID NO: 57028 - DNA, 20 bp, Artificial Sequence
  Synthetic oligonucleotide; TGGAAT chr11 5154319 5154338 5154335 +
taaattatggagaggaaact

SEQ ID NO: 57029 - DNA, 20 bp, Artificial Sequence
  Synthetic oligonucleotide; AAGAAT chr11 5154383 5154402 5154399 +
ttgctcttaccagatacctg

SEQ ID NO: 57030 - DNA, 20 bp, Artificial Sequence
  Synthetic oligonucleotide; AAGGAT chr11 5154442 5154461 5154458 +
ctcaccaatttttcttctcc

SEQ ID NO: 57031 - DNA, 20 bp, Artificial Sequence
  Synthetic oligonucleotide; GTGGGT chr11 5154470 5154489 5154486 +
cagcttcattcccttaagtt

SEQ ID NO: 57032 - DNA, 20 bp, Artificial Sequence
  Synthetic oligonucleotide; CAGGAT chr11 5154555 5154574 5154571 +
aattttactctgtttggtgc

SEQ ID NO: 57033 - DNA, 20 bp, Artificial Sequence
  Synthetic oligonucleotide; CGGGAT chr11 5154727 5154746 5154743 +
gtctgtagcattctgaaaca

SEQ ID NO: 57034 - DNA, 20 bp, Artificial Sequence
  Synthetic oligonucleotide; ATGAAT chr11 5154731 5154750 5154747 +
gtagcattctgaaacacggg

SEQ ID NO: 57035 - DNA, 20 bp, Artificial Sequence
  Synthetic oligonucleotide; ATGAAT chr11 5154792 5154811 5154808 +
caccaatttaatattccttt

SEQ ID NO: 57036 - DNA, 20 bp, Artificial Sequence
  Synthetic oligonucleotide; AGGAGT chr11 5154813 5154832 5154829 +
tgaatgtgtggagaagtagg

SEQ ID NO: 57037 - DNA, 20 bp, Artificial Sequence
  Synthetic oligonucleotide; AGGGAT chr11 5154834 5154853 5154850 +
ggagttatgagcatgaaatg

SEQ ID NO: 57038 - DNA, 20 bp, Artificial Sequence
  Synthetic oligonucleotide; TTGGGT chr11 5154895 5154914 5154911 +
caaattttaagtcagccctc

SEQ ID NO: 57039 - DNA, 20 bp, Artificial Sequence
  Synthetic oligonucleotide; CAGAAT chr11 5154987 5155006 5155003 +
cttttcccacaggctaaatg

SEQ ID NO: 57040 - DNA, 20 bp, Artificial Sequence
  Synthetic oligonucleotide; TTGAGT chr11 5155358 5155377 5155374 +
ggaagcaagttgttgaacat

SEQ ID NO: 57041 - DNA, 20 bp, Artificial Sequence
  Synthetic oligonucleotide; ATGAGT chr11 5155459 5155478 5155475 +
tcattatattcctactattt

SEQ ID NO: 57042 - DNA, 20 bp, Artificial Sequence
  Synthetic oligonucleotide; TGGGAT chr11 5155530 5155549 5155546 +
cctttaaattattagtaaaa

SEQ ID NO: 57043 - DNA, 20 bp, Artificial Sequence
  Synthetic oligonucleotide; TTGAAT chr11 5155644 5155663 5155660 +
cagctggtttctaggctttc

SEQ ID NO: 57044 - DNA, 20 bp, Artificial Sequence
  Synthetic oligonucleotide; GAGAAT chr11 5155714 5155733 5155730 +
taggaagcatactaatggtg

SEQ ID NO: 57045 - DNA, 20 bp, Artificial Sequence
  Synthetic oligonucleotide; ATGGAT chr11 5155727 5155746 5155743 +
aatggtggagaatatttata

SEQ ID NO: 57046 - DNA, 20 bp, Artificial Sequence
  Synthetic oligonucleotide; AGGAAT chr11 5155746 5155765 5155762 +
aatggatttccaggagaaca

SEQ ID NO: 57047 - DNA, 20 bp, Artificial Sequence
  Synthetic oligonucleotide; CAGAAT chr11 5155788 5155807 5155804 +
ggaaccccatgtgctctttc

SEQ ID NO: 57048 - DNA, 20 bp, Artificial Sequence
  Synthetic oligonucleotide; TTGAAT chr11 5155835 5155854 5155851 +
aacaatagtactgttgcatg

SEQ ID NO: 57049 - DNA, 20 bp, Artificial Sequence
  Synthetic oligonucleotide; TTGGGT chr11 5155993 5156012 5156009 +
gggctctccaaagttctatc

SEQ ID NO: 57050 - DNA, 20 bp, Artificial Sequence
  Synthetic oligonucleotide; ATGAGT chr11 5156190 5156209 5156206 +
catcctttgaaacattgtca

SEQ ID NO: 57051 - DNA, 20 bp, Artificial Sequence
  Synthetic oligonucleotide; CTGGAT chr11 5156278 5156297 5156294 +
atatgcatcaataactatct

SEQ ID NO: 57052 - DNA, 20 bp, Artificial Sequence
  Synthetic oligonucleotide; CAGAGT chr11 5156328 5156347 5156344 +
tttttttcttttttttgaga

SEQ ID NO: 57053 - DNA, 20 bp, Artificial Sequence
  Synthetic oligonucleotide; TGGAGT chr11 5156353 5156372 5156369 +
tctctctctgtcgcccaggc

SEQ ID NO: 57054 - DNA, 20 bp, Artificial Sequence
  Synthetic oligonucleotide; CGGGGT chr11 5156499 5156518 5156515 +
ttgtatttttttagtagaga

SEQ ID NO: 57055 - DNA, 20 bp, Artificial Sequence
  Synthetic oligonucleotide; CAGGAT chr11 5156519 5156538 5156535 +
cggggtttcactgtgttagc

SEQ ID NO: 57056 - DNA, 20 bp, Artificial Sequence
  Synthetic oligonucleotide; TGGGAT chr11 5156576 5156595 5156592 +
gcctccgcctcccaaagtgc

SEQ ID NO: 57057 - DNA, 20 bp, Artificial Sequence
  Synthetic oligonucleotide; CTGAAT chr11 5156611 5156630 5156627 +
gagccactgcacccggccta

SEQ ID NO: 57058 - DNA, 20 bp, Artificial Sequence
  Synthetic oligonucleotide; CGGAGT chr11 5156694 5156713 5156710 +
ctttttttttttccttgaga

SEQ ID NO: 57059 - DNA, 20 bp, Artificial Sequence
  Synthetic oligonucleotide; TGGAGT chr11 5156719 5156738 5156735 +
tctcgctccgtcatccaggc

SEQ ID NO: 57060 - DNA, 20 bp, Artificial Sequence
  Synthetic oligonucleotide; TAGGAT chr11 5156732 5156751 5156748 +
tccaggctggagtgcagtgg

SEQ ID NO: 57061 - DNA, 20 bp, Artificial Sequence
  Synthetic oligonucleotide; TGGGAT chr11 5156806 5156825 5156822 +
gcccaagcctcccaagtagg

SEQ ID NO: 57062 - DNA, 20 bp, Artificial Sequence
  Synthetic oligonucleotide; CAGGGT chr11 5156863 5156882 5156879 +
ttttgtatttttagtagaga

SEQ ID NO: 57063 - DNA, 20 bp, Artificial Sequence
  Synthetic oligonucleotide; TTGAGT chr11 5156987 5157006 5157003 +
ccagcccatctttaccattt

SEQ ID NO: 57064 - DNA, 20 bp, Artificial Sequence
  Synthetic oligonucleotide; GAGAGT chr11 5157118 5157137 5157134 +
tacacacagagggagagaga

SEQ ID NO: 57065 - DNA, 20 bp, Artificial Sequence
  Synthetic oligonucleotide; GAGGGT chr11 5157126 5157145 5157142 +
gagggagagagagagagtgg

SEQ ID NO: 57066 - DNA, 20 bp, Artificial Sequence
  Synthetic oligonucleotide; ACGAGT chr11 5157228 5157247 5157244 +
tccacgtttttaacttccac

SEQ ID NO: 57067 - DNA, 20 bp, Artificial Sequence
  Synthetic oligonucleotide; TTGAAT chr11 5157343 5157362 5157359 +
tatttcattcttttttatgg

SEQ ID NO: 57068 - DNA, 20 bp, Artificial Sequence
  Synthetic oligonucleotide; ACGAAT chr11 5157416 5157435 5157432 +
ctttatccatttatctgttg

SEQ ID NO: 57069 - DNA, 20 bp, Artificial Sequence
  Synthetic oligonucleotide; GTGAAT chr11 5157451 5157470 5157467 +
gatttcaaatcttggcgttt

SEQ ID NO: 57070 - DNA, 20 bp, Artificial Sequence
  Synthetic oligonucleotide; GGGAGT chr11 5157474 5157493 5157490 +
aatagtgctataataaagat

SEQ ID NO: 57071 - DNA, 20 bp, Artificial Sequence
  Synthetic oligonucleotide; AAGGGT chr11 5157515 5157534 5157531 +
acatactaatttattctttt

SEQ ID NO: 57072 - DNA, 20 bp, Artificial Sequence
  Synthetic oligonucleotide; AGGAGT chr11 5157529 5157548 5157545 +
tcttttaagggtatatacct

SEQ ID NO: 57073 - DNA, 20 bp, Artificial Sequence
  Synthetic oligonucleotide; CTGGAT chr11 5157542 5157561 5157558 +
tatacctaggagtgatattg

SEQ ID NO: 57074 - DNA, 20 bp, Artificial Sequence
  Synthetic oligonucleotide; GAGGGT chr11 5157638 5157657 5157654 +
tactcccaccaacagtgtaa

SEQ ID NO: 57075 - DNA, 20 bp, Artificial Sequence
  Synthetic oligonucleotide; TTGAGT chr11 5157865 5157884 5157881 +
atttatttatttattttctg

SEQ ID NO: 57076 - DNA, 20 bp, Artificial Sequence
  Synthetic oligonucleotide; TTGAGT chr11 5157874 5157893 5157890 +
tttattttctgttgagttgc

SEQ ID NO: 57077 - DNA, 20 bp, Artificial Sequence
  Synthetic oligonucleotide; TTGGGT chr11 5157946 5157965 5157962 +
caaatattttctcccattct

SEQ ID NO: 57078 - DNA, 20 bp, Artificial Sequence
  Synthetic oligonucleotide; ATGAAT chr11 5158069 5158088 5158085 +
gacagtatttgcccaaatca

SEQ ID NO: 57079 - DNA, 20 bp, Artificial Sequence
  Synthetic oligonucleotide; GAGGGT chr11 5158081 5158100 5158097 +
ccaaatcaatgaatgccctg

SEQ ID NO: 57080 - DNA, 20 bp, Artificial Sequence
  Synthetic oligonucleotide; TTGGAT chr11 5158128 5158147 5158144 +
tagtttcataatttcaggta

SEQ ID NO: 57081 - DNA, 20 bp, Artificial Sequence
  Synthetic oligonucleotide; AGGGGT chr11 5158182 5158201 5158198 +
ttttgtatatagtgagagat

SEQ ID NO: 57082 - DNA, 20 bp, Artificial Sequence
  Synthetic oligonucleotide; ATGGAT chr11 5158208 5158227 5158224 +
ccgattttactcttttgcaa

SEQ ID NO: 57083 - DNA, 20 bp, Artificial Sequence
  Synthetic oligonucleotide; TGGAGT chr11 5158280 5158299 5158296 +
ttttttttttttttttgaga

SEQ ID NO: 57084 - DNA, 20 bp, Artificial Sequence
  Synthetic oligonucleotide; TGGAGT chr11 5158303 5158322 5158319 +
agtctcactgttgcccaggc

SEQ ID NO: 57085 - DNA, 20 bp, Artificial Sequence
  Synthetic oligonucleotide; TTGGAT chr11 5158326 5158345 5158342 +
agtgcagtggcagcacaatc

SEQ ID NO: 57086 - DNA, 20 bp, Artificial Sequence
  Synthetic oligonucleotide; CTGAGT chr11 5158382 5158401 5158398 +
gattctcctgcctcagcctc

SEQ ID NO: 57087 - DNA, 20 bp, Artificial Sequence
  Synthetic oligonucleotide; TGGGAT chr11 5158391 5158410 5158407 +
gcctcagcctcctgagtatc

SEQ ID NO: 57088 - DNA, 20 bp, Artificial Sequence
  Synthetic oligonucleotide; CGGAGT chr11 5158447 5158466 5158463 +
ttttgtatttttagtagaga

SEQ ID NO: 57089 - DNA, 20 bp, Artificial Sequence
  Synthetic oligonucleotide; TGGGAT chr11 5158524 5158543 5158540 +
acctcagcctcacaaagtgc

SEQ ID NO: 57090 - DNA, 20 bp, Artificial Sequence
  Synthetic oligonucleotide; CTGGAT chr11 5158618 5158637 5158634 +
atgacttggttgttaagtgc

SEQ ID NO: 57091 - DNA, 20 bp, Artificial Sequence
  Synthetic oligonucleotide; CTGGGT chr11 5158630 5158649 5158646 +
ttaagtgcctggatttgcat

SEQ ID NO: 57092 - DNA, 20 bp, Artificial Sequence
  Synthetic oligonucleotide; CAGGAT chr11 5158761 5158780 5158777 +
ttggttttgttctttttgct

SEQ ID NO: 57093 - DNA, 20 bp, Artificial Sequence
  Synthetic oligonucleotide; GGGGAT chr11 5158780 5158799 5158796 +
tcaggattgctttagctatt

SEQ ID NO: 57094 - DNA, 20 bp, Artificial Sequence
  Synthetic oligonucleotide; TAGGAT chr11 5158809 5158828 5158825 +
ttgtggttccatataaatat

SEQ ID NO: 57095 - DNA, 20 bp, Artificial Sequence
  Synthetic oligonucleotide; GTGAAT chr11 5158830 5158849 5158846 +
aggattgtttttctatttct

SEQ ID NO: 57096 - DNA, 20 bp, Artificial Sequence
  Synthetic oligonucleotide; CTGAAT chr11 5158863 5158882 5158879 +
gtattttgacagaaattgca

SEQ ID NO: 57097 - DNA, 20 bp, Artificial Sequence
  Synthetic oligonucleotide; TTGGGT chr11 5158881 5158900 5158897 +
cactgaatctgtacattgct

SEQ ID NO: 57098 - DNA, 20 bp, Artificial Sequence
  Synthetic oligonucleotide; TGGAAT chr11 5158928 5158947 5158944 +
attcttctagttcatgagca

SEQ ID NO: 57099 - DNA, 20 bp, Artificial Sequence
  Synthetic oligonucleotide; CAGAGT chr11 5158976 5158995 5158992 +
ccctcttctatttctttcac

SEQ ID NO: 57100 - DNA, 20 bp, Artificial Sequence
  Synthetic oligonucleotide; TTGGGT chr11 5159015 5159034 5159031 +
ttatagagatcttttacttc

SEQ ID NO: 57101 - DNA, 20 bp, Artificial Sequence
  Synthetic oligonucleotide; CTGGGT chr11 5159032 5159051 5159048 +
ttcttgggttagattgactc

SEQ ID NO: 57102 - DNA, 20 bp, Artificial Sequence
  Synthetic oligonucleotide; TTGGAT chr11 5159270 5159289 5159286 +
ttaacttcttcctttccaat

SEQ ID NO: 57103 - DNA, 20 bp, Artificial Sequence
  Synthetic oligonucleotide; CTGAAT chr11 5159293 5159312 5159309 +
gatgcactttctttctcttc

SEQ ID NO: 57104 - DNA, 20 bp, Artificial Sequence
  Synthetic oligonucleotide; TTGGGT chr11 5159511 5159530 5159527 +
ttgttgtgtcctggtctggt

SEQ ID NO: 57105 - DNA, 20 bp, Artificial Sequence
  Synthetic oligonucleotide; TAGAGT chr11 5159521 5159540 5159537 +
ctggtctggtttgggtatat

SEQ ID NO: 57106 - DNA, 20 bp, Artificial Sequence
  Synthetic oligonucleotide; TAGAAT chr11 5159540 5159559 5159556 +
ttagagtaatgcttgcctca

SEQ ID NO: 57107 - DNA, 20 bp, Artificial Sequence
  Synthetic oligonucleotide; AGGAAT chr11 5159596 5159615 5159612 +
tttatttgtttgtttgtttg

SEQ ID NO: 57108 - DNA, 20 bp, Artificial Sequence
  Synthetic oligonucleotide; TTGAGT chr11 5159602 5159621 5159618 +
tgtttgtttgtttgaggaat

SEQ ID NO: 57109 - DNA, 20 bp, Artificial Sequence
  Synthetic oligonucleotide; TCGAGT chr11 5159648 5159667 5159664 +
ttgaaatgtttggtagccca

SEQ ID NO: 57110 - DNA, 20 bp, Artificial Sequence
  Synthetic oligonucleotide; AGGAAT chr11 5159771 5159790 5159787 +
ttgctaggctgtatgtgtcc

SEQ ID NO: 57111 - DNA, 20 bp, Artificial Sequence
  Synthetic oligonucleotide; TGGAAT chr11 5159808 5159827 5159824 +
ttctagattttccaatttgt

SEQ ID NO: 57112 - DNA, 20 bp, Artificial Sequence
  Synthetic oligonucleotide; ATGAGT chr11 5159837 5159856 5159853 +
gttgttcataatagtatcta

SEQ ID NO: 57113 - DNA, 20 bp, Artificial Sequence
  Synthetic oligonucleotide; TTGGAT chr11 5160122 5160141 5160138 +
gttgaagcctttctactttt

SEQ ID NO: 57114 - DNA, 20 bp, Artificial Sequence
  Synthetic oligonucleotide; CTGGGT chr11 5160342 5160361 5160358 +
gcaataaagctttttatcac

SEQ ID NO: 57115 - DNA, 20 bp, Artificial Sequence
  Synthetic oligonucleotide; CTGAGT chr11 5160357 5160376 5160373 +
atcacctgggtgcaggcggg

SEQ ID NO: 57116 - DNA, 20 bp, Artificial Sequence
  Synthetic oligonucleotide; GAGAGT chr11 5160370 5160389 5160386 +
aggcgggctgagtccgaaaa

SEQ ID NO: 57117 - DNA, 20 bp, Artificial Sequence
  Synthetic oligonucleotide; AGGAGT chr11 5160390 5160409 5160406 +
gagagtcagcaaagggagat

SEQ ID NO: 57118 - DNA, 20 bp, Artificial Sequence
  Synthetic oligonucleotide; TTGGGT chr11 5160414 5160433 5160430 +
gtggggctgttttataagat

SEQ ID NO: 57119 - DNA, 20 bp, Artificial Sequence
  Synthetic oligonucleotide; GGGGGT chr11 5160445 5160464 5160461 +
aaggaaaattacagtcaaag

SEQ ID NO: 57120 - DNA, 20 bp, Artificial Sequence
  Synthetic oligonucleotide; AGGAGT chr11 5160466 5160485 5160482 +
ggggttgttctctggcgggc

SEQ ID NO: 57121 - DNA, 20 bp, Artificial Sequence
  Synthetic oligonucleotide; GGGGGT chr11 5160473 5160492 5160489 +
ttctctggcgggcaggagtg

SEQ ID NO: 57122 - DNA, 20 bp, Artificial Sequence
  Synthetic oligonucleotide; CAGGAT chr11 5160510 5160529 5160526 +
cagtaggggagcttttgagc

SEQ ID NO: 57123 - DNA, 20 bp, Artificial Sequence
  Synthetic oligonucleotide; TGGAAT chr11 5160591 5160610 5160607 +
cattttcacttcttttgtgg

SEQ ID NO: 57124 - DNA, 20 bp, Artificial Sequence
  Synthetic oligonucleotide; GGGGAT chr11 5160760 5160779 5160776 +
ttggggcagcgaaaattttg

SEQ ID NO: 57125 - DNA, 20 bp, Artificial Sequence
  Synthetic oligonucleotide; CGGGAT chr11 5160810 5160829 5160826 +
tttctcagggctgcttcgag

SEQ ID NO: 57126 - DNA, 20 bp, Artificial Sequence
  Synthetic oligonucleotide; TAGAGT chr11 5160835 5160854 5160851 +
ttaggggcggcgtgggaacc

SEQ ID NO: 57127 - DNA, 20 bp, Artificial Sequence
  Synthetic oligonucleotide; AGGGGT chr11 5160875 5160894 5160891 +
tgaaggaagattttgtggta

SEQ ID NO: 57128 - DNA, 20 bp, Artificial Sequence
  Synthetic oligonucleotide; TGGGGT chr11 5160888 5160907 5160904 +
tgtggtaaggggtgatattg

SEQ ID NO: 57129 - DNA, 20 bp, Artificial Sequence
  Synthetic oligonucleotide; TAGAAT chr11 5160917 5160936 5160933 +
tagaagaaacatttgtcatg

SEQ ID NO: 57130 - DNA, 20 bp, Artificial Sequence
  Synthetic oligonucleotide; CTGGAT chr11 5160936 5160955 5160952 +
gtagaattattggtgatggc

SEQ ID NO: 57131 - DNA, 20 bp, Artificial Sequence
  Synthetic oligonucleotide; ATGGAT chr11 5160952 5160971 5160968 +
tggcctggatacggttttgt

SEQ ID NO: 57132 - DNA, 20 bp, Artificial Sequence
  Synthetic oligonucleotide; TGGAAT chr11 5160970 5160989 5160986 +
gtatggattgaaaaaccaaa

SEQ ID NO: 57133 - DNA, 20 bp, Artificial Sequence
  Synthetic oligonucleotide; AAGAGT chr11 5161039 5161058 5161055 +
ggacctaggacatctgatta

SEQ ID NO: 57134 - DNA, 20 bp, Artificial Sequence
  Synthetic oligonucleotide; AAGAGT chr11 5161096 5161115 5161112 +
aaagattatttatttacttc

SEQ ID NO: 57135 - DNA, 20 bp, Artificial Sequence
  Synthetic oligonucleotide; AAGAGT chr11 5161103 5161122 5161119 +
atttatttacttcaagagtt

SEQ ID NO: 57136 - DNA, 20 bp, Artificial Sequence
  Synthetic oligonucleotide; GGGGAT chr11 5161117 5161136 5161133 +
agagttaagagtggcagttt

SEQ ID NO: 57137 - DNA, 20 bp, Artificial Sequence
  Synthetic oligonucleotide; ATGAGT chr11 5161198 5161217 5161214 +
taaacaagagcagggcatgt

SEQ ID NO: 57138 - DNA, 20 bp, Artificial Sequence
  Synthetic oligonucleotide; GAGAAT chr11 5161208 5161227 5161224 +
cagggcatgtatgagtagtt

SEQ ID NO: 57139 - DNA, 20 bp, Artificial Sequence
  Synthetic oligonucleotide; GTGAAT chr11 5161215 5161234 5161231 +
tgtatgagtagttgagaatg

SEQ ID NO: 57140 - DNA, 20 bp, Artificial Sequence
  Synthetic oligonucleotide; AGGAGT chr11 5161221 5161240 5161237 +
agtagttgagaatggtgaat

SEQ ID NO: 57141 - DNA, 20 bp, Artificial Sequence
  Synthetic oligonucleotide; AGGGAT chr11 5161247 5161266 5161263 +
atgactagacagaagatagc

SEQ ID NO: 57142 - DNA, 20 bp, Artificial Sequence
  Synthetic oligonucleotide; TGGAAT chr11 5161294 5161313 5161310 +
ttctaagttggtctggtgtc

SEQ ID NO: 57143 - DNA, 20 bp, Artificial Sequence
  Synthetic oligonucleotide; AGGGAT chr11 5161507 5161526 5161523 +
cctgaagacggaggaccgta

SEQ ID NO: 57144 - DNA, 20 bp, Artificial Sequence
  Synthetic oligonucleotide; CTGAAT chr11 5161525 5161544 5161541 +
taagggatataaaggtttta

SEQ ID NO: 57145 - DNA, 20 bp, Artificial Sequence
  Synthetic oligonucleotide; AGGAAT chr11 5161618 5161637 5161634 +
gaggtaggaaggctaaactg

SEQ ID NO: 57146 - DNA, 20 bp, Artificial Sequence
  Synthetic oligonucleotide; TTGAGT chr11 5161751 5161770 5161767 +
gttatctgactcagggcatg

SEQ ID NO: 57147 - DNA, 20 bp, Artificial Sequence
  Synthetic oligonucleotide; CTGGGT chr11 5161775 5161794 5161791 +
gtaaatctaatttgccagtc

SEQ ID NO: 57148 - DNA, 20 bp, Artificial Sequence
  Synthetic oligonucleotide; CTGAAT chr11 5161824 5161843 5161840 +
gtgtagggaagggagggggc

SEQ ID NO: 57149 - DNA, 20 bp, Artificial Sequence
  Synthetic oligonucleotide; AGGAGT chr11 5161838 5161857 5161854 +
gggggcctgaataatccctg

SEQ ID NO: 57150 - DNA, 20 bp, Artificial Sequence
  Synthetic oligonucleotide; CAGAAT chr11 5161846 5161865 5161862 +
gaataatccctgaggagtag

SEQ ID NO: 57151 - DNA, 20 bp, Artificial Sequence
  Synthetic oligonucleotide; GAGGAT chr11 5161883 5161902 5161899 +
cactgagaagttatttcttt

SEQ ID NO: 57152 - DNA, 20 bp, Artificial Sequence
  Synthetic oligonucleotide; CAGGGT chr11 5162021 5162040 5162037 +
atcaataaatcaagtgtgat

SEQ ID NO: 57153 - DNA, 20 bp, Artificial Sequence
  Synthetic oligonucleotide; TGGGGT chr11 5162066 5162085 5162082 +
aagaaggaaatatggggaaa

SEQ ID NO: 57154 - DNA, 20 bp, Artificial Sequence
  Synthetic oligonucleotide; GTGAAT chr11 5162070 5162089 5162086 +
aggaaatatggggaaatggg

SEQ ID NO: 57155 - DNA, 20 bp, Artificial Sequence
  Synthetic oligonucleotide; GTGGAT chr11 5162081 5162100 5162097 +
ggaaatggggtgaatgtcag

SEQ ID NO: 57156 - DNA, 20 bp, Artificial Sequence
  Synthetic oligonucleotide; GGGGGT chr11 5162104 5162123 5162120 +
gatcagagagatacaatcat

SEQ ID NO: 57157 - DNA, 20 bp, Artificial Sequence
  Synthetic oligonucleotide; AGGAAT chr11 5162123 5162142 5162139 +
tgggggtcaggtgtggtatc

SEQ ID NO: 57158 - DNA, 20 bp, Artificial Sequence
  Synthetic oligonucleotide; CCGGAT chr11 5162140 5162159 5162156 +
atcaggaataatgtgggagg

SEQ ID NO: 57159 - DNA, 20 bp, Artificial Sequence
  Synthetic oligonucleotide; AAGAGT chr11 5162188 5162207 5162204 +
ggtaattgtgggacttaaca

SEQ ID NO: 57160 - DNA, 20 bp, Artificial Sequence
  Synthetic oligonucleotide; GTGAGT chr11 5162192 5162211 5162208 +
attgtgggacttaacaaaga

SEQ ID NO: 57161 - DNA, 20 bp, Artificial Sequence
  Synthetic oligonucleotide; GGGGAT chr11 5162213 5162232 5162229 +
tgagtacagctgaaggagcc

SEQ ID NO: 57162 - DNA, 20 bp, Artificial Sequence
  Synthetic oligonucleotide; AAGAGT chr11 5162280 5162299 5162296 +
tagaagttatgagaaatgtg

SEQ ID NO: 57163 - DNA, 20 bp, Artificial Sequence
  Synthetic oligonucleotide; CAGGGT chr11 5162408 5162427 5162424 +
ttatttggacagaaaggcta

SEQ ID NO: 57164 - DNA, 20 bp, Artificial Sequence
  Synthetic oligonucleotide; CTGGAT chr11 5162420 5162439 5162436 +
aaaggctacagggtgcagtc

SEQ ID NO: 57165 - DNA, 20 bp, Artificial Sequence
  Synthetic oligonucleotide; AAGAAT chr11 5162433 5162452 5162449 +
tgcagtcctggatcttgtgt

SEQ ID NO: 57166 - DNA, 20 bp, Artificial Sequence
  Synthetic oligonucleotide; AGGAGT chr11 5162470 5162489 5162486 +
taactatgcctaggaaggaa

SEQ ID NO: 57167 - DNA, 20 bp, Artificial Sequence
  Synthetic oligonucleotide; AGGGAT chr11 5162490 5162509 5162506 +
aggagttgttgttttgtaga

SEQ ID NO: 57168 - DNA, 20 bp, Artificial Sequence
  Synthetic oligonucleotide; GAGAAT chr11 5162552 5162571 5162568 +
gagagcacgtgtgtttttat

SEQ ID NO: 57169 - DNA, 20 bp, Artificial Sequence
  Synthetic oligonucleotide; GAGGAT chr11 5162580 5162599 5162596 +
tgccgagataggtaacacat

SEQ ID NO: 57170 - DNA, 20 bp, Artificial Sequence
  Synthetic oligonucleotide; TGGGGT chr11 5162610 5162629 5162626 +
tttgggcttgactgaagtaa

SEQ ID NO: 57171 - DNA, 20 bp, Artificial Sequence
  Synthetic oligonucleotide; ATGGGT chr11 5162666 5162685 5162682 +
caggtaatttgctgagccta

SEQ ID NO: 57172 - DNA, 20 bp, Artificial Sequence
  Synthetic oligonucleotide; TGGAAT chr11 5162706 5162725 5162722 +
aagtgaaagcgaagagaggc

SEQ ID NO: 57173 - DNA, 20 bp, Artificial Sequence
  Synthetic oligonucleotide; AAGGGT chr11 5162713 5162732 5162729 +
agcgaagagaggctggaatg

SEQ ID NO: 57174 - DNA, 20 bp, Artificial Sequence
  Synthetic oligonucleotide; AGGAAT chr11 5162723 5162742 5162739 +
ggctggaatgaagggtgcaa

SEQ ID NO: 57175 - DNA, 20 bp, Artificial Sequence
  Synthetic oligonucleotide; CAGAAT chr11 5162758 5162777 5162774 +
agcatgtttgagatccagaa

SEQ ID NO: 57176 - DNA, 20 bp, Artificial Sequence
  Synthetic oligonucleotide; ATGGGT chr11 5162765 5162784 5162781 +
ttgagatccagaacagaata

SEQ ID NO: 57177 - DNA, 20 bp, Artificial Sequence
  Synthetic oligonucleotide; GAGGAT chr11 5162787 5162806 5162803 +
gggttatagatggaggtatt

SEQ ID NO: 57178 - DNA, 20 bp, Artificial Sequence
  Synthetic oligonucleotide; GAGAGT chr11 5162795 5162814 5162811 +
gatggaggtattgaggatag

SEQ ID NO: 57179 - DNA, 20 bp, Artificial Sequence
  Synthetic oligonucleotide; ATGGGT chr11 5162803 5162822 5162819 +
tattgaggataggagagtat

SEQ ID NO: 57180 - DNA, 20 bp, Artificial Sequence
  Synthetic oligonucleotide; TGGGGT chr11 5162818 5162837 5162834 +
agtatatgggtttggcacca

SEQ ID NO: 57181 - DNA, 20 bp, Artificial Sequence
  Synthetic oligonucleotide; GTGGAT chr11 5162822 5162841 5162838 +
tatgggtttggcaccatggg

SEQ ID NO: 57182 - DNA, 20 bp, Artificial Sequence
  Synthetic oligonucleotide; GGGAAT chr11 5162908 5162927 5162924 +
ttttaggacaggtaaaatgg

SEQ ID NO: 57183 - DNA, 20 bp, Artificial Sequence
  Synthetic oligonucleotide; GAGAGT chr11 5162920 5162939 5162936 +
taaaatgggggaatggtaag

SEQ ID NO: 57184 - DNA, 20 bp, Artificial Sequence
  Synthetic oligonucleotide; TGGGAT chr11 5162996 5163015 5163012 +
aatcctttcaaagcatgctg

SEQ ID NO: 57185 - DNA, 20 bp, Artificial Sequence
  Synthetic oligonucleotide; TGGGAT chr11 5163001 5163020 5163017 +
tttcaaagcatgctgtggga

SEQ ID NO: 57186 - DNA, 20 bp, Artificial Sequence
  Synthetic oligonucleotide; CGGGGT chr11 5163019 5163038 5163035 +
gatgggatactggcattgag

SEQ ID NO: 57187 - DNA, 20 bp, Artificial Sequence
  Synthetic oligonucleotide; AAGAGT chr11 5163025 5163044 5163041 +
atactggcattgagcggggt

SEQ ID NO: 57188 - DNA, 20 bp, Artificial Sequence
  Synthetic oligonucleotide; TGGGAT chr11 5163044 5163063 5163060 +
taagagtgattaggttttaa

SEQ ID NO: 57189 - DNA, 20 bp, Artificial Sequence
  Synthetic oligonucleotide; GTGGAT chr11 5163103 5163122 5163119 +
agtagaggtgtcttatactt

SEQ ID NO: 57190 - DNA, 20 bp, Artificial Sequence
  Synthetic oligonucleotide; GAGGAT chr11 5163130 5163149 5163146 +
aaggtggggagatacaaggg

SEQ ID NO: 57191 - DNA, 20 bp, Artificial Sequence
  Synthetic oligonucleotide; AGGAAT chr11 5163191 5163210 5163207 +
atgaggtatggctgtagccc

SEQ ID NO: 57192 - DNA, 20 bp, Artificial Sequence
  Synthetic oligonucleotide; GGGGAT chr11 5163256 5163275 5163272 +
taataagggaactggcaggt

SEQ ID NO: 57193 - DNA, 20 bp, Artificial Sequence
  Synthetic oligonucleotide; AGGAGT chr11 5163270 5163289 5163286 +
gcaggtggggataatgaaaa

SEQ ID NO: 57194 - DNA, 20 bp, Artificial Sequence
  Synthetic oligonucleotide; AAGAGT chr11 5163282 5163301 5163298 +
aatgaaaaaggagtgcttaa

SEQ ID NO: 57195 - DNA, 20 bp, Artificial Sequence
  Synthetic oligonucleotide; CAGAGT chr11 5163305 5163324 5163321 +
agtatcgtctcggttagcac

SEQ ID NO: 57196 - DNA, 20 bp, Artificial Sequence
  Synthetic oligonucleotide; GGGAAT chr11 5163313 5163332 5163329 +
ctcggttagcaccagagttg

SEQ ID NO: 57197 - DNA, 20 bp, Artificial Sequence
  Synthetic oligonucleotide; TGGAGT chr11 5163402 5163421 5163418 +
cctttgaaaagaaggtaatg

SEQ ID NO: 57198 - DNA, 20 bp, Artificial Sequence
  Synthetic oligonucleotide; GTGGGT chr11 5163406 5163425 5163422 +
tgaaaagaaggtaatgtgga

SEQ ID NO: 57199 - DNA, 20 bp, Artificial Sequence
  Synthetic oligonucleotide; AAGGGT chr11 5163431 5163450 5163447 +
tagcctccatactgattaag

SEQ ID NO: 57200 - DNA, 20 bp, Artificial Sequence
  Synthetic oligonucleotide; GAGAAT chr11 5163457 5163476 5163473 +
acagacttaccctccactgt

SEQ ID NO: 57201 - DNA, 20 bp, Artificial Sequence
  Synthetic oligonucleotide; AGGAGT chr11 5163555 5163574 5163571 +
aaagccgagaagatctggga

SEQ ID NO: 57202 - DNA, 20 bp, Artificial Sequence
  Synthetic oligonucleotide; CAGAGT chr11 5163580 5163599 5163596 +
tcagtcagggagccttgggc

SEQ ID NO: 57203 - DNA, 20 bp, Artificial Sequence
  Synthetic oligonucleotide; AGGAGT chr11 5163598 5163617 5163614 +
gccagagttccaggggctct

SEQ ID NO: 57204 - DNA, 20 bp, Artificial Sequence
  Synthetic oligonucleotide; GTGAGT chr11 5163613 5163632 5163629 +
gctctaggagtggctgccag

SEQ ID NO: 57205 - DNA, 20 bp, Artificial Sequence
  Synthetic oligonucleotide; TGGGGT chr11 5163638 5163657 5163654 +
ttgaacagtccgatttctag

SEQ ID NO: 57206 - DNA, 20 bp, Artificial Sequence
  Synthetic oligonucleotide; AGGAAT chr11 5163670 5163689 5163686 +
cagatgggacacggcttagg

SEQ ID NO: 57207 - DNA, 20 bp, Artificial Sequence
  Synthetic oligonucleotide; TGGGGT chr11 5163814 5163833 5163830 +
ttgtgtgctggagatgtggc

SEQ ID NO: 57208 - DNA, 20 bp, Artificial Sequence
  Synthetic oligonucleotide; AGGAAT chr11 5163839 5163858 5163855 +
tttgtctcacagtggaggca

SEQ ID NO: 57209 - DNA, 20 bp, Artificial Sequence
  Synthetic oligonucleotide; TTGAGT chr11 5163915 5163934 5163931 +
caccttgaaggtgaggttaa

SEQ ID NO: 57210 - DNA, 20 bp, Artificial Sequence
  Synthetic oligonucleotide; TGGGGT chr11 5163928 5163947 5163944 +
aggttaattgagtcctgttg

SEQ ID NO: 57211 - DNA, 20 bp, Artificial Sequence
  Synthetic oligonucleotide; CAGAAT chr11 5163942 5163961 5163958 +
ctgttgtggggtttgaggtc

SEQ ID NO: 57212 - DNA, 20 bp, Artificial Sequence
  Synthetic oligonucleotide; TGGAGT chr11 5163956 5163975 5163972 +
gaggtccagaatttaatttt

SEQ ID NO: 57213 - DNA, 20 bp, Artificial Sequence
  Synthetic oligonucleotide; TTGGGT chr11 5163984 5164003 5164000 +
tatttaatgtcaggagcaga

SEQ ID NO: 57214 - DNA, 20 bp, Artificial Sequence
  Synthetic oligonucleotide; GAGAAT chr11 5164005 5164024 5164021 +
tgggtaataaaatgtatatt

SEQ ID NO: 57215 - DNA, 20 bp, Artificial Sequence
  Synthetic oligonucleotide; TAGGGT chr11 5164031 5164050 5164047 +
aaagtggccttttgtccttt

SEQ ID NO: 57216 - DNA, 20 bp, Artificial Sequence
  Synthetic oligonucleotide; CAGGGT chr11 5164056 5164075 5164072 +
tctagggctgtaaagcgtct

SEQ ID NO: 57217 - DNA, 20 bp, Artificial Sequence
  Synthetic oligonucleotide; CTGGGT chr11 5164088 5164107 5164104 +
cgaacgagccatgaactggg

SEQ ID NO: 57218 - DNA, 20 bp, Artificial Sequence
  Synthetic oligonucleotide; TCGGAT chr11 5164140 5164159 5164156 +
acgctctgattcgggagagg

SEQ ID NO: 57219 - DNA, 20 bp, Artificial Sequence
  Synthetic oligonucleotide; CGGAAT chr11 5164237 5164256 5164253 +
aggttggggagggctagtca

SEQ ID NO: 57220 - DNA, 20 bp, Artificial Sequence
  Synthetic oligonucleotide; CCGGGT chr11 5164259 5164278 5164275 +
gaatgaaactgtaaaccgga

SEQ ID NO: 57221 - DNA, 20 bp, Artificial Sequence
  Synthetic oligonucleotide; CAGGGT chr11 5164293 5164312 5164309 +
gggaggtgataaaaagatta

SEQ ID NO: 57222 - DNA, 20 bp, Artificial Sequence
  Synthetic oligonucleotide; ATGGGT chr11 5164378 5164397 5164394 +
gggaggaggggagacgtcag

SEQ ID NO: 57223 - DNA, 20 bp, Artificial Sequence
  Synthetic oligonucleotide; TGGAGT chr11 5164421 5164440 5164437 +
tagaaagactcagcgacgct

SEQ ID NO: 57224 - DNA, 20 bp, Artificial Sequence
  Synthetic oligonucleotide; AAGAAT chr11 5164514 5164533 5164530 +
agggagggaccaatgtgtaa

SEQ ID NO: 57225 - DNA, 20 bp, Artificial Sequence
  Synthetic oligonucleotide; AAGAAT chr11 5164582 5164601 5164598 +
caaaaattatttagatcttg

SEQ ID NO: 57226 - DNA, 20 bp, Artificial Sequence
  Synthetic oligonucleotide; TCGAGT chr11 5164631 5164650 5164647 +
ctggctatttggaaccactg

SEQ ID NO: 57227 - DNA, 20 bp, Artificial Sequence
  Synthetic oligonucleotide; TGGAGT chr11 5164643 5164662 5164659 +
aaccactgtcgagtttgtat

SEQ ID NO: 57228 - DNA, 20 bp, Artificial Sequence
  Synthetic oligonucleotide; GTGAGT chr11 5164697 5164716 5164713 +
atttaggttttaggtcaggt

SEQ ID NO: 57229 - DNA, 20 bp, Artificial Sequence
  Synthetic oligonucleotide; AGGAAT chr11 5164747 5164766 5164763 +
gcacaggctaagggagaggg

SEQ ID NO: 57230 - DNA, 20 bp, Artificial Sequence
  Synthetic oligonucleotide; GAGGGT chr11 5164754 5164773 5164770 +
ctaagggagagggaggaatg

SEQ ID NO: 57231 - DNA, 20 bp, Artificial Sequence
  Synthetic oligonucleotide; AAGAGT chr11 5164802 5164821 5164818 +
aggcaagcccagagaaaaga

SEQ ID NO: 57232 - DNA, 20 bp, Artificial Sequence
  Synthetic oligonucleotide; AGGGGT chr11 5164823 5164842 5164839 +
agagtacagacacggaggga

SEQ ID NO: 57233 - DNA, 20 bp, Artificial Sequence
  Synthetic oligonucleotide; GGGGGT chr11 5164831 5164850 5164847 +
gacacggagggaaggggttc

SEQ ID NO: 57234 - DNA, 20 bp, Artificial Sequence
  Synthetic oligonucleotide; AGGGGT chr11 5164861 5164880 5164877 +
actcaccagaaaaatgggca

SEQ ID NO: 57235 - DNA, 20 bp, Artificial Sequence
  Synthetic oligonucleotide; AGGGGT chr11 5164882 5164901 5164898 +
ggggttggggcacggaaata

SEQ ID NO: 57236 - DNA, 20 bp, Artificial Sequence
  Synthetic oligonucleotide; TGGGGT chr11 5164888 5164907 5164904 +
ggggcacggaaataaggggt

SEQ ID NO: 57237 - DNA, 20 bp, Artificial Sequence
  Synthetic oligonucleotide; AGGGGT chr11 5164924 5164943 5164940 +
gaggtcagggcacagaaata

SEQ ID NO: 57238 - DNA, 20 bp, Artificial Sequence
  Synthetic oligonucleotide; TGGGGT chr11 5164930 5164949 5164946 +
agggcacagaaataaggggt

SEQ ID NO: 57239 - DNA, 20 bp, Artificial Sequence
  Synthetic oligonucleotide; AGGGAT chr11 5164966 5164985 5164982 +
gaggttggggcacagaaata

SEQ ID NO: 57240 - DNA, 20 bp, Artificial Sequence
  Synthetic oligonucleotide; CGGGGT chr11 5164972 5164991 5164988 +
ggggcacagaaataagggat

SEQ ID NO: 57241 - DNA, 20 bp, Artificial Sequence
  Synthetic oligonucleotide; TGGGGT chr11 5164993 5165012 5165009 +
ggggtgcagagataagaggt

SEQ ID NO: 57242 - DNA, 20 bp, Artificial Sequence
  Synthetic oligonucleotide; AGGGAT chr11 5165008 5165027 5165024 +
gaggttggggtgcagaaata

SEQ ID NO: 57243 - DNA, 20 bp, Artificial Sequence
  Synthetic oligonucleotide; CAGGGT chr11 5165014 5165033 5165030 +
ggggtgcagaaataagggat

SEQ ID NO: 57244 - DNA, 20 bp, Artificial Sequence
  Synthetic oligonucleotide; CGGGGT chr11 5165035 5165054 5165051 +
agggtgcagagataagaggt

SEQ ID NO: 57245 - DNA, 20 bp, Artificial Sequence
  Synthetic oligonucleotide; AGGGAT chr11 5165050 5165069 5165066 +
gaggtcggggtgcagaaata

SEQ ID NO: 57246 - DNA, 20 bp, Artificial Sequence
  Synthetic oligonucleotide; TGGGGT chr11 5165056 5165075 5165072 +
ggggtgcagaaataagggat

SEQ ID NO: 57247 - DNA, 20 bp, Artificial Sequence
  Synthetic oligonucleotide; GAGGAT chr11 5165072 5165091 5165088 +
ggattggggtgcagagataa

SEQ ID NO: 57248 - DNA, 20 bp, Artificial Sequence
  Synthetic oligonucleotide; AGGGAT chr11 5165092 5165111 5165108 +
gaggatggggcgtggaaata

SEQ ID NO: 57249 - DNA, 20 bp, Artificial Sequence
  Synthetic oligonucleotide; TGGGGT chr11 5165097 5165116 5165113 +
tggggcgtggaaataaggga

SEQ ID NO: 57250 - DNA, 20 bp, Artificial Sequence
  Synthetic oligonucleotide; AGGGAT chr11 5165133 5165152 5165149 +
gaggttggggcacagaaata

SEQ ID NO: 57251 - DNA, 20 bp, Artificial Sequence
  Synthetic oligonucleotide; TGGGGT chr11 5165139 5165158 5165155 +
ggggcacagaaataagggat

SEQ ID NO: 57252 - DNA, 20 bp, Artificial Sequence
  Synthetic oligonucleotide; AGGGGT chr11 5165189 5165208 5165205 +
ggggcagagacatggagaga

SEQ ID NO: 57253 - DNA, 20 bp, Artificial Sequence
  Synthetic oligonucleotide; TGGGGT chr11 5165195 5165214 5165211 +
gagacatggagagaaggggt

SEQ ID NO: 57254 - DNA, 20 bp, Artificial Sequence
  Synthetic oligonucleotide; TGGGAT chr11 5165222 5165241 5165238 +
cttacccccctccagaaaag

SEQ ID NO: 57255 - DNA, 20 bp, Artificial Sequence
  Synthetic oligonucleotide; AAGGGT chr11 5165236 5165255 5165252 +
gaaaagtgggatttgccgct

SEQ ID NO: 57256 - DNA, 20 bp, Artificial Sequence
  Synthetic oligonucleotide; CGGAGT chr11 5165367 5165386 5165383 +
tcccagtccgtgactggcac

SEQ ID NO: 57257 - DNA, 20 bp, Artificial Sequence
  Synthetic oligonucleotide; TTGGGT chr11 5165374 5165393 5165390 +
ccgtgactggcaccggagtt

SEQ ID NO: 57258 - DNA, 20 bp, Artificial Sequence
  Synthetic oligonucleotide; ACGGAT chr11 5165382 5165401 5165398 +
ggcaccggagttttgggtcc

SEQ ID NO: 57259 - DNA, 20 bp, Artificial Sequence
  Synthetic oligonucleotide; AGGAAT chr11 5165423 5165442 5165439 +
tgtctctactggaaaatgaa

SEQ ID NO: 57260 - DNA, 20 bp, Artificial Sequence
  Synthetic oligonucleotide; AGGGAT chr11 5165490 5165509 5165506 +
ttgaaaggagaaagaagttg

SEQ ID NO: 57261 - DNA, 20 bp, Artificial Sequence
  Synthetic oligonucleotide; CCGGAT chr11 5165537 5165556 5165553 +
cagtaaaaagaggccactta

SEQ ID NO: 57262 - DNA, 20 bp, Artificial Sequence
  Synthetic oligonucleotide; GTGGAT chr11 5165598 5165617 5165614 +
ttgaggacctgaggtcgtag

SEQ ID NO: 57263 - DNA, 20 bp, Artificial Sequence
  Synthetic oligonucleotide; GGGGAT chr11 5165634 5165653 5165650 +
gagcaaagagcaggaggaca

SEQ ID NO: 57264 - DNA, 20 bp, Artificial Sequence
  Synthetic oligonucleotide; CTGAGT chr11 5165666 5165685 5165682 +
cccaagggaggtcccccaat

SEQ ID NO: 57265 - DNA, 20 bp, Artificial Sequence
  Synthetic oligonucleotide; CTGGGT chr11 5165753 5165772 5165769 +
aacaaggctgtttatttcac

SEQ ID NO: 57266 - DNA, 20 bp, Artificial Sequence
  Synthetic oligonucleotide; CTGAGT chr11 5165768 5165787 5165784 +
ttcacctgggtgcaggcagg

SEQ ID NO: 57267 - DNA, 20 bp, Artificial Sequence
  Synthetic oligonucleotide; GAGAGT chr11 5165781 5165800 5165797 +
aggcaggctgagtccaaaaa

SEQ ID NO: 57268 - DNA, 20 bp, Artificial Sequence
  Synthetic oligonucleotide; AGGAGT chr11 5165801 5165820 5165817 +
gagagtcagcaaagggagat

SEQ ID NO: 57269 - DNA, 20 bp, Artificial Sequence
  Synthetic oligonucleotide; TTGGGT chr11 5165825 5165844 5165841 +
gtggggctgttttataagat

SEQ ID NO: 57270 - DNA, 20 bp, Artificial Sequence
  Synthetic oligonucleotide; GGGGGT chr11 5165856 5165875 5165872 +
aaggaaaattacagtcaaag

SEQ ID NO: 57271 - DNA, 20 bp, Artificial Sequence
  Synthetic oligonucleotide; AGGAGT chr11 5165877 5165896 5165893 +
ggggttgttctctggcgggc

SEQ ID NO: 57272 - DNA, 20 bp, Artificial Sequence
  Synthetic oligonucleotide; GGGGGT chr11 5165883 5165902 5165899 +
gttctctggcgggcaggagt

SEQ ID NO: 57273 - DNA, 20 bp, Artificial Sequence
  Synthetic oligonucleotide; CAGGAT chr11 5165920 5165939 5165936 +
cagtaggggagcttttgagc

SEQ ID NO: 57274 - DNA, 20 bp, Artificial Sequence
  Synthetic oligonucleotide; AGGAAT chr11 5165937 5165956 5165953 +
agccaggatgagccaggaga

SEQ ID NO: 57275 - DNA, 20 bp, Artificial Sequence
  Synthetic oligonucleotide; TGGAAT chr11 5166001 5166020 5166017 +
cattttcacttcttttgtgg

SEQ ID NO: 57276 - DNA, 20 bp, Artificial Sequence
  Synthetic oligonucleotide; TTGGGT chr11 5166342 5166361 5166358 +
acaagttctgttaatgtcag

SEQ ID NO: 57277 - DNA, 20 bp, Artificial Sequence
  Synthetic oligonucleotide; GTGGGT chr11 5166360 5166379 5166376 +
agttgggtctattagatata

SEQ ID NO: 57278 - DNA, 20 bp, Artificial Sequence
  Synthetic oligonucleotide; TTGGAT chr11 5166522 5166541 5166538 +
tatacttgggaactttgatg

SEQ ID NO: 57279 - DNA, 20 bp, Artificial Sequence
  Synthetic oligonucleotide; CTGAAT chr11 5166557 5166576 5166573 +
tttataattgtatcctcttg

SEQ ID NO: 57280 - DNA, 20 bp, Artificial Sequence
  Synthetic oligonucleotide; TGGAAT chr11 5166680 5166699 5166696 +
tctttctggtttccagttca

SEQ ID NO: 57281 - DNA, 20 bp, Artificial Sequence
  Synthetic oligonucleotide; GTGGGT chr11 5166733 5166752 5166749 +
tgtgtgcctttataggtgaa

SEQ ID NO: 57282 - DNA, 20 bp, Artificial Sequence
  Synthetic oligonucleotide; TTGGAT chr11 5166759 5166778 5166775 +
ttcttgaagatcgcataaag

SEQ ID NO: 57283 - DNA, 20 bp, Artificial Sequence
  Synthetic oligonucleotide; AAGGAT chr11 5166845 5166864 5166861 +
actcagtgtagttactaagt

SEQ ID NO: 57284 - DNA, 20 bp, Artificial Sequence
  Synthetic oligonucleotide; AAGGAT chr11 5167063 5167082 5167079 +
aaatatagcaagttatttta

SEQ ID NO: 57285 - DNA, 20 bp, Artificial Sequence
  Synthetic oligonucleotide; ACGAAT chr11 5167070 5167089 5167086 +
gcaagttattttaaaggatg

SEQ ID NO: 57286 - DNA, 20 bp, Artificial Sequence
  Synthetic oligonucleotide; AGGAAT chr11 5167095 5167114 5167111 +
ttatcttagatcgcaaataa

SEQ ID NO: 57287 - DNA, 20 bp, Artificial Sequence
  Synthetic oligonucleotide; TTGGGT chr11 5167250 5167269 5167266 +
gtttttgaaagatttgtttt

SEQ ID NO: 57288 - DNA, 20 bp, Artificial Sequence
  Synthetic oligonucleotide; TGGAGT chr11 5167263 5167282 5167279 +
ttgttttttgggtttcatac

SEQ ID NO: 57289 - DNA, 20 bp, Artificial Sequence
  Synthetic oligonucleotide; GTGGAT chr11 5167274 5167293 5167290 +
gtttcatactggagttctgt

SEQ ID NO: 57290 - DNA, 20 bp, Artificial Sequence
  Synthetic oligonucleotide; TGGGGT chr11 5167302 5167321 5167318 +
cacaccaaaaaatacagtaa

SEQ ID NO: 57291 - DNA, 20 bp, Artificial Sequence
  Synthetic oligonucleotide; GTGGGT chr11 5167341 5167360 5167357 +
ctatgtacttaattttacca

SEQ ID NO: 57292 - DNA, 20 bp, Artificial Sequence
  Synthetic oligonucleotide; GTGAAT chr11 5167444 5167463 5167460 +
tgcaagatggtctggtgttg

SEQ ID NO: 57293 - DNA, 20 bp, Artificial Sequence
  Synthetic oligonucleotide; TTGAAT chr11 5167498 5167517 5167514 +
actttatatattgcttatat

SEQ ID NO: 57294 - DNA, 20 bp, Artificial Sequence
  Synthetic oligonucleotide; TTGAAT chr11 5167529 5167548 5167545 +
ttttaccctataaaatattc

SEQ ID NO: 57295 - DNA, 20 bp, Artificial Sequence
  Synthetic oligonucleotide; CAGGAT chr11 5167623 5167642 5167639 +
tattgagatgtttgttgtca

SEQ ID NO: 57296 - DNA, 20 bp, Artificial Sequence
  Synthetic oligonucleotide; TAGGAT chr11 5167674 5167693 5167690 +
tttctcatctcttctgcttt

SEQ ID NO: 57297 - DNA, 20 bp, Artificial Sequence
  Synthetic oligonucleotide; TAGAAT chr11 5167741 5167760 5167757 +
actatatctaggactacact

SEQ ID NO: 57298 - DNA, 20 bp, Artificial Sequence
  Synthetic oligonucleotide; ATGAAT chr11 5167745 5167764 5167761 +
tatctaggactacacttaga

SEQ ID NO: 57299 - DNA, 20 bp, Artificial Sequence
  Synthetic oligonucleotide; GAGAAT chr11 5167883 5167902 5167899 +
tgttggttgaggaagtagaa

SEQ ID NO: 57300 - DNA, 20 bp, Artificial Sequence
  Synthetic oligonucleotide; GTGAGT chr11 5167996 5168015 5168012 +
tataattagaggaaacagag

SEQ ID NO: 57301 - DNA, 20 bp, Artificial Sequence
  Synthetic oligonucleotide; GTGAAT chr11 5168000 5168019 5168016 +
attagaggaaacagaggtga

SEQ ID NO: 57302 - DNA, 20 bp, Artificial Sequence
  Synthetic oligonucleotide; ATGAAT chr11 5168015 5168034 5168031 +
ggtgagtgaattttgtcctc

SEQ ID NO: 57303 - DNA, 20 bp, Artificial Sequence
  Synthetic oligonucleotide; CAGAAT chr11 5168042 5168061 5168058 +
tcaaaggagaaaatggttta

SEQ ID NO: 57304 - DNA, 20 bp, Artificial Sequence
  Synthetic oligonucleotide; CTGAAT chr11 5168086 5168105 5168102 +
ttccaattttaaagtcaaat

SEQ ID NO: 57305 - DNA, 20 bp, Artificial Sequence
  Synthetic oligonucleotide; AAGAAT chr11 5168128 5168147 5168144 +
actgataatatggtgggcta

SEQ ID NO: 57306 - DNA, 20 bp, Artificial Sequence
  Synthetic oligonucleotide; TTGGAT chr11 5168145 5168164 5168161 +
ctaaagaatcaggtttttag

SEQ ID NO: 57307 - DNA, 20 bp, Artificial Sequence
  Synthetic oligonucleotide; TTGAGT chr11 5168160 5168179 5168176 +
tttagttggattgtctggtt

SEQ ID NO: 57308 - DNA, 20 bp, Artificial Sequence
  Synthetic oligonucleotide; GTGGAT chr11 5168285 5168304 5168301 +
tttcttcatatatttgttcc

SEQ ID NO: 57309 - DNA, 20 bp, Artificial Sequence
  Synthetic oligonucleotide; TTGAGT chr11 5168375 5168394 5168391 +
tgactttaatttttatgtac

SEQ ID NO: 57310 - DNA, 20 bp, Artificial Sequence
  Synthetic oligonucleotide; AGGAAT chr11 5168408 5168427 5168424 +
tagcatttagagagactgtc

SEQ ID NO: 57311 - DNA, 20 bp, Artificial Sequence
  Synthetic oligonucleotide; CTGGAT chr11 5168568 5168587 5168584 +
aatcttcaagatcataaaag

SEQ ID NO: 57312 - DNA, 20 bp, Artificial Sequence
  Synthetic oligonucleotide; ATGAAT chr11 5168597 5168616 5168613 +
attttcttattcatttataa

SEQ ID NO: 57313 - DNA, 20 bp, Artificial Sequence
  Synthetic oligonucleotide; TTGGGT chr11 5168726 5168745 5168742 +
tcacactgaggacttggctc

SEQ ID NO: 57314 - DNA, 20 bp, Artificial Sequence
  Synthetic oligonucleotide; AAGAAT chr11 5168803 5168822 5168819 +
agttttttcatgtataccat

SEQ ID NO: 57315 - DNA, 20 bp, Artificial Sequence
  Synthetic oligonucleotide; GAGAAT chr11 5168883 5168902 5168899 +
ctaaattactctgaaatttt

SEQ ID NO: 57316 - DNA, 20 bp, Artificial Sequence
  Synthetic oligonucleotide; TAGGAT chr11 5169108 5169127 5169124 +
ctcaagactgtgtggtttaa

SEQ ID NO: 57317 - DNA, 20 bp, Artificial Sequence
  Synthetic oligonucleotide; AGGGAT chr11 5169186 5169205 5169202 +
ggctctgcaatccctgtctg

SEQ ID NO: 57318 - DNA, 20 bp, Artificial Sequence
  Synthetic oligonucleotide; TAGAAT chr11 5169196 5169215 5169212 +
tccctgtctgagggattttc

SEQ ID NO: 57319 - DNA, 20 bp, Artificial Sequence
  Synthetic oligonucleotide; CCGAGT chr11 5169249 5169268 5169265 +
tgtcagaagcttgtctacta

SEQ ID NO: 57320 - DNA, 20 bp, Artificial Sequence
  Synthetic oligonucleotide; AGGAGT chr11 5169280 5169299 5169296 +
atgtcaccaaagactattgc

SEQ ID NO: 57321 - DNA, 20 bp, Artificial Sequence
  Synthetic oligonucleotide; CTGAGT chr11 5169480 5169499 5169496 +
taagatttaacattagcaca

SEQ ID NO: 57322 - DNA, 20 bp, Artificial Sequence
  Synthetic oligonucleotide; AAGAAT chr11 5169497 5169516 5169513 +
acactgagtataattttttt

SEQ ID NO: 57323 - DNA, 20 bp, Artificial Sequence
  Synthetic oligonucleotide; CAGAAT chr11 5169540 5169559 5169556 +
tgtaaactacacaaagtaaa

SEQ ID NO: 57324 - DNA, 20 bp, Artificial Sequence
  Synthetic oligonucleotide; CAGGGT chr11 5169869 5169888 5169885 +
ttatatccatcagaggtaag

SEQ ID NO: 57325 - DNA, 20 bp, Artificial Sequence
  Synthetic oligonucleotide; CTGAAT chr11 5170057 5170076 5170073 +
attcccagaaccaaatgtca

SEQ ID NO: 57326 - DNA, 20 bp, Artificial Sequence
  Synthetic oligonucleotide; TTGAGT chr11 5170062 5170081 5170078 +
cagaaccaaatgtcactgaa

SEQ ID NO: 57327 - DNA, 20 bp, Artificial Sequence
  Synthetic oligonucleotide; AAGGAT chr11 5170072 5170091 5170088 +
tgtcactgaattgagtattc

SEQ ID NO: 57328 - DNA, 20 bp, Artificial Sequence
  Synthetic oligonucleotide; CAGAGT chr11 5170146 5170165 5170162 +
ctcctcccacaattttattt

SEQ ID NO: 57329 - DNA, 20 bp, Artificial Sequence
  Synthetic oligonucleotide; TGGAAT chr11 5170245 5170264 5170261 +
taacaagcaataataagcca

SEQ ID NO: 57330 - DNA, 20 bp, Artificial Sequence
  Synthetic oligonucleotide; CAGGGT chr11 5170311 5170330 5170327 +
gatctaagtgcctgtgctgt

SEQ ID NO: 57331 - DNA, 20 bp, Artificial Sequence
  Synthetic oligonucleotide; CTGGAT chr11 5170350 5170369 5170366 +
attagaactcacccctcttc

SEQ ID NO: 57332 - DNA, 20 bp, Artificial Sequence
  Synthetic oligonucleotide; GCGAAT chr11 5170376 5170395 5170392 +
agtgtaagaacaacgctgtt

SEQ ID NO: 57333 - DNA, 20 bp, Artificial Sequence
  Synthetic oligonucleotide; TGGGGT chr11 5170408 5170427 5170424 +
gattttgatactatagacaa

SEQ ID NO: 57334 - DNA, 20 bp, Artificial Sequence
  Synthetic oligonucleotide; TTGAGT chr11 5170560 5170579 5170576 +
atatgtgcgacacacatgtg

SEQ ID NO: 57335 - DNA, 20 bp, Artificial Sequence
  Synthetic oligonucleotide; AAGAAT chr11 5170610 5170629 5170626 +
gctatttccagtactgtatg

SEQ ID NO: 57336 - DNA, 20 bp, Artificial Sequence
  Synthetic oligonucleotide; CAGGAT chr11 5170682 5170701 5170698 +
aaggtaatgacaaatagagc

SEQ ID NO: 57337 - DNA, 20 bp, Artificial Sequence
  Synthetic oligonucleotide; CTGAGT chr11 5170729 5170748 5170745 +
acagggcaatttgatcagat

SEQ ID NO: 57338 - DNA, 20 bp, Artificial Sequence
  Synthetic oligonucleotide; AAGAGT chr11 5170744 5170763 5170760 +
cagatctgagtggaggcaat

SEQ ID NO: 57339 - DNA, 20 bp, Artificial Sequence
  Synthetic oligonucleotide; GAGGGT chr11 5170754 5170773 5170770 +
tggaggcaataagagtgtgt

SEQ ID NO: 57340 - DNA, 20 bp, Artificial Sequence
  Synthetic oligonucleotide; CAGAAT chr11 5170868 5170887 5170884 +
ccagaaatgcaggcaattgt

SEQ ID NO: 57341 - DNA, 20 bp, Artificial Sequence
  Synthetic oligonucleotide; AAGAGT chr11 5170949 5170968 5170965 +
agaaggacacctgactccat

SEQ ID NO: 57342 - DNA, 20 bp, Artificial Sequence
  Synthetic oligonucleotide; AAGAGT chr11 5170957 5170976 5170973 +
acctgactccataagagtga

SEQ ID NO: 57343 - DNA, 20 bp, Artificial Sequence
  Synthetic oligonucleotide; AGGAAT chr11 5171019 5171038 5171035 +
tgacatcgttaatgccaaag

SEQ ID NO: 57344 - DNA, 20 bp, Artificial Sequence
  Synthetic oligonucleotide; ATGGGT chr11 5171100 5171119 5171116 +
gcatggccagaaaatagtac

SEQ ID NO: 57345 - DNA, 20 bp, Artificial Sequence
  Synthetic oligonucleotide; AAGAGT chr11 5171116 5171135 5171132 +
gtacatgggttggtgcaagg

SEQ ID NO: 57346 - DNA, 20 bp, Artificial Sequence
  Synthetic oligonucleotide; TCGGAT chr11 5171126 5171145 5171142 +
tggtgcaaggaagagtcaat

SEQ ID NO: 57347 - DNA, 20 bp, Artificial Sequence
  Synthetic oligonucleotide; AAGAAT chr11 5171138 5171157 5171154 +
gagtcaattcggatgatgtg

SEQ ID NO: 57348 - DNA, 20 bp, Artificial Sequence
  Synthetic oligonucleotide; GGGGAT chr11 5171186 5171205 5171202 +
atggtgtatatcaggcagaa

SEQ ID NO: 57349 - DNA, 20 bp, Artificial Sequence
  Synthetic oligonucleotide; ATGGAT chr11 5171190 5171209 5171206 +
tgtatatcaggcagaagggg

SEQ ID NO: 57350 - DNA, 20 bp, Artificial Sequence
  Synthetic oligonucleotide; CGGGAT chr11 5171223 5171242 5171239 +
taatgttctgcctccagtcc

SEQ ID NO: 57351 - DNA, 20 bp, Artificial Sequence
  Synthetic oligonucleotide; GAGAGT chr11 5171235 5171254 5171251 +
tccagtcccgggatgccaac

SEQ ID NO: 57352 - DNA, 20 bp, Artificial Sequence
  Synthetic oligonucleotide; GTGAAT chr11 5171239 5171258 5171255 +
gtcccgggatgccaacgaga

SEQ ID NO: 57353 - DNA, 20 bp, Artificial Sequence
  Synthetic oligonucleotide; GTGAAT chr11 5171254 5171273 5171270 +
cgagagtgaatgttgtaggt

SEQ ID NO: 57354 - DNA, 20 bp, Artificial Sequence
  Synthetic oligonucleotide; TGGAAT chr11 5171326 5171345 5171342 +
attgagaagcacatggagac

SEQ ID NO: 57355 - DNA, 20 bp, Artificial Sequence
  Synthetic oligonucleotide; AGGGAT chr11 5171406 5171425 5171422 +
taagacatttcctcagaaaa

SEQ ID NO: 57356 - DNA, 20 bp, Artificial Sequence
  Synthetic oligonucleotide; GTGAGT chr11 5171452 5171471 5171468 +
aagggcacaggtaagccaca

SEQ ID NO: 57357 - DNA, 20 bp, Artificial Sequence
  Synthetic oligonucleotide; ATGGGT chr11 5171472 5171491 5171488 +
gtgagtggaagagaaaccta

SEQ ID NO: 57358 - DNA, 20 bp, Artificial Sequence
  Synthetic oligonucleotide; TTGGGT chr11 5171540 5171559 5171556 +
gcattaatagaaatctcaag

SEQ ID NO: 57359 - DNA, 20 bp, Artificial Sequence
  Synthetic oligonucleotide; GAGAGT chr11 5171644 5171663 5171660 +
taacttgtagtgtttataaa

SEQ ID NO: 57360 - DNA, 20 bp, Artificial Sequence
  Synthetic oligonucleotide; ATGAAT chr11 5171652 5171671 5171668 +
agtgtttataaagagagtag

SEQ ID NO: 57361 - DNA, 20 bp, Artificial Sequence
  Synthetic oligonucleotide; AAGAGT chr11 5171682 5171701 5171698 +
aaagtaatataacactaata

SEQ ID NO: 57362 - DNA, 20 bp, Artificial Sequence
  Synthetic oligonucleotide; TGGGAT chr11 5171723 5171742 5171739 +
atttaattgacgtgtaatct

SEQ ID NO: 57363 - DNA, 20 bp, Artificial Sequence
  Synthetic oligonucleotide; TGGAAT chr11 5171836 5171855 5171852 +
atattgtttatcattatatg

SEQ ID NO: 57364 - DNA, 20 bp, Artificial Sequence
  Synthetic oligonucleotide; TAGAAT chr11 5171861 5171880 5171877 +
tatagtaaatattaaatgta

SEQ ID NO: 57365 - DNA, 20 bp, Artificial Sequence
  Synthetic oligonucleotide; AAGGAT chr11 5171896 5171915 5171912 +
aatttaatatattagaacac

SEQ ID NO: 57366 - DNA, 20 bp, Artificial Sequence
  Synthetic oligonucleotide; TAGAAT chr11 5171911 5171930 5171927 +
aacacaaggatagtttctcc

SEQ ID NO: 57367 - DNA, 20 bp, Artificial Sequence
  Synthetic oligonucleotide; AAGGGT chr11 5172008 5172027 5172024 +
agctcctctgtattttgcag

SEQ ID NO: 57368 - DNA, 20 bp, Artificial Sequence
  Synthetic oligonucleotide; CCGGGT chr11 5172030 5172049 5172046 +
gggtcagtcttctgctggaa

SEQ ID NO: 57369 - DNA, 20 bp, Artificial Sequence
  Synthetic oligonucleotide; TAGGGT chr11 5172091 5172110 5172107 +
gtcacatgtgatggtggggc

SEQ ID NO: 57370 - DNA, 20 bp, Artificial Sequence
  Synthetic oligonucleotide; TGGAAT chr11 5172194 5172213 5172210 +
ttaacgttggaggccagaaa

SEQ ID NO: 57371 - DNA, 20 bp, Artificial Sequence
  Synthetic oligonucleotide; CAGGAT chr11 5172201 5172220 5172217 +
tggaggccagaaatggaatt

SEQ ID NO: 57372 - DNA, 20 bp, Artificial Sequence
  Synthetic oligonucleotide; AAGAAT chr11 5172220 5172239 5172236 +
tcaggatggggctcagaaat

SEQ ID NO: 57373 - DNA, 20 bp, Artificial Sequence
  Synthetic oligonucleotide; TGGGAT chr11 5172287 5172306 5172303 +
tcttcgttaggcataatcag

SEQ ID NO: 57374 - DNA, 20 bp, Artificial Sequence
  Synthetic oligonucleotide; CAGAAT chr11 5172636 5172655 5172652 +
ttgactggaggacatagaga

SEQ ID NO: 57375 - DNA, 20 bp, Artificial Sequence
  Synthetic oligonucleotide; AAGAAT chr11 5172672 5172691 5172688 +
ccctcaagaagcaattaacc

SEQ ID NO: 57376 - DNA, 20 bp, Artificial Sequence
  Synthetic oligonucleotide; TCGGGT chr11 5172695 5172714 5172711 +
aataattattcccagaaact

SEQ ID NO: 57377 - DNA, 20 bp, Artificial Sequence
  Synthetic oligonucleotide; GGGAAT chr11 5172718 5172737 5172734 +
ggtgtattagagagaaaggg

SEQ ID NO: 57378 - DNA, 20 bp, Artificial Sequence
  Synthetic oligonucleotide; GAGAGT chr11 5172746 5172765 5172762 +
ttcctgagaagcatgctgga

SEQ ID NO: 57379 - DNA, 20 bp, Artificial Sequence
  Synthetic oligonucleotide; CAGAGT chr11 5173012 5173031 5173028 +
aagtaaaaagtggagagatg

SEQ ID NO: 57380 - DNA, 20 bp, Artificial Sequence
  Synthetic oligonucleotide; TTGGAT chr11 5173017 5173036 5173033 +
aaaagtggagagatgcagag

SEQ ID NO: 57381 - DNA, 20 bp, Artificial Sequence
  Synthetic oligonucleotide; AGGGAT chr11 5173049 5173068 5173065 +
ctagagacggaactgcagat

SEQ ID NO: 57382 - DNA, 20 bp, Artificial Sequence
  Synthetic oligonucleotide; GGGGAT chr11 5173077 5173096 5173093 +
tggtgtagatagtaataaag

SEQ ID NO: 57383 - DNA, 20 bp, Artificial Sequence
  Synthetic oligonucleotide; TTGGGT chr11 5173161 5173180 5173177 +
ctgaaatttgtttgggggac

SEQ ID NO: 57384 - DNA, 20 bp, Artificial Sequence
  Synthetic oligonucleotide; TAGAAT chr11 5173170 5173189 5173186 +
gtttgggggacttgggtaat

SEQ ID NO: 57385 - DNA, 20 bp, Artificial Sequence
  Synthetic oligonucleotide; AAGGGT chr11 5173232 5173251 5173248 +
ctaataccaagtataagatc

SEQ ID NO: 57386 - DNA, 20 bp, Artificial Sequence
  Synthetic oligonucleotide; AGGGAT chr11 5173256 5173275 5173272 +
gttggtctccaagcatgatg

SEQ ID NO: 57387 - DNA, 20 bp, Artificial Sequence
  Synthetic oligonucleotide; ATGGAT chr11 5173295 5173314 5173311 +
ttttatatttttatataaat

SEQ ID NO: 57388 - DNA, 20 bp, Artificial Sequence
  Synthetic oligonucleotide; AAGGAT chr11 5173450 5173469 5173466 +
aactttgtattctttcaaat

SEQ ID NO: 57389 - DNA, 20 bp, Artificial Sequence
  Synthetic oligonucleotide; ATGGGT chr11 5173529 5173548 5173545 +
taacaccctcggaaggaagc

SEQ ID NO: 57390 - DNA, 20 bp, Artificial Sequence
  Synthetic oligonucleotide; ATGAGT chr11 5173589 5173608 5173605 +
ttagatatgacacaaaaagt

SEQ ID NO: 57391 - DNA, 20 bp, Artificial Sequence
  Synthetic oligonucleotide; TTGGAT chr11 5173616 5173635 5173632 +
acaaaaaataaatacataaa

SEQ ID NO: 57392 - DNA, 20 bp, Artificial Sequence
  Synthetic oligonucleotide; CAGAAT chr11 5173727 5173746 5173743 +
tatttcataagtttaatatc

SEQ ID NO: 57393 - DNA, 20 bp, Artificial Sequence
  Synthetic oligonucleotide; GGGAAT chr11 5173800 5173819 5173816 +
tttaaaaatatgcaaatgat

SEQ ID NO: 57394 - DNA, 20 bp, Artificial Sequence
  Synthetic oligonucleotide; ATGAGT chr11 5173804 5173823 5173820 +
aaaatatgcaaatgatggga

SEQ ID NO: 57395 - DNA, 20 bp, Artificial Sequence
  Synthetic oligonucleotide; TAGAAT chr11 5173894 5173913 5173910 +
agacactacttcaaacttac

SEQ ID NO: 57396 - DNA, 20 bp, Artificial Sequence
  Synthetic oligonucleotide; TGGAAT chr11 5173965 5173984 5173981 +
tgacaaagatataagaaaat

SEQ ID NO: 57397 - DNA, 20 bp, Artificial Sequence
  Synthetic oligonucleotide; CTGAAT chr11 5174051 5174070 5174067 +
gttcttcaaaaacttaggca

SEQ ID NO: 57398 - DNA, 20 bp, Artificial Sequence
  Synthetic oligonucleotide; CAGAAT chr11 5174181 5174200 5174197 +
agccaaaaggtggaaacaac

SEQ ID NO: 57399 - DNA, 20 bp, Artificial Sequence
  Synthetic oligonucleotide; ATGAAT chr11 5174199 5174218 5174215 +
accagaatgtacataaacag

SEQ ID NO: 57400 - DNA, 20 bp, Artificial Sequence
  Synthetic oligonucleotide; ATGAAT chr11 5174203 5174222 5174219 +
gaatgtacataaacagatga

SEQ ID NO: 57401 - DNA, 20 bp, Artificial Sequence
  Synthetic oligonucleotide; TGGAAT chr11 5174234 5174253 5174250 +
aatgtgatatatacacacaa

SEQ ID NO: 57402 - DNA, 20 bp, Artificial Sequence
  Synthetic oligonucleotide; AAGAAT chr11 5174257 5174276 5174273 +
aatattatgtagcaataaaa

SEQ ID NO: 57403 - DNA, 20 bp, Artificial Sequence
  Synthetic oligonucleotide; ATGAAT chr11 5174297 5174316 5174313 +
gtaagtccttatttaatgtc

SEQ ID NO: 57404 - DNA, 20 bp, Artificial Sequence
  Synthetic oligonucleotide; ATGGAT chr11 5174395 5174414 5174411 +
actgttagatgagaaaaaaa

SEQ ID NO: 57405 - DNA, 20 bp, Artificial Sequence
  Synthetic oligonucleotide; AAGAAT chr11 5174438 5174457 5174454 +
ggcttaaagtttcagtttcc

SEQ ID NO: 57406 - DNA, 20 bp, Artificial Sequence
  Synthetic oligonucleotide; ATGAAT chr11 5174446 5174465 5174462 +
gtttcagtttccaagaatct

SEQ ID NO: 57407 - DNA, 20 bp, Artificial Sequence
  Synthetic oligonucleotide; ATGGAT chr11 5174494 5174513 5174510 +
accactatacatgttatggc

SEQ ID NO: 57408 - DNA, 20 bp, Artificial Sequence
  Synthetic oligonucleotide; TTGGGT chr11 5174518 5174537 5174534 +
atggactttgaaaccttatg

SEQ ID NO: 57409 - DNA, 20 bp, Artificial Sequence
  Synthetic oligonucleotide; ATGAAT chr11 5174557 5174576 5174573 +
cacaaaacaacaaatattgt

SEQ ID NO: 57410 - DNA, 20 bp, Artificial Sequence
  Synthetic oligonucleotide; ATGAAT chr11 5174571 5174590 5174587 +
tattgtatgaatctatttat

SEQ ID NO: 57411 - DNA, 20 bp, Artificial Sequence
  Synthetic oligonucleotide; GGGAGT chr11 5174636 5174655 5174652 +
tagaggttactatgggactg

SEQ ID NO: 57412 - DNA, 20 bp, Artificial Sequence
  Synthetic oligonucleotide; TTGGAT chr11 5174670 5174689 5174686 +
aacaagtatagcatttctgc

SEQ ID NO: 57413 - DNA, 20 bp, Artificial Sequence
  Synthetic oligonucleotide; TAGGGT chr11 5174878 5174897 5174894 +
agacaaatttttattttgat

SEQ ID NO: 57414 - DNA, 20 bp, Artificial Sequence
  Synthetic oligonucleotide; TTGAAT chr11 5174883 5174902 5174899 +
aatttttattttgattaggg

SEQ ID NO: 57415 - DNA, 20 bp, Artificial Sequence
  Synthetic oligonucleotide; TTGAAT chr11 5174888 5174907 5174904 +
ttattttgattagggttgaa

SEQ ID NO: 57416 - DNA, 20 bp, Artificial Sequence
  Synthetic oligonucleotide; ATGAGT chr11 5174899 5174918 5174915 +
agggttgaattgaatttatt

SEQ ID NO: 57417 - DNA, 20 bp, Artificial Sequence
  Synthetic oligonucleotide; GAGAAT chr11 5174914 5174933 5174930 +
ttattatgagttgtttctga

SEQ ID NO: 57418 - DNA, 20 bp, Artificial Sequence
  Synthetic oligonucleotide; TTGGGT chr11 5174992 5175011 5175008 +
tatacagttctattatcatt

SEQ ID NO: 57419 - DNA, 20 bp, Artificial Sequence
  Synthetic oligonucleotide; TGGAGT chr11 5175054 5175073 5175070 +
tatttttggtttttttgaga

SEQ ID NO: 57420 - DNA, 20 bp, Artificial Sequence
  Synthetic oligonucleotide; TAGAGT chr11 5175079 5175098 5175095 +
tctctctctgtggtccaggc

SEQ ID NO: 57421 - DNA, 20 bp, Artificial Sequence
  Synthetic oligonucleotide; CAGAAT chr11 5175123 5175142 5175139 +
ctcactgcaacctccgcctc

SEQ ID NO: 57422 - DNA, 20 bp, Artificial Sequence
  Synthetic oligonucleotide; TGGGAT chr11 5175164 5175183 5175180 +
gcctcagcctcccatgtagc

SEQ ID NO: 57423 - DNA, 20 bp, Artificial Sequence
  Synthetic oligonucleotide; TTGAAT chr11 5175209 5175228 5175225 +
gtctggcctctatcatcatt

SEQ ID NO: 57424 - DNA, 20 bp, Artificial Sequence
  Synthetic oligonucleotide; TTGGAT chr11 5175500 5175519 5175516 +
agtctgtagtggtactggtc

SEQ ID NO: 57425 - DNA, 20 bp, Artificial Sequence
  Synthetic oligonucleotide; AAGGAT chr11 5175804 5175823 5175820 +
ttccctttcccttcctgctg

SEQ ID NO: 57426 - DNA, 20 bp, Artificial Sequence
  Synthetic oligonucleotide; CAGAAT chr11 5175921 5175940 5175937 +
agccatttcctaaatccttt

SEQ ID NO: 57427 - DNA, 20 bp, Artificial Sequence
  Synthetic oligonucleotide; CTGAGT chr11 5175927 5175946 5175943 +
ttcctaaatcctttcagaat

SEQ ID NO: 57428 - DNA, 20 bp, Artificial Sequence
  Synthetic oligonucleotide; TTGGAT chr11 5176091 5176110 5176107 +
gatatcatgttgcatgcatt

SEQ ID NO: 57429 - DNA, 20 bp, Artificial Sequence
  Synthetic oligonucleotide; CTGAGT chr11 5176245 5176264 5176261 +
ttttatggagaaatgcaacg

SEQ ID NO: 57430 - DNA, 20 bp, Artificial Sequence
  Synthetic oligonucleotide; TAGAAT chr11 5176264 5176283 5176280 +
gctgagtgtaaatttcacat

SEQ ID NO: 57431 - DNA, 20 bp, Artificial Sequence
  Synthetic oligonucleotide; TAGAGT chr11 5176285 5176304 5176301 +
agaatgtccaaaacattgtg

SEQ ID NO: 57432 - DNA, 20 bp, Artificial Sequence
  Synthetic oligonucleotide; TAGAAT chr11 5176413 5176432 5176429 +
aacaaattaattagattttt

SEQ ID NO: 57433 - DNA, 20 bp, Artificial Sequence
  Synthetic oligonucleotide; ATGAGT chr11 5176681 5176700 5176697 +
aagctaagcataagccaagc

SEQ ID NO: 57434 - DNA, 20 bp, Artificial Sequence
  Synthetic oligonucleotide; AGGGAT chr11 5176838 5176857 5176854 +
aaaaatttgtattgatgtga

SEQ ID NO: 57435 - DNA, 20 bp, Artificial Sequence
  Synthetic oligonucleotide; TGGGAT chr11 5176887 5176906 5176903 +
tcatagataattacttttgc

SEQ ID NO: 57436 - DNA, 20 bp, Artificial Sequence
  Synthetic oligonucleotide; TTGGGT chr11 5177061 5177080 5177077 +
catgatgctccattgatgac

SEQ ID NO: 57437 - DNA, 20 bp, Artificial Sequence
  Synthetic oligonucleotide; TTGAAT chr11 5177182 5177201 5177198 +
aattcactattattcacttg

SEQ ID NO: 57438 - DNA, 20 bp, Artificial Sequence
  Synthetic oligonucleotide; GTGAGT chr11 5177237 5177256 5177253 +
agagactttgtgagatgtca

SEQ ID NO: 57439 - DNA, 20 bp, Artificial Sequence
  Synthetic oligonucleotide; AGGGAT chr11 5177256 5177275 5177272 +
agtgagttagaaaatattct

SEQ ID NO: 57440 - DNA, 20 bp, Artificial Sequence
  Synthetic oligonucleotide; CAGAGT chr11 5177334 5177353 5177350 +
gttattggttcaagtctctg

SEQ ID NO: 57441 - DNA, 20 bp, Artificial Sequence
  Synthetic oligonucleotide; GGGAGT chr11 5177345 5177364 5177361 +
aagtctctgcagagtacagc

SEQ ID NO: 57442 - DNA, 20 bp, Artificial Sequence
  Synthetic oligonucleotide; CAGAAT chr11 5177365 5177384 5177381 +
gggagtgttgtacatttcag

SEQ ID NO: 57443 - DNA, 20 bp, Artificial Sequence
  Synthetic oligonucleotide; CTGGAT chr11 5177444 5177463 5177460 +
tctacgtaggaaaagtcaat

SEQ ID NO: 57444 - DNA, 20 bp, Artificial Sequence
  Synthetic oligonucleotide; GAGAAT chr11 5177537 5177556 5177553 +
atagtatttctgaaaaaatg

SEQ ID NO: 57445 - DNA, 20 bp, Artificial Sequence
  Synthetic oligonucleotide; TTGAGT chr11 5177580 5177599 5177596 +
tttttcaaaacctttgatct

SEQ ID NO: 57446 - DNA, 20 bp, Artificial Sequence
  Synthetic oligonucleotide; GAGGAT chr11 5177641 5177660 5177657 +
ccatcattttaagtgtgttt

SEQ ID NO: 57447 - DNA, 20 bp, Artificial Sequence
  Synthetic oligonucleotide; ATGGAT chr11 5177651 5177670 5177667 +
aagtgtgtttgaggatttct

SEQ ID NO: 57448 - DNA, 20 bp, Artificial Sequence
  Synthetic oligonucleotide; TGGGGT chr11 5177771 5177790 5177787 +
ggtcttcaccccataaatga

SEQ ID NO: 57449 - DNA, 20 bp, Artificial Sequence
  Synthetic oligonucleotide; TAGGAT chr11 5177814 5177833 5177830 +
aacacatagagactgcccac

SEQ ID NO: 57450 - DNA, 20 bp, Artificial Sequence
  Synthetic oligonucleotide; GTGAAT chr11 5177820 5177839 5177836 +
tagagactgcccactaggat

SEQ ID NO: 57451 - DNA, 20 bp, Artificial Sequence
  Synthetic oligonucleotide; AGGGAT chr11 5177832 5177851 5177848 +
actaggatgtgaatgtggtg

SEQ ID NO: 57452 - DNA, 20 bp, Artificial Sequence
  Synthetic oligonucleotide; AAGAAT chr11 5177872 5177891 5177888 +
agcgatgggcaagaaatgaa

SEQ ID NO: 57453 - DNA, 20 bp, Artificial Sequence
  Synthetic oligonucleotide; TGGGGT chr11 5177880 5177899 5177896 +
gcaagaaatgaaaagaatgc

SEQ ID NO: 57454 - DNA, 20 bp, Artificial Sequence
  Synthetic oligonucleotide; CTGAGT chr11 5177969 5177988 5177985 +
ccaggaagatatctgaaaca

SEQ ID NO: 57455 - DNA, 20 bp, Artificial Sequence
  Synthetic oligonucleotide; AAGGAT chr11 5177976 5177995 5177992 +
gatatctgaaacactgagtg

SEQ ID NO: 57456 - DNA, 20 bp, Artificial Sequence
  Synthetic oligonucleotide; TAGGAT chr11 5177989 5178008 5178005 +
ctgagtgaaggatcattgtg

SEQ ID NO: 57457 - DNA, 20 bp, Artificial Sequence
  Synthetic oligonucleotide; GAGAGT chr11 5178025 5178044 5178041 +
gcactatatccagtcctgta

SEQ ID NO: 57458 - DNA, 20 bp, Artificial Sequence
  Synthetic oligonucleotide; AGGAAT chr11 5178104 5178123 5178120 +
tctggcaatgtgctcacagt

SEQ ID NO: 57459 - DNA, 20 bp, Artificial Sequence
  Synthetic oligonucleotide; AGGAAT chr11 5178111 5178130 5178127 +
atgtgctcacagtaggaatg

SEQ ID NO: 57460 - DNA, 20 bp, Artificial Sequence
  Synthetic oligonucleotide; GTGGGT chr11 5178245 5178264 5178261 +
ggttaaaatggtgtatctca

SEQ ID NO: 57461 - DNA, 20 bp, Artificial Sequence
  Synthetic oligonucleotide; GAGAAT chr11 5178288 5178307 5178304 +
cggtcaaatgccattgccag

SEQ ID NO: 57462 - DNA, 20 bp, Artificial Sequence
  Synthetic oligonucleotide; AAGGAT chr11 5178352 5178371 5178368 +
tctgagacacacaactacca

SEQ ID NO: 57463 - DNA, 20 bp, Artificial Sequence
  Synthetic oligonucleotide; TGGAGT chr11 5178365 5178384 5178381 +
actaccaaaggatatgtcca

SEQ ID NO: 57464 - DNA, 20 bp, Artificial Sequence
  Synthetic oligonucleotide; GAGGAT chr11 5178378 5178397 5178394 +
atgtccatggagtggaacca

SEQ ID NO: 57465 - DNA, 20 bp, Artificial Sequence
  Synthetic oligonucleotide; ATGGAT chr11 5178439 5178458 5178455 +
ggaagtcggctgaggccagc

SEQ ID NO: 57466 - DNA, 20 bp, Artificial Sequence
  Synthetic oligonucleotide; AGGGAT chr11 5178543 5178562 5178559 +
acaatgtacataaaagaaaa

SEQ ID NO: 57467 - DNA, 20 bp, Artificial Sequence
  Synthetic oligonucleotide; TGGGAT chr11 5178579 5178598 5178595 +
gtatgcaagccttccagccc

SEQ ID NO: 57468 - DNA, 20 bp, Artificial Sequence
  Synthetic oligonucleotide; GGGAAT chr11 5178611 5178630 5178627 +
caggacataccacacatcct

SEQ ID NO: 57469 - DNA, 20 bp, Artificial Sequence
  Synthetic oligonucleotide; GAGGAT chr11 5178695 5178714 5178711 +
tagtgaaagactacaaagtt

SEQ ID NO: 57470 - DNA, 20 bp, Artificial Sequence
  Synthetic oligonucleotide; CTGAAT chr11 5178720 5178739 5178736 +
tttagaaacactaccttagg

SEQ ID NO: 57471 - DNA, 20 bp, Artificial Sequence
  Synthetic oligonucleotide; GAGAGT chr11 5178776 5178795 5178792 +
tgttttcttctctgggaaag

SEQ ID NO: 57472 - DNA, 20 bp, Artificial Sequence
  Synthetic oligonucleotide; ATGGGT chr11 5178785 5178804 5178801 +
ctctgggaaaggagagtaaa

SEQ ID NO: 57473 - DNA, 20 bp, Artificial Sequence
  Synthetic oligonucleotide; CCGAAT chr11 5178798 5178817 5178814 +
gagtaaaatgggttaataga

SEQ ID NO: 57474 - DNA, 20 bp, Artificial Sequence
  Synthetic oligonucleotide; CTGGAT chr11 5179025 5179044 5179041 +
gcctcttaccctaggcccta

SEQ ID NO: 57475 - DNA, 20 bp, Artificial Sequence
  Synthetic oligonucleotide; CAGGAT chr11 5179042 5179061 5179058 +
ctactggatttaaagtaagg

SEQ ID NO: 57476 - DNA, 20 bp, Artificial Sequence
  Synthetic oligonucleotide; GAGAGT chr11 5179157 5179176 5179173 +
tcatatccctaaggaaaata

SEQ ID NO: 57477 - DNA, 20 bp, Artificial Sequence
  Synthetic oligonucleotide; GGGAAT chr11 5179198 5179217 5179214 +
tgctgcttacagaaatggga

SEQ ID NO: 57478 - DNA, 20 bp, Artificial Sequence
  Synthetic oligonucleotide; TAGGAT chr11 5179353 5179372 5179369 +
taatctatttctcaaaaata

SEQ ID NO: 57479 - DNA, 20 bp, Artificial Sequence
  Synthetic oligonucleotide; CTGGGT chr11 5179400 5179419 5179416 +
atttgcaatggcagacggag

SEQ ID NO: 57480 - DNA, 20 bp, Artificial Sequence
  Synthetic oligonucleotide; GCGGGT chr11 5179474 5179493 5179490 +
cagcactttgagaggctgag

SEQ ID NO: 57481 - DNA, 20 bp, Artificial Sequence
  Synthetic oligonucleotide; AGGAGT chr11 5179493 5179512 5179509 +
ggcgggtagatcacaaggtc

SEQ ID NO: 57482 - DNA, 20 bp, Artificial Sequence
  Synthetic oligonucleotide; GAGAAT chr11 5179611 5179630 5179627 +
tactcaagaggctgaggcag

SEQ ID NO: 57483 - DNA, 20 bp, Artificial Sequence
  Synthetic oligonucleotide; AAGAAT chr11 5179734 5179753 5179750 +
tatatgcctcataggtggta

SEQ ID NO: 57484 - DNA, 20 bp, Artificial Sequence
  Synthetic oligonucleotide; TAGGGT chr11 5179833 5179852 5179849 +
gtttattatactttaagttc

SEQ ID NO: 57485 - DNA, 20 bp, Artificial Sequence
  Synthetic oligonucleotide; ATGAGT chr11 5180034 5180053 5180050 +
tcattgttcaactcccacct

SEQ ID NO: 57486 - DNA, 20 bp, Artificial Sequence
  Synthetic oligonucleotide; GAGAAT chr11 5180040 5180059 5180056 +
ttcaactcccacctatgagt

SEQ ID NO: 57487 - DNA, 20 bp, Artificial Sequence
  Synthetic oligonucleotide; CAGAAT chr11 5180084 5180103 5180100 +
cgtccttgcgatactttgct

SEQ ID NO: 57488 - DNA, 20 bp, Artificial Sequence
  Synthetic oligonucleotide; TTGGGT chr11 5180214 5180233 5180230 +
agtctatcattgttggacat

SEQ ID NO: 57489 - DNA, 20 bp, Artificial Sequence
  Synthetic oligonucleotide; GTGAAT chr11 5180241 5180260 5180257 +
ggttccaagtctttgctatt

SEQ ID NO: 57490 - DNA, 20 bp, Artificial Sequence
  Synthetic oligonucleotide; TTGGGT chr11 5180305 5180324 5180321 +
gcagcatgatttacattcct

SEQ ID NO: 57491 - DNA, 20 bp, Artificial Sequence
  Synthetic oligonucleotide; TAGGAT chr11 5180324 5180343 5180340 +
tttgggtatatacccagtaa

SEQ ID NO: 57492 - DNA, 20 bp, Artificial Sequence
  Synthetic oligonucleotide; CTGGGT chr11 5180332 5180351 5180348 +
tatacccagtaataggatgg

SEQ ID NO: 57493 - DNA, 20 bp, Artificial Sequence
  Synthetic oligonucleotide; AGGAAT chr11 5180367 5180386 5180383 +
tttctagttctagatccctg

SEQ ID NO: 57494 - DNA, 20 bp, Artificial Sequence
  Synthetic oligonucleotide; TTGAGT chr11 5180676 5180695 5180692 +
tttttttcttgtaaatttgt

SEQ ID NO: 57495 - DNA, 20 bp, Artificial Sequence
  Synthetic oligonucleotide; CTGGAT chr11 5180694 5180713 5180710 +
gtttgagttcattgtagatt

SEQ ID NO: 57496 - DNA, 20 bp, Artificial Sequence
  Synthetic oligonucleotide; ATGAGT chr11 5180716 5180735 5180732 +
ggatattagccctttgtcag

SEQ ID NO: 57497 - DNA, 20 bp, Artificial Sequence
  Synthetic oligonucleotide; CTGAAT chr11 5180891 5180910 5180907 +
tccttgcccatgcctatgtc

SEQ ID NO: 57498 - DNA, 20 bp, Artificial Sequence
  Synthetic oligonucleotide; AGGGAT chr11 5180995 5181014 5181011 +
ttttgtataaggtgtaagga

SEQ ID NO: 57499 - DNA, 20 bp, Artificial Sequence
  Synthetic oligonucleotide; GGGAAT chr11 5181058 5181077 5181074 +
ccagcatcatttattaaata

SEQ ID NO: 57500 - DNA, 20 bp, Artificial Sequence
  Synthetic oligonucleotide; GTGGAT chr11 5181113 5181132 5181129 +
ttgtcaaagatcagatagtt

SEQ ID NO: 57501 - DNA, 20 bp, Artificial Sequence
  Synthetic oligonucleotide; TAGGAT chr11 5181265 5181284 5181281 +
ctagctttgttcttttggct

SEQ ID NO: 57502 - DNA, 20 bp, Artificial Sequence
  Synthetic oligonucleotide; GGGGAT chr11 5181361 5181380 5181377 +
aaagtcattggtagcttgat

SEQ ID NO: 57503 - DNA, 20 bp, Artificial Sequence
  Synthetic oligonucleotide; TTGAAT chr11 5181371 5181390 5181387 +
gtagcttgatggggatggca

SEQ ID NO: 57504 - DNA, 20 bp, Artificial Sequence
  Synthetic oligonucleotide; TGGAAT chr11 5181439 5181458 5181455 +
attcttcctatccatgagca

SEQ ID NO: 57505 - DNA, 20 bp, Artificial Sequence
  Synthetic oligonucleotide; TTGGAT chr11 5181532 5181551 5181548 +
tccttcacatcccttgtaag

SEQ ID NO: 57506 - DNA, 20 bp, Artificial Sequence
  Synthetic oligonucleotide; GTGAAT chr11 5181569 5181588 5181585 +
ttattctctttgaggcaatt

SEQ ID NO: 57507 - DNA, 20 bp, Artificial Sequence
  Synthetic oligonucleotide; GGGAGT chr11 5181575 5181594 5181591 +
tctttgaggcaattgtgaat

SEQ ID NO: 57508 - DNA, 20 bp, Artificial Sequence
  Synthetic oligonucleotide; AGGAAT chr11 5181623 5181642 5181639 +
tttgtctgttattggtgtat

SEQ ID NO: 57509 - DNA, 20 bp, Artificial Sequence
  Synthetic oligonucleotide; TGGGGT chr11 5181714 5181733 5181730 +
gagattttgggctgagacga

SEQ ID NO: 57510 - DNA, 20 bp, Artificial Sequence
  Synthetic oligonucleotide; TTGAAT chr11 5181781 5181800 5181797 +
ttcacttcctcttttcctaa

SEQ ID NO: 57511 - DNA, 20 bp, Artificial Sequence
  Synthetic oligonucleotide; TTGAAT chr11 5181842 5181861 5181858 +
ccagaacttccaacactatg

SEQ ID NO: 57512 - DNA, 20 bp, Artificial Sequence
  Synthetic oligonucleotide; AGGAGT chr11 5181848 5181867 5181864 +
cttccaacactatgttgaat

SEQ ID NO: 57513 - DNA, 20 bp, Artificial Sequence
  Synthetic oligonucleotide; GGGAAT chr11 5181893 5181912 5181909 +
gtcttgtgccagttttcaaa

SEQ ID NO: 57514 - DNA, 20 bp, Artificial Sequence
  Synthetic oligonucleotide; GTGGGT chr11 5181935 5181954 5181951 +
cattcagtatgatattggct

SEQ ID NO: 57515 - DNA, 20 bp, Artificial Sequence
  Synthetic oligonucleotide; GAGAGT chr11 5181997 5182016 5182013 +
ccatcgatacctaatttatt

SEQ ID NO: 57516 - DNA, 20 bp, Artificial Sequence
  Synthetic oligonucleotide; TTGAAT chr11 5182021 5182040 5182037 +
gtttttagtatgaagcattg

SEQ ID NO: 57517 - DNA, 20 bp, Artificial Sequence
  Synthetic oligonucleotide; CTGGAT chr11 5182096 5182115 5182112 +
tctttggttctgtttatatg

SEQ ID NO: 57518 - DNA, 20 bp, Artificial Sequence
  Synthetic oligonucleotide; AGGGAT chr11 5182144 5182163 5182160 +
ttgaaccagccctgcatccc

SEQ ID NO: 57519 - DNA, 20 bp, Artificial Sequence
  Synthetic oligonucleotide; GTGGAT chr11 5182168 5182187 5182184 +
atgaagcccacttgatcatg

SEQ ID NO: 57520 - DNA, 20 bp, Artificial Sequence
  Synthetic oligonucleotide; CTGGAT chr11 5182192 5182211 5182208 +
ataagctttttgatgtgctc

SEQ ID NO: 57521 - DNA, 20 bp, Artificial Sequence
  Synthetic oligonucleotide; GAGGAT chr11 5182219 5182238 5182235 +
tggtttgccagtattttact

SEQ ID NO: 57522 - DNA, 20 bp, Artificial Sequence
  Synthetic oligonucleotide; AGGGAT chr11 5182244 5182263 5182260 +
tttttgcatcgatgttcatc

SEQ ID NO: 57523 - DNA, 20 bp, Artificial Sequence
  Synthetic oligonucleotide; ATGAGT chr11 5182323 5182342 5182339 +
gatgatgctggcctcataaa

SEQ ID NO: 57524 - DNA, 20 bp, Artificial Sequence
  Synthetic oligonucleotide; GAGGAT chr11 5182333 5182352 5182349 +
gcctcataaaatgagttagg

SEQ ID NO: 57525 - DNA, 20 bp, Artificial Sequence
  Synthetic oligonucleotide; TGGAAT chr11 5182358 5182377 5182374 +
ttccctctttttctattgat

SEQ ID NO: 57526 - DNA, 20 bp, Artificial Sequence
  Synthetic oligonucleotide; AGGAAT chr11 5182373 5182392 5182389 +
ttgattggaatagtttcaga

SEQ ID NO: 57527 - DNA, 20 bp, Artificial Sequence
  Synthetic oligonucleotide; TAGAAT chr11 5182406 5182425 5182422 +
gctcctccttgtacctctgg

SEQ ID NO: 57528 - DNA, 20 bp, Artificial Sequence
  Synthetic oligonucleotide; GTGAAT chr11 5182418 5182437 5182434 +
acctctggtagaattcggct

SEQ ID NO: 57529 - DNA, 20 bp, Artificial Sequence
  Synthetic oligonucleotide; CAGGAT chr11 5182677 5182696 5182693 +
accagctaacatcataatga

SEQ ID NO: 57530 - DNA, 20 bp, Artificial Sequence
  Synthetic oligonucleotide; TTGGAT chr11 5182759 5182778 5182775 +
aaaagacacagactggcaaa

SEQ ID NO: 57531 - DNA, 20 bp, Artificial Sequence
  Synthetic oligonucleotide; AAGAGT chr11 5182766 5182785 5182782 +
acagactggcaaattggata

SEQ ID NO: 57532 - DNA, 20 bp, Artificial Sequence
  Synthetic oligonucleotide; AGGGAT chr11 5182842 5182861 5182858 +
cacacataggctcaaaataa

SEQ ID NO: 57533 - DNA, 20 bp, Artificial Sequence
  Synthetic oligonucleotide; CAGGGT chr11 5182888 5182907 5182904 +
aatggaaaacaaaaaaaagg

SEQ ID NO: 57534 - DNA, 20 bp, Artificial Sequence
  Synthetic oligonucleotide; AGGGAT chr11 5182975 5182994 5182991 +
aggccattacatactggtaa

SEQ ID NO: 57535 - DNA, 20 bp, Artificial Sequence
  Synthetic oligonucleotide; AAGGAT chr11 5183160 5183179 5183176 +
caacgagacagaaagttaac

SEQ ID NO: 57536 - DNA, 20 bp, Artificial Sequence
  Synthetic oligonucleotide; AGGAAT chr11 5183170 5183189 5183186 +
gaaagttaacaaggatatcc

SEQ ID NO: 57537 - DNA, 20 bp, Artificial Sequence
  Synthetic oligonucleotide; TTGAAT chr11 5183175 5183194 5183191 +
ttaacaaggatatccaggaa

SEQ ID NO: 57538 - DNA, 20 bp, Artificial Sequence
  Synthetic oligonucleotide; TAGAAT chr11 5183239 5183258 5183255 +
aactctccatcccaaatcaa

SEQ ID NO: 57539 - DNA, 20 bp, Artificial Sequence
  Synthetic oligonucleotide; CAGGAT chr11 5183382 5183401 5183398 +
agtgcaatcaaactagaact

SEQ ID NO: 57540 - DNA, 20 bp, Artificial Sequence
  Synthetic oligonucleotide; CTGAAT chr11 5183440 5183459 5183456 +
ggaaactgaacagcctgctc

SEQ ID NO: 57541 - DNA, 20 bp, Artificial Sequence
  Synthetic oligonucleotide; CTGGGT chr11 5183451 5183470 5183467 +
agcctgctcctgaatgacta

SEQ ID NO: 57542 - DNA, 20 bp, Artificial Sequence
  Synthetic oligonucleotide; GAGAAT chr11 5183503 5183522 5183519 +
agatgttctttgaaaccaac

SEQ ID NO: 57543 - DNA, 20 bp, Artificial Sequence
  Synthetic oligonucleotide; CAGAAT chr11 5183524 5183543 5183540 +
agaataaagatacaacaaaa

SEQ ID NO: 57544 - DNA, 20 bp, Artificial Sequence
  Synthetic oligonucleotide; ATGAAT chr11 5183750 5183769 5183766 +
aaaaacccttaaaaaaatca

SEQ ID NO: 57545 - DNA, 20 bp, Artificial Sequence
  Synthetic oligonucleotide; GGGGAT chr11 5183863 5183882 5183879 +
atgcaataagaaatgataaa

SEQ ID NO: 57546 - DNA, 20 bp, Artificial Sequence
  Synthetic oligonucleotide; GAGAAT chr11 5183906 5183925 5183922 +
agacatacaaactaccatca

SEQ ID NO: 57547 - DNA, 20 bp, Artificial Sequence
  Synthetic oligonucleotide; ATGGAT chr11 5183956 5183975 5183972 +
aactagaaaatctagtagaa

SEQ ID NO: 57548 - DNA, 20 bp, Artificial Sequence
  Synthetic oligonucleotide; TTGAAT chr11 5184008 5184027 5184024 +
aagactaaaccagggagaaa

SEQ ID NO: 57549 - DNA, 20 bp, Artificial Sequence
  Synthetic oligonucleotide; AGGAGT chr11 5184129 5184148 5184145 +
atgttttcacattataaaac

SEQ ID NO: 57550 - DNA, 20 bp, Artificial Sequence
  Synthetic oligonucleotide; GTGGAT chr11 5184188 5184207 5184204 +
aattactagttctaaaaaat

SEQ ID NO: 57551 - DNA, 20 bp, Artificial Sequence
  Synthetic oligonucleotide; TTGAGT chr11 5184210 5184229 5184226 +
ggatagaagcaagtttaata

SEQ ID NO: 57552 - DNA, 20 bp, Artificial Sequence
  Synthetic oligonucleotide; CAGGGT chr11 5184243 5184262 5184259 +
aagattaggagatgcaacac

SEQ ID NO: 57553 - DNA, 20 bp, Artificial Sequence
  Synthetic oligonucleotide; ATGGGT chr11 5184371 5184390 5184387 +
atagatagatagatagatgc

SEQ ID NO: 57554 - DNA, 20 bp, Artificial Sequence
  Synthetic oligonucleotide; GTGAAT chr11 5184397 5184416 5184413 +
ataaacatagataataatat

SEQ ID NO: 57555 - DNA, 20 bp, Artificial Sequence
  Synthetic oligonucleotide; TTGGGT chr11 5184628 5184647 5184644 +
attttatatgatggaaatgt

SEQ ID NO: 57556 - DNA, 20 bp, Artificial Sequence
  Synthetic oligonucleotide; TTGAGT chr11 5184642 5184661 5184658 +
aaatgtttgggtcccatttt

SEQ ID NO: 57557 - DNA, 20 bp, Artificial Sequence
  Synthetic oligonucleotide; TAGAAT chr11 5184655 5184674 5184671 +
ccattttttgagttacagtt

SEQ ID NO: 57558 - DNA, 20 bp, Artificial Sequence
  Synthetic oligonucleotide; TGGAAT chr11 5184704 5184723 5184720 +
aatttacccttgctttaagt

SEQ ID NO: 57559 - DNA, 20 bp, Artificial Sequence
  Synthetic oligonucleotide; GTGGAT chr11 5184757 5184776 5184773 +
atttgaagttatttaactct

SEQ ID NO: 57560 - DNA, 20 bp, Artificial Sequence
  Synthetic oligonucleotide; TAGAAT chr11 5184818 5184837 5184834 +
taatatatatctcacattgt

SEQ ID NO: 57561 - DNA, 20 bp, Artificial Sequence
  Synthetic oligonucleotide; AAGAAT chr11 5184859 5184878 5184875 +
ttgatgtttcagagaaagga

SEQ ID NO: 57562 - DNA, 20 bp, Artificial Sequence
  Synthetic oligonucleotide; GTGAGT chr11 5184910 5184929 5184926 +
tctaggccagagccatgcat

SEQ ID NO: 57563 - DNA, 20 bp, Artificial Sequence
  Synthetic oligonucleotide; GAGGGT chr11 5184935 5184954 5184951 +
tgaagcgtagttatagaagt

SEQ ID NO: 57564 - DNA, 20 bp, Artificial Sequence
  Synthetic oligonucleotide; AGGGAT chr11 5184970 5184989 5184986 +
tggggcttcatcaggacatt

SEQ ID NO: 57565 - DNA, 20 bp, Artificial Sequence
  Synthetic oligonucleotide; AAGAAT chr11 5184983 5185002 5184999 +
ggacattagggatgggagag

SEQ ID NO: 57566 - DNA, 20 bp, Artificial Sequence
  Synthetic oligonucleotide; AGGAAT chr11 5185008 5185027 5185024 +
tctaagtgaaaaaaaaatac

SEQ ID NO: 57567 - DNA, 20 bp, Artificial Sequence
  Synthetic oligonucleotide; CTGGGT chr11 5185157 5185176 5185173 +
tgatgacccaaattataggc

SEQ ID NO: 57568 - DNA, 20 bp, Artificial Sequence
  Synthetic oligonucleotide; TAGGAT chr11 5185180 5185199 5185196 +
ggttccttgtagcattattc

SEQ ID NO: 57569 - DNA, 20 bp, Artificial Sequence
  Synthetic oligonucleotide; CTGAAT chr11 5185207 5185226 5185223 +
tttctgacagcatattctga

SEQ ID NO: 57570 - DNA, 20 bp, Artificial Sequence
  Synthetic oligonucleotide; ATGAAT chr11 5185214 5185233 5185230 +
cagcatattctgactgaatc

SEQ ID NO: 57571 - DNA, 20 bp, Artificial Sequence
  Synthetic oligonucleotide; GTGAGT chr11 5185400 5185419 5185416 +
aataagcataaatttaaaat

SEQ ID NO: 57572 - DNA, 20 bp, Artificial Sequence
  Synthetic oligonucleotide; TGGAAT chr11 5185528 5185547 5185544 +
agaccaaaattattgtcaac

SEQ ID NO: 57573 - DNA, 20 bp, Artificial Sequence
  Synthetic oligonucleotide; TTGAAT chr11 5185580 5185599 5185596 +
tattatccatcaaactgaga

SEQ ID NO: 57574 - DNA, 20 bp, Artificial Sequence
  Synthetic oligonucleotide; TAGAGT chr11 5185591 5185610 5185607 +
aaactgagattgaattgatt

SEQ ID NO: 57575 - DNA, 20 bp, Artificial Sequence
  Synthetic oligonucleotide; AGGAAT chr11 5185610 5185629 5185626 +
ttagagtatccataaatact

SEQ ID NO: 57576 - DNA, 20 bp, Artificial Sequence
  Synthetic oligonucleotide; ATGAAT chr11 5185732 5185751 5185748 +
ttcagcatggtgacagacac

SEQ ID NO: 57577 - DNA, 20 bp, Artificial Sequence
  Synthetic oligonucleotide; TGGAGT chr11 5185745 5185764 5185761 +
cagacacatgaattttgaaa

SEQ ID NO: 57578 - DNA, 20 bp, Artificial Sequence
  Synthetic oligonucleotide; GAGAGT chr11 5185798 5185817 5185814 +
tatctttgttacatagggaa

SEQ ID NO: 57579 - DNA, 20 bp, Artificial Sequence
  Synthetic oligonucleotide; TGGAGT chr11 5185813 5185832 5185829 +
gggaagagagttaaaaattt

SEQ ID NO: 57580 - DNA, 20 bp, Artificial Sequence
  Synthetic oligonucleotide; ATGAGT chr11 5185854 5185873 5185870 +
tgtgcctagactattacctg

SEQ ID NO: 57581 - DNA, 20 bp, Artificial Sequence
  Synthetic oligonucleotide; TAGAAT chr11 5185946 5185965 5185962 +
ctgagccttgttttaactac

SEQ ID NO: 57582 - DNA, 20 bp, Artificial Sequence
  Synthetic oligonucleotide; TTGAAT chr11 5185961 5185980 5185977 +
actactagaatataaattca

SEQ ID NO: 57583 - DNA, 20 bp, Artificial Sequence
  Synthetic oligonucleotide; ATGGGT chr11 5186132 5186151 5186148 +
aaagccaagtctagtattcc

SEQ ID NO: 57584 - DNA, 20 bp, Artificial Sequence
  Synthetic oligonucleotide; AAGAAT chr11 5186176 5186195 5186192 +
ttagatgattaagttatcgg

SEQ ID NO: 57585 - DNA, 20 bp, Artificial Sequence
  Synthetic oligonucleotide; TAGAAT chr11 5186276 5186295 5186292 +
gtttacttacttgcattttc

SEQ ID NO: 57586 - DNA, 20 bp, Artificial Sequence
  Synthetic oligonucleotide; ACGAAT chr11 5186401 5186420 5186417 +
aaggttttcagcttaagagg

SEQ ID NO: 57587 - DNA, 20 bp, Artificial Sequence
  Synthetic oligonucleotide; ATGGGT chr11 5186749 5186768 5186765 +
ttttcttggtcacatggtaa

SEQ ID NO: 57588 - DNA, 20 bp, Artificial Sequence
  Synthetic oligonucleotide; CAGAAT chr11 5186755 5186774 5186771 +
tggtcacatggtaaatgggt

SEQ ID NO: 57589 - DNA, 20 bp, Artificial Sequence
  Synthetic oligonucleotide; AAGGAT chr11 5186811 5186830 5186827 +
gtagatatcccattctcttg

SEQ ID NO: 57590 - DNA, 20 bp, Artificial Sequence
  Synthetic oligonucleotide; AGGAAT chr11 5186826 5186845 5186842 +
tcttgaaggatactttaatg

SEQ ID NO: 57591 - DNA, 20 bp, Artificial Sequence
  Synthetic oligonucleotide; TGGAAT chr11 5186875 5186894 5186891 +
aacaaataccatgatattca

SEQ ID NO: 57592 - DNA, 20 bp, Artificial Sequence
  Synthetic oligonucleotide; AAGAAT chr11 5186985 5187004 5187001 +
tgattttctgatatttttca

SEQ ID NO: 57593 - DNA, 20 bp, Artificial Sequence
  Synthetic oligonucleotide; CTGGAT chr11 5187087 5187106 5187103 +
ttgacatcagctgaccctga

SEQ ID NO: 57594 - DNA, 20 bp, Artificial Sequence
  Synthetic oligonucleotide; TTGGAT chr11 5187101 5187120 5187117 +
ccctgactggatgatcttga

SEQ ID NO: 57595 - DNA, 20 bp, Artificial Sequence
  Synthetic oligonucleotide; GTGAGT chr11 5187194 5187213 5187210 +
tcatattttattacgtaagt

SEQ ID NO: 57596 - DNA, 20 bp, Artificial Sequence
  Synthetic oligonucleotide; AAGAAT chr11 5187219 5187238 5187235 +
tgctatatggtgggagatat

SEQ ID NO: 57597 - DNA, 20 bp, Artificial Sequence
  Synthetic oligonucleotide; GAGGGT chr11 5187275 5187294 5187291 +
aaaggtcttgaaaccatagt

SEQ ID NO: 57598 - DNA, 20 bp, Artificial Sequence
  Synthetic oligonucleotide; TTGGAT chr11 5187284 5187303 5187300 +
gaaaccatagtgagggtaaa

SEQ ID NO: 57599 - DNA, 20 bp, Artificial Sequence
  Synthetic oligonucleotide; AGGAAT chr11 5187366 5187385 5187382 +
atccttggaaaagaaattaa

SEQ ID NO: 57600 - DNA, 20 bp, Artificial Sequence
  Synthetic oligonucleotide; AAGGAT chr11 5187374 5187393 5187390 +
aaaagaaattaaaggaatca

SEQ ID NO: 57601 - DNA, 20 bp, Artificial Sequence
  Synthetic oligonucleotide; GAGAAT chr11 5187411 5187430 5187427 +
agagatggagaaaggacaag

SEQ ID NO: 57602 - DNA, 20 bp, Artificial Sequence
  Synthetic oligonucleotide; AAGAAT chr11 5187476 5187495 5187492 +
tgatagtgacaggaagaaca

SEQ ID NO: 57603 - DNA, 20 bp, Artificial Sequence
  Synthetic oligonucleotide; TAGAAT chr11 5187481 5187500 5187497 +
gtgacaggaagaacaaagaa

SEQ ID NO: 57604 - DNA, 20 bp, Artificial Sequence
  Synthetic oligonucleotide; AAGAAT chr11 5187551 5187570 5187567 +
tctggggactctaaaacttg

SEQ ID NO: 57605 - DNA, 20 bp, Artificial Sequence
  Synthetic oligonucleotide; ATGAAT chr11 5187804 5187823 5187820 +
aaaataattttccaattttt

SEQ ID NO: 57606 - DNA, 20 bp, Artificial Sequence
  Synthetic oligonucleotide; TGGAAT chr11 5187847 5187866 5187863 +
acatcaagtaacaatatcat

SEQ ID NO: 57607 - DNA, 20 bp, Artificial Sequence
  Synthetic oligonucleotide; TAGAAT chr11 5187936 5187955 5187952 +
gggaacatgtaagtattatg

SEQ ID NO: 57608 - DNA, 20 bp, Artificial Sequence
  Synthetic oligonucleotide; ATGGAT chr11 5188040 5188059 5188056 +
gactcagtttttaaatttct

SEQ ID NO: 57609 - DNA, 20 bp, Artificial Sequence
  Synthetic oligonucleotide; ATGGAT chr11 5188055 5188074 5188071 +
tttctatggatttcaaggaa

SEQ ID NO: 57610 - DNA, 20 bp, Artificial Sequence
  Synthetic oligonucleotide; AAGGAT chr11 5188133 5188152 5188149 +
tgatttagtatctgtaaatt

SEQ ID NO: 57611 - DNA, 20 bp, Artificial Sequence
  Synthetic oligonucleotide; TTGGAT chr11 5188140 5188159 5188156 +
gtatctgtaaattaaggatg

SEQ ID NO: 57612 - DNA, 20 bp, Artificial Sequence
  Synthetic oligonucleotide; TTGAGT chr11 5188196 5188215 5188212 +
aatatgtaagatacttctaa

SEQ ID NO: 57613 - DNA, 20 bp, Artificial Sequence
  Synthetic oligonucleotide; CTGGAT chr11 5188234 5188253 5188250 +
tctataggtaaattagtgtc

SEQ ID NO: 57614 - DNA, 20 bp, Artificial Sequence
  Synthetic oligonucleotide; TTGAGT chr11 5188306 5188325 5188322 +
cctttatcttactatgggac

SEQ ID NO: 57615 - DNA, 20 bp, Artificial Sequence
  Synthetic oligonucleotide; AAGAAT chr11 5188328 5188347 5188344 +
gagtggaggaaatccaagaa

SEQ ID NO: 57616 - DNA, 20 bp, Artificial Sequence
  Synthetic oligonucleotide; GGGAGT chr11 5188414 5188433 5188430 +
atttgtaagttagtaaagct

SEQ ID NO: 57617 - DNA, 20 bp, Artificial Sequence
  Synthetic oligonucleotide; GGGAGT chr11 5188436 5188455 5188452 +
gagttggtgctagtaaagct

SEQ ID NO: 57618 - DNA, 20 bp, Artificial Sequence
  Synthetic oligonucleotide; TTGAAT chr11 5188553 5188572 5188569 +
gcatgcatcccaagatggct

SEQ ID NO: 57619 - DNA, 20 bp, Artificial Sequence
  Synthetic oligonucleotide; TAGAGT chr11 5188705 5188724 5188721 +
aagattggacatccctgctg

SEQ ID NO: 57620 - DNA, 20 bp, Artificial Sequence
  Synthetic oligonucleotide; TGGAAT chr11 5188722 5188741 5188738 +
ctgtagagtttctcagtggt

SEQ ID NO: 57621 - DNA, 20 bp, Artificial Sequence
  Synthetic oligonucleotide; CAGAGT chr11 5188737 5188756 5188753 +
gtggttggaatcaatatttg

SEQ ID NO: 57622 - DNA, 20 bp, Artificial Sequence
  Synthetic oligonucleotide; AAGAAT chr11 5188781 5188800 5188797 +
atttttcccctgccacattg

SEQ ID NO: 57623 - DNA, 20 bp, Artificial Sequence
  Synthetic oligonucleotide; TGGAGT chr11 5188818 5188837 5188834 +
tagccactcttctttccagg

SEQ ID NO: 57624 - DNA, 20 bp, Artificial Sequence
  Synthetic oligonucleotide; GTGAAT chr11 5188826 5188845 5188842 +
cttctttccaggtggagttt

SEQ ID NO: 57625 - DNA, 20 bp, Artificial Sequence
  Synthetic oligonucleotide; AAGAAT chr11 5188858 5188877 5188874 +
agagatgatctttatctggg

SEQ ID NO: 57626 - DNA, 20 bp, Artificial Sequence
  Synthetic oligonucleotide; AAGGAT chr11 5188924 5188943 5188940 +
ttagatacttttctttaagg

SEQ ID NO: 57627 - DNA, 20 bp, Artificial Sequence
  Synthetic oligonucleotide; TTGAAT chr11 5189107 5189126 5189123 +
cttacattttatgtattttg

SEQ ID NO: 57628 - DNA, 20 bp, Artificial Sequence
  Synthetic oligonucleotide; AAGAGT chr11 5189126 5189145 5189142 +
gttgaattgtgtttaatcac

SEQ ID NO: 57629 - DNA, 20 bp, Artificial Sequence
  Synthetic oligonucleotide; TTGGAT chr11 5189151 5189170 5189167 +
taatgcatgcctgatatggt

SEQ ID NO: 57630 - DNA, 20 bp, Artificial Sequence
  Synthetic oligonucleotide; TTGGAT chr11 5189228 5189247 5189244 +
tggggcctggtgggaagtga

SEQ ID NO: 57631 - DNA, 20 bp, Artificial Sequence
  Synthetic oligonucleotide; CAGAGT chr11 5189242 5189261 5189258 +
aagtgattggatcataggag

SEQ ID NO: 57632 - DNA, 20 bp, Artificial Sequence
  Synthetic oligonucleotide; GTGGGT chr11 5189289 5189308 5189305 +
agtcccttttggtacgtata

SEQ ID NO: 57633 - DNA, 20 bp, Artificial Sequence
  Synthetic oligonucleotide; GTGAGT chr11 5189293 5189312 5189309 +
ccttttggtacgtatagtgg

SEQ ID NO: 57634 - DNA, 20 bp, Artificial Sequence
  Synthetic oligonucleotide; GAGAAT chr11 5189528 5189547 5189544 +
gtatttccttatagcaagat

SEQ ID NO: 57635 - DNA, 20 bp, Artificial Sequence
  Synthetic oligonucleotide; TGGGGT chr11 5189563 5189582 5189579 +
cagaaaattggtaccaaaag

SEQ ID NO: 57636 - DNA, 20 bp, Artificial Sequence
  Synthetic oligonucleotide; TTGGAT chr11 5189611 5189630 5189627 +
atgtggaagcaactttggca

SEQ ID NO: 57637 - DNA, 20 bp, Artificial Sequence
  Synthetic oligonucleotide; AAGAGT chr11 5189633 5189652 5189649 +
ggataacaggcagaagttgg

SEQ ID NO: 57638 - DNA, 20 bp, Artificial Sequence
  Synthetic oligonucleotide; GAGAAT chr11 5189672 5189691 5189688 +
aagaagacagggagatgagg

SEQ ID NO: 57639 - DNA, 20 bp, Artificial Sequence
  Synthetic oligonucleotide; TGGAAT chr11 5189699 5189718 5189715 +
tggaactttctagagacttg

SEQ ID NO: 57640 - DNA, 20 bp, Artificial Sequence
  Synthetic oligonucleotide; ATGAAT chr11 5189772 5189791 5189788 +
tgaggtggtctcagatggaa

SEQ ID NO: 57641 - DNA, 20 bp, Artificial Sequence
  Synthetic oligonucleotide; GAGAAT chr11 5189853 5189872 5189869 +
tgcactgtgcctctacctta

SEQ ID NO: 57642 - DNA, 20 bp, Artificial Sequence
  Synthetic oligonucleotide; CCGAGT chr11 5190131 5190150 5190147 +
tttgcataaatgaagaggag

SEQ ID NO: 57643 - DNA, 20 bp, Artificial Sequence
  Synthetic oligonucleotide; GAGAAT chr11 5190158 5190177 5190174 +
ctaatagccaaaataaaggg

SEQ ID NO: 57644 - DNA, 20 bp, Artificial Sequence
  Synthetic oligonucleotide; AGGAGT chr11 5190224 5190243 5190240 +
catcacaggcctggtggcct

SEQ ID NO: 57645 - DNA, 20 bp, Artificial Sequence
  Synthetic oligonucleotide; CTGAAT chr11 5190231 5190250 5190247 +
ggcctggtggcctaggagta

SEQ ID NO: 57646 - DNA, 20 bp, Artificial Sequence
  Synthetic oligonucleotide; GTGGGT chr11 5190243 5190262 5190259 +
taggagtactgaatgatttt

SEQ ID NO: 57647 - DNA, 20 bp, Artificial Sequence
  Synthetic oligonucleotide; GAGGGT chr11 5190365 5190384 5190381 +
cagctaaggccactgcttca

SEQ ID NO: 57648 - DNA, 20 bp, Artificial Sequence
  Synthetic oligonucleotide; GGGAGT chr11 5190413 5190432 5190429 +
ttccacatggtgataaatct

SEQ ID NO: 57649 - DNA, 20 bp, Artificial Sequence
  Synthetic oligonucleotide; GAGGAT chr11 5190467 5190486 5190483 +
aagcctccacctagatttca

SEQ ID NO: 57650 - DNA, 20 bp, Artificial Sequence
  Synthetic oligonucleotide; CTGAGT chr11 5190485 5190504 5190501 +
cagaggatgtgtagaaaagc

SEQ ID NO: 57651 - DNA, 20 bp, Artificial Sequence
  Synthetic oligonucleotide; CAGAGT chr11 5190584 5190603 5190600 +
atgaggttggaaccccctca

SEQ ID NO: 57652 - DNA, 20 bp, Artificial Sequence
  Synthetic oligonucleotide; CAGAAT chr11 5190648 5190667 5190664 +
ggccaccgtcctccagaccc

SEQ ID NO: 57653 - DNA, 20 bp, Artificial Sequence
  Synthetic oligonucleotide; AGGGGT chr11 5190755 5190774 5190771 +
gctaaactgtgcaaagcaat

SEQ ID NO: 57654 - DNA, 20 bp, Artificial Sequence
  Synthetic oligonucleotide; TGGGGT chr11 5190821 5190840 5190837 +
tgtgtccctgatatgagaca

SEQ ID NO: 57655 - DNA, 20 bp, Artificial Sequence
  Synthetic oligonucleotide; TGGAGT chr11 5190842 5190861 5190858 +
ggggtcaaaggagattattt

SEQ ID NO: 57656 - DNA, 20 bp, Artificial Sequence
  Synthetic oligonucleotide; CTGGGT chr11 5190899 5190918 5190915 +
ctatgaagaaatacccgaga

SEQ ID NO: 57657 - DNA, 20 bp, Artificial Sequence
  Synthetic oligonucleotide; AGGGAT chr11 5191158 5191177 5191174 +
gtgttccttccatgacaggc

SEQ ID NO: 57658 - DNA, 20 bp, Artificial Sequence
  Synthetic oligonucleotide; TTGGGT chr11 5191191 5191210 5191207 +
cctactattcaagaagaaat

SEQ ID NO: 57659 - DNA, 20 bp, Artificial Sequence
  Synthetic oligonucleotide; CTGGGT chr11 5191239 5191258 5191255 +
aaggtgtaatgactgccctg

SEQ ID NO: 57660 - DNA, 20 bp, Artificial Sequence
  Synthetic oligonucleotide; TGGGAT chr11 5191257 5191276 5191273 +
tgctgggttttctactcgtg

SEQ ID NO: 57661 - DNA, 20 bp, Artificial Sequence
  Synthetic oligonucleotide; TGGAAT chr11 5191298 5191317 5191314 +
tttggtgcatttctctcttt

SEQ ID NO: 57662 - DNA, 20 bp, Artificial Sequence
  Synthetic oligonucleotide; GGGAAT chr11 5191304 5191323 5191320 +
gcatttctctcttttggaat

SEQ ID NO: 57663 - DNA, 20 bp, Artificial Sequence
  Synthetic oligonucleotide; TTGGAT chr11 5191403 5191422 5191419 +
ttgaagggacttgccttgtc

SEQ ID NO: 57664 - DNA, 20 bp, Artificial Sequence
  Synthetic oligonucleotide; TTGAGT chr11 5191430 5191449 5191446 +
agactttggactttggactt

SEQ ID NO: 57665 - DNA, 20 bp, Artificial Sequence
  Synthetic oligonucleotide; TGGAAT chr11 5191442 5191461 5191458 +
ttggacttttgagttaatgc

SEQ ID NO: 57666 - DNA, 20 bp, Artificial Sequence
  Synthetic oligonucleotide; ATGAGT chr11 5191446 5191465 5191462 +
acttttgagttaatgctgga

SEQ ID NO: 57667 - DNA, 20 bp, Artificial Sequence
  Synthetic oligonucleotide; AAGGAT chr11 5191536 5191555 5191552 +
ttggaaggggccagaggtgg

SEQ ID NO: 57668 - DNA, 20 bp, Artificial Sequence
  Synthetic oligonucleotide; TTGGAT chr11 5191547 5191566 5191563 +
cagaggtggaaggatatggt

SEQ ID NO: 57669 - DNA, 20 bp, Artificial Sequence
  Synthetic oligonucleotide; CAGAGT chr11 5191638 5191657 5191654 +
aggtaattcaatcatggtgg

SEQ ID NO: 57670 - DNA, 20 bp, Artificial Sequence
  Synthetic oligonucleotide; GTGAGT chr11 5191685 5191704 5191701 +
atcccccttggtactgtata

SEQ ID NO: 57671 - DNA, 20 bp, Artificial Sequence
  Synthetic oligonucleotide; GGGAGT chr11 5192042 5192061 5192058 +
actcaatgtgatcaagattt

SEQ ID NO: 57672 - DNA, 20 bp, Artificial Sequence
  Synthetic oligonucleotide; AAGAAT chr11 5192231 5192250 5192247 +
agctgtctgaaactaagtca

SEQ ID NO: 57673 - DNA, 20 bp, Artificial Sequence
  Synthetic oligonucleotide; TTGAAT chr11 5192268 5192287 5192284 +
tattcactatttgtctatta

SEQ ID NO: 57674 - DNA, 20 bp, Artificial Sequence
  Synthetic oligonucleotide; AGGAAT chr11 5192289 5192308 5192305 +
tgaatatctatatttgtttg

SEQ ID NO: 57675 - DNA, 20 bp, Artificial Sequence
  Synthetic oligonucleotide; AAGGAT chr11 5192309 5192328 5192325 +
aggaataataatcagaacag

SEQ ID NO: 57676 - DNA, 20 bp, Artificial Sequence
  Synthetic oligonucleotide; AGGAAT chr11 5192327 5192346 5192343 +
agaaggatatgaaagactat

SEQ ID NO: 57677 - DNA, 20 bp, Artificial Sequence
  Synthetic oligonucleotide; TGGAGT chr11 5192367 5192386 5192383 +
agcaagataaaataggttaa

SEQ ID NO: 57678 - DNA, 20 bp, Artificial Sequence
  Synthetic oligonucleotide; GAGAAT chr11 5192381 5192400 5192397 +
ggttaatggagtaatatgta

SEQ ID NO: 57679 - DNA, 20 bp, Artificial Sequence
  Synthetic oligonucleotide; ATGAAT chr11 5192407 5192426 5192423 +
gatgactataattaaagaaa

SEQ ID NO: 57680 - DNA, 20 bp, Artificial Sequence
  Synthetic oligonucleotide; CTGAAT chr11 5192477 5192496 5192493 +
atagacctttatttatatca

SEQ ID NO: 57681 - DNA, 20 bp, Artificial Sequence
  Synthetic oligonucleotide; ATGGAT chr11 5192496 5192515 5192512 +
actgaataatattctatcct

SEQ ID NO: 57682 - DNA, 20 bp, Artificial Sequence
  Synthetic oligonucleotide; ATGAGT chr11 5192551 5192570 5192567 +
actttcaacttttggcaatt

SEQ ID NO: 57683 - DNA, 20 bp, Artificial Sequence
  Synthetic oligonucleotide; TTGGGT chr11 5192617 5192636 5192633 +
gacataaatttttgactcat

SEQ ID NO: 57684 - DNA, 20 bp, Artificial Sequence
  Synthetic oligonucleotide; AGGAGT chr11 5192631 5192650 5192647 +
actcatttgggtaaatacat

SEQ ID NO: 57685 - DNA, 20 bp, Artificial Sequence
  Synthetic oligonucleotide; TTGGGT chr11 5192644 5192663 5192660 +
aatacataggagtgtgattg

SEQ ID NO: 57686 - DNA, 20 bp, Artificial Sequence
  Synthetic oligonucleotide; GAGAGT chr11 5192734 5192753 5192750 +
catccctacaagcaataagt

SEQ ID NO: 57687 - DNA, 20 bp, Artificial Sequence
  Synthetic oligonucleotide; GTGGAT chr11 5192771 5192790 5192787 +
cacttcgttgccagtgtttg

SEQ ID NO: 57688 - DNA, 20 bp, Artificial Sequence
  Synthetic oligonucleotide; TGGAAT chr11 5192787 5192806 5192803 +
tttggtggatgtcagtattt

SEQ ID NO: 57689 - DNA, 20 bp, Artificial Sequence
  Synthetic oligonucleotide; CTGAGT chr11 5192866 5192885 5192882 +
tttcttaatgacatgtgtta

SEQ ID NO: 57690 - DNA, 20 bp, Artificial Sequence
  Synthetic oligonucleotide; TTGGAT chr11 5192949 5192968 5192965 +
atcttttgcccactttgcaa

SEQ ID NO: 57691 - DNA, 20 bp, Artificial Sequence
  Synthetic oligonucleotide; TAGAAT chr11 5192971 5192990 5192987 +
ggattgtttgttttttattg

SEQ ID NO: 57692 - DNA, 20 bp, Artificial Sequence
  Synthetic oligonucleotide; ATGAAT chr11 5193079 5193098 5193095 +
tttcattctcttaacttacc

SEQ ID NO: 57693 - DNA, 20 bp, Artificial Sequence
  Synthetic oligonucleotide; CTGGGT chr11 5193107 5193126 5193123 +
ttattttattttattttgtt

SEQ ID NO: 57694 - DNA, 20 bp, Artificial Sequence
  Synthetic oligonucleotide; GTGGAT chr11 5193118 5193137 5193134 +
tattttgttctgggtatttt

SEQ ID NO: 57695 - DNA, 20 bp, Artificial Sequence
  Synthetic oligonucleotide; TGGAGT chr11 5193239 5193258 5193255 +
ctgaactccagttaagattt

SEQ ID NO: 57696 - DNA, 20 bp, Artificial Sequence
  Synthetic oligonucleotide; AAGGAT chr11 5193426 5193445 5193442 +
tactattctgttcaaatatc

SEQ ID NO: 57697 - DNA, 20 bp, Artificial Sequence
  Synthetic oligonucleotide; ATGAGT chr11 5193437 5193456 5193453 +
tcaaatatcaaggatctaaa

SEQ ID NO: 57698 - DNA, 20 bp, Artificial Sequence
  Synthetic oligonucleotide; AAGAAT chr11 5193455 5193474 5193471 +
aaatgagtggttatttaatt

SEQ ID NO: 57699 - DNA, 20 bp, Artificial Sequence
  Synthetic oligonucleotide; CTGAAT chr11 5193504 5193523 5193520 +
attagcttttattttctgcc

SEQ ID NO: 57700 - DNA, 20 bp, Artificial Sequence
  Synthetic oligonucleotide; CGGAAT chr11 5193620 5193639 5193636 +
tttgtccatccttctgtgtc

SEQ ID NO: 57701 - DNA, 20 bp, Artificial Sequence
  Synthetic oligonucleotide; GTGGGT chr11 5193628 5193647 5193644 +
tccttctgtgtccggaattg

SEQ ID NO: 57702 - DNA, 20 bp, Artificial Sequence
  Synthetic oligonucleotide; AAGAAT chr11 5193653 5193672 5193669 +
ttcttggtctcgctgactta

SEQ ID NO: 57703 - DNA, 20 bp, Artificial Sequence
  Synthetic oligonucleotide; GTGAGT chr11 5193678 5193697 5193694 +
tgaagccgcgaaccctcgtg

SEQ ID NO: 57704 - DNA, 20 bp, Artificial Sequence
  Synthetic oligonucleotide; AAGGAT chr11 5193712 5193731 5193728 +
tcttaaagatggtgtgttca

SEQ ID NO: 57705 - DNA, 20 bp, Artificial Sequence
  Synthetic oligonucleotide; CAGAGT chr11 5193751 5193770 5193767 +
tttgttacttcagatgtgtc

SEQ ID NO: 57706 - DNA, 20 bp, Artificial Sequence
  Synthetic oligonucleotide; AGGAGT chr11 5193794 5193813 5193810 +
ttcacggtcttgctggctcc

SEQ ID NO: 57707 - DNA, 20 bp, Artificial Sequence
  Synthetic oligonucleotide; GGGAGT chr11 5193819 5193838 5193835 +
tgaagctgcagacccccacg

SEQ ID NO: 57708 - DNA, 20 bp, Artificial Sequence
  Synthetic oligonucleotide; TGGAGT chr11 5193851 5193870 5193867 +
gctcttaaaggcggagcgta

SEQ ID NO: 57709 - DNA, 20 bp, Artificial Sequence
  Synthetic oligonucleotide; TTGGGT chr11 5193874 5193893 5193890 +
agttgctcattcctcctgtc

SEQ ID NO: 57710 - DNA, 20 bp, Artificial Sequence
  Synthetic oligonucleotide; CTGGGT chr11 5193895 5193914 5193911 +
tgggttgttcatcccccatg

SEQ ID NO: 57711 - DNA, 20 bp, Artificial Sequence
  Synthetic oligonucleotide; GTGAGT chr11 5193945 5193964 5193961 +
tgaagccgcagaccttcgca

SEQ ID NO: 57712 - DNA, 20 bp, Artificial Sequence
  Synthetic oligonucleotide; GCGGAT chr11 5193972 5193991 5193988 +
ttacagctcataaaggcagc

SEQ ID NO: 57713 - DNA, 20 bp, Artificial Sequence
  Synthetic oligonucleotide; AAGAGT chr11 5193981 5194000 5193997 +
ataaaggcagcgcggatcca

SEQ ID NO: 57714 - DNA, 20 bp, Artificial Sequence
  Synthetic oligonucleotide; AAGAAT chr11 5194010 5194029 5194026 +
cagcagtaagatttattgtg

SEQ ID NO: 57715 - DNA, 20 bp, Artificial Sequence
  Synthetic oligonucleotide; CAGAGT chr11 5194186 5194205 5194202 +
agctggttggtccgttttgg

SEQ ID NO: 57716 - DNA, 20 bp, Artificial Sequence
  Synthetic oligonucleotide; CAGAGT chr11 5194227 5194246 5194243 +
tacaaaccttgagctagaca

SEQ ID NO: 57717 - DNA, 20 bp, Artificial Sequence
  Synthetic oligonucleotide; TTGAGT chr11 5194334 5194353 5194350 +
gattggtgcatttacaaacc

SEQ ID NO: 57718 - DNA, 20 bp, Artificial Sequence
  Synthetic oligonucleotide; AAGAAT chr11 5194425 5194444 5194441 +
atatttcatggtgaggaaca

SEQ ID NO: 57719 - DNA, 20 bp, Artificial Sequence
  Synthetic oligonucleotide; GGGGAT chr11 5194436 5194455 5194452 +
tgaggaacaaagaatatagt

SEQ ID NO: 57720 - DNA, 20 bp, Artificial Sequence
  Synthetic oligonucleotide; CTGGAT chr11 5194587 5194606 5194603 +
aaatgtccaacaatgataga

SEQ ID NO: 57721 - DNA, 20 bp, Artificial Sequence
  Synthetic oligonucleotide; TGGAAT chr11 5194619 5194638 5194635 +
aatgtggcacatacacacca

SEQ ID NO: 57722 - DNA, 20 bp, Artificial Sequence
  Synthetic oligonucleotide; AAGGAT chr11 5194642 5194661 5194658 +
aatactatgcagccataaaa

SEQ ID NO: 57723 - DNA, 20 bp, Artificial Sequence
  Synthetic oligonucleotide; ATGAGT chr11 5194646 5194665 5194662 +
ctatgcagccataaaaaagg

SEQ ID NO: 57724 - DNA, 20 bp, Artificial Sequence
  Synthetic oligonucleotide; ATGGAT chr11 5194671 5194690 5194687 +
ttcatgtcctttgtagggac

SEQ ID NO: 57725 - DNA, 20 bp, Artificial Sequence
  Synthetic oligonucleotide; GGGAAT chr11 5194753 5194772 5194769 +
gcatgttctcactcataggt

SEQ ID NO: 57726 - DNA, 20 bp, Artificial Sequence
  Synthetic oligonucleotide; TGGGGT chr11 5194816 5194835 5194832 +
tcacactctggggactgttg

SEQ ID NO: 57727 - DNA, 20 bp, Artificial Sequence
  Synthetic oligonucleotide; AGGGAT chr11 5194835 5194854 5194851 +
gtggggtggggggagggagg

SEQ ID NO: 57728 - DNA, 20 bp, Artificial Sequence
  Synthetic oligonucleotide; ATGAGT chr11 5194871 5194890 5194887 +
gatatacctaatgctaaatg

SEQ ID NO: 57729 - DNA, 20 bp, Artificial Sequence
  Synthetic oligonucleotide; ATGGGT chr11 5194879 5194898 5194895 +
taatgctaaatgatgagtta

SEQ ID NO: 57730 - DNA, 20 bp, Artificial Sequence
  Synthetic oligonucleotide; AAGAGT chr11 5194992 5195011 5195008 +
taaaataaaataattttaaa

SEQ ID NO: 57731 - DNA, 20 bp, Artificial Sequence
  Synthetic oligonucleotide; GGGGAT chr11 5195003 5195022 5195019 +
aattttaaaaagagtatagt

SEQ ID NO: 57732 - DNA, 20 bp, Artificial Sequence
  Synthetic oligonucleotide; GCGAAT chr11 5195088 5195107 5195104 +
aagcctagctaatccagtaa

SEQ ID NO: 57733 - DNA, 20 bp, Artificial Sequence
  Synthetic oligonucleotide; CTGAAT chr11 5195214 5195233 5195230 +
tagtcctggcatcctttgca

SEQ ID NO: 57734 - DNA, 20 bp, Artificial Sequence
  Synthetic oligonucleotide; CTGGAT chr11 5195230 5195249 5195246 +
tgcactgaatttcccagtgt

SEQ ID NO: 57735 - DNA, 20 bp, Artificial Sequence
  Synthetic oligonucleotide; ATGAGT chr11 5195290 5195309 5195306 +
tttgccagaactaaagagaa

SEQ ID NO: 57736 - DNA, 20 bp, Artificial Sequence
  Synthetic oligonucleotide; ACGAAT chr11 5195364 5195383 5195380 +
catttttagccctacccctc

SEQ ID NO: 57737 - DNA, 20 bp, Artificial Sequence
  Synthetic oligonucleotide; GTGGAT chr11 5195579 5195598 5195595 +
tgtgtacatctatagcttta

SEQ ID NO: 57738 - DNA, 20 bp, Artificial Sequence
  Synthetic oligonucleotide; AGGGGT chr11 5195934 5195953 5195950 +
aggacatcgactcctactgc

SEQ ID NO: 57739 - DNA, 20 bp, Artificial Sequence
  Synthetic oligonucleotide; GGGAAT chr11 5196082 5196101 5196098 +
taatggtaacaaatatccta

SEQ ID NO: 57740 - DNA, 20 bp, Artificial Sequence
  Synthetic oligonucleotide; GGGGAT chr11 5196238 5196257 5196254 +
ggaacctggtctcacagcag

SEQ ID NO: 57741 - DNA, 20 bp, Artificial Sequence
  Synthetic oligonucleotide; AGGGAT chr11 5196320 5196339 5196336 +
gattctcatagaggcatgca

SEQ ID NO: 57742 - DNA, 20 bp, Artificial Sequence
  Synthetic oligonucleotide; GAGAAT chr11 5196345 5196364 5196361 +
tctaggttgcggcttcttat

SEQ ID NO: 57743 - DNA, 20 bp, Artificial Sequence
  Synthetic oligonucleotide; GTGGAT chr11 5196481 5196500 5196497 +
tgtacagtgaacatctgcct

SEQ ID NO: 57744 - DNA, 20 bp, Artificial Sequence
  Synthetic oligonucleotide; CTGAAT chr11 5196530 5196549 5196546 +
ctaaaaacacatttctaatc

SEQ ID NO: 57745 - DNA, 20 bp, Artificial Sequence
  Synthetic oligonucleotide; AAGAAT chr11 5196553 5196572 5196569 +
aatcatgtcctctcacttct

SEQ ID NO: 57746 - DNA, 20 bp, Artificial Sequence
  Synthetic oligonucleotide; AAGAGT chr11 5196596 5196615 5196612 +
ggaccttagcttttcggtgt

SEQ ID NO: 57747 - DNA, 20 bp, Artificial Sequence
  Synthetic oligonucleotide; ATGAAT chr11 5196605 5196624 5196621 +
cttttcggtgtaagagttaa

SEQ ID NO: 57748 - DNA, 20 bp, Artificial Sequence
  Synthetic oligonucleotide; TTGAAT chr11 5196616 5196635 5196632 +
aagagttaaatgaatagcaa

SEQ ID NO: 57749 - DNA, 20 bp, Artificial Sequence
  Synthetic oligonucleotide; CTGAAT chr11 5196642 5196661 5196658 +
ggactagactttctgatttt

SEQ ID NO: 57750 - DNA, 20 bp, Artificial Sequence
  Synthetic oligonucleotide; CTGGAT chr11 5196830 5196849 5196846 +
cgtaacgtttctcagtgacg

SEQ ID NO: 57751 - DNA, 20 bp, Artificial Sequence
  Synthetic oligonucleotide; AGGAAT chr11 5196858 5196877 5196874 +
tagccttgcaggccttacaa

SEQ ID NO: 57752 - DNA, 20 bp, Artificial Sequence
  Synthetic oligonucleotide; CTGAAT chr11 5197285 5197304 5197301 +
actgattttcctccctttgg

SEQ ID NO: 57753 - DNA, 20 bp, Artificial Sequence
  Synthetic oligonucleotide; GAGGAT chr11 5197368 5197387 5197384 +
taaaataagcaatgatttct

SEQ ID NO: 57754 - DNA, 20 bp, Artificial Sequence
  Synthetic oligonucleotide; ATGAGT chr11 5197603 5197622 5197619 +
attcattctgatgcttccct

SEQ ID NO: 57755 - DNA, 20 bp, Artificial Sequence
  Synthetic oligonucleotide; AAGAAT chr11 5197639 5197658 5197655 +
aaacatattgtcagttgttg

SEQ ID NO: 57756 - DNA, 20 bp, Artificial Sequence
  Synthetic oligonucleotide; GAGGGT chr11 5197686 5197705 5197702 +
gtcagctctccggcgtatgg

SEQ ID NO: 57757 - DNA, 20 bp, Artificial Sequence
  Synthetic oligonucleotide; GTGGAT chr11 5197690 5197709 5197706 +
gctctccggcgtatgggagg

SEQ ID NO: 57758 - DNA, 20 bp, Artificial Sequence
  Synthetic oligonucleotide; AGGAAT chr11 5197818 5197837 5197834 +
tcattataaaactggggcat

SEQ ID NO: 57759 - DNA, 20 bp, Artificial Sequence
  Synthetic oligonucleotide; CAGAGT chr11 5197965 5197984 5197981 +
ttttttttttttttttgaga

SEQ ID NO: 57760 - DNA, 20 bp, Artificial Sequence
  Synthetic oligonucleotide; TGGAGT chr11 5197990 5198009 5198006 +
tctctctctgtcgcccaggc

SEQ ID NO: 57761 - DNA, 20 bp, Artificial Sequence
  Synthetic oligonucleotide; CCGGGT chr11 5198034 5198053 5198050 +
ctcactgcaagctccacctc

SEQ ID NO: 57762 - DNA, 20 bp, Artificial Sequence
  Synthetic oligonucleotide; CCGAGT chr11 5198066 5198085 5198082 +
cattctcctgtctcagcctc

SEQ ID NO: 57763 - DNA, 20 bp, Artificial Sequence
  Synthetic oligonucleotide; CTGGAT chr11 5198102 5198121 5198118 +
acaggtgcccgccaccacgc

SEQ ID NO: 57764 - DNA, 20 bp, Artificial Sequence
  Synthetic oligonucleotide; CGGGGT chr11 5198134 5198153 5198150 +
ttgtgtttttttagtagaga

SEQ ID NO: 57765 - DNA, 20 bp, Artificial Sequence
  Synthetic oligonucleotide; CAGGAT chr11 5198155 5198174 5198171 +
ggggtttcaccattgctggc

SEQ ID NO: 57766 - DNA, 20 bp, Artificial Sequence
  Synthetic oligonucleotide; AGGAAT chr11 5198388 5198407 5198404 +
aagacctaatttattgttct

SEQ ID NO: 57767 - DNA, 20 bp, Artificial Sequence
  Synthetic oligonucleotide; CTGAGT chr11 5198501 5198520 5198517 +
gcctgtatttttgtttccct

SEQ ID NO: 57768 - DNA, 20 bp, Artificial Sequence
  Synthetic oligonucleotide; TTGAAT chr11 5198533 5198552 5198549 +
agtagacagaggctatgtta

SEQ ID NO: 57769 - DNA, 20 bp, Artificial Sequence
  Synthetic oligonucleotide; TAGAAT chr11 5198700 5198719 5198716 +
ttaccttcttagatacctaa

SEQ ID NO: 57770 - DNA, 20 bp, Artificial Sequence
  Synthetic oligonucleotide; CAGAAT chr11 5198852 5198871 5198868 +
tatcttttttcttttaaact

SEQ ID NO: 57771 - DNA, 20 bp, Artificial Sequence
  Synthetic oligonucleotide; TGGAGT chr11 5198955 5198974 5198971 +
tgcttccagccttgtagcag

SEQ ID NO: 57772 - DNA, 20 bp, Artificial Sequence
  Synthetic oligonucleotide; AAGGAT chr11 5198983 5199002 5198999 +
acatataaaatctaaaaaat

SEQ ID NO: 57773 - DNA, 20 bp, Artificial Sequence
  Synthetic oligonucleotide; TTGAAT chr11 5199016 5199035 5199032 +
taaattagacatggtagaag

SEQ ID NO: 57774 - DNA, 20 bp, Artificial Sequence
  Synthetic oligonucleotide; GTGAGT chr11 5199311 5199330 5199327 +
acagatatcacaacattcct

SEQ ID NO: 57775 - DNA, 20 bp, Artificial Sequence
  Synthetic oligonucleotide; GAGAAT chr11 5199359 5199378 5199375 +
ggttaattaagtaaacctca

SEQ ID NO: 57776 - DNA, 20 bp, Artificial Sequence
  Synthetic oligonucleotide; TAGAGT chr11 5199508 5199527 5199524 +
cttaaatatggtcagactga

SEQ ID NO: 57777 - DNA, 20 bp, Artificial Sequence
  Synthetic oligonucleotide; CAGAGT chr11 5199605 5199624 5199621 +
aaggtcatttgtcatggact

SEQ ID NO: 57778 - DNA, 20 bp, Artificial Sequence
  Synthetic oligonucleotide; AAGAGT chr11 5199734 5199753 5199750 +
ctcaatatcttttcagagaa

SEQ ID NO: 57779 - DNA, 20 bp, Artificial Sequence
  Synthetic oligonucleotide; ATGAAT chr11 5199754 5199773 5199770 +
aagagtctaagcattctggt

SEQ ID NO: 57780 - DNA, 20 bp, Artificial Sequence
  Synthetic oligonucleotide; TTGGGT chr11 5199763 5199782 5199779 +
agcattctggtatgaatctg

SEQ ID NO: 57781 - DNA, 20 bp, Artificial Sequence
  Synthetic oligonucleotide; TGGGAT chr11 5199786 5199805 5199802 +
ggtcttgacactgtagatga

SEQ ID NO: 57782 - DNA, 20 bp, Artificial Sequence
  Synthetic oligonucleotide; AAGGAT chr11 5199808 5199827 5199824 +
ggattcattaaaggtgggaa

SEQ ID NO: 57783 - DNA, 20 bp, Artificial Sequence
  Synthetic oligonucleotide; AGGGAT chr11 5199892 5199911 5199908 +
accattgtgaggctaatgat

SEQ ID NO: 57784 - DNA, 20 bp, Artificial Sequence
  Synthetic oligonucleotide; AAGAAT chr11 5199988 5200007 5200004 +
gcaactgccaggactgactt

SEQ ID NO: 57785 - DNA, 20 bp, Artificial Sequence
  Synthetic oligonucleotide; CAGGAT chr11 5199994 5200013 5200010 +
gccaggactgacttaagaat

SEQ ID NO: 57786 - DNA, 20 bp, Artificial Sequence
  Synthetic oligonucleotide; AAGGAT chr11 5200009 5200028 5200025 +
agaatcaggatgtaggagaa

SEQ ID NO: 57787 - DNA, 20 bp, Artificial Sequence
  Synthetic oligonucleotide; ATGAGT chr11 5200013 5200032 5200029 +
tcaggatgtaggagaaaagg

SEQ ID NO: 57788 - DNA, 20 bp, Artificial Sequence
  Synthetic oligonucleotide; TTGAAT chr11 5200070 5200089 5200086 +
gcatcagggcatagtaacta

SEQ ID NO: 57789 - DNA, 20 bp, Artificial Sequence
  Synthetic oligonucleotide; TCGGAT chr11 5200075 5200094 5200091 +
agggcatagtaactattgaa

SEQ ID NO: 57790 - DNA, 20 bp, Artificial Sequence
  Synthetic oligonucleotide; AAGAGT chr11 5200122 5200141 5200138 +
aagatcctggtgcaggcaga

SEQ ID NO: 57791 - DNA, 20 bp, Artificial Sequence
  Synthetic oligonucleotide; AAGGAT chr11 5200132 5200151 5200148 +
tgcaggcagaaagagtgaga

SEQ ID NO: 57792 - DNA, 20 bp, Artificial Sequence
  Synthetic oligonucleotide; GGGGGT chr11 5200178 5200197 5200194 +
aaaatttcagacagatgatg

SEQ ID NO: 57793 - DNA, 20 bp, Artificial Sequence
  Synthetic oligonucleotide; TGGAAT chr11 5200236 5200255 5200252 +
gagcccaattttgataattc

SEQ ID NO: 57794 - DNA, 20 bp, Artificial Sequence
  Synthetic oligonucleotide; CAGGAT chr11 5200246 5200265 5200262 +
ttgataattctggaattagt

SEQ ID NO: 57795 - DNA, 20 bp, Artificial Sequence
  Synthetic oligonucleotide; AGGAAT chr11 5200254 5200273 5200270 +
tctggaattagtcaggatgg

SEQ ID NO: 57796 - DNA, 20 bp, Artificial Sequence
  Synthetic oligonucleotide; GTGGAT chr11 5200266 5200285 5200282 +
caggatggaggaataacgta

SEQ ID NO: 57797 - DNA, 20 bp, Artificial Sequence
  Synthetic oligonucleotide; ATGGAT chr11 5200339 5200358 5200355 +
gactccatgaaggacagacc

SEQ ID NO: 57798 - DNA, 20 bp, Artificial Sequence
  Synthetic oligonucleotide; AGGAAT chr11 5200365 5200384 5200381 +
gaaataggactgggcaatgc

SEQ ID NO: 57799 - DNA, 20 bp, Artificial Sequence
  Synthetic oligonucleotide; TCGAAT chr11 5200384 5200403 5200400 +
caggaatccaagctgatctc

SEQ ID NO: 57800 - DNA, 20 bp, Artificial Sequence
  Synthetic oligonucleotide; CAGGAT chr11 5200399 5200418 5200415 +
atctctcgaatgatccccca

SEQ ID NO: 57801 - DNA, 20 bp, Artificial Sequence
  Synthetic oligonucleotide; GGGGAT chr11 5200564 5200583 5200580 +
atggcatagattgaggagaa

SEQ ID NO: 57802 - DNA, 20 bp, Artificial Sequence
  Synthetic oligonucleotide; AGGGGT chr11 5200578 5200597 5200594 +
ggagaaggggatggaaagcc

SEQ ID NO: 57803 - DNA, 20 bp, Artificial Sequence
  Synthetic oligonucleotide; AAGAAT chr11 5200623 5200642 5200639 +
aaatccagtgagaagaaagg

SEQ ID NO: 57804 - DNA, 20 bp, Artificial Sequence
  Synthetic oligonucleotide; GAGAGT chr11 5200683 5200702 5200699 +
tctggaactgagaaacatgt

SEQ ID NO: 57805 - DNA, 20 bp, Artificial Sequence
  Synthetic oligonucleotide; CTGAAT chr11 5200719 5200738 5200735 +
aggaaatgtttcaatttcac

SEQ ID NO: 57806 - DNA, 20 bp, Artificial Sequence
  Synthetic oligonucleotide; CTGGAT chr11 5200878 5200897 5200894 +
agtcattattttttcactgt

SEQ ID NO: 57807 - DNA, 20 bp, Artificial Sequence
  Synthetic oligonucleotide; AAGGAT chr11 5200985 5201004 5201001 +
cgttgcttagacattttccc

SEQ ID NO: 57808 - DNA, 20 bp, Artificial Sequence
  Synthetic oligonucleotide; AAGAGT chr11 5201075 5201094 5201091 +
ttcattaaacattcgaagtg

SEQ ID NO: 57809 - DNA, 20 bp, Artificial Sequence
  Synthetic oligonucleotide; AGGAAT chr11 5201261 5201280 5201277 +
ttcattggtgataagcagac

SEQ ID NO: 57810 - DNA, 20 bp, Artificial Sequence
  Synthetic oligonucleotide; TTGGGT chr11 5201283 5201302 5201299 +
gaatatttatgcatgagacc

SEQ ID NO: 57811 - DNA, 20 bp, Artificial Sequence
  Synthetic oligonucleotide; GAGAAT chr11 5201354 5201373 5201370 +
atttgtgcctttgtgatgta

SEQ ID NO: 57812 - DNA, 20 bp, Artificial Sequence
  Synthetic oligonucleotide; CAGAAT chr11 5201567 5201586 5201583 +
tttcaaaagcctcatggtag

SEQ ID NO: 57813 - DNA, 20 bp, Artificial Sequence
  Synthetic oligonucleotide; GAGAAT chr11 5201621 5201640 5201637 +
ctgctttaagttccagacct

SEQ ID NO: 57814 - DNA, 20 bp, Artificial Sequence
  Synthetic oligonucleotide; TTGAGT chr11 5201695 5201714 5201711 +
gtccatactttcatgtttga

SEQ ID NO: 57815 - DNA, 20 bp, Artificial Sequence
  Synthetic oligonucleotide; TTGAAT chr11 5201882 5201901 5201898 +
gccctgactccttctcagca

SEQ ID NO: 57816 - DNA, 20 bp, Artificial Sequence
  Synthetic oligonucleotide; TAGAAT chr11 5201923 5201942 5201939 +
ttttaatacttttttctcca

SEQ ID NO: 57817 - DNA, 20 bp, Artificial Sequence
  Synthetic oligonucleotide; GAGGAT chr11 5201954 5201973 5201970 +
aagtttcttcgtttcttgca

SEQ ID NO: 57818 - DNA, 20 bp, Artificial Sequence
  Synthetic oligonucleotide; TTGAAT chr11 5201971 5201990 5201987 +
gcagaggatttttcagtctt

SEQ ID NO: 57819 - DNA, 20 bp, Artificial Sequence
  Synthetic oligonucleotide; TCGAAT chr11 5202002 5202021 5202018 +
tcttctttcatttctctaaa

SEQ ID NO: 57820 - DNA, 20 bp, Artificial Sequence
  Synthetic oligonucleotide; ATGAAT chr11 5202379 5202398 5202395 +
actcctgagagctcaaattc

SEQ ID NO: 57821 - DNA, 20 bp, Artificial Sequence
  Synthetic oligonucleotide; CTGAGT chr11 5202410 5202429 5202426 +
tggctatttaatatattcat

SEQ ID NO: 57822 - DNA, 20 bp, Artificial Sequence
  Synthetic oligonucleotide; AAGAAT chr11 5202431 5202450 5202447 +
tgagtgtttaatcttaaaat

SEQ ID NO: 57823 - DNA, 20 bp, Artificial Sequence
  Synthetic oligonucleotide; TTGAGT chr11 5202543 5202562 5202559 +
acaattgcataagacaagtc

SEQ ID NO: 57824 - DNA, 20 bp, Artificial Sequence
  Synthetic oligonucleotide; CAGGAT chr11 5203044 5203063 5203060 +
agctaagtacatgcatgtct

SEQ ID NO: 57825 - DNA, 20 bp, Artificial Sequence
  Synthetic oligonucleotide; CCGAAT chr11 5203075 5203094 5203091 +
cccatggtcttctctgtgct

SEQ ID NO: 57826 - DNA, 20 bp, Artificial Sequence
  Synthetic oligonucleotide; TTGAGT chr11 5203127 5203146 5203143 +
attcctttcaccattaactt

SEQ ID NO: 57827 - DNA, 20 bp, Artificial Sequence
  Synthetic oligonucleotide; GGGGAT chr11 5203153 5203172 5203169 +
taaaatgattacttcctcag

SEQ ID NO: 57828 - DNA, 20 bp, Artificial Sequence
  Synthetic oligonucleotide; CTGAAT chr11 5203265 5203284 5203281 +
tttataccacttattataca

SEQ ID NO: 57829 - DNA, 20 bp, Artificial Sequence
  Synthetic oligonucleotide; AAGAAT chr11 5203328 5203347 5203344 +
accatatctgttttttgctc

SEQ ID NO: 57830 - DNA, 20 bp, Artificial Sequence
  Synthetic oligonucleotide; AAGGGT chr11 5203343 5203362 5203359 +
tgctcaagaatatgaaaaat

SEQ ID NO: 57831 - DNA, 20 bp, Artificial Sequence
  Synthetic oligonucleotide; TAGAAT chr11 5203354 5203373 5203370 +
atgaaaaataagggttagca

SEQ ID NO: 57832 - DNA, 20 bp, Artificial Sequence
  Synthetic oligonucleotide; ATGAAT chr11 5203436 5203455 5203452 +
cacagagatataaagataat

SEQ ID NO: 57833 - DNA, 20 bp, Artificial Sequence
  Synthetic oligonucleotide; TTGAGT chr11 5203514 5203533 5203530 +
ttctgacctttggccaccaa

SEQ ID NO: 57834 - DNA, 20 bp, Artificial Sequence
  Synthetic oligonucleotide; TTGAAT chr11 5203535 5203554 5203551 +
tgagtcatcatataccaagt

SEQ ID NO: 57835 - DNA, 20 bp, Artificial Sequence
  Synthetic oligonucleotide; AGGGAT chr11 5203565 5203584 5203581 +
tataaaacagatgctgctcc

SEQ ID NO: 57836 - DNA, 20 bp, Artificial Sequence
  Synthetic oligonucleotide; TTGAAT chr11 5203581 5203600 5203597 +
ctccagggatcttgctgacc

SEQ ID NO: 57837 - DNA, 20 bp, Artificial Sequence
  Synthetic oligonucleotide; AAGGAT chr11 5203647 5203666 5203663 +
cctgactcagacatatcgtc

SEQ ID NO: 57838 - DNA, 20 bp, Artificial Sequence
  Synthetic oligonucleotide; TGGGAT chr11 5203654 5203673 5203670 +
cagacatatcgtcaaggatc

SEQ ID NO: 57839 - DNA, 20 bp, Artificial Sequence
  Synthetic oligonucleotide; GTGAAT chr11 5203684 5203703 5203700 +
cacaaaagatttaatattct

SEQ ID NO: 57840 - DNA, 20 bp, Artificial Sequence
  Synthetic oligonucleotide; GTGGAT chr11 5203774 5203793 5203790 +
actttgggaggccgaggcag

SEQ ID NO: 57841 - DNA, 20 bp, Artificial Sequence
  Synthetic oligonucleotide; AGGAGT chr11 5203791 5203810 5203807 +
caggtggattggctgagctc

SEQ ID NO: 57842 - DNA, 20 bp, Artificial Sequence
  Synthetic oligonucleotide; GAGAAT chr11 5203911 5203930 5203927 +
tacttgggagactgaggcag

SEQ ID NO: 57843 - DNA, 20 bp, Artificial Sequence
  Synthetic oligonucleotide; TGGGAT chr11 5204188 5204207 5204204 +
catagagactatcagccttt

SEQ ID NO: 57844 - DNA, 20 bp, Artificial Sequence
  Synthetic oligonucleotide; GAGGAT chr11 5204216 5204235 5204232 +
ccagagcaaaatacatgttg

SEQ ID NO: 57845 - DNA, 20 bp, Artificial Sequence
  Synthetic oligonucleotide; TAGGAT chr11 5204245 5204264 5204261 +
ttaaaatatgttttgaaagg

SEQ ID NO: 57846 - DNA, 20 bp, Artificial Sequence
  Synthetic oligonucleotide; GAGAGT chr11 5204397 5204416 5204413 +
catgttgtgttatgctatct

SEQ ID NO: 57847 - DNA, 20 bp, Artificial Sequence
  Synthetic oligonucleotide; CTGAGT chr11 5204422 5204441 5204438 +
tcagtgtatggtatctcagt

SEQ ID NO: 57848 - DNA, 20 bp, Artificial Sequence
  Synthetic oligonucleotide; GTGAAT chr11 5204482 5204501 5204498 +
aatagagaagacaaatagca

SEQ ID NO: 57849 - DNA, 20 bp, Artificial Sequence
  Synthetic oligonucleotide; TTGAGT chr11 5204488 5204507 5204504 +
gaagacaaatagcagtgaat

SEQ ID NO: 57850 - DNA, 20 bp, Artificial Sequence
  Synthetic oligonucleotide; AAGGGT chr11 5204506 5204525 5204522 +
atttgagtctggagaaataa

SEQ ID NO: 57851 - DNA, 20 bp, Artificial Sequence
  Synthetic oligonucleotide; TGGAAT chr11 5204537 5204556 5204553 +
tatcccctctgagcactgtc

SEQ ID NO: 57852 - DNA, 20 bp, Artificial Sequence
  Synthetic oligonucleotide; AGGAGT chr11 5204592 5204611 5204608 +
aataaccaggtcattctttc

SEQ ID NO: 57853 - DNA, 20 bp, Artificial Sequence
  Synthetic oligonucleotide; CAGAAT chr11 5204674 5204693 5204690 +
tttttttttttctgtctttt

SEQ ID NO: 57854 - DNA, 20 bp, Artificial Sequence
  Synthetic oligonucleotide; TAGGGT chr11 5204713 5204732 5204729 +
attacttgcttactttaaaa

SEQ ID NO: 57855 - DNA, 20 bp, Artificial Sequence
  Synthetic oligonucleotide; TGGAGT chr11 5204826 5204845 5204842 +
attcctatttgccaaggcag

SEQ ID NO: 57856 - DNA, 20 bp, Artificial Sequence
  Synthetic oligonucleotide; AGGGGT chr11 5204951 5204970 5204967 +
ggtcttttctggacaccact

SEQ ID NO: 57857 - DNA, 20 bp, Artificial Sequence
  Synthetic oligonucleotide; AAGAGT chr11 5205044 5205063 5205060 +
gtaagcgaggtcaggccctc

SEQ ID NO: 57858 - DNA, 20 bp, Artificial Sequence
  Synthetic oligonucleotide; TGGGAT chr11 5205052 5205071 5205068 +
ggtcaggccctcaagagtct

SEQ ID NO: 57859 - DNA, 20 bp, Artificial Sequence
  Synthetic oligonucleotide; CTGAAT chr11 5205117 5205136 5205133 +
gaactgactgtttaatgatt

SEQ ID NO: 57860 - DNA, 20 bp, Artificial Sequence
  Synthetic oligonucleotide; GAGAAT chr11 5205136 5205155 5205152 +
tctgaatatgctagttcaga

SEQ ID NO: 57861 - DNA, 20 bp, Artificial Sequence
  Synthetic oligonucleotide; CTGAAT chr11 5205185 5205204 5205201 +
ggcttaaatttccagtttac

SEQ ID NO: 57862 - DNA, 20 bp, Artificial Sequence
  Synthetic oligonucleotide; AGGAAT chr11 5205208 5205227 5205224 +
aatggttatgacctaattag

SEQ ID NO: 57863 - DNA, 20 bp, Artificial Sequence
  Synthetic oligonucleotide; CTGAAT chr11 5205778 5205797 5205794 +
ctataagaaactggtaaaca

SEQ ID NO: 57864 - DNA, 20 bp, Artificial Sequence
  Synthetic oligonucleotide; ATGGAT chr11 5205885 5205904 5205901 +
aataataagtgcatatatta

SEQ ID NO: 57865 - DNA, 20 bp, Artificial Sequence
  Synthetic oligonucleotide; TGGGAT chr11 5205937 5205956 5205953 +
ataatatatataatatgtta

SEQ ID NO: 57866 - DNA, 20 bp, Artificial Sequence
  Synthetic oligonucleotide; GAGAGT chr11 5205978 5205997 5205994 +
atctatatatacattgtaga

SEQ ID NO: 57867 - DNA, 20 bp, Artificial Sequence
  Synthetic oligonucleotide; ATGAAT chr11 5206003 5206022 5206019 +
tctatcaagctaattagcat

SEQ ID NO: 57868 - DNA, 20 bp, Artificial Sequence
  Synthetic oligonucleotide; GAGGAT chr11 5206288 5206307 5206304 +
aaatgaacagttaaatttat

SEQ ID NO: 57869 - DNA, 20 bp, Artificial Sequence
  Synthetic oligonucleotide; TAGAAT chr11 5206342 5206361 5206358 +
aagttgtcctctgaaaattc

SEQ ID NO: 57870 - DNA, 20 bp, Artificial Sequence
  Synthetic oligonucleotide; TCGAGT chr11 5206405 5206424 5206421 +
tgtaaaggctttctaagaaa

SEQ ID NO: 57871 - DNA, 20 bp, Artificial Sequence
  Synthetic oligonucleotide; GGGGGT chr11 5206454 5206473 5206470 +
ccaggtccaatttttctcca

SEQ ID NO: 57872 - DNA, 20 bp, Artificial Sequence
  Synthetic oligonucleotide; TGGAAT chr11 5206532 5206551 5206548 +
actttctcatcaccacacag

SEQ ID NO: 57873 - DNA, 20 bp, Artificial Sequence
  Synthetic oligonucleotide; AAGAAT chr11 5206538 5206557 5206554 +
tcatcaccacacagtggaat

SEQ ID NO: 57874 - DNA, 20 bp, Artificial Sequence
  Synthetic oligonucleotide; ATGAAT chr11 5206604 5206623 5206620 +
gtaaagccttcagaaaaagt

SEQ ID NO: 57875 - DNA, 20 bp, Artificial Sequence
  Synthetic oligonucleotide; TTGAAT chr11 5206709 5206728 5206725 +
atgttattaaagctaaaatt

SEQ ID NO: 57876 - DNA, 20 bp, Artificial Sequence
  Synthetic oligonucleotide; AAGAAT chr11 5206760 5206779 5206776 +
tctatctttctgttcaagaa

SEQ ID NO: 57877 - DNA, 20 bp, Artificial Sequence
  Synthetic oligonucleotide; ATGGAT chr11 5206901 5206920 5206917 +
gacctcagaacataggagag

SEQ ID NO: 57878 - DNA, 20 bp, Artificial Sequence
  Synthetic oligonucleotide; CAGAGT chr11 5206918 5206937 5206934 +
gagatggatattgtacacca

SEQ ID NO: 57879 - DNA, 20 bp, Artificial Sequence
  Synthetic oligonucleotide; CAGGAT chr11 5206925 5206944 5206941 +
atattgtacaccacagagtc

SEQ ID NO: 57880 - DNA, 20 bp, Artificial Sequence
  Synthetic oligonucleotide; AAGGAT chr11 5206942 5206961 5206958 +
gtccaggatgactagcagtg

SEQ ID NO: 57881 - DNA, 20 bp, Artificial Sequence
  Synthetic oligonucleotide; AGGGAT chr11 5207007 5207026 5207023 +
ccaagtccccaaagacaaga

SEQ ID NO: 57882 - DNA, 20 bp, Artificial Sequence
  Synthetic oligonucleotide; AAGGAT chr11 5207066 5207085 5207082 +
atgagccctcccattgctat

SEQ ID NO: 57883 - DNA, 20 bp, Artificial Sequence
  Synthetic oligonucleotide; GGGGAT chr11 5207072 5207091 5207088 +
cctcccattgctataaggat

SEQ ID NO: 57884 - DNA, 20 bp, Artificial Sequence
  Synthetic oligonucleotide; AGGGAT chr11 5207188 5207207 5207204 +
attccaacctcaaccaaatg

SEQ ID NO: 57885 - DNA, 20 bp, Artificial Sequence
  Synthetic oligonucleotide; GGGGAT chr11 5207198 5207217 5207214 +
caaccaaatgagggatggct

SEQ ID NO: 57886 - DNA, 20 bp, Artificial Sequence
  Synthetic oligonucleotide; GGGAGT chr11 5207233 5207252 5207249 +
aagatactgtatcttaggag

SEQ ID NO: 57887 - DNA, 20 bp, Artificial Sequence
  Synthetic oligonucleotide; CAGGAT chr11 5207262 5207281 5207278 +
ttttttttatagaaactcgt

SEQ ID NO: 57888 - DNA, 20 bp, Artificial Sequence
  Synthetic oligonucleotide; TAGGAT chr11 5207276 5207295 5207292 +
actcgtcaggatattattgc

SEQ ID NO: 57889 - DNA, 20 bp, Artificial Sequence
  Synthetic oligonucleotide; TGGAAT chr11 5207307 5207326 5207323 +
gttactgggaaaaaagctga

SEQ ID NO: 57890 - DNA, 20 bp, Artificial Sequence
  Synthetic oligonucleotide; AAGAGT chr11 5207317 5207336 5207333 +
aaaaagctgatggaatacaa

SEQ ID NO: 57891 - DNA, 20 bp, Artificial Sequence
  Synthetic oligonucleotide; AGGGAT chr11 5207335 5207354 5207351 +
aaaagagtagacatccccac

SEQ ID NO: 57892 - DNA, 20 bp, Artificial Sequence
  Synthetic oligonucleotide; TTGGAT chr11 5207559 5207578 5207575 +
agatctaaaattgtaatttc

SEQ ID NO: 57893 - DNA, 20 bp, Artificial Sequence
  Synthetic oligonucleotide; TAGAAT chr11 5207568 5207587 5207584 +
attgtaatttcttggattcc

SEQ ID NO: 57894 - DNA, 20 bp, Artificial Sequence
  Synthetic oligonucleotide; GTGGAT chr11 5207584 5207603 5207600 +
ttcctagaatttctaaatct

SEQ ID NO: 57895 - DNA, 20 bp, Artificial Sequence
  Synthetic oligonucleotide; TAGAAT chr11 5207593 5207612 5207609 +
tttctaaatctgtggatttt

SEQ ID NO: 57896 - DNA, 20 bp, Artificial Sequence
  Synthetic oligonucleotide; TTGGAT chr11 5207650 5207669 5207666 +
gctaccggagctatgtactt

SEQ ID NO: 57897 - DNA, 20 bp, Artificial Sequence
  Synthetic oligonucleotide; AAGAGT chr11 5207658 5207677 5207674 +
agctatgtacttttggatat

SEQ ID NO: 57898 - DNA, 20 bp, Artificial Sequence
  Synthetic oligonucleotide; TAGAAT chr11 5207754 5207773 5207770 +
atcagaaggaaccattgtcc

SEQ ID NO: 57899 - DNA, 20 bp, Artificial Sequence
  Synthetic oligonucleotide; AGGAAT chr11 5208117 5208136 5208133 +
tttggtttgtcatttttcga

SEQ ID NO: 57900 - DNA, 20 bp, Artificial Sequence
  Synthetic oligonucleotide; AGGAAT chr11 5208191 5208210 5208207 +
tagctcttaatttattattg

SEQ ID NO: 57901 - DNA, 20 bp, Artificial Sequence
  Synthetic oligonucleotide; GAGAGT chr11 5208252 5208271 5208268 +
agctattaacttatggacct

SEQ ID NO: 57902 - DNA, 20 bp, Artificial Sequence
  Synthetic oligonucleotide; TTGAGT chr11 5208371 5208390 5208387 +
aaataatagtggtttgaaat

SEQ ID NO: 57903 - DNA, 20 bp, Artificial Sequence
  Synthetic oligonucleotide; TAGAGT chr11 5208376 5208395 5208392 +
atagtggtttgaaatttgag

SEQ ID NO: 57904 - DNA, 20 bp, Artificial Sequence
  Synthetic oligonucleotide; GGGAAT chr11 5208406 5208425 5208422 +
ccaagaaaatgcatatttca

SEQ ID NO: 57905 - DNA, 20 bp, Artificial Sequence
  Synthetic oligonucleotide; AAGAAT chr11 5208468 5208487 5208484 +
gtaattagctccttagctga

SEQ ID NO: 57906 - DNA, 20 bp, Artificial Sequence
  Synthetic oligonucleotide; AGGGAT chr11 5208685 5208704 5208701 +
ttgattattaaatatatata

SEQ ID NO: 57907 - DNA, 20 bp, Artificial Sequence
  Synthetic oligonucleotide; GAGAGT chr11 5208695 5208714 5208711 +
aatatatataagggatagaa

SEQ ID NO: 57908 - DNA, 20 bp, Artificial Sequence
  Synthetic oligonucleotide; GAGAGT chr11 5208702 5208721 5208718 +
ataagggatagaagagagtg

SEQ ID NO: 57909 - DNA, 20 bp, Artificial Sequence
  Synthetic oligonucleotide; CTGAGT chr11 5208746 5208765 5208762 +
caaaattttgtcttggaaat

SEQ ID NO: 57910 - DNA, 20 bp, Artificial Sequence
  Synthetic oligonucleotide; GAGGAT chr11 5208799 5208818 5208815 +
agaggaaactgaaagaagtg

SEQ ID NO: 57911 - DNA, 20 bp, Artificial Sequence
  Synthetic oligonucleotide; CTGAGT chr11 5208827 5208846 5208843 +
tttactatcttttcaactcg

SEQ ID NO: 57912 - DNA, 20 bp, Artificial Sequence
  Synthetic oligonucleotide; TGGAGT chr11 5208949 5208968 5208965 +
agcaatgaagttctttttag

SEQ ID NO: 57913 - DNA, 20 bp, Artificial Sequence
  Synthetic oligonucleotide; TGGAAT chr11 5209001 5209020 5209017 +
agtgaagacactgctgactt

SEQ ID NO: 57914 - DNA, 20 bp, Artificial Sequence
  Synthetic oligonucleotide; AAGAAT chr11 5209010 5209029 5209026 +
actgctgactttggaattga

SEQ ID NO: 57915 - DNA, 20 bp, Artificial Sequence
  Synthetic oligonucleotide; CTGAGT chr11 5209037 5209056 5209053 +
ttagctcagctacttactag

SEQ ID NO: 57916 - DNA, 20 bp, Artificial Sequence
  Synthetic oligonucleotide; ACGAAT chr11 5209088 5209107 5209104 +
caagacagtgtgtgtaaaag

SEQ ID NO: 57917 - DNA, 20 bp, Artificial Sequence
  Synthetic oligonucleotide; CAGGAT chr11 5209113 5209132 5209129 +
taacaacatctcaggaagca

SEQ ID NO: 57918 - DNA, 20 bp, Artificial Sequence
  Synthetic oligonucleotide; AAGAAT chr11 5209309 5209328 5209325 +
ctaattgactaaagccattt

SEQ ID NO: 57919 - DNA, 20 bp, Artificial Sequence
  Synthetic oligonucleotide; CTGAAT chr11 5209460 5209479 5209476 +
cacaaattatacatgcacag

SEQ ID NO: 57920 - DNA, 20 bp, Artificial Sequence
  Synthetic oligonucleotide; AAGAGT chr11 5209519 5209538 5209535 +
actaataagataggaaatta

SEQ ID NO: 57921 - DNA, 20 bp, Artificial Sequence
  Synthetic oligonucleotide; TTGAAT chr11 5209642 5209661 5209658 +
tttttaaaagtgtgtataca

SEQ ID NO: 57922 - DNA, 20 bp, Artificial Sequence
  Synthetic oligonucleotide; GTGAAT chr11 5209691 5209710 5209707 +
ctttattcaatattatgttt

SEQ ID NO: 57923 - DNA, 20 bp, Artificial Sequence
  Synthetic oligonucleotide; CTGAAT chr11 5209738 5209757 5209754 +
ctgtagttgatttttcattt

SEQ ID NO: 57924 - DNA, 20 bp, Artificial Sequence
  Synthetic oligonucleotide; TTGAGT chr11 5209803 5209822 5209819 +
actccacagttgatagatat

SEQ ID NO: 57925 - DNA, 20 bp, Artificial Sequence
  Synthetic oligonucleotide; TTGAAT chr11 5210028 5210047 5210044 +
agcctgcatgtgcccagatt

SEQ ID NO: 57926 - DNA, 20 bp, Artificial Sequence
  Synthetic oligonucleotide; AGGAAT chr11 5210207 5210226 5210223 +
ctttttgcccctacttgact

SEQ ID NO: 57927 - DNA, 20 bp, Artificial Sequence
  Synthetic oligonucleotide; CAGAAT chr11 5210268 5210287 5210284 +
caagctggcctcaactggaa

SEQ ID NO: 57928 - DNA, 20 bp, Artificial Sequence
  Synthetic oligonucleotide; TGGAGT chr11 5210345 5210364 5210361 +
gtactttttccttttcccca

SEQ ID NO: 57929 - DNA, 20 bp, Artificial Sequence
  Synthetic oligonucleotide; CAGAAT chr11 5210423 5210442 5210439 +
taaagcctaatcctgccatc

SEQ ID NO: 57930 - DNA, 20 bp, Artificial Sequence
  Synthetic oligonucleotide; GTGGAT chr11 5210435 5210454 5210451 +
ctgccatccagaatgagcaa

SEQ ID NO: 57931 - DNA, 20 bp, Artificial Sequence
  Synthetic oligonucleotide; CAGAAT chr11 5210466 5210485 5210482 +
aaagggaagggaaaaaggag

SEQ ID NO: 57932 - DNA, 20 bp, Artificial Sequence
  Synthetic oligonucleotide; CAGGAT chr11 5210517 5210536 5210533 +
tgtttctcccacttgctctg

SEQ ID NO: 57933 - DNA, 20 bp, Artificial Sequence
  Synthetic oligonucleotide; TTGAAT chr11 5210677 5210696 5210693 +
cctaatctcgttagtacctt

SEQ ID NO: 57934 - DNA, 20 bp, Artificial Sequence
  Synthetic oligonucleotide; TTGAGT chr11 5210701 5210720 5210717 +
attagttttcaagataggac

SEQ ID NO: 57935 - DNA, 20 bp, Artificial Sequence
  Synthetic oligonucleotide; AAGGAT chr11 5210713 5210732 5210729 +
gataggacttgagttcctcg

SEQ ID NO: 57936 - DNA, 20 bp, Artificial Sequence
  Synthetic oligonucleotide; AGGAGT chr11 5210815 5210834 5210831 +
agggagaacgatttgagctc

SEQ ID NO: 57937 - DNA, 20 bp, Artificial Sequence
  Synthetic oligonucleotide; CCGAAT chr11 5210880 5210899 5210896 +
caaaaaattttaaaaagtag

SEQ ID NO: 57938 - DNA, 20 bp, Artificial Sequence
  Synthetic oligonucleotide; AAGGAT chr11 5210933 5210952 5210949 +
tacttgggaggctgaggtgg

SEQ ID NO: 57939 - DNA, 20 bp, Artificial Sequence
  Synthetic oligonucleotide; CTGAAT chr11 5211083 5211102 5211099 +
attcaggttgtcagaagtaa

SEQ ID NO: 57940 - DNA, 20 bp, Artificial Sequence
  Synthetic oligonucleotide; GAGAAT chr11 5211254 5211273 5211270 +
tcaaattacaaagaaggaca

SEQ ID NO: 57941 - DNA, 20 bp, Artificial Sequence
  Synthetic oligonucleotide; AAGAAT chr11 5211370 5211389 5211386 +
aggtggaaagaggagcaagg

SEQ ID NO: 57942 - DNA, 20 bp, Artificial Sequence
  Synthetic oligonucleotide; ATGGGT chr11 5211438 5211457 5211454 +
tacatagctaaacacatgtc

SEQ ID NO: 57943 - DNA, 20 bp, Artificial Sequence
  Synthetic oligonucleotide; AAGGAT chr11 5211640 5211659 5211656 +
tgttcttacattagtttgtt

SEQ ID NO: 57944 - DNA, 20 bp, Artificial Sequence
  Synthetic oligonucleotide; TAGAAT chr11 5211837 5211856 5211853 +
gtgtgcatgtgtctttgtga

SEQ ID NO: 57945 - DNA, 20 bp, Artificial Sequence
  Synthetic oligonucleotide; TAGGAT chr11 5211875 5211894 5211891 +
tttaggtatatactcaataa

SEQ ID NO: 57946 - DNA, 20 bp, Artificial Sequence
  Synthetic oligonucleotide; TTGGGT chr11 5211883 5211902 5211899 +
tatactcaataataggattg

SEQ ID NO: 57947 - DNA, 20 bp, Artificial Sequence
  Synthetic oligonucleotide; GGGAAT chr11 5211918 5211937 5211934 +
tttctgtttttaggtcttta

SEQ ID NO: 57948 - DNA, 20 bp, Artificial Sequence
  Synthetic oligonucleotide; TTGGGT chr11 5212074 5212093 5212090 +
atgtgagatagtatctcatt

SEQ ID NO: 57949 - DNA, 20 bp, Artificial Sequence
  Synthetic oligonucleotide; TTGAAT chr11 5212155 5212174 5212171 +
ggccacatgtatgtcttctt

SEQ ID NO: 57950 - DNA, 20 bp, Artificial Sequence
  Synthetic oligonucleotide; CTGAAT chr11 5212243 5212262 5212259 +
atttaagttccttatagatt

SEQ ID NO: 57951 - DNA, 20 bp, Artificial Sequence
  Synthetic oligonucleotide; TTGGAT chr11 5212261 5212280 5212277 +
ttctgaatattaggcctttg

SEQ ID NO: 57952 - DNA, 20 bp, Artificial Sequence
  Synthetic oligonucleotide; CGGAAT chr11 5212434 5212453 5212450 +
tctttgcccctgcttatgtc

SEQ ID NO: 57953 - DNA, 20 bp, Artificial Sequence
  Synthetic oligonucleotide; TTGGGT chr11 5212476 5212495 5212492 +
ctttcaagcatttttatagt

SEQ ID NO: 57954 - DNA, 20 bp, Artificial Sequence
  Synthetic oligonucleotide; TTGAGT chr11 5212507 5212526 5212523 +
atttaagtctctaatccatc

SEQ ID NO: 57955 - DNA, 20 bp, Artificial Sequence
  Synthetic oligonucleotide; CGGGGT chr11 5212536 5212555 5212552 +
tttgtgtatatgatatagaa

SEQ ID NO: 57956 - DNA, 20 bp, Artificial Sequence
  Synthetic oligonucleotide; TTGAAT chr11 5212592 5212611 5212608 +
agttatcccaacaccacttg

SEQ ID NO: 57957 - DNA, 20 bp, Artificial Sequence
  Synthetic oligonucleotide; TAGGGT chr11 5212597 5212616 5212613 +
tcccaacaccacttgttgaa

SEQ ID NO: 57958 - DNA, 20 bp, Artificial Sequence
  Synthetic oligonucleotide; GTGAGT chr11 5213023 5213042 5213039 +
tcatttttcaattcccacct

SEQ ID NO: 57959 - DNA, 20 bp, Artificial Sequence
  Synthetic oligonucleotide; TAGGAT chr11 5213031 5213050 5213047 +
caattcccacctgtgagtat

SEQ ID NO: 57960 - DNA, 20 bp, Artificial Sequence
  Synthetic oligonucleotide; AAGAAT chr11 5213108 5213127 5213124 +
tgtatttttctagttctgtg

SEQ ID NO: 57961 - DNA, 20 bp, Artificial Sequence
  Synthetic oligonucleotide; AGGAAT chr11 5213131 5213150 5213147 +
aatgtcattggtagtttgat

SEQ ID NO: 57962 - DNA, 20 bp, Artificial Sequence
  Synthetic oligonucleotide; TGGGAT chr11 5213344 5213363 5213360 +
ctttttgtggcaacggtaaa

SEQ ID NO: 57963 - DNA, 20 bp, Artificial Sequence
  Synthetic oligonucleotide; GGGAAT chr11 5213393 5213412 5213409 +
cttggctattgttgatgtat

SEQ ID NO: 57964 - DNA, 20 bp, Artificial Sequence
  Synthetic oligonucleotide; AGGGAT chr11 5213504 5213523 5213520 +
gttttctagatacagaaaac

SEQ ID NO: 57965 - DNA, 20 bp, Artificial Sequence
  Synthetic oligonucleotide; TTGGAT chr11 5213533 5213552 5213549 +
ttgactttctctcttcctat

SEQ ID NO: 57966 - DNA, 20 bp, Artificial Sequence
  Synthetic oligonucleotide; CTGAAT chr11 5213594 5213613 5213610 +
ccaggactgccagtactata

SEQ ID NO: 57967 - DNA, 20 bp, Artificial Sequence
  Synthetic oligonucleotide; AAGAAT chr11 5213645 5213664 5213661 +
gtcttgtgccagttttcaag

SEQ ID NO: 57968 - DNA, 20 bp, Artificial Sequence
  Synthetic oligonucleotide; GTGGGT chr11 5213687 5213706 5213703 +
cattctgtatgatgttggct

SEQ ID NO: 57969 - DNA, 20 bp, Artificial Sequence
  Synthetic oligonucleotide; TTGAAT chr11 5213773 5213792 5213789 +
ggttttaacatgaagtgaag

SEQ ID NO: 57970 - DNA, 20 bp, Artificial Sequence
  Synthetic oligonucleotide; ATGAAT chr11 5213848 5213867 5213864 +
tttttagtgctgtatatatg

SEQ ID NO: 57971 - DNA, 20 bp, Artificial Sequence
  Synthetic oligonucleotide; AGGGAT chr11 5213896 5213915 5213912 +
ctgaaccaatcttgcttctc

SEQ ID NO: 57972 - DNA, 20 bp, Artificial Sequence
  Synthetic oligonucleotide; GTGGAT chr11 5213920 5213939 5213936 +
ataaagcctacttgattgag

SEQ ID NO: 57973 - DNA, 20 bp, Artificial Sequence
  Synthetic oligonucleotide; CTGGAT chr11 5213944 5213963 5213960 +
attagctttgtgatgtgttg

SEQ ID NO: 57974 - DNA, 20 bp, Artificial Sequence
  Synthetic oligonucleotide; AAGGAT chr11 5213981 5214000 5213997 +
gtatttttgcatcaatgttc

SEQ ID NO: 57975 - DNA, 20 bp, Artificial Sequence
  Synthetic oligonucleotide; CAGGAT chr11 5214040 5214059 5214056 +
tgtctatcaggttttggtat

SEQ ID NO: 57976 - DNA, 20 bp, Artificial Sequence
  Synthetic oligonucleotide; TTGAAT chr11 5214074 5214093 5214090 +
cctcataaaatgagctgagg

SEQ ID NO: 57977 - DNA, 20 bp, Artificial Sequence
  Synthetic oligonucleotide; TGGAGT chr11 5214098 5214117 5214114 +
atccctccccctcaattttt

SEQ ID NO: 57978 - DNA, 20 bp, Artificial Sequence
  Synthetic oligonucleotide; AGGAAT chr11 5214113 5214132 5214129 +
ttttttggagtagcttcagt

SEQ ID NO: 57979 - DNA, 20 bp, Artificial Sequence
  Synthetic oligonucleotide; TAGAAT chr11 5214146 5214165 5214162 +
actcttctttgtgcatctga

SEQ ID NO: 57980 - DNA, 20 bp, Artificial Sequence
  Synthetic oligonucleotide; GTGAAT chr11 5214158 5214177 5214174 +
gcatctgatagaatttggtt

SEQ ID NO: 57981 - DNA, 20 bp, Artificial Sequence
  Synthetic oligonucleotide; CTGAAT chr11 5214206 5214225 5214222 +
gtttgataggctatttatta

SEQ ID NO: 57982 - DNA, 20 bp, Artificial Sequence
  Synthetic oligonucleotide; ATGGAT chr11 5214229 5214248 5214245 +
aatcattttcagagctcatc

SEQ ID NO: 57983 - DNA, 20 bp, Artificial Sequence
  Synthetic oligonucleotide; AGGAAT chr11 5214338 5214357 5214354 +
caatcactctcagaccacag

SEQ ID NO: 57984 - DNA, 20 bp, Artificial Sequence
  Synthetic oligonucleotide; ATGAAT chr11 5214364 5214383 5214380 +
aaaaatagatttcaagacta

SEQ ID NO: 57985 - DNA, 20 bp, Artificial Sequence
  Synthetic oligonucleotide; CTGAAT chr11 5214413 5214432 5214429 +
ggaaattaaacaacctgctc

SEQ ID NO: 57986 - DNA, 20 bp, Artificial Sequence
  Synthetic oligonucleotide; ATGAAT chr11 5214417 5214436 5214433 +
attaaacaacctgctcctga

SEQ ID NO: 57987 - DNA, 20 bp, Artificial Sequence
  Synthetic oligonucleotide; TTGGGT chr11 5214424 5214443 5214440 +
aacctgctcctgaatgaatt

SEQ ID NO: 57988 - DNA, 20 bp, Artificial Sequence
  Synthetic oligonucleotide; CGGAAT chr11 5214498 5214517 5214514 +
agaacaaagatacaatatac

SEQ ID NO: 57989 - DNA, 20 bp, Artificial Sequence
  Synthetic oligonucleotide; AAGGAT chr11 5214685 5214704 5214701 +
aacaagatcaaagctaactg

SEQ ID NO: 57990 - DNA, 20 bp, Artificial Sequence
  Synthetic oligonucleotide; ATGAGT chr11 5214722 5214741 5214738 +
aaataccattcaaaagatta

SEQ ID NO: 57991 - DNA, 20 bp, Artificial Sequence
  Synthetic oligonucleotide; GGGAAT chr11 5214831 5214850 5214847 +
gcacagttagaaatgaaaaa

SEQ ID NO: 57992 - DNA, 20 bp, Artificial Sequence
  Synthetic oligonucleotide; ATGGAT chr11 5214924 5214943 5214940 +
aactagaaaatctaaaagaa

SEQ ID NO: 57993 - DNA, 20 bp, Artificial Sequence
  Synthetic oligonucleotide; TTGAGT chr11 5214993 5215012 5215009 +
gtactttatttgagggctct

SEQ ID NO: 57994 - DNA, 20 bp, Artificial Sequence
  Synthetic oligonucleotide; TAGAGT chr11 5214998 5215017 5215014 +
ttatttgagggctctttgag

SEQ ID NO: 57995 - DNA, 20 bp, Artificial Sequence
  Synthetic oligonucleotide; CAGAAT chr11 5215047 5215066 5215063 +
caactctatgtccccctccc

SEQ ID NO: 57996 - DNA, 20 bp, Artificial Sequence
  Synthetic oligonucleotide; CTGAAT chr11 5215109 5215128 5215125 +
tggttatatctgtgttatat

SEQ ID NO: 57997 - DNA, 20 bp, Artificial Sequence
  Synthetic oligonucleotide; GAGAAT chr11 5215126 5215145 5215142 +
tatctgaatatatggctcta

SEQ ID NO: 57998 - DNA, 20 bp, Artificial Sequence
  Synthetic oligonucleotide; CTGAAT chr11 5215169 5215188 5215185 +
gctagtccaaaatccaagct

SEQ ID NO: 57999 - DNA, 20 bp, Artificial Sequence
  Synthetic oligonucleotide; TTGGAT chr11 5215191 5215210 5215207 +
gaataagacaggtgagacct

SEQ ID NO: 58000 - DNA, 20 bp, Artificial Sequence
  Synthetic oligonucleotide; ATGAAT chr11 5215195 5215214 5215211 +
aagacaggtgagacctttgg

SEQ ID NO: 58001 - DNA, 20 bp, Artificial Sequence
  Synthetic oligonucleotide; AAGAAT chr11 5215236 5215255 5215252 +
tgagaagatgtgaagaaccc

SEQ ID NO: 58002 - DNA, 20 bp, Artificial Sequence
  Synthetic oligonucleotide; AGGGGT chr11 5215272 5215291 5215288 +
aacagccccgaggcactgca

SEQ ID NO: 58003 - DNA, 20 bp, Artificial Sequence
  Synthetic oligonucleotide; GAGAAT chr11 5215292 5215311 5215308 +
aggggttcagacctgtgttg

SEQ ID NO: 58004 - DNA, 20 bp, Artificial Sequence
  Synthetic oligonucleotide; CAGGAT chr11 5215386 5215405 5215402 +
tgtttgtttttcctcagaga

SEQ ID NO: 58005 - DNA, 20 bp, Artificial Sequence
  Synthetic oligonucleotide; CTGGGT chr11 5215483 5215502 5215499 +
gatcctatcacttcagcctc

SEQ ID NO: 58006 - DNA, 20 bp, Artificial Sequence
  Synthetic oligonucleotide; TAGAGT chr11 5215838 5215857 5215854 +
atatatggagagactgaggt

SEQ ID NO: 58007 - DNA, 20 bp, Artificial Sequence
  Synthetic oligonucleotide; AGGAAT chr11 5215884 5215903 5215900 +
gtcacaactaatctagttga

SEQ ID NO: 58008 - DNA, 20 bp, Artificial Sequence
  Synthetic oligonucleotide; ACGGAT chr11 5215955 5215974 5215971 +
aaagacttgataatggctct

SEQ ID NO: 58009 - DNA, 20 bp, Artificial Sequence
  Synthetic oligonucleotide; TAGGAT chr11 5215979 5215998 5215995 +
atgtgtgagatcagttttaa

SEQ ID NO: 58010 - DNA, 20 bp, Artificial Sequence
  Synthetic oligonucleotide; TAGGGT chr11 5216015 5216034 5216031 +
tattattatacttcaagttt

SEQ ID NO: 58011 - DNA, 20 bp, Artificial Sequence
  Synthetic oligonucleotide; CAGAGT chr11 5216160 5216179 5216176 +
ccccaccccataacagtccc

SEQ ID NO: 58012 - DNA, 20 bp, Artificial Sequence
  Synthetic oligonucleotide; ATGAGT chr11 5216217 5216236 5216233 +
tcattgttcaattcccacct

SEQ ID NO: 58013 - DNA, 20 bp, Artificial Sequence
  Synthetic oligonucleotide; GAGAAT chr11 5216267 5216286 5216283 +
tctccttgtgatagtttgct

SEQ ID NO: 58014 - DNA, 20 bp, Artificial Sequence
  Synthetic oligonucleotide; TTGGGT chr11 5216397 5216416 5216413 +
agtctatcgttgttggacat

SEQ ID NO: 58015 - DNA, 20 bp, Artificial Sequence
  Synthetic oligonucleotide; GTGAAT chr11 5216424 5216443 5216440 +
ggttccaagtctttgctatt

SEQ ID NO: 58016 - DNA, 20 bp, Artificial Sequence
  Synthetic oligonucleotide; TTGGGT chr11 5216488 5216507 5216504 +
gcagcatgatttataatcct

SEQ ID NO: 58017 - DNA, 20 bp, Artificial Sequence
  Synthetic oligonucleotide; TGGGAT chr11 5216507 5216526 5216523 +
tttgggtatgtacccagtaa

SEQ ID NO: 58018 - DNA, 20 bp, Artificial Sequence
  Synthetic oligonucleotide; CTGGGT chr11 5216515 5216534 5216531 +
tgtacccagtaatgggatgg

SEQ ID NO: 58019 - DNA, 20 bp, Artificial Sequence
  Synthetic oligonucleotide; AGGAAT chr11 5216550 5216569 5216566 +
tttctagttctagattcctg

SEQ ID NO: 58020 - DNA, 20 bp, Artificial Sequence
  Synthetic oligonucleotide; TGGGGT chr11 5216828 5216847 5216844 +
atcctttgcccactttttga

SEQ ID NO: 58021 - DNA, 20 bp, Artificial Sequence
  Synthetic oligonucleotide; TTGAGT chr11 5216859 5216878 5216875 +
gttttttcttgtaaatttgt

SEQ ID NO: 58022 - DNA, 20 bp, Artificial Sequence
  Synthetic oligonucleotide; CTGGAT chr11 5216877 5216896 5216893 +
gtttgagttcattgtagatt

SEQ ID NO: 58023 - DNA, 20 bp, Artificial Sequence
  Synthetic oligonucleotide; ATGAGT chr11 5216899 5216918 5216915 +
ggatattagccctttgtcag

SEQ ID NO: 58024 - DNA, 20 bp, Artificial Sequence
  Synthetic oligonucleotide; CTGAAT chr11 5217074 5217093 5217090 +
tccttgcccatgcctatgtc

SEQ ID NO: 58025 - DNA, 20 bp, Artificial Sequence
  Synthetic oligonucleotide; TAGGGT chr11 5217101 5217120 5217117 +
gtattgcctaggtttttttc

SEQ ID NO: 58026 - DNA, 20 bp, Artificial Sequence
  Synthetic oligonucleotide; TTGAAT chr11 5217148 5217167 5217164 +
atgtaagtctttaatccatc

SEQ ID NO: 58027 - DNA, 20 bp, Artificial Sequence
  Synthetic oligonucleotide; AGGGAT chr11 5217178 5217197 5217194 +
ttttgtataaggtgtaagga

SEQ ID NO: 58028 - DNA, 20 bp, Artificial Sequence
  Synthetic oligonucleotide; GGGAAT chr11 5217241 5217260 5217257 +
ccagcaccatttattaaata

SEQ ID NO: 58029 - DNA, 20 bp, Artificial Sequence
  Synthetic oligonucleotide; TAGGAT chr11 5217449 5217468 5217465 +
ccagctttgttcttttggct

SEQ ID NO: 58030 - DNA, 20 bp, Artificial Sequence
  Synthetic oligonucleotide; GGGGAT chr11 5217545 5217564 5217561 +
aaagtcattggtagcttgat

SEQ ID NO: 58031 - DNA, 20 bp, Artificial Sequence
  Synthetic oligonucleotide; TTGAAT chr11 5217555 5217574 5217571 +
gtagcttgatggggatggca

SEQ ID NO: 58032 - DNA, 20 bp, Artificial Sequence
  Synthetic oligonucleotide; TGGAAT chr11 5217623 5217642 5217639 +
attcttcctacccatgagca

SEQ ID NO: 58033 - DNA, 20 bp, Artificial Sequence
  Synthetic oligonucleotide; TTGGAT chr11 5217716 5217735 5217732 +
tccttcacatcccttgtaag

SEQ ID NO: 58034 - DNA, 20 bp, Artificial Sequence
  Synthetic oligonucleotide; GTGAAT chr11 5217753 5217772 5217769 +
ttattctctttgaagcaatt

SEQ ID NO: 58035 - DNA, 20 bp, Artificial Sequence
  Synthetic oligonucleotide; GGGAGT chr11 5217759 5217778 5217775 +
tctttgaagcaattgtgaat

SEQ ID NO: 58036 - DNA, 20 bp, Artificial Sequence
  Synthetic oligonucleotide; AGGAAT chr11 5217807 5217826 5217823 +
tttgtctgttattggtgcat

SEQ ID NO: 58037 - DNA, 20 bp, Artificial Sequence
  Synthetic oligonucleotide; TGGGGT chr11 5217898 5217917 5217914 +
gagattttgggctgagacaa

SEQ ID NO: 58038 - DNA, 20 bp, Artificial Sequence
  Synthetic oligonucleotide; TTGAAT chr11 5217965 5217984 5217981 +
ttcacttcctcttttcctaa

SEQ ID NO: 58039 - DNA, 20 bp, Artificial Sequence
  Synthetic oligonucleotide; TTGAAT chr11 5218026 5218045 5218042 +
ccagaacttacaacactatg

SEQ ID NO: 58040 - DNA, 20 bp, Artificial Sequence
  Synthetic oligonucleotide; AGGAGT chr11 5218032 5218051 5218048 +
cttacaacactatgttgaat

SEQ ID NO: 58041 - DNA, 20 bp, Artificial Sequence
  Synthetic oligonucleotide; GGGAAT chr11 5218077 5218096 5218093 +
gccttgtgccagttttcaaa

SEQ ID NO: 58042 - DNA, 20 bp, Artificial Sequence
  Synthetic oligonucleotide; GTGGGT chr11 5218119 5218138 5218135 +
cactcagtatgatattggct

SEQ ID NO: 58043 - DNA, 20 bp, Artificial Sequence
  Synthetic oligonucleotide; GAGAGT chr11 5218181 5218200 5218197 +
ccatcaatacctaatttatt

SEQ ID NO: 58044 - DNA, 20 bp, Artificial Sequence
  Synthetic oligonucleotide; TTGAAT chr11 5218205 5218224 5218221 +
gtttttagcatgaagcgttg

SEQ ID NO: 58045 - DNA, 20 bp, Artificial Sequence
  Synthetic oligonucleotide; CTGGAT chr11 5218280 5218299 5218296 +
tctttggttctgtttatatg

SEQ ID NO: 58046 - DNA, 20 bp, Artificial Sequence
  Synthetic oligonucleotide; AGGGAT chr11 5218328 5218347 5218344 +
ttgaaccagccttgcatggc

SEQ ID NO: 58047 - DNA, 20 bp, Artificial Sequence
  Synthetic oligonucleotide; GTGGAT chr11 5218352 5218371 5218368 +
atgaagcccacttgatcatg

SEQ ID NO: 58048 - DNA, 20 bp, Artificial Sequence
  Synthetic oligonucleotide; GAGGAT chr11 5218378 5218397 5218394 +
cagtttgccagtattttatt

SEQ ID NO: 58049 - DNA, 20 bp, Artificial Sequence
  Synthetic oligonucleotide; AAGGAT chr11 5218403 5218422 5218419 +
tttttgcatcaatgttcatc

SEQ ID NO: 58050 - DNA, 20 bp, Artificial Sequence
  Synthetic oligonucleotide; CAGGAT chr11 5218459 5218478 5218475 +
tctctgtcaggctttggtat

SEQ ID NO: 58051 - DNA, 20 bp, Artificial Sequence
  Synthetic oligonucleotide; ATGAGT chr11 5218482 5218501 5218498 +
gatgatgctggcctcataaa

SEQ ID NO: 58052 - DNA, 20 bp, Artificial Sequence
  Synthetic oligonucleotide; GAGGAT chr11 5218492 5218511 5218508 +
gcctcataaaatgagttagg

SEQ ID NO: 58053 - DNA, 20 bp, Artificial Sequence
  Synthetic oligonucleotide; TGGAAT chr11 5218517 5218536 5218533 +
ttccctctttttctattgat

SEQ ID NO: 58054 - DNA, 20 bp, Artificial Sequence
  Synthetic oligonucleotide; AGGAAT chr11 5218532 5218551 5218548 +
ttgattggaatagtttcaga

SEQ ID NO: 58055 - DNA, 20 bp, Artificial Sequence
  Synthetic oligonucleotide; TAGAAT chr11 5218565 5218584 5218581 +
gctcctccttgtacctctgg

SEQ ID NO: 58056 - DNA, 20 bp, Artificial Sequence
  Synthetic oligonucleotide; ATGAAT chr11 5218577 5218596 5218593 +
acctctggtagaattcggct

SEQ ID NO: 58057 - DNA, 20 bp, Artificial Sequence
  Synthetic oligonucleotide; CAGAGT chr11 5218693 5218712 5218709 +
tcttcctggtttagtcttgg

SEQ ID NO: 58058 - DNA, 20 bp, Artificial Sequence
  Synthetic oligonucleotide; AGGAAT chr11 5218709 5218728 5218725 +
ttggcagagtgtatgtgtcg

SEQ ID NO: 58059 - DNA, 20 bp, Artificial Sequence
  Synthetic oligonucleotide; TGGGAT chr11 5218794 5218813 5218810 +
gacggtagtttgtatttctg

SEQ ID NO: 58060 - DNA, 20 bp, Artificial Sequence
  Synthetic oligonucleotide; CTGGAT chr11 5218917 5218936 5218933 +
tcttttcaaaaaaacagctt

SEQ ID NO: 58061 - DNA, 20 bp, Artificial Sequence
  Synthetic oligonucleotide; AAGGGT chr11 5218938 5218957 5218954 +
tggattcattgatttttttg

SEQ ID NO: 58062 - DNA, 20 bp, Artificial Sequence
  Synthetic oligonucleotide; TTGAAT chr11 5219010 5219029 5219026 +
ttcttgtcttctgttagctt

SEQ ID NO: 58063 - DNA, 20 bp, Artificial Sequence
  Synthetic oligonucleotide; TAGGGT chr11 5219055 5219074 5219071 +
tagttttttaattgtgatgt

SEQ ID NO: 58064 - DNA, 20 bp, Artificial Sequence
  Synthetic oligonucleotide; TTGAAT chr11 5219131 5219150 5219147 +
atttccctctacacactgct

SEQ ID NO: 58065 - DNA, 20 bp, Artificial Sequence
  Synthetic oligonucleotide; CTGAGT chr11 5219264 5219283 5219280 +
gctgttcagtttccatgtag

SEQ ID NO: 58066 - DNA, 20 bp, Artificial Sequence
  Synthetic oligonucleotide; TTGAGT chr11 5219274 5219293 5219290 +
ttccatgtagctgagtggtt

SEQ ID NO: 58067 - DNA, 20 bp, Artificial Sequence
  Synthetic oligonucleotide; GTGAGT chr11 5219278 5219297 5219294 +
atgtagctgagtggttttga

SEQ ID NO: 58068 - DNA, 20 bp, Artificial Sequence
  Synthetic oligonucleotide; CTGAGT chr11 5219293 5219312 5219309 +
tttgagtgagtttcttaatc

SEQ ID NO: 58069 - DNA, 20 bp, Artificial Sequence
  Synthetic oligonucleotide; TGGAAT chr11 5219399 5219418 5219415 +
tccaactatgtggtcagttt

SEQ ID NO: 58070 - DNA, 20 bp, Artificial Sequence
  Synthetic oligonucleotide; AAGAAT chr11 5219425 5219444 5219441 +
aggtgtggtgtggtgctgaa

SEQ ID NO: 58071 - DNA, 20 bp, Artificial Sequence
  Synthetic oligonucleotide; TGGGGT chr11 5219447 5219466 5219463 +
gaatgtatattctgttgatt

SEQ ID NO: 58072 - DNA, 20 bp, Artificial Sequence
  Synthetic oligonucleotide; GAGAGT chr11 5219454 5219473 5219470 +
tattctgttgatttggggtg

SEQ ID NO: 58073 - DNA, 20 bp, Artificial Sequence
  Synthetic oligonucleotide; CTGAGT chr11 5219495 5219514 5219511 +
taggtctgcttggtgcagag

SEQ ID NO: 58074 - DNA, 20 bp, Artificial Sequence
  Synthetic oligonucleotide; CTGGAT chr11 5219508 5219527 5219524 +
tgcagagctgagtccaattc

SEQ ID NO: 58075 - DNA, 20 bp, Artificial Sequence
  Synthetic oligonucleotide; TGGGGT chr11 5219559 5219578 5219575 +
gatctgtctaatgttgacag

SEQ ID NO: 58076 - DNA, 20 bp, Artificial Sequence
  Synthetic oligonucleotide; ATGAAT chr11 5219632 5219651 5219648 +
ggtcactcaggacttgtttt

SEQ ID NO: 58077 - DNA, 20 bp, Artificial Sequence
  Synthetic oligonucleotide; CTGGGT chr11 5219638 5219657 5219654 +
tcaggacttgttttatgaat

SEQ ID NO: 58078 - DNA, 20 bp, Artificial Sequence
  Synthetic oligonucleotide; TTGGGT chr11 5219653 5219672 5219669 +
tgaatctgggtgctcctgta

SEQ ID NO: 58079 - DNA, 20 bp, Artificial Sequence
  Synthetic oligonucleotide; TTGAAT chr11 5219691 5219710 5219707 +
agtatagttagttcttcttc

SEQ ID NO: 58080 - DNA, 20 bp, Artificial Sequence
  Synthetic oligonucleotide; TAGGAT chr11 5219775 5219794 5219791 +
aaatctgttttatcagagac

SEQ ID NO: 58081 - DNA, 20 bp, Artificial Sequence
  Synthetic oligonucleotide; ATGGGT chr11 5219871 5219890 5219887 +
tgtgtgtctctgcacgtgag

SEQ ID NO: 58082 - DNA, 20 bp, Artificial Sequence
  Synthetic oligonucleotide; CTGAAT chr11 5219880 5219899 5219896 +
ctgcacgtgagatgggtttc

SEQ ID NO: 58083 - DNA, 20 bp, Artificial Sequence
  Synthetic oligonucleotide; ATGGGT chr11 5219897 5219916 5219913 +
ttcctgaatacagaacacag

SEQ ID NO: 58084 - DNA, 20 bp, Artificial Sequence
  Synthetic oligonucleotide; GTGAGT chr11 5219971 5219990 5219987 +
ttagcctatttacatttaag

SEQ ID NO: 58085 - DNA, 20 bp, Artificial Sequence
  Synthetic oligonucleotide; ATGAAT chr11 5219987 5220006 5220003 +
taaggtgagtattgttatgt

SEQ ID NO: 58086 - DNA, 20 bp, Artificial Sequence
  Synthetic oligonucleotide; AAGGAT chr11 5220192 5220211 5220208 +
tcagcatttgcttgtctgta

SEQ ID NO: 58087 - DNA, 20 bp, Artificial Sequence
  Synthetic oligonucleotide; CTGGAT chr11 5220232 5220251 5220248 +
acttatgaagcttagtttgg

SEQ ID NO: 58088 - DNA, 20 bp, Artificial Sequence
  Synthetic oligonucleotide; CTGGGT chr11 5220246 5220265 5220262 +
gtttggctggatatgaaatt

SEQ ID NO: 58089 - DNA, 20 bp, Artificial Sequence
  Synthetic oligonucleotide; TTGAAT chr11 5220276 5220295 5220292 +
aattcttttctttaacaatg

SEQ ID NO: 58090 - DNA, 20 bp, Artificial Sequence
  Synthetic oligonucleotide; TAGAGT chr11 5220308 5220327 5220324 +
ccccactttcttctggcttg

SEQ ID NO: 58091 - DNA, 20 bp, Artificial Sequence
  Synthetic oligonucleotide; GTGGGT chr11 5220356 5220375 5220372 +
agtctgatgggcttcccttt

SEQ ID NO: 58092 - DNA, 20 bp, Artificial Sequence
  Synthetic oligonucleotide; GTGAAT chr11 5220417 5220436 5220433 +
tttccttcatttcaactttg

SEQ ID NO: 58093 - DNA, 20 bp, Artificial Sequence
  Synthetic oligonucleotide; TGGAGT chr11 5220440 5220459 5220456 +
aatctgacagttatgtgtct

SEQ ID NO: 58094 - DNA, 20 bp, Artificial Sequence
  Synthetic oligonucleotide; AGGAGT chr11 5220457 5220476 5220473 +
tcttggagttgcttttctct

SEQ ID NO: 58095 - DNA, 20 bp, Artificial Sequence
  Synthetic oligonucleotide; CTGAAT chr11 5220488 5220507 5220504 +
tgtggcgttctctgtatttc

SEQ ID NO: 58096 - DNA, 20 bp, Artificial Sequence
  Synthetic oligonucleotide; GTGAAT chr11 5220494 5220513 5220510 +
gttctctgtatttcctgaat

SEQ ID NO: 58097 - DNA, 20 bp, Artificial Sequence
  Synthetic oligonucleotide; CTGGAT chr11 5220533 5220552 5220549 +
gctagattggggaagttctc

SEQ ID NO: 58098 - DNA, 20 bp, Artificial Sequence
  Synthetic oligonucleotide; CAGAGT chr11 5220548 5220567 5220564 +
ttctcctggataatatcctg

SEQ ID NO: 58099 - DNA, 20 bp, Artificial Sequence
  Synthetic oligonucleotide; TGGAGT chr11 5220922 5220941 5220938 +
tcgaacttcctcctttagct

SEQ ID NO: 58100 - DNA, 20 bp, Artificial Sequence
  Synthetic oligonucleotide; TAGAGT chr11 5221045 5221064 5221061 +
aggagaggcactctcatttt

SEQ ID NO: 58101 - DNA, 20 bp, Artificial Sequence
  Synthetic oligonucleotide; ATGGGT chr11 5221129 5221148 5221145 +
ttgatgatggcgatgtacag

SEQ ID NO: 58102 - DNA, 20 bp, Artificial Sequence
  Synthetic oligonucleotide; GTGGAT chr11 5221142 5221161 5221158 +
tgtacagatgggtttttggt

SEQ ID NO: 58103 - DNA, 20 bp, Artificial Sequence
  Synthetic oligonucleotide; TGGAGT chr11 5221206 5221225 5221222 +
accctcagctgcaggtctgt

SEQ ID NO: 58104 - DNA, 20 bp, Artificial Sequence
  Synthetic oligonucleotide; CTGGGT chr11 5221243 5221262 5221259 +
ccactccagaagctgttttc

SEQ ID NO: 58105 - DNA, 20 bp, Artificial Sequence
  Synthetic oligonucleotide; GTGGAT chr11 5221273 5221292 5221289 +
acagcggtggctgcagaaca

SEQ ID NO: 58106 - DNA, 20 bp, Artificial Sequence
  Synthetic oligonucleotide; AGGAGT chr11 5221334 5221353 5221350 +
ctctggaagttttgtcttag

SEQ ID NO: 58107 - DNA, 20 bp, Artificial Sequence
  Synthetic oligonucleotide; GGGGAT chr11 5221374 5221393 5221390 +
gtgtcagtctgcccctactg

SEQ ID NO: 58108 - DNA, 20 bp, Artificial Sequence
  Synthetic oligonucleotide; GGGGGT chr11 5221400 5221419 5221416 +
gcctcccagttaggctactc

SEQ ID NO: 58109 - DNA, 20 bp, Artificial Sequence
  Synthetic oligonucleotide; TGGGAT chr11 5221765 5221784 5221781 +
aggaccctctgagccaggca

SEQ ID NO: 58110 - DNA, 20 bp, Artificial Sequence
  Synthetic oligonucleotide; GGGAGT chr11 5221826 5221845 5221842 +
gaagagcgcagtattagggc

SEQ ID NO: 58111 - DNA, 20 bp, Artificial Sequence
  Synthetic oligonucleotide; GGGAAT chr11 5221881 5221900 5221897 +
ccttttctttgactaggaaa

SEQ ID NO: 58112 - DNA, 20 bp, Artificial Sequence
  Synthetic oligonucleotide; CCGGGT chr11 5221907 5221926 5221923 +
tccctgaccccttgtgcttc

SEQ ID NO: 58113 - DNA, 20 bp, Artificial Sequence
  Synthetic oligonucleotide; CGGAGT chr11 5222144 5222163 5222160 +
tttttcttttttttttgtga

SEQ ID NO: 58114 - DNA, 20 bp, Artificial Sequence
  Synthetic oligonucleotide; TGGAAT chr11 5222169 5222188 5222185 +
tctcatgctgtcacctgggc

SEQ ID NO: 58115 - DNA, 20 bp, Artificial Sequence
  Synthetic oligonucleotide; CAGGAT chr11 5222214 5222233 5222230 +
tcactgcaacctctgcctcc

SEQ ID NO: 58116 - DNA, 20 bp, Artificial Sequence
  Synthetic oligonucleotide; TGGGAT chr11 5222254 5222273 5222270 +
gcctcagcctcccaaattgc

SEQ ID NO: 58117 - DNA, 20 bp, Artificial Sequence
  Synthetic oligonucleotide; TAGAAT chr11 5222421 5222440 5222437 +
gtgagccaccgctcccagcc

SEQ ID NO: 58118 - DNA, 20 bp, Artificial Sequence
  Synthetic oligonucleotide; CTGAAT chr11 5222453 5222472 5222469 +
ttaaatgcttttattgttga

SEQ ID NO: 58119 - DNA, 20 bp, Artificial Sequence
  Synthetic oligonucleotide; TTGGGT chr11 5222485 5222504 5222501 +
ctcccttgatagtttctact

SEQ ID NO: 58120 - DNA, 20 bp, Artificial Sequence
  Synthetic oligonucleotide; CTGAAT chr11 5222566 5222585 5222582 +
ttattctagttttttcgtga

SEQ ID NO: 58121 - DNA, 20 bp, Artificial Sequence
  Synthetic oligonucleotide; TTGGAT chr11 5222745 5222764 5222761 +
attttagtgagatttagttt

SEQ ID NO: 58122 - DNA, 20 bp, Artificial Sequence
  Synthetic oligonucleotide; ATGAGT chr11 5222780 5222799 5222796 +
ttccactatcttacttacac

SEQ ID NO: 58123 - DNA, 20 bp, Artificial Sequence
  Synthetic oligonucleotide; TAGAAT chr11 5222807 5222826 5222823 +
gtattaatttaacatgattt

SEQ ID NO: 58124 - DNA, 20 bp, Artificial Sequence
  Synthetic oligonucleotide; AAGGAT chr11 5222882 5222901 5222898 +
cagcagaaagagataatatt

SEQ ID NO: 58125 - DNA, 20 bp, Artificial Sequence
  Synthetic oligonucleotide; TAGAAT chr11 5222901 5222920 5222917 +
taaggataatcagaaaaaaa

SEQ ID NO: 58126 - DNA, 20 bp, Artificial Sequence
  Synthetic oligonucleotide; GAGAAT chr11 5222916 5222935 5222932 +
aaaaatagaataaacttaga

SEQ ID NO: 58127 - DNA, 20 bp, Artificial Sequence
  Synthetic oligonucleotide; GGGAGT chr11 5223008 5223027 5223024 +
taataacactagaaaatcta

SEQ ID NO: 58128 - DNA, 20 bp, Artificial Sequence
  Synthetic oligonucleotide; AAGAGT chr11 5223113 5223132 5223129 +
tttattgtattgttttggaa

SEQ ID NO: 58129 - DNA, 20 bp, Artificial Sequence
  Synthetic oligonucleotide; ATGGAT chr11 5223129 5223148 5223145 +
ggaaaagagtaaacagtcaa

SEQ ID NO: 58130 - DNA, 20 bp, Artificial Sequence
  Synthetic oligonucleotide; AAGAAT chr11 5223153 5223172 5223169 +
atatttgtatctgaaaaatc

SEQ ID NO: 58131 - DNA, 20 bp, Artificial Sequence
  Synthetic oligonucleotide; TTGGGT chr11 5223453 5223472 5223469 +
acgcctgtaatcccagccct

SEQ ID NO: 58132 - DNA, 20 bp, Artificial Sequence
  Synthetic oligonucleotide; GCGGAT chr11 5223470 5223489 5223486 +
cctttgggtggccgaggcag

SEQ ID NO: 58133 - DNA, 20 bp, Artificial Sequence
  Synthetic oligonucleotide; TAGAAT chr11 5223761 5223780 5223777 +
gatgctgtacattagatatc

SEQ ID NO: 58134 - DNA, 20 bp, Artificial Sequence
  Synthetic oligonucleotide; TTGAGT chr11 5223801 5223820 5223817 +
taactgaaattttataccct

SEQ ID NO: 58135 - DNA, 20 bp, Artificial Sequence
  Synthetic oligonucleotide; GAGAGT chr11 5223870 5223889 5223886 +
cctctactgtctgtttccat

SEQ ID NO: 58136 - DNA, 20 bp, Artificial Sequence
  Synthetic oligonucleotide; CAGGAT chr11 5223988 5224007 5224004 +
atcaattctgccataaatgg

SEQ ID NO: 58137 - DNA, 20 bp, Artificial Sequence
  Synthetic oligonucleotide; TTGAAT chr11 5224045 5224064 5224061 +
ttttaattttttgtttgtta

SEQ ID NO: 58138 - DNA, 20 bp, Artificial Sequence
  Synthetic oligonucleotide; TTGGAT chr11 5224072 5224091 5224088 +
atctgtgtttcttatatatt

SEQ ID NO: 58139 - DNA, 20 bp, Artificial Sequence
  Synthetic oligonucleotide; GTGAAT chr11 5224257 5224276 5224273 +
attcaaaaaacggctgcaac

SEQ ID NO: 58140 - DNA, 20 bp, Artificial Sequence
  Synthetic oligonucleotide; TAGAAT chr11 5224265 5224284 5224281 +
aacggctgcaacgtgaatat

SEQ ID NO: 58141 - DNA, 20 bp, Artificial Sequence
  Synthetic oligonucleotide; AAGGGT chr11 5224366 5224385 5224382 +
ttttgtttatggtgtaagac

SEQ ID NO: 58142 - DNA, 20 bp, Artificial Sequence
  Synthetic oligonucleotide; GAGGGT chr11 5224390 5224409 5224406 +
gtctgatttcatttcatttt

SEQ ID NO: 58143 - DNA, 20 bp, Artificial Sequence
  Synthetic oligonucleotide; CAGAAT chr11 5224471 5224490 5224487 +
ctgattatatgccttgattt

SEQ ID NO: 58144 - DNA, 20 bp, Artificial Sequence
  Synthetic oligonucleotide; CAGAAT chr11 5224492 5224511 5224508 +
agaatcttgccaactagatt

SEQ ID NO: 58145 - DNA, 20 bp, Artificial Sequence
  Synthetic oligonucleotide; CAGAAT chr11 5224546 5224565 5224562 +
tgagactcatattttatttc

SEQ ID NO: 58146 - DNA, 20 bp, Artificial Sequence
  Synthetic oligonucleotide; TTGAAT chr11 5224574 5224593 5224590 +
agcatctacctacctaggta

SEQ ID NO: 58147 - DNA, 20 bp, Artificial Sequence
  Synthetic oligonucleotide; CTGAAT chr11 5224688 5224707 5224704 +
agcagacctctgatctcttc

SEQ ID NO: 58148 - DNA, 20 bp, Artificial Sequence
  Synthetic oligonucleotide; AAGAAT chr11 5224716 5224735 5224732 +
taatcttaaacatcctgagg

SEQ ID NO: 58149 - DNA, 20 bp, Artificial Sequence
  Synthetic oligonucleotide; TGGGGT chr11 5224734 5224753 5224750 +
ggaagaatgggacttccatt

SEQ ID NO: 58150 - DNA, 20 bp, Artificial Sequence
  Synthetic oligonucleotide; CAGGGT chr11 5224750 5224769 5224766 +
catttggggtgggcctatga

SEQ ID NO: 58151 - DNA, 20 bp, Artificial Sequence
  Synthetic oligonucleotide; GTGAAT chr11 5224768 5224787 5224784 +
gacagggtaataagacagta

SEQ ID NO: 58152 - DNA, 20 bp, Artificial Sequence
  Synthetic oligonucleotide; AAGAGT chr11 5224858 5224877 5224874 +
ccttccaaagcagactgtga

SEQ ID NO: 58153 - DNA, 20 bp, Artificial Sequence
  Synthetic oligonucleotide; CCGGGT chr11 5224894 5224913 5224910 +
ggagactagcactgcagatt

SEQ ID NO: 58154 - DNA, 20 bp, Artificial Sequence
  Synthetic oligonucleotide; GTGAGT chr11 5224904 5224923 5224920 +
actgcagattccgggtcact

SEQ ID NO: 58155 - DNA, 20 bp, Artificial Sequence
  Synthetic oligonucleotide; CTGAGT chr11 5225009 5225028 5225025 +
gacaacagagacaactaagg

SEQ ID NO: 58156 - DNA, 20 bp, Artificial Sequence
  Synthetic oligonucleotide; CTGAGT chr11 5225096 5225115 5225112 +
ggtatctctaagcaagagaa

SEQ ID NO: 58157 - DNA, 20 bp, Artificial Sequence
  Synthetic oligonucleotide; TGGAGT chr11 5225101 5225120 5225117 +
ctctaagcaagagaactgag

SEQ ID NO: 58158 - DNA, 20 bp, Artificial Sequence
  Synthetic oligonucleotide; CAGGAT chr11 5225122 5225141 5225138 +
ggagtcaaggctgagagatg

SEQ ID NO: 58159 - DNA, 20 bp, Artificial Sequence
  Synthetic oligonucleotide; ATGGGT chr11 5225134 5225153 5225150 +
gagagatgcaggataagcaa

SEQ ID NO: 58160 - DNA, 20 bp, Artificial Sequence
  Synthetic oligonucleotide; TTGAAT chr11 5225229 5225248 5225245 +
cctccaaatcaagcctctac

SEQ ID NO: 58161 - DNA, 20 bp, Artificial Sequence
  Synthetic oligonucleotide; AGGGAT chr11 5225244 5225263 5225260 +
tctacttgaatccttttctg

SEQ ID NO: 58162 - DNA, 20 bp, Artificial Sequence
  Synthetic oligonucleotide; ATGAAT chr11 5225248 5225267 5225264 +
cttgaatccttttctgaggg

SEQ ID NO: 58163 - DNA, 20 bp, Artificial Sequence
  Synthetic oligonucleotide; TGGAGT chr11 5225318 5225337 5225334 +
tgcagcctcaccttctttca

SEQ ID NO: 58164 - DNA, 20 bp, Artificial Sequence
  Synthetic oligonucleotide; CAGAAT chr11 5225474 5225493 5225490 +
aataaatgttttttattagg

SEQ ID NO: 58165 - DNA, 20 bp, Artificial Sequence
  Synthetic oligonucleotide; TGGGGT chr11 5225647 5225666 5225663 +
tgataggcagcctgcactgg

SEQ ID NO: 58166 - DNA, 20 bp, Artificial Sequence
  Synthetic oligonucleotide; GTGAAT chr11 5225651 5225670 5225667 +
aggcagcctgcactggtggg

SEQ ID NO: 58167 - DNA, 20 bp, Artificial Sequence
  Synthetic oligonucleotide; CAGAAT chr11 5225764 5225783 5225780 +
aaaagggcctagcttggact

SEQ ID NO: 58168 - DNA, 20 bp, Artificial Sequence
  Synthetic oligonucleotide; CAGAAT chr11 5225802 5225821 5225818 +
tcccaaccataaaataaaag

SEQ ID NO: 58169 - DNA, 20 bp, Artificial Sequence
  Synthetic oligonucleotide; CTGGAT chr11 5225813 5225832 5225829 +
aaataaaagcagaatggtag

SEQ ID NO: 58170 - DNA, 20 bp, Artificial Sequence
  Synthetic oligonucleotide; TAGAAT chr11 5225935 5225954 5225951 +
aaattatcactgttattctt

SEQ ID NO: 58171 - DNA, 20 bp, Artificial Sequence
  Synthetic oligonucleotide; ATGAAT chr11 5226186 5226205 5226202 +
gaaaataaagtagggagatt

SEQ ID NO: 58172 - DNA, 20 bp, Artificial Sequence
  Synthetic oligonucleotide; AAGAAT chr11 5226359 5226378 5226375 +
agaagaaaaaaaaagaaagc

SEQ ID NO: 58173 - DNA, 20 bp, Artificial Sequence
  Synthetic oligonucleotide; CAGGAT chr11 5226568 5226587 5226584 +
tagactcaccctgaagttct

SEQ ID NO: 58174 - DNA, 20 bp, Artificial Sequence
  Synthetic oligonucleotide; TAGGGT chr11 5226694 5226713 5226710 +
cttgccatgagccttcacct

SEQ ID NO: 58175 - DNA, 20 bp, Artificial Sequence
  Synthetic oligonucleotide; AGGAGT chr11 5226716 5226735 5226732 +
gggttgcccataacagcatc

SEQ ID NO: 58176 - DNA, 20 bp, Artificial Sequence
  Synthetic oligonucleotide; CTGGGT chr11 5226752 5226771 5226768 +
ccaaaggactcaaagaacct

SEQ ID NO: 58177 - DNA, 20 bp, Artificial Sequence
  Synthetic oligonucleotide; AAGGGT chr11 5226760 5226779 5226776 +
ctcaaagaacctctgggtcc

SEQ ID NO: 58178 - DNA, 20 bp, Artificial Sequence
  Synthetic oligonucleotide; AAGGGT chr11 5226782 5226801 5226798 +
gggtagaccaccagcagcct

SEQ ID NO: 58179 - DNA, 20 bp, Artificial Sequence
  Synthetic oligonucleotide; GAGAGT chr11 5226811 5226830 5226827 +
aaaatagaccaataggcaga

SEQ ID NO: 58180 - DNA, 20 bp, Artificial Sequence
  Synthetic oligonucleotide; AAGAGT chr11 5226836 5226855 5226852 +
tcagtgcctatcagaaaccc

SEQ ID NO: 58181 - DNA, 20 bp, Artificial Sequence
  Synthetic oligonucleotide; AGGAGT chr11 5226984 5227003 5227000 +
gtaacggcagacttctcctc

SEQ ID NO: 58182 - DNA, 20 bp, Artificial Sequence
  Synthetic oligonucleotide; GGGAGT chr11 5227115 5227134 5227131 +
ctcctgccctccctgctcct

SEQ ID NO: 58183 - DNA, 20 bp, Artificial Sequence
  Synthetic oligonucleotide; TAGGGT chr11 5227135 5227154 5227151 +
gggagtagattggccaaccc

SEQ ID NO: 58184 - DNA, 20 bp, Artificial Sequence
  Synthetic oligonucleotide; CAGGGT chr11 5227150 5227169 5227166 +
aaccctagggtgtggctcca

SEQ ID NO: 58185 - DNA, 20 bp, Artificial Sequence
  Synthetic oligonucleotide; AGGAGT chr11 5227209 5227228 5227225 +
ggctcttctggcactggctt

SEQ ID NO: 58186 - DNA, 20 bp, Artificial Sequence
  Synthetic oligonucleotide; TGGAAT chr11 5227325 5227344 5227341 +
aagtgtatttacgtaatatt

SEQ ID NO: 58187 - DNA, 20 bp, Artificial Sequence
  Synthetic oligonucleotide; AAGAGT chr11 5227410 5227429 5227426 +
agttgatgcactaaaagtgg

SEQ ID NO: 58188 - DNA, 20 bp, Artificial Sequence
  Synthetic oligonucleotide; TGGGAT chr11 5227438 5227457 5227454 +
tgtctaccataattcagctt

SEQ ID NO: 58189 - DNA, 20 bp, Artificial Sequence
  Synthetic oligonucleotide; ATGGAT chr11 5227450 5227469 5227466 +
ttcagctttgggatatgtag

SEQ ID NO: 58190 - DNA, 20 bp, Artificial Sequence
  Synthetic oligonucleotide; CAGAAT chr11 5227471 5227490 5227487 +
tggatctcttcctgcgtctc

SEQ ID NO: 58191 - DNA, 20 bp, Artificial Sequence
  Synthetic oligonucleotide; CAGAAT chr11 5227496 5227515 5227512 +
tatgcaaaatacttacagga

SEQ ID NO: 58192 - DNA, 20 bp, Artificial Sequence
  Synthetic oligonucleotide; ATGGAT chr11 5227500 5227519 5227516 +
caaaatacttacaggacaga

SEQ ID NO: 58193 - DNA, 20 bp, Artificial Sequence
  Synthetic oligonucleotide; TTGGAT chr11 5227545 5227564 5227561 +
taagcatatcttctccttat

SEQ ID NO: 58194 - DNA, 20 bp, Artificial Sequence
  Synthetic oligonucleotide; TAGAAT chr11 5227690 5227709 5227706 +
taataaattatgtctaaaaa

SEQ ID NO: 58195 - DNA, 20 bp, Artificial Sequence
  Synthetic oligonucleotide; TGGGGT chr11 5227835 5227854 5227851 +
acccaaagtgtgactatcaa

SEQ ID NO: 58196 - DNA, 20 bp, Artificial Sequence
  Synthetic oligonucleotide; AAGAGT chr11 5227906 5227925 5227922 +
ttctgcctggactaatctgc

SEQ ID NO: 58197 - DNA, 20 bp, Artificial Sequence
  Synthetic oligonucleotide; AGGGGT chr11 5227949 5227968 5227965 +
gcctctgtgacttagaaagt

SEQ ID NO: 58198 - DNA, 20 bp, Artificial Sequence
  Synthetic oligonucleotide; AAGAAT chr11 5228010 5228029 5228026 +
tttttttcctctagtccact

SEQ ID NO: 58199 - DNA, 20 bp, Artificial Sequence
  Synthetic oligonucleotide; CAGAGT chr11 5228208 5228227 5228224 +
gaggaaaaacttttgaagtg

SEQ ID NO: 58200 - DNA, 20 bp, Artificial Sequence
  Synthetic oligonucleotide; TAGGGT chr11 5228280 5228299 5228296 +
aagcatttatgaggtcagcg

SEQ ID NO: 58201 - DNA, 20 bp, Artificial Sequence
  Synthetic oligonucleotide; CTGAAT chr11 5228318 5228337 5228334 +
taagggccctgtcagtcatc

SEQ ID NO: 58202 - DNA, 20 bp, Artificial Sequence
  Synthetic oligonucleotide; CTGGAT chr11 5228506 5228525 5228522 +
tttaggttaaccaaaagaaa

SEQ ID NO: 58203 - DNA, 20 bp, Artificial Sequence
  Synthetic oligonucleotide; AGGGAT chr11 5228765 5228784 5228781 +
tgtatgattatagaggtaag

SEQ ID NO: 58204 - DNA, 20 bp, Artificial Sequence
  Synthetic oligonucleotide; GAGGAT chr11 5228825 5228844 5228841 +
ctgtaaaaaactaaagcaat

SEQ ID NO: 58205 - DNA, 20 bp, Artificial Sequence
  Synthetic oligonucleotide; TTGAAT chr11 5228869 5228888 5228885 +
ctgagaaaagatttcacatg

SEQ ID NO: 58206 - DNA, 20 bp, Artificial Sequence
  Synthetic oligonucleotide; TTGGAT chr11 5228943 5228962 5228959 +
tttgacttggctgttagatt

SEQ ID NO: 58207 - DNA, 20 bp, Artificial Sequence
  Synthetic oligonucleotide; TTGAAT chr11 5229071 5229090 5229087 +
ataaagtgttctgcggaagt

SEQ ID NO: 58208 - DNA, 20 bp, Artificial Sequence
  Synthetic oligonucleotide; CTGGGT chr11 5229095 5229114 5229111 +
atatgtcttttgcaaatatc

SEQ ID NO: 58209 - DNA, 20 bp, Artificial Sequence
  Synthetic oligonucleotide; ATGGAT chr11 5229301 5229320 5229317 +
tcttttttaaatgatgaact

SEQ ID NO: 58210 - DNA, 20 bp, Artificial Sequence
  Synthetic oligonucleotide; AGGGGT chr11 5229359 5229378 5229375 +
catcatcctggcttcaaggc

SEQ ID NO: 58211 - DNA, 20 bp, Artificial Sequence
  Synthetic oligonucleotide; TAGAGT chr11 5229396 5229415 5229412 +
tggtagttacttagtgtgac

SEQ ID NO: 58212 - DNA, 20 bp, Artificial Sequence
  Synthetic oligonucleotide; GTGAAT chr11 5229638 5229657 5229654 +
tgtgagcttgcttctactct

SEQ ID NO: 58213 - DNA, 20 bp, Artificial Sequence
  Synthetic oligonucleotide; ATGGAT chr11 5229642 5229661 5229658 +
agcttgcttctactctgtga

SEQ ID NO: 58214 - DNA, 20 bp, Artificial Sequence
  Synthetic oligonucleotide; CAGAAT chr11 5229824 5229843 5229840 +
taagtcctaatgttttatat

SEQ ID NO: 58215 - DNA, 20 bp, Artificial Sequence
  Synthetic oligonucleotide; CTGGGT chr11 5229839 5229858 5229855 +
tatatcagaatggccctagt

SEQ ID NO: 58216 - DNA, 20 bp, Artificial Sequence
  Synthetic oligonucleotide; GAGGAT chr11 5229852 5229871 5229868 +
ccctagtctgggtatactta

SEQ ID NO: 58217 - DNA, 20 bp, Artificial Sequence
  Synthetic oligonucleotide; ATGAAT chr11 5229856 5229875 5229872 +
agtctgggtatacttagagg

SEQ ID NO: 58218 - DNA, 20 bp, Artificial Sequence
  Synthetic oligonucleotide; GGGAGT chr11 5229899 5229918 5229915 +
aaatcatgacactcatctat

SEQ ID NO: 58219 - DNA, 20 bp, Artificial Sequence
  Synthetic oligonucleotide; TAGAGT chr11 5229941 5229960 5229957 +
tttcaaaagcagcacttgac

SEQ ID NO: 58220 - DNA, 20 bp, Artificial Sequence
  Synthetic oligonucleotide; CAGAAT chr11 5230104 5230123 5230120 +
aaacacaactcagcagctct

SEQ ID NO: 58221 - DNA, 20 bp, Artificial Sequence
  Synthetic oligonucleotide; TAGGAT chr11 5230194 5230213 5230210 +
cacacaaaatagtttggaaa

SEQ ID NO: 58222 - DNA, 20 bp, Artificial Sequence
  Synthetic oligonucleotide; CAGAAT chr11 5230361 5230380 5230377 +
actgggctcagattttcatt

SEQ ID NO: 58223 - DNA, 20 bp, Artificial Sequence
  Synthetic oligonucleotide; TAGAAT chr11 5230465 5230484 5230481 +
agattgcatctctttagagg

SEQ ID NO: 58224 - DNA, 20 bp, Artificial Sequence
  Synthetic oligonucleotide; ATGGAT chr11 5230543 5230562 5230559 +
actgctctgaagctcaagag

SEQ ID NO: 58225 - DNA, 20 bp, Artificial Sequence
  Synthetic oligonucleotide; AGGAAT chr11 5230786 5230805 5230802 +
aaaattaaagccaaatcttg

SEQ ID NO: 58226 - DNA, 20 bp, Artificial Sequence
  Synthetic oligonucleotide; GGGGGT chr11 5230835 5230854 5230851 +
ttaactttcattttaaattt

SEQ ID NO: 58227 - DNA, 20 bp, Artificial Sequence
  Synthetic oligonucleotide; CTGGGT chr11 5230875 5230894 5230891 +
tataggtaaattgcatatca

SEQ ID NO: 58228 - DNA, 20 bp, Artificial Sequence
  Synthetic oligonucleotide; CTGGGT chr11 5230980 5230999 5230996 +
ccctcaaccctcaagtaggc

SEQ ID NO: 58229 - DNA, 20 bp, Artificial Sequence
  Synthetic oligonucleotide; ATGAAT chr11 5231206 5231225 5231222 +
cccatccaggtgatgttctc

SEQ ID NO: 58230 - DNA, 20 bp, Artificial Sequence
  Synthetic oligonucleotide; TTGGAT chr11 5231222 5231241 5231238 +
tctcatgaattctctggtat

SEQ ID NO: 58231 - DNA, 20 bp, Artificial Sequence
  Synthetic oligonucleotide; AGGAAT chr11 5231277 5231296 5231293 +
ctgactacttctaatggtgt

SEQ ID NO: 58232 - DNA, 20 bp, Artificial Sequence
  Synthetic oligonucleotide; AGGAAT chr11 5231332 5231351 5231348 +
tttttttgacttttggagaa

SEQ ID NO: 58233 - DNA, 20 bp, Artificial Sequence
  Synthetic oligonucleotide; TCGAAT chr11 5231392 5231411 5231408 +
acaatctctcttactgtctt

SEQ ID NO: 58234 - DNA, 20 bp, Artificial Sequence
  Synthetic oligonucleotide; AGGAAT chr11 5231453 5231472 5231469 +
atgagaacttccctatgctc

SEQ ID NO: 58235 - DNA, 20 bp, Artificial Sequence
  Synthetic oligonucleotide; CTGAGT chr11 5231485 5231504 5231501 +
gtgatcttccccaaaatgcc

SEQ ID NO: 58236 - DNA, 20 bp, Artificial Sequence
  Synthetic oligonucleotide; AAGAGT chr11 5231545 5231564 5231561 +
aaatatcttattcagatata

SEQ ID NO: 58237 - DNA, 20 bp, Artificial Sequence
  Synthetic oligonucleotide; ATGGAT chr11 5231590 5231609 5231606 +
taatgacttaaggaaaacac

SEQ ID NO: 58238 - DNA, 20 bp, Artificial Sequence
  Synthetic oligonucleotide; CAGAGT chr11 5231686 5231705 5231702 +
gtatattctggcagtacaga

SEQ ID NO: 58239 - DNA, 20 bp, Artificial Sequence
  Synthetic oligonucleotide; AGGAAT chr11 5232011 5232030 5232027 +
attccagaagttctaaagca

SEQ ID NO: 58240 - DNA, 20 bp, Artificial Sequence
  Synthetic oligonucleotide; TTGAAT chr11 5232070 5232089 5232086 +
ttcattcattcactgttttc

SEQ ID NO: 58241 - DNA, 20 bp, Artificial Sequence
  Synthetic oligonucleotide; ATGAAT chr11 5232099 5232118 5232115 +
tattttctttctgcccattg

SEQ ID NO: 58242 - DNA, 20 bp, Artificial Sequence
  Synthetic oligonucleotide; GAGAAT chr11 5232139 5232158 5232155 +
agtaggcatgtaagaaggta

SEQ ID NO: 58243 - DNA, 20 bp, Artificial Sequence
  Synthetic oligonucleotide; CAGAAT chr11 5232148 5232167 5232164 +
gtaagaaggtagagaatagg

SEQ ID NO: 58244 - DNA, 20 bp, Artificial Sequence
  Synthetic oligonucleotide; CGGAGT chr11 5232167 5232186 5232183 +
gcagaattgcttataaagca

SEQ ID NO: 58245 - DNA, 20 bp, Artificial Sequence
  Synthetic oligonucleotide; GAGGGT chr11 5232231 5232250 5232247 +
atataaaaaatggtgtgggg

SEQ ID NO: 58246 - DNA, 20 bp, Artificial Sequence
  Synthetic oligonucleotide; TTGGGT chr11 5232250 5232269 5232266 +
ggagggtttggaaagatttt

SEQ ID NO: 58247 - DNA, 20 bp, Artificial Sequence
  Synthetic oligonucleotide; TGGGGT chr11 5232279 5232298 5232295 +
atagagaagtttattgtggc

SEQ ID NO: 58248 - DNA, 20 bp, Artificial Sequence
  Synthetic oligonucleotide; ATGAAT chr11 5232314 5232333 5232330 +
tcacaagtaatacgtgagca

SEQ ID NO: 58249 - DNA, 20 bp, Artificial Sequence
  Synthetic oligonucleotide; TGGGGT chr11 5232417 5232436 5232433 +
cttggagcaggaacacttga

SEQ ID NO: 58250 - DNA, 20 bp, Artificial Sequence
  Synthetic oligonucleotide; TTGAGT chr11 5232486 5232505 5232502 +
aaagacaacataacattgtc

SEQ ID NO: 58251 - DNA, 20 bp, Artificial Sequence
  Synthetic oligonucleotide; TGGAGT chr11 5232537 5232556 5232553 +
attattttctcagtaattgt

SEQ ID NO: 58252 - DNA, 20 bp, Artificial Sequence
  Synthetic oligonucleotide; TAGGGT chr11 5232575 5232594 5232591 +
ttacccttgaggctatgtct

SEQ ID NO: 58253 - DNA, 20 bp, Artificial Sequence
  Synthetic oligonucleotide; AAGAGT chr11 5232628 5232647 5232644 +
gccagtattatctttgtatc

SEQ ID NO: 58254 - DNA, 20 bp, Artificial Sequence
  Synthetic oligonucleotide; TAGAAT chr11 5232890 5232909 5232906 +
gtgttcccaagttcagaaaa

SEQ ID NO: 58255 - DNA, 20 bp, Artificial Sequence
  Synthetic oligonucleotide; TAGGGT chr11 5232905 5232924 5232921 +
gaaaatagaatctagggaaa

SEQ ID NO: 58256 - DNA, 20 bp, Artificial Sequence
  Synthetic oligonucleotide; CAGGAT chr11 5232937 5232956 5232953 +
atggttatcaggaaacagtc

SEQ ID NO: 58257 - DNA, 20 bp, Artificial Sequence
  Synthetic oligonucleotide; TGGGGT chr11 5233013 5233032 5233029 +
tgataggcagcctgcatttg

SEQ ID NO: 58258 - DNA, 20 bp, Artificial Sequence
  Synthetic oligonucleotide; GTGAAT chr11 5233017 5233036 5233033 +
aggcagcctgcatttgtggg

SEQ ID NO: 58259 - DNA, 20 bp, Artificial Sequence
  Synthetic oligonucleotide; ATGAAT chr11 5233226 5233245 5233242 +
cagcataaataagtacatat

SEQ ID NO: 58260 - DNA, 20 bp, Artificial Sequence
  Synthetic oligonucleotide; CAGAAT chr11 5233543 5233562 5233559 +
cctttccattccatttacta

SEQ ID NO: 58261 - DNA, 20 bp, Artificial Sequence
  Synthetic oligonucleotide; TTGAGT chr11 5233622 5233641 5233638 +
gtattctatgcctctcatct

SEQ ID NO: 58262 - DNA, 20 bp, Artificial Sequence
  Synthetic oligonucleotide; AAGGAT chr11 5233661 5233680 5233677 +
atacccatgtggagagacaa

SEQ ID NO: 58263 - DNA, 20 bp, Artificial Sequence
  Synthetic oligonucleotide; CAGAAT chr11 5233678 5233697 5233694 +
caaaaggattattctaagtg

SEQ ID NO: 58264 - DNA, 20 bp, Artificial Sequence
  Synthetic oligonucleotide; TTGAGT chr11 5233711 5233730 5233727 +
tgagagctggtatgcataat

SEQ ID NO: 58265 - DNA, 20 bp, Artificial Sequence
  Synthetic oligonucleotide; GGGGGT chr11 5233745 5233764 5233761 +
gagaaggaaaaatgaaggga

SEQ ID NO: 58266 - DNA, 20 bp, Artificial Sequence
  Synthetic oligonucleotide; CAGGAT chr11 5233764 5233783 5233780 +
agggggttgggagagaaaga

SEQ ID NO: 58267 - DNA, 20 bp, Artificial Sequence
  Synthetic oligonucleotide; CAGAAT chr11 5233814 5233833 5233830 +
ttgtgaggaaggaaaaaatg

SEQ ID NO: 58268 - DNA, 20 bp, Artificial Sequence
  Synthetic oligonucleotide; CAGGAT chr11 5233982 5234001 5233998 +
tggactcaccctgaagttct

SEQ ID NO: 58269 - DNA, 20 bp, Artificial Sequence
  Synthetic oligonucleotide; TAGGGT chr11 5234108 5234127 5234124 +
cttgccatgagccttcacct

SEQ ID NO: 58270 - DNA, 20 bp, Artificial Sequence
  Synthetic oligonucleotide; CTGGGT chr11 5234166 5234185 5234182 +
ccaaaggactcaaagaacct

SEQ ID NO: 58271 - DNA, 20 bp, Artificial Sequence
  Synthetic oligonucleotide; AAGGGT chr11 5234174 5234193 5234190 +
ctcaaagaacctctgggtcc

SEQ ID NO: 58272 - DNA, 20 bp, Artificial Sequence
  Synthetic oligonucleotide; GAGGGT chr11 5234196 5234215 5234212 +
gggtagaccaccagtaatct

SEQ ID NO: 58273 - DNA, 20 bp, Artificial Sequence
  Synthetic oligonucleotide; GAGAGT chr11 5234223 5234242 5234239 +
ggaaaacagcccaagggaca

SEQ ID NO: 58274 - DNA, 20 bp, Artificial Sequence
  Synthetic oligonucleotide; AAGAGT chr11 5234248 5234267 5234264 +
tcagtgcctatcagaaaccc

SEQ ID NO: 58275 - DNA, 20 bp, Artificial Sequence
  Synthetic oligonucleotide; AGGAGT chr11 5234396 5234415 5234412 +
ttgacagcagtcttctcctc

SEQ ID NO: 58276 - DNA, 20 bp, Artificial Sequence
  Synthetic oligonucleotide; CAGGGT chr11 5234543 5234562 5234559 +
gcaggttggtttaagataag

SEQ ID NO: 58277 - DNA, 20 bp, Artificial Sequence
  Synthetic oligonucleotide; GAGAAT chr11 5234562 5234581 5234578 +
gcagggtttcattagtttgt

SEQ ID NO: 58278 - DNA, 20 bp, Artificial Sequence
  Synthetic oligonucleotide; TGGAAT chr11 5234752 5234771 5234768 +
agtgttttaggctaatatag

SEQ ID NO: 58279 - DNA, 20 bp, Artificial Sequence
  Synthetic oligonucleotide; TAGAGT chr11 5234764 5234783 5234780 +
taatatagtggaatgtatct

SEQ ID NO: 58280 - DNA, 20 bp, Artificial Sequence
  Synthetic oligonucleotide; GGGAAT chr11 5234884 5234903 5234900 +
ctagagatttttgtctccaa

SEQ ID NO: 58281 - DNA, 20 bp, Artificial Sequence
  Synthetic oligonucleotide; TGGAAT chr11 5234900 5234919 5234916 +
ccaagggaattttgagaggt

SEQ ID NO: 58282 - DNA, 20 bp, Artificial Sequence
  Synthetic oligonucleotide; AAGAAT chr11 5235016 5235035 5235032 +
ttgaaataaatatccattaa

SEQ ID NO: 58283 - DNA, 20 bp, Artificial Sequence
  Synthetic oligonucleotide; ATGAAT chr11 5235031 5235050 5235047 +
attaaaagaatatttaaaaa

SEQ ID NO: 58284 - DNA, 20 bp, Artificial Sequence
  Synthetic oligonucleotide; ATGAAT chr11 5235076 5235095 5235092 +
ttgaaataggttctggaaac

SEQ ID NO: 58285 - DNA, 20 bp, Artificial Sequence
  Synthetic oligonucleotide; TTGAAT chr11 5235135 5235154 5235151 +
aaatattatatacaaatatt

SEQ ID NO: 58286 - DNA, 20 bp, Artificial Sequence
  Synthetic oligonucleotide; AAGAAT chr11 5235167 5235186 5235183 +
aattatggtatgactaaaga

SEQ ID NO: 58287 - DNA, 20 bp, Artificial Sequence
  Synthetic oligonucleotide; GGGAAT chr11 5235229 5235248 5235245 +
ttaaatttaacgaagttcct

SEQ ID NO: 58288 - DNA, 20 bp, Artificial Sequence
  Synthetic oligonucleotide; TGGAAT chr11 5235281 5235300 5235297 +
tgtgttcttaaaaaaaaatg

SEQ ID NO: 58289 - DNA, 20 bp, Artificial Sequence
  Synthetic oligonucleotide; AGGAAT chr11 5235294 5235313 5235310 +
aaaaatgtggaattagaccc

SEQ ID NO: 58290 - DNA, 20 bp, Artificial Sequence
  Synthetic oligonucleotide; CTGAAT chr11 5235328 5235347 5235344 +
cagtagtttttcactctttt

SEQ ID NO: 58291 - DNA, 20 bp, Artificial Sequence
  Synthetic oligonucleotide; AAGGAT chr11 5235388 5235407 5235404 +
ccatgagcatatccaaaagg

SEQ ID NO: 58292 - DNA, 20 bp, Artificial Sequence
  Synthetic oligonucleotide; GAGGAT chr11 5235448 5235467 5235464 +
ggaaggaagaggggaagaga

SEQ ID NO: 58293 - DNA, 20 bp, Artificial Sequence
  Synthetic oligonucleotide; AGGGAT chr11 5235457 5235476 5235473 +
aggggaagagagaggatgga

SEQ ID NO: 58294 - DNA, 20 bp, Artificial Sequence
  Synthetic oligonucleotide; AGGGAT chr11 5235530 5235549 5235546 +
ggaggggagaggagaggaga

SEQ ID NO: 58295 - DNA, 20 bp, Artificial Sequence
  Synthetic oligonucleotide; ATGGAT chr11 5235683 5235702 5235699 +
gttcaaattttggtggtgat

SEQ ID NO: 58296 - DNA, 20 bp, Artificial Sequence
  Synthetic oligonucleotide; CTGGAT chr11 5235769 5235788 5235785 +
tttaatagtatccacaaatg

SEQ ID NO: 58297 - DNA, 20 bp, Artificial Sequence
  Synthetic oligonucleotide; TAGAAT chr11 5235922 5235941 5235938 +
acttaaatgcttaccaacag

SEQ ID NO: 58298 - DNA, 20 bp, Artificial Sequence
  Synthetic oligonucleotide; AAGAAT chr11 5235949 5235968 5235965 +
gataaattacggtatagtca

SEQ ID NO: 58299 - DNA, 20 bp, Artificial Sequence
  Synthetic oligonucleotide; TAGAAT chr11 5235954 5235973 5235970 +
attacggtatagtcaaagaa

SEQ ID NO: 58300 - DNA, 20 bp, Artificial Sequence
  Synthetic oligonucleotide; AAGAAT chr11 5235976 5235995 5235992 +
gaatattacacagaaatgaa

SEQ ID NO: 58301 - DNA, 20 bp, Artificial Sequence
  Synthetic oligonucleotide; GTGAGT chr11 5236051 5236070 5236067 +
ttgattaaaagtaaccagag

SEQ ID NO: 58302 - DNA, 20 bp, Artificial Sequence
  Synthetic oligonucleotide; ATGGAT chr11 5236090 5236109 5236106 +
ctttatttgtatatagaaag

SEQ ID NO: 58303 - DNA, 20 bp, Artificial Sequence
  Synthetic oligonucleotide; TAGGGT chr11 5236138 5236157 5236154 +
caaggggaaatgttataaaa

SEQ ID NO: 58304 - DNA, 20 bp, Artificial Sequence
  Synthetic oligonucleotide; ATGAAT chr11 5236155 5236174 5236171 +
aaatagggtagagaggagcc

SEQ ID NO: 58305 - DNA, 20 bp, Artificial Sequence
  Synthetic oligonucleotide; TTGAAT chr11 5236218 5236237 5236234 +
ctggaagccaacgaaagata

SEQ ID NO: 58306 - DNA, 20 bp, Artificial Sequence
  Synthetic oligonucleotide; AAGAAT chr11 5236416 5236435 5236432 +
gtgatgtcagtcgtgaacac

SEQ ID NO: 58307 - DNA, 20 bp, Artificial Sequence
  Synthetic oligonucleotide; GTGAGT chr11 5236434 5236453 5236450 +
acaagaatagggccacattt

SEQ ID NO: 58308 - DNA, 20 bp, Artificial Sequence
  Synthetic oligonucleotide; TTGGAT chr11 5236471 5236490 5236487 +
ataaaatcagaaatacagtc

SEQ ID NO: 58309 - DNA, 20 bp, Artificial Sequence
  Synthetic oligonucleotide; GTGGAT chr11 5236528 5236547 5236544 +
aaaaagatgtacttagatat

SEQ ID NO: 58310 - DNA, 20 bp, Artificial Sequence
  Synthetic oligonucleotide; AAGAAT chr11 5236546 5236565 5236562 +
atgtggatctggagctcaga

SEQ ID NO: 58311 - DNA, 20 bp, Artificial Sequence
  Synthetic oligonucleotide; AAGAAT chr11 5236563 5236582 5236579 +
agaaagaatacaaccaggtc

SEQ ID NO: 58312 - DNA, 20 bp, Artificial Sequence
  Synthetic oligonucleotide; CAGAAT chr11 5236570 5236589 5236586 +
atacaaccaggtcaagaata

SEQ ID NO: 58313 - DNA, 20 bp, Artificial Sequence
  Synthetic oligonucleotide; GTGAAT chr11 5236613 5236632 5236629 +
aacagatcataatgtgctgt

SEQ ID NO: 58314 - DNA, 20 bp, Artificial Sequence
  Synthetic oligonucleotide; TAGAAT chr11 5236680 5236699 5236696 +
tcaatatctccttaaaatct

SEQ ID NO: 58315 - DNA, 20 bp, Artificial Sequence
  Synthetic oligonucleotide; AGGAAT chr11 5236699 5236718 5236715 +
ttagaatgtgtttgtgaggg

SEQ ID NO: 58316 - DNA, 20 bp, Artificial Sequence
  Synthetic oligonucleotide; ATGGAT chr11 5236888 5236907 5236904 +
tggttacatgtttattctat

SEQ ID NO: 58317 - DNA, 20 bp, Artificial Sequence
  Synthetic oligonucleotide; GAGGAT chr11 5236902 5236921 5236918 +
ttctatatggattgcattga

SEQ ID NO: 58318 - DNA, 20 bp, Artificial Sequence
  Synthetic oligonucleotide; CAGAAT chr11 5236916 5236935 5236932 +
cattgagaggatttgtataa

SEQ ID NO: 58319 - DNA, 20 bp, Artificial Sequence
  Synthetic oligonucleotide; TGGAGT chr11 5236951 5236970 5236967 +
ttttcttttctcttctgaga

SEQ ID NO: 58320 - DNA, 20 bp, Artificial Sequence
  Synthetic oligonucleotide; TAGAGT chr11 5236977 5236996 5236993 +
ttcatccctattgcccaagc

SEQ ID NO: 58321 - DNA, 20 bp, Artificial Sequence
  Synthetic oligonucleotide; CTGGGT chr11 5237021 5237040 5237037 +
ctcaccgcaacctctgcctc

SEQ ID NO: 58322 - DNA, 20 bp, Artificial Sequence
  Synthetic oligonucleotide; CTGAAT chr11 5237053 5237072 5237069 +
aattctcctgcctcagccac

SEQ ID NO: 58323 - DNA, 20 bp, Artificial Sequence
  Synthetic oligonucleotide; TGGGGT chr11 5237116 5237135 5237132 +
ttttgtatttttagtagaga

SEQ ID NO: 58324 - DNA, 20 bp, Artificial Sequence
  Synthetic oligonucleotide; CTGGGT chr11 5237194 5237213 5237210 +
tgccttggcctcccaaagtg

SEQ ID NO: 58325 - DNA, 20 bp, Artificial Sequence
  Synthetic oligonucleotide; CAGGAT chr11 5237227 5237246 5237243 +
cctgagccaccgcatccagc

SEQ ID NO: 58326 - DNA, 20 bp, Artificial Sequence
  Synthetic oligonucleotide; AAGAAT chr11 5237249 5237268 5237265 +
ggataaggtctaaaagtgga

SEQ ID NO: 58327 - DNA, 20 bp, Artificial Sequence
  Synthetic oligonucleotide; AAGAGT chr11 5237301 5237320 5237317 +
tgaggacctgactgggcagt

SEQ ID NO: 58328 - DNA, 20 bp, Artificial Sequence
  Synthetic oligonucleotide; CAGAAT chr11 5237336 5237355 5237352 +
tagatagggacaaattgaag

SEQ ID NO: 58329 - DNA, 20 bp, Artificial Sequence
  Synthetic oligonucleotide; GTGAAT chr11 5237389 5237408 5237405 +
gattttaatctgtgaccttg

SEQ ID NO: 58330 - DNA, 20 bp, Artificial Sequence
  Synthetic oligonucleotide; CTGAGT chr11 5237474 5237493 5237490 +
taacaagtgaaatacccatg

SEQ ID NO: 58331 - DNA, 20 bp, Artificial Sequence
  Synthetic oligonucleotide; ATGGGT chr11 5237533 5237552 5237549 +
cccagtacattgtttgatat

SEQ ID NO: 58332 - DNA, 20 bp, Artificial Sequence
  Synthetic oligonucleotide; CAGAGT chr11 5237573 5237592 5237589 +
ggaggtcagaggttagaaat

SEQ ID NO: 58333 - DNA, 20 bp, Artificial Sequence
  Synthetic oligonucleotide; GGGAAT chr11 5237580 5237599 5237596 +
agaggttagaaatcagagtt

SEQ ID NO: 58334 - DNA, 20 bp, Artificial Sequence
  Synthetic oligonucleotide; TGGGAT chr11 5237586 5237605 5237602 +
tagaaatcagagttgggaat

SEQ ID NO: 58335 - DNA, 20 bp, Artificial Sequence
  Synthetic oligonucleotide; AAGAGT chr11 5237608 5237627 5237624 +
ggattatacaggctgtattt

SEQ ID NO: 58336 - DNA, 20 bp, Artificial Sequence
  Synthetic oligonucleotide; GTGAAT chr11 5237626 5237645 5237642 +
ttaagagtttagatataact

SEQ ID NO: 58337 - DNA, 20 bp, Artificial Sequence
  Synthetic oligonucleotide; AAGAGT chr11 5237634 5237653 5237650 +
ttagatataactgtgaatcc

SEQ ID NO: 58338 - DNA, 20 bp, Artificial Sequence
  Synthetic oligonucleotide; ATGAAT chr11 5237643 5237662 5237659 +
actgtgaatccaagagtgtg

SEQ ID NO: 58339 - DNA, 20 bp, Artificial Sequence
  Synthetic oligonucleotide; GTGGGT chr11 5237786 5237805 5237802 +
ttaattagtgtaatgccaat

SEQ ID NO: 58340 - DNA, 20 bp, Artificial Sequence
  Synthetic oligonucleotide; TAGAAT chr11 5237792 5237811 5237808 +
agtgtaatgccaatgtgggt

SEQ ID NO: 58341 - DNA, 20 bp, Artificial Sequence
  Synthetic oligonucleotide; TAGGGT chr11 5237887 5237906 5237903 +
ctgaaacaaaaaggaaaagg

SEQ ID NO: 58342 - DNA, 20 bp, Artificial Sequence
  Synthetic oligonucleotide; GAGGAT chr11 5237916 5237935 5237932 +
agatgggaaatgtatgtaag

SEQ ID NO: 58343 - DNA, 20 bp, Artificial Sequence
  Synthetic oligonucleotide; TAGGGT chr11 5237956 5237975 5237972 +
gggaggtatactaaggactc

SEQ ID NO: 58344 - DNA, 20 bp, Artificial Sequence
  Synthetic oligonucleotide; ATGGGT chr11 5237971 5237990 5237987 +
gactctagggtcagagaaat

SEQ ID NO: 58345 - DNA, 20 bp, Artificial Sequence
  Synthetic oligonucleotide; CTGGGT chr11 5238007 5238026 5238023 +
tacaaaattcacattcttgg

SEQ ID NO: 58346 - DNA, 20 bp, Artificial Sequence
  Synthetic oligonucleotide; GAGGGT chr11 5238056 5238075 5238072 +
cagcactttcagaggccgag

SEQ ID NO: 58347 - DNA, 20 bp, Artificial Sequence
  Synthetic oligonucleotide; GTGGAT chr11 5238060 5238079 5238076 +
actttcagaggccgaggagg

SEQ ID NO: 58348 - DNA, 20 bp, Artificial Sequence
  Synthetic oligonucleotide; AGGAGT chr11 5238077 5238096 5238093 +
agggtggatcacctgatgtt

SEQ ID NO: 58349 - DNA, 20 bp, Artificial Sequence
  Synthetic oligonucleotide; GAGAAT chr11 5238197 5238216 5238213 +
tacttgggaggctgaggcag

SEQ ID NO: 58350 - DNA, 20 bp, Artificial Sequence
  Synthetic oligonucleotide; CTGGAT chr11 5238237 5238256 5238253 +
aggcagatgttgcagtgagc

SEQ ID NO: 58351 - DNA, 20 bp, Artificial Sequence
  Synthetic oligonucleotide; ATGAAT chr11 5238370 5238389 5238386 +
taattcataattttcagata

SEQ ID NO: 58352 - DNA, 20 bp, Artificial Sequence
  Synthetic oligonucleotide; TTGAAT chr11 5238479 5238498 5238495 +
taatctcagttcactgctgt

SEQ ID NO: 58353 - DNA, 20 bp, Artificial Sequence
  Synthetic oligonucleotide; ACGGAT chr11 5238767 5238786 5238783 +
tggtctctctctctctctga

SEQ ID NO: 58354 - DNA, 20 bp, Artificial Sequence
  Synthetic oligonucleotide; CTGAAT chr11 5238873 5238892 5238889 +
aaggagcacccactagctca

SEQ ID NO: 58355 - DNA, 20 bp, Artificial Sequence
  Synthetic oligonucleotide; AAGGAT chr11 5239039 5239058 5239055 +
tattttagctcttccaatac

SEQ ID NO: 58356 - DNA, 20 bp, Artificial Sequence
  Synthetic oligonucleotide; TTGAGT chr11 5239078 5239097 5239094 +
gagctgtatttaattctagg

SEQ ID NO: 58357 - DNA, 20 bp, Artificial Sequence
  Synthetic oligonucleotide; GTGAAT chr11 5239182 5239201 5239198 +
ttagtgtatgaaattctgat

SEQ ID NO: 58358 - DNA, 20 bp, Artificial Sequence
  Synthetic oligonucleotide; ATGGAT chr11 5239329 5239348 5239345 +
ggtctcaaacaaacttctct

SEQ ID NO: 58359 - DNA, 20 bp, Artificial Sequence
  Synthetic oligonucleotide; TTGGAT chr11 5239373 5239392 5239389 +
tagaaaagagagatctaatt

SEQ ID NO: 58360 - DNA, 20 bp, Artificial Sequence
  Synthetic oligonucleotide; AAGAGT chr11 5239418 5239437 5239434 +
tctccaaatactagggaaat

SEQ ID NO: 58361 - DNA, 20 bp, Artificial Sequence
  Synthetic oligonucleotide; AGGAAT chr11 5239470 5239489 5239486 +
agaggttaaaatttagtggt

SEQ ID NO: 58362 - DNA, 20 bp, Artificial Sequence
  Synthetic oligonucleotide; CAGAGT chr11 5239547 5239566 5239563 +
gaaagagcccataattgtag

SEQ ID NO: 58363 - DNA, 20 bp, Artificial Sequence
  Synthetic oligonucleotide; ATGAGT chr11 5239636 5239655 5239652 +
tataagttaggacttaaagt

SEQ ID NO: 58364 - DNA, 20 bp, Artificial Sequence
  Synthetic oligonucleotide; CAGAGT chr11 5239680 5239699 5239696 +
aatgagggaaagacatcacc

SEQ ID NO: 58365 - DNA, 20 bp, Artificial Sequence
  Synthetic oligonucleotide; CAGAGT chr11 5239711 5239730 5239727 +
aacagcatgtacaaagctaa

SEQ ID NO: 58366 - DNA, 20 bp, Artificial Sequence
  Synthetic oligonucleotide; TGGGGT chr11 5239749 5239768 5239765 +
tccaaattctctagattgac

SEQ ID NO: 58367 - DNA, 20 bp, Artificial Sequence
  Synthetic oligonucleotide; TGGAAT chr11 5239812 5239831 5239828 +
tgtgtgttcttatgtgtgca

SEQ ID NO: 58368 - DNA, 20 bp, Artificial Sequence
  Synthetic oligonucleotide; GAGAAT chr11 5239879 5239898 5239895 +
acatctgtatgtgtatatca

SEQ ID NO: 58369 - DNA, 20 bp, Artificial Sequence
  Synthetic oligonucleotide; GTGAAT chr11 5239995 5240014 5240011 +
ttatgtgttttccactaaag

SEQ ID NO: 58370 - DNA, 20 bp, Artificial Sequence
  Synthetic oligonucleotide; CAGAGT chr11 5240074 5240093 5240090 +
tcatctcttcatttaaaata

SEQ ID NO: 58371 - DNA, 20 bp, Artificial Sequence
  Synthetic oligonucleotide; AGGGAT chr11 5240096 5240115 5240112 +
gagtgacattcagaagggca

SEQ ID NO: 58372 - DNA, 20 bp, Artificial Sequence
  Synthetic oligonucleotide; AAGAAT chr11 5240154 5240173 5240170 +
ttggacacagtaattattca

SEQ ID NO: 58373 - DNA, 20 bp, Artificial Sequence
  Synthetic oligonucleotide; TTGAGT chr11 5240192 5240211 5240208 +
tgtatgctacaagacagcag

SEQ ID NO: 58374 - DNA, 20 bp, Artificial Sequence
  Synthetic oligonucleotide; GTGGGT chr11 5240236 5240255 5240252 +
actggtatttattctgcttt

SEQ ID NO: 58375 - DNA, 20 bp, Artificial Sequence
  Synthetic oligonucleotide; AGGAAT chr11 5240270 5240289 5240286 +
gggactcaaaaatatgacaa

SEQ ID NO: 58376 - DNA, 20 bp, Artificial Sequence
  Synthetic oligonucleotide; TGGGGT chr11 5240349 5240368 5240365 +
atatggtgaggtgagctctt

SEQ ID NO: 58377 - DNA, 20 bp, Artificial Sequence
  Synthetic oligonucleotide; TGGGAT chr11 5240390 5240409 5240406 +
atactttgagaaagaggttt

SEQ ID NO: 58378 - DNA, 20 bp, Artificial Sequence
  Synthetic oligonucleotide; AAGGGT chr11 5240414 5240433 5240430 +
attaatgaaactggagaaga

SEQ ID NO: 58379 - DNA, 20 bp, Artificial Sequence
  Synthetic oligonucleotide; GAGGGT chr11 5240461 5240480 5240477 +
ttctttgaggttttaggttt

SEQ ID NO: 58380 - DNA, 20 bp, Artificial Sequence
  Synthetic oligonucleotide; AAGGGT chr11 5240481 5240500 5240497 +
gagggtgctacatacttcct

SEQ ID NO: 58381 - DNA, 20 bp, Artificial Sequence
  Synthetic oligonucleotide; TTGGGT chr11 5240488 5240507 5240504 +
ctacatacttcctaagggtc

SEQ ID NO: 58382 - DNA, 20 bp, Artificial Sequence
  Synthetic oligonucleotide; AGGAGT chr11 5240496 5240515 5240512 +
ttcctaagggtcttgggtac

SEQ ID NO: 58383 - DNA, 20 bp, Artificial Sequence
  Synthetic oligonucleotide; CAGAAT chr11 5240517 5240536 5240533 +
ggagtttgaagtgattgcca

SEQ ID NO: 58384 - DNA, 20 bp, Artificial Sequence
  Synthetic oligonucleotide; AGGGAT chr11 5240608 5240627 5240624 +
ccttcttttcattcacagac

SEQ ID NO: 58385 - DNA, 20 bp, Artificial Sequence
  Synthetic oligonucleotide; GTGAAT chr11 5240825 5240844 5240841 +
ttctatatatatatatacat

SEQ ID NO: 58386 - DNA, 20 bp, Artificial Sequence
  Synthetic oligonucleotide; ATGAAT chr11 5241126 5241145 5241142 +
cataaaaattgtatatattt

SEQ ID NO: 58387 - DNA, 20 bp, Artificial Sequence
  Synthetic oligonucleotide; GAGAAT chr11 5241161 5241180 5241177 +
tgtgtgtatatatatagaaa

SEQ ID NO: 58388 - DNA, 20 bp, Artificial Sequence
  Synthetic oligonucleotide; TTGGGT chr11 5241246 5241265 5241262 +
acaaagagatttattattta

SEQ ID NO: 58389 - DNA, 20 bp, Artificial Sequence
  Synthetic oligonucleotide; TGGAAT chr11 5241349 5241368 5241365 +
ctatcatatgcacagcttaa

SEQ ID NO: 58390 - DNA, 20 bp, Artificial Sequence
  Synthetic oligonucleotide; CTGAGT chr11 5241594 5241613 5241610 +
gtcaccaaatgagctatatc

SEQ ID NO: 58391 - DNA, 20 bp, Artificial Sequence
  Synthetic oligonucleotide; TTGAGT chr11 5241635 5241654 5241651 +
gcctatacagaacttctaat

SEQ ID NO: 58392 - DNA, 20 bp, Artificial Sequence
  Synthetic oligonucleotide; AAGAGT chr11 5241686 5241705 5241702 +
acaatcctcttacacctcca

SEQ ID NO: 58393 - DNA, 20 bp, Artificial Sequence
  Synthetic oligonucleotide; AGGAGT chr11 5241755 5241774 5241771 +
agagacgatttccccttcct

SEQ ID NO: 58394 - DNA, 20 bp, Artificial Sequence
  Synthetic oligonucleotide; ACGAGT chr11 5241783 5241802 5241799 +
ctaccccactaaatccaccc

SEQ ID NO: 58395 - DNA, 20 bp, Artificial Sequence
  Synthetic oligonucleotide; CAGGAT chr11 5241803 5241822 5241819 +
acgagttctctcttttcttg

SEQ ID NO: 58396 - DNA, 20 bp, Artificial Sequence
  Synthetic oligonucleotide; CTGAAT chr11 5241889 5241908 5241905 +
gaaatagtgcgtccttttgg

SEQ ID NO: 58397 - DNA, 20 bp, Artificial Sequence
  Synthetic oligonucleotide; CAGGGT chr11 5241895 5241914 5241911 +
gtgcgtccttttggctgaat

SEQ ID NO: 58398 - DNA, 20 bp, Artificial Sequence
  Synthetic oligonucleotide; AAGAGT chr11 5241919 5241938 5241935 +
gtaaaatataaagacagaaa

SEQ ID NO: 58399 - DNA, 20 bp, Artificial Sequence
  Synthetic oligonucleotide; CTGAAT chr11 5241980 5241999 5241996 +
ctatttttatcatgcaggaa

SEQ ID NO: 58400 - DNA, 20 bp, Artificial Sequence
  Synthetic oligonucleotide; CAGGAT chr11 5241993 5242012 5242009 +
gcaggaactgaatcagcagg

SEQ ID NO: 58401 - DNA, 20 bp, Artificial Sequence
  Synthetic oligonucleotide; TAGGGT chr11 5242168 5242187 5242184 +
tgccaagaagcctgtatctg

SEQ ID NO: 58402 - DNA, 20 bp, Artificial Sequence
  Synthetic oligonucleotide; GTGGGT chr11 5242189 5242208 5242205 +
agggtaaaatcctcgctgaa

SEQ ID NO: 58403 - DNA, 20 bp, Artificial Sequence
  Synthetic oligonucleotide; GGGAGT chr11 5242235 5242254 5242251 +
cgttgcctaagagctgggga

SEQ ID NO: 58404 - DNA, 20 bp, Artificial Sequence
  Synthetic oligonucleotide; GTGAAT chr11 5242267 5242286 5242283 +
aaaaaagaaaatggtacata

SEQ ID NO: 58405 - DNA, 20 bp, Artificial Sequence
  Synthetic oligonucleotide; CAGAGT chr11 5242330 5242349 5242346 +
acacttacatcctttttcac

SEQ ID NO: 58406 - DNA, 20 bp, Artificial Sequence
  Synthetic oligonucleotide; TAGGAT chr11 5242501 5242520 5242517 +
gacttcgtccttttaaaaag

SEQ ID NO: 58407 - DNA, 20 bp, Artificial Sequence
  Synthetic oligonucleotide; ATGGAT chr11 5242529 5242548 5242545 +
tagtacttcaaggaacagta

SEQ ID NO: 58408 - DNA, 20 bp, Artificial Sequence
  Synthetic oligonucleotide; TAGGAT chr11 5242534 5242553 5242550 +
cttcaaggaacagtaatgga

SEQ ID NO: 58409 - DNA, 20 bp, Artificial Sequence
  Synthetic oligonucleotide; AAGAAT chr11 5242604 5242623 5242620 +
tttcccaaacactcataaca

SEQ ID NO: 58410 - DNA, 20 bp, Artificial Sequence
  Synthetic oligonucleotide; CAGAAT chr11 5242836 5242855 5242852 +
acactcagtttgattttggc

SEQ ID NO: 58411 - DNA, 20 bp, Artificial Sequence
  Synthetic oligonucleotide; AAGGGT chr11 5243047 5243066 5243063 +
tacccatagtgcaaatatct

SEQ ID NO: 58412 - DNA, 20 bp, Artificial Sequence
  Synthetic oligonucleotide; GTGAGT chr11 5243065 5243084 5243081 +
ctaagggtaaagaagaaagc

SEQ ID NO: 58413 - DNA, 20 bp, Artificial Sequence
  Synthetic oligonucleotide; CAGGGT chr11 5243097 5243116 5243113 +
actactcaccaggaagttct

SEQ ID NO: 58414 - DNA, 20 bp, Artificial Sequence
  Synthetic oligonucleotide; TGGGGT chr11 5243223 5243242 5243239 +
cttgccatgtgccttgactt

SEQ ID NO: 58415 - DNA, 20 bp, Artificial Sequence
  Synthetic oligonucleotide; ATGGGT chr11 5243289 5243308 5243305 +
ttcaaagtacctctaggtcc

SEQ ID NO: 58416 - DNA, 20 bp, Artificial Sequence
  Synthetic oligonucleotide; TGGGAT chr11 5243312 5243331 5243328 +
ggtagacaaccaggagactg

SEQ ID NO: 58417 - DNA, 20 bp, Artificial Sequence
  Synthetic oligonucleotide; CAGAAT chr11 5243435 5243454 5243451 +
gcttccagtacctacctgcc

SEQ ID NO: 58418 - DNA, 20 bp, Artificial Sequence
  Synthetic oligonucleotide; GGGAGT chr11 5243533 5243552 5243549 +
tgcactacagtgtcagatct

SEQ ID NO: 58419 - DNA, 20 bp, Artificial Sequence
  Synthetic oligonucleotide; ATGAAT chr11 5243644 5243663 5243660 +
cctttgcctctcccagtgaa

SEQ ID NO: 58420 - DNA, 20 bp, Artificial Sequence
  Synthetic oligonucleotide; ATGAAT chr11 5243682 5243701 5243698 +
cctttgcctccctcagtaaa

SEQ ID NO: 58421 - DNA, 20 bp, Artificial Sequence
  Synthetic oligonucleotide; AAGGGT chr11 5243697 5243716 5243713 +
gtaaaatgaatctattggtc

SEQ ID NO: 58422 - DNA, 20 bp, Artificial Sequence
  Synthetic oligonucleotide; GTGGGT chr11 5243701 5243720 5243717 +
aatgaatctattggtcaagg

SEQ ID NO: 58423 - DNA, 20 bp, Artificial Sequence
  Synthetic oligonucleotide; AGGGGT chr11 5243716 5243735 5243732 +
caagggtgggttgtgactcc

SEQ ID NO: 58424 - DNA, 20 bp, Artificial Sequence
  Synthetic oligonucleotide; TGGGGT chr11 5243721 5243740 5243737 +
gtgggttgtgactccagggg

SEQ ID NO: 58425 - DNA, 20 bp, Artificial Sequence
  Synthetic oligonucleotide; TCGAGT chr11 5243757 5243776 5243773 +
aagttttgcaagatggacat

SEQ ID NO: 58426 - DNA, 20 bp, Artificial Sequence
  Synthetic oligonucleotide; TAGAAT chr11 5243769 5243788 5243785 +
atggacattcgagtttctga

SEQ ID NO: 58427 - DNA, 20 bp, Artificial Sequence
  Synthetic oligonucleotide; CTGAAT chr11 5243915 5243934 5243931 +
cgccagcagccgctaataac

SEQ ID NO: 58428 - DNA, 20 bp, Artificial Sequence
  Synthetic oligonucleotide; AGGAAT chr11 5243931 5243950 5243947 +
taacctgaatgctgacaaat

SEQ ID NO: 58429 - DNA, 20 bp, Artificial Sequence
  Synthetic oligonucleotide; AAGGAT chr11 5243951 5243970 5243967 +
aggaataagttacaactgaa

SEQ ID NO: 58430 - DNA, 20 bp, Artificial Sequence
  Synthetic oligonucleotide; AAGAAT chr11 5243957 5243976 5243973 +
aagttacaactgaaaaggat

SEQ ID NO: 58431 - DNA, 20 bp, Artificial Sequence
  Synthetic oligonucleotide; ACGAAT chr11 5243964 5243983 5243980 +
aactgaaaaggataagaatt

SEQ ID NO: 58432 - DNA, 20 bp, Artificial Sequence
  Synthetic oligonucleotide; CTGGAT chr11 5243987 5244006 5244003 +
aatatcttagccatcaattc

SEQ ID NO: 58433 - DNA, 20 bp, Artificial Sequence
  Synthetic oligonucleotide; AGGAGT chr11 5243994 5244013 5244010 +
tagccatcaattcctggatc

SEQ ID NO: 58434 - DNA, 20 bp, Artificial Sequence
  Synthetic oligonucleotide; TTGAAT chr11 5244096 5244115 5244112 +
tcaattctcttgagactaca

SEQ ID NO: 58435 - DNA, 20 bp, Artificial Sequence
  Synthetic oligonucleotide; TGGAGT chr11 5244169 5244188 5244185 +
ttttttttttttttttgaga

SEQ ID NO: 58436 - DNA, 20 bp, Artificial Sequence
  Synthetic oligonucleotide; TGGAGT chr11 5244194 5244213 5244210 +
tctcgctttgtcacccaggc

SEQ ID NO: 58437 - DNA, 20 bp, Artificial Sequence
  Synthetic oligonucleotide; CCGAGT chr11 5244272 5244291 5244288 +
cattctcctgcctcagcctc

SEQ ID NO: 58438 - DNA, 20 bp, Artificial Sequence
  Synthetic oligonucleotide; TGGGGT chr11 5244338 5244357 5244354 +
ttttgtatttttagtagaga

SEQ ID NO: 58439 - DNA, 20 bp, Artificial Sequence
  Synthetic oligonucleotide; CAGGAT chr11 5244358 5244377 5244374 +
tggggtttcaccatgttagc

SEQ ID NO: 58440 - DNA, 20 bp, Artificial Sequence
  Synthetic oligonucleotide; TGGGAT chr11 5244415 5244434 5244431 +
acctcagcctcccaaagtgc

SEQ ID NO: 58441 - DNA, 20 bp, Artificial Sequence
  Synthetic oligonucleotide; TAGAAT chr11 5244463 5244482 5244479 +
cggccaatttcatcactttt

SEQ ID NO: 58442 - DNA, 20 bp, Artificial Sequence
  Synthetic oligonucleotide; CAGAAT chr11 5244509 5244528 5244525 +
agcatcaacttggaagaaag

SEQ ID NO: 58443 - DNA, 20 bp, Artificial Sequence
  Synthetic oligonucleotide; CTGGGT chr11 5244545 5244564 5244561 +
ctagggaagtaaggggaaaa

SEQ ID NO: 58444 - DNA, 20 bp, Artificial Sequence
  Synthetic oligonucleotide; CTGAAT chr11 5244616 5244635 5244632 +
ctgaacaaaggagatttcct

SEQ ID NO: 58445 - DNA, 20 bp, Artificial Sequence
  Synthetic oligonucleotide; GAGGAT chr11 5244720 5244739 5244736 +
gtgctgctctgttcaagcaa

SEQ ID NO: 58446 - DNA, 20 bp, Artificial Sequence
  Synthetic oligonucleotide; AGGAAT chr11 5244917 5244936 5244933 +
cgtctcaaacaagcaatttc

SEQ ID NO: 58447 - DNA, 20 bp, Artificial Sequence
  Synthetic oligonucleotide; CAGGAT chr11 5245005 5245024 5245021 +
tgtcctcatacttagaggtt

SEQ ID NO: 58448 - DNA, 20 bp, Artificial Sequence
  Synthetic oligonucleotide; AAGAGT chr11 5245105 5245124 5245121 +
caaggagactctaaatttca

SEQ ID NO: 58449 - DNA, 20 bp, Artificial Sequence
  Synthetic oligonucleotide; CTGAAT chr11 5245130 5245149 5245146 +
ttaaacccaatatattaaag

SEQ ID NO: 58450 - DNA, 20 bp, Artificial Sequence
  Synthetic oligonucleotide; TTGAGT chr11 5245333 5245352 5245349 +
atgcaggaaacacatttata

SEQ ID NO: 58451 - DNA, 20 bp, Artificial Sequence
  Synthetic oligonucleotide; AAGAAT chr11 5245405 5245424 5245421 +
gccctaaaactcattcccaa

SEQ ID NO: 58452 - DNA, 20 bp, Artificial Sequence
  Synthetic oligonucleotide; AGGAAT chr11 5245504 5245523 5245520 +
catctttccatcagccaacc

SEQ ID NO: 58453 - DNA, 20 bp, Artificial Sequence
  Synthetic oligonucleotide; GAGAAT chr11 5245808 5245827 5245824 +
catccatttttcttaattct

SEQ ID NO: 58454 - DNA, 20 bp, Artificial Sequence
  Synthetic oligonucleotide; ATGAAT chr11 5245900 5245919 5245916 +
cagcatacatactaaaagaa

SEQ ID NO: 58455 - DNA, 20 bp, Artificial Sequence
  Synthetic oligonucleotide; AAGGAT chr11 5246008 5246027 5246024 +
acaaaagcaagcaatgggga

SEQ ID NO: 58456 - DNA, 20 bp, Artificial Sequence
  Synthetic oligonucleotide; ATGGAT chr11 5246110 5246129 5246126 +
ttatccaaaattaactccag

SEQ ID NO: 58457 - DNA, 20 bp, Artificial Sequence
  Synthetic oligonucleotide; TGGAAT chr11 5246255 5246274 5246271 +
caaaagcaaaaattgaccaa

SEQ ID NO: 58458 - DNA, 20 bp, Artificial Sequence
  Synthetic oligonucleotide; CAGAAT chr11 5246324 5246343 5246340 +
tcagagcgaaagacaatcta

SEQ ID NO: 58459 - DNA, 20 bp, Artificial Sequence
  Synthetic oligonucleotide; CAGAGT chr11 5246376 5246395 5246392 +
tctgacaaaggcctaatatc

SEQ ID NO: 58460 - DNA, 20 bp, Artificial Sequence
  Synthetic oligonucleotide; CTGAAT chr11 5246483 5246502 5246499 +
catatcctgtacgtgtaccc

SEQ ID NO: 58461 - DNA, 20 bp, Artificial Sequence
  Synthetic oligonucleotide; AAGAAT chr11 5246888 5246907 5246904 +
aaaaaagaaagaaagaaaaa

SEQ ID NO: 58462 - DNA, 20 bp, Artificial Sequence
  Synthetic oligonucleotide; TAGAGT chr11 5246936 5246955 5246952 +
atgtaaagacattacaaggc

SEQ ID NO: 58463 - DNA, 20 bp, Artificial Sequence
  Synthetic oligonucleotide; TTGGGT chr11 5247004 5247023 5247020 +
gaagggcgcaggcttattat

SEQ ID NO: 58464 - DNA, 20 bp, Artificial Sequence
  Synthetic oligonucleotide; GAGAGT chr11 5247019 5247038 5247035 +
attatttgggtcttatagat

SEQ ID NO: 58465 - DNA, 20 bp, Artificial Sequence
  Synthetic oligonucleotide; TAGAGT chr11 5247027 5247046 5247043 +
ggtcttatagatgagagtag

SEQ ID NO: 58466 - DNA, 20 bp, Artificial Sequence
  Synthetic oligonucleotide; CTGGGT chr11 5247183 5247202 5247199 +
ctataacaaaatacaaaaga

SEQ ID NO: 58467 - DNA, 20 bp, Artificial Sequence
  Synthetic oligonucleotide; CAGAGT chr11 5247200 5247219 5247216 +
agactgggtggcttcaacaa

SEQ ID NO: 58468 - DNA, 20 bp, Artificial Sequence
  Synthetic oligonucleotide; CAGGGT chr11 5247239 5247258 5247255 +
tctgaaggctgactcgtggt

SEQ ID NO: 58469 - DNA, 20 bp, Artificial Sequence
  Synthetic oligonucleotide; CTGGAT chr11 5247252 5247271 5247268 +
tcgtggtcagggttctcttc

SEQ ID NO: 58470 - DNA, 20 bp, Artificial Sequence
  Synthetic oligonucleotide; GGGGAT chr11 5247349 5247368 5247365 +
aaggaaaataattttatgat

SEQ ID NO: 58471 - DNA, 20 bp, Artificial Sequence
  Synthetic oligonucleotide; GGGAGT chr11 5247421 5247440 5247437 +
ccccacagataaggtcagtt

SEQ ID NO: 58472 - DNA, 20 bp, Artificial Sequence
  Synthetic oligonucleotide; GGGGAT chr11 5247428 5247447 5247444 +
gataaggtcagttgggagtt

SEQ ID NO: 58473 - DNA, 20 bp, Artificial Sequence
  Synthetic oligonucleotide; GTGAAT chr11 5247441 5247460 5247457 +
gggagttggggattcagcat

SEQ ID NO: 58474 - DNA, 20 bp, Artificial Sequence
  Synthetic oligonucleotide; CAGAGT chr11 5247687 5247706 5247703 +
acctaagtccccacctcccc

SEQ ID NO: 58475 - DNA, 20 bp, Artificial Sequence
  Synthetic oligonucleotide; TGGGAT chr11 5247749 5247768 5247765 +
aatctgcacacttgagggca

SEQ ID NO: 58476 - DNA, 20 bp, Artificial Sequence
  Synthetic oligonucleotide; TAGAAT chr11 5247832 5247851 5247848 +
tagtattcctcctaataaaa

SEQ ID NO: 58477 - DNA, 20 bp, Artificial Sequence
  Synthetic oligonucleotide; TTGAAT chr11 5247857 5247876 5247873 +
ttgctacacctgactaaacc

SEQ ID NO: 58478 - DNA, 20 bp, Artificial Sequence
  Synthetic oligonucleotide; CCGGAT chr11 5248016 5248035 5248032 +
tatagaggtctttcttccca

SEQ ID NO: 58479 - DNA, 20 bp, Artificial Sequence
  Synthetic oligonucleotide; CAGAAT chr11 5248264 5248283 5248280 +
aatcatgtgtgatctctcag

SEQ ID NO: 58480 - DNA, 20 bp, Artificial Sequence
  Synthetic oligonucleotide; CAGAAT chr11 5248293 5248312 5248309 +
tttattatttgtattgcttg

SEQ ID NO: 58481 - DNA, 20 bp, Artificial Sequence
  Synthetic oligonucleotide; CTGAAT chr11 5248319 5248338 5248335 +
aaagcctatccttgaaagct

SEQ ID NO: 58482 - DNA, 20 bp, Artificial Sequence
  Synthetic oligonucleotide; AGGGGT chr11 5248408 5248427 5248424 +
tgccaggaagcctgcacctc

SEQ ID NO: 58483 - DNA, 20 bp, Artificial Sequence
  Synthetic oligonucleotide; GTGAAT chr11 5248412 5248431 5248428 +
aggaagcctgcacctcaggg

SEQ ID NO: 58484 - DNA, 20 bp, Artificial Sequence
  Synthetic oligonucleotide; ATGGAT chr11 5248429 5248448 5248445 +
ggggtgaattctttgccgaa

SEQ ID NO: 58485 - DNA, 20 bp, Artificial Sequence
  Synthetic oligonucleotide; CAGAAT chr11 5248560 5248579 5248576 +
ctacacaccaagcttccacc

SEQ ID NO: 58486 - DNA, 20 bp, Artificial Sequence
  Synthetic oligonucleotide; TGGAAT chr11 5248856 5248875 5248872 +
ggacatactttgcccccatc

SEQ ID NO: 58487 - DNA, 20 bp, Artificial Sequence
  Synthetic oligonucleotide; AAGGAT chr11 5248864 5248883 5248880 +
tttgcccccatctggaatta

SEQ ID NO: 58488 - DNA, 20 bp, Artificial Sequence
  Synthetic oligonucleotide; AGGAAT chr11 5248921 5248940 5248937 +
tatatgtgtccagctgatat

SEQ ID NO: 58489 - DNA, 20 bp, Artificial Sequence
  Synthetic oligonucleotide; TGGAAT chr11 5249083 5249102 5249099 +
aagatgaaagttctttctac

SEQ ID NO: 58490 - DNA, 20 bp, Artificial Sequence
  Synthetic oligonucleotide; CTGGGT chr11 5249194 5249213 5249210 +
taggccctaaaacattacca

SEQ ID NO: 58491 - DNA, 20 bp, Artificial Sequence
  Synthetic oligonucleotide; CAGGAT chr11 5249359 5249378 5249375 +
tggactcaccttgaagttct

SEQ ID NO: 58492 - DNA, 20 bp, Artificial Sequence
  Synthetic oligonucleotide; TGGGGT chr11 5249485 5249504 5249501 +
cttgccatgtgccttgactt

SEQ ID NO: 58493 - DNA, 20 bp, Artificial Sequence
  Synthetic oligonucleotide; CTGGGT chr11 5249543 5249562 5249559 +
ccaaagctgtcaaagaacct

SEQ ID NO: 58494 - DNA, 20 bp, Artificial Sequence
  Synthetic oligonucleotide; ATGGGT chr11 5249551 5249570 5249567 +
gtcaaagaacctctgggtcc

SEQ ID NO: 58495 - DNA, 20 bp, Artificial Sequence
  Synthetic oligonucleotide; CAGGGT chr11 5249649 5249668 5249665 +
acctggacttttgccaggca

SEQ ID NO: 58496 - DNA, 20 bp, Artificial Sequence
  Synthetic oligonucleotide; CAGGGT chr11 5249698 5249717 5249714 +
gtcaccagagcctaccttcc

SEQ ID NO: 58497 - DNA, 20 bp, Artificial Sequence
  Synthetic oligonucleotide; GCGAGT chr11 5249830 5249849 5249846 +
taacctcagacgttccagaa

SEQ ID NO: 58498 - DNA, 20 bp, Artificial Sequence
  Synthetic oligonucleotide; AAGGGT chr11 5249850 5249869 5249866 +
gcgagtgtgtggaactgctg

SEQ ID NO: 58499 - DNA, 20 bp, Artificial Sequence
  Synthetic oligonucleotide; CTGGAT chr11 5249904 5249923 5249920 +
gccgccggcccctggcctca

SEQ ID NO: 58500 - DNA, 20 bp, Artificial Sequence
  Synthetic oligonucleotide; ATGGGT chr11 5249975 5249994 5249991 +
aaggcaaggctggccaaccc

SEQ ID NO: 58501 - DNA, 20 bp, Artificial Sequence
  Synthetic oligonucleotide; TGGAGT chr11 5249980 5249999 5249996 +
aaggctggccaacccatggg

SEQ ID NO: 58502 - DNA, 20 bp, Artificial Sequence
  Synthetic oligonucleotide; GAGGAT chr11 5250048 5250067 5250064 +
tgtggggaaggggcccccaa

SEQ ID NO: 58503 - DNA, 20 bp, Artificial Sequence
  Synthetic oligonucleotide; GAGGAT chr11 5250155 5250174 5250171 +
agtttccttctcccatcata

SEQ ID NO: 58504 - DNA, 20 bp, Artificial Sequence
  Synthetic oligonucleotide; AGGGAT chr11 5250261 5250280 5250277 +
taccaatttttgaaaagttc

SEQ ID NO: 58505 - DNA, 20 bp, Artificial Sequence
  Synthetic oligonucleotide; CAGGAT chr11 5250293 5250312 5250309 +
atgtgttttaggcataggtc

SEQ ID NO: 58506 - DNA, 20 bp, Artificial Sequence
  Synthetic oligonucleotide; TTGAAT chr11 5250369 5250388 5250385 +
aaaaagtgctatacttcttt

SEQ ID NO: 58507 - DNA, 20 bp, Artificial Sequence
  Synthetic oligonucleotide; CTGGAT chr11 5250617 5250636 5250633 +
cagatgatgtgtatttacca

SEQ ID NO: 58508 - DNA, 20 bp, Artificial Sequence
  Synthetic oligonucleotide; CAGGGT chr11 5250647 5250666 5250663 +
gtgtgtgctggctgatgacc

SEQ ID NO: 58509 - DNA, 20 bp, Artificial Sequence
  Synthetic oligonucleotide; TAGAAT chr11 5250690 5250709 5250706 +
atgctcagtaaagatgatgg

SEQ ID NO: 58510 - DNA, 20 bp, Artificial Sequence
  Synthetic oligonucleotide; GTGGAT chr11 5250713 5250732 5250729 +
aatgttctttggcaggtact

SEQ ID NO: 58511 - DNA, 20 bp, Artificial Sequence
  Synthetic oligonucleotide; TAGAAT chr11 5250719 5250738 5250735 +
ctttggcaggtactgtggat

SEQ ID NO: 58512 - DNA, 20 bp, Artificial Sequence
  Synthetic oligonucleotide; GGGAAT chr11 5250760 5250779 5250776 +
aatgctaggttcacttctca

SEQ ID NO: 58513 - DNA, 20 bp, Artificial Sequence
  Synthetic oligonucleotide; AAGGGT chr11 5250819 5250838 5250835 +
gaaaacaactctaaagaggc

SEQ ID NO: 58514 - DNA, 20 bp, Artificial Sequence
  Synthetic oligonucleotide; TCGAAT chr11 5250862 5250881 5250878 +
agtccacacactattataac

SEQ ID NO: 58515 - DNA, 20 bp, Artificial Sequence
  Synthetic oligonucleotide; CAGGGT chr11 5250932 5250951 5250948 +
ctgacatattggaccattaa

SEQ ID NO: 58516 - DNA, 20 bp, Artificial Sequence
  Synthetic oligonucleotide; TGGAAT chr11 5251054 5251073 5251070 +
gattataatgccagaagctc

SEQ ID NO: 58517 - DNA, 20 bp, Artificial Sequence
  Synthetic oligonucleotide; GCGAAT chr11 5251525 5251544 5251541 +
aaaggacaaagaaagaaagt

SEQ ID NO: 58518 - DNA, 20 bp, Artificial Sequence
  Synthetic oligonucleotide; GTGAGT chr11 5251543 5251562 5251559 +
gtgcgaattgtgaaatggta

SEQ ID NO: 58519 - DNA, 20 bp, Artificial Sequence
  Synthetic oligonucleotide; GTGGGT chr11 5251562 5251581 5251578 +
agtgagtgatggcatttgaa

SEQ ID NO: 58520 - DNA, 20 bp, Artificial Sequence
  Synthetic oligonucleotide; TAGAAT chr11 5251749 5251768 5251765 +
aaagtacgttgaagaaaaaa

SEQ ID NO: 58521 - DNA, 20 bp, Artificial Sequence
  Synthetic oligonucleotide; GAGAGT chr11 5251803 5251822 5251819 +
actatttgcatcttacagat

SEQ ID NO: 58522 - DNA, 20 bp, Artificial Sequence
  Synthetic oligonucleotide; TAGAGT chr11 5251811 5251830 5251827 +
catcttacagatgagagtag

SEQ ID NO: 58523 - DNA, 20 bp, Artificial Sequence
  Synthetic oligonucleotide; CTGGGT chr11 5251967 5251986 5251983 +
ctataacaaaatagcataga

SEQ ID NO: 58524 - DNA, 20 bp, Artificial Sequence
  Synthetic oligonucleotide; CAGGAT chr11 5251984 5252003 5252000 +
agactgggtgacttcaacaa

SEQ ID NO: 58525 - DNA, 20 bp, Artificial Sequence
  Synthetic oligonucleotide; CTGGGT chr11 5252032 5252051 5252048 +
tcctggtcagggctctcttc

SEQ ID NO: 58526 - DNA, 20 bp, Artificial Sequence
  Synthetic oligonucleotide; GGGGAT chr11 5252128 5252147 5252144 +
gaggaaaataattctatgat

SEQ ID NO: 58527 - DNA, 20 bp, Artificial Sequence
  Synthetic oligonucleotide; GGGAGT chr11 5252200 5252219 5252216 +
ccccacaaatggagccaatt

SEQ ID NO: 58528 - DNA, 20 bp, Artificial Sequence
  Synthetic oligonucleotide; GGGGAT chr11 5252207 5252226 5252223 +
aatggagccaattgggagtt

SEQ ID NO: 58529 - DNA, 20 bp, Artificial Sequence
  Synthetic oligonucleotide; GTGAAT chr11 5252220 5252239 5252236 +
gggagttggggattcagcat

SEQ ID NO: 58530 - DNA, 20 bp, Artificial Sequence
  Synthetic oligonucleotide; GTGAAT chr11 5252323 5252342 5252339 +
tcaattatataagaactcca

SEQ ID NO: 58531 - DNA, 20 bp, Artificial Sequence
  Synthetic oligonucleotide; AAGGGT chr11 5252526 5252545 5252542 +
tgtgaccagtctgtagactt

SEQ ID NO: 58532 - DNA, 20 bp, Artificial Sequence
  Synthetic oligonucleotide; TGGGAT chr11 5252533 5252552 5252549 +
agtctgtagacttaagggta

SEQ ID NO: 58533 - DNA, 20 bp, Artificial Sequence
  Synthetic oligonucleotide; AAGGAT chr11 5252597 5252616 5252613 +
gaaaagttccttagtaaagt

SEQ ID NO: 58534 - DNA, 20 bp, Artificial Sequence
  Synthetic oligonucleotide; TAGAAT chr11 5252737 5252756 5252753 +
tagtattgcccctaataaaa

SEQ ID NO: 58535 - DNA, 20 bp, Artificial Sequence
  Synthetic oligonucleotide; GGGGGT chr11 5252835 5252854 5252851 +
ctgtgctgcaatccagggaa

SEQ ID NO: 58536 - DNA, 20 bp, Artificial Sequence
  Synthetic oligonucleotide; AGGAGT chr11 5252893 5252912 5252909 +
ttccaaaacatctgtttctg

SEQ ID NO: 58537 - DNA, 20 bp, Artificial Sequence
  Synthetic oligonucleotide; TGGAGT chr11 5253043 5253062 5253059 +
ctaacgtaaacaaaaaagtg

SEQ ID NO: 58538 - DNA, 20 bp, Artificial Sequence
  Synthetic oligonucleotide; CAGAAT chr11 5253183 5253202 5253199 +
aaccatgtgtgatctcttag

SEQ ID NO: 58539 - DNA, 20 bp, Artificial Sequence
  Synthetic oligonucleotide; CAGAAT chr11 5253211 5253230 5253227 +
atttattatttgattgcttg

SEQ ID NO: 58540 - DNA, 20 bp, Artificial Sequence
  Synthetic oligonucleotide; AGGGGT chr11 5253326 5253345 5253342 +
tgccaggaagcctgcacctc

SEQ ID NO: 58541 - DNA, 20 bp, Artificial Sequence
  Synthetic oligonucleotide; GTGAAT chr11 5253330 5253349 5253346 +
aggaagcctgcacctcaggg

SEQ ID NO: 58542 - DNA, 20 bp, Artificial Sequence
  Synthetic oligonucleotide; ATGGAT chr11 5253347 5253366 5253363 +
ggggtgaattctttgccgaa

SEQ ID NO: 58543 - DNA, 20 bp, Artificial Sequence
  Synthetic oligonucleotide; CAGAAT chr11 5253478 5253497 5253494 +
ctacacaccaagcttccacc

SEQ ID NO: 58544 - DNA, 20 bp, Artificial Sequence
  Synthetic oligonucleotide; TGGAAT chr11 5253776 5253795 5253792 +
ggacatactttgcccccatc

SEQ ID NO: 58545 - DNA, 20 bp, Artificial Sequence
  Synthetic oligonucleotide; AAGGAT chr11 5253784 5253803 5253800 +
tttgcccccatctggaatta

SEQ ID NO: 58546 - DNA, 20 bp, Artificial Sequence
  Synthetic oligonucleotide; AGGAAT chr11 5253841 5253860 5253857 +
tatatgtgtccagctgatat

SEQ ID NO: 58547 - DNA, 20 bp, Artificial Sequence
  Synthetic oligonucleotide; ACGAAT chr11 5253966 5253985 5253982 +
ctccagatagatgttttaaa

SEQ ID NO: 58548 - DNA, 20 bp, Artificial Sequence
  Synthetic oligonucleotide; CTGGGT chr11 5254118 5254137 5254134 +
taggccctaaaacattgcca

SEQ ID NO: 58549 - DNA, 20 bp, Artificial Sequence
  Synthetic oligonucleotide; CAGGAT chr11 5254283 5254302 5254299 +
tggactcaccttgaagttct

SEQ ID NO: 58550 - DNA, 20 bp, Artificial Sequence
  Synthetic oligonucleotide; TGGGGT chr11 5254409 5254428 5254425 +
cttgccatgtgccttgactt

SEQ ID NO: 58551 - DNA, 20 bp, Artificial Sequence
  Synthetic oligonucleotide; CTGGGT chr11 5254467 5254486 5254483 +
ccaaagctgtcaaagaacct

SEQ ID NO: 58552 - DNA, 20 bp, Artificial Sequence
  Synthetic oligonucleotide; ATGGGT chr11 5254475 5254494 5254491 +
gtcaaagaacctctgggtcc

SEQ ID NO: 58553 - DNA, 20 bp, Artificial Sequence
  Synthetic oligonucleotide; CAGGGT chr11 5254573 5254592 5254589 +
acctggacttttgccaggca

SEQ ID NO: 58554 - DNA, 20 bp, Artificial Sequence
  Synthetic oligonucleotide; CAGGGT chr11 5254622 5254641 5254638 +
gtcaccagagcctaccttcc

SEQ ID NO: 58555 - DNA, 20 bp, Artificial Sequence
  Synthetic oligonucleotide; GCGAGT chr11 5254754 5254773 5254770 +
taacctcagacgttccagaa

SEQ ID NO: 58556 - DNA, 20 bp, Artificial Sequence
  Synthetic oligonucleotide; AAGGGT chr11 5254774 5254793 5254790 +
gcgagtgtgtggaactgctg

SEQ ID NO: 58557 - DNA, 20 bp, Artificial Sequence
  Synthetic oligonucleotide; CTGGAT chr11 5254828 5254847 5254844 +
gccgccggcccctggcctca

SEQ ID NO: 58558 - DNA, 20 bp, Artificial Sequence
  Synthetic oligonucleotide; ATGGGT chr11 5254899 5254918 5254915 +
aaggcaaggctggccaaccc

SEQ ID NO: 58559 - DNA, 20 bp, Artificial Sequence
  Synthetic oligonucleotide; TGGAGT chr11 5254904 5254923 5254920 +
aaggctggccaacccatggg

SEQ ID NO: 58560 - DNA, 20 bp, Artificial Sequence
  Synthetic oligonucleotide; GAGGAT chr11 5254972 5254991 5254988 +
tgtggggaaggggcccccaa

SEQ ID NO: 58561 - DNA, 20 bp, Artificial Sequence
  Synthetic oligonucleotide; AGGGAT chr11 5255189 5255208 5255205 +
taccaatttttgaaaagttc

SEQ ID NO: 58562 - DNA, 20 bp, Artificial Sequence
  Synthetic oligonucleotide; CAGGAT chr11 5255221 5255240 5255237 +
atgtgttttaggcataggtc

SEQ ID NO: 58563 - DNA, 20 bp, Artificial Sequence
  Synthetic oligonucleotide; TTGAAT chr11 5255297 5255316 5255313 +
aagaagtgctatacttatct

SEQ ID NO: 58564 - DNA, 20 bp, Artificial Sequence
  Synthetic oligonucleotide; AGGAAT chr11 5255385 5255404 5255401 +
taaagcaacagtttcagtgc

SEQ ID NO: 58565 - DNA, 20 bp, Artificial Sequence
  Synthetic oligonucleotide; CTGAAT chr11 5255420 5255439 5255436 +
ttatgtaatataatataaga

SEQ ID NO: 58566 - DNA, 20 bp, Artificial Sequence
  Synthetic oligonucleotide; CTGGAT chr11 5255548 5255567 5255564 +
ccgatgatgtgtatttatca

SEQ ID NO: 58567 - DNA, 20 bp, Artificial Sequence
  Synthetic oligonucleotide; CAGGGT chr11 5255578 5255597 5255594 +
gtatgtgctggctgatgacc

SEQ ID NO: 58568 - DNA, 20 bp, Artificial Sequence
  Synthetic oligonucleotide; TAGAAT chr11 5255621 5255640 5255637 +
atgctcggtaaagatgatgg

SEQ ID NO: 58569 - DNA, 20 bp, Artificial Sequence
  Synthetic oligonucleotide; ATGGAT chr11 5255644 5255663 5255660 +
aatgctctttaccagatact

SEQ ID NO: 58570 - DNA, 20 bp, Artificial Sequence
  Synthetic oligonucleotide; TAGAAT chr11 5255650 5255669 5255666 +
ctttaccagatactatggat

SEQ ID NO: 58571 - DNA, 20 bp, Artificial Sequence
  Synthetic oligonucleotide; GGGAAT chr11 5255691 5255710 5255707 +
aatgctaggttcacttctta

SEQ ID NO: 58572 - DNA, 20 bp, Artificial Sequence
  Synthetic oligonucleotide; TGGGAT chr11 5255792 5255811 5255808 +
agtccacacactgtgacagc

SEQ ID NO: 58573 - DNA, 20 bp, Artificial Sequence
  Synthetic oligonucleotide; TGGGAT chr11 5255906 5255925 5255922 +
ttttttctttattttttctt

SEQ ID NO: 58574 - DNA, 20 bp, Artificial Sequence
  Synthetic oligonucleotide; AGGAAT chr11 5256054 5256073 5256070 +
ccctaacctatcaggttgat

SEQ ID NO: 58575 - DNA, 20 bp, Artificial Sequence
  Synthetic oligonucleotide; TGGAAT chr11 5256074 5256093 5256090 +
aggaattataataatattgg

SEQ ID NO: 58576 - DNA, 20 bp, Artificial Sequence
  Synthetic oligonucleotide; TTGAAT chr11 5256218 5256237 5256234 +
tttggaagttaaaataaaag

SEQ ID NO: 58577 - DNA, 20 bp, Artificial Sequence
  Synthetic oligonucleotide; AAGGAT chr11 5256304 5256323 5256320 +
taagtgacttctctcaatct

SEQ ID NO: 58578 - DNA, 20 bp, Artificial Sequence
  Synthetic oligonucleotide; ATGGGT chr11 5256308 5256327 5256324 +
tgacttctctcaatctaagg

SEQ ID NO: 58579 - DNA, 20 bp, Artificial Sequence
  Synthetic oligonucleotide; TAGGGT chr11 5256372 5256391 5256388 +
agactgaggtgaacccaaat

SEQ ID NO: 58580 - DNA, 20 bp, Artificial Sequence
  Synthetic oligonucleotide; GGGGAT chr11 5256390 5256409 5256406 +
attagggtctctttaagata

SEQ ID NO: 58581 - DNA, 20 bp, Artificial Sequence
  Synthetic oligonucleotide; ATGGGT chr11 5256403 5256422 5256419 +
taagataggggatctgtgag

SEQ ID NO: 58582 - DNA, 20 bp, Artificial Sequence
  Synthetic oligonucleotide; GAGAGT chr11 5256433 5256452 5256449 +
atagatctttggccatatct

SEQ ID NO: 58583 - DNA, 20 bp, Artificial Sequence
  Synthetic oligonucleotide; TTGGGT chr11 5256443 5256462 5256459 +
ggccatatctgagagtctgg

SEQ ID NO: 58584 - DNA, 20 bp, Artificial Sequence
  Synthetic oligonucleotide; AAGAAT chr11 5256472 5256491 5256488 +
atttgtagagcctgaccttt

SEQ ID NO: 58585 - DNA, 20 bp, Artificial Sequence
  Synthetic oligonucleotide; GTGAAT chr11 5256519 5256538 5256535 +
gcccgctaaggcctaaacaa

SEQ ID NO: 58586 - DNA, 20 bp, Artificial Sequence
  Synthetic oligonucleotide; TTGAAT chr11 5256528 5256547 5256544 +
ggcctaaacaagtgaatctt

SEQ ID NO: 58587 - DNA, 20 bp, Artificial Sequence
  Synthetic oligonucleotide; CAGAGT chr11 5256555 5256574 5256571 +
tctcttttttttttttgaga

SEQ ID NO: 58588 - DNA, 20 bp, Artificial Sequence
  Synthetic oligonucleotide; TGGAGT chr11 5256580 5256599 5256596 +
tcttgttctgtcacccaggc

SEQ ID NO: 58589 - DNA, 20 bp, Artificial Sequence
  Synthetic oligonucleotide; TGGGAT chr11 5256665 5256684 5256681 +
tcctcagcctcccaagtagc

SEQ ID NO: 58590 - DNA, 20 bp, Artificial Sequence
  Synthetic oligonucleotide; TGGGAT chr11 5256720 5256739 5256736 +
tttttgtatttttgtagaga

SEQ ID NO: 58591 - DNA, 20 bp, Artificial Sequence
  Synthetic oligonucleotide; TGGGAT chr11 5256799 5256818 5256815 +
gccttggcctcccaaaattc

SEQ ID NO: 58592 - DNA, 20 bp, Artificial Sequence
  Synthetic oligonucleotide; GTGAAT chr11 5256841 5256860 5256857 +
cactcccagcctctaaacaa

SEQ ID NO: 58593 - DNA, 20 bp, Artificial Sequence
  Synthetic oligonucleotide; AGGAAT chr11 5256870 5256889 5256886 +
aattgctcctcctcagacta

SEQ ID NO: 58594 - DNA, 20 bp, Artificial Sequence
  Synthetic oligonucleotide; TAGGAT chr11 5256879 5256898 5256895 +
tcctcagactaaggaatatc

SEQ ID NO: 58595 - DNA, 20 bp, Artificial Sequence
  Synthetic oligonucleotide; AAGAGT chr11 5256993 5257012 5257009 +
cttttgaggcaatatctttt

SEQ ID NO: 58596 - DNA, 20 bp, Artificial Sequence
  Synthetic oligonucleotide; GAGAAT chr11 5257224 5257243 5257240 +
catttaagttaaataagtca

SEQ ID NO: 58597 - DNA, 20 bp, Artificial Sequence
  Synthetic oligonucleotide; AAGAAT chr11 5257322 5257341 5257338 +
aatttcagatattattaact

SEQ ID NO: 58598 - DNA, 20 bp, Artificial Sequence
  Synthetic oligonucleotide; AGGAAT chr11 5257370 5257389 5257386 +
aacagaggcaaaatgacaga

SEQ ID NO: 58599 - DNA, 20 bp, Artificial Sequence
  Synthetic oligonucleotide; GAGAGT chr11 5257469 5257488 5257485 +
aacaaactcctgctgtgcca

SEQ ID NO: 58600 - DNA, 20 bp, Artificial Sequence
  Synthetic oligonucleotide; GAGAAT chr11 5257510 5257529 5257526 +
tgccgttgatatgtaaagtg

SEQ ID NO: 58601 - DNA, 20 bp, Artificial Sequence
  Synthetic oligonucleotide; GGGAGT chr11 5257577 5257596 5257593 +
taaacttgtcctcagtggta

SEQ ID NO: 58602 - DNA, 20 bp, Artificial Sequence
  Synthetic oligonucleotide; TAGAAT chr11 5257595 5257614 5257611 +
tagggagtgagaagccatta

SEQ ID NO: 58603 - DNA, 20 bp, Artificial Sequence
  Synthetic oligonucleotide; CTGGAT chr11 5257647 5257666 5257663 +
taagcaacctgtactattgg

SEQ ID NO: 58604 - DNA, 20 bp, Artificial Sequence
  Synthetic oligonucleotide; AAGAAT chr11 5257662 5257681 5257678 +
attggctggattactattct

SEQ ID NO: 58605 - DNA, 20 bp, Artificial Sequence
  Synthetic oligonucleotide; ATGAAT chr11 5257790 5257809 5257806 +
tgtgtgtgtgtgtattcatt

SEQ ID NO: 58606 - DNA, 20 bp, Artificial Sequence
  Synthetic oligonucleotide; TTGAAT chr11 5257816 5257835 5257832 +
ttgctttcaattaagttatc

SEQ ID NO: 58607 - DNA, 20 bp, Artificial Sequence
  Synthetic oligonucleotide; AGGGGT chr11 5257854 5257873 5257870 +
aatctagatatagctcccta

SEQ ID NO: 58608 - DNA, 20 bp, Artificial Sequence
  Synthetic oligonucleotide; AAGAGT chr11 5257861 5257880 5257877 +
atatagctccctaaggggta

SEQ ID NO: 58609 - DNA, 20 bp, Artificial Sequence
  Synthetic oligonucleotide; GAGGGT chr11 5257999 5258018 5258015 +
tgcatattaccgacaaatta

SEQ ID NO: 58610 - DNA, 20 bp, Artificial Sequence
  Synthetic oligonucleotide; TCGGAT chr11 5258047 5258066 5258063 +
aagtacattgcagctcccac

SEQ ID NO: 58611 - DNA, 20 bp, Artificial Sequence
  Synthetic oligonucleotide; AGGAAT chr11 5258082 5258101 5258098 +
agcatgtgaagtctcccatc

SEQ ID NO: 58612 - DNA, 20 bp, Artificial Sequence
  Synthetic oligonucleotide; GTGAGT chr11 5258198 5258217 5258214 +
cgggaaacaccccaaatatt

SEQ ID NO: 58613 - DNA, 20 bp, Artificial Sequence
  Synthetic oligonucleotide; CTGAGT chr11 5258313 5258332 5258329 +
gattctgaccttacctggag

SEQ ID NO: 58614 - DNA, 20 bp, Artificial Sequence
  Synthetic oligonucleotide; AGGGGT chr11 5258344 5258363 5258360 +
tagagggccaagcaaaatac

SEQ ID NO: 58615 - DNA, 20 bp, Artificial Sequence
  Synthetic oligonucleotide; CTGGGT chr11 5258383 5258402 5258399 +
ggaaaagccctgtgggctct

SEQ ID NO: 58616 - DNA, 20 bp, Artificial Sequence
  Synthetic oligonucleotide; AGGGGT chr11 5258420 5258439 5258436 +
ccatttctgccttgcctcac

SEQ ID NO: 58617 - DNA, 20 bp, Artificial Sequence
  Synthetic oligonucleotide; GGGGGT chr11 5258513 5258532 5258529 +
atctaggggctgggcagtgg

SEQ ID NO: 58618 - DNA, 20 bp, Artificial Sequence
  Synthetic oligonucleotide; ATGAAT chr11 5258531 5258550 5258547 +
gggggggttggtggggggac

SEQ ID NO: 58619 - DNA, 20 bp, Artificial Sequence
  Synthetic oligonucleotide; GAGGGT chr11 5258663 5258682 5258679 +
gattcggtgctgttgcgggg

SEQ ID NO: 58620 - DNA, 20 bp, Artificial Sequence
  Synthetic oligonucleotide; TTGAGT chr11 5258694 5258713 5258710 +
ctggaagtgagaccaacctt

SEQ ID NO: 58621 - DNA, 20 bp, Artificial Sequence
  Synthetic oligonucleotide; GGGAGT chr11 5258958 5258977 5258974 +
gacaaagggcatatattctt

SEQ ID NO: 58622 - DNA, 20 bp, Artificial Sequence
  Synthetic oligonucleotide; TAGGGT chr11 5258966 5258985 5258982 +
gcatatattcttgggagttc

SEQ ID NO: 58623 - DNA, 20 bp, Artificial Sequence
  Synthetic oligonucleotide; CAGAGT chr11 5259099 5259118 5259115 +
accaaaagtaaggaccctca

SEQ ID NO: 58624 - DNA, 20 bp, Artificial Sequence
  Synthetic oligonucleotide; TGGAGT chr11 5259216 5259235 5259232 +
gacaaaccccagtaccagcc

SEQ ID NO: 58625 - DNA, 20 bp, Artificial Sequence
  Synthetic oligonucleotide; ATGGGT chr11 5259234 5259253 5259250 +
cctggagtctggtagacctg

SEQ ID NO: 58626 - DNA, 20 bp, Artificial Sequence
  Synthetic oligonucleotide; ATGGAT chr11 5259683 5259702 5259699 +
attcaaaacttcaggaaaca

SEQ ID NO: 58627 - DNA, 20 bp, Artificial Sequence
  Synthetic oligonucleotide; ATGAAT chr11 5259687 5259706 5259703 +
aaaacttcaggaaacaatgg

SEQ ID NO: 58628 - DNA, 20 bp, Artificial Sequence
  Synthetic oligonucleotide; ATGGAT chr11 5259691 5259710 5259707 +
cttcaggaaacaatggatga

SEQ ID NO: 58629 - DNA, 20 bp, Artificial Sequence
  Synthetic oligonucleotide; TAGAAT chr11 5259738 5259757 5259754 +
gctctagaaagtctcagcaa

SEQ ID NO: 58630 - DNA, 20 bp, Artificial Sequence
  Synthetic oligonucleotide; TTGAAT chr11 5259781 5259800 5259797 +
agagcttgaagacaaagttt

SEQ ID NO: 58631 - DNA, 20 bp, Artificial Sequence
  Synthetic oligonucleotide; AAGAAT chr11 5259815 5259834 5259831 +
tccaacaaagacaaagaaaa

SEQ ID NO: 58632 - DNA, 20 bp, Artificial Sequence
  Synthetic oligonucleotide; TGGGAT chr11 5259852 5259871 5259868 +
aacaaagcctccaagaaatc

SEQ ID NO: 58633 - DNA, 20 bp, Artificial Sequence
  Synthetic oligonucleotide; AAGAAT chr11 5259878 5259897 5259894 +
tatgttaaacaatcaaacct

SEQ ID NO: 58634 - DNA, 20 bp, Artificial Sequence
  Synthetic oligonucleotide; CAGAGT chr11 5260058 5260077 5260074 +
ttgcctaggtacattgtcat

SEQ ID NO: 58635 - DNA, 20 bp, Artificial Sequence
  Synthetic oligonucleotide; GAGAAT chr11 5260087 5260106 5260103 +
caaagttatctaaagacaaa

SEQ ID NO: 58636 - DNA, 20 bp, Artificial Sequence
  Synthetic oligonucleotide; GTGAAT chr11 5260188 5260207 5260204 +
agaaaccgtaaaagctagaa

SEQ ID NO: 58637 - DNA, 20 bp, Artificial Sequence
  Synthetic oligonucleotide; AAGAAT chr11 5260237 5260256 5260253 +
aaacaaaacaattatcagcc

SEQ ID NO: 58638 - DNA, 20 bp, Artificial Sequence
  Synthetic oligonucleotide; GAGAAT chr11 5260314 5260333 5260330 +
ttcagaaaaacaaatgctga

SEQ ID NO: 58639 - DNA, 20 bp, Artificial Sequence
  Synthetic oligonucleotide; AAGAAT chr11 5260483 5260502 5260499 +
cacaggcaacaaataccacg

SEQ ID NO: 58640 - DNA, 20 bp, Artificial Sequence
  Synthetic oligonucleotide; TGGAAT chr11 5260488 5260507 5260504 +
gcaacaaataccacgaagaa

SEQ ID NO: 58641 - DNA, 20 bp, Artificial Sequence
  Synthetic oligonucleotide; TTGAAT chr11 5260519 5260538 5260535 +
ctcacacctcaatactgatg

SEQ ID NO: 58642 - DNA, 20 bp, Artificial Sequence
  Synthetic oligonucleotide; CAGAAT chr11 5260557 5260576 5260573 +
aatgctccacttaaaagata

SEQ ID NO: 58643 - DNA, 20 bp, Artificial Sequence
  Synthetic oligonucleotide; CAGAAT chr11 5260565 5260584 5260581 +
acttaaaagatacagaattg

SEQ ID NO: 58644 - DNA, 20 bp, Artificial Sequence
  Synthetic oligonucleotide; ATGAAT chr11 5260569 5260588 5260585 +
aaaagatacagaattgcaga

SEQ ID NO: 58645 - DNA, 20 bp, Artificial Sequence
  Synthetic oligonucleotide; AAGAAT chr11 5260575 5260594 5260591 +
tacagaattgcagaatgaat

SEQ ID NO: 58646 - DNA, 20 bp, Artificial Sequence
  Synthetic oligonucleotide; AGGGGT chr11 5260652 5260671 5260668 +
ctcacataaacttaaggtaa

SEQ ID NO: 58647 - DNA, 20 bp, Artificial Sequence
  Synthetic oligonucleotide; GAGAAT chr11 5260801 5260820 5260817 +
taaaagcccttgtccaatgg

SEQ ID NO: 58648 - DNA, 20 bp, Artificial Sequence
  Synthetic oligonucleotide; ATGGAT chr11 5260961 5260980 5260977 +
agacagtctacaaagaaaca

SEQ ID NO: 58649 - DNA, 20 bp, Artificial Sequence
  Synthetic oligonucleotide; CAGAAT chr11 5261021 5261040 5261037 +
gacattctacccaacaactg

SEQ ID NO: 58650 - DNA, 20 bp, Artificial Sequence
  Synthetic oligonucleotide; TAGAAT chr11 5261148 5261167 5261164 +
agcactctctcagaccacag

SEQ ID NO: 58651 - DNA, 20 bp, Artificial Sequence
  Synthetic oligonucleotide; CTGAAT chr11 5261224 5261243 5261240 +
ggaaattaaataacctgctc

SEQ ID NO: 58652 - DNA, 20 bp, Artificial Sequence
  Synthetic oligonucleotide; TTGGGT chr11 5261235 5261254 5261251 +
aacctgctcctgaatgatca

SEQ ID NO: 58653 - DNA, 20 bp, Artificial Sequence
  Synthetic oligonucleotide; AAGGAT chr11 5261300 5261319 5261316 +
tttgaaaaccggcacaagac

SEQ ID NO: 58654 - DNA, 20 bp, Artificial Sequence
  Synthetic oligonucleotide; ATGGGT chr11 5261579 5261598 5261595 +
gacaagcagagagccaaatc

SEQ ID NO: 58655 - DNA, 20 bp, Artificial Sequence
  Synthetic oligonucleotide; GAGAAT chr11 5261611 5261630 5261627 +
ccattcacaattgctgcaaa

SEQ ID NO: 58656 - DNA, 20 bp, Artificial Sequence
  Synthetic oligonucleotide; AGGGAT chr11 5261647 5261666 5261663 +
acctagaaatacaacttcta

SEQ ID NO: 58657 - DNA, 20 bp, Artificial Sequence
  Synthetic oligonucleotide; AAGAAT chr11 5261752 5261771 5261768 +
attccatgctcatagataga

SEQ ID NO: 58658 - DNA, 20 bp, Artificial Sequence
  Synthetic oligonucleotide; AAGAAT chr11 5261841 5261860 5261857 +
gctaccactgacttttttca

SEQ ID NO: 58659 - DNA, 20 bp, Artificial Sequence
  Synthetic oligonucleotide; TGGAAT chr11 5261873 5261892 5261889 +
aaactactttaaatgtcata

SEQ ID NO: 58660 - DNA, 20 bp, Artificial Sequence
  Synthetic oligonucleotide; AAGAAT chr11 5262106 5262125 5262122 +
catcacaaaagcaatggaga

SEQ ID NO: 58661 - DNA, 20 bp, Artificial Sequence
  Synthetic oligonucleotide; GTGGAT chr11 5262210 5262229 5262226 +
tatacaaaaattaactcaag

SEQ ID NO: 58662 - DNA, 20 bp, Artificial Sequence
  Synthetic oligonucleotide; TGGGAT chr11 5262354 5262373 5262370 +
caaaggccaaaattgacata

SEQ ID NO: 58663 - DNA, 20 bp, Artificial Sequence
  Synthetic oligonucleotide; CAGAGT chr11 5262402 5262421 5262418 +
gcacagcaaaagactatcat

SEQ ID NO: 58664 - DNA, 20 bp, Artificial Sequence
  Synthetic oligonucleotide; CAGAAT chr11 5262422 5262441 5262438 +
cagagtgaacaggcaaccta

SEQ ID NO: 58665 - DNA, 20 bp, Artificial Sequence
  Synthetic oligonucleotide; AAGGAT chr11 5262541 5262560 5262557 +
accccatcaaaaagtggaca

SEQ ID NO: 58666 - DNA, 20 bp, Artificial Sequence
  Synthetic oligonucleotide; TAGAAT chr11 5262672 5262691 5262688 +
agataccatctcatgccagt

SEQ ID NO: 58667 - DNA, 20 bp, Artificial Sequence
  Synthetic oligonucleotide; GAGGAT chr11 5262716 5262735 5262732 +
aggaaacaaaaggtgctgga

SEQ ID NO: 58668 - DNA, 20 bp, Artificial Sequence
  Synthetic oligonucleotide; AAGAAT chr11 5262726 5262745 5262742 +
aggtgctggagaggatgtgg

SEQ ID NO: 58669 - DNA, 20 bp, Artificial Sequence
  Synthetic oligonucleotide; ATGGGT chr11 5262753 5262772 5262769 +
ggaaaaattttacactgttg

SEQ ID NO: 58670 - DNA, 20 bp, Artificial Sequence
  Synthetic oligonucleotide; AAGGAT chr11 5262805 5262824 5262821 +
agacagtgtggcgattcctc

SEQ ID NO: 58671 - DNA, 20 bp, Artificial Sequence
  Synthetic oligonucleotide; CTGGGT chr11 5262850 5262869 5262866 +
ttgacccagcaatcccatta

SEQ ID NO: 58672 - DNA, 20 bp, Artificial Sequence
  Synthetic oligonucleotide; AAGAAT chr11 5262865 5262884 5262881 +
cattactgggtatataccca

SEQ ID NO: 58673 - DNA, 20 bp, Artificial Sequence
  Synthetic oligonucleotide; ATGGAT chr11 5262975 5262994 5262991 +
aaatggccatcagcgatata

SEQ ID NO: 58674 - DNA, 20 bp, Artificial Sequence
  Synthetic oligonucleotide; TGGAAT chr11 5263007 5263026 5263023 +
aatgtggcacatatacacca

SEQ ID NO: 58675 - DNA, 20 bp, Artificial Sequence
  Synthetic oligonucleotide; ATGAGT chr11 5263033 5263052 5263049 +
actatgcagccataaaaatg

SEQ ID NO: 58676 - DNA, 20 bp, Artificial Sequence
  Synthetic oligonucleotide; ATGGAT chr11 5263057 5263076 5263073 +
gttcatgtctttgcagggac

SEQ ID NO: 58677 - DNA, 20 bp, Artificial Sequence
  Synthetic oligonucleotide; GGGAGT chr11 5263140 5263159 5263156 +
acacgttctcactcataagt

SEQ ID NO: 58678 - DNA, 20 bp, Artificial Sequence
  Synthetic oligonucleotide; GGGGGT chr11 5263203 5263222 5263219 +
tcacacaccagggcctgtcg

SEQ ID NO: 58679 - DNA, 20 bp, Artificial Sequence
  Synthetic oligonucleotide; GGGGGT chr11 5263211 5263230 5263227 +
cagggcctgtcggggggtga

SEQ ID NO: 58680 - DNA, 20 bp, Artificial Sequence
  Synthetic oligonucleotide; AGGGAT chr11 5263223 5263242 5263239 +
gggggtgagggggttaggag

SEQ ID NO: 58681 - DNA, 20 bp, Artificial Sequence
  Synthetic oligonucleotide; ATGGGT chr11 5263266 5263285 5263282 +
ctaatgtagatgacaggttg

SEQ ID NO: 58682 - DNA, 20 bp, Artificial Sequence
  Synthetic oligonucleotide; TAGGAT chr11 5263412 5263431 5263428 +
acacaacctatcaaaacctc

SEQ ID NO: 58683 - DNA, 20 bp, Artificial Sequence
  Synthetic oligonucleotide; AAGAGT chr11 5263470 5263489 5263486 +
agccctaaatgtcgatgtca

SEQ ID NO: 58684 - DNA, 20 bp, Artificial Sequence
  Synthetic oligonucleotide; GGGAAT chr11 5263564 5263583 5263580 +
ccaaaacccagcaaaagaaa

SEQ ID NO: 58685 - DNA, 20 bp, Artificial Sequence
  Synthetic oligonucleotide; TCGAAT chr11 5263840 5263859 5263856 +
agaaaacctaaaggagacgt

SEQ ID NO: 58686 - DNA, 20 bp, Artificial Sequence
  Synthetic oligonucleotide; AAGAAT chr11 5263881 5263900 5263897 +
gggctctagcttaagtcagg

SEQ ID NO: 58687 - DNA, 20 bp, Artificial Sequence
  Synthetic oligonucleotide; CTGAAT chr11 5263983 5264002 5263999 +
aggaccagatagattcacag

SEQ ID NO: 58688 - DNA, 20 bp, Artificial Sequence
  Synthetic oligonucleotide; AAGAAT chr11 5264007 5264026 5264023 +
attctaccagacattcaaag

SEQ ID NO: 58689 - DNA, 20 bp, Artificial Sequence
  Synthetic oligonucleotide; GAGAAT chr11 5264056 5264075 5264072 +
ttctacaagatagagaaaga

SEQ ID NO: 58690 - DNA, 20 bp, Artificial Sequence
  Synthetic oligonucleotide; GTGGGT chr11 5264234 5264253 5264250 +
atatcaaaacccatgatcaa

SEQ ID NO: 58691 - DNA, 20 bp, Artificial Sequence
  Synthetic oligonucleotide; AGGGAT chr11 5264248 5264267 5264264 +
gatcaagtgggtttcatgcg

SEQ ID NO: 58692 - DNA, 20 bp, Artificial Sequence
  Synthetic oligonucleotide; ACGGAT chr11 5264256 5264275 5264272 +
gggtttcatgcgagggatgc

SEQ ID NO: 58693 - DNA, 20 bp, Artificial Sequence
  Synthetic oligonucleotide; GAGAAT chr11 5264305 5264324 5264321 +
agtgtgatacacaacataaa

SEQ ID NO: 58694 - DNA, 20 bp, Artificial Sequence
  Synthetic oligonucleotide; TTGAAT chr11 5264469 5264488 5264485 +
aacacacagccaacattata

SEQ ID NO: 58695 - DNA, 20 bp, Artificial Sequence
  Synthetic oligonucleotide; TGGAAT chr11 5264507 5264526 5264523 +
aaagcattctgtctgaaaac

SEQ ID NO: 58696 - DNA, 20 bp, Artificial Sequence
  Synthetic oligonucleotide; AAGGAT chr11 5264518 5264537 5264534 +
tctgaaaactggaatgagac

SEQ ID NO: 58697 - DNA, 20 bp, Artificial Sequence
  Synthetic oligonucleotide; CTGGAT chr11 5264727 5264746 5264743 +
aaaataattcagcaaagttt

SEQ ID NO: 58698 - DNA, 20 bp, Artificial Sequence
  Synthetic oligonucleotide; ATGAGT chr11 5264752 5264771 5264768 +
tacaaaattaacgtacacca

SEQ ID NO: 58699 - DNA, 20 bp, Artificial Sequence
  Synthetic oligonucleotide; GAGAAT chr11 5264789 5264808 5264805 +
ataccagcaatgaccaagct

SEQ ID NO: 58700 - DNA, 20 bp, Artificial Sequence
  Synthetic oligonucleotide; AGGAAT chr11 5264860 5264879 5264876 +
acaaaacaaaacaaaaactt

SEQ ID NO: 58701 - DNA, 20 bp, Artificial Sequence
  Synthetic oligonucleotide; ATGGGT chr11 5264974 5264993 5264990 +
aacacatgccattctcatag

SEQ ID NO: 58702 - DNA, 20 bp, Artificial Sequence
  Synthetic oligonucleotide; TAGAAT chr11 5264979 5264998 5264995 +
atgccattctcatagatggg

SEQ ID NO: 58703 - DNA, 20 bp, Artificial Sequence
  Synthetic oligonucleotide; CAGAAT chr11 5265252 5265271 5265268 +
aggcacatcgaccaatggaa

SEQ ID NO: 58704 - DNA, 20 bp, Artificial Sequence
  Synthetic oligonucleotide; GGGGAT chr11 5265361 5265380 5265377 +
ccctattcaacaaatggtgc

SEQ ID NO: 58705 - DNA, 20 bp, Artificial Sequence
  Synthetic oligonucleotide; GAGAAT chr11 5265387 5265406 5265403 +
agctggcaagctacatgtag

SEQ ID NO: 58706 - DNA, 20 bp, Artificial Sequence
  Synthetic oligonucleotide; CTGGAT chr11 5265397 5265416 5265413 +
ctacatgtaggagaatgaaa

SEQ ID NO: 58707 - DNA, 20 bp, Artificial Sequence
  Synthetic oligonucleotide; ATGGAT chr11 5265438 5265457 5265454 +
tatacaaaaatcaactcaag

SEQ ID NO: 58708 - DNA, 20 bp, Artificial Sequence
  Synthetic oligonucleotide; AAGGAT chr11 5265526 5265545 5265542 +
ttctacacattggcttagga

SEQ ID NO: 58709 - DNA, 20 bp, Artificial Sequence
  Synthetic oligonucleotide; AAGAGT chr11 5265622 5265641 5265638 +
agcttttgcatggcaaaagg

SEQ ID NO: 58710 - DNA, 20 bp, Artificial Sequence
  Synthetic oligonucleotide; CAGAAT chr11 5265631 5265650 5265647 +
atggcaaaaggaagagtctg

SEQ ID NO: 58711 - DNA, 20 bp, Artificial Sequence
  Synthetic oligonucleotide; CAGAGT chr11 5265651 5265670 5265667 +
cagaataaacagacaaccca

SEQ ID NO: 58712 - DNA, 20 bp, Artificial Sequence
  Synthetic oligonucleotide; AAGAAT chr11 5265691 5265710 5265707 +
acaatctatacatctgacaa

SEQ ID NO: 58713 - DNA, 20 bp, Artificial Sequence
  Synthetic oligonucleotide; GAGGAT chr11 5265946 5265965 5265962 +
aaaaaataacagatccttgt

SEQ ID NO: 58714 - DNA, 20 bp, Artificial Sequence
  Synthetic oligonucleotide; GGGAAT chr11 5265989 5266008 5266005 +
ctttcttacacactgttggt

SEQ ID NO: 58715 - DNA, 20 bp, Artificial Sequence
  Synthetic oligonucleotide; TGGGAT chr11 5266176 5266195 5266192 +
tattcacaatagttaaggtt

SEQ ID NO: 58716 - DNA, 20 bp, Artificial Sequence
  Synthetic oligonucleotide; ACGGAT chr11 5266208 5266227 5266224 +
aagtgtctatcaacagatga

SEQ ID NO: 58717 - DNA, 20 bp, Artificial Sequence
  Synthetic oligonucleotide; AAGAAT chr11 5266255 5266274 5266271 +
agtactattttgccatgaaa

SEQ ID NO: 58718 - DNA, 20 bp, Artificial Sequence
  Synthetic oligonucleotide; ATGGAT chr11 5266284 5266303 5266300 +
atcttgtcatttgtagcaac

SEQ ID NO: 58719 - DNA, 20 bp, Artificial Sequence
  Synthetic oligonucleotide; GTGGGT chr11 5266435 5266454 5266451 +
catctgtgggagctaaaaaa

SEQ ID NO: 58720 - DNA, 20 bp, Artificial Sequence
  Synthetic oligonucleotide; GAGAGT chr11 5266453 5266472 5266469 +
aagtgggtctcatggtggta

SEQ ID NO: 58721 - DNA, 20 bp, Artificial Sequence
  Synthetic oligonucleotide; TAGAAT chr11 5266458 5266477 5266474 +
ggtctcatggtggtagagag

SEQ ID NO: 58722 - DNA, 20 bp, Artificial Sequence
  Synthetic oligonucleotide; GTGAGT chr11 5266490 5266509 5266506 +
tatcagaggctggaaaaagt

SEQ ID NO: 58723 - DNA, 20 bp, Artificial Sequence
  Synthetic oligonucleotide; GGGGAT chr11 5266506 5266525 5266522 +
aagtgtgagtgtgtatggga

SEQ ID NO: 58724 - DNA, 20 bp, Artificial Sequence
  Synthetic oligonucleotide; TTGGAT chr11 5266545 5266564 5266561 +
gttaataggtacaaacacag

SEQ ID NO: 58725 - DNA, 20 bp, Artificial Sequence
  Synthetic oligonucleotide; AAGGAT chr11 5266553 5266572 5266569 +
gtacaaacacagttggatag

SEQ ID NO: 58726 - DNA, 20 bp, Artificial Sequence
  Synthetic oligonucleotide; TTGAGT chr11 5266579 5266598 5266595 +
taagccataatgtttgatat

SEQ ID NO: 58727 - DNA, 20 bp, Artificial Sequence
  Synthetic oligonucleotide; TAGGGT chr11 5266584 5266603 5266600 +
cataatgtttgatatttgag

SEQ ID NO: 58728 - DNA, 20 bp, Artificial Sequence
  Synthetic oligonucleotide; GAGGAT chr11 5266638 5266657 5266654 +
atttcaaaatggctagaaat

SEQ ID NO: 58729 - DNA, 20 bp, Artificial Sequence
  Synthetic oligonucleotide; ATGGAT chr11 5266687 5266706 5266703 +
aatgataaatgctcaaagca

SEQ ID NO: 58730 - DNA, 20 bp, Artificial Sequence
  Synthetic oligonucleotide; ATGAAT chr11 5266832 5266851 5266848 +
aggtgaaaatatttagtgcc

SEQ ID NO: 58731 - DNA, 20 bp, Artificial Sequence
  Synthetic oligonucleotide; CTGGAT chr11 5266947 5266966 5266963 +
atttgtctctctcccatatt

SEQ ID NO: 58732 - DNA, 20 bp, Artificial Sequence
  Synthetic oligonucleotide; GAGAGT chr11 5267178 5267197 5267194 +
tccctctacccttcacacat

SEQ ID NO: 58733 - DNA, 20 bp, Artificial Sequence
  Synthetic oligonucleotide; TCGAAT chr11 5267282 5267301 5267298 +
ttctcatctcccacagtcag

SEQ ID NO: 58734 - DNA, 20 bp, Artificial Sequence
  Synthetic oligonucleotide; TTGGGT chr11 5267349 5267368 5267365 +
ccacagactcactgctcctc

SEQ ID NO: 58735 - DNA, 20 bp, Artificial Sequence
  Synthetic oligonucleotide; TTGAAT chr11 5267377 5267396 5267393 +
gaaccattgtatctgtcccc

SEQ ID NO: 58736 - DNA, 20 bp, Artificial Sequence
  Synthetic oligonucleotide; TTGAAT chr11 5267413 5267432 5267429 +
attttattttatctgcaaac

SEQ ID NO: 58737 - DNA, 20 bp, Artificial Sequence
  Synthetic oligonucleotide; CTGAGT chr11 5267466 5267485 5267482 +
ttttcccaaaatcttatttc

SEQ ID NO: 58738 - DNA, 20 bp, Artificial Sequence
  Synthetic oligonucleotide; TAGAAT chr11 5267649 5267668 5267665 +
aagccctagcttgctggttt

SEQ ID NO: 58739 - DNA, 20 bp, Artificial Sequence
  Synthetic oligonucleotide; TGGAAT chr11 5267824 5267843 5267840 +
tcagctaacccatgaaataa

SEQ ID NO: 58740 - DNA, 20 bp, Artificial Sequence
  Synthetic oligonucleotide; AAGAGT chr11 5267929 5267948 5267945 +
agctacttcaaaatgtaaat

SEQ ID NO: 58741 - DNA, 20 bp, Artificial Sequence
  Synthetic oligonucleotide; TTGGAT chr11 5267964 5267983 5267980 +
tagtaattctagcctatatc

SEQ ID NO: 58742 - DNA, 20 bp, Artificial Sequence
  Synthetic oligonucleotide; AGGAGT chr11 5268090 5268109 5268106 +
cggtgcagtaaaaactgcct

SEQ ID NO: 58743 - DNA, 20 bp, Artificial Sequence
  Synthetic oligonucleotide; TGGAAT chr11 5268162 5268181 5268178 +
ctccatcatatcatcctcct

SEQ ID NO: 58744 - DNA, 20 bp, Artificial Sequence
  Synthetic oligonucleotide; TGGAAT chr11 5268170 5268189 5268186 +
tatcatcctccttggaatcc

SEQ ID NO: 58745 - DNA, 20 bp, Artificial Sequence
  Synthetic oligonucleotide; AAGAGT chr11 5268293 5268312 5268309 +
acactttttccttttaacac

SEQ ID NO: 58746 - DNA, 20 bp, Artificial Sequence
  Synthetic oligonucleotide; GAGGGT chr11 5268405 5268424 5268421 +
ccagtccccatgtgcagaag

SEQ ID NO: 58747 - DNA, 20 bp, Artificial Sequence
  Synthetic oligonucleotide; CAGGGT chr11 5268413 5268432 5268429 +
catgtgcagaaggagggtgt

SEQ ID NO: 58748 - DNA, 20 bp, Artificial Sequence
  Synthetic oligonucleotide; AGGGGT chr11 5268518 5268537 5268534 +
tgccaggcagcctgcacttc

SEQ ID NO: 58749 - DNA, 20 bp, Artificial Sequence
  Synthetic oligonucleotide; GTGAGT chr11 5268539 5268558 5268555 +
ggggtgaactccttgccaaa

SEQ ID NO: 58750 - DNA, 20 bp, Artificial Sequence
  Synthetic oligonucleotide; CAGAAT chr11 5268548 5268567 5268564 +
tccttgccaaagtgagtagc

SEQ ID NO: 58751 - DNA, 20 bp, Artificial Sequence
  Synthetic oligonucleotide; TTGAGT chr11 5268613 5268632 5268629 +
caaaataacacacaggcatg

SEQ ID NO: 58752 - DNA, 20 bp, Artificial Sequence
  Synthetic oligonucleotide; TTGGGT chr11 5268834 5268853 5268850 +
tccccattttaccagtatta

SEQ ID NO: 58753 - DNA, 20 bp, Artificial Sequence
  Synthetic oligonucleotide; TAGAAT chr11 5268889 5268908 5268905 +
ttgtctaatttttgtaaatg

SEQ ID NO: 58754 - DNA, 20 bp, Artificial Sequence
  Synthetic oligonucleotide; GTGAGT chr11 5268895 5268914 5268911 +
aatttttgtaaatgtagaat

SEQ ID NO: 58755 - DNA, 20 bp, Artificial Sequence
  Synthetic oligonucleotide; AAGAGT chr11 5268906 5268925 5268922 +
atgtagaatgtgagtgctgc

SEQ ID NO: 58756 - DNA, 20 bp, Artificial Sequence
  Synthetic oligonucleotide; GGGAGT chr11 5268919 5268938 5268935 +
gtgctgcaagagttctcagc

SEQ ID NO: 58757 - DNA, 20 bp, Artificial Sequence
  Synthetic oligonucleotide; TGGGAT chr11 5269183 5269202 5269199 +
aattctataatacaattctc

SEQ ID NO: 58758 - DNA, 20 bp, Artificial Sequence
  Synthetic oligonucleotide; CTGAAT chr11 5269268 5269287 5269284 +
gtcctttactgtcactagtt

SEQ ID NO: 58759 - DNA, 20 bp, Artificial Sequence
  Synthetic oligonucleotide; CAGGAT chr11 5269445 5269464 5269461 +
tgaactcaccttgaagttct

SEQ ID NO: 58760 - DNA, 20 bp, Artificial Sequence
  Synthetic oligonucleotide; TGGGGT chr11 5269571 5269590 5269587 +
cttgccatgggccttgacct

SEQ ID NO: 58761 - DNA, 20 bp, Artificial Sequence
  Synthetic oligonucleotide; CAGGAT chr11 5269581 5269600 5269597 +
gccttgaccttggggttgcc

SEQ ID NO: 58762 - DNA, 20 bp, Artificial Sequence
  Synthetic oligonucleotide; CTGGGT chr11 5269629 5269648 5269645 +
ccaaagctgtcaaaaaatct

SEQ ID NO: 58763 - DNA, 20 bp, Artificial Sequence
  Synthetic oligonucleotide; AGGGGT chr11 5269637 5269656 5269653 +
gtcaaaaaatctctgggtcc

SEQ ID NO: 58764 - DNA, 20 bp, Artificial Sequence
  Synthetic oligonucleotide; AGGAGT chr11 5269651 5269670 5269667 +
gggtccaggggtaaacaacg

SEQ ID NO: 58765 - DNA, 20 bp, Artificial Sequence
  Synthetic oligonucleotide; TAGGGT chr11 5269730 5269749 5269746 +
gactttcccaatcaacttgc

SEQ ID NO: 58766 - DNA, 20 bp, Artificial Sequence
  Synthetic oligonucleotide; AGGGGT chr11 5270031 5270050 5270047 +
aaggctgacctgtgtccctc

SEQ ID NO: 58767 - DNA, 20 bp, Artificial Sequence
  Synthetic oligonucleotide; TGGAGT chr11 5270036 5270055 5270052 +
tgacctgtgtccctcagggg

SEQ ID NO: 58768 - DNA, 20 bp, Artificial Sequence
  Synthetic oligonucleotide; GAGGGT chr11 5270052 5270071 5270068 +
ggggtggagtcaggtccgga

SEQ ID NO: 58769 - DNA, 20 bp, Artificial Sequence
  Synthetic oligonucleotide; ATGGAT chr11 5270066 5270085 5270082 +
tccggagagggtcagcagtg

SEQ ID NO: 58770 - DNA, 20 bp, Artificial Sequence
  Synthetic oligonucleotide; CTGGAT chr11 5270098 5270117 5270114 +
taagtttgtgataatgtgtg

SEQ ID NO: 58771 - DNA, 20 bp, Artificial Sequence
  Synthetic oligonucleotide; CAGAAT chr11 5270357 5270376 5270373 +
agaaaataaagctgttaaaa

SEQ ID NO: 58772 - DNA, 20 bp, Artificial Sequence
  Synthetic oligonucleotide; AGGAGT chr11 5270386 5270405 5270402 +
acccagttctagctctctta

SEQ ID NO: 58773 - DNA, 20 bp, Artificial Sequence
  Synthetic oligonucleotide; CAGAAT chr11 5270469 5270488 5270485 +
agttccttctagaaactgaa

SEQ ID NO: 58774 - DNA, 20 bp, Artificial Sequence
  Synthetic oligonucleotide; TGGGGT chr11 5270526 5270545 5270542 +
aatcccaaagtacagtacct

SEQ ID NO: 58775 - DNA, 20 bp, Artificial Sequence
  Synthetic oligonucleotide; GAGAAT chr11 5270579 5270598 5270595 +
gattacatccagtgcttcca

SEQ ID NO: 58776 - DNA, 20 bp, Artificial Sequence
  Synthetic oligonucleotide; GTGAGT chr11 5270633 5270652 5270649 +
caggggacattggctacttt

SEQ ID NO: 58777 - DNA, 20 bp, Artificial Sequence
  Synthetic oligonucleotide; CAGAAT chr11 5270737 5270756 5270753 +
atcctaaaattatttaaagc

SEQ ID NO: 58778 - DNA, 20 bp, Artificial Sequence
  Synthetic oligonucleotide; GTGAAT chr11 5270765 5270784 5270781 +
gtcatcaaacagagaaaaaa

SEQ ID NO: 58779 - DNA, 20 bp, Artificial Sequence
  Synthetic oligonucleotide; AGGAGT chr11 5270789 5270808 5270805 +
atcgatatattaatcaggct

SEQ ID NO: 58780 - DNA, 20 bp, Artificial Sequence
  Synthetic oligonucleotide; CAGGGT chr11 5270795 5270814 5270811 +
atattaatcaggctaggagt

SEQ ID NO: 58781 - DNA, 20 bp, Artificial Sequence
  Synthetic oligonucleotide; TGGGAT chr11 5270892 5270911 5270908 +
gtagagctgaaactggaagt

SEQ ID NO: 58782 - DNA, 20 bp, Artificial Sequence
  Synthetic oligonucleotide; AAGAAT chr11 5270930 5270949 5270946 +
caattcgatccatgtgcctg

SEQ ID NO: 58783 - DNA, 20 bp, Artificial Sequence
  Synthetic oligonucleotide; TAGAAT chr11 5270997 5271016 5271013 +
ttgtcattatcctcatattt

SEQ ID NO: 58784 - DNA, 20 bp, Artificial Sequence
  Synthetic oligonucleotide; AGGAAT chr11 5271005 5271024 5271021 +
atcctcatattttagaatca

SEQ ID NO: 58785 - DNA, 20 bp, Artificial Sequence
  Synthetic oligonucleotide; GGGAAT chr11 5271060 5271079 5271076 +
gtgacagaagtaatgattgg

SEQ ID NO: 58786 - DNA, 20 bp, Artificial Sequence
  Synthetic oligonucleotide; CAGAGT chr11 5271074 5271093 5271090 +
gattgggggaataatagaag

SEQ ID NO: 58787 - DNA, 20 bp, Artificial Sequence
  Synthetic oligonucleotide; CGGAGT chr11 5271236 5271255 5271252 +
ttttttttttttttttgaga

SEQ ID NO: 58788 - DNA, 20 bp, Artificial Sequence
  Synthetic oligonucleotide; TGGAGT chr11 5271260 5271279 5271276 +
gtctcactctgttgccagac

SEQ ID NO: 58789 - DNA, 20 bp, Artificial Sequence
  Synthetic oligonucleotide; CTGGGT chr11 5271304 5271323 5271320 +
ctcactgcaaccttcgcctc

SEQ ID NO: 58790 - DNA, 20 bp, Artificial Sequence
  Synthetic oligonucleotide; CGGGAT chr11 5271401 5271420 5271417 +
ttttttatttttagtagaga

SEQ ID NO: 58791 - DNA, 20 bp, Artificial Sequence
  Synthetic oligonucleotide; CAGGAT chr11 5271421 5271440 5271437 +
cgggatttcaccatgtttgc

SEQ ID NO: 58792 - DNA, 20 bp, Artificial Sequence
  Synthetic oligonucleotide; AGGAAT chr11 5271528 5271547 5271544 +
ccccttgccccaccagatct

SEQ ID NO: 58793 - DNA, 20 bp, Artificial Sequence
  Synthetic oligonucleotide; GGGGAT chr11 5271630 5271649 5271646 +
ctcccaagtcaagtgccttt

SEQ ID NO: 58794 - DNA, 20 bp, Artificial Sequence
  Synthetic oligonucleotide; AAGAAT chr11 5271753 5271772 5271769 +
aaaaaacacttgtggcaagt

SEQ ID NO: 58795 - DNA, 20 bp, Artificial Sequence
  Synthetic oligonucleotide; CTGAAT chr11 5271839 5271858 5271855 +
attgttattattccaggcca

SEQ ID NO: 58796 - DNA, 20 bp, Artificial Sequence
  Synthetic oligonucleotide; AGGAAT chr11 5271928 5271947 5271944 +
tggctaacacagacaaaacc

SEQ ID NO: 58797 - DNA, 20 bp, Artificial Sequence
  Synthetic oligonucleotide; AGGAGT chr11 5272020 5272039 5272036 +
ttgcatcaaataatatacat

SEQ ID NO: 58798 - DNA, 20 bp, Artificial Sequence
  Synthetic oligonucleotide; TAGGAT chr11 5272125 5272144 5272141 +
ctttatgaaagcattagatc

SEQ ID NO: 58799 - DNA, 20 bp, Artificial Sequence
  Synthetic oligonucleotide; TTGGGT chr11 5272130 5272149 5272146 +
tgaaagcattagatctagga

SEQ ID NO: 58800 - DNA, 20 bp, Artificial Sequence
  Synthetic oligonucleotide; GTGAAT chr11 5272176 5272195 5272192 +
aagtagtgatgcagataaat

SEQ ID NO: 58801 - DNA, 20 bp, Artificial Sequence
  Synthetic oligonucleotide; AGGAGT chr11 5272271 5272290 5272287 +
cgggcagatcatctgaggtc

SEQ ID NO: 58802 - DNA, 20 bp, Artificial Sequence
  Synthetic oligonucleotide; GAGAAT chr11 5272390 5272409 5272406 +
tactcaggaggccaaggcag

SEQ ID NO: 58803 - DNA, 20 bp, Artificial Sequence
  Synthetic oligonucleotide; TTGAAT chr11 5272399 5272418 5272415 +
ggccaaggcaggagaattgc

SEQ ID NO: 58804 - DNA, 20 bp, Artificial Sequence
  Synthetic oligonucleotide; CTGGGT chr11 5272912 5272931 5272928 +
taaccaattaagatacagct

SEQ ID NO: 58805 - DNA, 20 bp, Artificial Sequence
  Synthetic oligonucleotide; GGGAAT chr11 5272925 5272944 5272941 +
tacagctctgggttttcagg

SEQ ID NO: 58806 - DNA, 20 bp, Artificial Sequence
  Synthetic oligonucleotide; TTGAAT chr11 5272976 5272995 5272992 +
cagtggcccttcctcagaac

SEQ ID NO: 58807 - DNA, 20 bp, Artificial Sequence
  Synthetic oligonucleotide; GAGGGT chr11 5272984 5273003 5273000 +
cttcctcagaacttgaatgt

SEQ ID NO: 58808 - DNA, 20 bp, Artificial Sequence
  Synthetic oligonucleotide; AGGAAT chr11 5273009 5273028 5273025 +
tcagacattgccaaagtcca

SEQ ID NO: 58809 - DNA, 20 bp, Artificial Sequence
  Synthetic oligonucleotide; AAGAGT chr11 5273037 5273056 5273053 +
ggaccaggtatctcaaggcc

SEQ ID NO: 58810 - DNA, 20 bp, Artificial Sequence
  Synthetic oligonucleotide; ATGGGT chr11 5273076 5273095 5273092 +
ttctccctaaaacaagccct

SEQ ID NO: 58811 - DNA, 20 bp, Artificial Sequence
  Synthetic oligonucleotide; CAGAGT chr11 5273103 5273122 5273119 +
atcccatcattcttcccatt

SEQ ID NO: 58812 - DNA, 20 bp, Artificial Sequence
  Synthetic oligonucleotide; CAGAGT chr11 5273134 5273153 5273150 +
caccagtcttctcttagatt

SEQ ID NO: 58813 - DNA, 20 bp, Artificial Sequence
  Synthetic oligonucleotide; TGGGGT chr11 5273141 5273160 5273157 +
cttctcttagattcagagta

SEQ ID NO: 58814 - DNA, 20 bp, Artificial Sequence
  Synthetic oligonucleotide; AGGGAT chr11 5273236 5273255 5273252 +
tccagacctggcttgcatcc

SEQ ID NO: 58815 - DNA, 20 bp, Artificial Sequence
  Synthetic oligonucleotide; ATGGAT chr11 5273481 5273500 5273497 +
catatgagataccatgaaaa

SEQ ID NO: 58816 - DNA, 20 bp, Artificial Sequence
  Synthetic oligonucleotide; CAGGAT chr11 5273548 5273567 5273564 +
agataagtgttatggccatc

SEQ ID NO: 58817 - DNA, 20 bp, Artificial Sequence
  Synthetic oligonucleotide; AAGAAT chr11 5273592 5273611 5273608 +
agtcagaaaaagtaatcagt

SEQ ID NO: 58818 - DNA, 20 bp, Artificial Sequence
  Synthetic oligonucleotide; TTGGGT chr11 5273722 5273741 5273738 +
gaagattaattcctgcctgt

SEQ ID NO: 58819 - DNA, 20 bp, Artificial Sequence
  Synthetic oligonucleotide; CAGGAT chr11 5273762 5273781 5273778 +
gtaatttcttaagttctatg

SEQ ID NO: 58820 - DNA, 20 bp, Artificial Sequence
  Synthetic oligonucleotide; AAGAGT chr11 5273859 5273878 5273875 +
tatgacatatgtttaacctg

SEQ ID NO: 58821 - DNA, 20 bp, Artificial Sequence
  Synthetic oligonucleotide; CTGAAT chr11 5273951 5273970 5273967 +
aaagtaggcccttcacttca

SEQ ID NO: 58822 - DNA, 20 bp, Artificial Sequence
  Synthetic oligonucleotide; ATGAAT chr11 5273993 5274012 5274009 +
tctaagaaataaatacttta

SEQ ID NO: 58823 - DNA, 20 bp, Artificial Sequence
  Synthetic oligonucleotide; TAGGAT chr11 5274092 5274111 5274108 +
ctgataggaaaagagctgct

SEQ ID NO: 58824 - DNA, 20 bp, Artificial Sequence
  Synthetic oligonucleotide; AGGAAT chr11 5274220 5274239 5274236 +
tgttagattttgcattatcc

SEQ ID NO: 58825 - DNA, 20 bp, Artificial Sequence
  Synthetic oligonucleotide; TTGGAT chr11 5274229 5274248 5274245 +
ttgcattatccaggaatgac

SEQ ID NO: 58826 - DNA, 20 bp, Artificial Sequence
  Synthetic oligonucleotide; AAGAAT chr11 5274301 5274320 5274317 +
tattttctagtgtaattgta

SEQ ID NO: 58827 - DNA, 20 bp, Artificial Sequence
  Synthetic oligonucleotide; GAGAAT chr11 5274309 5274328 5274325 +
agtgtaattgtaaagaatga

SEQ ID NO: 58828 - DNA, 20 bp, Artificial Sequence
  Synthetic oligonucleotide; AGGGGT chr11 5274373 5274392 5274389 +
tcaacttttattttaagttc

SEQ ID NO: 58829 - DNA, 20 bp, Artificial Sequence
  Synthetic oligonucleotide; CAGGAT chr11 5274386 5274405 5274402 +
taagttcaggggtacatgta

SEQ ID NO: 58830 - DNA, 20 bp, Artificial Sequence
  Synthetic oligonucleotide; ATGAAT chr11 5274415 5274434 5274431 +
caggtttgttacatagataa

SEQ ID NO: 58831 - DNA, 20 bp, Artificial Sequence
  Synthetic oligonucleotide; GGGGGT chr11 5274426 5274445 5274442 +
catagataaatgaatgtcaa

SEQ ID NO: 58832 - DNA, 20 bp, Artificial Sequence
  Synthetic oligonucleotide; ATGAGT chr11 5274555 5274574 5274571 +
agtatgcgttgtttccctct

SEQ ID NO: 58833 - DNA, 20 bp, Artificial Sequence
  Synthetic oligonucleotide; GTGAGT chr11 5274638 5274657 5274654 +
atctctcacgaagtttgcag

SEQ ID NO: 58834 - DNA, 20 bp, Artificial Sequence
  Synthetic oligonucleotide; AAGAGT chr11 5274670 5274689 5274686 +
cagggctgaggctcattctc

SEQ ID NO: 58835 - DNA, 20 bp, Artificial Sequence
  Synthetic oligonucleotide; CAGAGT chr11 5274756 5274775 5274772 +
cactgtgcctaaagtacaac

SEQ ID NO: 58836 - DNA, 20 bp, Artificial Sequence
  Synthetic oligonucleotide; GTGAAT chr11 5274767 5274786 5274783 +
aagtacaaccagagttactt

SEQ ID NO: 58837 - DNA, 20 bp, Artificial Sequence
  Synthetic oligonucleotide; AGGGAT chr11 5274787 5274806 5274803 +
gtgaatgttaattaagcagg

SEQ ID NO: 58838 - DNA, 20 bp, Artificial Sequence
  Synthetic oligonucleotide; AGGAGT chr11 5274807 5274826 5274823 +
agggatctttaatgggaaaa

SEQ ID NO: 58839 - DNA, 20 bp, Artificial Sequence
  Synthetic oligonucleotide; CAGAAT chr11 5274820 5274839 5274836 +
gggaaaaaggagtagaaagc

SEQ ID NO: 58840 - DNA, 20 bp, Artificial Sequence
  Synthetic oligonucleotide; TTGAGT chr11 5274876 5274895 5274892 +
tgggcactgaaggttaaaac

SEQ ID NO: 58841 - DNA, 20 bp, Artificial Sequence
  Synthetic oligonucleotide; TTGAGT chr11 5274966 5274985 5274982 +
ttctttgaccttttgggacc

SEQ ID NO: 58842 - DNA, 20 bp, Artificial Sequence
  Synthetic oligonucleotide; TTGGGT chr11 5275021 5275040 5275037 +
attaaaattctaagaaattc

SEQ ID NO: 58843 - DNA, 20 bp, Artificial Sequence
  Synthetic oligonucleotide; CAGAAT chr11 5275103 5275122 5275119 +
aacaatactctgaagtagtt

SEQ ID NO: 58844 - DNA, 20 bp, Artificial Sequence
  Synthetic oligonucleotide; AAGAGT chr11 5275127 5275146 5275143 +
atgtgctttcaatttatata

SEQ ID NO: 58845 - DNA, 20 bp, Artificial Sequence
  Synthetic oligonucleotide; TTGAAT chr11 5275166 5275185 5275182 +
actattttaagtgcagggct

SEQ ID NO: 58846 - DNA, 20 bp, Artificial Sequence
  Synthetic oligonucleotide; CTGAAT chr11 5275374 5275393 5275390 +
actataacatagtatgtttc

SEQ ID NO: 58847 - DNA, 20 bp, Artificial Sequence
  Synthetic oligonucleotide; GAGGAT chr11 5275415 5275434 5275431 +
ctctggagaaggttaaaact

SEQ ID NO: 58848 - DNA, 20 bp, Artificial Sequence
  Synthetic oligonucleotide; AAGGGT chr11 5275539 5275558 5275555 +
cccctctgttttgtgtcact

SEQ ID NO: 58849 - DNA, 20 bp, Artificial Sequence
  Synthetic oligonucleotide; GAGGAT chr11 5275545 5275564 5275561 +
tgttttgtgtcactaagggt

SEQ ID NO: 58850 - DNA, 20 bp, Artificial Sequence
  Synthetic oligonucleotide; CTGAAT chr11 5275552 5275571 5275568 +
tgtcactaagggtgaggatg

SEQ ID NO: 58851 - DNA, 20 bp, Artificial Sequence
  Synthetic oligonucleotide; AGGAGT chr11 5275609 5275628 5275625 +
atcaataattctagccccac

SEQ ID NO: 58852 - DNA, 20 bp, Artificial Sequence
  Synthetic oligonucleotide; TGGGAT chr11 5275893 5275912 5275909 +
attatttttttctttagact

SEQ ID NO: 58853 - DNA, 20 bp, Artificial Sequence
  Synthetic oligonucleotide; GTGGAT chr11 5275930 5275949 5275946 +
ggcagcgtcagaaactgtgt

SEQ ID NO: 58854 - DNA, 20 bp, Artificial Sequence
  Synthetic oligonucleotide; GAGAGT chr11 5275997 5276016 5276013 +
ggggcctagctaaaggcagt

SEQ ID NO: 58855 - DNA, 20 bp, Artificial Sequence
  Synthetic oligonucleotide; CAGAAT chr11 5276003 5276022 5276019 +
tagctaaaggcagtgagagt

SEQ ID NO: 58856 - DNA, 20 bp, Artificial Sequence
  Synthetic oligonucleotide; GAGAGT chr11 5276089 5276108 5276105 +
aaggctataggttagtgttt

SEQ ID NO: 58857 - DNA, 20 bp, Artificial Sequence
  Synthetic oligonucleotide; TAGGAT chr11 5276268 5276287 5276284 +
accagataacttgcaagtcc

SEQ ID NO: 58858 - DNA, 20 bp, Artificial Sequence
  Synthetic oligonucleotide; GGGGGT chr11 5276393 5276412 5276409 +
atcacacactggggcctgtt

SEQ ID NO: 58859 - DNA, 20 bp, Artificial Sequence
  Synthetic oligonucleotide; AAGGAT chr11 5276412 5276431 5276428 +
tgggggtggggggctagggg

SEQ ID NO: 58860 - DNA, 20 bp, Artificial Sequence
  Synthetic oligonucleotide; ACGGGT chr11 5276447 5276466 5276463 +
agaaatacctaatgtagatg

SEQ ID NO: 58861 - DNA, 20 bp, Artificial Sequence
  Synthetic oligonucleotide; ATGGGT chr11 5276455 5276474 5276471 +
ctaatgtagatgacgggttg

SEQ ID NO: 58862 - DNA, 20 bp, Artificial Sequence
  Synthetic oligonucleotide; CGGAAT chr11 5276553 5276572 5276569 +
tcaaatttaactataagaga

SEQ ID NO: 58863 - DNA, 20 bp, Artificial Sequence
  Synthetic oligonucleotide; CAGAAT chr11 5276588 5276607 5276604 +
aattcttaactataatctta

SEQ ID NO: 58864 - DNA, 20 bp, Artificial Sequence
  Synthetic oligonucleotide; TTGAAT chr11 5276601 5276620 5276617 +
aatcttacagaatattctca

SEQ ID NO: 58865 - DNA, 20 bp, Artificial Sequence
  Synthetic oligonucleotide; ATGGAT chr11 5276749 5276768 5276765 +
aggccatccttcccatgaag

SEQ ID NO: 58866 - DNA, 20 bp, Artificial Sequence
  Synthetic oligonucleotide; ATGAAT chr11 5276753 5276772 5276769 +
catccttcccatgaagatgg

SEQ ID NO: 58867 - DNA, 20 bp, Artificial Sequence
  Synthetic oligonucleotide; ATGAGT chr11 5276884 5276903 5276900 +
aattaattgcttacataaac

SEQ ID NO: 58868 - DNA, 20 bp, Artificial Sequence
  Synthetic oligonucleotide; ATGAGT chr11 5277003 5277022 5277019 +
aatctcagcctacaaaacaa

SEQ ID NO: 58869 - DNA, 20 bp, Artificial Sequence
  Synthetic oligonucleotide; GTGGAT chr11 5277124 5277143 5277140 +
ttctttgtgtgtgcatagca

SEQ ID NO: 58870 - DNA, 20 bp, Artificial Sequence
  Synthetic oligonucleotide; AAGAAT chr11 5277209 5277228 5277225 +
ttcaaaattgtaaaattgct

SEQ ID NO: 58871 - DNA, 20 bp, Artificial Sequence
  Synthetic oligonucleotide; CAGAAT chr11 5277227 5277246 5277243 +
ctaagaatacagcacaaaaa

SEQ ID NO: 58872 - DNA, 20 bp, Artificial Sequence
  Synthetic oligonucleotide; AGGAAT chr11 5277235 5277254 5277251 +
acagcacaaaaacagaatag

SEQ ID NO: 58873 - DNA, 20 bp, Artificial Sequence
  Synthetic oligonucleotide; CAGAGT chr11 5277363 5277382 5277379 +
aaaaaaactgaaatgaaggc

SEQ ID NO: 58874 - DNA, 20 bp, Artificial Sequence
  Synthetic oligonucleotide; CAGGGT chr11 5277379 5277398 5277395 +
aggccagagtgtgattagga

SEQ ID NO: 58875 - DNA, 20 bp, Artificial Sequence
  Synthetic oligonucleotide; AAGGGT chr11 5277387 5277406 5277403 +
gtgtgattaggacagggtga

SEQ ID NO: 58876 - DNA, 20 bp, Artificial Sequence
  Synthetic oligonucleotide; GAGAGT chr11 5277448 5277467 5277464 +
actataaagttaacacctga

SEQ ID NO: 58877 - DNA, 20 bp, Artificial Sequence
  Synthetic oligonucleotide; GGGAAT chr11 5277512 5277531 5277528 +
gattaaatatttagggcata

SEQ ID NO: 58878 - DNA, 20 bp, Artificial Sequence
  Synthetic oligonucleotide; TAGAAT chr11 5277552 5277571 5277568 +
ccctaaagatgtaagatgct

SEQ ID NO: 58879 - DNA, 20 bp, Artificial Sequence
  Synthetic oligonucleotide; AGGAAT chr11 5277563 5277582 5277579 +
taagatgcttagaattttca

SEQ ID NO: 58880 - DNA, 20 bp, Artificial Sequence
  Synthetic oligonucleotide; TAGGAT chr11 5277585 5277604 5277601 +
gaatatcaataaggccaatg

SEQ ID NO: 58881 - DNA, 20 bp, Artificial Sequence
  Synthetic oligonucleotide; GAGAAT chr11 5277607 5277626 5277623 +
ggatgagattcggtgaaggg

SEQ ID NO: 58882 - DNA, 20 bp, Artificial Sequence
  Synthetic oligonucleotide; TAGAGT chr11 5277675 5277694 5277691 +
cactaataatacctacatca

SEQ ID NO: 58883 - DNA, 20 bp, Artificial Sequence
  Synthetic oligonucleotide; GAGAAT chr11 5277792 5277811 5277808 +
atgcatgaacaactattgta

SEQ ID NO: 58884 - DNA, 20 bp, Artificial Sequence
  Synthetic oligonucleotide; AAGGAT chr11 5277801 5277820 5277817 +
caactattgtagagaattgt

SEQ ID NO: 58885 - DNA, 20 bp, Artificial Sequence
  Synthetic oligonucleotide; TTGGAT chr11 5277896 5277915 5277912 +
tacattttgaaaagactaat

SEQ ID NO: 58886 - DNA, 20 bp, Artificial Sequence
  Synthetic oligonucleotide; ATGAGT chr11 5277955 5277974 5277971 +
gtagaagcaggaagattgtt

SEQ ID NO: 58887 - DNA, 20 bp, Artificial Sequence
  Synthetic oligonucleotide; CAGAGT chr11 5278001 5278020 5278017 +
gtggtgacagtgacttagac

SEQ ID NO: 58888 - DNA, 20 bp, Artificial Sequence
  Synthetic oligonucleotide; AGGGGT chr11 5278029 5278048 5278045 +
tagcattggaggtgaaggca

SEQ ID NO: 58889 - DNA, 20 bp, Artificial Sequence
  Synthetic oligonucleotide; CAGGAT chr11 5278069 5278088 5278085 +
atcctttcacgaaaaaccaa

SEQ ID NO: 58890 - DNA, 20 bp, Artificial Sequence
  Synthetic oligonucleotide; GAGAAT chr11 5278084 5278103 5278100 +
accaacaggattttctgaca

SEQ ID NO: 58891 - DNA, 20 bp, Artificial Sequence
  Synthetic oligonucleotide; TGGAAT chr11 5278091 5278110 5278107 +
ggattttctgacagagaata

SEQ ID NO: 58892 - DNA, 20 bp, Artificial Sequence
  Synthetic oligonucleotide; GTGAGT chr11 5278152 5278171 5278168 +
gtgcatgctaatttctggct

SEQ ID NO: 58893 - DNA, 20 bp, Artificial Sequence
  Synthetic oligonucleotide; CAGAGT chr11 5278164 5278183 5278180 +
ttctggctgtgagtatatgt

SEQ ID NO: 58894 - DNA, 20 bp, Artificial Sequence
  Synthetic oligonucleotide; AAGGAT chr11 5278170 5278189 5278186 +
ctgtgagtatatgtcagagt

SEQ ID NO: 58895 - DNA, 20 bp, Artificial Sequence
  Synthetic oligonucleotide; GTGAGT chr11 5278192 5278211 5278208 +
ggattttgaagctaggcaaa

SEQ ID NO: 58896 - DNA, 20 bp, Artificial Sequence
  Synthetic oligonucleotide; TTGGGT chr11 5278200 5278219 5278216 +
aagctaggcaaagtgagtct

SEQ ID NO: 58897 - DNA, 20 bp, Artificial Sequence
  Synthetic oligonucleotide; TTGAAT chr11 5278205 5278224 5278221 +
aggcaaagtgagtctttggg

SEQ ID NO: 58898 - DNA, 20 bp, Artificial Sequence
  Synthetic oligonucleotide; CAGAAT chr11 5278246 5278265 5278262 +
gttcatcacagtctctacct

SEQ ID NO: 58899 - DNA, 20 bp, Artificial Sequence
  Synthetic oligonucleotide; CTGGGT chr11 5278271 5278290 5278287 +
ttggctttaaaattggaaag

SEQ ID NO: 58900 - DNA, 20 bp, Artificial Sequence
  Synthetic oligonucleotide; GTGGGT chr11 5278275 5278294 5278291 +
ctttaaaattggaaagctgg

SEQ ID NO: 58901 - DNA, 20 bp, Artificial Sequence
  Synthetic oligonucleotide; GTGGAT chr11 5278279 5278298 5278295 +
aaaattggaaagctgggtgg

SEQ ID NO: 58902 - DNA, 20 bp, Artificial Sequence
  Synthetic oligonucleotide; TTGGAT chr11 5278357 5278376 5278373 +
aaagtgacatcaagtatttc

SEQ ID NO: 58903 - DNA, 20 bp, Artificial Sequence
  Synthetic oligonucleotide; CAGAAT chr11 5278460 5278479 5278476 +
taagtcagagaacaatcaga

SEQ ID NO: 58904 - DNA, 20 bp, Artificial Sequence
  Synthetic oligonucleotide; GGGAAT chr11 5278478 5278497 5278494 +
gacagaattctgttcggtca

SEQ ID NO: 58905 - DNA, 20 bp, Artificial Sequence
  Synthetic oligonucleotide; ATGGGT chr11 5278487 5278506 5278503 +
ctgttcggtcagggaatttg

SEQ ID NO: 58906 - DNA, 20 bp, Artificial Sequence
  Synthetic oligonucleotide; CAGAGT chr11 5278535 5278554 5278551 +
tgttttcgtttttctttaga

SEQ ID NO: 58907 - DNA, 20 bp, Artificial Sequence
  Synthetic oligonucleotide; TGGAGT chr11 5278555 5278574 5278571 +
cagagtctcgctctggaggc

SEQ ID NO: 58908 - DNA, 20 bp, Artificial Sequence
  Synthetic oligonucleotide; TTGGAT chr11 5278639 5278658 5278655 +
tgcctcagcctcccaagtag

SEQ ID NO: 58909 - DNA, 20 bp, Artificial Sequence
  Synthetic oligonucleotide; AGGAGT chr11 5278784 5278803 5278800 +
tcccaaactgctgtgattac

SEQ ID NO: 58910 - DNA, 20 bp, Artificial Sequence
  Synthetic oligonucleotide; AGGAAT chr11 5278806 5278825 5278822 +
gagtgagccaccgcacctca

SEQ ID NO: 58911 - DNA, 20 bp, Artificial Sequence
  Synthetic oligonucleotide; AGGAAT chr11 5278840 5278859 5278856 +
taggctgtgacctctgcact

SEQ ID NO: 58912 - DNA, 20 bp, Artificial Sequence
  Synthetic oligonucleotide; ATGAGT chr11 5278944 5278963 5278960 +
gaggcgtgcctccatccctg

SEQ ID NO: 58913 - DNA, 20 bp, Artificial Sequence
  Synthetic oligonucleotide; TAGAAT chr11 5278964 5278983 5278980 +
atgagtttttcctccatgtg

SEQ ID NO: 58914 - DNA, 20 bp, Artificial Sequence
  Synthetic oligonucleotide; TTGAAT chr11 5278969 5278988 5278985 +
tttttcctccatgtgtagaa

SEQ ID NO: 58915 - DNA, 20 bp, Artificial Sequence
  Synthetic oligonucleotide; AAGGAT chr11 5278978 5278997 5278994 +
catgtgtagaattgaataag

SEQ ID NO: 58916 - DNA, 20 bp, Artificial Sequence
  Synthetic oligonucleotide; TAGAAT chr11 5278983 5279002 5278999 +
gtagaattgaataagaagga

SEQ ID NO: 58917 - DNA, 20 bp, Artificial Sequence
  Synthetic oligonucleotide; TTGAGT chr11 5279004 5279023 5279020 +
agaattcaatttaacaagct

SEQ ID NO: 58918 - DNA, 20 bp, Artificial Sequence
  Synthetic oligonucleotide; ATGAAT chr11 5279124 5279143 5279140 +
aggcccaatataaaatgaaa

SEQ ID NO: 58919 - DNA, 20 bp, Artificial Sequence
  Synthetic oligonucleotide; AAGGAT chr11 5279149 5279168 5279165 +
tagcccctttgtcaaaaatt

SEQ ID NO: 58920 - DNA, 20 bp, Artificial Sequence
  Synthetic oligonucleotide; AAGGAT chr11 5279172 5279191 5279188 +
gatttcatgtcaggaacagc

SEQ ID NO: 58921 - DNA, 20 bp, Artificial Sequence
  Synthetic oligonucleotide; AAGAGT chr11 5279235 5279254 5279251 +
attcatgatacgaaaaaata

SEQ ID NO: 58922 - DNA, 20 bp, Artificial Sequence
  Synthetic oligonucleotide; TGGAAT chr11 5279341 5279360 5279357 +
agtctttctagacccatcca

SEQ ID NO: 58923 - DNA, 20 bp, Artificial Sequence
  Synthetic oligonucleotide; CCGAGT chr11 5279655 5279674 5279671 +
atcattcattcacagcgaaa

SEQ ID NO: 58924 - DNA, 20 bp, Artificial Sequence
  Synthetic oligonucleotide; ATGAAT chr11 5279689 5279708 5279705 +
aagaggtcattcattcacaa

SEQ ID NO: 58925 - DNA, 20 bp, Artificial Sequence
  Synthetic oligonucleotide; ATGGGT chr11 5279731 5279750 5279747 +
agtatacgtgaggtcctgta

SEQ ID NO: 58926 - DNA, 20 bp, Artificial Sequence
  Synthetic oligonucleotide; AGGAAT chr11 5280081 5280100 5280097 +
aacccttttagctctcctgg

SEQ ID NO: 58927 - DNA, 20 bp, Artificial Sequence
  Synthetic oligonucleotide; CAGGAT chr11 5280100 5280119 5280116 +
gaggaatgtttctttcctct

SEQ ID NO: 58928 - DNA, 20 bp, Artificial Sequence
  Synthetic oligonucleotide; CAGAGT chr11 5280106 5280125 5280122 +
tgtttctttcctctcaggat

SEQ ID NO: 58929 - DNA, 20 bp, Artificial Sequence
  Synthetic oligonucleotide; AGGGGT chr11 5280256 5280275 5280272 +
cttttgccacctagctgtcc

SEQ ID NO: 58930 - DNA, 20 bp, Artificial Sequence
  Synthetic oligonucleotide; TAGAAT chr11 5280547 5280566 5280563 +
attcaggaaataatatattc

SEQ ID NO: 58931 - DNA, 20 bp, Artificial Sequence
  Synthetic oligonucleotide; TGGAGT chr11 5280603 5280622 5280619 +
ctttatgatgccgtttgagg

SEQ ID NO: 58932 - DNA, 20 bp, Artificial Sequence
  Synthetic oligonucleotide; AGGAGT chr11 5280679 5280698 5280695 +
atcctgctggggacccagat

SEQ ID NO: 58933 - DNA, 20 bp, Artificial Sequence
  Synthetic oligonucleotide; GGGGGT chr11 5280807 5280826 5280823 +
gttacacagaaccagaaggc

SEQ ID NO: 58934 - DNA, 20 bp, Artificial Sequence
  Synthetic oligonucleotide; GAGGAT chr11 5280939 5280958 5280955 +
aagcttatttaatcagagat

SEQ ID NO: 58935 - DNA, 20 bp, Artificial Sequence
  Synthetic oligonucleotide; AGGGAT chr11 5280951 5280970 5280967 +
tcagagatgaggatgctgga

SEQ ID NO: 58936 - DNA, 20 bp, Artificial Sequence
  Synthetic oligonucleotide; CTGGAT chr11 5281018 5281037 5281034 +
aaatggttttgaagcacctg

SEQ ID NO: 58937 - DNA, 20 bp, Artificial Sequence
  Synthetic oligonucleotide; TTGAAT chr11 5281045 5281064 5281061 +
ctaaacactattttcagtgc

SEQ ID NO: 58938 - DNA, 20 bp, Artificial Sequence
  Synthetic oligonucleotide; AAGAAT chr11 5281058 5281077 5281074 +
tcagtgcttgaatcataaat

SEQ ID NO: 58939 - DNA, 20 bp, Artificial Sequence
  Synthetic oligonucleotide; AAGAGT chr11 5281087 5281106 5281103 +
acatgtatcttattccccac

SEQ ID NO: 58940 - DNA, 20 bp, Artificial Sequence
  Synthetic oligonucleotide; TGGAGT chr11 5281140 5281159 5281156 +
atgtgctctgtcccccaggc

SEQ ID NO: 58941 - DNA, 20 bp, Artificial Sequence
  Synthetic oligonucleotide; CCGGGT chr11 5281184 5281203 5281200 +
ctcactgcaacctccgcctc

SEQ ID NO: 58942 - DNA, 20 bp, Artificial Sequence
  Synthetic oligonucleotide; TGGGAT chr11 5281225 5281244 5281241 +
gcctcagccaccctaatagc

SEQ ID NO: 58943 - DNA, 20 bp, Artificial Sequence
  Synthetic oligonucleotide; CAGGGT chr11 5281281 5281300 5281297 +
ttttgtactttttgtagagg

SEQ ID NO: 58944 - DNA, 20 bp, Artificial Sequence
  Synthetic oligonucleotide; TGGGAT chr11 5281361 5281380 5281377 +
acctcagcctcccaaagtgc

SEQ ID NO: 58945 - DNA, 20 bp, Artificial Sequence
  Synthetic oligonucleotide; TGGGAT chr11 5281419 5281438 5281435 +
atatttaatagaggtattta

SEQ ID NO: 58946 - DNA, 20 bp, Artificial Sequence
  Synthetic oligonucleotide; AAGAAT chr11 5281432 5281451 5281448 +
gtatttatgggatgggggaa

SEQ ID NO: 58947 - DNA, 20 bp, Artificial Sequence
  Synthetic oligonucleotide; GTGGAT chr11 5281450 5281469 5281466 +
aaaagaatgtttctctcact

SEQ ID NO: 58948 - DNA, 20 bp, Artificial Sequence
  Synthetic oligonucleotide; GAGAGT chr11 5281463 5281482 5281479 +
tctcactgtggattatttta

SEQ ID NO: 58949 - DNA, 20 bp, Artificial Sequence
  Synthetic oligonucleotide; GAGAAT chr11 5281470 5281489 5281486 +
gtggattattttagagagtg

SEQ ID NO: 58950 - DNA, 20 bp, Artificial Sequence
  Synthetic oligonucleotide; GAGGAT chr11 5281547 5281566 5281563 +
gaaaatttatttttttgttg

SEQ ID NO: 58951 - DNA, 20 bp, Artificial Sequence
  Synthetic oligonucleotide; CAGAGT chr11 5281612 5281631 5281628 +
ctggctaagacacagtgaga

SEQ ID NO: 58952 - DNA, 20 bp, Artificial Sequence
  Synthetic oligonucleotide; TAGGGT chr11 5281733 5281752 5281749 +
cagaaatttcataagtctac

SEQ ID NO: 58953 - DNA, 20 bp, Artificial Sequence
  Synthetic oligonucleotide; GAGGAT chr11 5281760 5281779 5281776 +
aggcagatcacataagaaaa

SEQ ID NO: 58954 - DNA, 20 bp, Artificial Sequence
  Synthetic oligonucleotide; GTGAGT chr11 5281783 5281802 5281799 +
gatgccagttaaggtctgca

SEQ ID NO: 58955 - DNA, 20 bp, Artificial Sequence
  Synthetic oligonucleotide; ATGAAT chr11 5281804 5281823 5281820 +
tgagtatgagcccatccctg

SEQ ID NO: 58956 - DNA, 20 bp, Artificial Sequence
  Synthetic oligonucleotide; TAGGAT chr11 5281940 5281959 5281956 +
ttcttgaagtctctgaaata

SEQ ID NO: 58957 - DNA, 20 bp, Artificial Sequence
  Synthetic oligonucleotide; TAGAAT chr11 5281965 5281984 5281981 +
tgataatatgtattagctaa

SEQ ID NO: 58958 - DNA, 20 bp, Artificial Sequence
  Synthetic oligonucleotide; GAGGAT chr11 5281974 5281993 5281990 +
gtattagctaatagaattat

SEQ ID NO: 58959 - DNA, 20 bp, Artificial Sequence
  Synthetic oligonucleotide; AAGAAT chr11 5282095 5282114 5282111 +
tacagttgcatgctacctta

SEQ ID NO: 58960 - DNA, 20 bp, Artificial Sequence
  Synthetic oligonucleotide; GGGAGT chr11 5282445 5282464 5282461 +
agcccatcagggaagacata

SEQ ID NO: 58961 - DNA, 20 bp, Artificial Sequence
  Synthetic oligonucleotide; AGGAAT chr11 5282456 5282475 5282472 +
gaagacatagggagttctgt

SEQ ID NO: 58962 - DNA, 20 bp, Artificial Sequence
  Synthetic oligonucleotide; ATGAGT chr11 5282460 5282479 5282476 +
acatagggagttctgtagga

SEQ ID NO: 58963 - DNA, 20 bp, Artificial Sequence
  Synthetic oligonucleotide; GAGAAT chr11 5282602 5282621 5282618 +
acccggcaaagggagatgca

SEQ ID NO: 58964 - DNA, 20 bp, Artificial Sequence
  Synthetic oligonucleotide; TAGAAT chr11 5282698 5282717 5282714 +
cctcagttcttgacgctagt

SEQ ID NO: 58965 - DNA, 20 bp, Artificial Sequence
  Synthetic oligonucleotide; CAGGAT chr11 5282762 5282781 5282778 +
ctgaggcactgaggtcactg

SEQ ID NO: 58966 - DNA, 20 bp, Artificial Sequence
  Synthetic oligonucleotide; ATGGGT chr11 5282781 5282800 5282797 +
gcaggatgaagacggagcca

SEQ ID NO: 58967 - DNA, 20 bp, Artificial Sequence
  Synthetic oligonucleotide; AAGAGT chr11 5282795 5282814 5282811 +
gagccaatgggttagaccag

SEQ ID NO: 58968 - DNA, 20 bp, Artificial Sequence
  Synthetic oligonucleotide; AGGGGT chr11 5282856 5282875 5282872 +
ccaaagttgcagcttgacca

SEQ ID NO: 58969 - DNA, 20 bp, Artificial Sequence
  Synthetic oligonucleotide; AAGGGT chr11 5282864 5282883 5282880 +
gcagcttgaccaaggggtca

SEQ ID NO: 58970 - DNA, 20 bp, Artificial Sequence
  Synthetic oligonucleotide; AGGAAT chr11 5283118 5283137 5283134 +
agaagcaagggccacagggc

SEQ ID NO: 58971 - DNA, 20 bp, Artificial Sequence
  Synthetic oligonucleotide; CTGAGT chr11 5283155 5283174 5283171 +
atttctcgcatccacaatat

SEQ ID NO: 58972 - DNA, 20 bp, Artificial Sequence
  Synthetic oligonucleotide; CTGGGT chr11 5283206 5283225 5283222 +
tgtcttcagaggtagcagaa

SEQ ID NO: 58973 - DNA, 20 bp, Artificial Sequence
  Synthetic oligonucleotide; TCGAGT chr11 5283278 5283297 5283294 +
ttatttcatgtctttgattt

SEQ ID NO: 58974 - DNA, 20 bp, Artificial Sequence
  Synthetic oligonucleotide; CTGAGT chr11 5283445 5283464 5283461 +
aatgaggtaataatctactt

SEQ ID NO: 58975 - DNA, 20 bp, Artificial Sequence
  Synthetic oligonucleotide; GTGAGT chr11 5283457 5283476 5283473 +
atctacttctgagtattggt

SEQ ID NO: 58976 - DNA, 20 bp, Artificial Sequence
  Synthetic oligonucleotide; TGGAGT chr11 5283510 5283529 5283526 +
ttctttttttttttttgaga

SEQ ID NO: 58977 - DNA, 20 bp, Artificial Sequence
  Synthetic oligonucleotide; TGGAGT chr11 5283535 5283554 5283551 +
tctcactctgtcgcctaggc

SEQ ID NO: 58978 - DNA, 20 bp, Artificial Sequence
  Synthetic oligonucleotide; CTGGGT chr11 5283579 5283598 5283595 +
ctcactgcaacctccacctc

SEQ ID NO: 58979 - DNA, 20 bp, Artificial Sequence
  Synthetic oligonucleotide; CTGAGT chr11 5283611 5283630 5283627 +
gattctcctgcctcagcctc

SEQ ID NO: 58980 - DNA, 20 bp, Artificial Sequence
  Synthetic oligonucleotide; TGGGAT chr11 5283620 5283639 5283636 +
gcctcagcctcctgagtagc

SEQ ID NO: 58981 - DNA, 20 bp, Artificial Sequence
  Synthetic oligonucleotide; AGGGGT chr11 5283678 5283697 5283694 +
tttgtattttttagtagaga

SEQ ID NO: 58982 - DNA, 20 bp, Artificial Sequence
  Synthetic oligonucleotide; TGGGAT chr11 5283757 5283776 5283773 +
gccttggcctcccaaagtgc

SEQ ID NO: 58983 - DNA, 20 bp, Artificial Sequence
  Synthetic oligonucleotide; CAGAAT chr11 5283906 5283925 5283922 +
gttcaataatacatatctca

SEQ ID NO: 58984 - DNA, 20 bp, Artificial Sequence
  Synthetic oligonucleotide; GAGGGT chr11 5284307 5284326 5284323 +
gttagaaggttctactggag

SEQ ID NO: 58985 - DNA, 20 bp, Artificial Sequence
  Synthetic oligonucleotide; GAGAGT chr11 5284471 5284490 5284487 +
actgttaggccactggtcca

SEQ ID NO: 58986 - DNA, 20 bp, Artificial Sequence
  Synthetic oligonucleotide; AGGAGT chr11 5284562 5284581 5284578 +
gatgatgatcctgaaaacat

SEQ ID NO: 58987 - DNA, 20 bp, Artificial Sequence
  Synthetic oligonucleotide; GGGGGT chr11 5284588 5284607 5284604 +
caaggcacttgcccctagct

SEQ ID NO: 58988 - DNA, 20 bp, Artificial Sequence
  Synthetic oligonucleotide; TAGAAT chr11 5284619 5284638 5284635 +
ggagcagtcccatgtagtag

SEQ ID NO: 58989 - DNA, 20 bp, Artificial Sequence
  Synthetic oligonucleotide; GGGAGT chr11 5284703 5284722 5284719 +
gtctatctctcctggctcct

SEQ ID NO: 58990 - DNA, 20 bp, Artificial Sequence
  Synthetic oligonucleotide; GAGGGT chr11 5284874 5284893 5284890 +
ccagctcgcaaagtcaccgt

SEQ ID NO: 58991 - DNA, 20 bp, Artificial Sequence
  Synthetic oligonucleotide; CTGAGT chr11 5284890 5284909 5284906 +
ccgtgagggtcttgtgtttg

SEQ ID NO: 58992 - DNA, 20 bp, Artificial Sequence
  Synthetic oligonucleotide; CAGAAT chr11 5284982 5285001 5284998 +
atggctgtctcctttatcca

SEQ ID NO: 58993 - DNA, 20 bp, Artificial Sequence
  Synthetic oligonucleotide; CAGAGT chr11 5285062 5285081 5285078 +
gggcccatgagcagtagctg

SEQ ID NO: 58994 - DNA, 20 bp, Artificial Sequence
  Synthetic oligonucleotide; TGGAGT chr11 5285178 5285197 5285194 +
ataataatagtgttttttta

SEQ ID NO: 58995 - DNA, 20 bp, Artificial Sequence
  Synthetic oligonucleotide; GAGGAT chr11 5285190 5285209 5285206 +
tttttttatggagttagcgt

SEQ ID NO: 58996 - DNA, 20 bp, Artificial Sequence
  Synthetic oligonucleotide; AAGAGT chr11 5285332 5285351 5285348 +
aattttcccttacctataat

SEQ ID NO: 58997 - DNA, 20 bp, Artificial Sequence
  Synthetic oligonucleotide; CTGGAT chr11 5285371 5285390 5285387 +
atattcttcttatagtgatt

SEQ ID NO: 58998 - DNA, 20 bp, Artificial Sequence
  Synthetic oligonucleotide; GGGAAT chr11 5285385 5285404 5285401 +
gtgattctggatattaaagt

SEQ ID NO: 58999 - DNA, 20 bp, Artificial Sequence
  Synthetic oligonucleotide; CAGGGT chr11 5285459 5285478 5285475 +
ccccacatagatcatctcag

SEQ ID NO: 59000 - DNA, 20 bp, Artificial Sequence
  Synthetic oligonucleotide; GAGGAT chr11 5285479 5285498 5285495 +
cagggttcaggaagataaag

SEQ ID NO: 59001 - DNA, 20 bp, Artificial Sequence
  Synthetic oligonucleotide; GTGGAT chr11 5285524 5285543 5285540 +
taaggaagaacactgggcaa

SEQ ID NO: 59002 - DNA, 20 bp, Artificial Sequence
  Synthetic oligonucleotide; AGGAAT chr11 5285553 5285572 5285569 +
ggttgtccaacgctgaaagt

SEQ ID NO: 59003 - DNA, 20 bp, Artificial Sequence
  Synthetic oligonucleotide; CTGGAT chr11 5285573 5285592 5285589 +
aggaatctaagcactagtct

SEQ ID NO: 59004 - DNA, 20 bp, Artificial Sequence
  Synthetic oligonucleotide; ATGGGT chr11 5285596 5285615 5285612 +
gatgctaggagggcctctgc

SEQ ID NO: 59005 - DNA, 20 bp, Artificial Sequence
  Synthetic oligonucleotide; GAGGAT chr11 5285687 5285706 5285703 +
ccagcaggaaacacttaaga

SEQ ID NO: 59006 - DNA, 20 bp, Artificial Sequence
  Synthetic oligonucleotide; CTGAAT chr11 5285839 5285858 5285855 +
gatttctacatgctggagcc

SEQ ID NO: 59007 - DNA, 20 bp, Artificial Sequence
  Synthetic oligonucleotide; AAGAAT chr11 5285948 5285967 5285964 +
ataatctgattcatgcaacc

SEQ ID NO: 59008 - DNA, 20 bp, Artificial Sequence
  Synthetic oligonucleotide; TGGGGT chr11 5286007 5286026 5286023 +
atttattgttgtgcatatga

SEQ ID NO: 59009 - DNA, 20 bp, Artificial Sequence
  Synthetic oligonucleotide; ATGAGT chr11 5286057 5286076 5286073 +
atagactttctcagagctat

SEQ ID NO: 59010 - DNA, 20 bp, Artificial Sequence
  Synthetic oligonucleotide; GGGAAT chr11 5286065 5286084 5286081 +
tctcagagctatatgagttt

SEQ ID NO: 59011 - DNA, 20 bp, Artificial Sequence
  Synthetic oligonucleotide; CAGGGT chr11 5286093 5286112 5286109 +
atcaagaccagccttttgct

SEQ ID NO: 59012 - DNA, 20 bp, Artificial Sequence
  Synthetic oligonucleotide; AGGGAT chr11 5286112 5286131 5286128 +
tcagggtagaaatcccctat

SEQ ID NO: 59013 - DNA, 20 bp, Artificial Sequence
  Synthetic oligonucleotide; ATGGGT chr11 5286128 5286147 5286144 +
ctatagggatttattcaatg

SEQ ID NO: 59014 - DNA, 20 bp, Artificial Sequence
  Synthetic oligonucleotide; AAGAAT chr11 5286225 5286244 5286241 +
tatgaaattcttacacacag

SEQ ID NO: 59015 - DNA, 20 bp, Artificial Sequence
  Synthetic oligonucleotide; CTGGGT chr11 5286240 5286259 5286256 +
cacagaagaatcttctaatc

SEQ ID NO: 59016 - DNA, 20 bp, Artificial Sequence
  Synthetic oligonucleotide; AGGGAT chr11 5286466 5286485 5286482 +
gtgtagtctttcctgatgtc

SEQ ID NO: 59017 - DNA, 20 bp, Artificial Sequence
  Synthetic oligonucleotide; ACGAAT chr11 5286522 5286541 5286538 +
catcccagagcaggacacag

SEQ ID NO: 59018 - DNA, 20 bp, Artificial Sequence
  Synthetic oligonucleotide; TGGAAT chr11 5286562 5286581 5286578 +
tagtcacttaggaaaaacag

SEQ ID NO: 59019 - DNA, 20 bp, Artificial Sequence
  Synthetic oligonucleotide; AAGAGT chr11 5286571 5286590 5286587 +
aggaaaaacagtggaatgca

SEQ ID NO: 59020 - DNA, 20 bp, Artificial Sequence
  Synthetic oligonucleotide; CTGAAT chr11 5286589 5286608 5286605 +
caaagagtaaaaaatgcttt

SEQ ID NO: 59021 - DNA, 20 bp, Artificial Sequence
  Synthetic oligonucleotide; ATGGAT chr11 5286593 5286612 5286609 +
gagtaaaaaatgctttctga

SEQ ID NO: 59022 - DNA, 20 bp, Artificial Sequence
  Synthetic oligonucleotide; TTGGAT chr11 5286712 5286731 5286728 +
tacatgtcaataaatattta

SEQ ID NO: 59023 - DNA, 20 bp, Artificial Sequence
  Synthetic oligonucleotide; GAGAGT chr11 5286788 5286807 5286804 +
tagtttatgtttgtgtgtgt

SEQ ID NO: 59024 - DNA, 20 bp, Artificial Sequence
  Synthetic oligonucleotide; GGGGAT chr11 5286841 5286860 5286857 +
ttttttaactgtagtaaaat

SEQ ID NO: 59025 - DNA, 20 bp, Artificial Sequence
  Synthetic oligonucleotide; AAGAAT chr11 5286866 5286885 5286882 +
taataatagtatctacctga

SEQ ID NO: 59026 - DNA, 20 bp, Artificial Sequence
  Synthetic oligonucleotide; AAGAGT chr11 5286874 5286893 5286890 +
gtatctacctgaaagaatcc

SEQ ID NO: 59027 - DNA, 20 bp, Artificial Sequence
  Synthetic oligonucleotide; ATGAAT chr11 5286968 5286987 5286984 +
ttttattattacagttaaag

SEQ ID NO: 59028 - DNA, 20 bp, Artificial Sequence
  Synthetic oligonucleotide; AAGAAT chr11 5287011 5287030 5287027 +
cactagttttcacctgcagc

SEQ ID NO: 59029 - DNA, 20 bp, Artificial Sequence
  Synthetic oligonucleotide; TAGAGT chr11 5287053 5287072 5287069 +
aaaatactagcaaacatttc

SEQ ID NO: 59030 - DNA, 20 bp, Artificial Sequence
  Synthetic oligonucleotide; CGGAGT chr11 5287210 5287229 5287226 +
tgggcagattgcttgagctc

SEQ ID NO: 59031 - DNA, 20 bp, Artificial Sequence
  Synthetic oligonucleotide; CAGGAT chr11 5287312 5287331 5287328 +
tacctgtggttccagctact

SEQ ID NO: 59032 - DNA, 20 bp, Artificial Sequence
  Synthetic oligonucleotide; TTGGGT chr11 5287393 5287412 5287409 +
ttttgccactacactcccat

SEQ ID NO: 59033 - DNA, 20 bp, Artificial Sequence
  Synthetic oligonucleotide; CAGAGT chr11 5287401 5287420 5287417 +
ctacactcccatttgggtga

SEQ ID NO: 59034 - DNA, 20 bp, Artificial Sequence
  Synthetic oligonucleotide; CTGAGT chr11 5287465 5287484 5287481 +
ccattttacagatgaagaaa

SEQ ID NO: 59035 - DNA, 20 bp, Artificial Sequence
  Synthetic oligonucleotide; CTGAGT chr11 5287491 5287510 5287507 +
catacaactactaagagaaa

SEQ ID NO: 59036 - DNA, 20 bp, Artificial Sequence
  Synthetic oligonucleotide; AAGGGT chr11 5287577 5287596 5287593 +
cccaagacttttataaagtc

SEQ ID NO: 59037 - DNA, 20 bp, Artificial Sequence
  Synthetic oligonucleotide; TTGAGT chr11 5287582 5287601 5287598 +
gacttttataaagtcaaggg

SEQ ID NO: 59038 - DNA, 20 bp, Artificial Sequence
  Synthetic oligonucleotide; ATGAGT chr11 5287595 5287614 5287611 +
tcaagggttgagtcactgaa

SEQ ID NO: 59039 - DNA, 20 bp, Artificial Sequence
  Synthetic oligonucleotide; TGGGAT chr11 5287604 5287623 5287620 +
gagtcactgaaatgagttat

SEQ ID NO: 59040 - DNA, 20 bp, Artificial Sequence
  Synthetic oligonucleotide; AAGGGT chr11 5287621 5287640 5287637 +
tattgggatggctgtgtggg

SEQ ID NO: 59041 - DNA, 20 bp, Artificial Sequence
  Synthetic oligonucleotide; GAGAAT chr11 5287652 5287671 5287668 +
gttctttcctaaaggtatgt

SEQ ID NO: 59042 - DNA, 20 bp, Artificial Sequence
  Synthetic oligonucleotide; CTGGGT chr11 5287727 5287746 5287743 +
aaatctgacactcagtgggc

SEQ ID NO: 59043 - DNA, 20 bp, Artificial Sequence
  Synthetic oligonucleotide; GAGAAT chr11 5287739 5287758 5287755 +
cagtgggcctgggtgaaggt

SEQ ID NO: 59044 - DNA, 20 bp, Artificial Sequence
  Synthetic oligonucleotide; CTGAAT chr11 5287752 5287771 5287768 +
tgaaggtgagaattttattg

SEQ ID NO: 59045 - DNA, 20 bp, Artificial Sequence
  Synthetic oligonucleotide; ATGAGT chr11 5287787 5287806 5287803 +
tggggacatcttgccagtca

SEQ ID NO: 59046 - DNA, 20 bp, Artificial Sequence
  Synthetic oligonucleotide; TGGAGT chr11 5287819 5287838 5287835 +
ttcaatttccttctcagtct

SEQ ID NO: 59047 - DNA, 20 bp, Artificial Sequence
  Synthetic oligonucleotide; AAGGGT chr11 5287934 5287953 5287950 +
agagaaactgaggctcagag

SEQ ID NO: 59048 - DNA, 20 bp, Artificial Sequence
  Synthetic oligonucleotide; TTGGAT chr11 5287976 5287995 5287992 +
tgacatggaaatgatcaggc

SEQ ID NO: 59049 - DNA, 20 bp, Artificial Sequence
  Synthetic oligonucleotide; GGGAAT chr11 5288172 5288191 5288188 +
taaataagcaaaccctgctc

SEQ ID NO: 59050 - DNA, 20 bp, Artificial Sequence
  Synthetic oligonucleotide; GAGAGT chr11 5288184 5288203 5288200 +
ccctgctcgggaatgggagg

SEQ ID NO: 59051 - DNA, 20 bp, Artificial Sequence
  Synthetic oligonucleotide; TGGAGT chr11 5288193 5288212 5288209 +
ggaatgggagggagagtctc

SEQ ID NO: 59052 - DNA, 20 bp, Artificial Sequence
  Synthetic oligonucleotide; TGGAGT chr11 5288273 5288292 5288289 +
ccctgcccattgctgggcct

SEQ ID NO: 59053 - DNA, 20 bp, Artificial Sequence
  Synthetic oligonucleotide; GTGAGT chr11 5288277 5288296 5288293 +
gcccattgctgggccttgga

SEQ ID NO: 59054 - DNA, 20 bp, Artificial Sequence
  Synthetic oligonucleotide; CTGAGT chr11 5288322 5288341 5288338 +
ggcaagccatctcatagctg

SEQ ID NO: 59055 - DNA, 20 bp, Artificial Sequence
  Synthetic oligonucleotide; AAGAAT chr11 5288396 5288415 5288412 +
cttattctcacactaagaaa

SEQ ID NO: 59056 - DNA, 20 bp, Artificial Sequence
  Synthetic oligonucleotide; TGGGGT chr11 5288440 5288459 5288456 +
ctgcgtcccctcttgtgtac

SEQ ID NO: 59057 - DNA, 20 bp, Artificial Sequence
  Synthetic oligonucleotide; ATGGGT chr11 5288714 5288733 5288730 +
aatttcacatcaatgtctat

SEQ ID NO: 59058 - DNA, 20 bp, Artificial Sequence
  Synthetic oligonucleotide; GTGAAT chr11 5288793 5288812 5288809 +
tctaagaaagttacaacatg

SEQ ID NO: 59059 - DNA, 20 bp, Artificial Sequence
  Synthetic oligonucleotide; AGGAAT chr11 5288861 5288880 5288877 +
tcttgaggcctcagctttct

SEQ ID NO: 59060 - DNA, 20 bp, Artificial Sequence
  Synthetic oligonucleotide; TGGAGT chr11 5289040 5289059 5289056 +
tttcactctgctgtccaggc

SEQ ID NO: 59061 - DNA, 20 bp, Artificial Sequence
  Synthetic oligonucleotide; AGGGAT chr11 5289093 5289112 5289109 +
gccttgacctcctgagctca

SEQ ID NO: 59062 - DNA, 20 bp, Artificial Sequence
  Synthetic oligonucleotide; CTGAGT chr11 5289116 5289135 5289132 +
gatcctcccatttcggcctc

SEQ ID NO: 59063 - DNA, 20 bp, Artificial Sequence
  Synthetic oligonucleotide; CAGGAT chr11 5289204 5289223 5289220 +
cgaggtcttgctatgttgtc

SEQ ID NO: 59064 - DNA, 20 bp, Artificial Sequence
  Synthetic oligonucleotide; TGGAAT chr11 5289262 5289281 5289278 +
cacttctacctctcaagtgc

SEQ ID NO: 59065 - DNA, 20 bp, Artificial Sequence
  Synthetic oligonucleotide; AGGGAT chr11 5289333 5289352 5289349 +
ctaattcctgacactacttg

SEQ ID NO: 59066 - DNA, 20 bp, Artificial Sequence
  Synthetic oligonucleotide; ATGGGT chr11 5289374 5289393 5289390 +
acacatctttaatataccaa

SEQ ID NO: 59067 - DNA, 20 bp, Artificial Sequence
  Synthetic oligonucleotide; TAGGGT chr11 5289385 5289404 5289401 +
atataccaaatgggtgactg

SEQ ID NO: 59068 - DNA, 20 bp, Artificial Sequence
  Synthetic oligonucleotide; TAGAAT chr11 5289403 5289422 5289419 +
tgtagggttgagagggagat

SEQ ID NO: 59069 - DNA, 20 bp, Artificial Sequence
  Synthetic oligonucleotide; GGGGAT chr11 5289574 5289593 5289590 +
gtgcaaaaagggaactacct

SEQ ID NO: 59070 - DNA, 20 bp, Artificial Sequence
  Synthetic oligonucleotide; AAGAGT chr11 5289804 5289823 5289820 +
cttccaaggtctgttgcatc

SEQ ID NO: 59071 - DNA, 20 bp, Artificial Sequence
  Synthetic oligonucleotide; GAGAAT chr11 5289810 5289829 5289826 +
aggtctgttgcatcaagagt

SEQ ID NO: 59072 - DNA, 20 bp, Artificial Sequence
  Synthetic oligonucleotide; TGGGAT chr11 5289832 5289851 5289848 +
gaattgaaggtcttagaagc

SEQ ID NO: 59073 - DNA, 20 bp, Artificial Sequence
  Synthetic oligonucleotide; ATGAGT chr11 5289923 5289942 5289939 +
gatctagtcatctacaaagc

SEQ ID NO: 59074 - DNA, 20 bp, Artificial Sequence
  Synthetic oligonucleotide; GTGGGT chr11 5289930 5289949 5289946 +
tcatctacaaagcatgagtt

SEQ ID NO: 59075 - DNA, 20 bp, Artificial Sequence
  Synthetic oligonucleotide; CAGAAT chr11 5289975 5289994 5289991 +
cttttgacttcctttgacat

SEQ ID NO: 59076 - DNA, 20 bp, Artificial Sequence
  Synthetic oligonucleotide; AGGAAT chr11 5289988 5290007 5290004 +
ttgacatcagaatataacct

SEQ ID NO: 59077 - DNA, 20 bp, Artificial Sequence
  Synthetic oligonucleotide; ATGGAT chr11 5290198 5290217 5290214 +
gtgctcagggctgtgtgtgt

SEQ ID NO: 59078 - DNA, 20 bp, Artificial Sequence
  Synthetic oligonucleotide; GGGAGT chr11 5290225 5290244 5290241 +
gtttgaaatgaaactaaagt

SEQ ID NO: 59079 - DNA, 20 bp, Artificial Sequence
  Synthetic oligonucleotide; GAGAAT chr11 5290366 5290385 5290382 +
caacatcctcataataactt

SEQ ID NO: 59080 - DNA, 20 bp, Artificial Sequence
  Synthetic oligonucleotide; TAGGGT chr11 5290392 5290411 5290408 +
aattttataaaatatcacaa

SEQ ID NO: 59081 - DNA, 20 bp, Artificial Sequence
  Synthetic oligonucleotide; TAGGGT chr11 5290407 5290426 5290423 +
cacaatagggtcatgttcag

SEQ ID NO: 59082 - DNA, 20 bp, Artificial Sequence
  Synthetic oligonucleotide; TTGAGT chr11 5290440 5290459 5290456 +
aaaattagacaagccatagt

SEQ ID NO: 59083 - DNA, 20 bp, Artificial Sequence
  Synthetic oligonucleotide; TTGAAT chr11 5290454 5290473 5290470 +
catagtttgagtttaccctt

SEQ ID NO: 59084 - DNA, 20 bp, Artificial Sequence
  Synthetic oligonucleotide; ATGAGT chr11 5290493 5290512 5290509 +
aaggcaatttaattatcttt

SEQ ID NO: 59085 - DNA, 20 bp, Artificial Sequence
  Synthetic oligonucleotide; AAGAAT chr11 5290607 5290626 5290623 +
tatagttcctagcacaaagt

SEQ ID NO: 59086 - DNA, 20 bp, Artificial Sequence
  Synthetic oligonucleotide; AGGAAT chr11 5290657 5290676 5290673 +
tgtatttatctgttattaat

SEQ ID NO: 59087 - DNA, 20 bp, Artificial Sequence
  Synthetic oligonucleotide; TTGAGT chr11 5290718 5290737 5290734 +
actatgaagcaggtatttat

SEQ ID NO: 59088 - DNA, 20 bp, Artificial Sequence
  Synthetic oligonucleotide; GTGAGT chr11 5290731 5290750 5290747 +
tatttatttgagttttccaa

SEQ ID NO: 59089 - DNA, 20 bp, Artificial Sequence
  Synthetic oligonucleotide; ATGAAT chr11 5290934 5290953 5290950 +
accagccttagctgtctgct

SEQ ID NO: 59090 - DNA, 20 bp, Artificial Sequence
  Synthetic oligonucleotide; GAGGGT chr11 5290982 5291001 5290998 +
aaatgagagagagaaatggg

SEQ ID NO: 59091 - DNA, 20 bp, Artificial Sequence
  Synthetic oligonucleotide; TAGGGT chr11 5291002 5291021 5291018 +
gagggtagaaggaaggaaga

SEQ ID NO: 59092 - DNA, 20 bp, Artificial Sequence
  Synthetic oligonucleotide; TTGAAT chr11 5291087 5291106 5291103 +
aaagagctctttccattaca

SEQ ID NO: 59093 - DNA, 20 bp, Artificial Sequence
  Synthetic oligonucleotide; GTGAGT chr11 5291233 5291252 5291249 +
ttattattagaaatggggaa

SEQ ID NO: 59094 - DNA, 20 bp, Artificial Sequence
  Synthetic oligonucleotide; AGGAGT chr11 5291293 5291312 5291309 +
gggaaactggagaaactggg

SEQ ID NO: 59095 - DNA, 20 bp, Artificial Sequence
  Synthetic oligonucleotide; AAGAGT chr11 5291458 5291477 5291474 +
cagcttcagctacctctcta

SEQ ID NO: 59096 - DNA, 20 bp, Artificial Sequence
  Synthetic oligonucleotide; CAGAGT chr11 5291674 5291693 5291690 +
ctaaactgaaattgctatag

SEQ ID NO: 59097 - DNA, 20 bp, Artificial Sequence
  Synthetic oligonucleotide; AAGAGT chr11 5291710 5291729 5291726 +
gtttacagatattttccaca

SEQ ID NO: 59098 - DNA, 20 bp, Artificial Sequence
  Synthetic oligonucleotide; AAGGAT chr11 5291718 5291737 5291734 +
atattttccacaaagagtaa

SEQ ID NO: 59099 - DNA, 20 bp, Artificial Sequence
  Synthetic oligonucleotide; TAGGAT chr11 5291795 5291814 5291811 +
catattatgacgaacaacat

SEQ ID NO: 59100 - DNA, 20 bp, Artificial Sequence
  Synthetic oligonucleotide; AAGAAT chr11 5291906 5291925 5291922 +
gaaagaggagccatttgatc

SEQ ID NO: 59101 - DNA, 20 bp, Artificial Sequence
  Synthetic oligonucleotide; AAGAAT chr11 5292083 5292102 5292099 +
taaaggagaacctaaagagg

SEQ ID NO: 59102 - DNA, 20 bp, Artificial Sequence
  Synthetic oligonucleotide; AAGGGT chr11 5292154 5292173 5292170 +
aatatccttttgactgtgga

SEQ ID NO: 59103 - DNA, 20 bp, Artificial Sequence
  Synthetic oligonucleotide; AGGGAT chr11 5292218 5292237 5292234 +
agaggaacattggcttggtg

SEQ ID NO: 59104 - DNA, 20 bp, Artificial Sequence
  Synthetic oligonucleotide; CAGGAT chr11 5292242 5292261 5292258 +
atatctgtcctgatgttgtc

SEQ ID NO: 59105 - DNA, 20 bp, Artificial Sequence
  Synthetic oligonucleotide; GGGGAT chr11 5292287 5292306 5292303 +
ataacgtagagaaaacagga

SEQ ID NO: 59106 - DNA, 20 bp, Artificial Sequence
  Synthetic oligonucleotide; AGGGAT chr11 5292322 5292341 5292338 +
gacaaagaggcatcaaagat

SEQ ID NO: 59107 - DNA, 20 bp, Artificial Sequence
  Synthetic oligonucleotide; AAGGAT chr11 5292334 5292353 5292350 +
tcaaagatagggatgtttgt

SEQ ID NO: 59108 - DNA, 20 bp, Artificial Sequence
  Synthetic oligonucleotide; GAGGAT chr11 5292371 5292390 5292387 +
ttttttgcgttagtcaccgt

SEQ ID NO: 59109 - DNA, 20 bp, Artificial Sequence
  Synthetic oligonucleotide; TGGGGT chr11 5292464 5292483 5292480 +
ataataattgtgtgtattca

SEQ ID NO: 59110 - DNA, 20 bp, Artificial Sequence
  Synthetic oligonucleotide; CAGGAT chr11 5292628 5292647 5292644 +
agttaaaatgtcatatgtgt

SEQ ID NO: 59111 - DNA, 20 bp, Artificial Sequence
  Synthetic oligonucleotide; TTGAAT chr11 5292656 5292675 5292672 +
agtaatagatttagaaaaca

SEQ ID NO: 59112 - DNA, 20 bp, Artificial Sequence
  Synthetic oligonucleotide; ATGAAT chr11 5292677 5292696 5292693 +
tgaatgattccttgcaaatc

SEQ ID NO: 59113 - DNA, 20 bp, Artificial Sequence
  Synthetic oligonucleotide; AGGAAT chr11 5292764 5292783 5292780 +
cttgatcacttttggaggtc

SEQ ID NO: 59114 - DNA, 20 bp, Artificial Sequence
  Synthetic oligonucleotide; CAGAAT chr11 5292818 5292837 5292834 +
aacttgaaattgcattatag

SEQ ID NO: 59115 - DNA, 20 bp, Artificial Sequence
  Synthetic oligonucleotide; TTGAGT chr11 5292831 5292850 5292847 +
attatagcagaatgtaggcc

SEQ ID NO: 59116 - DNA, 20 bp, Artificial Sequence
  Synthetic oligonucleotide; GTGGAT chr11 5292835 5292854 5292851 +
tagcagaatgtaggccttga

SEQ ID NO: 59117 - DNA, 20 bp, Artificial Sequence
  Synthetic oligonucleotide; GTGGGT chr11 5292935 5292954 5292951 +
taagcagtttcatatgaaac

SEQ ID NO: 59118 - DNA, 20 bp, Artificial Sequence
  Synthetic oligonucleotide; CTGAGT chr11 5292978 5292997 5292994 +
acagtcagatgttcatggtc

SEQ ID NO: 59119 - DNA, 20 bp, Artificial Sequence
  Synthetic oligonucleotide; AGGAGT chr11 5293006 5293025 5293022 +
tctcctccaagcagtgggcc

SEQ ID NO: 59120 - DNA, 20 bp, Artificial Sequence
  Synthetic oligonucleotide; CAGAAT chr11 5293045 5293064 5293061 +
tgtgattgactttatcattt

SEQ ID NO: 59121 - DNA, 20 bp, Artificial Sequence
  Synthetic oligonucleotide; GAGAAT chr11 5293083 5293102 5293099 +
gccacatagaggaagggaaa

SEQ ID NO: 59122 - DNA, 20 bp, Artificial Sequence
  Synthetic oligonucleotide; GGGAGT chr11 5293111 5293130 5293127 +
tagaagggcactctgcctta

SEQ ID NO: 59123 - DNA, 20 bp, Artificial Sequence
  Synthetic oligonucleotide; CGGAAT chr11 5293246 5293265 5293262 +
tgtttctgacatactgtgtc

SEQ ID NO: 59124 - DNA, 20 bp, Artificial Sequence
  Synthetic oligonucleotide; GTGGGT chr11 5293254 5293273 5293270 +
acatactgtgtccggaattg

SEQ ID NO: 59125 - DNA, 20 bp, Artificial Sequence
  Synthetic oligonucleotide; AAGAAT chr11 5293279 5293298 5293295 +
ttcttggtttcactgacttc

SEQ ID NO: 59126 - DNA, 20 bp, Artificial Sequence
  Synthetic oligonucleotide; GTGAGT chr11 5293304 5293323 5293320 +
tgaagccggggaccctcgtg

SEQ ID NO: 59127 - DNA, 20 bp, Artificial Sequence
  Synthetic oligonucleotide; TGGAGT chr11 5293336 5293355 5293352 +
gttcttaaaggctgcgtgtg

SEQ ID NO: 59128 - DNA, 20 bp, Artificial Sequence
  Synthetic oligonucleotide; TTGGAT chr11 5293358 5293377 5293374 +
gagtttgttcgttctgatgt

SEQ ID NO: 59129 - DNA, 20 bp, Artificial Sequence
  Synthetic oligonucleotide; CGGAGT chr11 5293369 5293388 5293385 +
ttctgatgtttggatgtgtt

SEQ ID NO: 59130 - DNA, 20 bp, Artificial Sequence
  Synthetic oligonucleotide; ATGGGT chr11 5293387 5293406 5293403 +
ttcggagtttcttccttctg

SEQ ID NO: 59131 - DNA, 20 bp, Artificial Sequence
  Synthetic oligonucleotide; AGGAGT chr11 5293411 5293430 5293427 +
gttcgtggtctcgctggctc

SEQ ID NO: 59132 - DNA, 20 bp, Artificial Sequence
  Synthetic oligonucleotide; TGGAGT chr11 5293467 5293486 5293483 +
agctcttaaggcggcgcctc

SEQ ID NO: 59133 - DNA, 20 bp, Artificial Sequence
  Synthetic oligonucleotide; GTGGGT chr11 5293488 5293507 5293504 +
ggagttgttcgttcctcccg

SEQ ID NO: 59134 - DNA, 20 bp, Artificial Sequence
  Synthetic oligonucleotide; AAGAGT chr11 5293513 5293532 5293529 +
ttcgtggtctcgctggcttc

SEQ ID NO: 59135 - DNA, 20 bp, Artificial Sequence
  Synthetic oligonucleotide; GCGGGT chr11 5293647 5293666 5293663 +
cagtgtggaaggggacccga

SEQ ID NO: 59136 - DNA, 20 bp, Artificial Sequence
  Synthetic oligonucleotide; CAGAGT chr11 5293822 5293841 5293838 +
cccaccagattagctagata

SEQ ID NO: 59137 - DNA, 20 bp, Artificial Sequence
  Synthetic oligonucleotide; CAGAGT chr11 5293857 5293876 5293873 +
aaggttctccaagtccccac

SEQ ID NO: 59138 - DNA, 20 bp, Artificial Sequence
  Synthetic oligonucleotide; CAGAGT chr11 5293872 5293891 5293888 +
cccaccagagtagctagata

SEQ ID NO: 59139 - DNA, 20 bp, Artificial Sequence
  Synthetic oligonucleotide; CAGGGT chr11 5293913 5293932 5293929 +
cacaaaccctgagctagaca

SEQ ID NO: 59140 - DNA, 20 bp, Artificial Sequence
  Synthetic oligonucleotide; CCGAGT chr11 5293961 5293980 5293977 +
cttgagctagatacagactg

SEQ ID NO: 59141 - DNA, 20 bp, Artificial Sequence
  Synthetic oligonucleotide; CAGAGT chr11 5294017 5294036 5294033 +
aaggttctccacgtccccac

SEQ ID NO: 59142 - DNA, 20 bp, Artificial Sequence
  Synthetic oligonucleotide; CAGAGT chr11 5294032 5294051 5294048 +
cccaccagagtagctagata

SEQ ID NO: 59143 - DNA, 20 bp, Artificial Sequence
  Synthetic oligonucleotide; CAGGGT chr11 5294073 5294092 5294089 +
cacaaaccctgagctagaca

SEQ ID NO: 59144 - DNA, 20 bp, Artificial Sequence
  Synthetic oligonucleotide; CAGAGT chr11 5294177 5294196 5294193 +
aaggttctccaaggccccac

SEQ ID NO: 59145 - DNA, 20 bp, Artificial Sequence
  Synthetic oligonucleotide; TAGAGT chr11 5294190 5294209 5294206 +
gccccaccagagtagctaga

SEQ ID NO: 59146 - DNA, 20 bp, Artificial Sequence
  Synthetic oligonucleotide; CAGGGT chr11 5294231 5294250 5294247 +
cacaaaccctgagctagaca

SEQ ID NO: 59147 - DNA, 20 bp, Artificial Sequence
  Synthetic oligonucleotide; CAGAGT chr11 5294272 5294291 5294288 +
tacaaaccttgagctagata

SEQ ID NO: 59148 - DNA, 20 bp, Artificial Sequence
  Synthetic oligonucleotide; AAGGGT chr11 5294314 5294333 5294330 +
acaatcccttatctagacat

SEQ ID NO: 59149 - DNA, 20 bp, Artificial Sequence
  Synthetic oligonucleotide; GTGGAT chr11 5294365 5294384 5294381 +
agcctagccggcttcaccca

SEQ ID NO: 59150 - DNA, 20 bp, Artificial Sequence
  Synthetic oligonucleotide; TTGGGT chr11 5294437 5294456 5294453 +
gcgcccgcactcttcagccc

SEQ ID NO: 59151 - DNA, 20 bp, Artificial Sequence
  Synthetic oligonucleotide; CTGGGT chr11 5294454 5294473 5294470 +
cccttgggtggtcgatggga

SEQ ID NO: 59152 - DNA, 20 bp, Artificial Sequence
  Synthetic oligonucleotide; AGGAAT chr11 5294592 5294611 5294608 +
aaggcagctaaggcccggcg

SEQ ID NO: 59153 - DNA, 20 bp, Artificial Sequence
  Synthetic oligonucleotide; CCGAGT chr11 5294669 5294688 5294685 +
ggtggggccggctggcggct

SEQ ID NO: 59154 - DNA, 20 bp, Artificial Sequence
  Synthetic oligonucleotide; CGGGGT chr11 5294676 5294695 5294692 +
ccggctggcggctccgagtg

SEQ ID NO: 59155 - DNA, 20 bp, Artificial Sequence
  Synthetic oligonucleotide; AGGAAT chr11 5294989 5295008 5295005 +
cctgtgcttccaaaaataac

SEQ ID NO: 59156 - DNA, 20 bp, Artificial Sequence
  Synthetic oligonucleotide; TGGAGT chr11 5295062 5295081 5295078 +
taagcagtaaaaataagacc

SEQ ID NO: 59157 - DNA, 20 bp, Artificial Sequence
  Synthetic oligonucleotide; TGGAAT chr11 5295100 5295119 5295116 +
ccaaatgctgtaatacttca

SEQ ID NO: 59158 - DNA, 20 bp, Artificial Sequence
  Synthetic oligonucleotide; ATGAAT chr11 5295176 5295195 5295192 +
gctttaaaaaatgtttcctc

SEQ ID NO: 59159 - DNA, 20 bp, Artificial Sequence
  Synthetic oligonucleotide; ATGAGT chr11 5295228 5295247 5295244 +
gtattctagagccaaatatc

SEQ ID NO: 59160 - DNA, 20 bp, Artificial Sequence
  Synthetic oligonucleotide; TTGAAT chr11 5295233 5295252 5295249 +
ctagagccaaatatcatgag

SEQ ID NO: 59161 - DNA, 20 bp, Artificial Sequence
  Synthetic oligonucleotide; TGGAAT chr11 5295272 5295291 5295288 +
agttagtagccacttcatct

SEQ ID NO: 59162 - DNA, 20 bp, Artificial Sequence
  Synthetic oligonucleotide; AAGGGT chr11 5295316 5295335 5295332 +
gcctcagtttcctcctctta

SEQ ID NO: 59163 - DNA, 20 bp, Artificial Sequence
  Synthetic oligonucleotide; CAGAGT chr11 5295343 5295362 5295359 +
ttacaatagtacttgaggca

SEQ ID NO: 59164 - DNA, 20 bp, Artificial Sequence
  Synthetic oligonucleotide; GTGAAT chr11 5295353 5295372 5295369 +
acttgaggcacagagttact

SEQ ID NO: 59165 - DNA, 20 bp, Artificial Sequence
  Synthetic oligonucleotide; GAGGAT chr11 5295478 5295497 5295494 +
actatcctagtgtgtagatt

SEQ ID NO: 59166 - DNA, 20 bp, Artificial Sequence
  Synthetic oligonucleotide; ATGGGT chr11 5295518 5295537 5295534 +
caaagacatgaaggtcacat

SEQ ID NO: 59167 - DNA, 20 bp, Artificial Sequence
  Synthetic oligonucleotide; GGGAAT chr11 5295530 5295549 5295546 +
ggtcacatatgggtagacat

SEQ ID NO: 59168 - DNA, 20 bp, Artificial Sequence
  Synthetic oligonucleotide; AAGGAT chr11 5295558 5295577 5295574 +
atagatgagatgacattgtc

SEQ ID NO: 59169 - DNA, 20 bp, Artificial Sequence
  Synthetic oligonucleotide; ACGAGT chr11 5295567 5295586 5295583 +
atgacattgtcaaggattac

SEQ ID NO: 59170 - DNA, 20 bp, Artificial Sequence
  Synthetic oligonucleotide; GAGAAT chr11 5295640 5295659 5295656 +
tggcagaaacattttttcaa

SEQ ID NO: 59171 - DNA, 20 bp, Artificial Sequence
  Synthetic oligonucleotide; GTGGAT chr11 5295764 5295783 5295780 +
tgctgctttttgactcagag

SEQ ID NO: 59172 - DNA, 20 bp, Artificial Sequence
  Synthetic oligonucleotide; AGGAAT chr11 5295843 5295862 5295859 +
gtatttagaaggctttggag

SEQ ID NO: 59173 - DNA, 20 bp, Artificial Sequence
  Synthetic oligonucleotide; TAGAGT chr11 5295951 5295970 5295967 +
aatgtacatatatttttgac

SEQ ID NO: 59174 - DNA, 20 bp, Artificial Sequence
  Synthetic oligonucleotide; GAGAAT chr11 5296129 5296148 5296145 +
agatgtttatagtgataagt

SEQ ID NO: 59175 - DNA, 20 bp, Artificial Sequence
  Synthetic oligonucleotide; CAGAAT chr11 5296257 5296276 5296273 +
ttattttatgtgaagaaact

SEQ ID NO: 59176 - DNA, 20 bp, Artificial Sequence
  Synthetic oligonucleotide; TGGAGT chr11 5296264 5296283 5296280 +
atgtgaagaaactcagaata

SEQ ID NO: 59177 - DNA, 20 bp, Artificial Sequence
  Synthetic oligonucleotide; AAGGAT chr11 5296298 5296317 5296314 +
tctcaaattatcacttttat

SEQ ID NO: 59178 - DNA, 20 bp, Artificial Sequence
  Synthetic oligonucleotide; AAGGAT chr11 5296368 5296387 5296384 +
atctcttctcattttctatc

SEQ ID NO: 59179 - DNA, 20 bp, Artificial Sequence
  Synthetic oligonucleotide; CAGGAT chr11 5296513 5296532 5296529 +
tttagattaaaacatctaac

SEQ ID NO: 59180 - DNA, 20 bp, Artificial Sequence
  Synthetic oligonucleotide; ATGAGT chr11 5296648 5296667 5296664 +
acattagttatctcttacat

SEQ ID NO: 59181 - DNA, 20 bp, Artificial Sequence
  Synthetic oligonucleotide; ATGGGT chr11 5296751 5296770 5296767 +
catttcaacctacacaaatt

SEQ ID NO: 59182 - DNA, 20 bp, Artificial Sequence
  Synthetic oligonucleotide; AGGAAT chr11 5296801 5296820 5296817 +
gctacacagctgtttaaatt

SEQ ID NO: 59183 - DNA, 20 bp, Artificial Sequence
  Synthetic oligonucleotide; GTGAAT chr11 5296865 5296884 5296881 +
taggcatttaataaattttg

SEQ ID NO: 59184 - DNA, 20 bp, Artificial Sequence
  Synthetic oligonucleotide; GAGAAT chr11 5296932 5296951 5296948 +
cactatgatacctacttatt

SEQ ID NO: 59185 - DNA, 20 bp, Artificial Sequence
  Synthetic oligonucleotide; TTGAAT chr11 5297027 5297046 5297043 +
cctaggcacatgaaacactt

SEQ ID NO: 59186 - DNA, 20 bp, Artificial Sequence
  Synthetic oligonucleotide; GTGGAT chr11 5297099 5297118 5297115 +
catgcagaaagaagcttaat

SEQ ID NO: 59187 - DNA, 20 bp, Artificial Sequence
  Synthetic oligonucleotide; TAGAGT chr11 5297157 5297176 5297173 +
aacatcctttccctttctgt

SEQ ID NO: 59188 - DNA, 20 bp, Artificial Sequence
  Synthetic oligonucleotide; TTGGAT chr11 5297183 5297202 5297199 +
cacctgccttcatccatccc

SEQ ID NO: 59189 - DNA, 20 bp, Artificial Sequence
  Synthetic oligonucleotide; TTGAGT chr11 5297197 5297216 5297213 +
catcccttggatatgatacc

SEQ ID NO: 59190 - DNA, 20 bp, Artificial Sequence
  Synthetic oligonucleotide; CCGAAT chr11 5297357 5297376 5297373 +
cacatattgtgtttctatgg

SEQ ID NO: 59191 - DNA, 20 bp, Artificial Sequence
  Synthetic oligonucleotide; TTGGAT chr11 5297389 5297408 5297405 +
aggttctacattgtgtggtt

SEQ ID NO: 59192 - DNA, 20 bp, Artificial Sequence
  Synthetic oligonucleotide; AGGAAT chr11 5297452 5297471 5297468 +
cagtctcttcatgtgtagtc

SEQ ID NO: 59193 - DNA, 20 bp, Artificial Sequence
  Synthetic oligonucleotide; TTGAAT chr11 5297535 5297554 5297551 +
cctcttaagacactagcaac

SEQ ID NO: 59194 - DNA, 20 bp, Artificial Sequence
  Synthetic oligonucleotide; GAGGAT chr11 5297588 5297607 5297604 +
attatatactgaactcatgt

SEQ ID NO: 59195 - DNA, 20 bp, Artificial Sequence
  Synthetic oligonucleotide; TAGAGT chr11 5297660 5297679 5297676 +
gtatatcttccttgtaggta

SEQ ID NO: 59196 - DNA, 20 bp, Artificial Sequence
  Synthetic oligonucleotide; TTGGAT chr11 5297757 5297776 5297773 +
ttccttattggtcaatactt

SEQ ID NO: 59197 - DNA, 20 bp, Artificial Sequence
  Synthetic oligonucleotide; TGGGGT chr11 5297808 5297827 5297824 +
tgataataatgccaagaggc

SEQ ID NO: 59198 - DNA, 20 bp, Artificial Sequence
  Synthetic oligonucleotide; AGGAGT chr11 5297824 5297843 5297840 +
aggctggggtgagctataag

SEQ ID NO: 59199 - DNA, 20 bp, Artificial Sequence
  Synthetic oligonucleotide; AGGAAT chr11 5297852 5297871 5297868 +
aggctaatcagtacagcaag

SEQ ID NO: 59200 - DNA, 20 bp, Artificial Sequence
  Synthetic oligonucleotide; ATGAAT chr11 5297856 5297875 5297872 +
taatcagtacagcaagagga

SEQ ID NO: 59201 - DNA, 20 bp, Artificial Sequence
  Synthetic oligonucleotide; GAGGGT chr11 5297890 5297909 5297906 +
agataaagggaacggcgtgg

SEQ ID NO: 59202 - DNA, 20 bp, Artificial Sequence
  Synthetic oligonucleotide; GGGAAT chr11 5297905 5297924 5297921 +
cgtgggagggtgtttcctga

SEQ ID NO: 59203 - DNA, 20 bp, Artificial Sequence
  Synthetic oligonucleotide; GAGAAT chr11 5297927 5297946 5297943 +
gaatattcatgagacaaaca

SEQ ID NO: 59204 - DNA, 20 bp, Artificial Sequence
  Synthetic oligonucleotide; GGGAAT chr11 5297944 5297963 5297960 +
acagagaataaagaaatgaa

SEQ ID NO: 59205 - DNA, 20 bp, Artificial Sequence
  Synthetic oligonucleotide; ATGAAT chr11 5297999 5298018 5298015 +
aagtgatttctagaaagtgc

SEQ ID NO: 59206 - DNA, 20 bp, Artificial Sequence
  Synthetic oligonucleotide; GTGAAT chr11 5298044 5298063 5298060 +
aaagacctggcacttaaaat

SEQ ID NO: 59207 - DNA, 20 bp, Artificial Sequence
  Synthetic oligonucleotide; AGGAAT chr11 5298081 5298100 5298097 +
ctggctgagagaaatatctc

SEQ ID NO: 59208 - DNA, 20 bp, Artificial Sequence
  Synthetic oligonucleotide; CAGGGT chr11 5298104 5298123 5298120 +
aatggccatgttccaggctt

SEQ ID NO: 59209 - DNA, 20 bp, Artificial Sequence
  Synthetic oligonucleotide; CAGGGT chr11 5298182 5298201 5298198 +
tgtccctatcattaggaggc

SEQ ID NO: 59210 - DNA, 20 bp, Artificial Sequence
  Synthetic oligonucleotide; GAGGAT chr11 5298190 5298209 5298206 +
tcattaggaggccagggtgg

SEQ ID NO: 59211 - DNA, 20 bp, Artificial Sequence
  Synthetic oligonucleotide; AGGAAT chr11 5298207 5298226 5298223 +
tgggaggattgcttgaggtt

SEQ ID NO: 59212 - DNA, 20 bp, Artificial Sequence
  Synthetic oligonucleotide; AAGGAT chr11 5298325 5298344 5298341 +
tactcaaaaagctgaggaag

SEQ ID NO: 59213 - DNA, 20 bp, Artificial Sequence
  Synthetic oligonucleotide; CAGGAT chr11 5298341 5298360 5298357 +
gaagaaggattgcttgagcc

SEQ ID NO: 59214 - DNA, 20 bp, Artificial Sequence
  Synthetic oligonucleotide; GGGGGT chr11 5298506 5298525 5298522 +
aggactgcattaataaattt

SEQ ID NO: 59215 - DNA, 20 bp, Artificial Sequence
  Synthetic oligonucleotide; CAGAAT chr11 5298515 5298534 5298531 +
ttaataaatttgggggttta

SEQ ID NO: 59216 - DNA, 20 bp, Artificial Sequence
  Synthetic oligonucleotide; GAGAAT chr11 5298600 5298619 5298616 +
actaaactcacagtatgaca

SEQ ID NO: 59217 - DNA, 20 bp, Artificial Sequence
  Synthetic oligonucleotide; CAGGGT chr11 5298707 5298726 5298723 +
agtatggcaaacttgtcagt

SEQ ID NO: 59218 - DNA, 20 bp, Artificial Sequence
  Synthetic oligonucleotide; GAGGAT chr11 5298719 5298738 5298735 +
ttgtcagtcagggtgagact

SEQ ID NO: 59219 - DNA, 20 bp, Artificial Sequence
  Synthetic oligonucleotide; CTGGAT chr11 5298813 5298832 5298829 +
ataaatgtccttatatatca

SEQ ID NO: 59220 - DNA, 20 bp, Artificial Sequence
  Synthetic oligonucleotide; GTGGAT chr11 5298825 5298844 5298841 +
atatatcactggatcagcag

SEQ ID NO: 59221 - DNA, 20 bp, Artificial Sequence
  Synthetic oligonucleotide; AAGGAT chr11 5298848 5298867 5298864 +
gatgctgacttaataattga

SEQ ID NO: 59222 - DNA, 20 bp, Artificial Sequence
  Synthetic oligonucleotide; ATGAAT chr11 5298892 5298911 5298908 +
taaaatataatatataggtt

SEQ ID NO: 59223 - DNA, 20 bp, Artificial Sequence
  Synthetic oligonucleotide; ATGAGT chr11 5298941 5298960 5298957 +
atatacatttacttaagaaa

SEQ ID NO: 59224 - DNA, 20 bp, Artificial Sequence
  Synthetic oligonucleotide; ATGAGT chr11 5299050 5299069 5299066 +
atgtcatcccttgctaacat

SEQ ID NO: 59225 - DNA, 20 bp, Artificial Sequence
  Synthetic oligonucleotide; TAGAAT chr11 5299434 5299453 5299450 +
cagaaaacgacgtttctaaa

SEQ ID NO: 59226 - DNA, 20 bp, Artificial Sequence
  Synthetic oligonucleotide; GAGAAT chr11 5299488 5299507 5299504 +
aaataaataaattttacaca

SEQ ID NO: 59227 - DNA, 20 bp, Artificial Sequence
  Synthetic oligonucleotide; ATGAAT chr11 5299510 5299529 5299526 +
gaataacaactaaaatgaca

SEQ ID NO: 59228 - DNA, 20 bp, Artificial Sequence
  Synthetic oligonucleotide; CTGAAT chr11 5299569 5299588 5299585 +
acaaacaattcgcacaataa

SEQ ID NO: 59229 - DNA, 20 bp, Artificial Sequence
  Synthetic oligonucleotide; AGGAGT chr11 5299580 5299599 5299596 +
gcacaataactgaatccttc

SEQ ID NO: 59230 - DNA, 20 bp, Artificial Sequence
  Synthetic oligonucleotide; TGGAAT chr11 5299695 5299714 5299711 +
gtattttcttatcaaatctc

SEQ ID NO: 59231 - DNA, 20 bp, Artificial Sequence
  Synthetic oligonucleotide; CAGAGT chr11 5299706 5299725 5299722 +
tcaaatctctggaatatttt

SEQ ID NO: 59232 - DNA, 20 bp, Artificial Sequence
  Synthetic oligonucleotide; GAGAAT chr11 5299764 5299783 5299780 +
gatttcttaagtgaagcaga

SEQ ID NO: 59233 - DNA, 20 bp, Artificial Sequence
  Synthetic oligonucleotide; TAGAAT chr11 5299771 5299790 5299787 +
taagtgaagcagagagaatt

SEQ ID NO: 59234 - DNA, 20 bp, Artificial Sequence
  Synthetic oligonucleotide; TGGAAT chr11 5299776 5299795 5299792 +
gaagcagagagaatttagaa

SEQ ID NO: 59235 - DNA, 20 bp, Artificial Sequence
  Synthetic oligonucleotide; CTGGGT chr11 5299791 5299810 5299807 +
tagaatggaataattatata

SEQ ID NO: 59236 - DNA, 20 bp, Artificial Sequence
  Synthetic oligonucleotide; AGGAAT chr11 5299886 5299905 5299902 +
agaaacagcagtcttcagag

SEQ ID NO: 59237 - DNA, 20 bp, Artificial Sequence
  Synthetic oligonucleotide; ATGAAT chr11 5299890 5299909 5299906 +
acagcagtcttcagagagga

SEQ ID NO: 59238 - DNA, 20 bp, Artificial Sequence
  Synthetic oligonucleotide; ATGGGT chr11 5300206 5300225 5300222 +
aagcaagaggggaaatagaa

SEQ ID NO: 59239 - DNA, 20 bp, Artificial Sequence
  Synthetic oligonucleotide; TGGGAT chr11 5300341 5300360 5300357 +
gggaagaaggaaaacggggc

SEQ ID NO: 59240 - DNA, 20 bp, Artificial Sequence
  Synthetic oligonucleotide; ATGAGT chr11 5300460 5300479 5300476 +
actaagggaaattacatttc

SEQ ID NO: 59241 - DNA, 20 bp, Artificial Sequence
  Synthetic oligonucleotide; CAGAGT chr11 5300540 5300559 5300556 +
taatcaagcaagatcctttt

SEQ ID NO: 59242 - DNA, 20 bp, Artificial Sequence
  Synthetic oligonucleotide; TTGGAT chr11 5300721 5300740 5300737 +
aaatcatagttactcttctt

SEQ ID NO: 59243 - DNA, 20 bp, Artificial Sequence
  Synthetic oligonucleotide; TTGAAT chr11 5300885 5300904 5300901 +
ttttcatgtgataattaaaa

SEQ ID NO: 59244 - DNA, 20 bp, Artificial Sequence
  Synthetic oligonucleotide; GTGGAT chr11 5300913 5300932 5300929 +
aactctgaggaaaaaaaagt

SEQ ID NO: 59245 - DNA, 20 bp, Artificial Sequence
  Synthetic oligonucleotide; CAGGGT chr11 5300926 5300945 5300942 +
aaaaagtgtggatataaaac

SEQ ID NO: 59246 - DNA, 20 bp, Artificial Sequence
  Synthetic oligonucleotide; GCGAAT chr11 5301021 5301040 5301037 +
ctactctgcccagaaaatag

SEQ ID NO: 59247 - DNA, 20 bp, Artificial Sequence
  Synthetic oligonucleotide; TTGAAT chr11 5301036 5301055 5301052 +
aataggcgaataatgcttct

SEQ ID NO: 59248 - DNA, 20 bp, Artificial Sequence
  Synthetic oligonucleotide; TAGGAT chr11 5301068 5301087 5301084 +
ggtcttgatgctataaatga

SEQ ID NO: 59249 - DNA, 20 bp, Artificial Sequence
  Synthetic oligonucleotide; ACGAAT chr11 5301076 5301095 5301092 +
tgctataaatgataggattc

SEQ ID NO: 59250 - DNA, 20 bp, Artificial Sequence
  Synthetic oligonucleotide; GTGAAT chr11 5301150 5301169 5301166 +
ggtgcatgtttcccaaacct

SEQ ID NO: 59251 - DNA, 20 bp, Artificial Sequence
  Synthetic oligonucleotide; ATGAAT chr11 5301154 5301173 5301170 +
catgtttcccaaacctgtga

SEQ ID NO: 59252 - DNA, 20 bp, Artificial Sequence
  Synthetic oligonucleotide; GAGGAT chr11 5301270 5301289 5301286 +
gcaatgcccatcactgtctt

SEQ ID NO: 59253 - DNA, 20 bp, Artificial Sequence
  Synthetic oligonucleotide; CTGAAT chr11 5301330 5301349 5301346 +
aaaaagacagtcaaagaagt

SEQ ID NO: 59254 - DNA, 20 bp, Artificial Sequence
  Synthetic oligonucleotide; TTGGAT chr11 5301338 5301357 5301354 +
agtcaaagaagtctgaataa

SEQ ID NO: 59255 - DNA, 20 bp, Artificial Sequence
  Synthetic oligonucleotide; GCGAGT chr11 5301373 5301392 5301389 +
taaacgtgatatcagcacag

SEQ ID NO: 59256 - DNA, 20 bp, Artificial Sequence
  Synthetic oligonucleotide; ATGGGT chr11 5301434 5301453 5301450 +
gagggcacgggaaccacaat

SEQ ID NO: 59257 - DNA, 20 bp, Artificial Sequence
  Synthetic oligonucleotide; TAGAGT chr11 5301445 5301464 5301461 +
aaccacaatatgggtagcag

SEQ ID NO: 59258 - DNA, 20 bp, Artificial Sequence
  Synthetic oligonucleotide; AAGAAT chr11 5301453 5301472 5301469 +
tatgggtagcagtagagtga

SEQ ID NO: 59259 - DNA, 20 bp, Artificial Sequence
  Synthetic oligonucleotide; GGGAAT chr11 5301518 5301537 5301534 +
cagtcctatgttcatcactc

SEQ ID NO: 59260 - DNA, 20 bp, Artificial Sequence
  Synthetic oligonucleotide; AAGAAT chr11 5301528 5301547 5301544 +
ttcatcactcgggaattggt

SEQ ID NO: 59261 - DNA, 20 bp, Artificial Sequence
  Synthetic oligonucleotide; GCGGAT chr11 5301555 5301574 5301571 +
cagttgtacctcagtggtgt

SEQ ID NO: 59262 - DNA, 20 bp, Artificial Sequence
  Synthetic oligonucleotide; GTGAAT chr11 5301617 5301636 5301633 +
acctgattctacaatggcca

SEQ ID NO: 59263 - DNA, 20 bp, Artificial Sequence
  Synthetic oligonucleotide; ATGAAT chr11 5301621 5301640 5301637 +
gattctacaatggccagtga

SEQ ID NO: 59264 - DNA, 20 bp, Artificial Sequence
  Synthetic oligonucleotide; AAGGAT chr11 5301628 5301647 5301644 +
caatggccagtgaatgaatg

SEQ ID NO: 59265 - DNA, 20 bp, Artificial Sequence
  Synthetic oligonucleotide; TTGGGT chr11 5301633 5301652 5301649 +
gccagtgaatgaatgaagga

SEQ ID NO: 59266 - DNA, 20 bp, Artificial Sequence
  Synthetic oligonucleotide; GTGAAT chr11 5301706 5301725 5301722 +
ccaggactgtgggcattgta

SEQ ID NO: 59267 - DNA, 20 bp, Artificial Sequence
  Synthetic oligonucleotide; AAGAGT chr11 5301798 5301817 5301814 +
tcattccaaatgaggacaag

SEQ ID NO: 59268 - DNA, 20 bp, Artificial Sequence
  Synthetic oligonucleotide; AGGGGT chr11 5301959 5301978 5301975 +
aggtggagaagatatttttt

SEQ ID NO: 59269 - DNA, 20 bp, Artificial Sequence
  Synthetic oligonucleotide; CTGGAT chr11 5302059 5302078 5302075 +
ctcaaaacttaaatattttt

SEQ ID NO: 59270 - DNA, 20 bp, Artificial Sequence
  Synthetic oligonucleotide; TAGAAT chr11 5302113 5302132 5302129 +
gtactcacaaggcctttccc

SEQ ID NO: 59271 - DNA, 20 bp, Artificial Sequence
  Synthetic oligonucleotide; CAGAAT chr11 5302141 5302160 5302157 +
caaataacaaaaatcatggt

SEQ ID NO: 59272 - DNA, 20 bp, Artificial Sequence
  Synthetic oligonucleotide; TTGAGT chr11 5302329 5302348 5302345 +
ttactgtgttactatccaag

SEQ ID NO: 59273 - DNA, 20 bp, Artificial Sequence
  Synthetic oligonucleotide; TAGGAT chr11 5302378 5302397 5302394 +
actaatgggacagctgtatt

SEQ ID NO: 59274 - DNA, 20 bp, Artificial Sequence
  Synthetic oligonucleotide; GTGAAT chr11 5302461 5302480 5302477 +
gttgctatctcaagtggact

SEQ ID NO: 59275 - DNA, 20 bp, Artificial Sequence
  Synthetic oligonucleotide; CGGAGT chr11 5302628 5302647 5302644 +
ctgctctccagcctgggcaa

SEQ ID NO: 59276 - DNA, 20 bp, Artificial Sequence
  Synthetic oligonucleotide; GTGAGT chr11 5302694 5302713 5302710 +
aagaaaataactcatctatt

SEQ ID NO: 59277 - DNA, 20 bp, Artificial Sequence
  Synthetic oligonucleotide; GTGGGT chr11 5302728 5302747 5302744 +
aaatctgaacacctgaacaa

SEQ ID NO: 59278 - DNA, 20 bp, Artificial Sequence
  Synthetic oligonucleotide; CTGAGT chr11 5302814 5302833 5302830 +
ttccctatgctgcaaaaagt

SEQ ID NO: 59279 - DNA, 20 bp, Artificial Sequence
  Synthetic oligonucleotide; TAGAGT chr11 5302935 5302954 5302951 +
cacaaaagcctaatacttgt

SEQ ID NO: 59280 - DNA, 20 bp, Artificial Sequence
  Synthetic oligonucleotide; TTGAGT chr11 5302997 5303016 5303013 +
gtaatatcggaagttggtaa

SEQ ID NO: 59281 - DNA, 20 bp, Artificial Sequence
  Synthetic oligonucleotide; ATGAAT chr11 5303110 5303129 5303126 +
ttacagaccctctaatcatt

SEQ ID NO: 59282 - DNA, 20 bp, Artificial Sequence
  Synthetic oligonucleotide; AAGGAT chr11 5303145 5303164 5303161 +
tcgtattgagaaaaattcac

SEQ ID NO: 59283 - DNA, 20 bp, Artificial Sequence
  Synthetic oligonucleotide; CAGAGT chr11 5303336 5303355 5303352 +
caattgattctgtatgtgtc

SEQ ID NO: 59284 - DNA, 20 bp, Artificial Sequence
  Synthetic oligonucleotide; CAGAAT chr11 5303480 5303499 5303496 +
acaataataattatatgttt

SEQ ID NO: 59285 - DNA, 20 bp, Artificial Sequence
  Synthetic oligonucleotide; ATGGAT chr11 5303644 5303663 5303660 +
gtagcagagactatgttcat

SEQ ID NO: 59286 - DNA, 20 bp, Artificial Sequence
  Synthetic oligonucleotide; CTGAAT chr11 5303680 5303699 5303696 +
ctgctaactaacttgatcca

SEQ ID NO: 59287 - DNA, 20 bp, Artificial Sequence
  Synthetic oligonucleotide; AGGAGT chr11 5303732 5303751 5303748 +
cagaacttatctaccgccac

SEQ ID NO: 59288 - DNA, 20 bp, Artificial Sequence
  Synthetic oligonucleotide; GAGAAT chr11 5303788 5303807 5303804 +
cttccaatgttgccttataa

SEQ ID NO: 59289 - DNA, 20 bp, Artificial Sequence
  Synthetic oligonucleotide; ATGGAT chr11 5303792 5303811 5303808 +
caatgttgccttataagaga

SEQ ID NO: 59290 - DNA, 20 bp, Artificial Sequence
  Synthetic oligonucleotide; CAGGAT chr11 5303818 5303837 5303834 +
taatgccaaaatttgttgta

SEQ ID NO: 59291 - DNA, 20 bp, Artificial Sequence
  Synthetic oligonucleotide; TTGGAT chr11 5303841 5303860 5303857 +
gataagagctaaccacttat

SEQ ID NO: 59292 - DNA, 20 bp, Artificial Sequence
  Synthetic oligonucleotide; GCGGAT chr11 5303950 5303969 5303966 +
ctgagctgcgtttgggacat

SEQ ID NO: 59293 - DNA, 20 bp, Artificial Sequence
  Synthetic oligonucleotide; CAGGGT chr11 5303959 5303978 5303975 +
gtttgggacatgcggatgca

SEQ ID NO: 59294 - DNA, 20 bp, Artificial Sequence
  Synthetic oligonucleotide; GAGAAT chr11 5304147 5304166 5304163 +
acatacccaaatattccagg

SEQ ID NO: 59295 - DNA, 20 bp, Artificial Sequence
  Synthetic oligonucleotide; GGGAGT chr11 5304171 5304190 5304187 +
atagttgccctaatagttta

SEQ ID NO: 59296 - DNA, 20 bp, Artificial Sequence
  Synthetic oligonucleotide; TAGAAT chr11 5304181 5304200 5304197 +
taatagtttagggagtctcc

SEQ ID NO: 59297 - DNA, 20 bp, Artificial Sequence
  Synthetic oligonucleotide; GAGAGT chr11 5304205 5304224 5304221 +
atgtgatacatgacaaaagt

SEQ ID NO: 59298 - DNA, 20 bp, Artificial Sequence
  Synthetic oligonucleotide; TGGAAT chr11 5304222 5304241 5304238 +
agtgagagtcataactttag

SEQ ID NO: 59299 - DNA, 20 bp, Artificial Sequence
  Synthetic oligonucleotide; AGGGAT chr11 5304261 5304280 5304277 +
gcaagcatagaggccccctg

SEQ ID NO: 59300 - DNA, 20 bp, Artificial Sequence
  Synthetic oligonucleotide; CTGAGT chr11 5304303 5304322 5304319 +
cactgttctcttgccccttt

SEQ ID NO: 59301 - DNA, 20 bp, Artificial Sequence
  Synthetic oligonucleotide; CAGAGT chr11 5304342 5304361 5304358 +
ttctttgacagcaactatcc

SEQ ID NO: 59302 - DNA, 20 bp, Artificial Sequence
  Synthetic oligonucleotide; AAGAGT chr11 5304352 5304371 5304368 +
gcaactatcccagagtcctc

SEQ ID NO: 59303 - DNA, 20 bp, Artificial Sequence
  Synthetic oligonucleotide; GAGAAT chr11 5304478 5304497 5304494 +
ctaaaatgagaagacaaaaa

SEQ ID NO: 59304 - DNA, 20 bp, Artificial Sequence
  Synthetic oligonucleotide; CTGAAT chr11 5304562 5304581 5304578 +
ccctgtacaatcagtgtccc

SEQ ID NO: 59305 - DNA, 20 bp, Artificial Sequence
  Synthetic oligonucleotide; GTGGAT chr11 5304811 5304830 5304827 +
tagcactttggaaggctgag

SEQ ID NO: 59306 - DNA, 20 bp, Artificial Sequence
  Synthetic oligonucleotide; CTGGGT chr11 5304891 5304910 5304907 +
actaaaaatacaaaaattag

SEQ ID NO: 59307 - DNA, 20 bp, Artificial Sequence
  Synthetic oligonucleotide; GAGAAT chr11 5304944 5304963 5304960 +
tactcgggaggctgaggcag

SEQ ID NO: 59308 - DNA, 20 bp, Artificial Sequence
  Synthetic oligonucleotide; GAGGAT chr11 5305158 5305177 5305174 +
agaagcaggcacagatgtaa

SEQ ID NO: 59309 - DNA, 20 bp, Artificial Sequence
  Synthetic oligonucleotide; AGGAGT chr11 5305213 5305232 5305229 +
caatgaaaagggaagtttat

SEQ ID NO: 59310 - DNA, 20 bp, Artificial Sequence
  Synthetic oligonucleotide; GTGGAT chr11 5305217 5305236 5305233 +
gaaaagggaagtttatagga

SEQ ID NO: 59311 - DNA, 20 bp, Artificial Sequence
  Synthetic oligonucleotide; TAGAAT chr11 5305250 5305269 5305266 +
taggttaatagtgaaaaata

SEQ ID NO: 59312 - DNA, 20 bp, Artificial Sequence
  Synthetic oligonucleotide; ATGAAT chr11 5305342 5305361 5305358 +
atttcaacataatggcagaa

SEQ ID NO: 59313 - DNA, 20 bp, Artificial Sequence
  Synthetic oligonucleotide; GTGAGT chr11 5305371 5305390 5305387 +
taatgactgtgagacaaaaa

SEQ ID NO: 59314 - DNA, 20 bp, Artificial Sequence
  Synthetic oligonucleotide; GAGGGT chr11 5305435 5305454 5305451 +
cagcactttgggaggccgag

SEQ ID NO: 59315 - DNA, 20 bp, Artificial Sequence
  Synthetic oligonucleotide; GTGGAT chr11 5305439 5305458 5305455 +
actttgggaggccgaggagg

SEQ ID NO: 59316 - DNA, 20 bp, Artificial Sequence
  Synthetic oligonucleotide; TTGAGT chr11 5305448 5305467 5305464 +
ggccgaggagggtggatcac

SEQ ID NO: 59317 - DNA, 20 bp, Artificial Sequence
  Synthetic oligonucleotide; AGGAGT chr11 5305456 5305475 5305472 +
agggtggatcacttgagttc

SEQ ID NO: 59318 - DNA, 20 bp, Artificial Sequence
  Synthetic oligonucleotide; GAGAAT chr11 5305574 5305593 5305590 +
tactctggaggctgaggcat

SEQ ID NO: 59319 - DNA, 20 bp, Artificial Sequence
  Synthetic oligonucleotide; GTGAGT chr11 5305686 5305705 5305702 +
gagagagagagaaaagaaaa

SEQ ID NO: 59320 - DNA, 20 bp, Artificial Sequence
  Synthetic oligonucleotide; AGGAAT chr11 5305809 5305828 5305825 +
gcaactaatatgtgtcataa

SEQ ID NO: 59321 - DNA, 20 bp, Artificial Sequence
  Synthetic oligonucleotide; TTGAAT chr11 5305904 5305923 5305920 +
gttaaacttgcttcccgtat

SEQ ID NO: 59322 - DNA, 20 bp, Artificial Sequence
  Synthetic oligonucleotide; CTGAAT chr11 5305965 5305984 5305981 +
ttgcggtttctgagcatgac

SEQ ID NO: 59323 - DNA, 20 bp, Artificial Sequence
  Synthetic oligonucleotide; AGGGGT chr11 5306047 5306066 5306063 +
tgttacacaaacaactctca

SEQ ID NO: 59324 - DNA, 20 bp, Artificial Sequence
  Synthetic oligonucleotide; TAGGAT chr11 5306073 5306092 5306089 +
tattctagctcatttccaca

SEQ ID NO: 59325 - DNA, 20 bp, Artificial Sequence
  Synthetic oligonucleotide; GGGAAT chr11 5306083 5306102 5306099 +
catttccacataggatattt

SEQ ID NO: 59326 - DNA, 20 bp, Artificial Sequence
  Synthetic oligonucleotide; GAGAGT chr11 5306181 5306200 5306197 +
ctttattttttctttggaag

SEQ ID NO: 59327 - DNA, 20 bp, Artificial Sequence
  Synthetic oligonucleotide; ATGAGT chr11 5306233 5306252 5306249 +
tcagatgaggcatgaccgaa

SEQ ID NO: 59328 - DNA, 20 bp, Artificial Sequence
  Synthetic oligonucleotide; TAGAGT chr11 5306263 5306282 5306279 +
ctcaagtgttccattggtct

SEQ ID NO: 59329 - DNA, 20 bp, Artificial Sequence
  Synthetic oligonucleotide; GTGGGT chr11 5306483 5306502 5306499 +
gctatctcattcatatatat

SEQ ID NO: 59330 - DNA, 20 bp, Artificial Sequence
  Synthetic oligonucleotide; CAGAAT chr11 5306664 5306683 5306680 +
ttatatttaggtctgatctc

SEQ ID NO: 59331 - DNA, 20 bp, Artificial Sequence
  Synthetic oligonucleotide; ATGGGT chr11 5306763 5306782 5306779 +
accctaagacttctttcctg

SEQ ID NO: 59332 - DNA, 20 bp, Artificial Sequence
  Synthetic oligonucleotide; TTGGAT chr11 5306908 5306927 5306924 +
ttctgaaatctcttttttca

SEQ ID NO: 59333 - DNA, 20 bp, Artificial Sequence
  Synthetic oligonucleotide; CTGAGT chr11 5306920 5306939 5306936 +
ttttttcattggattatgtg

SEQ ID NO: 59334 - DNA, 20 bp, Artificial Sequence
  Synthetic oligonucleotide; CAGAAT chr11 5307187 5307206 5307203 +
atacagcaataaatgcattc

SEQ ID NO: 59335 - DNA, 20 bp, Artificial Sequence
  Synthetic oligonucleotide; GTGAGT chr11 5307316 5307335 5307332 +
aaacttctgaaagattttaa

SEQ ID NO: 59336 - DNA, 20 bp, Artificial Sequence
  Synthetic oligonucleotide; GTGGGT chr11 5307358 5307377 5307374 +
aaaatggagcttaacatata

SEQ ID NO: 59337 - DNA, 20 bp, Artificial Sequence
  Synthetic oligonucleotide; ATGAAT chr11 5307388 5307407 5307404 +
agtaagtactagttaagcaa

SEQ ID NO: 59338 - DNA, 20 bp, Artificial Sequence
  Synthetic oligonucleotide; GGGAGT chr11 5307825 5307844 5307841 +
tcttgctctgtcacccagga

SEQ ID NO: 59339 - DNA, 20 bp, Artificial Sequence
  Synthetic oligonucleotide; GTGAGT chr11 5307970 5307989 5307986 +
tcttagtactttggctgcaa

SEQ ID NO: 59340 - DNA, 20 bp, Artificial Sequence
  Synthetic oligonucleotide; AGGAGT chr11 5308493 5308512 5308509 +
aagtgtctaaatatgtatag

SEQ ID NO: 59341 - DNA, 20 bp, Artificial Sequence
  Synthetic oligonucleotide; CTGAGT chr11 5308533 5308552 5308549 +
aattgcactttgggcccctg

SEQ ID NO: 59342 - DNA, 20 bp, Artificial Sequence
  Synthetic oligonucleotide; GTGAGT chr11 5308733 5308752 5308749 +
acagccctgcatattcaaaa

SEQ ID NO: 59343 - DNA, 20 bp, Artificial Sequence
  Synthetic oligonucleotide; TTGAAT chr11 5308844 5308863 5308860 +
tggtcatcactgaagataga

SEQ ID NO: 59344 - DNA, 20 bp, Artificial Sequence
  Synthetic oligonucleotide; CAGAGT chr11 5308955 5308974 5308971 +
ctaagcatgagaaaaactaa

SEQ ID NO: 59345 - DNA, 20 bp, Artificial Sequence
  Synthetic oligonucleotide; CGGGGT chr11 5309202 5309221 5309218 +
caaatcaagatggaaatgat

SEQ ID NO: 59346 - DNA, 20 bp, Artificial Sequence
  Synthetic oligonucleotide; AGGAGT chr11 5309271 5309290 5309287 +
gggcacattatgagaaacag

SEQ ID NO: 59347 - DNA, 20 bp, Artificial Sequence
  Synthetic oligonucleotide; GGGGAT chr11 5309282 5309301 5309298 +
gagaaacagaggagtctttg

SEQ ID NO: 59348 - DNA, 20 bp, Artificial Sequence
  Synthetic oligonucleotide; TTGGGT chr11 5309375 5309394 5309391 +
aattttgcttacagcatgca

SEQ ID NO: 59349 - DNA, 20 bp, Artificial Sequence
  Synthetic oligonucleotide; TTGGAT chr11 5309480 5309499 5309496 +
ttttttaagcattccataga

SEQ ID NO: 59350 - DNA, 20 bp, Artificial Sequence
  Synthetic oligonucleotide; GCGGGT chr11 5309586 5309605 5309602 +
cagcactttgggaggccgag

SEQ ID NO: 59351 - DNA, 20 bp, Artificial Sequence
  Synthetic oligonucleotide; GTGGAT chr11 5309590 5309609 5309606 +
actttgggaggccgaggcgg

SEQ ID NO: 59352 - DNA, 20 bp, Artificial Sequence
  Synthetic oligonucleotide; GAGAAT chr11 5309725 5309744 5309741 +
tactcgggaggctgaggcag

SEQ ID NO: 59353 - DNA, 20 bp, Artificial Sequence
  Synthetic oligonucleotide; GTGGAT chr11 5309932 5309951 5309948 +
tgaaaatgtacctgtaaaat

SEQ ID NO: 59354 - DNA, 20 bp, Artificial Sequence
  Synthetic oligonucleotide; AAGGAT chr11 5309959 5309978 5309975 +
ccacatatttttaggtctgg

SEQ ID NO: 59355 - DNA, 20 bp, Artificial Sequence
  Synthetic oligonucleotide; TTGAGT chr11 5310008 5310027 5310024 +
cattatcataaaatctctag

SEQ ID NO: 59356 - DNA, 20 bp, Artificial Sequence
  Synthetic oligonucleotide; TGGAAT chr11 5310140 5310159 5310156 +
tgtctcattttcttcttcca

SEQ ID NO: 59357 - DNA, 20 bp, Artificial Sequence
  Synthetic oligonucleotide; AGGAAT chr11 5310152 5310171 5310168 +
ttcttccatggaatattcca

SEQ ID NO: 59358 - DNA, 20 bp, Artificial Sequence
  Synthetic oligonucleotide; CAGAAT chr11 5310171 5310190 5310187 +
aaggaatattctttgaaaag

SEQ ID NO: 59359 - DNA, 20 bp, Artificial Sequence
  Synthetic oligonucleotide; CAGAGT chr11 5310180 5310199 5310196 +
tctttgaaaagcagaatatt

SEQ ID NO: 59360 - DNA, 20 bp, Artificial Sequence
  Synthetic oligonucleotide; TAGAAT chr11 5310213 5310232 5310229 +
agtagagagatatatttagg

SEQ ID NO: 59361 - DNA, 20 bp, Artificial Sequence
  Synthetic oligonucleotide; AGGAAT chr11 5310262 5310281 5310278 +
tcaataattcacagtagcca

SEQ ID NO: 59362 - DNA, 20 bp, Artificial Sequence
  Synthetic oligonucleotide; TAGAAT chr11 5310329 5310348 5310345 +
aaaatgtcttatatatgtga

SEQ ID NO: 59363 - DNA, 20 bp, Artificial Sequence
  Synthetic oligonucleotide; ATGAAT chr11 5310376 5310395 5310392 +
ggtctgacacatgctacaac

SEQ ID NO: 59364 - DNA, 20 bp, Artificial Sequence
  Synthetic oligonucleotide; TAGAAT chr11 5310459 5310478 5310475 +
tttcacttacatgagctatc

SEQ ID NO: 59365 - DNA, 20 bp, Artificial Sequence
  Synthetic oligonucleotide; CAGAGT chr11 5310504 5310523 5310520 +
aaaagtagattagaagttac

SEQ ID NO: 59366 - DNA, 20 bp, Artificial Sequence
  Synthetic oligonucleotide; ATGGAT chr11 5310521 5310540 5310537 +
taccagagtgtaggaagaac

SEQ ID NO: 59367 - DNA, 20 bp, Artificial Sequence
  Synthetic oligonucleotide; GGGAGT chr11 5310529 5310548 5310545 +
tgtaggaagaacatggattg

SEQ ID NO: 59368 - DNA, 20 bp, Artificial Sequence
  Synthetic oligonucleotide; TAGAGT chr11 5310551 5310570 5310567 +
gagtaactgattaatcaata

SEQ ID NO: 59369 - DNA, 20 bp, Artificial Sequence
  Synthetic oligonucleotide; AAGAGT chr11 5310745 5310764 5310761 +
attgtgaaaggtttaaaaac

SEQ ID NO: 59370 - DNA, 20 bp, Artificial Sequence
  Synthetic oligonucleotide; TAGGAT chr11 5310851 5310870 5310867 +
acaactatatatatacatac

SEQ ID NO: 59371 - DNA, 20 bp, Artificial Sequence
  Synthetic oligonucleotide; TAGAAT chr11 5310901 5310920 5310917 +
atttatttgattttaataaa

SEQ ID NO: 59372 - DNA, 20 bp, Artificial Sequence
  Synthetic oligonucleotide; TAGGAT chr11 5310906 5310925 5310922 +
tttgattttaataaatagaa

SEQ ID NO: 59373 - DNA, 20 bp, Artificial Sequence
  Synthetic oligonucleotide; AAGAAT chr11 5310940 5310959 5310956 +
caacaatttcacttgagaga

SEQ ID NO: 59374 - DNA, 20 bp, Artificial Sequence
  Synthetic oligonucleotide; TAGGGT chr11 5311026 5311045 5311042 +
gtgaaggcatgccgcaaatc

SEQ ID NO: 59375 - DNA, 20 bp, Artificial Sequence
  Synthetic oligonucleotide; CAGAAT chr11 5311102 5311121 5311118 +
tatttactcatctggtaatt

SEQ ID NO: 59376 - DNA, 20 bp, Artificial Sequence
  Synthetic oligonucleotide; CTGGGT chr11 5311227 5311246 5311243 +
tttggactgctattttaaaa

SEQ ID NO: 59377 - DNA, 20 bp, Artificial Sequence
  Synthetic oligonucleotide; GTGAAT chr11 5311241 5311260 5311257 +
ttaaaactgggtctacttca

SEQ ID NO: 59378 - DNA, 20 bp, Artificial Sequence
  Synthetic oligonucleotide; CCGGAT chr11 5311263 5311282 5311279 +
gaatgacacccaagaaaaac

SEQ ID NO: 59379 - DNA, 20 bp, Artificial Sequence
  Synthetic oligonucleotide; TAGGAT chr11 5311285 5311304 5311301 +
ggatctatcctgctttctcc

SEQ ID NO: 59380 - DNA, 20 bp, Artificial Sequence
  Synthetic oligonucleotide; TTGGGT chr11 5311326 5311345 5311342 +
cacttattctctgaccttct

SEQ ID NO: 59381 - DNA, 20 bp, Artificial Sequence
  Synthetic oligonucleotide; TTGAAT chr11 5311455 5311474 5311471 +
gaaatacatactgaaatgat

SEQ ID NO: 59382 - DNA, 20 bp, Artificial Sequence
  Synthetic oligonucleotide; ATGAAT chr11 5311459 5311478 5311475 +
tacatactgaaatgatttga

SEQ ID NO: 59383 - DNA, 20 bp, Artificial Sequence
  Synthetic oligonucleotide; TTGAGT chr11 5311817 5311836 5311833 +
accatttccactttcctaaa

SEQ ID NO: 59384 - DNA, 20 bp, Artificial Sequence
  Synthetic oligonucleotide; ATGAAT chr11 5311921 5311940 5311937 +
gaagtaattttaaaacatca

SEQ ID NO: 59385 - DNA, 20 bp, Artificial Sequence
  Synthetic oligonucleotide; CCGAGT chr11 5311959 5311978 5311975 +
ttcagtagctttccatgact

SEQ ID NO: 59386 - DNA, 20 bp, Artificial Sequence
  Synthetic oligonucleotide; TAGAAT chr11 5312107 5312126 5312123 +
cacacacactccttcagtct

SEQ ID NO: 59387 - DNA, 20 bp, Artificial Sequence
  Synthetic oligonucleotide; GGGAAT chr11 5312184 5312203 5312200 +
gctgaagggacactttctca

SEQ ID NO: 59388 - DNA, 20 bp, Artificial Sequence
  Synthetic oligonucleotide; TTGGAT chr11 5312295 5312314 5312311 +
tcacagcacttgttttaaat

SEQ ID NO: 59389 - DNA, 20 bp, Artificial Sequence
  Synthetic oligonucleotide; TTGAGT chr11 5312313 5312332 5312329 +
atttggatttcttttattct

SEQ ID NO: 59390 - DNA, 20 bp, Artificial Sequence
  Synthetic oligonucleotide; AGGAAT chr11 5312426 5312445 5312442 +
gcccttaaaaaattaaccaa

SEQ ID NO: 59391 - DNA, 20 bp, Artificial Sequence
  Synthetic oligonucleotide; AGGAAT chr11 5312472 5312491 5312488 +
tccacgaaaataggcacatg

SEQ ID NO: 59392 - DNA, 20 bp, Artificial Sequence
  Synthetic oligonucleotide; TAGGAT chr11 5312522 5312541 5312538 +
aacacaaacccttttaaaca

SEQ ID NO: 59393 - DNA, 20 bp, Artificial Sequence
  Synthetic oligonucleotide; AAGGAT chr11 5312764 5312783 5312780 +
cttcttaaaatcaattataa

SEQ ID NO: 59394 - DNA, 20 bp, Artificial Sequence
  Synthetic oligonucleotide; TAGAAT chr11 5312853 5312872 5312869 +
tgagatcacttgtgatttat

SEQ ID NO: 59395 - DNA, 20 bp, Artificial Sequence
  Synthetic oligonucleotide; TTGAAT chr11 5312869 5312888 5312885 +
ttattagaataaaaaataaa

SEQ ID NO: 59396 - DNA, 20 bp, Artificial Sequence
  Synthetic oligonucleotide; ATGAAT chr11 5313005 5313024 5313021 +
aatgagcaactaggaaattt

SEQ ID NO: 59397 - DNA, 20 bp, Artificial Sequence
  Synthetic oligonucleotide; GAGAGT chr11 5313014 5313033 5313030 +
ctaggaaatttatgaattta

SEQ ID NO: 59398 - DNA, 20 bp, Artificial Sequence
  Synthetic oligonucleotide; TGGGAT chr11 5313108 5313127 5313124 +
tgcaaaaaaaaattgacaaa

SEQ ID NO: 59399 - DNA, 20 bp, Artificial Sequence
  Synthetic oligonucleotide; CAGAAT chr11 5313178 5313197 5313194 +
cagagataacagacaaccta

SEQ ID NO: 59400 - DNA, 20 bp, Artificial Sequence
  Synthetic oligonucleotide; TGGAGT chr11 5313230 5313249 5313246 +
tctgacaaaagtctaatatc

SEQ ID NO: 59401 - DNA, 20 bp, Artificial Sequence
  Synthetic oligonucleotide; GGGAAT chr11 5313289 5313308 5313305 +
aacaaccccattaaaaagtg

SEQ ID NO: 59402 - DNA, 20 bp, Artificial Sequence
  Synthetic oligonucleotide; ATGAAT chr11 5313298 5313317 5313314 +
attaaaaagtggggaatgac

SEQ ID NO: 59403 - DNA, 20 bp, Artificial Sequence
  Synthetic oligonucleotide; TGGGAT chr11 5313405 5313424 5313421 +
aatgcaaatcaaaaccacaa

SEQ ID NO: 59404 - DNA, 20 bp, Artificial Sequence
  Synthetic oligonucleotide; CAGAAT chr11 5313427 5313446 5313443 +
ggataccatctcacaccagt

SEQ ID NO: 59405 - DNA, 20 bp, Artificial Sequence
  Synthetic oligonucleotide; AGGAAT chr11 5313487 5313506 5313503 +
tggcaaggttgcagagagaa

SEQ ID NO: 59406 - DNA, 20 bp, Artificial Sequence
  Synthetic oligonucleotide; TGGAAT chr11 5313492 5313511 5313508 +
aggttgcagagagaaaggaa

SEQ ID NO: 59407 - DNA, 20 bp, Artificial Sequence
  Synthetic oligonucleotide; GAGAGT chr11 5313517 5313536 5313533 +
tgcttttacactgttaacgg

SEQ ID NO: 59408 - DNA, 20 bp, Artificial Sequence
  Synthetic oligonucleotide; GAGAGT chr11 5313546 5313565 5313562 +
ttagttcaaacattgtggaa

SEQ ID NO: 59409 - DNA, 20 bp, Artificial Sequence
  Synthetic oligonucleotide; CTGGGT chr11 5313610 5313629 5313626 +
ttgactcagcaatctcatta

SEQ ID NO: 59410 - DNA, 20 bp, Artificial Sequence
  Synthetic oligonucleotide; AGGAAT chr11 5313626 5313645 5313642 +
attactgggtatatacccaa

SEQ ID NO: 59411 - DNA, 20 bp, Artificial Sequence
  Synthetic oligonucleotide; TGGAAT chr11 5313703 5313722 5313719 +
tattcataatagccaagatg

SEQ ID NO: 59412 - DNA, 20 bp, Artificial Sequence
  Synthetic oligonucleotide; TAGAGT chr11 5313731 5313750 5313747 +
acccaaatgtccatcaatga

SEQ ID NO: 59413 - DNA, 20 bp, Artificial Sequence
  Synthetic oligonucleotide; GTGGAT chr11 5313735 5313754 5313751 +
aaatgtccatcaatgataga

SEQ ID NO: 59414 - DNA, 20 bp, Artificial Sequence
  Synthetic oligonucleotide; TGGAAT chr11 5313767 5313786 5313783 +
aacgtggtacatatatacca

SEQ ID NO: 59415 - DNA, 20 bp, Artificial Sequence
  Synthetic oligonucleotide; AAGGAT chr11 5313795 5313814 5313811 +
tatacagccataaaaaggaa

SEQ ID NO: 59416 - DNA, 20 bp, Artificial Sequence
  Synthetic oligonucleotide; ATGAAT chr11 5313819 5313838 5313835 +
attgtgttccttgcagggac

SEQ ID NO: 59417 - DNA, 20 bp, Artificial Sequence
  Synthetic oligonucleotide; GTGGGT chr11 5313966 5313985 5313982 +
acacaggggcctgtccggta

SEQ ID NO: 59418 - DNA, 20 bp, Artificial Sequence
  Synthetic oligonucleotide; AAGAAT chr11 5313996 5314015 5314012 +
aggagagggagagcaccagg

SEQ ID NO: 59419 - DNA, 20 bp, Artificial Sequence
  Synthetic oligonucleotide; ACGAAT chr11 5314007 5314026 5314023 +
agcaccaggaagaatagcta

SEQ ID NO: 59420 - DNA, 20 bp, Artificial Sequence
  Synthetic oligonucleotide; TAGAGT chr11 5314213 5314232 5314229 +
aaggaaaatctaccctgaaa

SEQ ID NO: 59421 - DNA, 20 bp, Artificial Sequence
  Synthetic oligonucleotide; TAGAGT chr11 5314235 5314254 5314251 +
gagtagttttgagattatag

SEQ ID NO: 59422 - DNA, 20 bp, Artificial Sequence
  Synthetic oligonucleotide; ATGAAT chr11 5314381 5314400 5314397 +
aaatggtactttcagttctt

SEQ ID NO: 59423 - DNA, 20 bp, Artificial Sequence
  Synthetic oligonucleotide; ATGAAT chr11 5314394 5314413 5314410 +
agttcttatgaatacaggtt

SEQ ID NO: 59424 - DNA, 20 bp, Artificial Sequence
  Synthetic oligonucleotide; TAGGGT chr11 5314421 5314440 5314437 +
accatattttccctgattat

SEQ ID NO: 59425 - DNA, 20 bp, Artificial Sequence
  Synthetic oligonucleotide; ATGAAT chr11 5314539 5314558 5314555 +
ataaagctttacatctacat

SEQ ID NO: 59426 - DNA, 20 bp, Artificial Sequence
  Synthetic oligonucleotide; ATGGAT chr11 5314587 5314606 5314603 +
atttatcaattgatcaattg

SEQ ID NO: 59427 - DNA, 20 bp, Artificial Sequence
  Synthetic oligonucleotide; TTGGGT chr11 5314673 5314692 5314689 +
taacactgatacaagagata

SEQ ID NO: 59428 - DNA, 20 bp, Artificial Sequence
  Synthetic oligonucleotide; TTGGAT chr11 5314794 5314813 5314810 +
aataggcgaacaatgcttct

SEQ ID NO: 59429 - DNA, 20 bp, Artificial Sequence
  Synthetic oligonucleotide; TAGGGT chr11 5314825 5314844 5314841 +
tggtttgatgctgtatataa

SEQ ID NO: 59430 - DNA, 20 bp, Artificial Sequence
  Synthetic oligonucleotide; ATGAAT chr11 5314833 5314852 5314849 +
tgctgtatataatagggttc

SEQ ID NO: 59431 - DNA, 20 bp, Artificial Sequence
  Synthetic oligonucleotide; ATGAGT chr11 5314852 5314871 5314868 +
catgaatggaggaaaaagaa

SEQ ID NO: 59432 - DNA, 20 bp, Artificial Sequence
  Synthetic oligonucleotide; GTGAAT chr11 5314908 5314927 5314924 +
ggtgcatgtttcccaaacct

SEQ ID NO: 59433 - DNA, 20 bp, Artificial Sequence
  Synthetic oligonucleotide; AAGGAT chr11 5315028 5315047 5315044 +
gcaatacctttaactgtttt

SEQ ID NO: 59434 - DNA, 20 bp, Artificial Sequence
  Synthetic oligonucleotide; CAGGAT chr11 5315034 5315053 5315050 +
cctttaactgttttaaggat

SEQ ID NO: 59435 - DNA, 20 bp, Artificial Sequence
  Synthetic oligonucleotide; CAGAAT chr11 5315088 5315107 5315104 +
aggaagaaaatcaaagcaac

SEQ ID NO: 59436 - DNA, 20 bp, Artificial Sequence
  Synthetic oligonucleotide; CTGGGT chr11 5315096 5315115 5315112 +
aatcaaagcaaccagaatag

SEQ ID NO: 59437 - DNA, 20 bp, Artificial Sequence
  Synthetic oligonucleotide; TTGAAT chr11 5315110 5315129 5315126 +
gaatagctgggtataagtga

SEQ ID NO: 59438 - DNA, 20 bp, Artificial Sequence
  Synthetic oligonucleotide; GGGAAT chr11 5315180 5315199 5315196 +
aaaggtgtggaagagaacat

SEQ ID NO: 59439 - DNA, 20 bp, Artificial Sequence
  Synthetic oligonucleotide; TGGAGT chr11 5315203 5315222 5315219 +
aatgacaatatgggaagcaa

SEQ ID NO: 59440 - DNA, 20 bp, Artificial Sequence
  Synthetic oligonucleotide; CAGAAT chr11 5315211 5315230 5315227 +
tatgggaagcaatggagtgg

SEQ ID NO: 59441 - DNA, 20 bp, Artificial Sequence
  Synthetic oligonucleotide; AGGGAT chr11 5315227 5315246 5315243 +
gtggcagaattggaggcacg

SEQ ID NO: 59442 - DNA, 20 bp, Artificial Sequence
  Synthetic oligonucleotide; GTGGAT chr11 5315308 5315327 5315324 +
tagttatacctgagaagcat

SEQ ID NO: 59443 - DNA, 20 bp, Artificial Sequence
  Synthetic oligonucleotide; GAGAAT chr11 5315344 5315363 5315360 +
cggtcataggccattgacag

SEQ ID NO: 59444 - DNA, 20 bp, Artificial Sequence
  Synthetic oligonucleotide; GTGGAT chr11 5315364 5315383 5315380 +
gagaatacctgattctgcaa

SEQ ID NO: 59445 - DNA, 20 bp, Artificial Sequence
  Synthetic oligonucleotide; GGGAGT chr11 5315373 5315392 5315389 +
tgattctgcaagtggataat

SEQ ID NO: 59446 - DNA, 20 bp, Artificial Sequence
  Synthetic oligonucleotide; GTGGAT chr11 5315377 5315396 5315393 +
tctgcaagtggataatggga

SEQ ID NO: 59447 - DNA, 20 bp, Artificial Sequence
  Synthetic oligonucleotide; ATGGAT chr11 5315410 5315429 5315426 +
acctgcaagaagcaggcccc

SEQ ID NO: 59448 - DNA, 20 bp, Artificial Sequence
  Synthetic oligonucleotide; ATGGGT chr11 5315513 5315532 5315529 +
gtgtggcaaggaaacagtac

SEQ ID NO: 59449 - DNA, 20 bp, Artificial Sequence
  Synthetic oligonucleotide; GGGGAT chr11 5315599 5315618 5315615 +
cacacataaacagcaaagaa

SEQ ID NO: 59450 - DNA, 20 bp, Artificial Sequence
  Synthetic oligonucleotide; TCGAGT chr11 5315610 5315629 5315626 +
agcaaagaaggggatggaga

SEQ ID NO: 59451 - DNA, 20 bp, Artificial Sequence
  Synthetic oligonucleotide; ATGAAT chr11 5315813 5315832 5315829 +
aataatttattggtatatgc

SEQ ID NO: 59452 - DNA, 20 bp, Artificial Sequence
  Synthetic oligonucleotide; AGGAAT chr11 5315873 5315892 5315889 +
tatagactgtgctagagata

SEQ ID NO: 59453 - DNA, 20 bp, Artificial Sequence
  Synthetic oligonucleotide; ATGAAT chr11 5315898 5315917 5315914 +
tgatgatcatttcttcagtt

SEQ ID NO: 59454 - DNA, 20 bp, Artificial Sequence
  Synthetic oligonucleotide; TTGGAT chr11 5316080 5316099 5316096 +
tgcttagcttaattgcatat

SEQ ID NO: 59455 - DNA, 20 bp, Artificial Sequence
  Synthetic oligonucleotide; TAGAAT chr11 5316176 5316195 5316192 +
ttctttgtttagttttgaaa

SEQ ID NO: 59456 - DNA, 20 bp, Artificial Sequence
  Synthetic oligonucleotide; TGGAAT chr11 5316194 5316213 5316210 +
aatagaatgttaatgtttta

SEQ ID NO: 59457 - DNA, 20 bp, Artificial Sequence
  Synthetic oligonucleotide; TGGAGT chr11 5316387 5316406 5316403 +
taggtgttggtcatcccaga

SEQ ID NO: 59458 - DNA, 20 bp, Artificial Sequence
  Synthetic oligonucleotide; AGGAAT chr11 5316462 5316481 5316478 +
catctaacataagaaggaag

SEQ ID NO: 59459 - DNA, 20 bp, Artificial Sequence
  Synthetic oligonucleotide; TGGAAT chr11 5316517 5316536 5316533 +
ctatgctgtcattttcttgc

SEQ ID NO: 59460 - DNA, 20 bp, Artificial Sequence
  Synthetic oligonucleotide; GAGAGT chr11 5316599 5316618 5316615 +
ctattcaagaggccaaatta

SEQ ID NO: 59461 - DNA, 20 bp, Artificial Sequence
  Synthetic oligonucleotide; CAGAGT chr11 5316629 5316648 5316645 +
gtatgtggaaatcacttccc

SEQ ID NO: 59462 - DNA, 20 bp, Artificial Sequence
  Synthetic oligonucleotide; AAGGAT chr11 5316742 5316761 5316758 +
gaactttcaggtatttctcc

SEQ ID NO: 59463 - DNA, 20 bp, Artificial Sequence
  Synthetic oligonucleotide; ATGGAT chr11 5316746 5316765 5316762 +
tttcaggtatttctccaagg

SEQ ID NO: 59464 - DNA, 20 bp, Artificial Sequence
  Synthetic oligonucleotide; TGGGAT chr11 5316787 5316806 5316803 +
ctccaatgccacctctacat

SEQ ID NO: 59465 - DNA, 20 bp, Artificial Sequence
  Synthetic oligonucleotide; TTGAAT chr11 5316907 5316926 5316923 +
aaagtattgagagatactag

SEQ ID NO: 59466 - DNA, 20 bp, Artificial Sequence
  Synthetic oligonucleotide; CAGGGT chr11 5316914 5316933 5316930 +
tgagagatactagttgaatg

SEQ ID NO: 59467 - DNA, 20 bp, Artificial Sequence
  Synthetic oligonucleotide; TGGAGT chr11 5316937 5316956 5316953 +
ggtcacatgtgtctttgtcc

SEQ ID NO: 59468 - DNA, 20 bp, Artificial Sequence
  Synthetic oligonucleotide; ATGGAT chr11 5317015 5317034 5317031 +
tctgatccacaggaacctca

SEQ ID NO: 59469 - DNA, 20 bp, Artificial Sequence
  Synthetic oligonucleotide; CAGGAT chr11 5317113 5317132 5317129 +
tgcccatttcataccaggtt

SEQ ID NO: 59470 - DNA, 20 bp, Artificial Sequence
  Synthetic oligonucleotide; GTGGGT chr11 5317178 5317197 5317194 +
caacatttactttagataca

SEQ ID NO: 59471 - DNA, 20 bp, Artificial Sequence
  Synthetic oligonucleotide; ATGGAT chr11 5317203 5317222 5317219 +
tacttgtgcaggttttttac

SEQ ID NO: 59472 - DNA, 20 bp, Artificial Sequence
  Synthetic oligonucleotide; GAGAAT chr11 5317355 5317374 5317371 +
tttagcttccacttataaat

SEQ ID NO: 59473 - DNA, 20 bp, Artificial Sequence
  Synthetic oligonucleotide; TAGGAT chr11 5317399 5317418 5317415 +
tgttcttgcgttaatttgct

SEQ ID NO: 59474 - DNA, 20 bp, Artificial Sequence
  Synthetic oligonucleotide; ATGGAT chr11 5317616 5317635 5317632 +
gtctaatgctctgttttcct

SEQ ID NO: 59475 - DNA, 20 bp, Artificial Sequence
  Synthetic oligonucleotide; CGGGAT chr11 5317635 5317654 5317651 +
tatggatatatacccagtag

SEQ ID NO: 59476 - DNA, 20 bp, Artificial Sequence
  Synthetic oligonucleotide; GAGAAT chr11 5317768 5317787 5317784 +
ccttttctccatagcctcat

SEQ ID NO: 59477 - DNA, 20 bp, Artificial Sequence
  Synthetic oligonucleotide; AAGAGT chr11 5317914 5317933 5317930 +
cctgtatgtcttctcttgag

SEQ ID NO: 59478 - DNA, 20 bp, Artificial Sequence
  Synthetic oligonucleotide; GTGGAT chr11 5317926 5317945 5317942 +
ctcttgagaagagtctgttc

SEQ ID NO: 59479 - DNA, 20 bp, Artificial Sequence
  Synthetic oligonucleotide; TGGAAT chr11 5317948 5317967 5317964 +
ggattttgcccatttttaaa

SEQ ID NO: 59480 - DNA, 20 bp, Artificial Sequence
  Synthetic oligonucleotide; TCGAAT chr11 5317980 5317999 5317996 +
ctttttgcttgctgatatgt

SEQ ID NO: 59481 - DNA, 20 bp, Artificial Sequence
  Synthetic oligonucleotide; CTGAAT chr11 5317998 5318017 5318014 +
gttcgaattccttatagatt

SEQ ID NO: 59482 - DNA, 20 bp, Artificial Sequence
  Synthetic oligonucleotide; GTGAAT chr11 5318031 5318050 5318047 +
cttttccagatgcacagttt

SEQ ID NO: 59483 - DNA, 20 bp, Artificial Sequence
  Synthetic oligonucleotide; TAGGGT chr11 5318133 5318152 5318149 +
tattattatactttaagttc

SEQ ID NO: 59484 - DNA, 20 bp, Artificial Sequence
  Synthetic oligonucleotide; GAGAAT chr11 5318388 5318407 5318404 +
tgtccttgtgatagtttgct

SEQ ID NO: 59485 - DNA, 20 bp, Artificial Sequence
  Synthetic oligonucleotide; TTGGGT chr11 5318518 5318537 5318534 +
attctatcattgttggacat

SEQ ID NO: 59486 - DNA, 20 bp, Artificial Sequence
  Synthetic oligonucleotide; GTGAAT chr11 5318545 5318564 5318561 +
ggttccaagtctttgttatt

SEQ ID NO: 59487 - DNA, 20 bp, Artificial Sequence
  Synthetic oligonucleotide; GTGAAT chr11 5318584 5318603 5318600 +
agtttaattaggttccactt

SEQ ID NO: 59488 - DNA, 20 bp, Artificial Sequence
  Synthetic oligonucleotide; TTGAAT chr11 5318676 5318695 5318692 +
tgagatcttacatttaagtt

SEQ ID NO: 59489 - DNA, 20 bp, Artificial Sequence
  Synthetic oligonucleotide; AAGGGT chr11 5318717 5318736 5318733 +
ttctctaaatggtgtaaggt

SEQ ID NO: 59490 - DNA, 20 bp, Artificial Sequence
  Synthetic oligonucleotide; TTGGAT chr11 5318773 5318792 5318789 +
acgtattccagcacagttta

SEQ ID NO: 59491 - DNA, 20 bp, Artificial Sequence
  Synthetic oligonucleotide; TTGAGT chr11 5318855 5318874 5318871 +
gtaactatgtagctttattt

SEQ ID NO: 59492 - DNA, 20 bp, Artificial Sequence
  Synthetic oligonucleotide; TGGGGT chr11 5318917 5318936 5318933 +
tgtaacaatatcatgctgtt

SEQ ID NO: 59493 - DNA, 20 bp, Artificial Sequence
  Synthetic oligonucleotide; CAGAGT chr11 5318996 5319015 5319012 +
tctttctttttttatttttt

SEQ ID NO: 59494 - DNA, 20 bp, Artificial Sequence
  Synthetic oligonucleotide; TGGAGT chr11 5319021 5319040 5319037 +
tttcactctgtcacccaggc

SEQ ID NO: 59495 - DNA, 20 bp, Artificial Sequence
  Synthetic oligonucleotide; CAGAGT chr11 5319065 5319084 5319081 +
ctcactgcaccgtctgcctc

SEQ ID NO: 59496 - DNA, 20 bp, Artificial Sequence
  Synthetic oligonucleotide; CCGAGT chr11 5319097 5319116 5319113 +
aattctcctgcctcagcctt

SEQ ID NO: 59497 - DNA, 20 bp, Artificial Sequence
  Synthetic oligonucleotide; TGGGAT chr11 5319106 5319125 5319122 +
gcctcagccttccgagtagc

SEQ ID NO: 59498 - DNA, 20 bp, Artificial Sequence
  Synthetic oligonucleotide; TAGAGT chr11 5319239 5319258 5319255 +
acctcagccccctaaagtgc

SEQ ID NO: 59499 - DNA, 20 bp, Artificial Sequence
  Synthetic oligonucleotide; ATGAAT chr11 5319361 5319380 5319377 +
caggctctttttggttccat

SEQ ID NO: 59500 - DNA, 20 bp, Artificial Sequence
  Synthetic oligonucleotide; AAGAAT chr11 5319393 5319412 5319409 +
ctagtttttctaatactgtg

SEQ ID NO: 59501 - DNA, 20 bp, Artificial Sequence
  Synthetic oligonucleotide; TTGGAT chr11 5319410 5319429 5319426 +
gtgaagaatgacattggtaa

SEQ ID NO: 59502 - DNA, 20 bp, Artificial Sequence
  Synthetic oligonucleotide; ATGAAT chr11 5319426 5319445 5319442 +
gtaattggatagaaattgca

SEQ ID NO: 59503 - DNA, 20 bp, Artificial Sequence
  Synthetic oligonucleotide; AAGAAT chr11 5319693 5319712 5319709 +
atcaaaggaacatacctcaa

SEQ ID NO: 59504 - DNA, 20 bp, Artificial Sequence
  Synthetic oligonucleotide; CTGAAT chr11 5319736 5319755 5319752 +
aacccataaccaaaaccata

SEQ ID NO: 59505 - DNA, 20 bp, Artificial Sequence
  Synthetic oligonucleotide; AAGGAT chr11 5319785 5319804 5319801 +
ctcgaaaactgcaacaagac

SEQ ID NO: 59506 - DNA, 20 bp, Artificial Sequence
  Synthetic oligonucleotide; CAGGAT chr11 5319992 5320011 5320008 +
aaacaattttagcaaggttt

SEQ ID NO: 59507 - DNA, 20 bp, Artificial Sequence
  Synthetic oligonucleotide; GAGAGT chr11 5320053 5320072 5320069 +
acaccaataaggcccaggct

SEQ ID NO: 59508 - DNA, 20 bp, Artificial Sequence
  Synthetic oligonucleotide; ATGAAT chr11 5320174 5320193 5320190 +
ctagaaagaaaatatttacc

SEQ ID NO: 59509 - DNA, 20 bp, Artificial Sequence
  Synthetic oligonucleotide; GTGAAT chr11 5320203 5320222 5320219 +
tacaacactatcattactac

SEQ ID NO: 59510 - DNA, 20 bp, Artificial Sequence
  Synthetic oligonucleotide; TGGGAT chr11 5320245 5320264 5320261 +
agacacatcaaataaatttc

SEQ ID NO: 59511 - DNA, 20 bp, Artificial Sequence
  Synthetic oligonucleotide; GAGAAT chr11 5320287 5320306 5320303 +
gaagaaatgctacttaagct

SEQ ID NO: 59512 - DNA, 20 bp, Artificial Sequence
  Synthetic oligonucleotide; TGGGGT chr11 5320329 5320348 5320345 +
agtagtgtagtagtatttgg

SEQ ID NO: 59513 - DNA, 20 bp, Artificial Sequence
  Synthetic oligonucleotide; ATGAAT chr11 5320534 5320553 5320550 +
gaaaaaaagcttgagagaaa

SEQ ID NO: 59514 - DNA, 20 bp, Artificial Sequence
  Synthetic oligonucleotide; GGGAAT chr11 5320610 5320629 5320626 +
acattttgacattaccataa

SEQ ID NO: 59515 - DNA, 20 bp, Artificial Sequence
  Synthetic oligonucleotide; ATGAAT chr11 5320614 5320633 5320630 +
tttgacattaccataaggga

SEQ ID NO: 59516 - DNA, 20 bp, Artificial Sequence
  Synthetic oligonucleotide; ATGAGT chr11 5320637 5320656 5320653 +
aatataaaacaagaggtatg

SEQ ID NO: 59517 - DNA, 20 bp, Artificial Sequence
  Synthetic oligonucleotide; CAGGAT chr11 5320733 5320752 5320749 +
agaacaggtaaaagaagtat

SEQ ID NO: 59518 - DNA, 20 bp, Artificial Sequence
  Synthetic oligonucleotide; TTGAAT chr11 5320808 5320827 5320824 +
atcagtagcattagaaaggc

SEQ ID NO: 59519 - DNA, 20 bp, Artificial Sequence
  Synthetic oligonucleotide; TAGAAT chr11 5320834 5320853 5320850 +
agaagagagattctatgact

SEQ ID NO: 59520 - DNA, 20 bp, Artificial Sequence
  Synthetic oligonucleotide; CTGAGT chr11 5320844 5320863 5320860 +
ttctatgacttagaatagaa

SEQ ID NO: 59521 - DNA, 20 bp, Artificial Sequence
  Synthetic oligonucleotide; CTGAAT chr11 5320896 5320915 5320912 +
agaagcgtaagtaatgccac

SEQ ID NO: 59522 - DNA, 20 bp, Artificial Sequence
  Synthetic oligonucleotide; CTGAGT chr11 5320904 5320923 5320920 +
aagtaatgccacctgaattt

SEQ ID NO: 59523 - DNA, 20 bp, Artificial Sequence
  Synthetic oligonucleotide; CTGAAT chr11 5320914 5320933 5320930 +
acctgaatttctgagttttg

SEQ ID NO: 59524 - DNA, 20 bp, Artificial Sequence
  Synthetic oligonucleotide; GAGAGT chr11 5320921 5320940 5320937 +
tttctgagttttgctgaatg

SEQ ID NO: 59525 - DNA, 20 bp, Artificial Sequence
  Synthetic oligonucleotide; ATGAGT chr11 5321015 5321034 5321031 +
tgattggtcattgtacatta

SEQ ID NO: 59526 - DNA, 20 bp, Artificial Sequence
  Synthetic oligonucleotide; GAGAAT chr11 5321053 5321072 5321069 +
gactttgtagaaaagatgaa

SEQ ID NO: 59527 - DNA, 20 bp, Artificial Sequence
  Synthetic oligonucleotide; AAGGAT chr11 5321084 5321103 5321100 +
tcaatgaagtgctttgcaca

SEQ ID NO: 59528 - DNA, 20 bp, Artificial Sequence
  Synthetic oligonucleotide; CAGGAT chr11 5321154 5321173 5321170 +
cattaacatataggtaaaga

SEQ ID NO: 59529 - DNA, 20 bp, Artificial Sequence
  Synthetic oligonucleotide; CTGAAT chr11 5321224 5321243 5321240 +
catgtggtaaagtgggaagg

SEQ ID NO: 59530 - DNA, 20 bp, Artificial Sequence
  Synthetic oligonucleotide; AAGGAT chr11 5321230 5321249 5321246 +
gtaaagtgggaaggctgaat

SEQ ID NO: 59531 - DNA, 20 bp, Artificial Sequence
  Synthetic oligonucleotide; GAGAAT chr11 5321251 5321270 5321267 +
aggatattattttgttttta

SEQ ID NO: 59532 - DNA, 20 bp, Artificial Sequence
  Synthetic oligonucleotide; AAGAGT chr11 5321294 5321313 5321310 +
ccttattaaaaatatgacag

SEQ ID NO: 59533 - DNA, 20 bp, Artificial Sequence
  Synthetic oligonucleotide; GTGGAT chr11 5321447 5321466 5321463 +
ctcaatgaaataaaatgcta

SEQ ID NO: 59534 - DNA, 20 bp, Artificial Sequence
  Synthetic oligonucleotide; TAGAAT chr11 5321467 5321486 5321483 +
gtggattcagatcaccctct

SEQ ID NO: 59535 - DNA, 20 bp, Artificial Sequence
  Synthetic oligonucleotide; GAGAAT chr11 5321521 5321540 5321537 +
ccatgaaggcaccaagaaca

SEQ ID NO: 59536 - DNA, 20 bp, Artificial Sequence
  Synthetic oligonucleotide; AAGAGT chr11 5321807 5321826 5321823 +
tggccttggccagttaaact

SEQ ID NO: 59537 - DNA, 20 bp, Artificial Sequence
  Synthetic oligonucleotide; GGGGAT chr11 5321874 5321893 5321890 +
tcaaaatttagatatcagat

SEQ ID NO: 59538 - DNA, 20 bp, Artificial Sequence
  Synthetic oligonucleotide; GGGAAT chr11 5322012 5322031 5322028 +
tcaagatagcaaatcaagat

SEQ ID NO: 59539 - DNA, 20 bp, Artificial Sequence
  Synthetic oligonucleotide; TAGGAT chr11 5322118 5322137 5322134 +
tttggtagataactgacttt

SEQ ID NO: 59540 - DNA, 20 bp, Artificial Sequence
  Synthetic oligonucleotide; TTGAGT chr11 5322124 5322143 5322140 +
agataactgacttttaggat

SEQ ID NO: 59541 - DNA, 20 bp, Artificial Sequence
  Synthetic oligonucleotide; GTGGAT chr11 5322193 5322212 5322209 +
gttttccccttttgaaattt

SEQ ID NO: 59542 - DNA, 20 bp, Artificial Sequence
  Synthetic oligonucleotide; TTGGAT chr11 5322288 5322307 5322304 +
ccaccacaattttttagtca

SEQ ID NO: 59543 - DNA, 20 bp, Artificial Sequence
  Synthetic oligonucleotide; ATGAAT chr11 5322292 5322311 5322308 +
cacaattttttagtcattgg

SEQ ID NO: 59544 - DNA, 20 bp, Artificial Sequence
  Synthetic oligonucleotide; GAGAGT chr11 5322339 5322358 5322355 +
ttgttggtcttcctaatata

SEQ ID NO: 59545 - DNA, 20 bp, Artificial Sequence
  Synthetic oligonucleotide; AAGAAT chr11 5322379 5322398 5322395 +
agagaaagtatttatggcaa

SEQ ID NO: 59546 - DNA, 20 bp, Artificial Sequence
  Synthetic oligonucleotide; TAGAAT chr11 5322465 5322484 5322481 +
atgtctcatatttttcattc

SEQ ID NO: 59547 - DNA, 20 bp, Artificial Sequence
  Synthetic oligonucleotide; TTGAAT chr11 5322488 5322507 5322504 +
aatggctatattttctattt

SEQ ID NO: 59548 - DNA, 20 bp, Artificial Sequence
  Synthetic oligonucleotide; AAGAAT chr11 5322645 5322664 5322661 +
tctaagatttttttgggcaa

SEQ ID NO: 59549 - DNA, 20 bp, Artificial Sequence
  Synthetic oligonucleotide; AAGAAT chr11 5322659 5322678 5322675 +
gggcaaaagaatatttatag

SEQ ID NO: 59550 - DNA, 20 bp, Artificial Sequence
  Synthetic oligonucleotide; AGGAAT chr11 5322707 5322726 5322723 +
taaaatccagacatcctgca

SEQ ID NO: 59551 - DNA, 20 bp, Artificial Sequence
  Synthetic oligonucleotide; GAGAGT chr11 5322802 5322821 5322818 +
aaatgcaaatcatggcccta

SEQ ID NO: 59552 - DNA, 20 bp, Artificial Sequence
  Synthetic oligonucleotide; CAGGGT chr11 5322817 5322836 5322833 +
ccctagagagtaccctaact

SEQ ID NO: 59553 - DNA, 20 bp, Artificial Sequence
  Synthetic oligonucleotide; GAGAAT chr11 5322905 5322924 5322921 +
cttatcactatatttgccat

SEQ ID NO: 59554 - DNA, 20 bp, Artificial Sequence
  Synthetic oligonucleotide; AAGAAT chr11 5322927 5322946 5322943 +
gaataatgaaaattttaaat

SEQ ID NO: 59555 - DNA, 20 bp, Artificial Sequence
  Synthetic oligonucleotide; GAGAAT chr11 5322942 5322961 5322958 +
taaataagaatttatttcta

SEQ ID NO: 59556 - DNA, 20 bp, Artificial Sequence
  Synthetic oligonucleotide; AAGAAT chr11 5323112 5323131 5323128 +
atttcaggtgcatttgaaag

SEQ ID NO: 59557 - DNA, 20 bp, Artificial Sequence
  Synthetic oligonucleotide; GTGAGT chr11 5323221 5323240 5323237 +
ggtaaagtacttaagtcctt

SEQ ID NO: 59558 - DNA, 20 bp, Artificial Sequence
  Synthetic oligonucleotide; CCGAGT chr11 5323333 5323352 5323349 +
ctgtgtctgattctccagat

SEQ ID NO: 59559 - DNA, 20 bp, Artificial Sequence
  Synthetic oligonucleotide; GCGGAT chr11 5323369 5323388 5323385 +
aacctatgtttagataaaag

SEQ ID NO: 59560 - DNA, 20 bp, Artificial Sequence
  Synthetic oligonucleotide; CAGGGT chr11 5323416 5323435 5323432 +
ggttttgatgctgtagatga

SEQ ID NO: 59561 - DNA, 20 bp, Artificial Sequence
  Synthetic oligonucleotide; ATGAAT chr11 5323502 5323521 5323518 +
cattcttcccaaatctgtaa

SEQ ID NO: 59562 - DNA, 20 bp, Artificial Sequence
  Synthetic oligonucleotide; AAGAAT chr11 5323618 5323637 5323634 +
gcaatgcctatgacagtatt

SEQ ID NO: 59563 - DNA, 20 bp, Artificial Sequence
  Synthetic oligonucleotide; TAGAAT chr11 5323624 5323643 5323640 +
cctatgacagtattaagaat

SEQ ID NO: 59564 - DNA, 20 bp, Artificial Sequence
  Synthetic oligonucleotide; GAGGAT chr11 5323639 5323658 5323655 +
agaattagaatataggagaa

SEQ ID NO: 59565 - DNA, 20 bp, Artificial Sequence
  Synthetic oligonucleotide; CAGGGT chr11 5323686 5323705 5323702 +
tgttaaagagatcaaaatta

SEQ ID NO: 59566 - DNA, 20 bp, Artificial Sequence
  Synthetic oligonucleotide; CAGGAT chr11 5323813 5323832 5323829 +
aaaagacgcaaaattacagg

SEQ ID NO: 59567 - DNA, 20 bp, Artificial Sequence
  Synthetic oligonucleotide; ATGGAT chr11 5323817 5323836 5323833 +
gacgcaaaattacaggcagg

SEQ ID NO: 59568 - DNA, 20 bp, Artificial Sequence
  Synthetic oligonucleotide; GAGAAT chr11 5323876 5323895 5323892 +
gctatgactctagtattggt

SEQ ID NO: 59569 - DNA, 20 bp, Artificial Sequence
  Synthetic oligonucleotide; AAGGAT chr11 5323896 5323915 5323912 +
gagaatggaagcatatctca

SEQ ID NO: 59570 - DNA, 20 bp, Artificial Sequence
  Synthetic oligonucleotide; GCGGAT chr11 5323903 5323922 5323919 +
gaagcatatctcaaaggatt

SEQ ID NO: 59571 - DNA, 20 bp, Artificial Sequence
  Synthetic oligonucleotide; GGGAGT chr11 5323965 5323984 5323981 +
acctgattccacaacagaaa

SEQ ID NO: 59572 - DNA, 20 bp, Artificial Sequence
  Synthetic oligonucleotide; GTGAAT chr11 5323969 5323988 5323985 +
gattccacaacagaaaggga

SEQ ID NO: 59573 - DNA, 20 bp, Artificial Sequence
  Synthetic oligonucleotide; TAGGAT chr11 5324029 5324048 5324045 +
atctccctgtgattcaccca

SEQ ID NO: 59574 - DNA, 20 bp, Artificial Sequence
  Synthetic oligonucleotide; AAGGAT chr11 5324167 5324186 5324183 +
aggagcatgccattgcccag

SEQ ID NO: 59575 - DNA, 20 bp, Artificial Sequence
  Synthetic oligonucleotide; GGGGAT chr11 5324194 5324213 5324210 +
cacacataaacagcaaagaa

SEQ ID NO: 59576 - DNA, 20 bp, Artificial Sequence
  Synthetic oligonucleotide; AAGAAT chr11 5324398 5324417 5324414 +
ctgcaactattttcctgaag

SEQ ID NO: 59577 - DNA, 20 bp, Artificial Sequence
  Synthetic oligonucleotide; CTGAGT chr11 5324446 5324465 5324462 +
ttccctaattagaaaaaata

SEQ ID NO: 59578 - DNA, 20 bp, Artificial Sequence
  Synthetic oligonucleotide; GAGGGT chr11 5324521 5324540 5324537 +
atattatccgcaactatttt

SEQ ID NO: 59579 - DNA, 20 bp, Artificial Sequence
  Synthetic oligonucleotide; ATGGAT chr11 5324585 5324604 5324601 +
cataacataaatatacataa

SEQ ID NO: 59580 - DNA, 20 bp, Artificial Sequence
  Synthetic oligonucleotide; TTGAAT chr11 5324723 5324742 5324739 +
tttctcattttttttggaaa

SEQ ID NO: 59581 - DNA, 20 bp, Artificial Sequence
  Synthetic oligonucleotide; CAGAGT chr11 5324815 5324834 5324831 +
agttacttgagcttggccac

SEQ ID NO: 59582 - DNA, 20 bp, Artificial Sequence
  Synthetic oligonucleotide; GTGGAT chr11 5324822 5324841 5324838 +
tgagcttggccaccagagtt

SEQ ID NO: 59583 - DNA, 20 bp, Artificial Sequence
  Synthetic oligonucleotide; CTGAAT chr11 5324901 5324920 5324917 +
attctgccccttccaacatt

SEQ ID NO: 59584 - DNA, 20 bp, Artificial Sequence
  Synthetic oligonucleotide; AAGGAT chr11 5325262 5325281 5325278 +
ttataatgtttccacagcct

SEQ ID NO: 59585 - DNA, 20 bp, Artificial Sequence
  Synthetic oligonucleotide; AGGGGT chr11 5325315 5325334 5325331 +
cttggttgccacgatccaag

SEQ ID NO: 59586 - DNA, 20 bp, Artificial Sequence
  Synthetic oligonucleotide; CAGAAT chr11 5325379 5325398 5325395 +
gtcttatttaacgagaaatt

SEQ ID NO: 59587 - DNA, 20 bp, Artificial Sequence
  Synthetic oligonucleotide; CAGAAT chr11 5325451 5325470 5325467 +
cctcagtatcaaaaataaat

SEQ ID NO: 59588 - DNA, 20 bp, Artificial Sequence
  Synthetic oligonucleotide; GTGAGT chr11 5325526 5325545 5325542 +
ctacctctgtatcagctcct

SEQ ID NO: 59589 - DNA, 20 bp, Artificial Sequence
  Synthetic oligonucleotide; CAGGAT chr11 5325532 5325551 5325548 +
ctgtatcagctcctgtgagt

SEQ ID NO: 59590 - DNA, 20 bp, Artificial Sequence
  Synthetic oligonucleotide; GGGAAT chr11 5325572 5325591 5325588 +
gattgaaatcaccaacacta

SEQ ID NO: 59591 - DNA, 20 bp, Artificial Sequence
  Synthetic oligonucleotide; TTGAAT chr11 5325596 5325615 5325612 +
atccctaaaattaaatcaca

SEQ ID NO: 59592 - DNA, 20 bp, Artificial Sequence
  Synthetic oligonucleotide; CTGAAT chr11 5325614 5325633 5325630 +
cattgaattcatatagaaga

SEQ ID NO: 59593 - DNA, 20 bp, Artificial Sequence
  Synthetic oligonucleotide; AGGAAT chr11 5325684 5325703 5325700 +
atgcttaaaaacacagattg

SEQ ID NO: 59594 - DNA, 20 bp, Artificial Sequence
  Synthetic oligonucleotide; GAGGAT chr11 5325692 5325711 5325708 +
aaacacagattgaggaataa

SEQ ID NO: 59595 - DNA, 20 bp, Artificial Sequence
  Synthetic oligonucleotide; CGGAAT chr11 5325701 5325720 5325717 +
ttgaggaataagaggatgta

SEQ ID NO: 59596 - DNA, 20 bp, Artificial Sequence
  Synthetic oligonucleotide; GAGAAT chr11 5325722 5325741 5325738 +
ggaatgaggtataggaggaa

SEQ ID NO: 59597 - DNA, 20 bp, Artificial Sequence
  Synthetic oligonucleotide; AAGGGT chr11 5325768 5325787 5325784 +
aattggtgacacatattctg

SEQ ID NO: 59598 - DNA, 20 bp, Artificial Sequence
  Synthetic oligonucleotide; TGGGAT chr11 5325867 5325886 5325883 +
aaaaagaaagccataaaatc

SEQ ID NO: 59599 - DNA, 20 bp, Artificial Sequence
  Synthetic oligonucleotide; AAGGAT chr11 5325893 5325912 5325909 +
tcctttaaaaaaaattgtgt

SEQ ID NO: 59600 - DNA, 20 bp, Artificial Sequence
  Synthetic oligonucleotide; TTGGGT chr11 5326077 5326096 5326093 +
atctccctccatctctaagc

SEQ ID NO: 59601 - DNA, 20 bp, Artificial Sequence
  Synthetic oligonucleotide; GGGAAT chr11 5326153 5326172 5326169 +
taaatcatgtctgagatttt

SEQ ID NO: 59602 - DNA, 20 bp, Artificial Sequence
  Synthetic oligonucleotide; GGGGAT chr11 5326228 5326247 5326244 +
ttacccagaggcaggcgtgt

SEQ ID NO: 59603 - DNA, 20 bp, Artificial Sequence
  Synthetic oligonucleotide; CTGGAT chr11 5326412 5326431 5326428 +
aagcacaagaactagttttt

SEQ ID NO: 59604 - DNA, 20 bp, Artificial Sequence
  Synthetic oligonucleotide; AAGGAT chr11 5326492 5326511 5326508 +
taaatgtttagtgatttcct

SEQ ID NO: 59605 - DNA, 20 bp, Artificial Sequence
  Synthetic oligonucleotide; TGGGGT chr11 5326499 5326518 5326515 +
ttagtgatttcctaaggatc

SEQ ID NO: 59606 - DNA, 20 bp, Artificial Sequence
  Synthetic oligonucleotide; TTGAGT chr11 5326622 5326641 5326638 +
caagttggaaaatgactatt

SEQ ID NO: 59607 - DNA, 20 bp, Artificial Sequence
  Synthetic oligonucleotide; CAGAAT chr11 5326633 5326652 5326649 +
atgactattttgagtcagca

SEQ ID NO: 59608 - DNA, 20 bp, Artificial Sequence
  Synthetic oligonucleotide; ATGAGT chr11 5326732 5326751 5326748 +
agaagctctcaatatggcct

SEQ ID NO: 59609 - DNA, 20 bp, Artificial Sequence
  Synthetic oligonucleotide; CAGAAT chr11 5326775 5326794 5326791 +
attctcccttcaattttatg

SEQ ID NO: 59610 - DNA, 20 bp, Artificial Sequence
  Synthetic oligonucleotide; TTGAAT chr11 5326788 5326807 5326804 +
ttttatgcagaatattgccc

SEQ ID NO: 59611 - DNA, 20 bp, Artificial Sequence
  Synthetic oligonucleotide; CAGGAT chr11 5326801 5326820 5326817 +
attgcccttgaatgtctcaa

SEQ ID NO: 59612 - DNA, 20 bp, Artificial Sequence
  Synthetic oligonucleotide; CTGAAT chr11 5326886 5326905 5326902 +
attctagatgttctattgac

SEQ ID NO: 59613 - DNA, 20 bp, Artificial Sequence
  Synthetic oligonucleotide; ATGAAT chr11 5326915 5326934 5326931 +
acatgatgatatatttctag

SEQ ID NO: 59614 - DNA, 20 bp, Artificial Sequence
  Synthetic oligonucleotide; TTGAAT chr11 5327016 5327035 5327032 +
gctcactttgagaacataat

SEQ ID NO: 59615 - DNA, 20 bp, Artificial Sequence
  Synthetic oligonucleotide; GGGAGT chr11 5327036 5327055 5327052 +
ttgaatgttaccagatacaa

SEQ ID NO: 59616 - DNA, 20 bp, Artificial Sequence
  Synthetic oligonucleotide; GTGAAT chr11 5327123 5327142 5327139 +
tcaagaaaatgtagtaaata

SEQ ID NO: 59617 - DNA, 20 bp, Artificial Sequence
  Synthetic oligonucleotide; CTGAGT chr11 5327218 5327237 5327234 +
tttcctactctgccctcctt

SEQ ID NO: 59618 - DNA, 20 bp, Artificial Sequence
  Synthetic oligonucleotide; TTGGAT chr11 5327223 5327242 5327239 +
tactctgccctccttctgag

SEQ ID NO: 59619 - DNA, 20 bp, Artificial Sequence
  Synthetic oligonucleotide; TAGAAT chr11 5327274 5327293 5327290 +
aaggagatgggccctgtctc

SEQ ID NO: 59620 - DNA, 20 bp, Artificial Sequence
  Synthetic oligonucleotide; GTGAGT chr11 5327287 5327306 5327303 +
ctgtctctagaatttttcta

SEQ ID NO: 59621 - DNA, 20 bp, Artificial Sequence
  Synthetic oligonucleotide; AGGGGT chr11 5327370 5327389 5327386 +
acatgcatgtgtgtgtttca

SEQ ID NO: 59622 - DNA, 20 bp, Artificial Sequence
  Synthetic oligonucleotide; TTGGAT chr11 5327381 5327400 5327397 +
tgtgtttcaaggggtgttgt

SEQ ID NO: 59623 - DNA, 20 bp, Artificial Sequence
  Synthetic oligonucleotide; CAGGAT chr11 5327441 5327460 5327457 +
acttttctttctataaattt

SEQ ID NO: 59624 - DNA, 20 bp, Artificial Sequence
  Synthetic oligonucleotide; CAGAGT chr11 5327452 5327471 5327468 +
tataaatttcaggatcttag

SEQ ID NO: 59625 - DNA, 20 bp, Artificial Sequence
  Synthetic oligonucleotide; GTGAGT chr11 5327525 5327544 5327541 +
tgtctttaatcttcaaaaaa

SEQ ID NO: 59626 - DNA, 20 bp, Artificial Sequence
  Synthetic oligonucleotide; CAGAAT chr11 5327736 5327755 5327752 +
ctaagcctttcaactcgatt

SEQ ID NO: 59627 - DNA, 20 bp, Artificial Sequence
  Synthetic oligonucleotide; CTGGAT chr11 5327833 5327852 5327849 +
aaacgtaaaataagcccttt

SEQ ID NO: 59628 - DNA, 20 bp, Artificial Sequence
  Synthetic oligonucleotide; CTGAGT chr11 5327848 5327867 5327864 +
cctttctggataaacaaaaa

SEQ ID NO: 59629 - DNA, 20 bp, Artificial Sequence
  Synthetic oligonucleotide; TTGAAT chr11 5327896 5327915 5327912 +
aaatgaccaaagatgatcat

SEQ ID NO: 59630 - DNA, 20 bp, Artificial Sequence
  Synthetic oligonucleotide; ATGAAT chr11 5327995 5328014 5328011 +
tctgcttcttattttcaaaa

SEQ ID NO: 59631 - DNA, 20 bp, Artificial Sequence
  Synthetic oligonucleotide; TAGAAT chr11 5328017 5328036 5328033 +
gaatgtattacaataaaaaa

SEQ ID NO: 59632 - DNA, 20 bp, Artificial Sequence
  Synthetic oligonucleotide; GTGAGT chr11 5328085 5328104 5328101 +
ccaataactgaacaaaggag

SEQ ID NO: 59633 - DNA, 20 bp, Artificial Sequence
  Synthetic oligonucleotide; TGGAAT chr11 5328107 5328126 5328123 +
gagtgataacaaagctgttt

SEQ ID NO: 59634 - DNA, 20 bp, Artificial Sequence
  Synthetic oligonucleotide; ATGAGT chr11 5328160 5328179 5328176 +
ataaacatctacatagaaaa

SEQ ID NO: 59635 - DNA, 20 bp, Artificial Sequence
  Synthetic oligonucleotide; AAGAAT chr11 5328166 5328185 5328182 +
atctacatagaaaaatgagt

SEQ ID NO: 59636 - DNA, 20 bp, Artificial Sequence
  Synthetic oligonucleotide; AAGGGT chr11 5328224 5328243 5328240 +
aattatacttatgccaatcc

SEQ ID NO: 59637 - DNA, 20 bp, Artificial Sequence
  Synthetic oligonucleotide; TAGGAT chr11 5328305 5328324 5328321 +
aaaaaaaaaaatctgtgctg

SEQ ID NO: 59638 - DNA, 20 bp, Artificial Sequence
  Synthetic oligonucleotide; TTGAGT chr11 5328376 5328395 5328392 +
aaccttcttatatgctttcc

SEQ ID NO: 59639 - DNA, 20 bp, Artificial Sequence
  Synthetic oligonucleotide; AGGAAT chr11 5328403 5328422 5328419 +
catctcacatcagaagagag

SEQ ID NO: 59640 - DNA, 20 bp, Artificial Sequence
  Synthetic oligonucleotide; CTGAGT chr11 5328567 5328586 5328583 +
gcatgtggaaatcacctccc

SEQ ID NO: 59641 - DNA, 20 bp, Artificial Sequence
  Synthetic oligonucleotide; CGGGAT chr11 5328662 5328681 5328678 +
ggccccacaactgatgtcct

SEQ ID NO: 59642 - DNA, 20 bp, Artificial Sequence
  Synthetic oligonucleotide; AAGAAT chr11 5328684 5328703 5328700 +
ggattttcaggtgtttcctg

SEQ ID NO: 59643 - DNA, 20 bp, Artificial Sequence
  Synthetic oligonucleotide; TGGGGT chr11 5328689 5328708 5328705 +
ttcaggtgtttcctgaagaa

SEQ ID NO: 59644 - DNA, 20 bp, Artificial Sequence
  Synthetic oligonucleotide; AGGGAT chr11 5328734 5328753 5328750 +
aaaaccagctgatgtaagat

SEQ ID NO: 59645 - DNA, 20 bp, Artificial Sequence
  Synthetic oligonucleotide; AAGGGT chr11 5328797 5328816 5328813 +
tcataacttagtttatttga

SEQ ID NO: 59646 - DNA, 20 bp, Artificial Sequence
  Synthetic oligonucleotide; GGGGAT chr11 5328805 5328824 5328821 +
tagtttatttgaaagggtta

SEQ ID NO: 59647 - DNA, 20 bp, Artificial Sequence
  Synthetic oligonucleotide; AGGGAT chr11 5328824 5328843 5328840 +
aggggatatcggttgtcttc

SEQ ID NO: 59648 - DNA, 20 bp, Artificial Sequence
  Synthetic oligonucleotide; ACGGGT chr11 5328843 5328862 5328859 +
cagggatcatatgtacctct

SEQ ID NO: 59649 - DNA, 20 bp, Artificial Sequence
  Synthetic oligonucleotide; ATGAAT chr11 5328859 5328878 5328875 +
ctctacgggtcctagagctt

SEQ ID NO: 59650 - DNA, 20 bp, Artificial Sequence
  Synthetic oligonucleotide; ATGGAT chr11 5328929 5328948 5328945 +
tcttatctactggaacttca

SEQ ID NO: 59651 - DNA, 20 bp, Artificial Sequence
  Synthetic oligonucleotide; TAGAGT chr11 5329000 5329019 5329016 +
tttttttttttttttttaga

SEQ ID NO: 59652 - DNA, 20 bp, Artificial Sequence
  Synthetic oligonucleotide; TGGAGT chr11 5329024 5329043 5329040 +
gtctcactctgtcgccaggc

SEQ ID NO: 59653 - DNA, 20 bp, Artificial Sequence
  Synthetic oligonucleotide; CGGGGT chr11 5329165 5329184 5329181 +
ttttgtatttttagtagaca

SEQ ID NO: 59654 - DNA, 20 bp, Artificial Sequence
  Synthetic oligonucleotide; CAGGAT chr11 5329185 5329204 5329201 +
cggggtttcaccatattggc

SEQ ID NO: 59655 - DNA, 20 bp, Artificial Sequence
  Synthetic oligonucleotide; TGGGAT chr11 5329242 5329261 5329258 +
tccttggcctcccaaagtgc

SEQ ID NO: 59656 - DNA, 20 bp, Artificial Sequence
  Synthetic oligonucleotide; GTGAGT chr11 5329255 5329274 5329271 +
aaagtgctgggattgcaggt

SEQ ID NO: 59657 - DNA, 20 bp, Artificial Sequence
  Synthetic oligonucleotide; CAGAAT chr11 5329374 5329393 5329390 +
aggagcatagtctttattca

SEQ ID NO: 59658 - DNA, 20 bp, Artificial Sequence
  Synthetic oligonucleotide; TGGGGT chr11 5329573 5329592 5329589 +
aaatatagtgtttgtataag

SEQ ID NO: 59659 - DNA, 20 bp, Artificial Sequence
  Synthetic oligonucleotide; GAGAAT chr11 5329647 5329666 5329663 +
atatgacaaactcaaatcaa

SEQ ID NO: 59660 - DNA, 20 bp, Artificial Sequence
  Synthetic oligonucleotide; CAGAAT chr11 5329664 5329683 5329680 +
caagagaattctagcagagc

SEQ ID NO: 59661 - DNA, 20 bp, Artificial Sequence
  Synthetic oligonucleotide; GAGAAT chr11 5329700 5329719 5329716 +
gtgagaaaattgaacacaaa

SEQ ID NO: 59662 - DNA, 20 bp, Artificial Sequence
  Synthetic oligonucleotide; TAGGGT chr11 5329780 5329799 5329796 +
tattattatactttaagttt

SEQ ID NO: 59663 - DNA, 20 bp, Artificial Sequence
  Synthetic oligonucleotide; CGGAGT chr11 5329925 5329944 5329941 +
ccccacctcacaacagtccc

SEQ ID NO: 59664 - DNA, 20 bp, Artificial Sequence
  Synthetic oligonucleotide; ATGAGT chr11 5329982 5330001 5329998 +
tcattgttcaattcccacct

SEQ ID NO: 59665 - DNA, 20 bp, Artificial Sequence
  Synthetic oligonucleotide; GAGAAT chr11 5330032 5330051 5330048 +
tgtccttgcgatagtttgct

SEQ ID NO: 59666 - DNA, 20 bp, Artificial Sequence
  Synthetic oligonucleotide; TTGGGT chr11 5330162 5330181 5330178 +
agtctatcattgttggacat

SEQ ID NO: 59667 - DNA, 20 bp, Artificial Sequence
  Synthetic oligonucleotide; GTGAAT chr11 5330189 5330208 5330205 +
ggttccaagtctttgctatt

SEQ ID NO: 59668 - DNA, 20 bp, Artificial Sequence
  Synthetic oligonucleotide; TTGGGT chr11 5330253 5330272 5330269 +
gcagcatgatttataatccg

SEQ ID NO: 59669 - DNA, 20 bp, Artificial Sequence
  Synthetic oligonucleotide; TGGGAT chr11 5330272 5330291 5330288 +
gttgggtatatacccagtaa

SEQ ID NO: 59670 - DNA, 20 bp, Artificial Sequence
  Synthetic oligonucleotide; CTGGGT chr11 5330280 5330299 5330296 +
tatacccagtaatgggatgg

SEQ ID NO: 59671 - DNA, 20 bp, Artificial Sequence
  Synthetic oligonucleotide; AGGAAT chr11 5330315 5330334 5330331 +
tttctagttctagatccctg

SEQ ID NO: 59672 - DNA, 20 bp, Artificial Sequence
  Synthetic oligonucleotide; AAGAGT chr11 5330367 5330386 5330383 +
aactagtttacagtcccacc

SEQ ID NO: 59673 - DNA, 20 bp, Artificial Sequence
  Synthetic oligonucleotide; AAGGGT chr11 5330564 5330583 5330580 +
tgatgaagcacagtgtctga

SEQ ID NO: 59674 - DNA, 20 bp, Artificial Sequence
  Synthetic oligonucleotide; AAGGAT chr11 5330679 5330698 5330695 +
gcaattcccatgaccttctt

SEQ ID NO: 59675 - DNA, 20 bp, Artificial Sequence
  Synthetic oligonucleotide; CAGAAT chr11 5330685 5330704 5330701 +
cccatgaccttcttaaggat

SEQ ID NO: 59676 - DNA, 20 bp, Artificial Sequence
  Synthetic oligonucleotide; AAGGAT chr11 5330700 5330719 5330716 +
aggatcagaatgtaagagat

SEQ ID NO: 59677 - DNA, 20 bp, Artificial Sequence
  Synthetic oligonucleotide; TAGGAT chr11 5330747 5330766 5330763 +
agttgatgagaccaggacta

SEQ ID NO: 59678 - DNA, 20 bp, Artificial Sequence
  Synthetic oligonucleotide; TGGGAT chr11 5330829 5330848 5330845 +
agaaagcatgggagaggaca

SEQ ID NO: 59679 - DNA, 20 bp, Artificial Sequence
  Synthetic oligonucleotide; GGGAAT chr11 5330844 5330863 5330860 +
ggacatgggattgacagtag

SEQ ID NO: 59680 - DNA, 20 bp, Artificial Sequence
  Synthetic oligonucleotide; GAGGGT chr11 5330855 5330874 5330871 +
tgacagtaggggaatccaga

SEQ ID NO: 59681 - DNA, 20 bp, Artificial Sequence
  Synthetic oligonucleotide; GAGAAT chr11 5330939 5330958 5330955 +
ttcaccaccttagcattggt

SEQ ID NO: 59682 - DNA, 20 bp, Artificial Sequence
  Synthetic oligonucleotide; GGGGAT chr11 5330959 5330978 5330975 +
gagaatggaggtgtatctca

SEQ ID NO: 59683 - DNA, 20 bp, Artificial Sequence
  Synthetic oligonucleotide; ATGGAT chr11 5330966 5330985 5330982 +
gaggtgtatctcaggggatt

SEQ ID NO: 59684 - DNA, 20 bp, Artificial Sequence
  Synthetic oligonucleotide; GGGAGT chr11 5331028 5331047 5331044 +
tctggactccacgatagaga

SEQ ID NO: 59685 - DNA, 20 bp, Artificial Sequence
  Synthetic oligonucleotide; GTGGAT chr11 5331032 5331051 5331048 +
gactccacgatagagaggga

SEQ ID NO: 59686 - DNA, 20 bp, Artificial Sequence
  Synthetic oligonucleotide; GAGAGT chr11 5331160 5331179 5331176 +
tatggctgccagtatagtca

SEQ ID NO: 59687 - DNA, 20 bp, Artificial Sequence
  Synthetic oligonucleotide; AAGAGT chr11 5331182 5331201 5331198 +
gagtagtacacgggctcatg

SEQ ID NO: 59688 - DNA, 20 bp, Artificial Sequence
  Synthetic oligonucleotide; AAGGAT chr11 5331271 5331290 5331287 +
aaagaaggagatagaactcc

SEQ ID NO: 59689 - DNA, 20 bp, Artificial Sequence
  Synthetic oligonucleotide; GTGGGT chr11 5331330 5331349 5331346 +
gaaaaggggcagcagtaatg

SEQ ID NO: 59690 - DNA, 20 bp, Artificial Sequence
  Synthetic oligonucleotide; GTGGAT chr11 5331342 5331361 5331358 +
cagtaatggtgggtgacatg

SEQ ID NO: 59691 - DNA, 20 bp, Artificial Sequence
  Synthetic oligonucleotide; AGGAGT chr11 5331457 5331476 5331473 +
gttctggtagtcacattaaa

SEQ ID NO: 59692 - DNA, 20 bp, Artificial Sequence
  Synthetic oligonucleotide; TCGAGT chr11 5331606 5331625 5331622 +
ttggtacaaattcttcaaaa

SEQ ID NO: 59693 - DNA, 20 bp, Artificial Sequence
  Synthetic oligonucleotide; AAGAAT chr11 5331761 5331780 5331777 +
tgcttcatcaaaaaaatgtt

SEQ ID NO: 59694 - DNA, 20 bp, Artificial Sequence
  Synthetic oligonucleotide; GTGAAT chr11 5331913 5331932 5331929 +
ctatcctaatttctaggact

SEQ ID NO: 59695 - DNA, 20 bp, Artificial Sequence
  Synthetic oligonucleotide; TGGGGT chr11 5331937 5331956 5331953 +
atatgatacaatatcatgct

SEQ ID NO: 59696 - DNA, 20 bp, Artificial Sequence
  Synthetic oligonucleotide; TTGAGT chr11 5331979 5331998 5331995 +
aagttgctgatctattgact

SEQ ID NO: 59697 - DNA, 20 bp, Artificial Sequence
  Synthetic oligonucleotide; CAGAGT chr11 5332042 5332061 5332058 +
attccatgagcccctaaaag

SEQ ID NO: 59698 - DNA, 20 bp, Artificial Sequence
  Synthetic oligonucleotide; GAGAAT chr11 5332064 5332083 5332080 +
gagttttcaccaagtagtag

SEQ ID NO: 59699 - DNA, 20 bp, Artificial Sequence
  Synthetic oligonucleotide; ATGGGT chr11 5332106 5332125 5332122 +
tcaaaatttgagaaaggttc

SEQ ID NO: 59700 - DNA, 20 bp, Artificial Sequence
  Synthetic oligonucleotide; AGGAAT chr11 5332149 5332168 5332165 +
tataaggaggtcacaaaaga

SEQ ID NO: 59701 - DNA, 20 bp, Artificial Sequence
  Synthetic oligonucleotide; CAGAGT chr11 5332245 5332264 5332261 +
acaaaaacaaacagggactt

SEQ ID NO: 59702 - DNA, 20 bp, Artificial Sequence
  Synthetic oligonucleotide; CCGGGT chr11 5332279 5332298 5332295 +
aggaaactgaactctgacag

SEQ ID NO: 59703 - DNA, 20 bp, Artificial Sequence
  Synthetic oligonucleotide; GCGGAT chr11 5332336 5332355 5332352 +
actttgggaggccaaggcgg

SEQ ID NO: 59704 - DNA, 20 bp, Artificial Sequence
  Synthetic oligonucleotide; AGGAGT chr11 5332353 5332372 5332369 +
cgggcggatcacctgaggtc

SEQ ID NO: 59705 - DNA, 20 bp, Artificial Sequence
  Synthetic oligonucleotide; GAGAAT chr11 5332472 5332491 5332488 +
tacttgggaaactgaggcag

SEQ ID NO: 59706 - DNA, 20 bp, Artificial Sequence
  Synthetic oligonucleotide; CTGGGT chr11 5332538 5332557 5332554 +
ttgtgccactgcactccagg

SEQ ID NO: 59707 - DNA, 20 bp, Artificial Sequence
  Synthetic oligonucleotide; CTGAAT chr11 5332617 5332636 5332633 +
aactgagctctgactacaat

SEQ ID NO: 59708 - DNA, 20 bp, Artificial Sequence
  Synthetic oligonucleotide; GCGAAT chr11 5332633 5332652 5332649 +
caatctgaatgaacgtggaa

SEQ ID NO: 59709 - DNA, 20 bp, Artificial Sequence
  Synthetic oligonucleotide; TTGGAT chr11 5332654 5332673 5332670 +
cgaattcttccccagagcct

SEQ ID NO: 59710 - DNA, 20 bp, Artificial Sequence
  Synthetic oligonucleotide; TTGAAT chr11 5332683 5332702 5332699 +
agcccagccctcccgatatt

SEQ ID NO: 59711 - DNA, 20 bp, Artificial Sequence
  Synthetic oligonucleotide; GAGAGT chr11 5332732 5332751 5332748 +
gagaactcagttaagcctat

SEQ ID NO: 59712 - DNA, 20 bp, Artificial Sequence
  Synthetic oligonucleotide; AAGAGT chr11 5332857 5332876 5332873 +
actattatccatattttatt

SEQ ID NO: 59713 - DNA, 20 bp, Artificial Sequence
  Synthetic oligonucleotide; TAGAGT chr11 5332866 5332885 5332882 +
catattttattaagagttta

SEQ ID NO: 59714 - DNA, 20 bp, Artificial Sequence
  Synthetic oligonucleotide; CAGGGT chr11 5332893 5332912 5332909 +
ctataataaactaatattta

SEQ ID NO: 59715 - DNA, 20 bp, Artificial Sequence
  Synthetic oligonucleotide; CAGAAT chr11 5332933 5332952 5332949 +
gtatcatttatctattatca

SEQ ID NO: 59716 - DNA, 20 bp, Artificial Sequence
  Synthetic oligonucleotide; TAGGGT chr11 5333080 5333099 5333096 +
gcaccatctgctcaggtaca

SEQ ID NO: 59717 - DNA, 20 bp, Artificial Sequence
  Synthetic oligonucleotide; CAGAGT chr11 5333405 5333424 5333421 +
aatggccctggaagcaatga

SEQ ID NO: 59718 - DNA, 20 bp, Artificial Sequence
  Synthetic oligonucleotide; GTGGAT chr11 5333621 5333640 5333637 +
aaggcagaaagggaacatag

SEQ ID NO: 59719 - DNA, 20 bp, Artificial Sequence
  Synthetic oligonucleotide; CAGAGT chr11 5333732 5333751 5333748 +
ccaccctgcacattcactcc

SEQ ID NO: 59720 - DNA, 20 bp, Artificial Sequence
  Synthetic oligonucleotide; CAGAGT chr11 5333892 5333911 5333908 +
taaaactactgtttttattt

SEQ ID NO: 59721 - DNA, 20 bp, Artificial Sequence
  Synthetic oligonucleotide; CAGAAT chr11 5333948 5333967 5333964 +
ttggaggttgatacacccgg

SEQ ID NO: 59722 - DNA, 20 bp, Artificial Sequence
  Synthetic oligonucleotide; GAGAAT chr11 5334018 5334037 5334034 +
gcaacaactatgtggtggaa

SEQ ID NO: 59723 - DNA, 20 bp, Artificial Sequence
  Synthetic oligonucleotide; TGGGGT chr11 5334096 5334115 5334112 +
atagtcactagagcctgacc

SEQ ID NO: 59724 - DNA, 20 bp, Artificial Sequence
  Synthetic oligonucleotide; CTGAGT chr11 5334129 5334148 5334145 +
attaaggggagaggtaattg

SEQ ID NO: 59725 - DNA, 20 bp, Artificial Sequence
  Synthetic oligonucleotide; CAGGGT chr11 5334180 5334199 5334196 +
gtatctctgaagactgctaa

SEQ ID NO: 59726 - DNA, 20 bp, Artificial Sequence
  Synthetic oligonucleotide; CTGGAT chr11 5334239 5334258 5334255 +
ccccagtatctgtcttgatg

SEQ ID NO: 59727 - DNA, 20 bp, Artificial Sequence
  Synthetic oligonucleotide; TGGGAT chr11 5334256 5334275 5334272 +
atgctggataattaggctac

SEQ ID NO: 59728 - DNA, 20 bp, Artificial Sequence
  Synthetic oligonucleotide; CAGAAT chr11 5334347 5334366 5334363 +
ttttctttgcaaaaagaaaa

SEQ ID NO: 59729 - DNA, 20 bp, Artificial Sequence
  Synthetic oligonucleotide; ATGAGT chr11 5334566 5334585 5334582 +
tttgttatatatactcacaa

SEQ ID NO: 59730 - DNA, 20 bp, Artificial Sequence
  Synthetic oligonucleotide; AAGAAT chr11 5334632 5334651 5334648 +
tctcttggtaagtcttgccc

SEQ ID NO: 59731 - DNA, 20 bp, Artificial Sequence
  Synthetic oligonucleotide; CAGAGT chr11 5334638 5334657 5334654 +
ggtaagtcttgcccaagaat

SEQ ID NO: 59732 - DNA, 20 bp, Artificial Sequence
  Synthetic oligonucleotide; TTGAAT chr11 5334767 5334786 5334783 +
ctttgtctgacaatttgtac

SEQ ID NO: 59733 - DNA, 20 bp, Artificial Sequence
  Synthetic oligonucleotide; AAGGAT chr11 5334802 5334821 5334818 +
tcatagtctgtcagagaaat

SEQ ID NO: 59734 - DNA, 20 bp, Artificial Sequence
  Synthetic oligonucleotide; GAGAAT chr11 5334810 5334829 5334826 +
tgtcagagaaataaggatct

SEQ ID NO: 59735 - DNA, 20 bp, Artificial Sequence
  Synthetic oligonucleotide; ATGAGT chr11 5334884 5334903 5334900 +
cccaactatgagattttaaa

SEQ ID NO: 59736 - DNA, 20 bp, Artificial Sequence
  Synthetic oligonucleotide; ATGGGT chr11 5334890 5334909 5334906 +
tatgagattttaaaatgagt

SEQ ID NO: 59737 - DNA, 20 bp, Artificial Sequence
  Synthetic oligonucleotide; GAGGGT chr11 5334913 5334932 5334929 +
ggtgcaatgtggtgaaccat

SEQ ID NO: 59738 - DNA, 20 bp, Artificial Sequence
  Synthetic oligonucleotide; CAGAAT chr11 5334999 5335018 5335015 +
taggtcttcctaaatgtaag

SEQ ID NO: 59739 - DNA, 20 bp, Artificial Sequence
  Synthetic oligonucleotide; CTGGAT chr11 5335098 5335117 5335114 +
tactaagttaaaatttaggt

SEQ ID NO: 59740 - DNA, 20 bp, Artificial Sequence
  Synthetic oligonucleotide; ACGAAT chr11 5335231 5335250 5335247 +
gaccctctcactggcagtac

SEQ ID NO: 59741 - DNA, 20 bp, Artificial Sequence
  Synthetic oligonucleotide; CAGAGT chr11 5335320 5335339 5335336 +
taatttcctgcagactgccc

SEQ ID NO: 59742 - DNA, 20 bp, Artificial Sequence
  Synthetic oligonucleotide; TGGGAT chr11 5335326 5335345 5335342 +
cctgcagactgccccagagt

SEQ ID NO: 59743 - DNA, 20 bp, Artificial Sequence
  Synthetic oligonucleotide; GAGGAT chr11 5335362 5335381 5335378 +
gtgaagtgacactgttggtg

SEQ ID NO: 59744 - DNA, 20 bp, Artificial Sequence
  Synthetic oligonucleotide; GAGAAT chr11 5335377 5335396 5335393 +
tggtggaggataagcctcca

SEQ ID NO: 59745 - DNA, 20 bp, Artificial Sequence
  Synthetic oligonucleotide; AAGGGT chr11 5335654 5335673 5335670 +
ttgatgcagtgtttcctgac

SEQ ID NO: 59746 - DNA, 20 bp, Artificial Sequence
  Synthetic oligonucleotide; CTGAGT chr11 5335666 5335685 5335682 +
ttcctgacaagggtcatccg

SEQ ID NO: 59747 - DNA, 20 bp, Artificial Sequence
  Synthetic oligonucleotide; TAGAAT chr11 5335709 5335728 5335725 +
tcacataacacaatatttat

SEQ ID NO: 59748 - DNA, 20 bp, Artificial Sequence
  Synthetic oligonucleotide; TAGGAT chr11 5335934 5335953 5335950 +
attcaggaaggtctctatcc

SEQ ID NO: 59749 - DNA, 20 bp, Artificial Sequence
  Synthetic oligonucleotide; TTGAGT chr11 5335952 5335971 5335968 +
cctaggatttttgctgtttg

SEQ ID NO: 59750 - DNA, 20 bp, Artificial Sequence
  Synthetic oligonucleotide; CTGGAT chr11 5336031 5336050 5336047 +
ttctattatctgtcagcctt

SEQ ID NO: 59751 - DNA, 20 bp, Artificial Sequence
  Synthetic oligonucleotide; TGGGGT chr11 5336124 5336143 5336140 +
atgccaatttgactgggcca

SEQ ID NO: 59752 - DNA, 20 bp, Artificial Sequence
  Synthetic oligonucleotide; GAGGGT chr11 5336169 5336188 5336185 +
attattctagatgtttttgt

SEQ ID NO: 59753 - DNA, 20 bp, Artificial Sequence
  Synthetic oligonucleotide; CTGAAT chr11 5336267 5336286 5336283 +
tcctccaatcagttgaaaac

SEQ ID NO: 59754 - DNA, 20 bp, Artificial Sequence
  Synthetic oligonucleotide; GAGAAT chr11 5336306 5336325 5336322 +
tgacccttccccaaatcaga

SEQ ID NO: 59755 - DNA, 20 bp, Artificial Sequence
  Synthetic oligonucleotide; TGGAAT chr11 5336337 5336356 5336353 +
cttattgatggccttcaaac

SEQ ID NO: 59756 - DNA, 20 bp, Artificial Sequence
  Synthetic oligonucleotide; CTGGGT chr11 5336391 5336410 5336407 +
aactgaaacatcaaaacttc

SEQ ID NO: 59757 - DNA, 20 bp, Artificial Sequence
  Synthetic oligonucleotide; TTGGGT chr11 5336414 5336433 5336430 +
ggtctgaagcctgatggctt

SEQ ID NO: 59758 - DNA, 20 bp, Artificial Sequence
  Synthetic oligonucleotide; TTGAGT chr11 5336492 5336511 5336508 +
gactaaactaccaggctctc

SEQ ID NO: 59759 - DNA, 20 bp, Artificial Sequence
  Synthetic oligonucleotide; GTGAAT chr11 5336625 5336644 5336641 +
cattatttttttttaatgca

SEQ ID NO: 59760 - DNA, 20 bp, Artificial Sequence
  Synthetic oligonucleotide; CAGGAT chr11 5336701 5336720 5336717 +
taagttctgaggtacatgtg

SEQ ID NO: 59761 - DNA, 20 bp, Artificial Sequence
  Synthetic oligonucleotide; TTGGGT chr11 5337089 5337108 5337105 +
tgtctatcattgatggccat

SEQ ID NO: 59762 - DNA, 20 bp, Artificial Sequence
  Synthetic oligonucleotide; GTGAAT chr11 5337116 5337135 5337132 +
gattctatgtctttgctatt

SEQ ID NO: 59763 - DNA, 20 bp, Artificial Sequence
  Synthetic oligonucleotide; TAGAAT chr11 5337161 5337180 5337177 +
atgtgcatgtatcttagtaa

SEQ ID NO: 59764 - DNA, 20 bp, Artificial Sequence
  Synthetic oligonucleotide; TGGGAT chr11 5337199 5337218 5337215 +
tttaggtatatacccagtaa

SEQ ID NO: 59765 - DNA, 20 bp, Artificial Sequence
  Synthetic oligonucleotide; AGGAAT chr11 5337242 5337261 5337258 +
tttctggttctaaatctttg

SEQ ID NO: 59766 - DNA, 20 bp, Artificial Sequence
  Synthetic oligonucleotide; TTGAAT chr11 5337271 5337290 5337287 +
cacactgtcttccacaatgg

SEQ ID NO: 59767 - DNA, 20 bp, Artificial Sequence
  Synthetic oligonucleotide; TGGGGT chr11 5337517 5337536 5337533 +
gtcctttgcccactttttaa

SEQ ID NO: 59768 - DNA, 20 bp, Artificial Sequence
  Synthetic oligonucleotide; CTGGAT chr11 5337569 5337588 5337585 +
gtctaagttcctcatagatt

SEQ ID NO: 59769 - DNA, 20 bp, Artificial Sequence
  Synthetic oligonucleotide; ATGGGT chr11 5337591 5337610 5337607 +
ggatattagacctttgtcag

SEQ ID NO: 59770 - DNA, 20 bp, Artificial Sequence
  Synthetic oligonucleotide; TAGAGT chr11 5337731 5337750 5337747 +
tctcactctttcacccatgc

SEQ ID NO: 59771 - DNA, 20 bp, Artificial Sequence
  Synthetic oligonucleotide; CTGGGT chr11 5337775 5337794 5337791 +
ctcactgcaacctctgcctc

SEQ ID NO: 59772 - DNA, 20 bp, Artificial Sequence
  Synthetic oligonucleotide; CTGAGT chr11 5337807 5337826 5337823 +
aattctcctgcctcagcctc

SEQ ID NO: 59773 - DNA, 20 bp, Artificial Sequence
  Synthetic oligonucleotide; TGGAGT chr11 5337873 5337892 5337889 +
ttttgtatttttagtagaga

SEQ ID NO: 59774 - DNA, 20 bp, Artificial Sequence
  Synthetic oligonucleotide; TGGGAT chr11 5337952 5337971 5337968 +
accttggcctcccaaagtgc

SEQ ID NO: 59775 - DNA, 20 bp, Artificial Sequence
  Synthetic oligonucleotide; CGGAAT chr11 5338079 5338098 5338095 +
tctttgcctgtgtctatgtc

SEQ ID NO: 59776 - DNA, 20 bp, Artificial Sequence
  Synthetic oligonucleotide; TTGGGT chr11 5338122 5338141 5338138 +
cttctaaagtttttatagtt

SEQ ID NO: 59777 - DNA, 20 bp, Artificial Sequence
  Synthetic oligonucleotide; TTGAGT chr11 5338153 5338172 5338169 +
acttaagtctttaatgcatc

SEQ ID NO: 59778 - DNA, 20 bp, Artificial Sequence
  Synthetic oligonucleotide; AGGGGT chr11 5338183 5338202 5338199 +
ttatgtataagatgtaagga

SEQ ID NO: 59779 - DNA, 20 bp, Artificial Sequence
  Synthetic oligonucleotide; GGGAAT chr11 5338246 5338265 5338262 +
ccagcacaatttataaaata

SEQ ID NO: 59780 - DNA, 20 bp, Artificial Sequence
  Synthetic oligonucleotide; CTGAGT chr11 5338321 5338340 5338337 +
tcagatgcgcggtcttactt

SEQ ID NO: 59781 - DNA, 20 bp, Artificial Sequence
  Synthetic oligonucleotide; TTGGGT chr11 5338419 5338438 5338435 +
ccttgtagtataatttgaag

SEQ ID NO: 59782 - DNA, 20 bp, Artificial Sequence
  Synthetic oligonucleotide; ATGAGT chr11 5338586 5338605 5338602 +
ccataaaataaattttgtct

SEQ ID NO: 59783 - DNA, 20 bp, Artificial Sequence
  Synthetic oligonucleotide; AAGGAT chr11 5338616 5338635 5338632 +
taataacaatgactgtgtct

SEQ ID NO: 59784 - DNA, 20 bp, Artificial Sequence
  Synthetic oligonucleotide; CTGGGT chr11 5338676 5338695 5338692 +
ttaattggacatggagacct

SEQ ID NO: 59785 - DNA, 20 bp, Artificial Sequence
  Synthetic oligonucleotide; AGGAAT chr11 5338823 5338842 5338839 +
agcaattatttgttaatgag

SEQ ID NO: 59786 - DNA, 20 bp, Artificial Sequence
  Synthetic oligonucleotide; AAGGAT chr11 5339084 5339103 5339100 +
atattattatttgaaaaaga

SEQ ID NO: 59787 - DNA, 20 bp, Artificial Sequence
  Synthetic oligonucleotide; TTGAAT chr11 5339237 5339256 5339253 +
gttatattcttctttcagtc

SEQ ID NO: 59788 - DNA, 20 bp, Artificial Sequence
  Synthetic oligonucleotide; CTGAAT chr11 5339252 5339271 5339268 +
cagtcttgaatgatgaaaag

SEQ ID NO: 59789 - DNA, 20 bp, Artificial Sequence
  Synthetic oligonucleotide; CTGAAT chr11 5339317 5339336 5339333 +
tgttagtccactggaccact

SEQ ID NO: 59790 - DNA, 20 bp, Artificial Sequence
  Synthetic oligonucleotide; ATGAAT chr11 5339335 5339354 5339351 +
ctctgaattctactcttctt

SEQ ID NO: 59791 - DNA, 20 bp, Artificial Sequence
  Synthetic oligonucleotide; AGGAGT chr11 5339420 5339439 5339436 +
ctaacttttattttaggttc

SEQ ID NO: 59792 - DNA, 20 bp, Artificial Sequence
  Synthetic oligonucleotide; GAGGGT chr11 5339464 5339483 5339480 +
catatttaaacttgtgtcac

SEQ ID NO: 59793 - DNA, 20 bp, Artificial Sequence
  Synthetic oligonucleotide; ATGGGT chr11 5339795 5339814 5339811 +
tgtttatgttgattgttaca

SEQ ID NO: 59794 - DNA, 20 bp, Artificial Sequence
  Synthetic oligonucleotide; TTGAAT chr11 5339802 5339821 5339818 +
gttgattgttacaatgggtt

SEQ ID NO: 59795 - DNA, 20 bp, Artificial Sequence
  Synthetic oligonucleotide; CTGAGT chr11 5339820 5339839 5339836 +
ttttgaatagaaaaacatgt

SEQ ID NO: 59796 - DNA, 20 bp, Artificial Sequence
  Synthetic oligonucleotide; GTGGAT chr11 5339824 5339843 5339840 +
gaatagaaaaacatgtctga

SEQ ID NO: 59797 - DNA, 20 bp, Artificial Sequence
  Synthetic oligonucleotide; GTGAAT chr11 5339933 5339952 5339949 +
catcctacagcatcttctca

SEQ ID NO: 59798 - DNA, 20 bp, Artificial Sequence
  Synthetic oligonucleotide; AGGAGT chr11 5340220 5340239 5340236 +
acaaaacaaattacaagaag

SEQ ID NO: 59799 - DNA, 20 bp, Artificial Sequence
  Synthetic oligonucleotide; TGGAAT chr11 5340237 5340256 5340253 +
aagaggagtttattaggctg

SEQ ID NO: 59800 - DNA, 20 bp, Artificial Sequence
  Synthetic oligonucleotide; CTGAGT chr11 5340275 5340294 5340291 +
tcaaactgtcctccttgtca

SEQ ID NO: 59801 - DNA, 20 bp, Artificial Sequence
  Synthetic oligonucleotide; TGGAAT chr11 5340293 5340312 5340309 +
cactgagtctcaggaaaaca

SEQ ID NO: 59802 - DNA, 20 bp, Artificial Sequence
  Synthetic oligonucleotide; AGGAGT chr11 5340517 5340536 5340533 +
aaagttcttctactgcggtt

SEQ ID NO: 59803 - DNA, 20 bp, Artificial Sequence
  Synthetic oligonucleotide; TGGAGT chr11 5340570 5340589 5340586 +
ttcatagggaacaatatttt

SEQ ID NO: 59804 - DNA, 20 bp, Artificial Sequence
  Synthetic oligonucleotide; CGGAAT chr11 5340625 5340644 5340641 +
agtaggtactacaagcatga

SEQ ID NO: 59805 - DNA, 20 bp, Artificial Sequence
  Synthetic oligonucleotide; AAGGAT chr11 5340655 5340674 5340671 +
ggcaaaaagtagaagccact

SEQ ID NO: 59806 - DNA, 20 bp, Artificial Sequence
  Synthetic oligonucleotide; TGGAGT chr11 5340673 5340692 5340689 +
ctaaggatagtctactgtag

SEQ ID NO: 59807 - DNA, 20 bp, Artificial Sequence
  Synthetic oligonucleotide; TTGAAT chr11 5340716 5340735 5340732 +
tatagttagaagatataaat

SEQ ID NO: 59808 - DNA, 20 bp, Artificial Sequence
  Synthetic oligonucleotide; GGGAAT chr11 5340758 5340777 5340774 +
aaaaatgttatgcccttgga

SEQ ID NO: 59809 - DNA, 20 bp, Artificial Sequence
  Synthetic oligonucleotide; ATGAAT chr11 5340832 5340851 5340848 +
atctaccccacaatattttt

SEQ ID NO: 59810 - DNA, 20 bp, Artificial Sequence
  Synthetic oligonucleotide; GTGGAT chr11 5340848 5340867 5340864 +
ttttatgaataaaataagtt

SEQ ID NO: 59811 - DNA, 20 bp, Artificial Sequence
  Synthetic oligonucleotide; ATGAAT chr11 5340891 5340910 5340907 +
agggacacatgtttggtttt

SEQ ID NO: 59812 - DNA, 20 bp, Artificial Sequence
  Synthetic oligonucleotide; AAGGAT chr11 5340991 5341010 5341007 +
ctcaggtgacatggcgtgac

SEQ ID NO: 59813 - DNA, 20 bp, Artificial Sequence
  Synthetic oligonucleotide; CAGAAT chr11 5341063 5341082 5341079 +
aattacatctcttaatgaaa

SEQ ID NO: 59814 - DNA, 20 bp, Artificial Sequence
  Synthetic oligonucleotide; AAGGAT chr11 5341075 5341094 5341091 +
taatgaaacagaatataaat

SEQ ID NO: 59815 - DNA, 20 bp, Artificial Sequence
  Synthetic oligonucleotide; AGGGAT chr11 5341126 5341145 5341142 +
ctatgagcaatacctgagat

SEQ ID NO: 59816 - DNA, 20 bp, Artificial Sequence
  Synthetic oligonucleotide; ATGAAT chr11 5341153 5341172 5341169 +
caaatgtgtgcaatttatta

SEQ ID NO: 59817 - DNA, 20 bp, Artificial Sequence
  Synthetic oligonucleotide; GAGGGT chr11 5341254 5341273 5341270 +
agcttagcttcagaaggcaa

SEQ ID NO: 59818 - DNA, 20 bp, Artificial Sequence
  Synthetic oligonucleotide; CTGAGT chr11 5341324 5341343 5341340 +
tcttcataagacatttcctg

SEQ ID NO: 59819 - DNA, 20 bp, Artificial Sequence
  Synthetic oligonucleotide; CGGGGT chr11 5341410 5341429 5341426 +
gcacaattctgtaaaatgat

SEQ ID NO: 59820 - DNA, 20 bp, Artificial Sequence
  Synthetic oligonucleotide; TAGGAT chr11 5341526 5341545 5341542 +
agacataacctccctctttt

SEQ ID NO: 59821 - DNA, 20 bp, Artificial Sequence
  Synthetic oligonucleotide; TTGAGT chr11 5341540 5341559 5341556 +
tctttttaggatattttaaa

SEQ ID NO: 59822 - DNA, 20 bp, Artificial Sequence
  Synthetic oligonucleotide; ATGGGT chr11 5341547 5341566 5341563 +
aggatattttaaattgagtt

SEQ ID NO: 59823 - DNA, 20 bp, Artificial Sequence
  Synthetic oligonucleotide; GAGAAT chr11 5341587 5341606 5341603 +
tcagacaattttaatcaaat

SEQ ID NO: 59824 - DNA, 20 bp, Artificial Sequence
  Synthetic oligonucleotide; TGGAAT chr11 5341632 5341651 5341648 +
ggaaatttacacttattaca

SEQ ID NO: 59825 - DNA, 20 bp, Artificial Sequence
  Synthetic oligonucleotide; CAGAAT chr11 5341638 5341657 5341654 +
ttacacttattacatggaat

SEQ ID NO: 59826 - DNA, 20 bp, Artificial Sequence
  Synthetic oligonucleotide; GAGGGT chr11 5341727 5341746 5341743 +
gacctttttcatagcaaaag

SEQ ID NO: 59827 - DNA, 20 bp, Artificial Sequence
  Synthetic oligonucleotide; GAGGAT chr11 5341785 5341804 5341801 +
gtcagccagcgtagatatct

SEQ ID NO: 59828 - DNA, 20 bp, Artificial Sequence
  Synthetic oligonucleotide; TAGGGT chr11 5341815 5341834 5341831 +
tcaacattggagctagcaac

SEQ ID NO: 59829 - DNA, 20 bp, Artificial Sequence
  Synthetic oligonucleotide; TAGAAT chr11 5341823 5341842 5341839 +
ggagctagcaactagggtag

SEQ ID NO: 59830 - DNA, 20 bp, Artificial Sequence
  Synthetic oligonucleotide; AAGAAT chr11 5341829 5341848 5341845 +
agcaactagggtagtagaat

SEQ ID NO: 59831 - DNA, 20 bp, Artificial Sequence
  Synthetic oligonucleotide; GGGAAT chr11 5341942 5341961 5341958 +
tgtcagaaggtactgccttg

SEQ ID NO: 59832 - DNA, 20 bp, Artificial Sequence
  Synthetic oligonucleotide; ATGAGT chr11 5341952 5341971 5341968 +
tactgccttggggaataaat

SEQ ID NO: 59833 - DNA, 20 bp, Artificial Sequence
  Synthetic oligonucleotide; AAGAGT chr11 5342148 5342167 5342164 +
acacctgcagagaaattcat

SEQ ID NO: 59834 - DNA, 20 bp, Artificial Sequence
  Synthetic oligonucleotide; AGGAAT chr11 5342364 5342383 5342380 +
tagagaaatattccgtttac

SEQ ID NO: 59835 - DNA, 20 bp, Artificial Sequence
  Synthetic oligonucleotide; AAGAGT chr11 5342403 5342422 5342419 +
gtacaaactacatttagcta

SEQ ID NO: 59836 - DNA, 20 bp, Artificial Sequence
  Synthetic oligonucleotide; TAGAGT chr11 5342523 5342542 5342539 +
tttgctctcctgctaaatat

SEQ ID NO: 59837 - DNA, 20 bp, Artificial Sequence
  Synthetic oligonucleotide; GAGAGT chr11 5342542 5342561 5342558 +
ttagagtttttacattctgt

SEQ ID NO: 59838 - DNA, 20 bp, Artificial Sequence
  Synthetic oligonucleotide; ATGGGT chr11 5342581 5342600 5342597 +
ggagatcaggttccaattct

SEQ ID NO: 59839 - DNA, 20 bp, Artificial Sequence
  Synthetic oligonucleotide; AAGAAT chr11 5342599 5342618 5342615 +
ctatgggtagtaaaaaggtg

SEQ ID NO: 59840 - DNA, 20 bp, Artificial Sequence
  Synthetic oligonucleotide; CTGAAT chr11 5342611 5342630 5342627 +
aaaaggtgaagaatggcatt

SEQ ID NO: 59841 - DNA, 20 bp, Artificial Sequence
  Synthetic oligonucleotide; TAGGAT chr11 5342643 5342662 5342659 +
ggtcttgacactatatgtta

SEQ ID NO: 59842 - DNA, 20 bp, Artificial Sequence
  Synthetic oligonucleotide; ATGAAT chr11 5342725 5342744 5342741 +
ggaacctgctttccaaaacg

SEQ ID NO: 59843 - DNA, 20 bp, Artificial Sequence
  Synthetic oligonucleotide; TTGAGT chr11 5342843 5342862 5342859 +
aggcaatgctcaggacagtc

SEQ ID NO: 59844 - DNA, 20 bp, Artificial Sequence
  Synthetic oligonucleotide; CTGGGT chr11 5342913 5342932 5342929 +
tataaagactacaagcacag

SEQ ID NO: 59845 - DNA, 20 bp, Artificial Sequence
  Synthetic oligonucleotide; GCGAGT chr11 5342948 5342967 5342964 +
tgaaggtggtatcagcacag

SEQ ID NO: 59846 - DNA, 20 bp, Artificial Sequence
  Synthetic oligonucleotide; CAGAAT chr11 5342975 5342994 5342991 +
taatgacatcctggtgaagg

SEQ ID NO: 59847 - DNA, 20 bp, Artificial Sequence
  Synthetic oligonucleotide; GGGAGT chr11 5342997 5343016 5343013 +
gaatgcatgtgaaagaacat

SEQ ID NO: 59848 - DNA, 20 bp, Artificial Sequence
  Synthetic oligonucleotide; ACGGAT chr11 5343044 5343063 5343060 +
ggggcctgattgggggaaca

SEQ ID NO: 59849 - DNA, 20 bp, Artificial Sequence
  Synthetic oligonucleotide; TCGAGT chr11 5343091 5343110 5343107 +
cccagcccaatcttcactac

SEQ ID NO: 59850 - DNA, 20 bp, Artificial Sequence
  Synthetic oligonucleotide; GAGGGT chr11 5343123 5343142 5343139 +
aagtacagaggtatatctaa

SEQ ID NO: 59851 - DNA, 20 bp, Artificial Sequence
  Synthetic oligonucleotide; CAGAAT chr11 5343166 5343185 5343182 +
cggtcataggccatggcaag

SEQ ID NO: 59852 - DNA, 20 bp, Artificial Sequence
  Synthetic oligonucleotide; GTGAGT chr11 5343192 5343211 5343208 +
gccagactcgagaaaggaaa

SEQ ID NO: 59853 - DNA, 20 bp, Artificial Sequence
  Synthetic oligonucleotide; GAGGGT chr11 5343376 5343395 5343392 +
tcttccttaatgagaagaag

SEQ ID NO: 59854 - DNA, 20 bp, Artificial Sequence
  Synthetic oligonucleotide; AAGGAT chr11 5343394 5343413 5343410 +
aggagggtgccattgccaaa

SEQ ID NO: 59855 - DNA, 20 bp, Artificial Sequence
  Synthetic oligonucleotide; ATGGAT chr11 5343398 5343417 5343414 +
gggtgccattgccaaaaagg

SEQ ID NO: 59856 - DNA, 20 bp, Artificial Sequence
  Synthetic oligonucleotide; AGGGAT chr11 5343477 5343496 5343493 +
tggaaaaccagtcaatagga

SEQ ID NO: 59857 - DNA, 20 bp, Artificial Sequence
  Synthetic oligonucleotide; CTGGGT chr11 5343506 5343525 5343522 +
agctgccgctggacgacatc

SEQ ID NO: 59858 - DNA, 20 bp, Artificial Sequence
  Synthetic oligonucleotide; CAGAAT chr11 5343598 5343617 5343614 +
cacttcgactatatcattct

SEQ ID NO: 59859 - DNA, 20 bp, Artificial Sequence
  Synthetic oligonucleotide; CAGGGT chr11 5343662 5343681 5343678 +
tgtttctcaaaatacattct

SEQ ID NO: 59860 - DNA, 20 bp, Artificial Sequence
  Synthetic oligonucleotide; CAGGAT chr11 5343702 5343721 5343718 +
gtattcttaactgcacattc

SEQ ID NO: 59861 - DNA, 20 bp, Artificial Sequence
  Synthetic oligonucleotide; TGGAGT chr11 5343736 5343755 5343752 +
tacctacgtaatcaaattct

SEQ ID NO: 59862 - DNA, 20 bp, Artificial Sequence
  Synthetic oligonucleotide; AAGAAT chr11 5343836 5343855 5343852 +
ccttaactatgcagatttta

SEQ ID NO: 59863 - DNA, 20 bp, Artificial Sequence
  Synthetic oligonucleotide; GGGGAT chr11 5343864 5343883 5343880 +
gtattctatggggcattcaa

SEQ ID NO: 59864 - DNA, 20 bp, Artificial Sequence
  Synthetic oligonucleotide; CTGAAT chr11 5343975 5343994 5343991 +
tcctgcatgtaaagacttac

SEQ ID NO: 59865 - DNA, 20 bp, Artificial Sequence
  Synthetic oligonucleotide; GTGAAT chr11 5344135 5344154 5344151 +
aacagacattcacgattagt

SEQ ID NO: 59866 - DNA, 20 bp, Artificial Sequence
  Synthetic oligonucleotide; TAGAAT chr11 5344151 5344170 5344167 +
tagtgtgaattaccctcttg

SEQ ID NO: 59867 - DNA, 20 bp, Artificial Sequence
  Synthetic oligonucleotide; TGGAAT chr11 5344220 5344239 5344236 +
tataagttagactttggggc

SEQ ID NO: 59868 - DNA, 20 bp, Artificial Sequence
  Synthetic oligonucleotide; TAGAAT chr11 5344362 5344381 5344378 +
ggcctactgaagtaattccc

SEQ ID NO: 59869 - DNA, 20 bp, Artificial Sequence
  Synthetic oligonucleotide; CTGAAT chr11 5344453 5344472 5344469 +
ttatccccagccataggctt

SEQ ID NO: 59870 - DNA, 20 bp, Artificial Sequence
  Synthetic oligonucleotide; CTGAGT chr11 5344474 5344493 5344490 +
tgaatctgttctccccaata

SEQ ID NO: 59871 - DNA, 20 bp, Artificial Sequence
  Synthetic oligonucleotide; TGGAAT chr11 5344722 5344741 5344738 +
ccatgatatttaaagctctc

SEQ ID NO: 59872 - DNA, 20 bp, Artificial Sequence
  Synthetic oligonucleotide; TTGGAT chr11 5344854 5344873 5344870 +
tactacttgatgtagattaa

SEQ ID NO: 59873 - DNA, 20 bp, Artificial Sequence
  Synthetic oligonucleotide; CGGAAT chr11 5345100 5345119 5345116 +
tagggccttacagaccacca

SEQ ID NO: 59874 - DNA, 20 bp, Artificial Sequence
  Synthetic oligonucleotide; ATGAGT chr11 5345270 5345289 5345286 +
agcaagagacaagaaaagag

SEQ ID NO: 59875 - DNA, 20 bp, Artificial Sequence
  Synthetic oligonucleotide; AAGAGT chr11 5345303 5345322 5345319 +
ctattttaaaaatccatatg

SEQ ID NO: 59876 - DNA, 20 bp, Artificial Sequence
  Synthetic oligonucleotide; GGGAGT chr11 5345429 5345448 5345445 +
tttgctgatatattaaaaat

SEQ ID NO: 59877 - DNA, 20 bp, Artificial Sequence
  Synthetic oligonucleotide; AAGAAT chr11 5345485 5345504 5345501 +
atttctgtttgaacaaatga

SEQ ID NO: 59878 - DNA, 20 bp, Artificial Sequence
  Synthetic oligonucleotide; GGGGAT chr11 5345524 5345543 5345540 +
actcaaaatggaagtctgag

SEQ ID NO: 59879 - DNA, 20 bp, Artificial Sequence
  Synthetic oligonucleotide; AAGAGT chr11 5345553 5345572 5345569 +
tattcacttgtgaggaaatc

SEQ ID NO: 59880 - DNA, 20 bp, Artificial Sequence
  Synthetic oligonucleotide; CTGAAT chr11 5345574 5345593 5345590 +
agagtcattagtaaatatag

SEQ ID NO: 59881 - DNA, 20 bp, Artificial Sequence
  Synthetic oligonucleotide; CAGAGT chr11 5345688 5345707 5345704 +
cgtatccaaatatacccctt

SEQ ID NO: 59882 - DNA, 20 bp, Artificial Sequence
  Synthetic oligonucleotide; AAGAAT chr11 5345843 5345862 5345859 +
gcaacaactcagcactttga

SEQ ID NO: 59883 - DNA, 20 bp, Artificial Sequence
  Synthetic oligonucleotide; CAGAAT chr11 5345895 5345914 5345911 +
taggactgagagacataaac

SEQ ID NO: 59884 - DNA, 20 bp, Artificial Sequence
  Synthetic oligonucleotide; ATGAGT chr11 5345922 5345941 5345938 +
cagtgcctactgaacataca

SEQ ID NO: 59885 - DNA, 20 bp, Artificial Sequence
  Synthetic oligonucleotide; GAGAAT chr11 5346104 5346123 5346120 +
tgaaaaattccttcttatca

SEQ ID NO: 59886 - DNA, 20 bp, Artificial Sequence
  Synthetic oligonucleotide; ATGAAT chr11 5346124 5346143 5346140 +
gagaatatgcagcacaagtg

SEQ ID NO: 59887 - DNA, 20 bp, Artificial Sequence
  Synthetic oligonucleotide; AAGAAT chr11 5346221 5346240 5346237 +
tttcctccttctccattccc

SEQ ID NO: 59888 - DNA, 20 bp, Artificial Sequence
  Synthetic oligonucleotide; TGGAAT chr11 5346270 5346289 5346286 +
gcagctataatagtgatcta

SEQ ID NO: 59889 - DNA, 20 bp, Artificial Sequence
  Synthetic oligonucleotide; GAGGAT chr11 5346411 5346430 5346427 +
ggaaagagatcataaagact

SEQ ID NO: 59890 - DNA, 20 bp, Artificial Sequence
  Synthetic oligonucleotide; TAGAAT chr11 5346519 5346538 5346535 +
gtttaaaaagtaaaatgtag

SEQ ID NO: 59891 - DNA, 20 bp, Artificial Sequence
  Synthetic oligonucleotide; GAGGGT chr11 5346573 5346592 5346589 +
aaaggaaagaagacatatga

SEQ ID NO: 59892 - DNA, 20 bp, Artificial Sequence
  Synthetic oligonucleotide; CTGAGT chr11 5346596 5346615 5346612 +
ggtcaatcatattcacatca

SEQ ID NO: 59893 - DNA, 20 bp, Artificial Sequence
  Synthetic oligonucleotide; TGGAAT chr11 5346635 5346654 5346651 +
ggtagttggttggtagcact

SEQ ID NO: 59894 - DNA, 20 bp, Artificial Sequence
  Synthetic oligonucleotide; AGGAGT chr11 5346751 5346770 5346767 +
tttctctggagagcttatag

SEQ ID NO: 59895 - DNA, 20 bp, Artificial Sequence
  Synthetic oligonucleotide; AGGAGT chr11 5346782 5346801 5346798 +
agtacactctttatatatct

SEQ ID NO: 59896 - DNA, 20 bp, Artificial Sequence
  Synthetic oligonucleotide; CAGGGT chr11 5346837 5346856 5346853 +
tgtttgatggtgaggaagag

SEQ ID NO: 59897 - DNA, 20 bp, Artificial Sequence
  Synthetic oligonucleotide; TTGGAT chr11 5346965 5346984 5346981 +
gtctcccttttatagccaac

SEQ ID NO: 59898 - DNA, 20 bp, Artificial Sequence
  Synthetic oligonucleotide; CTGAAT chr11 5347079 5347098 5347095 +
tttttcaaataagttactgg

SEQ ID NO: 59899 - DNA, 20 bp, Artificial Sequence
  Synthetic oligonucleotide; GGGAAT chr11 5347113 5347132 5347129 +
tggtaggacctttatgtgtg

SEQ ID NO: 59900 - DNA, 20 bp, Artificial Sequence
  Synthetic oligonucleotide; CTGAAT chr11 5347259 5347278 5347275 +
atcttcttggcctatgtaac

SEQ ID NO: 59901 - DNA, 20 bp, Artificial Sequence
  Synthetic oligonucleotide; TAGAGT chr11 5347328 5347347 5347344 +
aagcagagagctagatagac

SEQ ID NO: 59902 - DNA, 20 bp, Artificial Sequence
  Synthetic oligonucleotide; TTGAGT chr11 5347414 5347433 5347430 +
tatcactaactattcccttc

SEQ ID NO: 59903 - DNA, 20 bp, Artificial Sequence
  Synthetic oligonucleotide; GGGGAT chr11 5347449 5347468 5347465 +
cagaagttttctcttttcca

SEQ ID NO: 59904 - DNA, 20 bp, Artificial Sequence
  Synthetic oligonucleotide; TTGAGT chr11 5347672 5347691 5347688 +
ccaggacagagacagagatc

SEQ ID NO: 59905 - DNA, 20 bp, Artificial Sequence
  Synthetic oligonucleotide; AGGAAT chr11 5347817 5347836 5347833 +
gaacaataattatctaaatc

SEQ ID NO: 59906 - DNA, 20 bp, Artificial Sequence
  Synthetic oligonucleotide; AAGAAT chr11 5347947 5347966 5347963 +
gatacatgactatggaactg

SEQ ID NO: 59907 - DNA, 20 bp, Artificial Sequence
  Synthetic oligonucleotide; GAGGGT chr11 5347979 5347998 5347995 +
gaacaaagtttcaggtcagt

SEQ ID NO: 59908 - DNA, 20 bp, Artificial Sequence
  Synthetic oligonucleotide; ATGAAT chr11 5347990 5348009 5348006 +
caggtcagtgagggtattta

SEQ ID NO: 59909 - DNA, 20 bp, Artificial Sequence
  Synthetic oligonucleotide; AAGAGT chr11 5348094 5348113 5348110 +
aagtaatagtgttgtctgct

SEQ ID NO: 59910 - DNA, 20 bp, Artificial Sequence
  Synthetic oligonucleotide; ATGGGT chr11 5348117 5348136 5348133 +
agtagatatatgtagtaggc

SEQ ID NO: 59911 - DNA, 20 bp, Artificial Sequence
  Synthetic oligonucleotide; GAGAGT chr11 5348162 5348181 5348178 +
ctctaaaacttggtttcttt

SEQ ID NO: 59912 - DNA, 20 bp, Artificial Sequence
  Synthetic oligonucleotide; AAGGAT chr11 5348192 5348211 5348208 +
tcttcaaatataaaaaagtg

SEQ ID NO: 59913 - DNA, 20 bp, Artificial Sequence
  Synthetic oligonucleotide; ATGGGT chr11 5348245 5348264 5348261 +
ttctacgaacaaaccagagc

SEQ ID NO: 59914 - DNA, 20 bp, Artificial Sequence
  Synthetic oligonucleotide; ATGAAT chr11 5348263 5348282 5348279 +
gcatgggtgttgactcaggc

SEQ ID NO: 59915 - DNA, 20 bp, Artificial Sequence
  Synthetic oligonucleotide; TGGGGT chr11 5348271 5348290 5348287 +
gttgactcaggcatgaatta

SEQ ID NO: 59916 - DNA, 20 bp, Artificial Sequence
  Synthetic oligonucleotide; GAGAGT chr11 5348337 5348356 5348353 +
ctggcttccattctaaccct

SEQ ID NO: 59917 - DNA, 20 bp, Artificial Sequence
  Synthetic oligonucleotide; TAGAAT chr11 5348399 5348418 5348415 +
gtccagataagtgccaaata

SEQ ID NO: 59918 - DNA, 20 bp, Artificial Sequence
  Synthetic oligonucleotide; TTGGGT chr11 5348532 5348551 5348548 +
aaattaagcttggacggagc

SEQ ID NO: 59919 - DNA, 20 bp, Artificial Sequence
  Synthetic oligonucleotide; CTGGAT chr11 5348549 5348568 5348565 +
agcttgggttatgtgtgcct

SEQ ID NO: 59920 - DNA, 20 bp, Artificial Sequence
  Synthetic oligonucleotide; AGGGGT chr11 5348556 5348575 5348572 +
gttatgtgtgcctctggatc

SEQ ID NO: 59921 - DNA, 20 bp, Artificial Sequence
  Synthetic oligonucleotide; GAGGGT chr11 5348701 5348720 5348717 +
agatagtacccacccagacg

SEQ ID NO: 59922 - DNA, 20 bp, Artificial Sequence
  Synthetic oligonucleotide; GTGGGT chr11 5348705 5348724 5348721 +
agtacccacccagacggagg

SEQ ID NO: 59923 - DNA, 20 bp, Artificial Sequence
  Synthetic oligonucleotide; GTGGGT chr11 5348709 5348728 5348725 +
cccacccagacggagggtgg

SEQ ID NO: 59924 - DNA, 20 bp, Artificial Sequence
  Synthetic oligonucleotide; AAGGAT chr11 5348841 5348860 5348857 +
tcaatattaaccatcacaga

SEQ ID NO: 59925 - DNA, 20 bp, Artificial Sequence
  Synthetic oligonucleotide; GGGGGT chr11 5348862 5348881 5348878 +
aggataatagccaaaggtaa

SEQ ID NO: 59926 - DNA, 20 bp, Artificial Sequence
  Synthetic oligonucleotide; AAGGAT chr11 5348873 5348892 5348889 +
caaaggtaagggggtaaaaa

SEQ ID NO: 59927 - DNA, 20 bp, Artificial Sequence
  Synthetic oligonucleotide; AAGAGT chr11 5348905 5348924 5348921 +
actaagtgcttgagacagaa

SEQ ID NO: 59928 - DNA, 20 bp, Artificial Sequence
  Synthetic oligonucleotide; GAGAAT chr11 5348950 5348969 5348966 +
aaaagccaaagggaaggtga

SEQ ID NO: 59929 - DNA, 20 bp, Artificial Sequence
  Synthetic oligonucleotide; CTGAAT chr11 5348972 5348991 5348988 +
gaatatatgaaagttaacat

SEQ ID NO: 59930 - DNA, 20 bp, Artificial Sequence
  Synthetic oligonucleotide; CAGAGT chr11 5349022 5349041 5349038 +
agagccatcagtttatgcgg

SEQ ID NO: 59931 - DNA, 20 bp, Artificial Sequence
  Synthetic oligonucleotide; GAGAAT chr11 5349038 5349057 5349054 +
gcggcagagtttgagacttt

SEQ ID NO: 59932 - DNA, 20 bp, Artificial Sequence
  Synthetic oligonucleotide; GAGGGT chr11 5349096 5349115 5349112 +
ctatgacagagaccctggaa

SEQ ID NO: 59933 - DNA, 20 bp, Artificial Sequence
  Synthetic oligonucleotide; GTGAAT chr11 5349100 5349119 5349116 +
gacagagaccctggaagagg

SEQ ID NO: 59934 - DNA, 20 bp, Artificial Sequence
  Synthetic oligonucleotide; AGGGAT chr11 5349112 5349131 5349128 +
ggaagagggtgaatggctgc

SEQ ID NO: 59935 - DNA, 20 bp, Artificial Sequence
  Synthetic oligonucleotide; CTGAGT chr11 5349185 5349204 5349201 +
ctcatataccacaaaagcaa

SEQ ID NO: 59936 - DNA, 20 bp, Artificial Sequence
  Synthetic oligonucleotide; GTGAAT chr11 5349189 5349208 5349205 +
tataccacaaaagcaactga

SEQ ID NO: 59937 - DNA, 20 bp, Artificial Sequence
  Synthetic oligonucleotide; AAGGAT chr11 5349250 5349269 5349266 +
acaagacaaacagctatttt

SEQ ID NO: 59938 - DNA, 20 bp, Artificial Sequence
  Synthetic oligonucleotide; ATGAAT chr11 5349604 5349623 5349620 +
attatggtaatcatttaaca

SEQ ID NO: 59939 - DNA, 20 bp, Artificial Sequence
  Synthetic oligonucleotide; CTGAGT chr11 5349686 5349705 5349702 +
cttctttaatcctgcataag

SEQ ID NO: 59940 - DNA, 20 bp, Artificial Sequence
  Synthetic oligonucleotide; CAGAGT chr11 5349758 5349777 5349774 +
cttttctcactttttgagga

SEQ ID NO: 59941 - DNA, 20 bp, Artificial Sequence
  Synthetic oligonucleotide; CTGGGT chr11 5350026 5350045 5350042 +
ggaaatcatttgacacacct

SEQ ID NO: 59942 - DNA, 20 bp, Artificial Sequence
  Synthetic oligonucleotide; GTGAAT chr11 5350030 5350049 5350046 +
atcatttgacacacctctgg

SEQ ID NO: 59943 - DNA, 20 bp, Artificial Sequence
  Synthetic oligonucleotide; GAGAAT chr11 5350157 5350176 5350173 +
ttccccttactttgtgtcaa

SEQ ID NO: 59944 - DNA, 20 bp, Artificial Sequence
  Synthetic oligonucleotide; TTGGAT chr11 5350308 5350327 5350324 +
aaaatgaaagtccagtaatc

SEQ ID NO: 59945 - DNA, 20 bp, Artificial Sequence
  Synthetic oligonucleotide; TAGAAT chr11 5350507 5350526 5350523 +
gcctgcaccagctgaaatct

SEQ ID NO: 59946 - DNA, 20 bp, Artificial Sequence
  Synthetic oligonucleotide; ATGAGT chr11 5350517 5350536 5350533 +
gctgaaatcttagaattcta

SEQ ID NO: 59947 - DNA, 20 bp, Artificial Sequence
  Synthetic oligonucleotide; TTGAAT chr11 5350738 5350757 5350754 +
tcaatttatattatgaaaat

SEQ ID NO: 59948 - DNA, 20 bp, Artificial Sequence
  Synthetic oligonucleotide; TAGGGT chr11 5350768 5350787 5350784 +
tgaagcagtgtatcaataac

SEQ ID NO: 59949 - DNA, 20 bp, Artificial Sequence
  Synthetic oligonucleotide; TAGAGT chr11 5350791 5350810 5350807 +
ggttataaagctgggcaact

SEQ ID NO: 59950 - DNA, 20 bp, Artificial Sequence
  Synthetic oligonucleotide; TTGAAT chr11 5350879 5350898 5350895 +
agtctctggagcttcatcaa

SEQ ID NO: 59951 - DNA, 20 bp, Artificial Sequence
  Synthetic oligonucleotide; AGGAAT chr11 5350894 5350913 5350910 +
atcaattgaattttccctcc

SEQ ID NO: 59952 - DNA, 20 bp, Artificial Sequence
  Synthetic oligonucleotide; CAGGAT chr11 5351092 5351111 5351108 +
caccctataataccaccagt

SEQ ID NO: 59953 - DNA, 20 bp, Artificial Sequence
  Synthetic oligonucleotide; CTGGGT chr11 5351189 5351208 5351205 +
tttcattttgtttttatttt

SEQ ID NO: 59954 - DNA, 20 bp, Artificial Sequence
  Synthetic oligonucleotide; ATGAAT chr11 5351208 5351227 5351224 +
tctgggttatatgatttaca

SEQ ID NO: 59955 - DNA, 20 bp, Artificial Sequence
  Synthetic oligonucleotide; ATGAAT chr11 5351233 5351252 5351249 +
ttcaacaatgtttattctgc

SEQ ID NO: 59956 - DNA, 20 bp, Artificial Sequence
  Synthetic oligonucleotide; TAGAGT chr11 5351275 5351294 5351291 +
tagtatccaataatcttaca

SEQ ID NO: 59957 - DNA, 20 bp, Artificial Sequence
  Synthetic oligonucleotide; TAGGAT chr11 5351326 5351345 5351342 +
acattctattttcccatacc

SEQ ID NO: 59958 - DNA, 20 bp, Artificial Sequence
  Synthetic oligonucleotide; AGGAAT chr11 5351337 5351356 5351353 +
tcccatacctaggatctccc

SEQ ID NO: 59959 - DNA, 20 bp, Artificial Sequence
  Synthetic oligonucleotide; TAGAAT chr11 5351404 5351423 5351420 +
gtgaacatcttatgaacagg

SEQ ID NO: 59960 - DNA, 20 bp, Artificial Sequence
  Synthetic oligonucleotide; TGGAGT chr11 5351454 5351473 5351470 +
ctgattactattgctttacc

SEQ ID NO: 59961 - DNA, 20 bp, Artificial Sequence
  Synthetic oligonucleotide; CTGGAT chr11 5351556 5351575 5351572 +
ggcatggagaaggcacatca

SEQ ID NO: 59962 - DNA, 20 bp, Artificial Sequence
  Synthetic oligonucleotide; AGGAAT chr11 5351629 5351648 5351645 +
gcactcttctctttctcatc

SEQ ID NO: 59963 - DNA, 20 bp, Artificial Sequence
  Synthetic oligonucleotide; CGGAGT chr11 5351694 5351713 5351710 +
atgttggcagctacagacct

SEQ ID NO: 59964 - DNA, 20 bp, Artificial Sequence
  Synthetic oligonucleotide; TGGAGT chr11 5351810 5351829 5351826 +
tatccatactctttctgtca

SEQ ID NO: 59965 - DNA, 20 bp, Artificial Sequence
  Synthetic oligonucleotide; GCGGGT chr11 5351919 5351938 5351935 +
caggtaatgaagattggtgt

SEQ ID NO: 59966 - DNA, 20 bp, Artificial Sequence
  Synthetic oligonucleotide; CAGAGT chr11 5352379 5352398 5352395 +
gcattaaaactaagcagatt

SEQ ID NO: 59967 - DNA, 20 bp, Artificial Sequence
  Synthetic oligonucleotide; AGGAAT chr11 5352447 5352466 5352463 +
cattgtttcactggtctctg

SEQ ID NO: 59968 - DNA, 20 bp, Artificial Sequence
  Synthetic oligonucleotide; CAGGAT chr11 5352470 5352489 5352486 +
aataattcaggggacctgga

SEQ ID NO: 59969 - DNA, 20 bp, Artificial Sequence
  Synthetic oligonucleotide; TTGGGT chr11 5352913 5352932 5352929 +
accaattatatatataattc

SEQ ID NO: 59970 - DNA, 20 bp, Artificial Sequence
  Synthetic oligonucleotide; TTGGGT chr11 5352926 5352945 5352942 +
ataattcttgggtctatgat

SEQ ID NO: 59971 - DNA, 20 bp, Artificial Sequence
  Synthetic oligonucleotide; AGGAAT chr11 5352998 5353017 5353014 +
atattagtcctgttatacat

SEQ ID NO: 59972 - DNA, 20 bp, Artificial Sequence
  Synthetic oligonucleotide; GAGAGT chr11 5353106 5353125 5353122 +
gaaatgagactttcttcaat

SEQ ID NO: 59973 - DNA, 20 bp, Artificial Sequence
  Synthetic oligonucleotide; GAGGGT chr11 5353142 5353161 5353158 +
cctcaattactttcttcaat

SEQ ID NO: 59974 - DNA, 20 bp, Artificial Sequence
  Synthetic oligonucleotide; ATGAGT chr11 5353173 5353192 5353189 +
atttccctcaattcaaaatg

SEQ ID NO: 59975 - DNA, 20 bp, Artificial Sequence
  Synthetic oligonucleotide; AGGGGT chr11 5353396 5353415 5353412 +
catcagagataagactagat

SEQ ID NO: 59976 - DNA, 20 bp, Artificial Sequence
  Synthetic oligonucleotide; CAGAGT chr11 5353422 5353441 5353438 +
gtctggcatgtgcaaaatag

SEQ ID NO: 59977 - DNA, 20 bp, Artificial Sequence
  Synthetic oligonucleotide; GAGAGT chr11 5353455 5353474 5353471 +
caaacagttggtcatatgtg

SEQ ID NO: 59978 - DNA, 20 bp, Artificial Sequence
  Synthetic oligonucleotide; GAGGAT chr11 5353474 5353493 5353490 +
ggagagtggggaggaaggga

SEQ ID NO: 59979 - DNA, 20 bp, Artificial Sequence
  Synthetic oligonucleotide; CAGAGT chr11 5353546 5353565 5353562 +
caaatacttttgattctttt

SEQ ID NO: 59980 - DNA, 20 bp, Artificial Sequence
  Synthetic oligonucleotide; GGGGGT chr11 5353567 5353586 5353583 +
agagtctaggcatgagaaga

SEQ ID NO: 59981 - DNA, 20 bp, Artificial Sequence
  Synthetic oligonucleotide; CAGGGT chr11 5353669 5353688 5353685 +
atattcttttgaccaaaata

SEQ ID NO: 59982 - DNA, 20 bp, Artificial Sequence
  Synthetic oligonucleotide; CTGGAT chr11 5353720 5353739 5353736 +
gccacccagtgaccagtcag

SEQ ID NO: 59983 - DNA, 20 bp, Artificial Sequence
  Synthetic oligonucleotide; GGGGAT chr11 5353803 5353822 5353819 +
actcttcatcacagaaaggt

SEQ ID NO: 59984 - DNA, 20 bp, Artificial Sequence
  Synthetic oligonucleotide; TAGGAT chr11 5353813 5353832 5353829 +
acagaaaggtggggattttt

SEQ ID NO: 59985 - DNA, 20 bp, Artificial Sequence
  Synthetic oligonucleotide; TGGGAT chr11 5353822 5353841 5353838 +
tggggattttttaggattct

SEQ ID NO: 59986 - DNA, 20 bp, Artificial Sequence
  Synthetic oligonucleotide; GAGGAT chr11 5353994 5354013 5354010 +
agcttcttgactgtgtgctc

SEQ ID NO: 59987 - DNA, 20 bp, Artificial Sequence
  Synthetic oligonucleotide; ATGAAT chr11 5354087 5354106 5354103 +
aaatataatttttcattaaa

SEQ ID NO: 59988 - DNA, 20 bp, Artificial Sequence
  Synthetic oligonucleotide; GGGAAT chr11 5354224 5354243 5354240 +
ctttcttcccttgggctttt

SEQ ID NO: 59989 - DNA, 20 bp, Artificial Sequence
  Synthetic oligonucleotide; ATGAAT chr11 5354228 5354247 5354244 +
cttcccttgggcttttggga

SEQ ID NO: 59990 - DNA, 20 bp, Artificial Sequence
  Synthetic oligonucleotide; GGGGAT chr11 5354238 5354257 5354254 +
gcttttgggaatgaattcag

SEQ ID NO: 59991 - DNA, 20 bp, Artificial Sequence
  Synthetic oligonucleotide; TAGGAT chr11 5354333 5354352 5354349 +
caggctagtataaagataac

SEQ ID NO: 59992 - DNA, 20 bp, Artificial Sequence
  Synthetic oligonucleotide; CTGAGT chr11 5354388 5354407 5354404 +
gacacatttgactgacaacc

SEQ ID NO: 59993 - DNA, 20 bp, Artificial Sequence
  Synthetic oligonucleotide; TGGAGT chr11 5354498 5354517 5354514 +
gggacttgcagttctctttg

SEQ ID NO: 59994 - DNA, 20 bp, Artificial Sequence
  Synthetic oligonucleotide; TAGGGT chr11 5354562 5354581 5354578 +
cctgaacaacatatcaacag

SEQ ID NO: 59995 - DNA, 20 bp, Artificial Sequence
  Synthetic oligonucleotide; AAGAAT chr11 5354701 5354720 5354717 +
atcaagagggcatctttgcc

SEQ ID NO: 59996 - DNA, 20 bp, Artificial Sequence
  Synthetic oligonucleotide; AAGAAT chr11 5354789 5354808 5354805 +
gacaaaagacaaacagtttg

SEQ ID NO: 59997 - DNA, 20 bp, Artificial Sequence
  Synthetic oligonucleotide; GAGGGT chr11 5354824 5354843 5354840 +
acttcaagccacaagaagca

SEQ ID NO: 59998 - DNA, 20 bp, Artificial Sequence
  Synthetic oligonucleotide; GAGGAT chr11 5354850 5354869 5354866 +
accagacctgagagaactct

SEQ ID NO: 59999 - DNA, 20 bp, Artificial Sequence
  Synthetic oligonucleotide; CTGAGT chr11 5354897 5354916 5354913 +
ttcaagagaccttgacgaag

SEQ ID NO: 60000 - DNA, 20 bp, Artificial Sequence
  Synthetic oligonucleotide; CTGGAT chr11 5354923 5354942 5354939 +
cactgtgtgaagtctgtgcg

SEQ ID NO: 60001 - DNA, 20 bp, Artificial Sequence
  Synthetic oligonucleotide; GAGGAT chr11 5354983 5355002 5354999 +
agaaaggtgatgtgctctgg

SEQ ID NO: 60002 - DNA, 20 bp, Artificial Sequence
  Synthetic oligonucleotide; ATGGAT chr11 5355004 5355023 5355020 +
aggatatccacaaaaaactc

SEQ ID NO: 60003 - DNA, 20 bp, Artificial Sequence
  Synthetic oligonucleotide; AAGAAT chr11 5355058 5355077 5355074 +
tggaccaatttcctgacttg

SEQ ID NO: 60004 - DNA, 20 bp, Artificial Sequence
  Synthetic oligonucleotide; AAGGAT chr11 5355146 5355165 5355162 +
ctcaacagagcttcaggagg

SEQ ID NO: 60005 - DNA, 20 bp, Artificial Sequence
  Synthetic oligonucleotide; TAGAAT chr11 5355176 5355195 5355192 +
gcctctgtctaaggcagaag

SEQ ID NO: 60006 - DNA, 20 bp, Artificial Sequence
  Synthetic oligonucleotide; AAGAGT chr11 5355206 5355225 5355222 +
gaaagcatagagaaagtttg

SEQ ID NO: 60007 - DNA, 20 bp, Artificial Sequence
  Synthetic oligonucleotide; ACGAAT chr11 5355255 5355274 5355271 +
ttaccattattatagtcaag

SEQ ID NO: 60008 - DNA, 20 bp, Artificial Sequence
  Synthetic oligonucleotide; TTGGAT chr11 5355260 5355279 5355276 +
attattatagtcaagacgaa

SEQ ID NO: 60009 - DNA, 20 bp, Artificial Sequence
  Synthetic oligonucleotide; CTGGGT chr11 5355364 5355383 5355380 +
agtatgaagtgatgatgaaa

SEQ ID NO: 60010 - DNA, 20 bp, Artificial Sequence
  Synthetic oligonucleotide; TTGGGT chr11 5355421 5355440 5355437 +
aaagagcaacacccactgat

SEQ ID NO: 60011 - DNA, 20 bp, Artificial Sequence
  Synthetic oligonucleotide; CTGAGT chr11 5355539 5355558 5355555 +
ttctcctatgccagcatgac

SEQ ID NO: 60012 - DNA, 20 bp, Artificial Sequence
  Synthetic oligonucleotide; AAGAGT chr11 5355755 5355774 5355771 +
taaaaattaaaaaaaaaaaa

SEQ ID NO: 60013 - DNA, 20 bp, Artificial Sequence
  Synthetic oligonucleotide; TAGGGT chr11 5355760 5355779 5355776 +
attaaaaaaaaaaaaaagag

SEQ ID NO: 60014 - DNA, 20 bp, Artificial Sequence
  Synthetic oligonucleotide; AGGGGT chr11 5355768 5355787 5355784 +
aaaaaaaaagagtagggtca

SEQ ID NO: 60015 - DNA, 20 bp, Artificial Sequence
  Synthetic oligonucleotide; TAGGGT chr11 5355775 5355794 5355791 +
aagagtagggtcaaggggta

SEQ ID NO: 60016 - DNA, 20 bp, Artificial Sequence
  Synthetic oligonucleotide; AAGGAT chr11 5355796 5355815 5355812 +
agggtagcaaaattttctta

SEQ ID NO: 60017 - DNA, 20 bp, Artificial Sequence
  Synthetic oligonucleotide; GAGGGT chr11 5355894 5355913 5355910 +
ttaaaaatctgctgcaagct

SEQ ID NO: 60018 - DNA, 20 bp, Artificial Sequence
  Synthetic oligonucleotide; CAGAGT chr11 5356041 5356060 5356057 +
aaactggaaactctaaaaat

SEQ ID NO: 60019 - DNA, 20 bp, Artificial Sequence
  Synthetic oligonucleotide; AGGAAT chr11 5356063 5356082 5356079 +
gagtgcctctcctcctccaa

SEQ ID NO: 60020 - DNA, 20 bp, Artificial Sequence
  Synthetic oligonucleotide; GAGAAT chr11 5356104 5356123 5356120 +
caacggtacaaagctggaca

SEQ ID NO: 60021 - DNA, 20 bp, Artificial Sequence
  Synthetic oligonucleotide; TAGAAT chr11 5356232 5356251 5356248 +
aaattagactaatggctaac

SEQ ID NO: 60022 - DNA, 20 bp, Artificial Sequence
  Synthetic oligonucleotide; ATGAAT chr11 5356303 5356322 5356319 +
caaggcatgagaactacatg

SEQ ID NO: 60023 - DNA, 20 bp, Artificial Sequence
  Synthetic oligonucleotide; AAGGGT chr11 5356346 5356365 5356362 +
tgattcgatcaactggaaga

SEQ ID NO: 60024 - DNA, 20 bp, Artificial Sequence
  Synthetic oligonucleotide; ATGAAT chr11 5356371 5356390 5356387 +
tatcagtgatggaagatcaa

SEQ ID NO: 60025 - DNA, 20 bp, Artificial Sequence
  Synthetic oligonucleotide; AAGAAT chr11 5356409 5356428 5356425 +
gaagagaagtttagagaaaa

SEQ ID NO: 60026 - DNA, 20 bp, Artificial Sequence
  Synthetic oligonucleotide; CAGAAT chr11 5356503 5356522 5356519 +
gtgtacctgaaagtgacggg

SEQ ID NO: 60027 - DNA, 20 bp, Artificial Sequence
  Synthetic oligonucleotide; CAGGAT chr11 5356533 5356552 5356549 +
ccaagttggaaaacactctg

SEQ ID NO: 60028 - DNA, 20 bp, Artificial Sequence
  Synthetic oligonucleotide; AAGGGT chr11 5356691 5356710 5356707 +
gaaatgaagggaaaaatgtt

SEQ ID NO: 60029 - DNA, 20 bp, Artificial Sequence
  Synthetic oligonucleotide; TCGGGT chr11 5356712 5356731 5356728 +
agggtagccagagagaaagg

SEQ ID NO: 60030 - DNA, 20 bp, Artificial Sequence
  Synthetic oligonucleotide; CAGAAT chr11 5356739 5356758 5356755 +
acccacaaagggaagcccat

SEQ ID NO: 60031 - DNA, 20 bp, Artificial Sequence
  Synthetic oligonucleotide; GAGAGT chr11 5356783 5356802 5356799 +
agaaactctacaagccagaa

SEQ ID NO: 60032 - DNA, 20 bp, Artificial Sequence
  Synthetic oligonucleotide; AAGAAT chr11 5356818 5356837 5356834 +
tattcaacatccttaaagga

SEQ ID NO: 60033 - DNA, 20 bp, Artificial Sequence
  Synthetic oligonucleotide; CAGAAT chr11 5356832 5356851 5356848 +
aaaggaaagaattttcaaca

SEQ ID NO: 60034 - DNA, 20 bp, Artificial Sequence
  Synthetic oligonucleotide; CAGGAT chr11 5357083 5357102 5357099 +
accagctaacatcataatga

SEQ ID NO: 60035 - DNA, 20 bp, Artificial Sequence
  Synthetic oligonucleotide; AAGAGT chr11 5357171 5357190 5357187 +
acagacgggcaaattagata

SEQ ID NO: 60036 - DNA, 20 bp, Artificial Sequence
  Synthetic oligonucleotide; AGGGAT chr11 5357247 5357266 5357263 +
cacacataggctcaaaataa

SEQ ID NO: 60037 - DNA, 20 bp, Artificial Sequence
  Synthetic oligonucleotide; AGGGGT chr11 5357293 5357312 5357309 +
aatggaaaacaaaaaaaggc

SEQ ID NO: 60038 - DNA, 20 bp, Artificial Sequence
  Synthetic oligonucleotide; AGGGAT chr11 5357379 5357398 5357395 +
aggccattacataatggtaa

SEQ ID NO: 60039 - DNA, 20 bp, Artificial Sequence
  Synthetic oligonucleotide; AAGGAT chr11 5357579 5357598 5357595 +
caacgagacagaaagttaac

SEQ ID NO: 60040 - DNA, 20 bp, Artificial Sequence
  Synthetic oligonucleotide; AGGAAT chr11 5357589 5357608 5357605 +
gaaagttaacaaggatatcc

SEQ ID NO: 60041 - DNA, 20 bp, Artificial Sequence
  Synthetic oligonucleotide; CAGAAT chr11 5357658 5357677 5357674 +
aactctccaccccaaatcaa

SEQ ID NO: 60042 - DNA, 20 bp, Artificial Sequence
  Synthetic oligonucleotide; CAGGAT chr11 5357803 5357822 5357819 +
agtgcaatcaaactagaact

SEQ ID NO: 60043 - DNA, 20 bp, Artificial Sequence
  Synthetic oligonucleotide; CTGAAT chr11 5357861 5357880 5357877 +
ggaaaccgaacaaattgctc

SEQ ID NO: 60044 - DNA, 20 bp, Artificial Sequence
  Synthetic oligonucleotide; CTGGGT chr11 5357872 5357891 5357888 +
aaattgctcctgaatgacta

SEQ ID NO: 60045 - DNA, 20 bp, Artificial Sequence
  Synthetic oligonucleotide; CAGAAT chr11 5357945 5357964 5357961 +
agaacaaagacacaacatac

SEQ ID NO: 60046 - DNA, 20 bp, Artificial Sequence
  Synthetic oligonucleotide; ATGAAT chr11 5358172 5358191 5358188 +
aaaaacccttcaaaaaatca

SEQ ID NO: 60047 - DNA, 20 bp, Artificial Sequence
  Synthetic oligonucleotide; AAGAAT chr11 5358252 5358271 5358268 +
taataaagaagaaaagagag

SEQ ID NO: 60048 - DNA, 20 bp, Artificial Sequence
  Synthetic oligonucleotide; AAGGGT chr11 5358283 5358302 5358299 +
agatgcaataaaaaatgata

SEQ ID NO: 60049 - DNA, 20 bp, Artificial Sequence
  Synthetic oligonucleotide; GAGAAT chr11 5358328 5358347 5358344 +
agaaatacaaaccaccatca

SEQ ID NO: 60050 - DNA, 20 bp, Artificial Sequence
  Synthetic oligonucleotide; ATGGAT chr11 5358378 5358397 5358394 +
aactagaaaatctagaagaa

SEQ ID NO: 60051 - DNA, 20 bp, Artificial Sequence
  Synthetic oligonucleotide; TTGAAT chr11 5358430 5358449 5358446 +
aagactaaaccaggaagaag

SEQ ID NO: 60052 - DNA, 20 bp, Artificial Sequence
  Synthetic oligonucleotide; CTGAAT chr11 5358438 5358457 5358454 +
accaggaagaagttgaatct

SEQ ID NO: 60053 - DNA, 20 bp, Artificial Sequence
  Synthetic oligonucleotide; CAGGAT chr11 5358454 5358473 5358470 +
atctctgaatagaccaataa

SEQ ID NO: 60054 - DNA, 20 bp, Artificial Sequence
  Synthetic oligonucleotide; TGGAGT chr11 5358515 5358534 5358531 +
aaaaacagtccaggaccaga

SEQ ID NO: 60055 - DNA, 20 bp, Artificial Sequence
  Synthetic oligonucleotide; TCGAAT chr11 5358580 5358599 5358596 +
accattccctctgaaactat

SEQ ID NO: 60056 - DNA, 20 bp, Artificial Sequence
  Synthetic oligonucleotide; GGGAAT chr11 5358599 5358618 5358615 +
ttcgaatcaatagtaaaaga

SEQ ID NO: 60057 - DNA, 20 bp, Artificial Sequence
  Synthetic oligonucleotide; GAGAAT chr11 5358675 5358694 5358691 +
gcagagacacaacaaaaaaa

SEQ ID NO: 60058 - DNA, 20 bp, Artificial Sequence
  Synthetic oligonucleotide; TGGGAT chr11 5358797 5358816 5358813 +
gatcaagtgggcttcatccc

SEQ ID NO: 60059 - DNA, 20 bp, Artificial Sequence
  Synthetic oligonucleotide; CTGAAT chr11 5359020 5359039 5359036 +
aacccacagccaatatcata

SEQ ID NO: 60060 - DNA, 20 bp, Artificial Sequence
  Synthetic oligonucleotide; AGGGAT chr11 5359069 5359088 5359085 +
tttgaaaactggcacaagac

SEQ ID NO: 60061 - DNA, 20 bp, Artificial Sequence
  Synthetic oligonucleotide; TGGAAT chr11 5359108 5359127 5359124 +
actcctattcaacatagtgt

SEQ ID NO: 60062 - DNA, 20 bp, Artificial Sequence
  Synthetic oligonucleotide; CAGGAT chr11 5359278 5359297 5359294 +
aggcaacttcagcaaagtct

SEQ ID NO: 60063 - DNA, 20 bp, Artificial Sequence
  Synthetic oligonucleotide; GAGAAT chr11 5359384 5359403 5359400 +
ccattcacaattgcttcaaa

SEQ ID NO: 60064 - DNA, 20 bp, Artificial Sequence
  Synthetic oligonucleotide; AGGAAT chr11 5359399 5359418 5359415 +
tcaaagagaataaaatacct

SEQ ID NO: 60065 - DNA, 20 bp, Artificial Sequence
  Synthetic oligonucleotide; CTGAAT chr11 5359457 5359476 5359473 +
aggagaactacaaaccactg

SEQ ID NO: 60066 - DNA, 20 bp, Artificial Sequence
  Synthetic oligonucleotide; ATGGGT chr11 5359507 5359526 5359523 +
tggaagaacattccatgctc

SEQ ID NO: 60067 - DNA, 20 bp, Artificial Sequence
  Synthetic oligonucleotide; AAGAAT chr11 5359516 5359535 5359532 +
attccatgctcatgggtagg

SEQ ID NO: 60068 - DNA, 20 bp, Artificial Sequence
  Synthetic oligonucleotide; CAGAAT chr11 5359605 5359624 5359621 +
gctaccaatgactttcttca

SEQ ID NO: 60069 - DNA, 20 bp, Artificial Sequence
  Synthetic oligonucleotide; AAGGAT chr11 5359874 5359893 5359890 +
acaaaaaaaacaaatgggga

SEQ ID NO: 60070 - DNA, 20 bp, Artificial Sequence
  Synthetic oligonucleotide; CTGGAT chr11 5359937 5359956 5359953 +
ccatacgcagaaagctgaaa

SEQ ID NO: 60071 - DNA, 20 bp, Artificial Sequence
  Synthetic oligonucleotide; ATGGAT chr11 5359978 5359997 5359994 +
tatacaaaaattaattcaag

SEQ ID NO: 60072 - DNA, 20 bp, Artificial Sequence
  Synthetic oligonucleotide; TGGGAT chr11 5360123 5360142 5360139 +
caaaagccaaaatggacaaa

SEQ ID NO: 60073 - DNA, 20 bp, Artificial Sequence
  Synthetic oligonucleotide; CAGAGT chr11 5360173 5360192 5360189 +
acagcaaaagaaactaccat

SEQ ID NO: 60074 - DNA, 20 bp, Artificial Sequence
  Synthetic oligonucleotide; CAGAAT chr11 5360193 5360212 5360209 +
cagagtgaacaggcaacata

SEQ ID NO: 60075 - DNA, 20 bp, Artificial Sequence
  Synthetic oligonucleotide; CAGAAT chr11 5360245 5360264 5360261 +
tccgacaaagggctaatatc

SEQ ID NO: 60076 - DNA, 20 bp, Artificial Sequence
  Synthetic oligonucleotide; AAGGAT chr11 5360308 5360327 5360324 +
accccatcaaaaagtgggca

SEQ ID NO: 60077 - DNA, 20 bp, Artificial Sequence
  Synthetic oligonucleotide; TAGAAT chr11 5360439 5360458 5360455 +
agataccatctcacaccagt

SEQ ID NO: 60078 - DNA, 20 bp, Artificial Sequence
  Synthetic oligonucleotide; GAGGAT chr11 5360483 5360502 5360499 +
aggaaacaacaggtgctgga

SEQ ID NO: 60079 - DNA, 20 bp, Artificial Sequence
  Synthetic oligonucleotide; AGGGAT chr11 5360572 5360591 5360588 +
agtcagtgtggcgattcctc

SEQ ID NO: 60080 - DNA, 20 bp, Artificial Sequence
  Synthetic oligonucleotide; CTGGGT chr11 5360617 5360636 5360633 +
ttgacccagccatcccatta

SEQ ID NO: 60081 - DNA, 20 bp, Artificial Sequence
  Synthetic oligonucleotide; AAGGAT chr11 5360632 5360651 5360648 +
cattactgggtacatactca

SEQ ID NO: 60082 - DNA, 20 bp, Artificial Sequence
  Synthetic oligonucleotide; CTGGAT chr11 5360742 5360761 5360758 +
aaatgtccaacaatgataga

SEQ ID NO: 60083 - DNA, 20 bp, Artificial Sequence
  Synthetic oligonucleotide; TGGAAT chr11 5360774 5360793 5360790 +
aacgtggcacatatacacca

SEQ ID NO: 60084 - DNA, 20 bp, Artificial Sequence
  Synthetic oligonucleotide; AAGAGT chr11 5360801 5360820 5360817 +
ctatgcagccataaaaaatg

SEQ ID NO: 60085 - DNA, 20 bp, Artificial Sequence
  Synthetic oligonucleotide; ATGGAT chr11 5360826 5360845 5360842 +
ttcatgtcctttgtagggac

SEQ ID NO: 60086 - DNA, 20 bp, Artificial Sequence
  Synthetic oligonucleotide; GGGAAT chr11 5360907 5360926 5360923 +
gcatgttctcactcataggt

SEQ ID NO: 60087 - DNA, 20 bp, Artificial Sequence
  Synthetic oligonucleotide; TGGGGT chr11 5360970 5360989 5360986 +
tcacacaccagggcctgcag

SEQ ID NO: 60088 - DNA, 20 bp, Artificial Sequence
  Synthetic oligonucleotide; GGGGGT chr11 5360976 5360995 5360992 +
accagggcctgcagtggggt

SEQ ID NO: 60089 - DNA, 20 bp, Artificial Sequence
  Synthetic oligonucleotide; AGGGAT chr11 5360989 5361008 5361005 +
gtggggtgggggtcgggggg

SEQ ID NO: 60090 - DNA, 20 bp, Artificial Sequence
  Synthetic oligonucleotide; ACGAGT chr11 5361025 5361044 5361041 +
gatatacctaatgctaagtg

SEQ ID NO: 60091 - DNA, 20 bp, Artificial Sequence
  Synthetic oligonucleotide; ATGGGT chr11 5361033 5361052 5361049 +
taatgctaagtgacgagtta

SEQ ID NO: 60092 - DNA, 20 bp, Artificial Sequence
  Synthetic oligonucleotide; GAGAAT chr11 5361302 5361321 5361318 +
ttctaaatccctcaggctgg

SEQ ID NO: 60093 - DNA, 20 bp, Artificial Sequence
  Synthetic oligonucleotide; AGGAGT chr11 5361327 5361346 5361343 +
taaagaaggagggaggagag

SEQ ID NO: 60094 - DNA, 20 bp, Artificial Sequence
  Synthetic oligonucleotide; AGGAGT chr11 5361344 5361363 5361360 +
gagaggagtgggccgtaggg

SEQ ID NO: 60095 - DNA, 20 bp, Artificial Sequence
  Synthetic oligonucleotide; CTGAGT chr11 5361382 5361401 5361398 +
ttttctttgcagcttggctt

SEQ ID NO: 60096 - DNA, 20 bp, Artificial Sequence
  Synthetic oligonucleotide; TTGGAT chr11 5361407 5361426 5361423 +
tatagtctaaaaagttggtg

SEQ ID NO: 60097 - DNA, 20 bp, Artificial Sequence
  Synthetic oligonucleotide; AGGGGT chr11 5361433 5361452 5361449 +
ccaatatcttgaccaggctt

SEQ ID NO: 60098 - DNA, 20 bp, Artificial Sequence
  Synthetic oligonucleotide; AGGAAT chr11 5361526 5361545 5361542 +
ttggcctagaggctccgcat

SEQ ID NO: 60099 - DNA, 20 bp, Artificial Sequence
  Synthetic oligonucleotide; TGGGGT chr11 5361602 5361621 5361618 +
atgtatcagtcaagatgtga

SEQ ID NO: 60100 - DNA, 20 bp, Artificial Sequence
  Synthetic oligonucleotide; AAGAAT chr11 5361610 5361629 5361626 +
gtcaagatgtgatggggtat

SEQ ID NO: 60101 - DNA, 20 bp, Artificial Sequence
  Synthetic oligonucleotide; CTGAAT chr11 5361658 5361677 5361674 +
aaatctttagaacttggctt

SEQ ID NO: 60102 - DNA, 20 bp, Artificial Sequence
  Synthetic oligonucleotide; CAGAGT chr11 5361724 5361743 5361740 +
tctcctttttcattccctag

SEQ ID NO: 60103 - DNA, 20 bp, Artificial Sequence
  Synthetic oligonucleotide; GGGAAT chr11 5361765 5361784 5361781 +
aaatcaagttgaaaatccac

SEQ ID NO: 60104 - DNA, 20 bp, Artificial Sequence
  Synthetic oligonucleotide; CAGAAT chr11 5361772 5361791 5361788 +
gttgaaaatccacgggaata

SEQ ID NO: 60105 - DNA, 20 bp, Artificial Sequence
  Synthetic oligonucleotide; TTGGAT chr11 5361808 5361827 5361824 +
gtgtagttccagactctggt

SEQ ID NO: 60106 - DNA, 20 bp, Artificial Sequence
  Synthetic oligonucleotide; TAGAGT chr11 5361912 5361931 5361928 +
actcccaaaaaagatgaagt

SEQ ID NO: 60107 - DNA, 20 bp, Artificial Sequence
  Synthetic oligonucleotide; GAGGAT chr11 5361918 5361937 5361934 +
aaaaaagatgaagttagagt

SEQ ID NO: 60108 - DNA, 20 bp, Artificial Sequence
  Synthetic oligonucleotide; AAGGGT chr11 5361942 5361961 5361958 +
ataggggacactgtaatgac

SEQ ID NO: 60109 - DNA, 20 bp, Artificial Sequence
  Synthetic oligonucleotide; TTGAGT chr11 5361993 5362012 5362009 +
ccaaatagattagtgtcaga

SEQ ID NO: 60110 - DNA, 20 bp, Artificial Sequence
  Synthetic oligonucleotide; GAGAGT chr11 5362186 5362205 5362202 +
atctcaaccacacccagata

SEQ ID NO: 60111 - DNA, 20 bp, Artificial Sequence
  Synthetic oligonucleotide; GTGGAT chr11 5362196 5362215 5362212 +
cacccagatagagagtgata

SEQ ID NO: 60112 - DNA, 20 bp, Artificial Sequence
  Synthetic oligonucleotide; GGGGAT chr11 5362217 5362236 5362233 +
tggatcccgtgtttctgtcg

SEQ ID NO: 60113 - DNA, 20 bp, Artificial Sequence
  Synthetic oligonucleotide; GGGAGT chr11 5362223 5362242 5362239 +
ccgtgtttctgtcgggggat

SEQ ID NO: 60114 - DNA, 20 bp, Artificial Sequence
  Synthetic oligonucleotide; CTGGAT chr11 5362290 5362309 5362306 +
ctacccagatgaaaatggtg

SEQ ID NO: 60115 - DNA, 20 bp, Artificial Sequence
  Synthetic oligonucleotide; AGGAAT chr11 5362345 5362364 5362361 +
aatcaactacgaagatggtc

SEQ ID NO: 60116 - DNA, 20 bp, Artificial Sequence
  Synthetic oligonucleotide; GAGAAT chr11 5362426 5362445 5362442 +
tagttgttgagccttataat

SEQ ID NO: 60117 - DNA, 20 bp, Artificial Sequence
  Synthetic oligonucleotide; CTGGAT chr11 5362453 5362472 5362469 +
tgatgattaaatcaggtcta

SEQ ID NO: 60118 - DNA, 20 bp, Artificial Sequence
  Synthetic oligonucleotide; ATGAAT chr11 5362462 5362481 5362478 +
aatcaggtctactggatact

SEQ ID NO: 60119 - DNA, 20 bp, Artificial Sequence
  Synthetic oligonucleotide; CAGAAT chr11 5362468 5362487 5362484 +
gtctactggatactatgaat

SEQ ID NO: 60120 - DNA, 20 bp, Artificial Sequence
  Synthetic oligonucleotide; CAGAGT chr11 5362565 5362584 5362581 +
taacagaagtcttctggtgg

SEQ ID NO: 60121 - DNA, 20 bp, Artificial Sequence
  Synthetic oligonucleotide; AAGAGT chr11 5362749 5362768 5362765 +
gtacacttgtgatatctata

SEQ ID NO: 60122 - DNA, 20 bp, Artificial Sequence
  Synthetic oligonucleotide; CTGGGT chr11 5362808 5362827 5362824 +
gaagtcctcttcctgatgct

SEQ ID NO: 60123 - DNA, 20 bp, Artificial Sequence
  Synthetic oligonucleotide; GTGAGT chr11 5362826 5362845 5362842 +
ctctgggttggcatctacat

SEQ ID NO: 60124 - DNA, 20 bp, Artificial Sequence
  Synthetic oligonucleotide; AAGAGT chr11 5362836 5362855 5362852 +
gcatctacatgtgagtgccc

SEQ ID NO: 60125 - DNA, 20 bp, Artificial Sequence
  Synthetic oligonucleotide; CTGAAT chr11 5362860 5362879 5362876 +
gtaacaaccaggtggcttca

SEQ ID NO: 60126 - DNA, 20 bp, Artificial Sequence
  Synthetic oligonucleotide; AGGGAT chr11 5362980 5362999 5362996 +
agaaataatagaagttaggc

SEQ ID NO: 60127 - DNA, 20 bp, Artificial Sequence
  Synthetic oligonucleotide; CTGAGT chr11 5363061 5363080 5363077 +
aaaatgtgctaagtagatgt

SEQ ID NO: 60128 - DNA, 20 bp, Artificial Sequence
  Synthetic oligonucleotide; CTGAGT chr11 5363109 5363128 5363125 +
cttaagggaagaaagagacc

SEQ ID NO: 60129 - DNA, 20 bp, Artificial Sequence
  Synthetic oligonucleotide; CAGAAT chr11 5363141 5363160 5363157 +
aaaactcaaagttttacgaa

SEQ ID NO: 60130 - DNA, 20 bp, Artificial Sequence
  Synthetic oligonucleotide; CAGGAT chr11 5363179 5363198 5363195 +
gaaatcatttttcatcaata

SEQ ID NO: 60131 - DNA, 20 bp, Artificial Sequence
  Synthetic oligonucleotide; GTGAGT chr11 5363269 5363288 5363285 +
acacacacacacacacaccg

SEQ ID NO: 60132 - DNA, 20 bp, Artificial Sequence
  Synthetic oligonucleotide; TGGAAT chr11 5363313 5363332 5363329 +
aagtcatgatgcagcagtat

SEQ ID NO: 60133 - DNA, 20 bp, Artificial Sequence
  Synthetic oligonucleotide; TTGAGT chr11 5363365 5363384 5363381 +
ttttacttcaagctatggtg

SEQ ID NO: 60134 - DNA, 20 bp, Artificial Sequence
  Synthetic oligonucleotide; TTGAGT chr11 5363552 5363571 5363568 +
caagcacagataccaagttt

SEQ ID NO: 60135 - DNA, 20 bp, Artificial Sequence
  Synthetic oligonucleotide; GTGAAT chr11 5363558 5363577 5363574 +
cagataccaagtttttgagt

SEQ ID NO: 60136 - DNA, 20 bp, Artificial Sequence
  Synthetic oligonucleotide; TGGAAT chr11 5363624 5363643 5363640 +
actactaagattatattgtc

SEQ ID NO: 60137 - DNA, 20 bp, Artificial Sequence
  Synthetic oligonucleotide; GAGGAT chr11 5363744 5363763 5363760 +
cgggaaagtagcattttcat

SEQ ID NO: 60138 - DNA, 20 bp, Artificial Sequence
  Synthetic oligonucleotide; AGGAAT chr11 5363944 5363963 5363960 +
aaggaggagaagcttgtgtt

SEQ ID NO: 60139 - DNA, 20 bp, Artificial Sequence
  Synthetic oligonucleotide; AAGAAT chr11 5363952 5363971 5363968 +
gaagcttgtgttaggaatgg

SEQ ID NO: 60140 - DNA, 20 bp, Artificial Sequence
  Synthetic oligonucleotide; AAGAGT chr11 5364116 5364135 5364132 +
aggtatctcaacactaaaga

SEQ ID NO: 60141 - DNA, 20 bp, Artificial Sequence
  Synthetic oligonucleotide; CAGGGT chr11 5364130 5364149 5364146 +
taaagaaagagtaaaatttt

SEQ ID NO: 60142 - DNA, 20 bp, Artificial Sequence
  Synthetic oligonucleotide; TGGAAT chr11 5364299 5364318 5364315 +
tcttgacttcacaaaaccat

SEQ ID NO: 60143 - DNA, 20 bp, Artificial Sequence
  Synthetic oligonucleotide; TGGGGT chr11 5364306 5364325 5364322 +
ttcacaaaaccattggaatt

SEQ ID NO: 60144 - DNA, 20 bp, Artificial Sequence
  Synthetic oligonucleotide; CAGGAT chr11 5364400 5364419 5364416 +
gtgatgtgtcatttctgtga

SEQ ID NO: 60145 - DNA, 20 bp, Artificial Sequence
  Synthetic oligonucleotide; GAGAGT chr11 5364525 5364544 5364541 +
tttaagcacagtgctttgaa

SEQ ID NO: 60146 - DNA, 20 bp, Artificial Sequence
  Synthetic oligonucleotide; CTGAAT chr11 5364635 5364654 5364651 +
ctccatcctcatgtgcatct

SEQ ID NO: 60147 - DNA, 20 bp, Artificial Sequence
  Synthetic oligonucleotide; GTGAAT chr11 5364717 5364736 5364733 +
atgacagaagactcttcaaa

SEQ ID NO: 60148 - DNA, 20 bp, Artificial Sequence
  Synthetic oligonucleotide; CAGGGT chr11 5364742 5364761 5364758 +
tgatcaaagtcccttgttta

SEQ ID NO: 60149 - DNA, 20 bp, Artificial Sequence
  Synthetic oligonucleotide; CTGGAT chr11 5364780 5364799 5364796 +
ttccttcctgagcatgtgtt

SEQ ID NO: 60150 - DNA, 20 bp, Artificial Sequence
  Synthetic oligonucleotide; GTGAAT chr11 5364837 5364856 5364853 +
cctttcctaagtttctattg

SEQ ID NO: 60151 - DNA, 20 bp, Artificial Sequence
  Synthetic oligonucleotide; GTGGAT chr11 5364908 5364927 5364924 +
taatcattgtagcttctatg

SEQ ID NO: 60152 - DNA, 20 bp, Artificial Sequence
  Synthetic oligonucleotide; GGGGAT chr11 5364968 5364987 5364984 +
gaagtaacagaaggctacaa

SEQ ID NO: 60153 - DNA, 20 bp, Artificial Sequence
  Synthetic oligonucleotide; ATGAAT chr11 5365015 5365034 5365031 +
ttgtcattcttgtcacagca

SEQ ID NO: 60154 - DNA, 20 bp, Artificial Sequence
  Synthetic oligonucleotide; TTGAAT chr11 5365083 5365102 5365099 +
taatcatgcttgtaataacc

SEQ ID NO: 60155 - DNA, 20 bp, Artificial Sequence
  Synthetic oligonucleotide; GTGAGT chr11 5365138 5365157 5365154 +
taacttttcttctttgtctg

SEQ ID NO: 60156 - DNA, 20 bp, Artificial Sequence
  Synthetic oligonucleotide; TAGAGT chr11 5365156 5365175 5365172 +
tggtgagttctgtagacatt

SEQ ID NO: 60157 - DNA, 20 bp, Artificial Sequence
  Synthetic oligonucleotide; TAGAAT chr11 5365262 5365281 5365278 +
ggtggtgagaacagtgttat

SEQ ID NO: 60158 - DNA, 20 bp, Artificial Sequence
  Synthetic oligonucleotide; ATGGGT chr11 5365297 5365316 5365313 +
gtttgccagctgtggaaaac

SEQ ID NO: 60159 - DNA, 20 bp, Artificial Sequence
  Synthetic oligonucleotide; TGGGAT chr11 5365375 5365394 5365391 +
tggcaacaagtaaccaaata

SEQ ID NO: 60160 - DNA, 20 bp, Artificial Sequence
  Synthetic oligonucleotide; CAGGAT chr11 5365490 5365509 5365506 +
accattttcctgtctatgca

SEQ ID NO: 60161 - DNA, 20 bp, Artificial Sequence
  Synthetic oligonucleotide; TAGGAT chr11 5365495 5365514 5365511 +
tttcctgtctatgcacagga

SEQ ID NO: 60162 - DNA, 20 bp, Artificial Sequence
  Synthetic oligonucleotide; GTGAAT chr11 5365601 5365620 5365617 +
gccatgacagggctcttggt

SEQ ID NO: 60163 - DNA, 20 bp, Artificial Sequence
  Synthetic oligonucleotide; CAGGAT chr11 5365822 5365841 5365838 +
agtatgtgctggcttgatga

SEQ ID NO: 60164 - DNA, 20 bp, Artificial Sequence
  Synthetic oligonucleotide; TTGGGT chr11 5365873 5365892 5365889 +
agaggaactctgcttacctc

SEQ ID NO: 60165 - DNA, 20 bp, Artificial Sequence
  Synthetic oligonucleotide; AAGGGT chr11 5365883 5365902 5365899 +
tgcttacctcttgggttctg

SEQ ID NO: 60166 - DNA, 20 bp, Artificial Sequence
  Synthetic oligonucleotide; AAGAGT chr11 5366054 5366073 5366070 +
tgtttgggggctgttaatgg

SEQ ID NO: 60167 - DNA, 20 bp, Artificial Sequence
  Synthetic oligonucleotide; AGGGGT chr11 5366065 5366084 5366081 +
tgttaatggaagagttgctg

SEQ ID NO: 60168 - DNA, 20 bp, Artificial Sequence
  Synthetic oligonucleotide; GAGGAT chr11 5366141 5366160 5366157 +
aataagaaacagtatgtgaa

SEQ ID NO: 60169 - DNA, 20 bp, Artificial Sequence
  Synthetic oligonucleotide; AAGGAT chr11 5366171 5366190 5366187 +
caagccttaagtaggaagtt

SEQ ID NO: 60170 - DNA, 20 bp, Artificial Sequence
  Synthetic oligonucleotide; AAGAAT chr11 5366248 5366267 5366264 +
agggccagagaaacagaagg

SEQ ID NO: 60171 - DNA, 20 bp, Artificial Sequence
  Synthetic oligonucleotide; GTGGGT chr11 5366284 5366303 5366300 +
gctcaagggaaggttcctct

SEQ ID NO: 60172 - DNA, 20 bp, Artificial Sequence
  Synthetic oligonucleotide; TTGGGT chr11 5366343 5366362 5366359 +
atgcctgtaatcccagcact

SEQ ID NO: 60173 - DNA, 20 bp, Artificial Sequence
  Synthetic oligonucleotide; GAGGAT chr11 5366360 5366379 5366376 +
actttgggtggctgaggcag

SEQ ID NO: 60174 - DNA, 20 bp, Artificial Sequence
  Synthetic oligonucleotide; AAGAGT chr11 5366377 5366396 5366393 +
caggaggatcacctgagggc

SEQ ID NO: 60175 - DNA, 20 bp, Artificial Sequence
  Synthetic oligonucleotide; GAGAAT chr11 5366497 5366516 5366513 +
tacacaggaggctgaggtag

SEQ ID NO: 60176 - DNA, 20 bp, Artificial Sequence
  Synthetic oligonucleotide; CAGGGT chr11 5366727 5366746 5366743 +
aaagaaggaaggaaggaaat

SEQ ID NO: 60177 - DNA, 20 bp, Artificial Sequence
  Synthetic oligonucleotide; TAGAAT chr11 5366756 5366775 5366772 +
cacttgagattcaaagtctt

SEQ ID NO: 60178 - DNA, 20 bp, Artificial Sequence
  Synthetic oligonucleotide; ACGGGT chr11 5366818 5366837 5366834 +
gactaattccaatcccaagc

SEQ ID NO: 60179 - DNA, 20 bp, Artificial Sequence
  Synthetic oligonucleotide; AGGGGT chr11 5366857 5366876 5366873 +
aggactgggaaggtttaggc

SEQ ID NO: 60180 - DNA, 20 bp, Artificial Sequence
  Synthetic oligonucleotide; CAGGAT chr11 5367008 5367027 5367024 +
tcccgctgcagtccatgaac

SEQ ID NO: 60181 - DNA, 20 bp, Artificial Sequence
  Synthetic oligonucleotide; AGGAAT chr11 5367058 5367077 5367074 +
aagacattctctcaagtctc

SEQ ID NO: 60182 - DNA, 20 bp, Artificial Sequence
  Synthetic oligonucleotide; CAGAGT chr11 5367131 5367150 5367147 +
tgcaaagccacttagtgaca

SEQ ID NO: 60183 - DNA, 20 bp, Artificial Sequence
  Synthetic oligonucleotide; TGGAAT chr11 5367158 5367177 5367174 +
ttagttatttcattgtgaac

SEQ ID NO: 60184 - DNA, 20 bp, Artificial Sequence
  Synthetic oligonucleotide; AGGAGT chr11 5367211 5367230 5367227 +
agttaaaagcattgccagaa

SEQ ID NO: 60185 - DNA, 20 bp, Artificial Sequence
  Synthetic oligonucleotide; GAGGGT chr11 5367236 5367255 5367252 +
tcacaatccagaccctaaga

SEQ ID NO: 60186 - DNA, 20 bp, Artificial Sequence
  Synthetic oligonucleotide; TTGGAT chr11 5367244 5367263 5367260 +
cagaccctaagagagggttc

SEQ ID NO: 60187 - DNA, 20 bp, Artificial Sequence
  Synthetic oligonucleotide; AAGAAT chr11 5367263 5367282 5367279 +
cttggatttcgtgcccaaga

SEQ ID NO: 60188 - DNA, 20 bp, Artificial Sequence
  Synthetic oligonucleotide; AGGAGT chr11 5367319 5367338 5367335 +
caagttaattaagaaagtaa

SEQ ID NO: 60189 - DNA, 20 bp, Artificial Sequence
  Synthetic oligonucleotide; AGGGGT chr11 5367412 5367431 5367428 +
tattgatgatatgctaaaca

SEQ ID NO: 60190 - DNA, 20 bp, Artificial Sequence
  Synthetic oligonucleotide; GTGGAT chr11 5367416 5367435 5367432 +
gatgatatgctaaacaaggg

SEQ ID NO: 60191 - DNA, 20 bp, Artificial Sequence
  Synthetic oligonucleotide; GAGAGT chr11 5367505 5367524 5367521 +
aacagtcatagtgctggtgg

SEQ ID NO: 60192 - DNA, 20 bp, Artificial Sequence
  Synthetic oligonucleotide; GTGGGT chr11 5367557 5367576 5367573 +
ctcatcacaatcttggtttg

SEQ ID NO: 60193 - DNA, 20 bp, Artificial Sequence
  Synthetic oligonucleotide; GAGAAT chr11 5367652 5367671 5367668 +
tcttatctcatcctgtgact

SEQ ID NO: 60194 - DNA, 20 bp, Artificial Sequence
  Synthetic oligonucleotide; GGGAAT chr11 5367670 5367689 5367686 +
ctgagaatgcctaactttct

SEQ ID NO: 60195 - DNA, 20 bp, Artificial Sequence
  Synthetic oligonucleotide; TGGAGT chr11 5367723 5367742 5367739 +
tacccagctcctatttaaga

SEQ ID NO: 60196 - DNA, 20 bp, Artificial Sequence
  Synthetic oligonucleotide; CAGAAT chr11 5367791 5367810 5367807 +
gtttctggtatgctagcacc

SEQ ID NO: 60197 - DNA, 20 bp, Artificial Sequence
  Synthetic oligonucleotide; AGGAAT chr11 5367935 5367954 5367951 +
tccttactcagcagtttgtg

SEQ ID NO: 60198 - DNA, 20 bp, Artificial Sequence
  Synthetic oligonucleotide; CAGAGT chr11 5367969 5367988 5367985 +
cttcaaagtttcacttctac

SEQ ID NO: 60199 - DNA, 20 bp, Artificial Sequence
  Synthetic oligonucleotide; GGGAAT chr11 5368227 5368246 5368243 +
cagtcttatgcagtagtttt

SEQ ID NO: 60200 - DNA, 20 bp, Artificial Sequence
  Synthetic oligonucleotide; GGGGAT chr11 5368332 5368351 5368348 +
tggtccactcatctttaagt

SEQ ID NO: 60201 - DNA, 20 bp, Artificial Sequence
  Synthetic oligonucleotide; TTGAAT chr11 5368357 5368376 5368373 +
taccaatagtacccacatgg

SEQ ID NO: 60202 - DNA, 20 bp, Artificial Sequence
  Synthetic oligonucleotide; TTGAGT chr11 5368705 5368724 5368721 +
aaatttgaggtttctaaaca

SEQ ID NO: 60203 - DNA, 20 bp, Artificial Sequence
  Synthetic oligonucleotide; TGGAAT chr11 5368830 5368849 5368846 +
tgttcttaggagcaagatgt

SEQ ID NO: 60204 - DNA, 20 bp, Artificial Sequence
  Synthetic oligonucleotide; GTGGAT chr11 5368851 5368870 5368867 +
ggaatttacaccattcttat

SEQ ID NO: 60205 - DNA, 20 bp, Artificial Sequence
  Synthetic oligonucleotide; GAGGAT chr11 5368875 5368894 5368891 +
attaagagaggtttccttct

SEQ ID NO: 60206 - DNA, 20 bp, Artificial Sequence
  Synthetic oligonucleotide; CCGGAT chr11 5368913 5368932 5368929 +
tgttcaggaactttttcttt

SEQ ID NO: 60207 - DNA, 20 bp, Artificial Sequence
  Synthetic oligonucleotide; ATGAGT chr11 5369030 5369049 5369046 +
ctagatattcattcaccaag

SEQ ID NO: 60208 - DNA, 20 bp, Artificial Sequence
  Synthetic oligonucleotide; CAGAAT chr11 5369046 5369065 5369062 +
caagatgagtgcctttgaag

SEQ ID NO: 60209 - DNA, 20 bp, Artificial Sequence
  Synthetic oligonucleotide; TAGGGT chr11 5369058 5369077 5369074 +
ctttgaagcagaatctgtga

SEQ ID NO: 60210 - DNA, 20 bp, Artificial Sequence
  Synthetic oligonucleotide; TAGAAT chr11 5369096 5369115 5369112 +
tagagacatatggccatgac

SEQ ID NO: 60211 - DNA, 20 bp, Artificial Sequence
  Synthetic oligonucleotide; AAGGAT chr11 5369121 5369140 5369137 +
tctaaggttagacatacaga

SEQ ID NO: 60212 - DNA, 20 bp, Artificial Sequence
  Synthetic oligonucleotide; CTGAGT chr11 5369181 5369200 5369197 +
catccattcacacatataac

SEQ ID NO: 60213 - DNA, 20 bp, Artificial Sequence
  Synthetic oligonucleotide; CTGAAT chr11 5369211 5369230 5369227 +
actgattttctagtactgta

SEQ ID NO: 60214 - DNA, 20 bp, Artificial Sequence
  Synthetic oligonucleotide; TGGGGT chr11 5369258 5369277 5369274 +
gatatgtatgcccatgtgtg

SEQ ID NO: 60215 - DNA, 20 bp, Artificial Sequence
  Synthetic oligonucleotide; TGGAAT chr11 5369321 5369340 5369337 +
aagttattattactagttag

SEQ ID NO: 60216 - DNA, 20 bp, Artificial Sequence
  Synthetic oligonucleotide; GAGAAT chr11 5369381 5369400 5369397 +
gcaaaatataacacttttag

SEQ ID NO: 60217 - DNA, 20 bp, Artificial Sequence
  Synthetic oligonucleotide; CTGGAT chr11 5369442 5369461 5369458 +
agactttttatatatttttt

SEQ ID NO: 60218 - DNA, 20 bp, Artificial Sequence
  Synthetic oligonucleotide; GTGAAT chr11 5369817 5369836 5369833 +
gtctgcatttttgtgttaca

SEQ ID NO: 60219 - DNA, 20 bp, Artificial Sequence
  Synthetic oligonucleotide; CAGGAT chr11 5369916 5369935 5369932 +
agaaagggaagacattttct

SEQ ID NO: 60220 - DNA, 20 bp, Artificial Sequence
  Synthetic oligonucleotide; GAGAGT chr11 5370017 5370036 5370033 +
ctccctctgcatggccccag

SEQ ID NO: 60221 - DNA, 20 bp, Artificial Sequence
  Synthetic oligonucleotide; TTGAAT chr11 5370228 5370247 5370244 +
taaatcctaaagttgaaggt

SEQ ID NO: 60222 - DNA, 20 bp, Artificial Sequence
  Synthetic oligonucleotide; CAGGAT chr11 5370290 5370309 5370306 +
tatcttttatgctgactgtc

SEQ ID NO: 60223 - DNA, 20 bp, Artificial Sequence
  Synthetic oligonucleotide; CTGGGT chr11 5370364 5370383 5370380 +
caaagactaaactaaaatag

SEQ ID NO: 60224 - DNA, 20 bp, Artificial Sequence
  Synthetic oligonucleotide; GAGGAT chr11 5370416 5370435 5370432 +
aaattaaattcaaatcttca

SEQ ID NO: 60225 - DNA, 20 bp, Artificial Sequence
  Synthetic oligonucleotide; ATGAAT chr11 5370556 5370575 5370572 +
cactctttctgtgtttagaa

SEQ ID NO: 60226 - DNA, 20 bp, Artificial Sequence
  Synthetic oligonucleotide; TAGAAT chr11 5370564 5370583 5370580 +
ctgtgtttagaaatgaataa

SEQ ID NO: 60227 - DNA, 20 bp, Artificial Sequence
  Synthetic oligonucleotide; CTGGGT chr11 5370651 5370670 5370667 +
cttctctattttagcaacta

SEQ ID NO: 60228 - DNA, 20 bp, Artificial Sequence
  Synthetic oligonucleotide; GAGAAT chr11 5370794 5370813 5370810 +
agaaaaaatttgatgcaata

SEQ ID NO: 60229 - DNA, 20 bp, Artificial Sequence
  Synthetic oligonucleotide; GCGGGT chr11 5370831 5370850 5370847 +
tgtaagctagtgtgacaaat

SEQ ID NO: 60230 - DNA, 20 bp, Artificial Sequence
  Synthetic oligonucleotide; GAGAGT chr11 5370869 5370888 5370885 +
taatatttcagctgtgacct

SEQ ID NO: 60231 - DNA, 20 bp, Artificial Sequence
  Synthetic oligonucleotide; TTGAGT chr11 5371034 5371053 5371050 +
tttttccaagagcagataat

SEQ ID NO: 60232 - DNA, 20 bp, Artificial Sequence
  Synthetic oligonucleotide; ATGGAT chr11 5371095 5371114 5371111 +
agccctagctatggaccacc

SEQ ID NO: 60233 - DNA, 20 bp, Artificial Sequence
  Synthetic oligonucleotide; TGGAAT chr11 5371122 5371141 5371138 +
ttgaagtaagggctttgttt

SEQ ID NO: 60234 - DNA, 20 bp, Artificial Sequence
  Synthetic oligonucleotide; GAGGAT chr11 5371145 5371164 5371161 +
aattactctccacacattct

SEQ ID NO: 60235 - DNA, 20 bp, Artificial Sequence
  Synthetic oligonucleotide; CCGGAT chr11 5371229 5371248 5371245 +
aagccacacagcacctttcc

SEQ ID NO: 60236 - DNA, 20 bp, Artificial Sequence
  Synthetic oligonucleotide; TAGGGT chr11 5371236 5371255 5371252 +
acagcacctttccccggatc

SEQ ID NO: 60237 - DNA, 20 bp, Artificial Sequence
  Synthetic oligonucleotide; CTGAGT chr11 5371364 5371383 5371380 +
attgatgaaactgtaaaacc

SEQ ID NO: 60238 - DNA, 20 bp, Artificial Sequence
  Synthetic oligonucleotide; AAGAAT chr11 5371400 5371419 5371416 +
agatataaaatttcaacata

SEQ ID NO: 60239 - DNA, 20 bp, Artificial Sequence
  Synthetic oligonucleotide; AAGAGT chr11 5371460 5371479 5371476 +
gacagtgatagctgtatcta

SEQ ID NO: 60240 - DNA, 20 bp, Artificial Sequence
  Synthetic oligonucleotide; AAGGGT chr11 5371510 5371529 5371526 +
catatatctcattatatcca

SEQ ID NO: 60241 - DNA, 20 bp, Artificial Sequence
  Synthetic oligonucleotide; AAGAGT chr11 5371528 5371547 5371544 +
caaagggttacataagtttt

SEQ ID NO: 60242 - DNA, 20 bp, Artificial Sequence
  Synthetic oligonucleotide; TAGGAT chr11 5371643 5371662 5371659 +
gtaagcttgttcaaaaaata

SEQ ID NO: 60243 - DNA, 20 bp, Artificial Sequence
  Synthetic oligonucleotide; CTGAAT chr11 5372058 5372077 5372074 +
ccccatctccttttttaagg

SEQ ID NO: 60244 - DNA, 20 bp, Artificial Sequence
  Synthetic oligonucleotide; GTGAAT chr11 5372188 5372207 5372204 +
gtttccatgtcttggctatt

SEQ ID NO: 60245 - DNA, 20 bp, Artificial Sequence
  Synthetic oligonucleotide; GAGAGT chr11 5372211 5372230 5372227 +
aataatgctgcaattaacat

SEQ ID NO: 60246 - DNA, 20 bp, Artificial Sequence
  Synthetic oligonucleotide; GCGGAT chr11 5372236 5372255 5372252 +
tgcagatagctctagaaaat

SEQ ID NO: 60247 - DNA, 20 bp, Artificial Sequence
  Synthetic oligonucleotide; TTGGAT chr11 5372252 5372271 5372268 +
aaatgcggattttatttatt

SEQ ID NO: 60248 - DNA, 20 bp, Artificial Sequence
  Synthetic oligonucleotide; AAGAGT chr11 5372375 5372394 5372391 +
cattcccaccagctatgcac

SEQ ID NO: 60249 - DNA, 20 bp, Artificial Sequence
  Synthetic oligonucleotide; GTGAGT chr11 5372449 5372468 5372465 +
taatagccatctcaacaggt

SEQ ID NO: 60250 - DNA, 20 bp, Artificial Sequence
  Synthetic oligonucleotide; TTGAGT chr11 5372614 5372633 5372630 +
attttttcatatttagttga

SEQ ID NO: 60251 - DNA, 20 bp, Artificial Sequence
  Synthetic oligonucleotide; TTGGGT chr11 5372632 5372651 5372648 +
gattgagttccttatatatt

SEQ ID NO: 60252 - DNA, 20 bp, Artificial Sequence
  Synthetic oligonucleotide; CAGAAT chr11 5372971 5372990 5372987 +
gacacatagaccaaattgaa

SEQ ID NO: 60253 - DNA, 20 bp, Artificial Sequence
  Synthetic oligonucleotide; AAGGAT chr11 5373048 5373067 5373064 +
ggccaccaacacaatagggg

SEQ ID NO: 60254 - DNA, 20 bp, Artificial Sequence
  Synthetic oligonucleotide; CTGGAT chr11 5373083 5373102 5373099 +
aacaaatagtgttgggaaaa

SEQ ID NO: 60255 - DNA, 20 bp, Artificial Sequence
  Synthetic oligonucleotide; AAGAAT chr11 5373101 5373120 5373117 +
aactggatatccaaatgcaa

SEQ ID NO: 60256 - DNA, 20 bp, Artificial Sequence
  Synthetic oligonucleotide; ACGGGT chr11 5373389 5373408 5373405 +
cagcgtgaacaacacagaag

SEQ ID NO: 60257 - DNA, 20 bp, Artificial Sequence
  Synthetic oligonucleotide; TGGGGT chr11 5373420 5373439 5373436 +
ctgcatttccatctgaggta

SEQ ID NO: 60258 - DNA, 20 bp, Artificial Sequence
  Synthetic oligonucleotide; GGGAGT chr11 5373437 5373456 5373453 +
gtatggggttcatctcgcta

SEQ ID NO: 60259 - DNA, 20 bp, Artificial Sequence
  Synthetic oligonucleotide; GTGGGT chr11 5373465 5373484 5373481 +
cagacagtgggcacaggtca

SEQ ID NO: 60260 - DNA, 20 bp, Artificial Sequence
  Synthetic oligonucleotide; CAGGGT chr11 5373496 5373515 5373512 +
acaccatgcaccagccgaag

SEQ ID NO: 60261 - DNA, 20 bp, Artificial Sequence
  Synthetic oligonucleotide; AGGGGT chr11 5373529 5373548 5373545 +
tgcctcacttgggaagcaca

SEQ ID NO: 60262 - DNA, 20 bp, Artificial Sequence
  Synthetic oligonucleotide; TGGAGT chr11 5373537 5373556 5373553 +
ttgggaagcacaaggggtca

SEQ ID NO: 60263 - DNA, 20 bp, Artificial Sequence
  Synthetic oligonucleotide; AGGGGT chr11 5373563 5373582 5373579 +
tccctttcctggtcaaggaa

SEQ ID NO: 60264 - DNA, 20 bp, Artificial Sequence
  Synthetic oligonucleotide; CCGAAT chr11 5373604 5373623 5373620 +
gaaaattgggccactcccac

SEQ ID NO: 60265 - DNA, 20 bp, Artificial Sequence
  Synthetic oligonucleotide; GAGGGT chr11 5373674 5373693 5373690 +
tatatcctgcacatggctcc

SEQ ID NO: 60266 - DNA, 20 bp, Artificial Sequence
  Synthetic oligonucleotide; CGGAGT chr11 5373690 5373709 5373706 +
ctccgagggtcctacgccca

SEQ ID NO: 60267 - DNA, 20 bp, Artificial Sequence
  Synthetic oligonucleotide; CTGGGT chr11 5373816 5373835 5373832 +
aagcagccaggaagctcaaa

SEQ ID NO: 60268 - DNA, 20 bp, Artificial Sequence
  Synthetic oligonucleotide; GTGGGT chr11 5374012 5374031 5374028 +
cgggcagactgcctcctcaa

SEQ ID NO: 60269 - DNA, 20 bp, Artificial Sequence
  Synthetic oligonucleotide; GCGGAT chr11 5374145 5374164 5374161 +
acgatcagacagcagcattc

SEQ ID NO: 60270 - DNA, 20 bp, Artificial Sequence
  Synthetic oligonucleotide; CAGGGT chr11 5374199 5374218 5374215 +
gctgctgatacccaggcaaa

SEQ ID NO: 60271 - DNA, 20 bp, Artificial Sequence
  Synthetic oligonucleotide; TGGAGT chr11 5374206 5374225 5374222 +
atacccaggcaaacagggtc

SEQ ID NO: 60272 - DNA, 20 bp, Artificial Sequence
  Synthetic oligonucleotide; GAGGGT chr11 5374245 5374264 5374261 +
actccaacagacctgcagct

SEQ ID NO: 60273 - DNA, 20 bp, Artificial Sequence
  Synthetic oligonucleotide; CTGGAT chr11 5374453 5374472 5374469 +
tcaccagcaacggaacaaag

SEQ ID NO: 60274 - DNA, 20 bp, Artificial Sequence
  Synthetic oligonucleotide; GAGAAT chr11 5374460 5374479 5374476 +
caacggaacaaagctggatg

SEQ ID NO: 60275 - DNA, 20 bp, Artificial Sequence
  Synthetic oligonucleotide; ATGAAT chr11 5374576 5374595 5374592 +
aactttgaaaaaaaatttag

SEQ ID NO: 60276 - DNA, 20 bp, Artificial Sequence
  Synthetic oligonucleotide; TAGAAT chr11 5374589 5374608 5374605 +
aatttagatgaatgtataac

SEQ ID NO: 60277 - DNA, 20 bp, Artificial Sequence
  Synthetic oligonucleotide; GAGAAT chr11 5374648 5374667 5374664 +
ggagctgaaagccaaggctc

SEQ ID NO: 60278 - DNA, 20 bp, Artificial Sequence
  Synthetic oligonucleotide; AAGAAT chr11 5374660 5374679 5374676 +
caaggctcgagaatgacgtg

SEQ ID NO: 60279 - DNA, 20 bp, Artificial Sequence
  Synthetic oligonucleotide; AAGGGT chr11 5374703 5374722 5374719 +
tgatgcgatcaactggaaga

SEQ ID NO: 60280 - DNA, 20 bp, Artificial Sequence
  Synthetic oligonucleotide; AAGAAT chr11 5374766 5374785 5374782 +
gaagggaagtttagagaaaa

SEQ ID NO: 60281 - DNA, 20 bp, Artificial Sequence
  Synthetic oligonucleotide; GAGAAT chr11 5374860 5374879 5374876 +
gtgtacctgaaagtgacggg

SEQ ID NO: 60282 - DNA, 20 bp, Artificial Sequence
  Synthetic oligonucleotide; CAGGAT chr11 5374890 5374909 5374906 +
ccaagttggaaaacactctg

SEQ ID NO: 60283 - DNA, 20 bp, Artificial Sequence
  Synthetic oligonucleotide; TCGGGT chr11 5375069 5375088 5375085 +
agggcagccagagagaaagg

SEQ ID NO: 60284 - DNA, 20 bp, Artificial Sequence
  Synthetic oligonucleotide; GAGAGT chr11 5375140 5375159 5375156 +
agaaactctacaagccagaa

SEQ ID NO: 60285 - DNA, 20 bp, Artificial Sequence
  Synthetic oligonucleotide; AAGAAT chr11 5375175 5375194 5375191 +
tattcaacatccttaaagga

SEQ ID NO: 60286 - DNA, 20 bp, Artificial Sequence
  Synthetic oligonucleotide; CAGAAT chr11 5375189 5375208 5375205 +
aaaggaaagaattttcaaca

SEQ ID NO: 60287 - DNA, 20 bp, Artificial Sequence
  Synthetic oligonucleotide; CAGGAT chr11 5375437 5375456 5375453 +
ataaccagctatcataatga

SEQ ID NO: 60288 - DNA, 20 bp, Artificial Sequence
  Synthetic oligonucleotide; TTGGAT chr11 5375518 5375537 5375534 +
gaaagacacagactggcaaa

SEQ ID NO: 60289 - DNA, 20 bp, Artificial Sequence
  Synthetic oligonucleotide; AAGAGT chr11 5375525 5375544 5375541 +
acagactggcaaattggata

SEQ ID NO: 60290 - DNA, 20 bp, Artificial Sequence
  Synthetic oligonucleotide; AAGGAT chr11 5375582 5375601 5375598 +
cacacataggctcaaaataa

SEQ ID NO: 60291 - DNA, 20 bp, Artificial Sequence
  Synthetic oligonucleotide; AGGGGT chr11 5375628 5375647 5375644 +
aatggaaaacaaaaaaaggc

SEQ ID NO: 60292 - DNA, 20 bp, Artificial Sequence
  Synthetic oligonucleotide; AGGGAT chr11 5375714 5375733 5375730 +
aggccattacataatggtaa

SEQ ID NO: 60293 - DNA, 20 bp, Artificial Sequence
  Synthetic oligonucleotide; AAGGAT chr11 5375899 5375918 5375915 +
caacgagacagaaagttaac

SEQ ID NO: 60294 - DNA, 20 bp, Artificial Sequence
  Synthetic oligonucleotide; AGGAAT chr11 5375909 5375928 5375925 +
gaaagttaacaaggatatcc

SEQ ID NO: 60295 - DNA, 20 bp, Artificial Sequence
  Synthetic oligonucleotide; CAGAAT chr11 5375978 5375997 5375994 +
aactctccaccccaaatcaa

SEQ ID NO: 60296 - DNA, 20 bp, Artificial Sequence
  Synthetic oligonucleotide; CAGGAT chr11 5376124 5376143 5376140 +
agtgcaatcaaactagaact

SEQ ID NO: 60297 - DNA, 20 bp, Artificial Sequence
  Synthetic oligonucleotide; CTGAAT chr11 5376182 5376201 5376198 +
ggaaactgaacaacctgctc

SEQ ID NO: 60298 - DNA, 20 bp, Artificial Sequence
  Synthetic oligonucleotide; CTGGGT chr11 5376193 5376212 5376209 +
aacctgctcctgaatgacta

SEQ ID NO: 60299 - DNA, 20 bp, Artificial Sequence
  Synthetic oligonucleotide; CAGAAT chr11 5376266 5376285 5376282 +
agaacaaagacacaacatac

SEQ ID NO: 60300 - DNA, 20 bp, Artificial Sequence
  Synthetic oligonucleotide; TCGAAT chr11 5376285 5376304 5376301 +
ccagaatctctgggacacat

SEQ ID NO: 60301 - DNA, 20 bp, Artificial Sequence
  Synthetic oligonucleotide; ATGAAT chr11 5376492 5376511 5376508 +
aaaaacccttcaaaaaatta

SEQ ID NO: 60302 - DNA, 20 bp, Artificial Sequence
  Synthetic oligonucleotide; AAGGAT chr11 5376517 5376536 5376533 +
tctgggagctggttttttga

SEQ ID NO: 60303 - DNA, 20 bp, Artificial Sequence
  Synthetic oligonucleotide; AAGAAT chr11 5376568 5376587 5376584 +
agactaataagaaaagagag

SEQ ID NO: 60304 - DNA, 20 bp, Artificial Sequence
  Synthetic oligonucleotide; GGGGAT chr11 5376602 5376621 5376618 +
cacaataaaaaaatgataaa

SEQ ID NO: 60305 - DNA, 20 bp, Artificial Sequence
  Synthetic oligonucleotide; GAGAAT chr11 5376645 5376664 5376661 +
agaaatacaaactgccatca

SEQ ID NO: 60306 - DNA, 20 bp, Artificial Sequence
  Synthetic oligonucleotide; ATGGAT chr11 5376695 5376714 5376711 +
aactagaaaatctagaagaa

SEQ ID NO: 60307 - DNA, 20 bp, Artificial Sequence
  Synthetic oligonucleotide; TTGAAT chr11 5376747 5376766 5376763 +
aagactaaaccaggaagaag

SEQ ID NO: 60308 - DNA, 20 bp, Artificial Sequence
  Synthetic oligonucleotide; CTGAAT chr11 5376755 5376774 5376771 +
accaggaagaagttgaatct

SEQ ID NO: 60309 - DNA, 20 bp, Artificial Sequence
  Synthetic oligonucleotide; CAGGAT chr11 5376771 5376790 5376787 +
atctctgaatagaccaataa

SEQ ID NO: 60310 - DNA, 20 bp, Artificial Sequence
  Synthetic oligonucleotide; AAGAGT chr11 5376815 5376834 5376831 +
tcaatagcttaccaaccaaa

SEQ ID NO: 60311 - DNA, 20 bp, Artificial Sequence
  Synthetic oligonucleotide; ATGGAT chr11 5376831 5376850 5376847 +
caaaaagagtccaggaccag

SEQ ID NO: 60312 - DNA, 20 bp, Artificial Sequence
  Synthetic oligonucleotide; AGGAAT chr11 5376867 5376886 5376883 +
attctaacagaggtacaagg

SEQ ID NO: 60313 - DNA, 20 bp, Artificial Sequence
  Synthetic oligonucleotide; AGGAAT chr11 5376916 5376935 5376932 +
ttccaatcaacagaaaaaga

SEQ ID NO: 60314 - DNA, 20 bp, Artificial Sequence
  Synthetic oligonucleotide; GAGAAT chr11 5376992 5377011 5377008 +
aaagagacacaaccaaaaaa

SEQ ID NO: 60315 - DNA, 20 bp, Artificial Sequence
  Synthetic oligonucleotide; ATGAAT chr11 5377003 5377022 5377019 +
accaaaaaagagaattttag

SEQ ID NO: 60316 - DNA, 20 bp, Artificial Sequence
  Synthetic oligonucleotide; CCGAAT chr11 5377057 5377076 5377073 +
ctcaataaaatactggcaaa

SEQ ID NO: 60317 - DNA, 20 bp, Artificial Sequence
  Synthetic oligonucleotide; TGGGAT chr11 5377114 5377133 5377130 +
gatcaagtggacttcatccc

SEQ ID NO: 60318 - DNA, 20 bp, Artificial Sequence
  Synthetic oligonucleotide; CTGAAT chr11 5377337 5377356 5377353 +
aacccacagccaatatcata

SEQ ID NO: 60319 - DNA, 20 bp, Artificial Sequence
  Synthetic oligonucleotide; AGGGAT chr11 5377386 5377405 5377402 +
tttgtaaactggcacaagac

SEQ ID NO: 60320 - DNA, 20 bp, Artificial Sequence
  Synthetic oligonucleotide; AAGGGT chr11 5377466 5377485 5377482 +
ttaggcagaagacaggaaaa

SEQ ID NO: 60321 - DNA, 20 bp, Artificial Sequence
  Synthetic oligonucleotide; CAGGAT chr11 5377596 5377615 5377612 +
aagcaacttcagcaaagcct

SEQ ID NO: 60322 - DNA, 20 bp, Artificial Sequence
  Synthetic oligonucleotide; GAGAAT chr11 5377702 5377721 5377718 +
ccattcacaattgcttcaaa

SEQ ID NO: 60323 - DNA, 20 bp, Artificial Sequence
  Synthetic oligonucleotide; AGGAAT chr11 5377717 5377736 5377733 +
tcaaagagaataaaatacct

SEQ ID NO: 60324 - DNA, 20 bp, Artificial Sequence
  Synthetic oligonucleotide; AGGGAT chr11 5377733 5377752 5377749 +
acctaggaatccaacttaca

SEQ ID NO: 60325 - DNA, 20 bp, Artificial Sequence
  Synthetic oligonucleotide; ATGGGT chr11 5377825 5377844 5377841 +
tggaagaacattccatgctt

SEQ ID NO: 60326 - DNA, 20 bp, Artificial Sequence
  Synthetic oligonucleotide; AAGAAT chr11 5377834 5377853 5377850 +
attccatgcttatgggtagg

SEQ ID NO: 60327 - DNA, 20 bp, Artificial Sequence
  Synthetic oligonucleotide; CAGAAT chr11 5377923 5377942 5377939 +
gctaccaatgattttcttca

SEQ ID NO: 60328 - DNA, 20 bp, Artificial Sequence
  Synthetic oligonucleotide; AAGGAT chr11 5378191 5378210 5378207 +
agaaaaacaagaaatgggga

SEQ ID NO: 60329 - DNA, 20 bp, Artificial Sequence
  Synthetic oligonucleotide; TAGAAT chr11 5378241 5378260 5378257 +
gagaactggctagccatatg

SEQ ID NO: 60330 - DNA, 20 bp, Artificial Sequence
  Synthetic oligonucleotide; CTGGAT chr11 5378254 5378273 5378270 +
ccatatgtagaatgctgaaa

SEQ ID NO: 60331 - DNA, 20 bp, Artificial Sequence
  Synthetic oligonucleotide; ATGGAT chr11 5378295 5378314 5378311 +
tatacaaaaattaattcaag

SEQ ID NO: 60332 - DNA, 20 bp, Artificial Sequence
  Synthetic oligonucleotide; TGGGAT chr11 5378440 5378459 5378456 +
caaaagccaaaattcactaa

SEQ ID NO: 60333 - DNA, 20 bp, Artificial Sequence
  Synthetic oligonucleotide; CAGAGT chr11 5378490 5378509 5378506 +
acagctaaagaaactaccat

SEQ ID NO: 60334 - DNA, 20 bp, Artificial Sequence
  Synthetic oligonucleotide; CAGAAT chr11 5378562 5378581 5378578 +
tctgacaaagggctaatatc

SEQ ID NO: 60335 - DNA, 20 bp, Artificial Sequence
  Synthetic oligonucleotide; AAGGAT chr11 5378629 5378648 5378645 +
gccccatcaacaagtgggca

SEQ ID NO: 60336 - DNA, 20 bp, Artificial Sequence
  Synthetic oligonucleotide; TAGAAT chr11 5378760 5378779 5378776 +
agataccatctcataccagt

SEQ ID NO: 60337 - DNA, 20 bp, Artificial Sequence
  Synthetic oligonucleotide; GAGGAT chr11 5378804 5378823 5378820 +
aggaaacaacaggtgctgga

SEQ ID NO: 60338 - DNA, 20 bp, Artificial Sequence
  Synthetic oligonucleotide; AGGGAT chr11 5378893 5378912 5378909 +
agtcagtgtggcgattcctc

SEQ ID NO: 60339 - DNA, 20 bp, Artificial Sequence
  Synthetic oligonucleotide; CTGGGT chr11 5378938 5378957 5378954 +
ttgacccagccatcccatta

SEQ ID NO: 60340 - DNA, 20 bp, Artificial Sequence
  Synthetic oligonucleotide; AGGAAT chr11 5378954 5378973 5378970 +
attactgggtatatacccaa

SEQ ID NO: 60341 - DNA, 20 bp, Artificial Sequence
  Synthetic oligonucleotide; CTGGAT chr11 5379063 5379082 5379079 +
aaatgtccaacaatgataga

SEQ ID NO: 60342 - DNA, 20 bp, Artificial Sequence
  Synthetic oligonucleotide; TGGAAT chr11 5379095 5379114 5379111 +
aatgtggcacatatacacca

SEQ ID NO: 60343 - DNA, 20 bp, Artificial Sequence
  Synthetic oligonucleotide; ATGAGT chr11 5379121 5379140 5379137 +
actatgcagccataaaaatg

SEQ ID NO: 60344 - DNA, 20 bp, Artificial Sequence
  Synthetic oligonucleotide; ATGGAT chr11 5379146 5379165 5379162 +
ttcatgtcctttgtagggac

SEQ ID NO: 60345 - DNA, 20 bp, Artificial Sequence
  Synthetic oligonucleotide; TGGGGT chr11 5379291 5379310 5379307 +
tcacactctggggactgttg

SEQ ID NO: 60346 - DNA, 20 bp, Artificial Sequence
  Synthetic oligonucleotide; GGGGGT chr11 5379297 5379316 5379313 +
tctggggactgttgtggggt

SEQ ID NO: 60347 - DNA, 20 bp, Artificial Sequence
  Synthetic oligonucleotide; AGGGAT chr11 5379309 5379328 5379325 +
tgtggggtgggggtgcaggg

SEQ ID NO: 60348 - DNA, 20 bp, Artificial Sequence
  Synthetic oligonucleotide; ACGAGT chr11 5379345 5379364 5379361 +
gatatacctaatgctaaatt

SEQ ID NO: 60349 - DNA, 20 bp, Artificial Sequence
  Synthetic oligonucleotide; ATGGGT chr11 5379353 5379372 5379369 +
taatgctaaattacgagtta

SEQ ID NO: 60350 - DNA, 20 bp, Artificial Sequence
  Synthetic oligonucleotide; ATGAAT chr11 5379660 5379679 5379676 +
gctcaaggttagctaaagat

SEQ ID NO: 60351 - DNA, 20 bp, Artificial Sequence
  Synthetic oligonucleotide; TAGAAT chr11 5379746 5379765 5379762 +
atccattttttgtttccttt

SEQ ID NO: 60352 - DNA, 20 bp, Artificial Sequence
  Synthetic oligonucleotide; ATGAGT chr11 5379790 5379809 5379806 +
ggacagcttgatactttccc

SEQ ID NO: 60353 - DNA, 20 bp, Artificial Sequence
  Synthetic oligonucleotide; CTGGGT chr11 5379804 5379823 5379820 +
tttcccatgagtctggcttt

SEQ ID NO: 60354 - DNA, 20 bp, Artificial Sequence
  Synthetic oligonucleotide; CAGAAT chr11 5379944 5379963 5379960 +
atcttggacttttaagtcac

SEQ ID NO: 60355 - DNA, 20 bp, Artificial Sequence
  Synthetic oligonucleotide; TGGAGT chr11 5380056 5380075 5380072 +
actaaaactttagcccaact

SEQ ID NO: 60356 - DNA, 20 bp, Artificial Sequence
  Synthetic oligonucleotide; AGGGGT chr11 5380086 5380105 5380102 +
agaagagatggtttcccaaa

SEQ ID NO: 60357 - DNA, 20 bp, Artificial Sequence
  Synthetic oligonucleotide; TAGGAT chr11 5380156 5380175 5380172 +
tcataatgactgaagagagg

SEQ ID NO: 60358 - DNA, 20 bp, Artificial Sequence
  Synthetic oligonucleotide; AAGAGT chr11 5380185 5380204 5380201 +
acgaaagaaggcgtttctga

SEQ ID NO: 60359 - DNA, 20 bp, Artificial Sequence
  Synthetic oligonucleotide; GGGGAT chr11 5380273 5380292 5380289 +
gcaggtgtccagggaggcag

SEQ ID NO: 60360 - DNA, 20 bp, Artificial Sequence
  Synthetic oligonucleotide; ATGAAT chr11 5380286 5380305 5380302 +
gaggcagggggatggacaaa

SEQ ID NO: 60361 - DNA, 20 bp, Artificial Sequence
  Synthetic oligonucleotide; GTGGGT chr11 5380359 5380378 5380375 +
ttttggcaatcctaacttct

SEQ ID NO: 60362 - DNA, 20 bp, Artificial Sequence
  Synthetic oligonucleotide; TGGAGT chr11 5380407 5380426 5380423 +
atcgatctcacaccacaaaa

SEQ ID NO: 60363 - DNA, 20 bp, Artificial Sequence
  Synthetic oligonucleotide; GAGAGT chr11 5380444 5380463 5380460 +
ggacttgttctaacaggcct

SEQ ID NO: 60364 - DNA, 20 bp, Artificial Sequence
  Synthetic oligonucleotide; AAGAGT chr11 5380492 5380511 5380508 +
ctgtgacagagacacctaaa

SEQ ID NO: 60365 - DNA, 20 bp, Artificial Sequence
  Synthetic oligonucleotide; GTGAGT chr11 5380503 5380522 5380519 +
acacctaaaaagagtctgtt

SEQ ID NO: 60366 - DNA, 20 bp, Artificial Sequence
  Synthetic oligonucleotide; GTGAGT chr11 5380529 5380548 5380545 +
ctggagacattgagaaccct

SEQ ID NO: 60367 - DNA, 20 bp, Artificial Sequence
  Synthetic oligonucleotide; AAGGAT chr11 5380535 5380554 5380551 +
acattgagaaccctgtgagt

SEQ ID NO: 60368 - DNA, 20 bp, Artificial Sequence
  Synthetic oligonucleotide; CAGAGT chr11 5380563 5380582 5380579 +
tatttaggtctgtttctggt

SEQ ID NO: 60369 - DNA, 20 bp, Artificial Sequence
  Synthetic oligonucleotide; GGGGAT chr11 5380569 5380588 5380585 +
ggtctgtttctggtcagagt

SEQ ID NO: 60370 - DNA, 20 bp, Artificial Sequence
  Synthetic oligonucleotide; AAGAAT chr11 5380761 5380780 5380777 +
aggaagatcatcctcaaagg

SEQ ID NO: 60371 - DNA, 20 bp, Artificial Sequence
  Synthetic oligonucleotide; GTGGGT chr11 5380795 5380814 5380811 +
tggcagctttcagctgtgta

SEQ ID NO: 60372 - DNA, 20 bp, Artificial Sequence
  Synthetic oligonucleotide; GGGGAT chr11 5380855 5380874 5380871 +
gccacattttcttgtgccct

SEQ ID NO: 60373 - DNA, 20 bp, Artificial Sequence
  Synthetic oligonucleotide; CAGAAT chr11 5380881 5380900 5380897 +
agtagggccttggtgctggt

SEQ ID NO: 60374 - DNA, 20 bp, Artificial Sequence
  Synthetic oligonucleotide; CTGAAT chr11 5380904 5380923 5380920 +
aatttaagcctatccttggg

SEQ ID NO: 60375 - DNA, 20 bp, Artificial Sequence
  Synthetic oligonucleotide; GGGGAT chr11 5380959 5380978 5380975 +
acagcatgtgtacagacctt

SEQ ID NO: 60376 - DNA, 20 bp, Artificial Sequence
  Synthetic oligonucleotide; AGGAAT chr11 5380978 5380997 5380994 +
tggggattcagttctcctga

SEQ ID NO: 60377 - DNA, 20 bp, Artificial Sequence
  Synthetic oligonucleotide; CTGGAT chr11 5381031 5381050 5381047 +
gggctggctaggtatcaatt

SEQ ID NO: 60378 - DNA, 20 bp, Artificial Sequence
  Synthetic oligonucleotide; ATGGAT chr11 5381247 5381266 5381263 +
gacacttttcacttttagta

SEQ ID NO: 60379 - DNA, 20 bp, Artificial Sequence
  Synthetic oligonucleotide; ATGAAT chr11 5381268 5381287 5381284 +
tggatttagattctttaata

SEQ ID NO: 60380 - DNA, 20 bp, Artificial Sequence
  Synthetic oligonucleotide; CTGAAT chr11 5381297 5381316 5381313 +
aataccttaaaggttaaggc

SEQ ID NO: 60381 - DNA, 20 bp, Artificial Sequence
  Synthetic oligonucleotide; CAGAGT chr11 5381601 5381620 5381617 +
tctatcttcaagttcttgat

SEQ ID NO: 60382 - DNA, 20 bp, Artificial Sequence
  Synthetic oligonucleotide; GAGAAT chr11 5381648 5381667 5381664 +
gcacgtcaatgaaaattgat

SEQ ID NO: 60383 - DNA, 20 bp, Artificial Sequence
  Synthetic oligonucleotide; AAGAAT chr11 5381736 5381755 5381752 +
aaaggtcatttagagcaata

SEQ ID NO: 60384 - DNA, 20 bp, Artificial Sequence
  Synthetic oligonucleotide; CTGAGT chr11 5381750 5381769 5381766 +
gcaataaagaatcaaaaatg

SEQ ID NO: 60385 - DNA, 20 bp, Artificial Sequence
  Synthetic oligonucleotide; TAGAAT chr11 5381825 5381844 5381841 +
aattatataattcagagaaa

SEQ ID NO: 60386 - DNA, 20 bp, Artificial Sequence
  Synthetic oligonucleotide; CAGGGT chr11 5382117 5382136 5382133 +
acatgtcatataaactcatt

SEQ ID NO: 60387 - DNA, 20 bp, Artificial Sequence
  Synthetic oligonucleotide; CTGAAT chr11 5382459 5382478 5382475 +
cttatgtgtgatagatgccc

SEQ ID NO: 60388 - DNA, 20 bp, Artificial Sequence
  Synthetic oligonucleotide; TAGGAT chr11 5382528 5382547 5382544 +
gctgttatactgtccttggc

SEQ ID NO: 60389 - DNA, 20 bp, Artificial Sequence
  Synthetic oligonucleotide; CAGGAT chr11 5382572 5382591 5382588 +
aatcatgttcttaataaatg

SEQ ID NO: 60390 - DNA, 20 bp, Artificial Sequence
  Synthetic oligonucleotide; CTGGGT chr11 5382790 5382809 5382806 +
taaggtggtgccacttctgt

SEQ ID NO: 60391 - DNA, 20 bp, Artificial Sequence
  Synthetic oligonucleotide; ATGGGT chr11 5382829 5382848 5382845 +
aatggcatgtcataaacttc

SEQ ID NO: 60392 - DNA, 20 bp, Artificial Sequence
  Synthetic oligonucleotide; AAGGAT chr11 5382913 5382932 5382929 +
aatcaaccatgccctattta

SEQ ID NO: 60393 - DNA, 20 bp, Artificial Sequence
  Synthetic oligonucleotide; AAGAGT chr11 5382946 5382965 5382962 +
cttgcttcatgccagtctcc

SEQ ID NO: 60394 - DNA, 20 bp, Artificial Sequence
  Synthetic oligonucleotide; GTGAGT chr11 5382982 5383001 5382998 +
ttgtggtggagaggttgtgt

SEQ ID NO: 60395 - DNA, 20 bp, Artificial Sequence
  Synthetic oligonucleotide; TGGGGT chr11 5383235 5383254 5383251 +
cactgacctggacatttgtt

SEQ ID NO: 60396 - DNA, 20 bp, Artificial Sequence
  Synthetic oligonucleotide; TAGGAT chr11 5383240 5383259 5383256 +
acctggacatttgtttgggg

SEQ ID NO: 60397 - DNA, 20 bp, Artificial Sequence
  Synthetic oligonucleotide; TTGAAT chr11 5383245 5383264 5383261 +
gacatttgtttggggtagga

SEQ ID NO: 60398 - DNA, 20 bp, Artificial Sequence
  Synthetic oligonucleotide; ATGAGT chr11 5383351 5383370 5383367 +
atataaaaatagacaggaaa

SEQ ID NO: 60399 - DNA, 20 bp, Artificial Sequence
  Synthetic oligonucleotide; AGGAGT chr11 5383359 5383378 5383375 +
atagacaggaaaatgagtgc

SEQ ID NO: 60400 - DNA, 20 bp, Artificial Sequence
  Synthetic oligonucleotide; GAGAAT chr11 5383367 5383386 5383383 +
gaaaatgagtgcaggagtga

SEQ ID NO: 60401 - DNA, 20 bp, Artificial Sequence
  Synthetic oligonucleotide; ATGGAT chr11 5383440 5383459 5383456 +
aaagccactgtgaacatcac

SEQ ID NO: 60402 - DNA, 20 bp, Artificial Sequence
  Synthetic oligonucleotide; ACGGGT chr11 5383486 5383505 5383502 +
tccgacctctctggaaaacg

SEQ ID NO: 60403 - DNA, 20 bp, Artificial Sequence
  Synthetic oligonucleotide; GTGGAT chr11 5383501 5383520 5383517 +
aaacgacgggtccattacta

SEQ ID NO: 60404 - DNA, 20 bp, Artificial Sequence
  Synthetic oligonucleotide; ATGAAT chr11 5383539 5383558 5383555 +
taaataaaatgataagtgat

SEQ ID NO: 60405 - DNA, 20 bp, Artificial Sequence
  Synthetic oligonucleotide; CTGAAT chr11 5383630 5383649 5383646 +
gtgtagccaaaacctgggga

SEQ ID NO: 60406 - DNA, 20 bp, Artificial Sequence
  Synthetic oligonucleotide; AGGGGT chr11 5383670 5383689 5383686 +
gctcttcagcttcaggagac

SEQ ID NO: 60407 - DNA, 20 bp, Artificial Sequence
  Synthetic oligonucleotide; TAGGAT chr11 5383701 5383720 5383717 +
taaagaaagtttcctgccca

SEQ ID NO: 60408 - DNA, 20 bp, Artificial Sequence
  Synthetic oligonucleotide; GAGGAT chr11 5383769 5383788 5383785 +
gctggagccatggtctttag

SEQ ID NO: 60409 - DNA, 20 bp, Artificial Sequence
  Synthetic oligonucleotide; GTGAGT chr11 5383898 5383917 5383914 +
atttttgttattacctgctg

SEQ ID NO: 60410 - DNA, 20 bp, Artificial Sequence
  Synthetic oligonucleotide; CGGGGT chr11 5383922 5383941 5383938 +
gtctcactactgtcttgtgc

SEQ ID NO: 60411 - DNA, 20 bp, Artificial Sequence
  Synthetic oligonucleotide; AGGAGT chr11 5383931 5383950 5383947 +
ctgtcttgtgccggggtttc

SEQ ID NO: 60412 - DNA, 20 bp, Artificial Sequence
  Synthetic oligonucleotide; GTGGGT chr11 5383935 5383954 5383951 +
cttgtgccggggtttcagga

SEQ ID NO: 60413 - DNA, 20 bp, Artificial Sequence
  Synthetic oligonucleotide; GGGAAT chr11 5383986 5384005 5384002 +
gggagaaaatgagggaaaat

SEQ ID NO: 60414 - DNA, 20 bp, Artificial Sequence
  Synthetic oligonucleotide; TTGAAT chr11 5384066 5384085 5384082 +
aaggcttttcccccaaatgt

SEQ ID NO: 60415 - DNA, 20 bp, Artificial Sequence
  Synthetic oligonucleotide; ATGGAT chr11 5384084 5384103 5384100 +
gtttgaatgtccttagccaa

SEQ ID NO: 60416 - DNA, 20 bp, Artificial Sequence
  Synthetic oligonucleotide; TGGGAT chr11 5384117 5384136 5384133 +
attccctgcactaagcctaa

SEQ ID NO: 60417 - DNA, 20 bp, Artificial Sequence
  Synthetic oligonucleotide; CCGGAT chr11 5384243 5384262 5384259 +
tagctcactgtaaactcaaa

SEQ ID NO: 60418 - DNA, 20 bp, Artificial Sequence
  Synthetic oligonucleotide; CAGGAT chr11 5384284 5384303 5384300 +
accttattcttccaagttgc

SEQ ID NO: 60419 - DNA, 20 bp, Artificial Sequence
  Synthetic oligonucleotide; CAGGGT chr11 5384362 5384381 5384378 +
gaaaatgaagtcttagaaac

SEQ ID NO: 60420 - DNA, 20 bp, Artificial Sequence
  Synthetic oligonucleotide; CAGAAT chr11 5384373 5384392 5384389 +
cttagaaaccagggttctca

SEQ ID NO: 60421 - DNA, 20 bp, Artificial Sequence
  Synthetic oligonucleotide; CAGAGT chr11 5384394 5384413 5384410 +
agaatctcttctgatattct

SEQ ID NO: 60422 - DNA, 20 bp, Artificial Sequence
  Synthetic oligonucleotide; ATGAGT chr11 5384524 5384543 5384540 +
agggctgcctcactcccctg

SEQ ID NO: 60423 - DNA, 20 bp, Artificial Sequence
  Synthetic oligonucleotide; CTGGAT chr11 5384556 5384575 5384572 +
atggccaggccagcccctcc

SEQ ID NO: 60424 - DNA, 20 bp, Artificial Sequence
  Synthetic oligonucleotide; CAGGAT chr11 5384575 5384594 5384591 +
cctggatcatgtctagaagt

SEQ ID NO: 60425 - DNA, 20 bp, Artificial Sequence
  Synthetic oligonucleotide; CAGGAT chr11 5384788 5384807 5384804 +
cttgtaacttccccagtatc

SEQ ID NO: 60426 - DNA, 20 bp, Artificial Sequence
  Synthetic oligonucleotide; ATGAGT chr11 5384851 5384870 5384867 +
aaaaacaggcatgtttacag

SEQ ID NO: 60427 - DNA, 20 bp, Artificial Sequence
  Synthetic oligonucleotide; AGGGGT chr11 5384881 5384900 5384897 +
ccactgtggaaatgttctct

SEQ ID NO: 60428 - DNA, 20 bp, Artificial Sequence
  Synthetic oligonucleotide; ATGAAT chr11 5384893 5384912 5384909 +
tgttctctaggggttcaaaa

SEQ ID NO: 60429 - DNA, 20 bp, Artificial Sequence
  Synthetic oligonucleotide; AAGAAT chr11 5385019 5385038 5385035 +
ctaatattaaattcaaacaa

SEQ ID NO: 60430 - DNA, 20 bp, Artificial Sequence
  Synthetic oligonucleotide; AGGAAT chr11 5385084 5385103 5385100 +
tatactgaaaatctcttttc

SEQ ID NO: 60431 - DNA, 20 bp, Artificial Sequence
  Synthetic oligonucleotide; ATGAAT chr11 5385108 5385127 5385124 +
attttctcctgtgatctaag

SEQ ID NO: 60432 - DNA, 20 bp, Artificial Sequence
  Synthetic oligonucleotide; TTGAAT chr11 5385124 5385143 5385140 +
taagatgaatctactctgcc

SEQ ID NO: 60433 - DNA, 20 bp, Artificial Sequence
  Synthetic oligonucleotide; CTGAGT chr11 5385167 5385186 5385183 +
attagatgtaactgactgct

SEQ ID NO: 60434 - DNA, 20 bp, Artificial Sequence
  Synthetic oligonucleotide; ATGGAT chr11 5385225 5385244 5385241 +
atgactgttgctctcctatc

SEQ ID NO: 60435 - DNA, 20 bp, Artificial Sequence
  Synthetic oligonucleotide; AAGAAT chr11 5385422 5385441 5385438 +
acaacagaaccccaggcaca

SEQ ID NO: 60436 - DNA, 20 bp, Artificial Sequence
  Synthetic oligonucleotide; CAGGAT chr11 5385428 5385447 5385444 +
gaaccccaggcacaaagaat

SEQ ID NO: 60437 - DNA, 20 bp, Artificial Sequence
  Synthetic oligonucleotide; GTGAGT chr11 5385439 5385458 5385455 +
acaaagaatcaggataagag

SEQ ID NO: 60438 - DNA, 20 bp, Artificial Sequence
  Synthetic oligonucleotide; GAGAAT chr11 5385542 5385561 5385558 +
tcaggctccaggggccttta

SEQ ID NO: 60439 - DNA, 20 bp, Artificial Sequence
  Synthetic oligonucleotide; ATGAAT chr11 5385570 5385589 5385586 +
cagtctaatcaacttaaaaa

SEQ ID NO: 60440 - DNA, 20 bp, Artificial Sequence
  Synthetic oligonucleotide; AAGAAT chr11 5385644 5385663 5385660 +
tgttctaaacatgtataata

SEQ ID NO: 60441 - DNA, 20 bp, Artificial Sequence
  Synthetic oligonucleotide; AAGAAT chr11 5385803 5385822 5385819 +
aaaaatctataaagtatata

SEQ ID NO: 60442 - DNA, 20 bp, Artificial Sequence
  Synthetic oligonucleotide; ATGAGT chr11 5385850 5385869 5385866 +
gtatattctataaagtattt

SEQ ID NO: 60443 - DNA, 20 bp, Artificial Sequence
  Synthetic oligonucleotide; ATGGAT chr11 5385905 5385924 5385921 +
ttatacatatgtgtacttat

SEQ ID NO: 60444 - DNA, 20 bp, Artificial Sequence
  Synthetic oligonucleotide; AAGAAT chr11 5385965 5385984 5385981 +
tatataaatataaaaatata

SEQ ID NO: 60445 - DNA, 20 bp, Artificial Sequence
  Synthetic oligonucleotide; AAGGAT chr11 5386100 5386119 5386116 +
gatatttgtactaagtctta

SEQ ID NO: 60446 - DNA, 20 bp, Artificial Sequence
  Synthetic oligonucleotide; AGGGGT chr11 5386133 5386152 5386149 +
tgtttactggttggaaaaac

SEQ ID NO: 60447 - DNA, 20 bp, Artificial Sequence
  Synthetic oligonucleotide; AAGAAT chr11 5386168 5386187 5386184 +
caagaaagcaataaatatag

SEQ ID NO: 60448 - DNA, 20 bp, Artificial Sequence
  Synthetic oligonucleotide; GGGAAT chr11 5386196 5386215 5386212 +
aaacaagaaaagtatgtgta

SEQ ID NO: 60449 - DNA, 20 bp, Artificial Sequence
  Synthetic oligonucleotide; ATGGGT chr11 5386218 5386237 5386234 +
gaattgaagaaaaaaatgat

SEQ ID NO: 60450 - DNA, 20 bp, Artificial Sequence
  Synthetic oligonucleotide; ATGGGT chr11 5386241 5386260 5386257 +
ggtgtgttgactgggaaaag

SEQ ID NO: 60451 - DNA, 20 bp, Artificial Sequence
  Synthetic oligonucleotide; CAGGGT chr11 5386293 5386312 5386309 +
ccgggctaaagatggtgtta

SEQ ID NO: 60452 - DNA, 20 bp, Artificial Sequence
  Synthetic oligonucleotide; TGGGAT chr11 5386375 5386394 5386391 +
tttcgctcactaccaggcct

SEQ ID NO: 60453 - DNA, 20 bp, Artificial Sequence
  Synthetic oligonucleotide; TAGAGT chr11 5386593 5386612 5386609 +
gaaaacagtgcagtgattca

SEQ ID NO: 60454 - DNA, 20 bp, Artificial Sequence
  Synthetic oligonucleotide; GAGGAT chr11 5386633 5386652 5386649 +
taatctcggtggctgcagta

SEQ ID NO: 60455 - DNA, 20 bp, Artificial Sequence
  Synthetic oligonucleotide; TTGAAT chr11 5386672 5386691 5386688 +
gaggagcctggctttgcatg

SEQ ID NO: 60456 - DNA, 20 bp, Artificial Sequence
  Synthetic oligonucleotide; ATGAAT chr11 5386740 5386759 5386756 +
cattggctacagagatgaag

SEQ ID NO: 60457 - DNA, 20 bp, Artificial Sequence
  Synthetic oligonucleotide; AGGGAT chr11 5386753 5386772 5386769 +
gatgaagatgaatagattac

SEQ ID NO: 60458 - DNA, 20 bp, Artificial Sequence
  Synthetic oligonucleotide; GAGGGT chr11 5386802 5386821 5386818 +
attagatacagaaagaggga

SEQ ID NO: 60459 - DNA, 20 bp, Artificial Sequence
  Synthetic oligonucleotide; TTGAGT chr11 5386807 5386826 5386823 +
atacagaaagagggagaggg

SEQ ID NO: 60460 - DNA, 20 bp, Artificial Sequence
  Synthetic oligonucleotide; TTGAAT chr11 5386838 5386857 5386854 +
atcagctcaaaaatgttgtc

SEQ ID NO: 60461 - DNA, 20 bp, Artificial Sequence
  Synthetic oligonucleotide; GTGAAT chr11 5386855 5386874 5386871 +
gtcttgaatggcaggaaatg

SEQ ID NO: 60462 - DNA, 20 bp, Artificial Sequence
  Synthetic oligonucleotide; AAGAAT chr11 5386889 5386908 5386905 +
aaaaaatgcataaatatgag

SEQ ID NO: 60463 - DNA, 20 bp, Artificial Sequence
  Synthetic oligonucleotide; ATGGAT chr11 5386908 5386927 5386924 +
gaagaatcaggtgtgaaaag

SEQ ID NO: 60464 - DNA, 20 bp, Artificial Sequence
  Synthetic oligonucleotide; TTGAGT chr11 5386936 5386955 5386952 +
tgggctcaatattagacgtg

SEQ ID NO: 60465 - DNA, 20 bp, Artificial Sequence
  Synthetic oligonucleotide; CGGAGT chr11 5387003 5387022 5387019 +
aactcaggcctgatatgtaa

SEQ ID NO: 60466 - DNA, 20 bp, Artificial Sequence
  Synthetic oligonucleotide; ATGAAT chr11 5387076 5387095 5387092 +
taataataatagataatata

SEQ ID NO: 60467 - DNA, 20 bp, Artificial Sequence
  Synthetic oligonucleotide; CTGAAT chr11 5387111 5387130 5387127 +
aggtgttcaaggacagtaaa

SEQ ID NO: 60468 - DNA, 20 bp, Artificial Sequence
  Synthetic oligonucleotide; GAGAGT chr11 5387145 5387164 5387161 +
tatttgagcaatggaaataa

SEQ ID NO: 60469 - DNA, 20 bp, Artificial Sequence
  Synthetic oligonucleotide; AAGAAT chr11 5387201 5387220 5387217 +
aaccagcagatcttggcatt

SEQ ID NO: 60470 - DNA, 20 bp, Artificial Sequence
  Synthetic oligonucleotide; GTGAAT chr11 5387326 5387345 5387342 +
ttggcccctagaagtcactg

SEQ ID NO: 60471 - DNA, 20 bp, Artificial Sequence
  Synthetic oligonucleotide; GTGGGT chr11 5387355 5387374 5387371 +
aggagcattgctttagctaa

SEQ ID NO: 60472 - DNA, 20 bp, Artificial Sequence
  Synthetic oligonucleotide; TAGGGT chr11 5387377 5387396 5387393 +
gggttttaaaaaaaacatta

SEQ ID NO: 60473 - DNA, 20 bp, Artificial Sequence
  Synthetic oligonucleotide; TTGAGT chr11 5387389 5387408 5387405 +
aaacattatagggtggttgg

SEQ ID NO: 60474 - DNA, 20 bp, Artificial Sequence
  Synthetic oligonucleotide; GTGGAT chr11 5387586 5387605 5387602 +
gcatttagctgctacttcaa

SEQ ID NO: 60475 - DNA, 20 bp, Artificial Sequence
  Synthetic oligonucleotide; TTGAAT chr11 5387622 5387641 5387638 +
tccccaccttgcttcctcca

SEQ ID NO: 60476 - DNA, 20 bp, Artificial Sequence
  Synthetic oligonucleotide; TTGAAT chr11 5387708 5387727 5387724 +
cacttgttcttcctccttcc

SEQ ID NO: 60477 - DNA, 20 bp, Artificial Sequence
  Synthetic oligonucleotide; TAGAAT chr11 5388015 5388034 5388031 +
ttacttttgcaccaacctaa

SEQ ID NO: 60478 - DNA, 20 bp, Artificial Sequence
  Synthetic oligonucleotide; TTGAAT chr11 5388058 5388077 5388074 +
acaatttcaatatgtattta

SEQ ID NO: 60479 - DNA, 20 bp, Artificial Sequence
  Synthetic oligonucleotide; ATGAAT chr11 5388070 5388089 5388086 +
tgtatttattgaatcaatta

SEQ ID NO: 60480 - DNA, 20 bp, Artificial Sequence
  Synthetic oligonucleotide; TTGAAT chr11 5388090 5388109 5388106 +
atgaataattattgaaataa

SEQ ID NO: 60481 - DNA, 20 bp, Artificial Sequence
  Synthetic oligonucleotide; AAGGAT chr11 5388166 5388185 5388182 +
atttattcaaataatattta

SEQ ID NO: 60482 - DNA, 20 bp, Artificial Sequence
  Synthetic oligonucleotide; AGGAAT chr11 5388255 5388274 5388271 +
agtcatggtttatgtccaca

SEQ ID NO: 60483 - DNA, 20 bp, Artificial Sequence
  Synthetic oligonucleotide; GAGGGT chr11 5388351 5388370 5388367 +
aactacaggaacacatagga

SEQ ID NO: 60484 - DNA, 20 bp, Artificial Sequence
  Synthetic oligonucleotide; GGGAAT chr11 5388373 5388392 5388389 +
gggtattcaaactaaacttg

SEQ ID NO: 60485 - DNA, 20 bp, Artificial Sequence
  Synthetic oligonucleotide; GTGGGT chr11 5388418 5388437 5388434 +
gacatcatatctaagctaag

SEQ ID NO: 60486 - DNA, 20 bp, Artificial Sequence
  Synthetic oligonucleotide; AAGAAT chr11 5388495 5388514 5388511 +
aaaaatgtttttattccagg

SEQ ID NO: 60487 - DNA, 20 bp, Artificial Sequence
  Synthetic oligonucleotide; AAGAAT chr11 5388547 5388566 5388563 +
aagcatactagataaactgg

SEQ ID NO: 60488 - DNA, 20 bp, Artificial Sequence
  Synthetic oligonucleotide; GTGAAT chr11 5388573 5388592 5388589 +
tgtttagtgtcattaacacc

SEQ ID NO: 60489 - DNA, 20 bp, Artificial Sequence
  Synthetic oligonucleotide; TAGGAT chr11 5388592 5388611 5388608 +
cgtgaatatacagaggaaat

SEQ ID NO: 60490 - DNA, 20 bp, Artificial Sequence
  Synthetic oligonucleotide; TAGGAT chr11 5388609 5388628 5388625 +
aattaggatagataagaaaa

SEQ ID NO: 60491 - DNA, 20 bp, Artificial Sequence
  Synthetic oligonucleotide; TAGGGT chr11 5388636 5388655 5388652 +
tacacggagagaaaataagg

SEQ ID NO: 60492 - DNA, 20 bp, Artificial Sequence
  Synthetic oligonucleotide; TTGAAT chr11 5388643 5388662 5388659 +
agagaaaataaggtagggtc

SEQ ID NO: 60493 - DNA, 20 bp, Artificial Sequence
  Synthetic oligonucleotide; CTGAAT chr11 5388721 5388740 5388737 +
tcttgctatatagtagtcaa

SEQ ID NO: 60494 - DNA, 20 bp, Artificial Sequence
  Synthetic oligonucleotide; ATGAGT chr11 5388742 5388761 5388758 +
tgaatacagtagtacaaaag

SEQ ID NO: 60495 - DNA, 20 bp, Artificial Sequence
  Synthetic oligonucleotide; TGGAAT chr11 5388751 5388770 5388767 +
tagtacaaaagatgagtcac

SEQ ID NO: 60496 - DNA, 20 bp, Artificial Sequence
  Synthetic oligonucleotide; AAGAGT chr11 5388765 5388784 5388781 +
agtcactggaatagtcctga

SEQ ID NO: 60497 - DNA, 20 bp, Artificial Sequence
  Synthetic oligonucleotide; CTGAAT chr11 5388774 5388793 5388790 +
aatagtcctgaaagagtgat

SEQ ID NO: 60498 - DNA, 20 bp, Artificial Sequence
  Synthetic oligonucleotide; TAGAAT chr11 5388780 5388799 5388796 +
cctgaaagagtgatctgaat

SEQ ID NO: 60499 - DNA, 20 bp, Artificial Sequence
  Synthetic oligonucleotide; GTGAGT chr11 5388805 5388824 5388821 +
tagcatcaatgaaggtgacg

SEQ ID NO: 60500 - DNA, 20 bp, Artificial Sequence
  Synthetic oligonucleotide; TAGAGT chr11 5388960 5388979 5388976 +
atgaaaagtacagatgttgc

SEQ ID NO: 60501 - DNA, 20 bp, Artificial Sequence
  Synthetic oligonucleotide; TGGAAT chr11 5388996 5389015 5389012 +
aaagagagaaagacaagttc

SEQ ID NO: 60502 - DNA, 20 bp, Artificial Sequence
  Synthetic oligonucleotide; ATGGAT chr11 5389026 5389045 5389042 +
tatttgttatttatcaatat

SEQ ID NO: 60503 - DNA, 20 bp, Artificial Sequence
  Synthetic oligonucleotide; GTGGAT chr11 5389051 5389070 5389067 +
tggtaaatgaaatcatggta

SEQ ID NO: 60504 - DNA, 20 bp, Artificial Sequence
  Synthetic oligonucleotide; TAGAAT chr11 5389075 5389094 5389091 +
atgacattaagaagaaataa

SEQ ID NO: 60505 - DNA, 20 bp, Artificial Sequence
  Synthetic oligonucleotide; AAGGAT chr11 5389098 5389117 5389114 +
aatatggccaggaaattgcc

SEQ ID NO: 60506 - DNA, 20 bp, Artificial Sequence
  Synthetic oligonucleotide; AAGGGT chr11 5389120 5389139 5389136 +
ggatgggaagaactatactt

SEQ ID NO: 60507 - DNA, 20 bp, Artificial Sequence
  Synthetic oligonucleotide; CAGAAT chr11 5389242 5389261 5389258 +
caataaagtagtgagattgg

SEQ ID NO: 60508 - DNA, 20 bp, Artificial Sequence
  Synthetic oligonucleotide; AAGGGT chr11 5389252 5389271 5389268 +
gtgagattggcagaattcat

SEQ ID NO: 60509 - DNA, 20 bp, Artificial Sequence
  Synthetic oligonucleotide; TGGAGT chr11 5389257 5389276 5389273 +
attggcagaattcataaggg

SEQ ID NO: 60510 - DNA, 20 bp, Artificial Sequence
  Synthetic oligonucleotide; GTGAAT chr11 5389309 5389328 5389325 +
atggtactgcttgtgatgtt

SEQ ID NO: 60511 - DNA, 20 bp, Artificial Sequence
  Synthetic oligonucleotide; AAGAAT chr11 5389328 5389347 5389344 +
tgtgaatgttagtgaagctg

SEQ ID NO: 60512 - DNA, 20 bp, Artificial Sequence
  Synthetic oligonucleotide; AGGAAT chr11 5389375 5389394 5389391 +
tattttcagctcaatccccg

SEQ ID NO: 60513 - DNA, 20 bp, Artificial Sequence
  Synthetic oligonucleotide; CTGGAT chr11 5389467 5389486 5389483 +
attctatctcaccagctttc

SEQ ID NO: 60514 - DNA, 20 bp, Artificial Sequence
  Synthetic oligonucleotide; CTGGAT chr11 5389489 5389508 5389505 +
ggattggaaggcatcaaaca

SEQ ID NO: 60515 - DNA, 20 bp, Artificial Sequence
  Synthetic oligonucleotide; GGGGAT chr11 5389660 5389679 5389676 +
tccacgttgcccaccactat

SEQ ID NO: 60516 - DNA, 20 bp, Artificial Sequence
  Synthetic oligonucleotide; TGGAGT chr11 5389743 5389762 5389759 +
catccactctttttccttca

SEQ ID NO: 60517 - DNA, 20 bp, Artificial Sequence
  Synthetic oligonucleotide; GTGGAT chr11 5389920 5389939 5389936 +
cctgaaggcttttccctact

SEQ ID NO: 60518 - DNA, 20 bp, Artificial Sequence
  Synthetic oligonucleotide; ATGAGT chr11 5390356 5390375 5390372 +
ggtcttaaaaaggccagtaa

SEQ ID NO: 60519 - DNA, 20 bp, Artificial Sequence
  Synthetic oligonucleotide; TGGAGT chr11 5390421 5390440 5390437 +
cccaaattggactgaaaatt

SEQ ID NO: 60520 - DNA, 20 bp, Artificial Sequence
  Synthetic oligonucleotide; TTGAGT chr11 5390428 5390447 5390444 +
tggactgaaaatttggagta

SEQ ID NO: 60521 - DNA, 20 bp, Artificial Sequence
  Synthetic oligonucleotide; TGGAGT chr11 5390497 5390516 5390513 +
aatatgggcaaatttatgtc

SEQ ID NO: 60522 - DNA, 20 bp, Artificial Sequence
  Synthetic oligonucleotide; ACGAGT chr11 5391199 5391218 5391215 +
tggctgatcagcctgtccct

SEQ ID NO: 60523 - DNA, 20 bp, Artificial Sequence
  Synthetic oligonucleotide; AGGGGT chr11 5391224 5391243 5391240 +
tgactaaatgcaatccttgc

SEQ ID NO: 60524 - DNA, 20 bp, Artificial Sequence
  Synthetic oligonucleotide; TAGAAT chr11 5391400 5391419 5391416 +
aggtgtgtgcatgtgtccat

SEQ ID NO: 60525 - DNA, 20 bp, Artificial Sequence
  Synthetic oligonucleotide; AGGAAT chr11 5391426 5391445 5391442 +
gactaaatcaagatccctgg

SEQ ID NO: 60526 - DNA, 20 bp, Artificial Sequence
  Synthetic oligonucleotide; AGGGAT chr11 5391537 5391556 5391553 +
ggacatatagatacataaag

SEQ ID NO: 60527 - DNA, 20 bp, Artificial Sequence
  Synthetic oligonucleotide; CTGGAT chr11 5391681 5391700 5391697 +
ttctactttactcaggccct

SEQ ID NO: 60528 - DNA, 20 bp, Artificial Sequence
  Synthetic oligonucleotide; GAGGAT chr11 5391779 5391798 5391795 +
actttgggagaccaaggtgg

SEQ ID NO: 60529 - DNA, 20 bp, Artificial Sequence
  Synthetic oligonucleotide; AGGAGT chr11 5391796 5391815 5391812 +
tgggaggattgctgaaggcc

SEQ ID NO: 60530 - DNA, 20 bp, Artificial Sequence
  Synthetic oligonucleotide; TTGAGT chr11 5391831 5391850 5391847 +
acttcaggcaagaagattac

SEQ ID NO: 60531 - DNA, 20 bp, Artificial Sequence
  Synthetic oligonucleotide; AGGAGT chr11 5391839 5391858 5391855 +
caagaagattacttgagtcc

SEQ ID NO: 60532 - DNA, 20 bp, Artificial Sequence
  Synthetic oligonucleotide; AAGAAT chr11 5391958 5391977 5391974 +
acctgggaggctgaggtggg

SEQ ID NO: 60533 - DNA, 20 bp, Artificial Sequence
  Synthetic oligonucleotide; CTGGGT chr11 5392014 5392033 5392030 +
agccataatcacactactgc

SEQ ID NO: 60534 - DNA, 20 bp, Artificial Sequence
  Synthetic oligonucleotide; GTGGGT chr11 5392167 5392186 5392183 +
ggtatctcatgtttgtatgt

SEQ ID NO: 60535 - DNA, 20 bp, Artificial Sequence
  Synthetic oligonucleotide; TAGAAT chr11 5392322 5392341 5392338 +
tcaatagcagttccgagact

SEQ ID NO: 60536 - DNA, 20 bp, Artificial Sequence
  Synthetic oligonucleotide; TAGAAT chr11 5392377 5392396 5392393 +
attctatagatctcatttgg

SEQ ID NO: 60537 - DNA, 20 bp, Artificial Sequence
  Synthetic oligonucleotide; TGGGGT chr11 5392382 5392401 5392398 +
atagatctcatttggtagaa

SEQ ID NO: 60538 - DNA, 20 bp, Artificial Sequence
  Synthetic oligonucleotide; TAGGAT chr11 5392398 5392417 5392414 +
agaatggggtacaaaaaatt

SEQ ID NO: 60539 - DNA, 20 bp, Artificial Sequence
  Synthetic oligonucleotide; TTGGAT chr11 5392404 5392423 5392420 +
gggtacaaaaaatttaggat

SEQ ID NO: 60540 - DNA, 20 bp, Artificial Sequence
  Synthetic oligonucleotide; ACGAAT chr11 5392575 5392594 5392591 +
atatcttaatttgttactaa

SEQ ID NO: 60541 - DNA, 20 bp, Artificial Sequence
  Synthetic oligonucleotide; AAGAAT chr11 5392585 5392604 5392601 +
ttgttactaaacgaatattg

SEQ ID NO: 60542 - DNA, 20 bp, Artificial Sequence
  Synthetic oligonucleotide; TAGAGT chr11 5392590 5392609 5392606 +
actaaacgaatattgaagaa

SEQ ID NO: 60543 - DNA, 20 bp, Artificial Sequence
  Synthetic oligonucleotide; GCGGGT chr11 5392662 5392681 5392678 +
cagcactctgggaggccgag

SEQ ID NO: 60544 - DNA, 20 bp, Artificial Sequence
  Synthetic oligonucleotide; GTGGAT chr11 5392666 5392685 5392682 +
actctgggaggccgaggcgg

SEQ ID NO: 60545 - DNA, 20 bp, Artificial Sequence
  Synthetic oligonucleotide; CAGAAT chr11 5392800 5392819 5392816 +
tactcaggaggctggggcag

SEQ ID NO: 60546 - DNA, 20 bp, Artificial Sequence
  Synthetic oligonucleotide; CAGAAT chr11 5392966 5392985 5392982 +
aaagaggtattttcacatac

SEQ ID NO: 60547 - DNA, 20 bp, Artificial Sequence
  Synthetic oligonucleotide; TAGGAT chr11 5393100 5393119 5393116 +
taaatgataaattaaaaatt

SEQ ID NO: 60548 - DNA, 20 bp, Artificial Sequence
  Synthetic oligonucleotide; GTGAAT chr11 5393205 5393224 5393221 +
tgtgttgaactatttaataa

SEQ ID NO: 60549 - DNA, 20 bp, Artificial Sequence
  Synthetic oligonucleotide; AAGAAT chr11 5393241 5393260 5393257 +
gtgttattgttcataatttt

SEQ ID NO: 60550 - DNA, 20 bp, Artificial Sequence
  Synthetic oligonucleotide; TAGAAT chr11 5393265 5393284 5393281 +
atgtaagcatacaaaatgtc

SEQ ID NO: 60551 - DNA, 20 bp, Artificial Sequence
  Synthetic oligonucleotide; CTGAGT chr11 5393654 5393673 5393670 +
ttaactcacggtagagaggg

SEQ ID NO: 60552 - DNA, 20 bp, Artificial Sequence
  Synthetic oligonucleotide; TAGAAT chr11 5393968 5393987 5393984 +
taactttttgttccctttcc

SEQ ID NO: 60553 - DNA, 20 bp, Artificial Sequence
  Synthetic oligonucleotide; AAGAGT chr11 5394072 5394091 5394088 +
tttttaatagacttgatttt

SEQ ID NO: 60554 - DNA, 20 bp, Artificial Sequence
  Synthetic oligonucleotide; CTGAGT chr11 5394110 5394129 5394126 +
gaaaaactcagtagaaggta

SEQ ID NO: 60555 - DNA, 20 bp, Artificial Sequence
  Synthetic oligonucleotide; ATGGAT chr11 5394225 5394244 5394241 +
cttgacaataaccttatgag

SEQ ID NO: 60556 - DNA, 20 bp, Artificial Sequence
  Synthetic oligonucleotide; CAGAAT chr11 5394589 5394608 5394605 +
gctcatgtaattgaagttca

SEQ ID NO: 60557 - DNA, 20 bp, Artificial Sequence
  Synthetic oligonucleotide; TTGAAT chr11 5394666 5394685 5394682 +
tatctaaaatgttacctatt

SEQ ID NO: 60558 - DNA, 20 bp, Artificial Sequence
  Synthetic oligonucleotide; CAGAGT chr11 5394802 5394821 5394818 +
agacaatgctttctgaaaga

SEQ ID NO: 60559 - DNA, 20 bp, Artificial Sequence
  Synthetic oligonucleotide; GTGAAT chr11 5394875 5394894 5394891 +
gatctttacatacttgctca

SEQ ID NO: 60560 - DNA, 20 bp, Artificial Sequence
  Synthetic oligonucleotide; GTGAAT chr11 5394885 5394904 5394901 +
tacttgctcagtgaatgaca

SEQ ID NO: 60561 - DNA, 20 bp, Artificial Sequence
  Synthetic oligonucleotide; GAGGAT chr11 5394958 5394977 5394974 +
aagaaaagaaagacaaaaaa

SEQ ID NO: 60562 - DNA, 20 bp, Artificial Sequence
  Synthetic oligonucleotide; AAGGAT chr11 5395021 5395040 5395037 +
gctggggagagaagacagtc

SEQ ID NO: 60563 - DNA, 20 bp, Artificial Sequence
  Synthetic oligonucleotide; GAGGAT chr11 5395118 5395137 5395134 +
tctcaaatgctttggtctag

SEQ ID NO: 60564 - DNA, 20 bp, Artificial Sequence
  Synthetic oligonucleotide; CTGAGT chr11 5395246 5395265 5395262 +
agcccacgtagaacagcatc

SEQ ID NO: 60565 - DNA, 20 bp, Artificial Sequence
  Synthetic oligonucleotide; TGGAGT chr11 5395271 5395290 5395287 +
tcaaatggaagatgctggca

SEQ ID NO: 60566 - DNA, 20 bp, Artificial Sequence
  Synthetic oligonucleotide; GTGGAT chr11 5395346 5395365 5395362 +
tgctgaaggtcctttgtttt

SEQ ID NO: 60567 - DNA, 20 bp, Artificial Sequence
  Synthetic oligonucleotide; TGGAGT chr11 5395364 5395383 5395380 +
ttgtggataaaggaagtcat

SEQ ID NO: 60568 - DNA, 20 bp, Artificial Sequence
  Synthetic oligonucleotide; CAGGGT chr11 5395407 5395426 5395423 +
ttatctagcatgactatatg

SEQ ID NO: 60569 - DNA, 20 bp, Artificial Sequence
  Synthetic oligonucleotide; TGGAAT chr11 5395415 5395434 5395431 +
catgactatatgcagggtta

SEQ ID NO: 60570 - DNA, 20 bp, Artificial Sequence
  Synthetic oligonucleotide; GAGAAT chr11 5395538 5395557 5395554 +
ttactgggctatgccttgta

SEQ ID NO: 60571 - DNA, 20 bp, Artificial Sequence
  Synthetic oligonucleotide; CAGGGT chr11 5395548 5395567 5395564 +
atgccttgtagagaatgata

SEQ ID NO: 60572 - DNA, 20 bp, Artificial Sequence
  Synthetic oligonucleotide; CAGAGT chr11 5395615 5395634 5395631 +
tgatgaagcttctaacattt

SEQ ID NO: 60573 - DNA, 20 bp, Artificial Sequence
  Synthetic oligonucleotide; AAGGAT chr11 5395751 5395770 5395767 +
actttgccaaagccatatgg

SEQ ID NO: 60574 - DNA, 20 bp, Artificial Sequence
  Synthetic oligonucleotide; TGGAAT chr11 5395869 5395888 5395885 +
ctcactgcaacattgctcac

SEQ ID NO: 60575 - DNA, 20 bp, Artificial Sequence
  Synthetic oligonucleotide; TTGAGT chr11 5395906 5395925 5395922 +
caactaataaaatgtgtcta

SEQ ID NO: 60576 - DNA, 20 bp, Artificial Sequence
  Synthetic oligonucleotide; ATGAAT chr11 5395947 5395966 5395963 +
tactccatttaaaattgcat

SEQ ID NO: 60577 - DNA, 20 bp, Artificial Sequence
  Synthetic oligonucleotide; TGGAGT chr11 5395967 5395986 5395983 +
atgaatggctctctaatcta

SEQ ID NO: 60578 - DNA, 20 bp, Artificial Sequence
  Synthetic oligonucleotide; TAGAAT chr11 5395976 5395995 5395992 +
tctctaatctatggagtagg

SEQ ID NO: 60579 - DNA, 20 bp, Artificial Sequence
  Synthetic oligonucleotide; TAGAGT chr11 5396037 5396056 5396053 +
tcagatactttgcacaatca

SEQ ID NO: 60580 - DNA, 20 bp, Artificial Sequence
  Synthetic oligonucleotide; AGGGAT chr11 5396145 5396164 5396161 +
atgtgcctaggctgcaagac

SEQ ID NO: 60581 - DNA, 20 bp, Artificial Sequence
  Synthetic oligonucleotide; CAGGAT chr11 5396355 5396374 5396371 +
aagcaacttcagcaaagtct

SEQ ID NO: 60582 - DNA, 20 bp, Artificial Sequence
  Synthetic oligonucleotide; GTGAGT chr11 5396417 5396436 5396433 +
acaccaataacagacaaaca

SEQ ID NO: 60583 - DNA, 20 bp, Artificial Sequence
  Synthetic oligonucleotide; GAGAAT chr11 5396449 5396468 5396465 +
ccattcacaattgcttcaga

SEQ ID NO: 60584 - DNA, 20 bp, Artificial Sequence
  Synthetic oligonucleotide; AGGAAT chr11 5396464 5396483 5396480 +
tcagagagaatataatacct

SEQ ID NO: 60585 - DNA, 20 bp, Artificial Sequence
  Synthetic oligonucleotide; AGGGAT chr11 5396480 5396499 5396496 +
acctaggaatccaacttaca

SEQ ID NO: 60586 - DNA, 20 bp, Artificial Sequence
  Synthetic oligonucleotide; ATGGAT chr11 5396567 5396586 5396583 +
tggaagaacattccatgctc

SEQ ID NO: 60587 - DNA, 20 bp, Artificial Sequence
  Synthetic oligonucleotide; CAGAAT chr11 5396665 5396684 5396681 +
gctaccaatgactttcttca

SEQ ID NO: 60588 - DNA, 20 bp, Artificial Sequence
  Synthetic oligonucleotide; AAGGAT chr11 5396934 5396953 5396950 +
agaaaaacaagaaatgggga

SEQ ID NO: 60589 - DNA, 20 bp, Artificial Sequence
  Synthetic oligonucleotide; CTGGAT chr11 5396997 5397016 5397013 +
ccaaatgtaggaagctgaaa

SEQ ID NO: 60590 - DNA, 20 bp, Artificial Sequence
  Synthetic oligonucleotide; ATGGAT chr11 5397038 5397057 5397054 +
tatacaaaaattaactcaag

SEQ ID NO: 60591 - DNA, 20 bp, Artificial Sequence
  Synthetic oligonucleotide; TGGGAT chr11 5397183 5397202 5397199 +
caaaagccaaaattcactaa

SEQ ID NO: 60592 - DNA, 20 bp, Artificial Sequence
  Synthetic oligonucleotide; CAGAGT chr11 5397233 5397252 5397249 +
acagcaaaagaaactaccat

SEQ ID NO: 60593 - DNA, 20 bp, Artificial Sequence
  Synthetic oligonucleotide; CAGAAT chr11 5397305 5397324 5397321 +
tctgacaaagggctaatatc

SEQ ID NO: 60594 - DNA, 20 bp, Artificial Sequence
  Synthetic oligonucleotide; AAGGAT chr11 5397368 5397387 5397384 +
accccatcaaaaagtgggca

SEQ ID NO: 60595 - DNA, 20 bp, Artificial Sequence
  Synthetic oligonucleotide; TAGAAT chr11 5397499 5397518 5397515 +
agataccatctcacaccagt

SEQ ID NO: 60596 - DNA, 20 bp, Artificial Sequence
  Synthetic oligonucleotide; GAGGAT chr11 5397543 5397562 5397559 +
aggaaacaacaggtgctgga

SEQ ID NO: 60597 - DNA, 20 bp, Artificial Sequence
  Synthetic oligonucleotide; AGGGAT chr11 5397632 5397651 5397648 +
agtcagtgtggtgattcctc

SEQ ID NO: 60598 - DNA, 20 bp, Artificial Sequence
  Synthetic oligonucleotide; CTGGGT chr11 5397677 5397696 5397693 +
ttgacccagccatcccatta

SEQ ID NO: 60599 - DNA, 20 bp, Artificial Sequence
  Synthetic oligonucleotide; AAGGAT chr11 5397692 5397711 5397708 +
cattactgggtatacaccca

SEQ ID NO: 60600 - DNA, 20 bp, Artificial Sequence
  Synthetic oligonucleotide; CTGGAT chr11 5397802 5397821 5397818 +
aaatgtccaacaatgataga

SEQ ID NO: 60601 - DNA, 20 bp, Artificial Sequence
  Synthetic oligonucleotide; TGGAAT chr11 5397834 5397853 5397850 +
aatgtggcacatatacacca

SEQ ID NO: 60602 - DNA, 20 bp, Artificial Sequence
  Synthetic oligonucleotide; ATGAGT chr11 5397861 5397880 5397877 +
ctatgcagccataaaaaatg

SEQ ID NO: 60603 - DNA, 20 bp, Artificial Sequence
  Synthetic oligonucleotide; ATGGAT chr11 5397886 5397905 5397902 +
ttcatgtcctttgtagggac

SEQ ID NO: 60604 - DNA, 20 bp, Artificial Sequence
  Synthetic oligonucleotide; TGGGGT chr11 5398031 5398050 5398047 +
tcacacaccggggcctgttg

SEQ ID NO: 60605 - DNA, 20 bp, Artificial Sequence
  Synthetic oligonucleotide; AGGGAT chr11 5398050 5398069 5398066 +
gtggggtgggaggagggggc

SEQ ID NO: 60606 - DNA, 20 bp, Artificial Sequence
  Synthetic oligonucleotide; GTGAGT chr11 5398086 5398105 5398102 +
gatatacctaatgttaaatg

SEQ ID NO: 60607 - DNA, 20 bp, Artificial Sequence
  Synthetic oligonucleotide; ATGGGT chr11 5398094 5398113 5398110 +
taatgttaaatggtgagtta

SEQ ID NO: 60608 - DNA, 20 bp, Artificial Sequence
  Synthetic oligonucleotide; CTGGAT chr11 5398234 5398253 5398250 +
atattagttatttaaatatg

SEQ ID NO: 60609 - DNA, 20 bp, Artificial Sequence
  Synthetic oligonucleotide; CTGGAT chr11 5398306 5398325 5398322 +
gcttgtttcccttaggttct

SEQ ID NO: 60610 - DNA, 20 bp, Artificial Sequence
  Synthetic oligonucleotide; CTGGGT chr11 5398336 5398355 5398352 +
agagaggctaatgtaattac

SEQ ID NO: 60611 - DNA, 20 bp, Artificial Sequence
  Synthetic oligonucleotide; ATGAAT chr11 5398449 5398468 5398465 +
agccccaggactaagaagat

SEQ ID NO: 60612 - DNA, 20 bp, Artificial Sequence
  Synthetic oligonucleotide; GTGAGT chr11 5398528 5398547 5398544 +
agaggccagtttcacttgtg

SEQ ID NO: 60613 - DNA, 20 bp, Artificial Sequence
  Synthetic oligonucleotide; TTGAAT chr11 5398591 5398610 5398607 +
gtctccacccaaatttcata

SEQ ID NO: 60614 - DNA, 20 bp, Artificial Sequence
  Synthetic oligonucleotide; TTGGAT chr11 5398648 5398667 5398664 +
agggaccaggtgggagatta

SEQ ID NO: 60615 - DNA, 20 bp, Artificial Sequence
  Synthetic oligonucleotide; CTGAGT chr11 5398690 5398709 5398706 +
cccatgcagttctcgtgata

SEQ ID NO: 60616 - DNA, 20 bp, Artificial Sequence
  Synthetic oligonucleotide; GTGAGT chr11 5398694 5398713 5398710 +
tgcagttctcgtgatactga

SEQ ID NO: 60617 - DNA, 20 bp, Artificial Sequence
  Synthetic oligonucleotide; GTGAGT chr11 5398841 5398860 5398857 +
ctccccagctatgtggaaat

SEQ ID NO: 60618 - DNA, 20 bp, Artificial Sequence
  Synthetic oligonucleotide; GAGAAT chr11 5398907 5398926 5398923 +
tagtatctttagagcagtgt

SEQ ID NO: 60619 - DNA, 20 bp, Artificial Sequence
  Synthetic oligonucleotide; AGGAAT chr11 5399053 5399072 5399069 +
aacctgtctggcagaaggag

SEQ ID NO: 60620 - DNA, 20 bp, Artificial Sequence
  Synthetic oligonucleotide; ATGAAT chr11 5399113 5399132 5399129 +
caaaaacaccagagcacatc

SEQ ID NO: 60621 - DNA, 20 bp, Artificial Sequence
  Synthetic oligonucleotide; TTGGGT chr11 5399148 5399167 5399164 +
agttttgccatcatattatc

SEQ ID NO: 60622 - DNA, 20 bp, Artificial Sequence
  Synthetic oligonucleotide; CTGAGT chr11 5399239 5399258 5399255 +
gtttacctcacagatgtggt

SEQ ID NO: 60623 - DNA, 20 bp, Artificial Sequence
  Synthetic oligonucleotide; GAGAAT chr11 5399318 5399337 5399334 +
gctgactgtgattgactcct

SEQ ID NO: 60624 - DNA, 20 bp, Artificial Sequence
  Synthetic oligonucleotide; TAGAGT chr11 5399338 5399357 5399354 +
gagaattcctgaaagagata

SEQ ID NO: 60625 - DNA, 20 bp, Artificial Sequence
  Synthetic oligonucleotide; GAGAAT chr11 5399347 5399366 5399363 +
tgaaagagatatagagtgga

SEQ ID NO: 60626 - DNA, 20 bp, Artificial Sequence
  Synthetic oligonucleotide; AGGGGT chr11 5399519 5399538 5399535 +
ctccaattctgtccagctcc

SEQ ID NO: 60627 - DNA, 20 bp, Artificial Sequence
  Synthetic oligonucleotide; GAGAAT chr11 5399657 5399676 5399673 +
caaacaaatcctaaactcag

SEQ ID NO: 60628 - DNA, 20 bp, Artificial Sequence
  Synthetic oligonucleotide; AAGGAT chr11 5399738 5399757 5399754 +
ctctggagatggaaactgag

SEQ ID NO: 60629 - DNA, 20 bp, Artificial Sequence
  Synthetic oligonucleotide; CAGGGT chr11 5399902 5399921 5399918 +
gaggtgtggcaggcaagata

SEQ ID NO: 60630 - DNA, 20 bp, Artificial Sequence
  Synthetic oligonucleotide; TGGGAT chr11 5399912 5399931 5399928 +
aggcaagatacagggtgcag

SEQ ID NO: 60631 - DNA, 20 bp, Artificial Sequence
  Synthetic oligonucleotide; AAGGAT chr11 5399919 5399938 5399935 +
atacagggtgcagtgggatc

SEQ ID NO: 60632 - DNA, 20 bp, Artificial Sequence
  Synthetic oligonucleotide; CTGAAT chr11 5399949 5399968 5399952 -
tcttcccgtgtgctgcctta

SEQ ID NO: 60633 - DNA, 20 bp, Artificial Sequence
  Synthetic oligonucleotide; CCGGAT chr11 5399896 5399915 5399899 -
gcctgccacacctcaaataa

SEQ ID NO: 60634 - DNA, 20 bp, Artificial Sequence
  Synthetic oligonucleotide; TAGAGT chr11 5399855 5399874 5399858 -
tcttgactgatacttgaaac

SEQ ID NO: 60635 - DNA, 20 bp, Artificial Sequence
  Synthetic oligonucleotide; CAGAGT chr11 5399743 5399762 5399746 -
tccttctcagtttccatctc

SEQ ID NO: 60636 - DNA, 20 bp, Artificial Sequence
  Synthetic oligonucleotide; AAGGGT chr11 5399723 5399742 5399726 -
cagagtctctaccgccagat

SEQ ID NO: 60637 - DNA, 20 bp, Artificial Sequence
  Synthetic oligonucleotide; CTGAGT chr11 5399677 5399696 5399680 -
cttaaaacacaatcattctc

SEQ ID NO: 60638 - DNA, 20 bp, Artificial Sequence
  Synthetic oligonucleotide; TAGGAT chr11 5399670 5399689 5399673 -
cacaatcattctcctgagtt

SEQ ID NO: 60639 - DNA, 20 bp, Artificial Sequence
  Synthetic oligonucleotide; AGGGAT chr11 5399626 5399645 5399629 -
ttagcttgaaaggttacaaa

SEQ ID NO: 60640 - DNA, 20 bp, Artificial Sequence
  Synthetic oligonucleotide; TAGAAT chr11 5399570 5399589 5399573 -
acaacaaatcagaaaaaaag

SEQ ID NO: 60641 - DNA, 20 bp, Artificial Sequence
  Synthetic oligonucleotide; CAGAAT chr11 5399530 5399549 5399533 -
actgtacccctggagctgga

SEQ ID NO: 60642 - DNA, 20 bp, Artificial Sequence
  Synthetic oligonucleotide; GTGAAT chr11 5399519 5399538 5399522 -
ggagctggacagaattggag

SEQ ID NO: 60643 - DNA, 20 bp, Artificial Sequence
  Synthetic oligonucleotide; GTGAAT chr11 5399385 5399404 5399388 -
atgtgagcctttagcaacca

SEQ ID NO: 60644 - DNA, 20 bp, Artificial Sequence
  Synthetic oligonucleotide; AGGAAT chr11 5399348 5399367 5399351 -
ctccactctatatctctttc

SEQ ID NO: 60645 - DNA, 20 bp, Artificial Sequence
  Synthetic oligonucleotide; AGGAGT chr11 5399338 5399357 5399341 -
tatctctttcaggaattctc

SEQ ID NO: 60646 - DNA, 20 bp, Artificial Sequence
  Synthetic oligonucleotide; AAGAAT chr11 5399231 5399250 5399234 -
tgtgaggtaaacaaggagac

SEQ ID NO: 60647 - DNA, 20 bp, Artificial Sequence
  Synthetic oligonucleotide; GTGAGT chr11 5399181 5399200 5399184 -
aaaccagacataagcatttt

SEQ ID NO: 60648 - DNA, 20 bp, Artificial Sequence
  Synthetic oligonucleotide; AAGAAT chr11 5399143 5399162 5399146 -
tatgatggcaaaactatttc

SEQ ID NO: 60649 - DNA, 20 bp, Artificial Sequence
  Synthetic oligonucleotide; TAGGAT chr11 5399088 5399107 5399091 -
ttttccatctgccaccaatt

SEQ ID NO: 60650 - DNA, 20 bp, Artificial Sequence
  Synthetic oligonucleotide; TGGGGT chr11 5398992 5399011 5398995 -
aagggcttcacactgtgaca

SEQ ID NO: 60651 - DNA, 20 bp, Artificial Sequence
  Synthetic oligonucleotide; GGGAGT chr11 5398985 5399004 5398988 -
tcacactgtgacatggggtt

SEQ ID NO: 60652 - DNA, 20 bp, Artificial Sequence
  Synthetic oligonucleotide; CTGAAT chr11 5398978 5398997 5398981 -
gtgacatggggttgggagtc

SEQ ID NO: 60653 - DNA, 20 bp, Artificial Sequence
  Synthetic oligonucleotide; GGGGAT chr11 5398950 5398969 5398953 -
tgcttcagaaggcagggctt

SEQ ID NO: 60654 - DNA, 20 bp, Artificial Sequence
  Synthetic oligonucleotide; CTGGGT chr11 5398900 5398919 5398903 -
tctaaagatactacctgaga

SEQ ID NO: 60655 - DNA, 20 bp, Artificial Sequence
  Synthetic oligonucleotide; GAGAGT chr11 5398775 5398794 5398778 -
ttacttggtggcaggcaaga

SEQ ID NO: 60656 - DNA, 20 bp, Artificial Sequence
  Synthetic oligonucleotide; AGGGAT chr11 5398636 5398655 5398639 -
tggtccctcccccgacatat

SEQ ID NO: 60657 - DNA, 20 bp, Artificial Sequence
  Synthetic oligonucleotide; GGGGAT chr11 5398627 5398646 5398630 -
ccccgacatatagggattat

SEQ ID NO: 60658 - DNA, 20 bp, Artificial Sequence
  Synthetic oligonucleotide; TTGGGT chr11 5398603 5398622 5398606 -
attacaattcaatatgaaat

SEQ ID NO: 60659 - DNA, 20 bp, Artificial Sequence
  Synthetic oligonucleotide; AGGGAT chr11 5398573 5398592 5398576 -
acacagagccaagccatatc

SEQ ID NO: 60660 - DNA, 20 bp, Artificial Sequence
  Synthetic oligonucleotide; TGGGAT chr11 5398518 5398537 5398521 -
actggcctctgagcctcagg

SEQ ID NO: 60661 - DNA, 20 bp, Artificial Sequence
  Synthetic oligonucleotide; TGGAAT chr11 5398450 5398469 5398453 -
tatcttcttagtcctggggc

SEQ ID NO: 60662 - DNA, 20 bp, Artificial Sequence
  Synthetic oligonucleotide; CAGAGT chr11 5398418 5398437 5398421 -
cattttttgaaaaagctgat

SEQ ID NO: 60663 - DNA, 20 bp, Artificial Sequence
  Synthetic oligonucleotide; AGGAGT chr11 5398408 5398427 5398411 -
aaaagctgatcagagtctct

SEQ ID NO: 60664 - DNA, 20 bp, Artificial Sequence
  Synthetic oligonucleotide; TAGAGT chr11 5398403 5398422 5398406 -
ctgatcagagtctctaggag

SEQ ID NO: 60665 - DNA, 20 bp, Artificial Sequence
  Synthetic oligonucleotide; TAGAGT chr11 5398299 5398318 5398302 -
aagggaaacaagcaaagata

SEQ ID NO: 60666 - DNA, 20 bp, Artificial Sequence
  Synthetic oligonucleotide; ATGAGT chr11 5398278 5398297 5398281 -
agagtcagtatctttgtgaa

SEQ ID NO: 60667 - DNA, 20 bp, Artificial Sequence
  Synthetic oligonucleotide; TAGGGT chr11 5398186 5398205 5398189 -
tttgttatacttttaagttt

SEQ ID NO: 60668 - DNA, 20 bp, Artificial Sequence
  Synthetic oligonucleotide; ATGAGT chr11 5397984 5398003 5397987 -
tcattgttcagttcccacct

SEQ ID NO: 60669 - DNA, 20 bp, Artificial Sequence
  Synthetic oligonucleotide; GAGAAT chr11 5397934 5397953 5397937 -
tgtccttgtgatagtttgct

SEQ ID NO: 60670 - DNA, 20 bp, Artificial Sequence
  Synthetic oligonucleotide; TTGGGT chr11 5397804 5397823 5397807 -
agtctatcattgttggacat

SEQ ID NO: 60671 - DNA, 20 bp, Artificial Sequence
  Synthetic oligonucleotide; GTGAAT chr11 5397777 5397796 5397780 -
ggttccaagtctttgctatt

SEQ ID NO: 60672 - DNA, 20 bp, Artificial Sequence
  Synthetic oligonucleotide; TTGGGT chr11 5397713 5397732 5397716 -
gcagcatgatttataatcct

SEQ ID NO: 60673 - DNA, 20 bp, Artificial Sequence
  Synthetic oligonucleotide; TGGGAT chr11 5397694 5397713 5397697 -
tttgggtgtatacccagtaa

SEQ ID NO: 60674 - DNA, 20 bp, Artificial Sequence
  Synthetic oligonucleotide; CTGGGT chr11 5397686 5397705 5397689 -
tatacccagtaatgggatgg

SEQ ID NO: 60675 - DNA, 20 bp, Artificial Sequence
  Synthetic oligonucleotide; AGGAAT chr11 5397651 5397670 5397654 -
tttctagttctagatccctg

SEQ ID NO: 60676 - DNA, 20 bp, Artificial Sequence
  Synthetic oligonucleotide; TGGGGT chr11 5397374 5397393 5397377 -
atcctttgcccactttttga

SEQ ID NO: 60677 - DNA, 20 bp, Artificial Sequence
  Synthetic oligonucleotide; TTGAGT chr11 5397346 5397365 5397349 -
tttttctcttgtaaatttgt

SEQ ID NO: 60678 - DNA, 20 bp, Artificial Sequence
  Synthetic oligonucleotide; CTGGAT chr11 5397328 5397347 5397331 -
gtttgagttcattgtagatt

SEQ ID NO: 60679 - DNA, 20 bp, Artificial Sequence
  Synthetic oligonucleotide; ATGAGT chr11 5397306 5397325 5397309 -
ggatattagccctttgtcag

SEQ ID NO: 60680 - DNA, 20 bp, Artificial Sequence
  Synthetic oligonucleotide; GTGAAT chr11 5397200 5397219 5397203 -
agtttaattagatcccatta

SEQ ID NO: 60681 - DNA, 20 bp, Artificial Sequence
  Synthetic oligonucleotide; CTGAAT chr11 5397131 5397150 5397134 -
tccatgcccatgcctatgtc

SEQ ID NO: 60682 - DNA, 20 bp, Artificial Sequence
  Synthetic oligonucleotide; TAGAGT chr11 5397104 5397123 5397107 -
gtattgcttaggttttcttc

SEQ ID NO: 60683 - DNA, 20 bp, Artificial Sequence
  Synthetic oligonucleotide; TTGAGT chr11 5397057 5397076 5397060 -
atttaagtctttaatccatc

SEQ ID NO: 60684 - DNA, 20 bp, Artificial Sequence
  Synthetic oligonucleotide; AGGGAT chr11 5397027 5397046 5397030 -
ttttgtataaggtgtaagga

SEQ ID NO: 60685 - DNA, 20 bp, Artificial Sequence
  Synthetic oligonucleotide; GGGAAT chr11 5396964 5396983 5396967 -
ccagcaccatttattaaaca

SEQ ID NO: 60686 - DNA, 20 bp, Artificial Sequence
  Synthetic oligonucleotide; TAGGAT chr11 5396756 5396775 5396759 -
ccagctttgttcttttggct

SEQ ID NO: 60687 - DNA, 20 bp, Artificial Sequence
  Synthetic oligonucleotide; GGGGAT chr11 5396660 5396679 5396663 -
aaagtcattggtagcttgat

SEQ ID NO: 60688 - DNA, 20 bp, Artificial Sequence
  Synthetic oligonucleotide; TTGAAT chr11 5396650 5396669 5396653 -
gtagcttgatggggatggca

SEQ ID NO: 60689 - DNA, 20 bp, Artificial Sequence
  Synthetic oligonucleotide; TGGAAT chr11 5396582 5396601 5396585 -
tttcttcctatccatgagca

SEQ ID NO: 60690 - DNA, 20 bp, Artificial Sequence
  Synthetic oligonucleotide; TTGGAT chr11 5396494 5396513 5396497 -
tccttcacatcccttgtaag

SEQ ID NO: 60691 - DNA, 20 bp, Artificial Sequence
  Synthetic oligonucleotide; GTGAAT chr11 5396457 5396476 5396460 -
atattctctctgaagcaatt

SEQ ID NO: 60692 - DNA, 20 bp, Artificial Sequence
  Synthetic oligonucleotide; GGGAGT chr11 5396451 5396470 5396454 -
tctctgaagcaattgtgaat

SEQ ID NO: 60693 - DNA, 20 bp, Artificial Sequence
  Synthetic oligonucleotide; AAGAAT chr11 5396415 5396434 5396418 -
tttgtctgttattggtgtat

SEQ ID NO: 60694 - DNA, 20 bp, Artificial Sequence
  Synthetic oligonucleotide; GGGGAT chr11 5396345 5396364 5396348 -
gaagttgcttatcagcttaa

SEQ ID NO: 60695 - DNA, 20 bp, Artificial Sequence
  Synthetic oligonucleotide; TGGGGT chr11 5396324 5396343 5396327 -
gggattttgggctgagacaa

SEQ ID NO: 60696 - DNA, 20 bp, Artificial Sequence
  Synthetic oligonucleotide; TTGAAT chr11 5396257 5396276 5396260 -
ttgactttctctttacataa

SEQ ID NO: 60697 - DNA, 20 bp, Artificial Sequence
  Synthetic oligonucleotide; TTGAAT chr11 5396196 5396215 5396199 -
ccagaacttccaacactatg

SEQ ID NO: 60698 - DNA, 20 bp, Artificial Sequence
  Synthetic oligonucleotide; AGGAGT chr11 5396190 5396209 5396193 -
cttccaacactatgttgaat

SEQ ID NO: 60699 - DNA, 20 bp, Artificial Sequence
  Synthetic oligonucleotide; TGGAGT chr11 5395954 5395973 5395957 -
cattcatatgcaattttaaa

SEQ ID NO: 60700 - DNA, 20 bp, Artificial Sequence
  Synthetic oligonucleotide; TGGAGT chr11 5395818 5395837 5395821 -
acaatgaagcgtaaggtatt

SEQ ID NO: 60701 - DNA, 20 bp, Artificial Sequence
  Synthetic oligonucleotide; CTGAAT chr11 5395749 5395768 5395752 -
atatggctttggcaaagtta

SEQ ID NO: 60702 - DNA, 20 bp, Artificial Sequence
  Synthetic oligonucleotide; AGGGAT chr11 5395408 5395427 5395411 -
gcatatagtcatgctagata

SEQ ID NO: 60703 - DNA, 20 bp, Artificial Sequence
  Synthetic oligonucleotide; CAGGAT chr11 5395269 5395288 5395272 -
ccagcatcttccatttgact

SEQ ID NO: 60704 - DNA, 20 bp, Artificial Sequence
  Synthetic oligonucleotide; TTGGGT chr11 5395215 5395234 5395218 -
tataaagctgtctctcttcc

SEQ ID NO: 60705 - DNA, 20 bp, Artificial Sequence
  Synthetic oligonucleotide; AGGAAT chr11 5395196 5395215 5395199 -
cttgggtctttggccctcaa

SEQ ID NO: 60706 - DNA, 20 bp, Artificial Sequence
  Synthetic oligonucleotide; ATGAAT chr11 5395167 5395186 5395170 -
cctagatggacgcagacttg

SEQ ID NO: 60707 - DNA, 20 bp, Artificial Sequence
  Synthetic oligonucleotide; AGGGAT chr11 5395154 5395173 5395157 -
agacttgatgaatgtcaaag

SEQ ID NO: 60708 - DNA, 20 bp, Artificial Sequence
  Synthetic oligonucleotide; ATGAGT chr11 5395084 5395103 5395087 -
aaatggaaatttagtgaacc

SEQ ID NO: 60709 - DNA, 20 bp, Artificial Sequence
  Synthetic oligonucleotide; GAGGAT chr11 5395051 5395070 5395054 -
ggaggtatttcagtgagcca

SEQ ID NO: 60710 - DNA, 20 bp, Artificial Sequence
  Synthetic oligonucleotide; TTGGGT chr11 5394998 5395017 5395001 -
caacttcataagaaaattta

SEQ ID NO: 60711 - DNA, 20 bp, Artificial Sequence
  Synthetic oligonucleotide; TTGGGT chr11 5394868 5394887 5394871 -
gtatgtaaagatcacaagct

SEQ ID NO: 60712 - DNA, 20 bp, Artificial Sequence
  Synthetic oligonucleotide; TTGAAT chr11 5394855 5394874 5394858 -
acaagctttgggtcagatat

SEQ ID NO: 60713 - DNA, 20 bp, Artificial Sequence
  Synthetic oligonucleotide; CAGAGT chr11 5394642 5394661 5394645 -
ggaaaacatgtacaaaggct

SEQ ID NO: 60714 - DNA, 20 bp, Artificial Sequence
  Synthetic oligonucleotide; GTGGAT chr11 5394539 5394558 5394542 -
tcaaaggcttagagaggctt

SEQ ID NO: 60715 - DNA, 20 bp, Artificial Sequence
  Synthetic oligonucleotide; CGGGAT chr11 5394524 5394543 5394527 -
ggcttgtggatattaaataa

SEQ ID NO: 60716 - DNA, 20 bp, Artificial Sequence
  Synthetic oligonucleotide; AGGAAT chr11 5394496 5394515 5394499 -
ttgtaaagatttttgcctgc

SEQ ID NO: 60717 - DNA, 20 bp, Artificial Sequence
  Synthetic oligonucleotide; AGGAAT chr11 5394476 5394495 5394479 -
aggaatataggcttgtgctg

SEQ ID NO: 60718 - DNA, 20 bp, Artificial Sequence
  Synthetic oligonucleotide; AGGAAT chr11 5394435 5394454 5394438 -
aagcagatactgtcattagc

SEQ ID NO: 60719 - DNA, 20 bp, Artificial Sequence
  Synthetic oligonucleotide; TTGAAT chr11 5394381 5394400 5394384 -
tttttggtttgttgttgttg

SEQ ID NO: 60720 - DNA, 20 bp, Artificial Sequence
  Synthetic oligonucleotide; ATGGGT chr11 5394268 5394287 5394271 -
tcagtgtacttatctgtaaa

SEQ ID NO: 60721 - DNA, 20 bp, Artificial Sequence
  Synthetic oligonucleotide; TAGAAT chr11 5394196 5394215 5394199 -
cttatagtgtattatgccct

SEQ ID NO: 60722 - DNA, 20 bp, Artificial Sequence
  Synthetic oligonucleotide; CTGAGT chr11 5394121 5394140 5394124 -
aaggtactcagtaccttcta

SEQ ID NO: 60723 - DNA, 20 bp, Artificial Sequence
  Synthetic oligonucleotide; GTGAAT chr11 5394109 5394128 5394112 -
accttctactgagtttttct

SEQ ID NO: 60724 - DNA, 20 bp, Artificial Sequence
  Synthetic oligonucleotide; ACGAGT chr11 5393912 5393931 5393915 -
atggaaaacatggccctgaa

SEQ ID NO: 60725 - DNA, 20 bp, Artificial Sequence
  Synthetic oligonucleotide; AGGAGT chr11 5393892 5393911 5393895 -
acgagtggtcctgtttggag

SEQ ID NO: 60726 - DNA, 20 bp, Artificial Sequence
  Synthetic oligonucleotide; TTGAAT chr11 5393848 5393867 5393851 -
aaaatcagatgcgcttgata

SEQ ID NO: 60727 - DNA, 20 bp, Artificial Sequence
  Synthetic oligonucleotide; GTGAGT chr11 5393663 5393682 5393666 -
agtactcagccctctctacc

SEQ ID NO: 60728 - DNA, 20 bp, Artificial Sequence
  Synthetic oligonucleotide; ATGAAT chr11 5393322 5393341 5393325 -
ttttaataatagtgtatcaa

SEQ ID NO: 60729 - DNA, 20 bp, Artificial Sequence
  Synthetic oligonucleotide; ATGGAT chr11 5393180 5393199 5393183 -
attgatcactgacctaggag

SEQ ID NO: 60730 - DNA, 20 bp, Artificial Sequence
  Synthetic oligonucleotide; ATGAAT chr11 5393057 5393076 5393060 -
gcatttctgagacacagagc

SEQ ID NO: 60731 - DNA, 20 bp, Artificial Sequence
  Synthetic oligonucleotide; AGGAGT chr11 5392908 5392927 5392911 -
ctttttttttgtttttgaga

SEQ ID NO: 60732 - DNA, 20 bp, Artificial Sequence
  Synthetic oligonucleotide; TGGAGT chr11 5392883 5392902 5392886 -
tcttgctctgttgcccaggc

SEQ ID NO: 60733 - DNA, 20 bp, Artificial Sequence
  Synthetic oligonucleotide; CTGGGT chr11 5392839 5392858 5392842 -
ctcactgcaagctccacctc

SEQ ID NO: 60734 - DNA, 20 bp, Artificial Sequence
  Synthetic oligonucleotide; CTGAGT chr11 5392807 5392826 5392810 -
cattctgctgccccagcctc

SEQ ID NO: 60735 - DNA, 20 bp, Artificial Sequence
  Synthetic oligonucleotide; CTGGGT chr11 5392741 5392760 5392744 -
ttttgtatttttagtagaga

SEQ ID NO: 60736 - DNA, 20 bp, Artificial Sequence
  Synthetic oligonucleotide; CAGGAT chr11 5392721 5392740 5392724 -
ctgggttccaccgtgttagc

SEQ ID NO: 60737 - DNA, 20 bp, Artificial Sequence
  Synthetic oligonucleotide; CAGAGT chr11 5392672 5392691 5392675 -
atccacccgcctcggcctcc

SEQ ID NO: 60738 - DNA, 20 bp, Artificial Sequence
  Synthetic oligonucleotide; TGGGAT chr11 5392664 5392683 5392667 -
gcctcggcctcccagagtgc

SEQ ID NO: 60739 - DNA, 20 bp, Artificial Sequence
  Synthetic oligonucleotide; TTGAGT chr11 5392556 5392575 5392559 -
tgttaatttgcattttaaat

SEQ ID NO: 60740 - DNA, 20 bp, Artificial Sequence
  Synthetic oligonucleotide; TAGAAT chr11 5392383 5392402 5392386 -
attctaccaaatgagatcta

SEQ ID NO: 60741 - DNA, 20 bp, Artificial Sequence
  Synthetic oligonucleotide; AGGAAT chr11 5392377 5392396 5392380 -
ccaaatgagatctatagaat

SEQ ID NO: 60742 - DNA, 20 bp, Artificial Sequence
  Synthetic oligonucleotide; AAGAAT chr11 5392354 5392373 5392357 -
aatttcctctcaacatggag

SEQ ID NO: 60743 - DNA, 20 bp, Artificial Sequence
  Synthetic oligonucleotide; TTGAGT chr11 5392326 5392345 5392329 -
tctaagtctcggaactgcta

SEQ ID NO: 60744 - DNA, 20 bp, Artificial Sequence
  Synthetic oligonucleotide; GTGGAT chr11 5392305 5392324 5392308 -
tgagtaatgtggcctactat

SEQ ID NO: 60745 - DNA, 20 bp, Artificial Sequence
  Synthetic oligonucleotide; TAGAAT chr11 5392286 5392305 5392289 -
tgtggatgtaaattaaagtt

SEQ ID NO: 60746 - DNA, 20 bp, Artificial Sequence
  Synthetic oligonucleotide; AGGAGT chr11 5392266 5392285 5392269 -
tagaatggaacctatgttta

SEQ ID NO: 60747 - DNA, 20 bp, Artificial Sequence
  Synthetic oligonucleotide; CTGGGT chr11 5392234 5392253 5392237 -
ctgtaaggctgcagaaactg

SEQ ID NO: 60748 - DNA, 20 bp, Artificial Sequence
  Synthetic oligonucleotide; GAGAGT chr11 5392207 5392226 5392210 -
ccagaggggctcccaagcct

SEQ ID NO: 60749 - DNA, 20 bp, Artificial Sequence
  Synthetic oligonucleotide; TAGAGT chr11 5392122 5392141 5392125 -
caaacatacatacatatttt

SEQ ID NO: 60750 - DNA, 20 bp, Artificial Sequence
  Synthetic oligonucleotide; TTGAAT chr11 5392063 5392082 5392066 -
gtttgttttcctttttattt

SEQ ID NO: 60751 - DNA, 20 bp, Artificial Sequence
  Synthetic oligonucleotide; CGGGGT chr11 5392057 5392076 5392060 -
tttcctttttatttttgaat

SEQ ID NO: 60752 - DNA, 20 bp, Artificial Sequence
  Synthetic oligonucleotide; TAGGGT chr11 5391899 5391918 5391902 -
tttaattttttttgtagaga

SEQ ID NO: 60753 - DNA, 20 bp, Artificial Sequence
  Synthetic oligonucleotide; TGGGAT chr11 5391777 5391796 5391780 -
accttggtctcccaaagtgc

SEQ ID NO: 60754 - DNA, 20 bp, Artificial Sequence
  Synthetic oligonucleotide; GAGAAT chr11 5391723 5391742 5391726 -
atggtaattttaacctgtag

SEQ ID NO: 60755 - DNA, 20 bp, Artificial Sequence
  Synthetic oligonucleotide; ATGGGT chr11 5391719 5391738 5391722 -
taattttaacctgtaggaga

SEQ ID NO: 60756 - DNA, 20 bp, Artificial Sequence
  Synthetic oligonucleotide; GAGGAT chr11 5391711 5391730 5391714 -
acctgtaggagaatgggtgg

SEQ ID NO: 60757 - DNA, 20 bp, Artificial Sequence
  Synthetic oligonucleotide; CTGAGT chr11 5391696 5391715 5391699 -
ggtgggaggatccagagggc

SEQ ID NO: 60758 - DNA, 20 bp, Artificial Sequence
  Synthetic oligonucleotide; ATGGAT chr11 5391654 5391673 5391657 -
aatgaagatataccaccttg

SEQ ID NO: 60759 - DNA, 20 bp, Artificial Sequence
  Synthetic oligonucleotide; CTGAAT chr11 5391620 5391639 5391623 -
aaaggtgtcttcttgggctt

SEQ ID NO: 60760 - DNA, 20 bp, Artificial Sequence
  Synthetic oligonucleotide; AGGAGT chr11 5391605 5391624 5391608 -
ggcttctgaatgtgaagagg

SEQ ID NO: 60761 - DNA, 20 bp, Artificial Sequence
  Synthetic oligonucleotide; CTGGAT chr11 5391567 5391586 5391570 -
gaagagaacttctgttagct

SEQ ID NO: 60762 - DNA, 20 bp, Artificial Sequence
  Synthetic oligonucleotide; TTGAGT chr11 5391517 5391536 5391520 -
acgcatacatttaatattta

SEQ ID NO: 60763 - DNA, 20 bp, Artificial Sequence
  Synthetic oligonucleotide; AGGGAT chr11 5391444 5391463 5391447 -
aagacatgcctaattcctcc

SEQ ID NO: 60764 - DNA, 20 bp, Artificial Sequence
  Synthetic oligonucleotide; AAGGAT chr11 5391242 5391261 5391245 -
ttcaaagctgagacccctgc

SEQ ID NO: 60765 - DNA, 20 bp, Artificial Sequence
  Synthetic oligonucleotide; TGGGAT chr11 5391172 5391191 5391175 -
gtttatttcctcctgagcaa

SEQ ID NO: 60766 - DNA, 20 bp, Artificial Sequence
  Synthetic oligonucleotide; GTGAGT chr11 5391146 5391165 5391149 -
tgtgacttcaatatgtttgt

SEQ ID NO: 60767 - DNA, 20 bp, Artificial Sequence
  Synthetic oligonucleotide; AGGAGT chr11 5391013 5391032 5391016 -
aaggtaaaatcagagatgag

SEQ ID NO: 60768 - DNA, 20 bp, Artificial Sequence
  Synthetic oligonucleotide; AAGGAT chr11 5391006 5391025 5391009 -
aatcagagatgagaggagtc

SEQ ID NO: 60769 - DNA, 20 bp, Artificial Sequence
  Synthetic oligonucleotide; TAGGAT chr11 5391001 5391020 5391004 -
gagatgagaggagtcaagga

SEQ ID NO: 60770 - DNA, 20 bp, Artificial Sequence
  Synthetic oligonucleotide; AGGAAT chr11 5390977 5390996 5390980 -
atcaaagtctcttcttctag

SEQ ID NO: 60771 - DNA, 20 bp, Artificial Sequence
  Synthetic oligonucleotide; GGGGGT chr11 5390937 5390956 5390940 -
gcacaaccttagaaatttgg

SEQ ID NO: 60772 - DNA, 20 bp, Artificial Sequence
  Synthetic oligonucleotide; AAGAAT chr11 5390908 5390927 5390911 -
gcttgaaacaggtgttgagg

SEQ ID NO: 60773 - DNA, 20 bp, Artificial Sequence
  Synthetic oligonucleotide; AGGAGT chr11 5390900 5390919 5390903 -
caggtgttgaggaagaatgc

SEQ ID NO: 60774 - DNA, 20 bp, Artificial Sequence
  Synthetic oligonucleotide; GGGGGT chr11 5390872 5390891 5390875 -
tgaggtttctgatgtgactt

SEQ ID NO: 60775 - DNA, 20 bp, Artificial Sequence
  Synthetic oligonucleotide; CAGGAT chr11 5390848 5390867 5390851 -
gtctgaaagttactgctgac

SEQ ID NO: 60776 - DNA, 20 bp, Artificial Sequence
  Synthetic oligonucleotide; GTGAGT chr11 5390759 5390778 5390762 -
aaggaggtgtatttccggag

SEQ ID NO: 60777 - DNA, 20 bp, Artificial Sequence
  Synthetic oligonucleotide; CTGGGT chr11 5390712 5390731 5390715 -
ggtctctgccaggctctcct

SEQ ID NO: 60778 - DNA, 20 bp, Artificial Sequence
  Synthetic oligonucleotide; CTGGAT chr11 5390618 5390637 5390621 -
accttcaataaagttgcctt

SEQ ID NO: 60779 - DNA, 20 bp, Artificial Sequence
  Synthetic oligonucleotide; GGGAGT chr11 5390400 5390419 5390403 -
ccttcttataggcctctagg

SEQ ID NO: 60780 - DNA, 20 bp, Artificial Sequence
  Synthetic oligonucleotide; GTGGAT chr11 5390335 5390354 5390338 -
aggaacttgataatggcacg

SEQ ID NO: 60781 - DNA, 20 bp, Artificial Sequence
  Synthetic oligonucleotide; TTGGGT chr11 5390303 5390322 5390306 -
ggtcttaatgctgtatatga

SEQ ID NO: 60782 - DNA, 20 bp, Artificial Sequence
  Synthetic oligonucleotide; ATGAAT chr11 5390254 5390273 5390257 -
tagacattggccataagaag

SEQ ID NO: 60783 - DNA, 20 bp, Artificial Sequence
  Synthetic oligonucleotide; AAGAAT chr11 5390190 5390209 5390193 -
acagccccatcatgggcaca

SEQ ID NO: 60784 - DNA, 20 bp, Artificial Sequence
  Synthetic oligonucleotide; CAGGAT chr11 5390101 5390120 5390104 -
gccaggcctgctactgtgtg

SEQ ID NO: 60785 - DNA, 20 bp, Artificial Sequence
  Synthetic oligonucleotide; ATGAGT chr11 5390097 5390116 5390100 -
ggcctgctactgtgtgcagg

SEQ ID NO: 60786 - DNA, 20 bp, Artificial Sequence
  Synthetic oligonucleotide; ATGAGT chr11 5389967 5389986 5389970 -
cacttcctggtgcaggcaaa

SEQ ID NO: 60787 - DNA, 20 bp, Artificial Sequence
  Synthetic oligonucleotide; AGGGAT chr11 5389909 5389928 5389912 -
gccttcaggaggaggacaat

SEQ ID NO: 60788 - DNA, 20 bp, Artificial Sequence
  Synthetic oligonucleotide; CCGAAT chr11 5389835 5389854 5389838 -
ttgctggccagtgataatga

SEQ ID NO: 60789 - DNA, 20 bp, Artificial Sequence
  Synthetic oligonucleotide; GAGGGT chr11 5389823 5389842 5389826 -
gataatgaccgaatacctca

SEQ ID NO: 60790 - DNA, 20 bp, Artificial Sequence
  Synthetic oligonucleotide; AAGAGT chr11 5389754 5389773 5389757 -
tgaggactccatgaaggaaa

SEQ ID NO: 60791 - DNA, 20 bp, Artificial Sequence
  Synthetic oligonucleotide; GTGGAT chr11 5389750 5389769 5389753 -
gactccatgaaggaaaaaga

SEQ ID NO: 60792 - DNA, 20 bp, Artificial Sequence
  Synthetic oligonucleotide; CTGGAT chr11 5389735 5389754 5389738 -
aaagagtggatgcagaacat

SEQ ID NO: 60793 - DNA, 20 bp, Artificial Sequence
  Synthetic oligonucleotide; GGGAGT chr11 5389703 5389722 5389706 -
cgctccaaagtagatactat

SEQ ID NO: 60794 - DNA, 20 bp, Artificial Sequence
  Synthetic oligonucleotide; AAGGAT chr11 5389629 5389648 5389632 -
ccaggtcagtgagggccagc

SEQ ID NO: 60795 - DNA, 20 bp, Artificial Sequence
  Synthetic oligonucleotide; ATGGGT chr11 5389611 5389630 5389614 -
gcaaggatagtagatagtac

SEQ ID NO: 60796 - DNA, 20 bp, Artificial Sequence
  Synthetic oligonucleotide; GAGGGT chr11 5389595 5389614 5389598 -
gtacatgggtgtgtgcagac

SEQ ID NO: 60797 - DNA, 20 bp, Artificial Sequence
  Synthetic oligonucleotide; CAGAAT chr11 5389573 5389592 5389576 -
gggttggtcttaataatgat

SEQ ID NO: 60798 - DNA, 20 bp, Artificial Sequence
  Synthetic oligonucleotide; GGGGAT chr11 5389525 5389544 5389528 -
accatgtacataaagaaaaa

SEQ ID NO: 60799 - DNA, 20 bp, Artificial Sequence
  Synthetic oligonucleotide; TAGAAT chr11 5389473 5389492 5389476 -
atccaggaaagctggtgaga

SEQ ID NO: 60800 - DNA, 20 bp, Artificial Sequence
  Synthetic oligonucleotide; CTGAGT chr11 5389456 5389475 5389459 -
agatagaatatggggctaaa

SEQ ID NO: 60801 - DNA, 20 bp, Artificial Sequence
  Synthetic oligonucleotide; TTGGAT chr11 5389446 5389465 5389449 -
tggggctaaactgagtaatg

SEQ ID NO: 60802 - DNA, 20 bp, Artificial Sequence
  Synthetic oligonucleotide; ATGAAT chr11 5389434 5389453 5389437 -
gagtaatgttggatagcagc

SEQ ID NO: 60803 - DNA, 20 bp, Artificial Sequence
  Synthetic oligonucleotide; GCGAAT chr11 5389418 5389437 5389421 -
cagcatgaattgaggactga

SEQ ID NO: 60804 - DNA, 20 bp, Artificial Sequence
  Synthetic oligonucleotide; GGGGAT chr11 5389394 5389413 5389397 -
atattggactgacattcctc

SEQ ID NO: 60805 - DNA, 20 bp, Artificial Sequence
  Synthetic oligonucleotide; ATGGAT chr11 5389374 5389393 5389377 -
ggggattgagctgaaaataa

SEQ ID NO: 60806 - DNA, 20 bp, Artificial Sequence
  Synthetic oligonucleotide; ATGAAT chr11 5389272 5389291 5389275 -
gtattatctactccaccctt

SEQ ID NO: 60807 - DNA, 20 bp, Artificial Sequence
  Synthetic oligonucleotide; TAGGGT chr11 5388867 5388886 5388870 -
atcaaccaatcaccaagtcc

SEQ ID NO: 60808 - DNA, 20 bp, Artificial Sequence
  Synthetic oligonucleotide; CTGAAT chr11 5388852 5388871 5388855 -
agtcctagggtttctgttta

SEQ ID NO: 60809 - DNA, 20 bp, Artificial Sequence
  Synthetic oligonucleotide; TGGAAT chr11 5388513 5388532 5388516 -
atttgtattttcattcttcc

SEQ ID NO: 60810 - DNA, 20 bp, Artificial Sequence
  Synthetic oligonucleotide; TTGAAT chr11 5388383 5388402 5388386 -
ttaaattccccaagtttagt

SEQ ID NO: 60811 - DNA, 20 bp, Artificial Sequence
  Synthetic oligonucleotide; GTGAAT chr11 5388285 5388304 5388288 -
ttctgtattgcttctataat

SEQ ID NO: 60812 - DNA, 20 bp, Artificial Sequence
  Synthetic oligonucleotide; AGGGAT chr11 5388226 5388245 5388229 -
ttaattttaatattagctct

SEQ ID NO: 60813 - DNA, 20 bp, Artificial Sequence
  Synthetic oligonucleotide; TGGAAT chr11 5388196 5388215 5388199 -
ttttttagccaccatatcat

SEQ ID NO: 60814 - DNA, 20 bp, Artificial Sequence
  Synthetic oligonucleotide; TTGAAT chr11 5388176 5388195 5388179 -
tggaatcctttaaatattat

SEQ ID NO: 60815 - DNA, 20 bp, Artificial Sequence
  Synthetic oligonucleotide; AAGAGT chr11 5387844 5387863 5387847 -
agggagcaaaggaggaaggt

SEQ ID NO: 60816 - DNA, 20 bp, Artificial Sequence
  Synthetic oligonucleotide; TAGGGT chr11 5387825 5387844 5387828 -
taagagtgatgcattttata

SEQ ID NO: 60817 - DNA, 20 bp, Artificial Sequence
  Synthetic oligonucleotide; CTGAGT chr11 5387802 5387821 5387805 -
ggtagtcagagaagacctct

SEQ ID NO: 60818 - DNA, 20 bp, Artificial Sequence
  Synthetic oligonucleotide; GGGAAT chr11 5387626 5387645 5387629 -
tcaatggaggaagcaaggtg

SEQ ID NO: 60819 - DNA, 20 bp, Artificial Sequence
  Synthetic oligonucleotide; TTGAAT chr11 5387549 5387568 5387552 -
tgcaggtcacgcaagctact

SEQ ID NO: 60820 - DNA, 20 bp, Artificial Sequence
  Synthetic oligonucleotide; TCGAGT chr11 5387524 5387543 5387527 -
ttttattatacttgtgagct

SEQ ID NO: 60821 - DNA, 20 bp, Artificial Sequence
  Synthetic oligonucleotide; ATGGAT chr11 5387500 5387519 5387503 -
gttgagagcagaggtgctgc

SEQ ID NO: 60822 - DNA, 20 bp, Artificial Sequence
  Synthetic oligonucleotide; AGGGGT chr11 5387471 5387490 5387474 -
aggcttacatcactttggca

SEQ ID NO: 60823 - DNA, 20 bp, Artificial Sequence
  Synthetic oligonucleotide; GAGAGT chr11 5387318 5387337 5387321 -
tctaggggccaaatgcaatg

SEQ ID NO: 60824 - DNA, 20 bp, Artificial Sequence
  Synthetic oligonucleotide; CTGAGT chr11 5387010 5387029 5387013 -
aactccgttacatatcaggc

SEQ ID NO: 60825 - DNA, 20 bp, Artificial Sequence
  Synthetic oligonucleotide; AAGGAT chr11 5386977 5386996 5386980 -
ttctcactaggtgtttccaa

SEQ ID NO: 60826 - DNA, 20 bp, Artificial Sequence
  Synthetic oligonucleotide; ATGAAT chr11 5386614 5386633 5386617 -
atgcagaaagtactaactct

SEQ ID NO: 60827 - DNA, 20 bp, Artificial Sequence
  Synthetic oligonucleotide; TAGAAT chr11 5386570 5386589 5386573 -
acttcagtagctcctatcat

SEQ ID NO: 60828 - DNA, 20 bp, Artificial Sequence
  Synthetic oligonucleotide; ATGAAT chr11 5386475 5386494 5386478 -
gtgaaaagcttgacataatc

SEQ ID NO: 60829 - DNA, 20 bp, Artificial Sequence
  Synthetic oligonucleotide; CAGGAT chr11 5386373 5386392 5386376 -
gcctggtagtgagcgaaaat

SEQ ID NO: 60830 - DNA, 20 bp, Artificial Sequence
  Synthetic oligonucleotide; GCGGAT chr11 5386130 5386149 5386133 -
tttccaaccagtaaacactt

SEQ ID NO: 60831 - DNA, 20 bp, Artificial Sequence
  Synthetic oligonucleotide; TAGAAT chr11 5385860 5385879 5385863 -
atttactcataaatacttta

SEQ ID NO: 60832 - DNA, 20 bp, Artificial Sequence
  Synthetic oligonucleotide; TAGGGT chr11 5385791 5385810 5385794 -
agattttttatatataagta

SEQ ID NO: 60833 - DNA, 20 bp, Artificial Sequence
  Synthetic oligonucleotide; TGGAAT chr11 5385572 5385591 5385575 -
attttttaagttgattagac

SEQ ID NO: 60834 - DNA, 20 bp, Artificial Sequence
  Synthetic oligonucleotide; ATGGGT chr11 5385484 5385503 5385487 -
ttttttgcatgaaaaactaa

SEQ ID NO: 60835 - DNA, 20 bp, Artificial Sequence
  Synthetic oligonucleotide; GTGAAT chr11 5385480 5385499 5385483 -
ttgcatgaaaaactaaatgg

SEQ ID NO: 60836 - DNA, 20 bp, Artificial Sequence
  Synthetic oligonucleotide; TGGGGT chr11 5385436 5385455 5385439 -
ttatcctgattctttgtgcc

SEQ ID NO: 60837 - DNA, 20 bp, Artificial Sequence
  Synthetic oligonucleotide; CAGAGT chr11 5385401 5385420 5385404 -
agctctgtgttcaccaactt

SEQ ID NO: 60838 - DNA, 20 bp, Artificial Sequence
  Synthetic oligonucleotide; AAGGAT chr11 5385377 5385396 5385380 -
gtgatgagatggacagggag

SEQ ID NO: 60839 - DNA, 20 bp, Artificial Sequence
  Synthetic oligonucleotide; TGGGAT chr11 5385330 5385349 5385333 -
tacagagacaatgacagggc

SEQ ID NO: 60840 - DNA, 20 bp, Artificial Sequence
  Synthetic oligonucleotide; GGGGAT chr11 5385280 5385299 5385283 -
ctcttgggaagaaagcttta

SEQ ID NO: 60841 - DNA, 20 bp, Artificial Sequence
  Synthetic oligonucleotide; AGGAGT chr11 5385201 5385220 5385204 -
tcatgtctactaagcaatgg

SEQ ID NO: 60842 - DNA, 20 bp, Artificial Sequence
  Synthetic oligonucleotide; CAGAGT chr11 5385142 5385161 5385145 -
cataattaaaatattcaagg

SEQ ID NO: 60843 - DNA, 20 bp, Artificial Sequence
  Synthetic oligonucleotide; ATGAGT chr11 5385082 5385101 5385085 -
aaagagattttcagtataca

SEQ ID NO: 60844 - DNA, 20 bp, Artificial Sequence
  Synthetic oligonucleotide; TTGAAT chr11 5385035 5385054 5385038 -
gtgtctaaatattcttttgt

SEQ ID NO: 60845 - DNA, 20 bp, Artificial Sequence
  Synthetic oligonucleotide; GAGGAT chr11 5384993 5385012 5384996 -
tttaatgaactacattggtg

SEQ ID NO: 60846 - DNA, 20 bp, Artificial Sequence
  Synthetic oligonucleotide; GAGAAT chr11 5384969 5384988 5384972 -
atactgtttcttgtaaatag

SEQ ID NO: 60847 - DNA, 20 bp, Artificial Sequence
  Synthetic oligonucleotide; TAGGAT chr11 5384849 5384868 5384852 -
gtaaacatgcctgtttttag

SEQ ID NO: 60848 - DNA, 20 bp, Artificial Sequence
  Synthetic oligonucleotide; GAGGAT chr11 5384839 5384858 5384842 -
ctgtttttagtaggatagag

SEQ ID NO: 60849 - DNA, 20 bp, Artificial Sequence
  Synthetic oligonucleotide; CTGGAT chr11 5384811 5384830 5384814 -
tggaaggcgaaggccatatc

SEQ ID NO: 60850 - DNA, 20 bp, Artificial Sequence
  Synthetic oligonucleotide; TTGGAT chr11 5384781 5384800 5384784 -
gggaagttacaaggtgttgt

SEQ ID NO: 60851 - DNA, 20 bp, Artificial Sequence
  Synthetic oligonucleotide; GAGGAT chr11 5384760 5384779 5384763 -
tggattaaaataagcagatt

SEQ ID NO: 60852 - DNA, 20 bp, Artificial Sequence
  Synthetic oligonucleotide; TGGGGT chr11 5384755 5384774 5384758 -
taaaataagcagattgagga

SEQ ID NO: 60853 - DNA, 20 bp, Artificial Sequence
  Synthetic oligonucleotide; TTGAAT chr11 5384701 5384720 5384704 -
aaaatgcatttaataatttg

SEQ ID NO: 60854 - DNA, 20 bp, Artificial Sequence
  Synthetic oligonucleotide; GTGAAT chr11 5384693 5384712 5384696 -
tttaataatttgttgaataa

SEQ ID NO: 60855 - DNA, 20 bp, Artificial Sequence
  Synthetic oligonucleotide; GAGAGT chr11 5384672 5384691 5384675 -
tgaatgactgtttttctgat

SEQ ID NO: 60856 - DNA, 20 bp, Artificial Sequence
  Synthetic oligonucleotide; GAGGGT chr11 5384661 5384680 5384664 -
ttttctgatgagagtaagga

SEQ ID NO: 60857 - DNA, 20 bp, Artificial Sequence
  Synthetic oligonucleotide; AAGAGT chr11 5384630 5384649 5384633 -
taccagatggctcggcagga

SEQ ID NO: 60858 - DNA, 20 bp, Artificial Sequence
  Synthetic oligonucleotide; GGGAGT chr11 5384541 5384560 5384544 -
gccatgcaggcactcatcag

SEQ ID NO: 60859 - DNA, 20 bp, Artificial Sequence
  Synthetic oligonucleotide; CAGAAT chr11 5384506 5384525 5384509 -
ctgcctcctggccttcctaa

SEQ ID NO: 60860 - DNA, 20 bp, Artificial Sequence
  Synthetic oligonucleotide; GAGAAT chr11 5384415 5384434 5384418 -
tggttctgtgcatagactct

SEQ ID NO: 60861 - DNA, 20 bp, Artificial Sequence
  Synthetic oligonucleotide; AAGAAT chr11 5384295 5384314 5384298 -
ttataatcctggcaacttgg

SEQ ID NO: 60862 - DNA, 20 bp, Artificial Sequence
  Synthetic oligonucleotide; GAGGAT chr11 5384282 5384301 5384285 -
aacttggaagaataaggtgg

SEQ ID NO: 60863 - DNA, 20 bp, Artificial Sequence
  Synthetic oligonucleotide; TTGAAT chr11 5384273 5384292 5384276 -
gaataaggtgggaggattgc

SEQ ID NO: 60864 - DNA, 20 bp, Artificial Sequence
  Synthetic oligonucleotide; TTGAGT chr11 5384262 5384281 5384265 -
gaggattgcttgaatccggt

SEQ ID NO: 60865 - DNA, 20 bp, Artificial Sequence
  Synthetic oligonucleotide; CTGGGT chr11 5384220 5384239 5384223 -
ttacaccactgcactgtagc

SEQ ID NO: 60866 - DNA, 20 bp, Artificial Sequence
  Synthetic oligonucleotide; GGGAAT chr11 5384123 5384142 5384126 -
atcccattaggcttagtgca

SEQ ID NO: 60867 - DNA, 20 bp, Artificial Sequence
  Synthetic oligonucleotide; GGGAAT chr11 5384114 5384133 5384117 -
ggcttagtgcagggaatgtg

SEQ ID NO: 60868 - DNA, 20 bp, Artificial Sequence
  Synthetic oligonucleotide; ATGAGT chr11 5383889 5383908 5383892 -
ataacaaaaatgtgaagcca

SEQ ID NO: 60869 - DNA, 20 bp, Artificial Sequence
  Synthetic oligonucleotide; AAGAGT chr11 5383864 5383883 5383867 -
taggttccaaaggaagaaag

SEQ ID NO: 60870 - DNA, 20 bp, Artificial Sequence
  Synthetic oligonucleotide; AAGGAT chr11 5383852 5383871 5383855 -
gaagaaagaagagtatagat

SEQ ID NO: 60871 - DNA, 20 bp, Artificial Sequence
  Synthetic oligonucleotide; AAGGGT chr11 5383841 5383860 5383844 -
agtatagataaggatgacac

SEQ ID NO: 60872 - DNA, 20 bp, Artificial Sequence
  Synthetic oligonucleotide; AAGGAT chr11 5383803 5383822 5383806 -
caaggctgtggctgtcacag

SEQ ID NO: 60873 - DNA, 20 bp, Artificial Sequence
  Synthetic oligonucleotide; AAGGGT chr11 5383747 5383766 5383750 -
ggagaacttaatggtaaaca

SEQ ID NO: 60874 - DNA, 20 bp, Artificial Sequence
  Synthetic oligonucleotide; GGGAAT chr11 5383731 5383750 5383734 -
aacaaagggtccccagggct

SEQ ID NO: 60875 - DNA, 20 bp, Artificial Sequence
  Synthetic oligonucleotide; TCGGAT chr11 5383491 5383510 5383494 -
cccgtcgttttccagagagg

SEQ ID NO: 60876 - DNA, 20 bp, Artificial Sequence
  Synthetic oligonucleotide; GAGGAT chr11 5383473 5383492 5383476 -
ggtcggatgtagtatatgaa

SEQ ID NO: 60877 - DNA, 20 bp, Artificial Sequence
  Synthetic oligonucleotide; TTGAAT chr11 5383202 5383221 5383205 -
caaagctctctacttcatct

SEQ ID NO: 60878 - DNA, 20 bp, Artificial Sequence
  Synthetic oligonucleotide; CTGAGT chr11 5383056 5383075 5383059 -
cccagactatgctacagaac

SEQ ID NO: 60879 - DNA, 20 bp, Artificial Sequence
  Synthetic oligonucleotide; TAGAGT chr11 5382914 5382933 5382917 -
ttaaatagggcatggttgat

SEQ ID NO: 60880 - DNA, 20 bp, Artificial Sequence
  Synthetic oligonucleotide; GGGGAT chr11 5382903 5382922 5382906 -
atggttgattagagttgtgt

SEQ ID NO: 60881 - DNA, 20 bp, Artificial Sequence
  Synthetic oligonucleotide; CCGGGT chr11 5382788 5382807 5382791 -
agaagtggcaccaccttaca

SEQ ID NO: 60882 - DNA, 20 bp, Artificial Sequence
  Synthetic oligonucleotide; CAGAGT chr11 5382762 5382781 5382765 -
aagtaactggttgttagggc

SEQ ID NO: 60883 - DNA, 20 bp, Artificial Sequence
  Synthetic oligonucleotide; GAGAGT chr11 5382752 5382771 5382755 -
ttgttagggccagagtgtag

SEQ ID NO: 60884 - DNA, 20 bp, Artificial Sequence
  Synthetic oligonucleotide; CAGGGT chr11 5382746 5382765 5382749 -
gggccagagtgtaggagagt

SEQ ID NO: 60885 - DNA, 20 bp, Artificial Sequence
  Synthetic oligonucleotide; CAGGAT chr11 5382719 5382738 5382722 -
ataggacaagatgcagagag

SEQ ID NO: 60886 - DNA, 20 bp, Artificial Sequence
  Synthetic oligonucleotide; TGGGAT chr11 5382558 5382577 5382561 -
atgattttagcctatttcac

SEQ ID NO: 60887 - DNA, 20 bp, Artificial Sequence
  Synthetic oligonucleotide; GTGGGT chr11 5382398 5382417 5382401 -
tggcaattatattaatattt

SEQ ID NO: 60888 - DNA, 20 bp, Artificial Sequence
  Synthetic oligonucleotide; AAGAAT chr11 5382332 5382351 5382335 -
ctgagctatgaagactaatt

SEQ ID NO: 60889 - DNA, 20 bp, Artificial Sequence
  Synthetic oligonucleotide; AGGGGT chr11 5382284 5382303 5382287 -
gaaaggtatttccaaaaagg

SEQ ID NO: 60890 - DNA, 20 bp, Artificial Sequence
  Synthetic oligonucleotide; GAGAGT chr11 5382190 5382209 5382193 -
tgatcaaatataacatttaa

SEQ ID NO: 60891 - DNA, 20 bp, Artificial Sequence
  Synthetic oligonucleotide; TGGAAT chr11 5382176 5382195 5382179 -
atttaagagagttaatacct

SEQ ID NO: 60892 - DNA, 20 bp, Artificial Sequence
  Synthetic oligonucleotide; CTGAAT chr11 5382140 5382159 5382143 -
aggtaggcaggggcaagacc

SEQ ID NO: 60893 - DNA, 20 bp, Artificial Sequence
  Synthetic oligonucleotide; ATGAGT chr11 5382136 5382155 5382139 -
aggcaggggcaagaccctga

SEQ ID NO: 60894 - DNA, 20 bp, Artificial Sequence
  Synthetic oligonucleotide; TTGGGT chr11 5382093 5382112 5382096 -
catggtacacattttgatgg

SEQ ID NO: 60895 - DNA, 20 bp, Artificial Sequence
  Synthetic oligonucleotide; CAGAGT chr11 5382055 5382074 5382058 -
gagataacaatcatattttc

SEQ ID NO: 60896 - DNA, 20 bp, Artificial Sequence
  Synthetic oligonucleotide; AAGGAT chr11 5382028 5382047 5382031 -
cattgttaacaatatgcagg

SEQ ID NO: 60897 - DNA, 20 bp, Artificial Sequence
  Synthetic oligonucleotide; CTGGAT chr11 5381979 5381998 5381982 -
tgttattttggtgtatggag

SEQ ID NO: 60898 - DNA, 20 bp, Artificial Sequence
  Synthetic oligonucleotide; GTGGAT chr11 5381925 5381944 5381928 -
tagataaacaatactgttta

SEQ ID NO: 60899 - DNA, 20 bp, Artificial Sequence
  Synthetic oligonucleotide; CTGAAT chr11 5381840 5381859 5381843 -
tagctttatattctatttct

SEQ ID NO: 60900 - DNA, 20 bp, Artificial Sequence
  Synthetic oligonucleotide; TTGAGT chr11 5381561 5381580 5381564 -
ttgcctttatgaagctcaca

SEQ ID NO: 60901 - DNA, 20 bp, Artificial Sequence
  Synthetic oligonucleotide; TAGGGT chr11 5381521 5381540 5381524 -
gttcaacgaagtttccaaaa

SEQ ID NO: 60902 - DNA, 20 bp, Artificial Sequence
  Synthetic oligonucleotide; GAGGAT chr11 5381461 5381480 5381464 -
tgaagcctggaggccaagag

SEQ ID NO: 60903 - DNA, 20 bp, Artificial Sequence
  Synthetic oligonucleotide; GTGGGT chr11 5381409 5381428 5381412 -
tcggacctatctctatcact

SEQ ID NO: 60904 - DNA, 20 bp, Artificial Sequence
  Synthetic oligonucleotide; GCGAAT chr11 5381397 5381416 5381400 -
ctatcactgtgggtaatcat

SEQ ID NO: 60905 - DNA, 20 bp, Artificial Sequence
  Synthetic oligonucleotide; GTGAAT chr11 5381381 5381400 5381384 -
tcatgcgaatattaggtgaa

SEQ ID NO: 60906 - DNA, 20 bp, Artificial Sequence
  Synthetic oligonucleotide; GTGGGT chr11 5381375 5381394 5381378 -
gaatattaggtgaagtgaat

SEQ ID NO: 60907 - DNA, 20 bp, Artificial Sequence
  Synthetic oligonucleotide; TAGAAT chr11 5381298 5381317 5381301 -
ggccttaacctttaaggtat

SEQ ID NO: 60908 - DNA, 20 bp, Artificial Sequence
  Synthetic oligonucleotide; AAGAAT chr11 5381283 5381302 5381286 -
ggtattagaattcattatta

SEQ ID NO: 60909 - DNA, 20 bp, Artificial Sequence
  Synthetic oligonucleotide; TGGGGT chr11 5381130 5381149 5381133 -
gagcgacagagagagagagg

SEQ ID NO: 60910 - DNA, 20 bp, Artificial Sequence
  Synthetic oligonucleotide; GGGGGT chr11 5381124 5381143 5381127 -
cagagagagagaggtggggt

SEQ ID NO: 60911 - DNA, 20 bp, Artificial Sequence
  Synthetic oligonucleotide; TGGGGT chr11 5381114 5381133 5381117 -
gaggtggggtgggggtatgg

SEQ ID NO: 60912 - DNA, 20 bp, Artificial Sequence
  Synthetic oligonucleotide; CAGAAT chr11 5381054 5381073 5381057 -
ttatttaaggaacctctatc

SEQ ID NO: 60913 - DNA, 20 bp, Artificial Sequence
  Synthetic oligonucleotide; CTGAAT chr11 5380989 5381008 5380992 -
aggagattccttcaggagaa

SEQ ID NO: 60914 - DNA, 20 bp, Artificial Sequence
  Synthetic oligonucleotide; AAGGAT chr11 5380921 5380940 5380924 -
ccagggggagcattcagccc

SEQ ID NO: 60915 - DNA, 20 bp, Artificial Sequence
  Synthetic oligonucleotide; GAGGAT chr11 5380776 5380795 5380779 -
aaccagttcattcttccttt

SEQ ID NO: 60916 - DNA, 20 bp, Artificial Sequence
  Synthetic oligonucleotide; CAGGGT chr11 5380550 5380569 5380553 -
ctaaataaaatccttactca

SEQ ID NO: 60917 - DNA, 20 bp, Artificial Sequence
  Synthetic oligonucleotide; GCGGGT chr11 5380407 5380426 5380410 -
ttttgtggtgtgagatcgat

SEQ ID NO: 60918 - DNA, 20 bp, Artificial Sequence
  Synthetic oligonucleotide; TAGGAT chr11 5380373 5380392 5380376 -
ctggagagacccacagaagt

SEQ ID NO: 60919 - DNA, 20 bp, Artificial Sequence
  Synthetic oligonucleotide; AAGGGT chr11 5380361 5380380 5380364 -
acagaagttaggattgccaa

SEQ ID NO: 60920 - DNA, 20 bp, Artificial Sequence
  Synthetic oligonucleotide; GAGAGT chr11 5380258 5380277 5380261 -
cctgcatctgtgtgtgcaca

SEQ ID NO: 60921 - DNA, 20 bp, Artificial Sequence
  Synthetic oligonucleotide; CAGAGT chr11 5380028 5380047 5380031 -
catattttgatttgctataa

SEQ ID NO: 60922 - DNA, 20 bp, Artificial Sequence
  Synthetic oligonucleotide; CTGAGT chr11 5380020 5380039 5380023 -
gatttgctataacagagtac

SEQ ID NO: 60923 - DNA, 20 bp, Artificial Sequence
  Synthetic oligonucleotide; CTGGGT chr11 5380014 5380033 5380017 -
ctataacagagtacctgagt

SEQ ID NO: 60924 - DNA, 20 bp, Artificial Sequence
  Synthetic oligonucleotide; TAGAAT chr11 5379776 5379795 5379779 -
ctgtccaccatatgtgaaat

SEQ ID NO: 60925 - DNA, 20 bp, Artificial Sequence
  Synthetic oligonucleotide; ATGGAT chr11 5379752 5379771 5379755 -
attctaaaaggaaacaaaaa

SEQ ID NO: 60926 - DNA, 20 bp, Artificial Sequence
  Synthetic oligonucleotide; AGGAAT chr11 5379733 5379752 5379736 -
aatggattaaacgttttttg

SEQ ID NO: 60927 - DNA, 20 bp, Artificial Sequence
  Synthetic oligonucleotide; CTGAAT chr11 5379721 5379740 5379724 -
gttttttgaggaattattga

SEQ ID NO: 60928 - DNA, 20 bp, Artificial Sequence
  Synthetic oligonucleotide; TAGGGT chr11 5379445 5379464 5379448 -
tattattatactttaagatt

SEQ ID NO: 60929 - DNA, 20 bp, Artificial Sequence
  Synthetic oligonucleotide; CAGAGT chr11 5379301 5379320 5379304 -
ccccaccccacaacagtccc

SEQ ID NO: 60930 - DNA, 20 bp, Artificial Sequence
  Synthetic oligonucleotide; ATGAGT chr11 5379244 5379263 5379247 -
tcattgttcagttcccatct

SEQ ID NO: 60931 - DNA, 20 bp, Artificial Sequence
  Synthetic oligonucleotide; GAGAAT chr11 5379238 5379257 5379241 -
ttcagttcccatctatgagt

SEQ ID NO: 60932 - DNA, 20 bp, Artificial Sequence
  Synthetic oligonucleotide; GAGAAT chr11 5379194 5379213 5379197 -
tgtccttgcgatagtttact

SEQ ID NO: 60933 - DNA, 20 bp, Artificial Sequence
  Synthetic oligonucleotide; TTGGGT chr11 5379065 5379084 5379068 -
agtctatcattgttggacat

SEQ ID NO: 60934 - DNA, 20 bp, Artificial Sequence
  Synthetic oligonucleotide; GTGAAT chr11 5379038 5379057 5379041 -
ggttccaagtctttgctatt

SEQ ID NO: 60935 - DNA, 20 bp, Artificial Sequence
  Synthetic oligonucleotide; TTGGGT chr11 5378974 5378993 5378977 -
gcagcatgatttatattcct

SEQ ID NO: 60936 - DNA, 20 bp, Artificial Sequence
  Synthetic oligonucleotide; TGGGAT chr11 5378955 5378974 5378958 -
tttgggtatatacccagtaa

SEQ ID NO: 60937 - DNA, 20 bp, Artificial Sequence
  Synthetic oligonucleotide; CTGGGT chr11 5378947 5378966 5378950 -
tatacccagtaatgggatgg

SEQ ID NO: 60938 - DNA, 20 bp, Artificial Sequence
  Synthetic oligonucleotide; AGGAAT chr11 5378912 5378931 5378915 -
tttctagttctagatccctg

SEQ ID NO: 60939 - DNA, 20 bp, Artificial Sequence
  Synthetic oligonucleotide; AAGAGT chr11 5378860 5378879 5378863 -
aactagtttacagtcccacc

SEQ ID NO: 60940 - DNA, 20 bp, Artificial Sequence
  Synthetic oligonucleotide; TTGAGT chr11 5378603 5378622 5378606 -
tttttttcttgtaaatttgt

SEQ ID NO: 60941 - DNA, 20 bp, Artificial Sequence
  Synthetic oligonucleotide; CTGGAT chr11 5378585 5378604 5378588 -
gtttgagttcattatagatt

SEQ ID NO: 60942 - DNA, 20 bp, Artificial Sequence
  Synthetic oligonucleotide; ATGAGT chr11 5378563 5378582 5378566 -
ggatattagccctttgtcag

SEQ ID NO: 60943 - DNA, 20 bp, Artificial Sequence
  Synthetic oligonucleotide; GTGAAT chr11 5378457 5378476 5378460 -
agtttcattagatcccatta

SEQ ID NO: 60944 - DNA, 20 bp, Artificial Sequence
  Synthetic oligonucleotide; CTGAAT chr11 5378388 5378407 5378391 -
tccttgcccatgcctatgtc

SEQ ID NO: 60945 - DNA, 20 bp, Artificial Sequence
  Synthetic oligonucleotide; TAGGGT chr11 5378361 5378380 5378364 -
gtaatgcctgcgttttcttc

SEQ ID NO: 60946 - DNA, 20 bp, Artificial Sequence
  Synthetic oligonucleotide; TTGAAT chr11 5378314 5378333 5378317 -
gtttaagtctttaatccatc

SEQ ID NO: 60947 - DNA, 20 bp, Artificial Sequence
  Synthetic oligonucleotide; AGGGAT chr11 5378284 5378303 5378287 -
ttttgtataaggtgtaagga

SEQ ID NO: 60948 - DNA, 20 bp, Artificial Sequence
  Synthetic oligonucleotide; GGGAAT chr11 5378221 5378240 5378224 -
ccagcaccatttattaaata

SEQ ID NO: 60949 - DNA, 20 bp, Artificial Sequence
  Synthetic oligonucleotide; TAGGAT chr11 5378013 5378032 5378016 -
ccagctttgttcttttggct

SEQ ID NO: 60950 - DNA, 20 bp, Artificial Sequence
  Synthetic oligonucleotide; GGGGAT chr11 5377918 5377937 5377921 -
aaaatcattggtagcttgat

SEQ ID NO: 60951 - DNA, 20 bp, Artificial Sequence
  Synthetic oligonucleotide; TTGAAT chr11 5377908 5377927 5377911 -
gtagcttgatggggatggca

SEQ ID NO: 60952 - DNA, 20 bp, Artificial Sequence
  Synthetic oligonucleotide; TGGAAT chr11 5377840 5377859 5377843 -
attcttcctacccataagca

SEQ ID NO: 60953 - DNA, 20 bp, Artificial Sequence
  Synthetic oligonucleotide; TTGGAT chr11 5377747 5377766 5377750 -
tccttcacatcccttgtaag

SEQ ID NO: 60954 - DNA, 20 bp, Artificial Sequence
  Synthetic oligonucleotide; GTGAAT chr11 5377710 5377729 5377713 -
ttattctctttgaagcaatt

SEQ ID NO: 60955 - DNA, 20 bp, Artificial Sequence
  Synthetic oligonucleotide; GGGAGT chr11 5377704 5377723 5377707 -
tctttgaagcaattgtgaat

SEQ ID NO: 60956 - DNA, 20 bp, Artificial Sequence
  Synthetic oligonucleotide; AAGAAT chr11 5377656 5377675 5377659 -
tttgtctgttattggtgtat

SEQ ID NO: 60957 - DNA, 20 bp, Artificial Sequence
  Synthetic oligonucleotide; GGGGGT chr11 5377565 5377584 5377568 -
gagattttgggctgagacaa

SEQ ID NO: 60958 - DNA, 20 bp, Artificial Sequence
  Synthetic oligonucleotide; TTGAAT chr11 5377498 5377517 5377501 -
ttgacttcctcttttcttaa

SEQ ID NO: 60959 - DNA, 20 bp, Artificial Sequence
  Synthetic oligonucleotide; TTGAAT chr11 5377437 5377456 5377440 -
ccagaacttccaacactatg

SEQ ID NO: 60960 - DNA, 20 bp, Artificial Sequence
  Synthetic oligonucleotide; AGGAGT chr11 5377431 5377450 5377434 -
cttccaacactatgttgaat

SEQ ID NO: 60961 - DNA, 20 bp, Artificial Sequence
  Synthetic oligonucleotide; GGGAAT chr11 5377386 5377405 5377389 -
gtcttgtgccagtttacaaa

SEQ ID NO: 60962 - DNA, 20 bp, Artificial Sequence
  Synthetic oligonucleotide; GTGGGT chr11 5377344 5377363 5377347 -
cattcagtatgatattggct

SEQ ID NO: 60963 - DNA, 20 bp, Artificial Sequence
  Synthetic oligonucleotide; AAGGGT chr11 5377266 5377285 5377269 -
tattgaaagtttttagcatg

SEQ ID NO: 60964 - DNA, 20 bp, Artificial Sequence
  Synthetic oligonucleotide; TTGAAT chr11 5377258 5377277 5377261 -
gtttttagcatgaagggttg

SEQ ID NO: 60965 - DNA, 20 bp, Artificial Sequence
  Synthetic oligonucleotide; CTGGAT chr11 5377183 5377202 5377186 -
tctttggttctgtttatatg

SEQ ID NO: 60966 - DNA, 20 bp, Artificial Sequence
  Synthetic oligonucleotide; AGGGAT chr11 5377135 5377154 5377138 -
ttgaaccagccttgcatccc

SEQ ID NO: 60967 - DNA, 20 bp, Artificial Sequence
  Synthetic oligonucleotide; GTGGAT chr11 5377111 5377130 5377114 -
atgaagtccacttgatcatc

SEQ ID NO: 60968 - DNA, 20 bp, Artificial Sequence
  Synthetic oligonucleotide; CTGGAT chr11 5377087 5377106 5377090 -
ataagctttttgatgtgctg

SEQ ID NO: 60969 - DNA, 20 bp, Artificial Sequence
  Synthetic oligonucleotide; GAGGAT chr11 5377060 5377079 5377063 -
cggtttgccagtattttatt

SEQ ID NO: 60970 - DNA, 20 bp, Artificial Sequence
  Synthetic oligonucleotide; AGGGAT chr11 5377035 5377054 5377038 -
tttttgcatcgatgttcatc

SEQ ID NO: 60971 - DNA, 20 bp, Artificial Sequence
  Synthetic oligonucleotide; TAGGAT chr11 5376979 5376998 5376982 -
tctctttctggctttggtat

SEQ ID NO: 60972 - DNA, 20 bp, Artificial Sequence
  Synthetic oligonucleotide; ATGAGT chr11 5376956 5376975 5376959 -
gatgatgctggcctcataaa

SEQ ID NO: 60973 - DNA, 20 bp, Artificial Sequence
  Synthetic oligonucleotide; GAGGAT chr11 5376946 5376965 5376949 -
gcctcataaaatgagttagg

SEQ ID NO: 60974 - DNA, 20 bp, Artificial Sequence
  Synthetic oligonucleotide; TGGAAT chr11 5376921 5376940 5376924 -
ttccttctttttctgttgat

SEQ ID NO: 60975 - DNA, 20 bp, Artificial Sequence
  Synthetic oligonucleotide; AGGAAT chr11 5376906 5376925 5376909 -
ttgattggaatagtttcaga

SEQ ID NO: 60976 - DNA, 20 bp, Artificial Sequence
  Synthetic oligonucleotide; TAGAAT chr11 5376873 5376892 5376876 -
attcctccttgtacctctgt

SEQ ID NO: 60977 - DNA, 20 bp, Artificial Sequence
  Synthetic oligonucleotide; GTGAAT chr11 5376861 5376880 5376864 -
acctctgttagaatttggct

SEQ ID NO: 60978 - DNA, 20 bp, Artificial Sequence
  Synthetic oligonucleotide; TGGGAT chr11 5376748 5376767 5376751 -
acttcttcctggtttagtct

SEQ ID NO: 60979 - DNA, 20 bp, Artificial Sequence
  Synthetic oligonucleotide; AGGAAT chr11 5376729 5376748 5376732 -
ttgggatagtgtatgtgtcc

SEQ ID NO: 60980 - DNA, 20 bp, Artificial Sequence
  Synthetic oligonucleotide; TGGGAT chr11 5376644 5376663 5376647 -
gatggcagtttgtatttctg

SEQ ID NO: 60981 - DNA, 20 bp, Artificial Sequence
  Synthetic oligonucleotide; AAGGGT chr11 5376502 5376521 5376505 -
ccagattcattaattttttg

SEQ ID NO: 60982 - DNA, 20 bp, Artificial Sequence
  Synthetic oligonucleotide; TTGAAT chr11 5376431 5376450 5376434 -
ttcttgacttctgctagctt

SEQ ID NO: 60983 - DNA, 20 bp, Artificial Sequence
  Synthetic oligonucleotide; TAGGGT chr11 5376385 5376404 5376388 -
agttcttttaattgtgatgt

SEQ ID NO: 60984 - DNA, 20 bp, Artificial Sequence
  Synthetic oligonucleotide; TTGGAT chr11 5376372 5376391 5376375 -
gtgatgttagggtgtcaatt

SEQ ID NO: 60985 - DNA, 20 bp, Artificial Sequence
  Synthetic oligonucleotide; TCGAAT chr11 5376309 5376328 5376312 -
atttccccctacacactgat

SEQ ID NO: 60986 - DNA, 20 bp, Artificial Sequence
  Synthetic oligonucleotide; TTGAGT chr11 5376176 5376195 5376179 -
gttgttcagtttccatgtag

SEQ ID NO: 60987 - DNA, 20 bp, Artificial Sequence
  Synthetic oligonucleotide; TTGAGT chr11 5376166 5376185 5376169 -
ttccatgtagttgagtggtt

SEQ ID NO: 60988 - DNA, 20 bp, Artificial Sequence
  Synthetic oligonucleotide; GTGAGT chr11 5376162 5376181 5376165 -
atgtagttgagtggttttga

SEQ ID NO: 60989 - DNA, 20 bp, Artificial Sequence
  Synthetic oligonucleotide; CTGAGT chr11 5376147 5376166 5376150 -
tttgagtgagtttcttaatc

SEQ ID NO: 60990 - DNA, 20 bp, Artificial Sequence
  Synthetic oligonucleotide; TGGAAT chr11 5376041 5376060 5376044 -
tccaagtatgtggtcaattt

SEQ ID NO: 60991 - DNA, 20 bp, Artificial Sequence
  Synthetic oligonucleotide; TGGGGT chr11 5375992 5376011 5375995 -
aaatgtatattctgttgatt

SEQ ID NO: 60992 - DNA, 20 bp, Artificial Sequence
  Synthetic oligonucleotide; GAGAGT chr11 5375985 5376004 5375988 -
tattctgttgatttggggtg

SEQ ID NO: 60993 - DNA, 20 bp, Artificial Sequence
  Synthetic oligonucleotide; CTGGAT chr11 5375931 5375950 5375934 -
tgcagagctgtgttcaattc

SEQ ID NO: 60994 - DNA, 20 bp, Artificial Sequence
  Synthetic oligonucleotide; TGGGGT chr11 5375880 5375899 5375883 -
gatctgtctaatgttgacag

SEQ ID NO: 60995 - DNA, 20 bp, Artificial Sequence
  Synthetic oligonucleotide; GGGAGT chr11 5375848 5375867 5375851 -
gtctcccattattaaagtgt

SEQ ID NO: 60996 - DNA, 20 bp, Artificial Sequence
  Synthetic oligonucleotide; ATGAAT chr11 5375807 5375826 5375810 -
ggtctctaaggacttgcttt

SEQ ID NO: 60997 - DNA, 20 bp, Artificial Sequence
  Synthetic oligonucleotide; CTGGGT chr11 5375801 5375820 5375804 -
taaggacttgctttatgaat

SEQ ID NO: 60998 - DNA, 20 bp, Artificial Sequence
  Synthetic oligonucleotide; TTGGGT chr11 5375786 5375805 5375789 -
tgaatctgggtgctcctgta

SEQ ID NO: 60999 - DNA, 20 bp, Artificial Sequence
  Synthetic oligonucleotide; TAGGAT chr11 5375769 5375788 5375772 -
gtattgggtgcatatatatt

SEQ ID NO: 61000 - DNA, 20 bp, Artificial Sequence
  Synthetic oligonucleotide; TTGAAT chr11 5375748 5375767 5375751 -
aggatagttagctcttcttg

SEQ ID NO: 61001 - DNA, 20 bp, Artificial Sequence
  Synthetic oligonucleotide; TAGGAT chr11 5375664 5375683 5375667 -
aagcctgttttatcagagac

SEQ ID NO: 61002 - DNA, 20 bp, Artificial Sequence
  Synthetic oligonucleotide; ATGGGT chr11 5375568 5375587 5375571 -
tgtgtgtgtgtgcacatgag

SEQ ID NO: 61003 - DNA, 20 bp, Artificial Sequence
  Synthetic oligonucleotide; CTGAAT chr11 5375559 5375578 5375562 -
gtgcacatgagatgggtttc

SEQ ID NO: 61004 - DNA, 20 bp, Artificial Sequence
  Synthetic oligonucleotide; GTGAAT chr11 5375472 5375491 5375475 -
ttaaagttaatattgtatgt

SEQ ID NO: 61005 - DNA, 20 bp, Artificial Sequence
  Synthetic oligonucleotide; CTGGAT chr11 5375226 5375245 5375229 -
acttatgaagcttagtttgg

SEQ ID NO: 61006 - DNA, 20 bp, Artificial Sequence
  Synthetic oligonucleotide; AAGGAT chr11 5375189 5375208 5375192 -
tgttgaaaattctttccttt

SEQ ID NO: 61007 - DNA, 20 bp, Artificial Sequence
  Synthetic oligonucleotide; TTGAAT chr11 5375182 5375201 5375185 -
aattctttcctttaaggatg

SEQ ID NO: 61008 - DNA, 20 bp, Artificial Sequence
  Synthetic oligonucleotide; TAGAGT chr11 5375150 5375169 5375153 -
ccccactctcttctggcttg

SEQ ID NO: 61009 - DNA, 20 bp, Artificial Sequence
  Synthetic oligonucleotide; GTGGGT chr11 5375102 5375121 5375105 -
agtctgatgggcttcccttt

SEQ ID NO: 61010 - DNA, 20 bp, Artificial Sequence
  Synthetic oligonucleotide; GTGAAT chr11 5375041 5375060 5375044 -
tttccttcatttcaactttg

SEQ ID NO: 61011 - DNA, 20 bp, Artificial Sequence
  Synthetic oligonucleotide; TGGAGT chr11 5375018 5375037 5375021 -
aatctgacaattatgtgtct

SEQ ID NO: 61012 - DNA, 20 bp, Artificial Sequence
  Synthetic oligonucleotide; AGGAGT chr11 5375001 5375020 5375004 -
tcttggagttgctcttctcg

SEQ ID NO: 61013 - DNA, 20 bp, Artificial Sequence
  Synthetic oligonucleotide; CTGAAT chr11 5374970 5374989 5374973 -
tgtggcgttctctgtatttc

SEQ ID NO: 61014 - DNA, 20 bp, Artificial Sequence
  Synthetic oligonucleotide; CTGAAT chr11 5374964 5374983 5374967 -
gttctctgtatttcctgaat

SEQ ID NO: 61015 - DNA, 20 bp, Artificial Sequence
  Synthetic oligonucleotide; CTGGAT chr11 5374925 5374944 5374928 -
gctagattggggaagttctc

SEQ ID NO: 61016 - DNA, 20 bp, Artificial Sequence
  Synthetic oligonucleotide; CAGAGT chr11 5374910 5374929 5374913 -
ttctcctggataatatcctg

SEQ ID NO: 61017 - DNA, 20 bp, Artificial Sequence
  Synthetic oligonucleotide; TTGAAT chr11 5374555 5374574 5374558 -
ttatcttctttgcctttggt

SEQ ID NO: 61018 - DNA, 20 bp, Artificial Sequence
  Synthetic oligonucleotide; CGGAGT chr11 5374535 5374554 5374538 -
ttgaatttcctcctgtagct

SEQ ID NO: 61019 - DNA, 20 bp, Artificial Sequence
  Synthetic oligonucleotide; TAGAGT chr11 5374412 5374431 5374415 -
aggaaaggtgctctgctttt

SEQ ID NO: 61020 - DNA, 20 bp, Artificial Sequence
  Synthetic oligonucleotide; ATGGGT chr11 5374328 5374347 5374331 -
ttgatgatagtgatgtaccg

SEQ ID NO: 61021 - DNA, 20 bp, Artificial Sequence
  Synthetic oligonucleotide; GTGGAT chr11 5374315 5374334 5374318 -
tgtaccgatgggtttttggt

SEQ ID NO: 61022 - DNA, 20 bp, Artificial Sequence
  Synthetic oligonucleotide; TGGAGT chr11 5374251 5374270 5374254 -
accctcagctgcaggtctgt

SEQ ID NO: 61023 - DNA, 20 bp, Artificial Sequence
  Synthetic oligonucleotide; CTGGGT chr11 5374214 5374233 5374217 -
ccactccagaccctgtttgc

SEQ ID NO: 61024 - DNA, 20 bp, Artificial Sequence
  Synthetic oligonucleotide; GCGAAT chr11 5374167 5374186 5374170 -
accgcagattttcgtgatcc

SEQ ID NO: 61025 - DNA, 20 bp, Artificial Sequence
  Synthetic oligonucleotide; AGGAGT chr11 5374123 5374142 5374126 -
ctctggaagttttgtctcag

SEQ ID NO: 61026 - DNA, 20 bp, Artificial Sequence
  Synthetic oligonucleotide; GGGGGT chr11 5374082 5374101 5374085 -
gtgtcagtctgcccttactt

SEQ ID NO: 61027 - DNA, 20 bp, Artificial Sequence
  Synthetic oligonucleotide; GGGGGT chr11 5374056 5374075 5374059 -
gcctcccagttaggctgctc

SEQ ID NO: 61028 - DNA, 20 bp, Artificial Sequence
  Synthetic oligonucleotide; AGGGGT chr11 5374049 5374068 5374052 -
agttaggctgctcgggggtc

SEQ ID NO: 61029 - DNA, 20 bp, Artificial Sequence
  Synthetic oligonucleotide; TGGGGT chr11 5373850 5373869 5373853 -
caggcctccttgagctgtgg

SEQ ID NO: 61030 - DNA, 20 bp, Artificial Sequence
  Synthetic oligonucleotide; CAGGAT chr11 5373683 5373702 5373686 -
aggaccctcggagccatgtg

SEQ ID NO: 61031 - DNA, 20 bp, Artificial Sequence
  Synthetic oligonucleotide; TCGGGT chr11 5373628 5373647 5373631 -
ctgtcagaaaagcacagtat

SEQ ID NO: 61032 - DNA, 20 bp, Artificial Sequence
  Synthetic oligonucleotide; GGGAGT chr11 5373622 5373641 5373625 -
gaaaagcacagtattcgggt

SEQ ID NO: 61033 - DNA, 20 bp, Artificial Sequence
  Synthetic oligonucleotide; AGGAGT chr11 5373211 5373230 5373214 -
atctctatacatgttcttcc

SEQ ID NO: 61034 - DNA, 20 bp, Artificial Sequence
  Synthetic oligonucleotide; TTGAGT chr11 5373165 5373184 5373168 -
atttatgtctttaatctatt

SEQ ID NO: 61035 - DNA, 20 bp, Artificial Sequence
  Synthetic oligonucleotide; TTGGAT chr11 5373115 5373134 5373118 -
ccaattttattcttttgcat

SEQ ID NO: 61036 - DNA, 20 bp, Artificial Sequence
  Synthetic oligonucleotide; GAGAAT chr11 5373043 5373062 5373046 -
attgtgttggtggccttgtt

SEQ ID NO: 61037 - DNA, 20 bp, Artificial Sequence
  Synthetic oligonucleotide; GGGGGT chr11 5372854 5372873 5372857 -
caagattgttttggccattt

SEQ ID NO: 61038 - DNA, 20 bp, Artificial Sequence
  Synthetic oligonucleotide; AAGGAT chr11 5372586 5372605 5372589 -
aacctaagtaaaaatgggca

SEQ ID NO: 61039 - DNA, 20 bp, Artificial Sequence
  Synthetic oligonucleotide; CTGAAT chr11 5372580 5372599 5372583 -
agtaaaaatgggcaaaggat

SEQ ID NO: 61040 - DNA, 20 bp, Artificial Sequence
  Synthetic oligonucleotide; AGGGGT chr11 5372431 5372450 5372434 -
tatcaaaaaagacaagagat

SEQ ID NO: 61041 - DNA, 20 bp, Artificial Sequence
  Synthetic oligonucleotide; GGGAAT chr11 5372382 5372401 5372385 -
aactcttgtgcatagctggt

SEQ ID NO: 61042 - DNA, 20 bp, Artificial Sequence
  Synthetic oligonucleotide; TAGAGT chr11 5372320 5372339 5372323 -
gtttctcaaacaactaaaaa

SEQ ID NO: 61043 - DNA, 20 bp, Artificial Sequence
  Synthetic oligonucleotide; GGGAAT chr11 5372059 5372078 5372062 -
gccttaaaaaaggagatggg

SEQ ID NO: 61044 - DNA, 20 bp, Artificial Sequence
  Synthetic oligonucleotide; TAGAGT chr11 5372044 5372063 5372047 -
atggggggaatgtataaacc

SEQ ID NO: 61045 - DNA, 20 bp, Artificial Sequence
  Synthetic oligonucleotide; TGGAAT chr11 5371975 5371994 5371978 -
ggcatgatattacttatatg

SEQ ID NO: 61046 - DNA, 20 bp, Artificial Sequence
  Synthetic oligonucleotide; TAGGAT chr11 5371864 5371883 5371867 -
gttataaacttgcagctgta

SEQ ID NO: 61047 - DNA, 20 bp, Artificial Sequence
  Synthetic oligonucleotide; ATGGAT chr11 5371722 5371741 5371725 -
ctatggaaggtgttgtattg

SEQ ID NO: 61048 - DNA, 20 bp, Artificial Sequence
  Synthetic oligonucleotide; TAGGGT chr11 5371576 5371595 5371579 -
atttctgtttcctaattgtt

SEQ ID NO: 61049 - DNA, 20 bp, Artificial Sequence
  Synthetic oligonucleotide; TTGGAT chr11 5371531 5371550 5371534 -
cttaaaacttatgtaaccct

SEQ ID NO: 61050 - DNA, 20 bp, Artificial Sequence
  Synthetic oligonucleotide; CAGGGT chr11 5371457 5371476 5371460 -
atacagctatcactgtctct

SEQ ID NO: 61051 - DNA, 20 bp, Artificial Sequence
  Synthetic oligonucleotide; CAGGGT chr11 5371387 5371406 5371390 -
tatatctccggcctacaact

SEQ ID NO: 61052 - DNA, 20 bp, Artificial Sequence
  Synthetic oligonucleotide; GAGAAT chr11 5371337 5371356 5371340 -
ttaaatgtttatgagccaca

SEQ ID NO: 61053 - DNA, 20 bp, Artificial Sequence
  Synthetic oligonucleotide; GAGAAT chr11 5371331 5371350 5371334 -
gtttatgagccacagagaat

SEQ ID NO: 61054 - DNA, 20 bp, Artificial Sequence
  Synthetic oligonucleotide; TTGAGT chr11 5371295 5371314 5371298 -
atttttttgaacttctgtgt

SEQ ID NO: 61055 - DNA, 20 bp, Artificial Sequence
  Synthetic oligonucleotide; TAGAGT chr11 5371230 5371249 5371233 -
gggaaaggtgctgtgtggct

SEQ ID NO: 61056 - DNA, 20 bp, Artificial Sequence
  Synthetic oligonucleotide; CAGAAT chr11 5371216 5371235 5371219 -
gtggcttagagtataaacat

SEQ ID NO: 61057 - DNA, 20 bp, Artificial Sequence
  Synthetic oligonucleotide; TAGAAT chr11 5371195 5371214 5371198 -
agaatgtgctatggactttc

SEQ ID NO: 61058 - DNA, 20 bp, Artificial Sequence
  Synthetic oligonucleotide; CAGAAT chr11 5371166 5371185 5371169 -
tcagtgcccttgtatatcct

SEQ ID NO: 61059 - DNA, 20 bp, Artificial Sequence
  Synthetic oligonucleotide; GAGAGT chr11 5371155 5371174 5371158 -
gtatatcctcagaatgtgtg

SEQ ID NO: 61060 - DNA, 20 bp, Artificial Sequence
  Synthetic oligonucleotide; AAGGGT chr11 5371086 5371105 5371089 -
tagctagggctagcagaagg

SEQ ID NO: 61061 - DNA, 20 bp, Artificial Sequence
  Synthetic oligonucleotide; TTGGGT chr11 5371025 5371044 5371028 -
tcttggaaaaaccagtccct

SEQ ID NO: 61062 - DNA, 20 bp, Artificial Sequence
  Synthetic oligonucleotide; GAGAAT chr11 5370705 5370724 5370708 -
atacaagcttcataggaaca

SEQ ID NO: 61063 - DNA, 20 bp, Artificial Sequence
  Synthetic oligonucleotide; AAGAGT chr11 5370563 5370582 5370566 -
tattcatttctaaacacaga

SEQ ID NO: 61064 - DNA, 20 bp, Artificial Sequence
  Synthetic oligonucleotide; AAGAAT chr11 5370533 5370552 5370536 -
aagggagaaagacagaaagt

SEQ ID NO: 61065 - DNA, 20 bp, Artificial Sequence
  Synthetic oligonucleotide; GAGAGT chr11 5370519 5370538 5370522 -
gaaagtaagaatgaaagaaa

SEQ ID NO: 61066 - DNA, 20 bp, Artificial Sequence
  Synthetic oligonucleotide; AAGAAT chr11 5370507 5370526 5370510 -
gaaagaaagagagtgagata

SEQ ID NO: 61067 - DNA, 20 bp, Artificial Sequence
  Synthetic oligonucleotide; TTGAAT chr11 5370429 5370448 5370432 -
acaaatgatcctctgaagat

SEQ ID NO: 61068 - DNA, 20 bp, Artificial Sequence
  Synthetic oligonucleotide; TAGGAT chr11 5370237 5370256 5370240 -
aacattcaaaccttcaactt

SEQ ID NO: 61069 - DNA, 20 bp, Artificial Sequence
  Synthetic oligonucleotide; CAGAAT chr11 5369987 5370006 5369990 -
cttgttgatacagattgaca

SEQ ID NO: 61070 - DNA, 20 bp, Artificial Sequence
  Synthetic oligonucleotide; TTGAGT chr11 5369952 5369971 5369955 -
tctttccccactgcctttcc

SEQ ID NO: 61071 - DNA, 20 bp, Artificial Sequence
  Synthetic oligonucleotide; TTGGAT chr11 5369859 5369878 5369862 -
ttaacaactgttgacttatt

SEQ ID NO: 61072 - DNA, 20 bp, Artificial Sequence
  Synthetic oligonucleotide; TTGAGT chr11 5369735 5369754 5369738 -
cagccaataggactatttat

SEQ ID NO: 61073 - DNA, 20 bp, Artificial Sequence
  Synthetic oligonucleotide; GAGGAT chr11 5369648 5369667 5369651 -
aaagggaaattatctccagg

SEQ ID NO: 61074 - DNA, 20 bp, Artificial Sequence
  Synthetic oligonucleotide; AAGGAT chr11 5369634 5369653 5369637 -
tccagggaggatagaaaggt

SEQ ID NO: 61075 - DNA, 20 bp, Artificial Sequence
  Synthetic oligonucleotide; TGGAGT chr11 5369598 5369617 5369601 -
tactttatatttaatataca

SEQ ID NO: 61076 - DNA, 20 bp, Artificial Sequence
  Synthetic oligonucleotide; TAGGAT chr11 5369557 5369576 5369560 -
aattatatcatagacatatt

SEQ ID NO: 61077 - DNA, 20 bp, Artificial Sequence
  Synthetic oligonucleotide; GTGAAT chr11 5369550 5369569 5369553 -
tcatagacatatttaggata

SEQ ID NO: 61078 - DNA, 20 bp, Artificial Sequence
  Synthetic oligonucleotide; TAGAGT chr11 5369436 5369455 5369439 -
tatataaaaagtctgtttca

SEQ ID NO: 61079 - DNA, 20 bp, Artificial Sequence
  Synthetic oligonucleotide; GTGAAT chr11 5369192 5369211 5369195 -
tagggactcaggttatatgt

SEQ ID NO: 61080 - DNA, 20 bp, Artificial Sequence
  Synthetic oligonucleotide; ATGGAT chr11 5369188 5369207 5369191 -
gactcaggttatatgtgtga

SEQ ID NO: 61081 - DNA, 20 bp, Artificial Sequence
  Synthetic oligonucleotide; ATGAAT chr11 5369184 5369203 5369187 -
caggttatatgtgtgaatgg

SEQ ID NO: 61082 - DNA, 20 bp, Artificial Sequence
  Synthetic oligonucleotide; ATGAAT chr11 5369176 5369195 5369179 -
atgtgtgaatggatgaataa

SEQ ID NO: 61083 - DNA, 20 bp, Artificial Sequence
  Synthetic oligonucleotide; ATGAAT chr11 5369172 5369191 5369175 -
gtgaatggatgaataaatga

SEQ ID NO: 61084 - DNA, 20 bp, Artificial Sequence
  Synthetic oligonucleotide; GTGAAT chr11 5369046 5369065 5369049 -
cttcaaaggcactcatcttg

SEQ ID NO: 61085 - DNA, 20 bp, Artificial Sequence
  Synthetic oligonucleotide; ATGAAT chr11 5369042 5369061 5369045 -
aaaggcactcatcttggtga

SEQ ID NO: 61086 - DNA, 20 bp, Artificial Sequence
  Synthetic oligonucleotide; TTGGGT chr11 5368966 5368985 5368969 -
tgacacacaatttaggcttc

SEQ ID NO: 61087 - DNA, 20 bp, Artificial Sequence
  Synthetic oligonucleotide; AAGAAT chr11 5368869 5368888 5368872 -
aaacctctcttaatccacat

SEQ ID NO: 61088 - DNA, 20 bp, Artificial Sequence
  Synthetic oligonucleotide; TTGAGT chr11 5368738 5368757 5368741 -
cagttttaaagcataatatt

SEQ ID NO: 61089 - DNA, 20 bp, Artificial Sequence
  Synthetic oligonucleotide; CAGGAT chr11 5368657 5368676 5368660 -
tactatgctctgctttctca

SEQ ID NO: 61090 - DNA, 20 bp, Artificial Sequence
  Synthetic oligonucleotide; GAGAAT chr11 5368645 5368664 5368648 -
ctttctcacaggatgcatgt

SEQ ID NO: 61091 - DNA, 20 bp, Artificial Sequence
  Synthetic oligonucleotide; TAGAAT chr11 5368619 5368638 5368622 -
aaaacacaaagtctttatgt

SEQ ID NO: 61092 - DNA, 20 bp, Artificial Sequence
  Synthetic oligonucleotide; CAGAGT chr11 5368539 5368558 5368542 -
ttttctttgtcagagctaga

SEQ ID NO: 61093 - DNA, 20 bp, Artificial Sequence
  Synthetic oligonucleotide; GTGGGT chr11 5368373 5368392 5368376 -
cattaaaataattcaaccat

SEQ ID NO: 61094 - DNA, 20 bp, Artificial Sequence
  Synthetic oligonucleotide; ATGAGT chr11 5368344 5368363 5368347 -
attggtatccccacttaaag

SEQ ID NO: 61095 - DNA, 20 bp, Artificial Sequence
  Synthetic oligonucleotide; TAGGGT chr11 5368304 5368323 5368307 -
aaagataaattgctttgcta

SEQ ID NO: 61096 - DNA, 20 bp, Artificial Sequence
  Synthetic oligonucleotide; TGGGAT chr11 5368277 5368296 5368280 -
cgcagccaataagtggaagg

SEQ ID NO: 61097 - DNA, 20 bp, Artificial Sequence
  Synthetic oligonucleotide; CAGGAT chr11 5368177 5368196 5368180 -
gaagcctacagaacacttaa

SEQ ID NO: 61098 - DNA, 20 bp, Artificial Sequence
  Synthetic oligonucleotide; CTGAAT chr11 5368123 5368142 5368126 -
tggttgaagatgcaacaaat

SEQ ID NO: 61099 - DNA, 20 bp, Artificial Sequence
  Synthetic oligonucleotide; GAGAGT chr11 5368095 5368114 5368098 -
cagaggaaaaaacaaagaaa

SEQ ID NO: 61100 - DNA, 20 bp, Artificial Sequence
  Synthetic oligonucleotide; CTGAGT chr11 5368088 5368107 5368091 -
aaaaacaaagaaagagagtt

SEQ ID NO: 61101 - DNA, 20 bp, Artificial Sequence
  Synthetic oligonucleotide; CTGGGT chr11 5368078 5368097 5368081 -
aaagagagttctgagtgagc

SEQ ID NO: 61102 - DNA, 20 bp, Artificial Sequence
  Synthetic oligonucleotide; TTGGGT chr11 5368043 5368062 5368046 -
agcaaagaaccaagtgaagc

SEQ ID NO: 61103 - DNA, 20 bp, Artificial Sequence
  Synthetic oligonucleotide; TGGGGT chr11 5368031 5368050 5368034 -
agtgaagcttgggttagttg

SEQ ID NO: 61104 - DNA, 20 bp, Artificial Sequence
  Synthetic oligonucleotide; AAGAAT chr11 5367972 5367991 5367975 -
ctggtagaagtgaaactttg

SEQ ID NO: 61105 - DNA, 20 bp, Artificial Sequence
  Synthetic oligonucleotide; CTGAGT chr11 5367946 5367965 5367949 -
gtctgattcctcacaaactg

SEQ ID NO: 61106 - DNA, 20 bp, Artificial Sequence
  Synthetic oligonucleotide; AAGGAT chr11 5367940 5367959 5367943 -
ttcctcacaaactgctgagt

SEQ ID NO: 61107 - DNA, 20 bp, Artificial Sequence
  Synthetic oligonucleotide; TTGAAT chr11 5367846 5367865 5367849 -
aagtgaaaaaaaatacattt

SEQ ID NO: 61108 - DNA, 20 bp, Artificial Sequence
  Synthetic oligonucleotide; CTGGGT chr11 5367814 5367833 5367817 -
attgtgcaagtgcctctatt

SEQ ID NO: 61109 - DNA, 20 bp, Artificial Sequence
  Synthetic oligonucleotide; CTGGGT chr11 5367730 5367749 5367733 -
aactccatcttaaataggag

SEQ ID NO: 61110 - DNA, 20 bp, Artificial Sequence
  Synthetic oligonucleotide; CAGGAT chr11 5367667 5367686 5367670 -
aagttaggcattctcagtca

SEQ ID NO: 61111 - DNA, 20 bp, Artificial Sequence
  Synthetic oligonucleotide; GAGAGT chr11 5367560 5367579 5367563 -
caccaaaccaagattgtgat

SEQ ID NO: 61112 - DNA, 20 bp, Artificial Sequence
  Synthetic oligonucleotide; ATGAAT chr11 5367449 5367468 5367452 -
gcggtctgaaaaggggaggc

SEQ ID NO: 61113 - DNA, 20 bp, Artificial Sequence
  Synthetic oligonucleotide; TAGGGT chr11 5367363 5367382 5367366 -
cctcaggactgttctgccta

SEQ ID NO: 61114 - DNA, 20 bp, Artificial Sequence
  Synthetic oligonucleotide; ATGGAT chr11 5367304 5367323 5367307 -
acttgctttcacttttctgt

SEQ ID NO: 61115 - DNA, 20 bp, Artificial Sequence
  Synthetic oligonucleotide; TAGGGT chr11 5367253 5367272 5367256 -
gaaatccaagaaccctctct

SEQ ID NO: 61116 - DNA, 20 bp, Artificial Sequence
  Synthetic oligonucleotide; CTGGAT chr11 5367247 5367266 5367250 -
caagaaccctctcttagggt

SEQ ID NO: 61117 - DNA, 20 bp, Artificial Sequence
  Synthetic oligonucleotide; GAGAAT chr11 5367069 5367088 5367072 -
accacattcctgagacttga

SEQ ID NO: 61118 - DNA, 20 bp, Artificial Sequence
  Synthetic oligonucleotide; GAGAAT chr11 5367043 5367062 5367046 -
gtctttggtctctgctgcta

SEQ ID NO: 61119 - DNA, 20 bp, Artificial Sequence
  Synthetic oligonucleotide; GGGAAT chr11 5366981 5367000 5366984 -
gcattttcaaactttgggag

SEQ ID NO: 61120 - DNA, 20 bp, Artificial Sequence
  Synthetic oligonucleotide; ATGAAT chr11 5366897 5366916 5366900 -
aactttgtgcctgttgtctc

SEQ ID NO: 61121 - DNA, 20 bp, Artificial Sequence
  Synthetic oligonucleotide; TGGGAT chr11 5366835 5366854 5366838 -
attgcacagagacccgtgct

SEQ ID NO: 61122 - DNA, 20 bp, Artificial Sequence
  Synthetic oligonucleotide; TGGAAT chr11 5366829 5366848 5366832 -
cagagacccgtgcttgggat

SEQ ID NO: 61123 - DNA, 20 bp, Artificial Sequence
  Synthetic oligonucleotide; TTGAAT chr11 5366770 5366789 5366773 -
taatttttattctaaagact

SEQ ID NO: 61124 - DNA, 20 bp, Artificial Sequence
  Synthetic oligonucleotide; GTGAAT chr11 5366759 5366778 5366762 -
ctaaagactttgaatctcaa

SEQ ID NO: 61125 - DNA, 20 bp, Artificial Sequence
  Synthetic oligonucleotide; TGGAGT chr11 5366580 5366599 5366583 -
gcttttgccttccaggctgc

SEQ ID NO: 61126 - DNA, 20 bp, Artificial Sequence
  Synthetic oligonucleotide; CAGGGT chr11 5366437 5366456 5366440 -
ttttgtatttttattagaga

SEQ ID NO: 61127 - DNA, 20 bp, Artificial Sequence
  Synthetic oligonucleotide; TGGGAT chr11 5366358 5366377 5366361 -
gcctcagccacccaaagtgc

SEQ ID NO: 61128 - DNA, 20 bp, Artificial Sequence
  Synthetic oligonucleotide; ATGAGT chr11 5366345 5366364 5366348 -
aaagtgctgggattacaggc

SEQ ID NO: 61129 - DNA, 20 bp, Artificial Sequence
  Synthetic oligonucleotide; CTGGGT chr11 5366134 5366153 5366137 -
actgtttcttattttgccca

SEQ ID NO: 61130 - DNA, 20 bp, Artificial Sequence
  Synthetic oligonucleotide; TAGGGT chr11 5366032 5366051 5366035 -
ctgattacctggctgctcca

SEQ ID NO: 61131 - DNA, 20 bp, Artificial Sequence
  Synthetic oligonucleotide; CAGAGT chr11 5365885 5365904 5365888 -
ttcagaacccaagaggtaag

SEQ ID NO: 61132 - DNA, 20 bp, Artificial Sequence
  Synthetic oligonucleotide; AAGAAT chr11 5365873 5365892 5365876 -
gaggtaagcagagttcctct

SEQ ID NO: 61133 - DNA, 20 bp, Artificial Sequence
  Synthetic oligonucleotide; GTGGGT chr11 5365797 5365816 5365800 -
tctataatgtgctagacaat

SEQ ID NO: 61134 - DNA, 20 bp, Artificial Sequence
  Synthetic oligonucleotide; CTGGAT chr11 5365777 5365796 5365780 -
gtgggtaatggaggtgatgc

SEQ ID NO: 61135 - DNA, 20 bp, Artificial Sequence
  Synthetic oligonucleotide; TTGGGT chr11 5365702 5365721 5365705 -
gacaatttaaatgtatcagt

SEQ ID NO: 61136 - DNA, 20 bp, Artificial Sequence
  Synthetic oligonucleotide; TTGAAT chr11 5365697 5365716 5365700 -
tttaaatgtatcagtttggg

SEQ ID NO: 61137 - DNA, 20 bp, Artificial Sequence
  Synthetic oligonucleotide; AGGGAT chr11 5365685 5365704 5365688 -
agtttgggttgaataaaatc

SEQ ID NO: 61138 - DNA, 20 bp, Artificial Sequence
  Synthetic oligonucleotide; CAGAAT chr11 5365475 5365494 5365478 -
atggttgctgactggcagac

SEQ ID NO: 61139 - DNA, 20 bp, Artificial Sequence
  Synthetic oligonucleotide; TTGGGT chr11 5365470 5365489 5365473 -
tgctgactggcagaccagaa

SEQ ID NO: 61140 - DNA, 20 bp, Artificial Sequence
  Synthetic oligonucleotide; TGGAGT chr11 5365234 5365253 5365237 -
tggttcactagatgtttcca

SEQ ID NO: 61141 - DNA, 20 bp, Artificial Sequence
  Synthetic oligonucleotide; TTGAAT chr11 5365113 5365132 5365116 -
cagttgtgataagctaccac

SEQ ID NO: 61142 - DNA, 20 bp, Artificial Sequence
  Synthetic oligonucleotide; TTGAGT chr11 5365065 5365084 5365068 -
tattgacacatttggtttta

SEQ ID NO: 61143 - DNA, 20 bp, Artificial Sequence
  Synthetic oligonucleotide; AAGAAT chr11 5365026 5365045 5365029 -
ccaagattcattgctgtgac

SEQ ID NO: 61144 - DNA, 20 bp, Artificial Sequence
  Synthetic oligonucleotide; GAGGGT chr11 5364780 5364799 5364783 -
aacacatgctcaggaaggaa

SEQ ID NO: 61145 - DNA, 20 bp, Artificial Sequence
  Synthetic oligonucleotide; AAGAGT chr11 5364733 5364752 5364736 -
gactttgatcattcactttg

SEQ ID NO: 61146 - DNA, 20 bp, Artificial Sequence
  Synthetic oligonucleotide; CTGGAT chr11 5364714 5364733 5364717 -
gaagagtcttctgtcatatg

SEQ ID NO: 61147 - DNA, 20 bp, Artificial Sequence
  Synthetic oligonucleotide; TAGAGT chr11 5364683 5364702 5364686 -
aacagcttagagggctgcct

SEQ ID NO: 61148 - DNA, 20 bp, Artificial Sequence
  Synthetic oligonucleotide; GAGGAT chr11 5364645 5364664 5364648 -
agatattcagagatgcacat

SEQ ID NO: 61149 - DNA, 20 bp, Artificial Sequence
  Synthetic oligonucleotide; TGGAGT chr11 5364640 5364659 5364643 -
ttcagagatgcacatgagga

SEQ ID NO: 61150 - DNA, 20 bp, Artificial Sequence
  Synthetic oligonucleotide; CAGAAT chr11 5364572 5364591 5364575 -
gtttattttttcatttaata

SEQ ID NO: 61151 - DNA, 20 bp, Artificial Sequence
  Synthetic oligonucleotide; TTGAAT chr11 5364513 5364532 5364516 -
tgcttaaagctggcatgtag

SEQ ID NO: 61152 - DNA, 20 bp, Artificial Sequence
  Synthetic oligonucleotide; GAGAAT chr11 5364479 5364498 5364482 -
cagcaaggagactgaccatt

SEQ ID NO: 61153 - DNA, 20 bp, Artificial Sequence
  Synthetic oligonucleotide; AGGAAT chr11 5364461 5364480 5364464 -
ttgagaattacaaatatggc

SEQ ID NO: 61154 - DNA, 20 bp, Artificial Sequence
  Synthetic oligonucleotide; TTGAAT chr11 5364107 5364126 5364110 -
ttgagatacctcttccttta

SEQ ID NO: 61155 - DNA, 20 bp, Artificial Sequence
  Synthetic oligonucleotide; GAGAAT chr11 5364075 5364094 5364078 -
tcgaccttattgcaaccatg

SEQ ID NO: 61156 - DNA, 20 bp, Artificial Sequence
  Synthetic oligonucleotide; GTGGGT chr11 5364030 5364049 5364033 -
aggtccacatcacataatat

SEQ ID NO: 61157 - DNA, 20 bp, Artificial Sequence
  Synthetic oligonucleotide; GTGAAT chr11 5364026 5364045 5364029 -
ccacatcacataatatgtgg

SEQ ID NO: 61158 - DNA, 20 bp, Artificial Sequence
  Synthetic oligonucleotide; ATGGGT chr11 5363937 5363956 5363940 -
gcttctcctcctttacagaa

SEQ ID NO: 61159 - DNA, 20 bp, Artificial Sequence
  Synthetic oligonucleotide; CTGAGT chr11 5363931 5363950 5363934 -
cctcctttacagaaatgggt

SEQ ID NO: 61160 - DNA, 20 bp, Artificial Sequence
  Synthetic oligonucleotide; CTGAGT chr11 5363897 5363916 5363900 -
tttatacctgccatgtcatg

SEQ ID NO: 61161 - DNA, 20 bp, Artificial Sequence
  Synthetic oligonucleotide; TGGGGT chr11 5363885 5363904 5363888 -
atgtcatgctgagtgggggc

SEQ ID NO: 61162 - DNA, 20 bp, Artificial Sequence
  Synthetic oligonucleotide; CTGGAT chr11 5363807 5363826 5363810 -
tattgtacactaaatatagt

SEQ ID NO: 61163 - DNA, 20 bp, Artificial Sequence
  Synthetic oligonucleotide; TAGAAT chr11 5363774 5363793 5363777 -
atatggtccctagtttttaa

SEQ ID NO: 61164 - DNA, 20 bp, Artificial Sequence
  Synthetic oligonucleotide; CAGAAT chr11 5363733 5363752 5363736 -
actttcccgctttccaataa

SEQ ID NO: 61165 - DNA, 20 bp, Artificial Sequence
  Synthetic oligonucleotide; CAGAGT chr11 5363680 5363699 5363683 -
acaagcaaatggccaaatgg

SEQ ID NO: 61166 - DNA, 20 bp, Artificial Sequence
  Synthetic oligonucleotide; GTGAGT chr11 5363538 5363557 5363541 -
tgcttggtttaataaaagta

SEQ ID NO: 61167 - DNA, 20 bp, Artificial Sequence
  Synthetic oligonucleotide; CTGAGT chr11 5363519 5363538 5363522 -
agtgagtgtacctcatggag

SEQ ID NO: 61168 - DNA, 20 bp, Artificial Sequence
  Synthetic oligonucleotide; GAGAGT chr11 5363463 5363482 5363466 -
tggcgcttttgtgtgagaga

SEQ ID NO: 61169 - DNA, 20 bp, Artificial Sequence
  Synthetic oligonucleotide; TAGGAT chr11 5363402 5363421 5363405 -
aggaacaattaattggtgat

SEQ ID NO: 61170 - DNA, 20 bp, Artificial Sequence
  Synthetic oligonucleotide; AGGGGT chr11 5363238 5363257 5363241 -
tgtgtgtgtgtgtgtgtgtg

SEQ ID NO: 61171 - DNA, 20 bp, Artificial Sequence
  Synthetic oligonucleotide; TTGGGT chr11 5363233 5363252 5363236 -
gtgtgtgtgtgtgtgagggg

SEQ ID NO: 61172 - DNA, 20 bp, Artificial Sequence
  Synthetic oligonucleotide; TTGAGT chr11 5363150 5363169 5363153 -
atcattctgttcgtaaaact

SEQ ID NO: 61173 - DNA, 20 bp, Artificial Sequence
  Synthetic oligonucleotide; CAGGGT chr11 5363132 5363151 5363135 -
ctttgagttttgaagacact

SEQ ID NO: 61174 - DNA, 20 bp, Artificial Sequence
  Synthetic oligonucleotide; AGGAAT chr11 5363096 5363115 5363099 -
ccttaagctttctctcatgg

SEQ ID NO: 61175 - DNA, 20 bp, Artificial Sequence
  Synthetic oligonucleotide; AGGGAT chr11 5362890 5362909 5362893 -
aaaacttaatttacaaaagc

SEQ ID NO: 61176 - DNA, 20 bp, Artificial Sequence
  Synthetic oligonucleotide; AAGAGT chr11 5362798 5362817 5362801 -
agaggacttcaaagcccatg

SEQ ID NO: 61177 - DNA, 20 bp, Artificial Sequence
  Synthetic oligonucleotide; CTGGGT chr11 5362661 5362680 5362664 -
aatcagatgggggaagacag

SEQ ID NO: 61178 - DNA, 20 bp, Artificial Sequence
  Synthetic oligonucleotide; CTGAAT chr11 5362339 5362358 5362342 -
cttcgtagttgattatggct

SEQ ID NO: 61179 - DNA, 20 bp, Artificial Sequence
  Synthetic oligonucleotide; CTGGGT chr11 5362298 5362317 5362301 -
gcatccagcaccattttcat

SEQ ID NO: 61180 - DNA, 20 bp, Artificial Sequence
  Synthetic oligonucleotide; CGGGAT chr11 5362226 5362245 5362229 -
cccatcccccgacagaaaca

SEQ ID NO: 61181 - DNA, 20 bp, Artificial Sequence
  Synthetic oligonucleotide; CTGGGT chr11 5362203 5362222 5362206 -
gatccactatcactctctat

SEQ ID NO: 61182 - DNA, 20 bp, Artificial Sequence
  Synthetic oligonucleotide; TGGAAT chr11 5362155 5362174 5362158 -
gcagtgctgatagctcagca

SEQ ID NO: 61183 - DNA, 20 bp, Artificial Sequence
  Synthetic oligonucleotide; AAGGAT chr11 5362112 5362131 5362115 -
tctctctgactttggtttat

SEQ ID NO: 61184 - DNA, 20 bp, Artificial Sequence
  Synthetic oligonucleotide; ATGGAT chr11 5362090 5362109 5362093 -
ggatttgcatacattttctg

SEQ ID NO: 61185 - DNA, 20 bp, Artificial Sequence
  Synthetic oligonucleotide; GGGAAT chr11 5362069 5362088 5362072 -
tggatactaggctcatttct

SEQ ID NO: 61186 - DNA, 20 bp, Artificial Sequence
  Synthetic oligonucleotide; GGGAGT chr11 5361918 5361937 5361921 -
actctaacttcatctttttt

SEQ ID NO: 61187 - DNA, 20 bp, Artificial Sequence
  Synthetic oligonucleotide; CAGAGT chr11 5361826 5361845 5361829 -
aggaaatagataatccaaac

SEQ ID NO: 61188 - DNA, 20 bp, Artificial Sequence
  Synthetic oligonucleotide; GTGGAT chr11 5361785 5361804 5361788 -
agatatcattctgtattccc

SEQ ID NO: 61189 - DNA, 20 bp, Artificial Sequence
  Synthetic oligonucleotide; GGGAAT chr11 5361741 5361760 5361744 -
ctaactagatcactctgcta

SEQ ID NO: 61190 - DNA, 20 bp, Artificial Sequence
  Synthetic oligonucleotide; TAGGAT chr11 5361722 5361741 5361725 -
agggaatgaaaaaggagatc

SEQ ID NO: 61191 - DNA, 20 bp, Artificial Sequence
  Synthetic oligonucleotide; AGGAAT chr11 5361704 5361723 5361707 -
tctaggattttccctcttct

SEQ ID NO: 61192 - DNA, 20 bp, Artificial Sequence
  Synthetic oligonucleotide; GGGAGT chr11 5361656 5361675 5361659 -
gccaagttctaaagatttta

SEQ ID NO: 61193 - DNA, 20 bp, Artificial Sequence
  Synthetic oligonucleotide; TGGGAT chr11 5361647 5361666 5361650 -
taaagattttagggagtctt

SEQ ID NO: 61194 - DNA, 20 bp, Artificial Sequence
  Synthetic oligonucleotide; TGGAGT chr11 5361519 5361538 5361522 -
gcctctaggccaagacacac

SEQ ID NO: 61195 - DNA, 20 bp, Artificial Sequence
  Synthetic oligonucleotide; TTGGAT chr11 5361437 5361456 5361440 -
ccctaagcctggtcaagata

SEQ ID NO: 61196 - DNA, 20 bp, Artificial Sequence
  Synthetic oligonucleotide; AGGGAT chr11 5361314 5361333 5361317 -
ttctttattctcccagcctg

SEQ ID NO: 61197 - DNA, 20 bp, Artificial Sequence
  Synthetic oligonucleotide; AGGAGT chr11 5361293 5361312 5361296 -
gggatttagaactttggaac

SEQ ID NO: 61198 - DNA, 20 bp, Artificial Sequence
  Synthetic oligonucleotide; GGGAAT chr11 5361258 5361277 5361261 -
ttcttcctgcatctaggtta

SEQ ID NO: 61199 - DNA, 20 bp, Artificial Sequence
  Synthetic oligonucleotide; AGGGGT chr11 5361210 5361229 5361213 -
atttattttaagcatcacat

SEQ ID NO: 61200 - DNA, 20 bp, Artificial Sequence
  Synthetic oligonucleotide; GAGGAT chr11 5361187 5361206 5361190 -
ggtagaaaagaaaatgtagg

SEQ ID NO: 61201 - DNA, 20 bp, Artificial Sequence
  Synthetic oligonucleotide; TAGGGT chr11 5361125 5361144 5361128 -
tattattatactttaagttt

SEQ ID NO: 61202 - DNA, 20 bp, Artificial Sequence
  Synthetic oligonucleotide; ATGAGT chr11 5360923 5360942 5360926 -
tcattgttcaattcccacct

SEQ ID NO: 61203 - DNA, 20 bp, Artificial Sequence
  Synthetic oligonucleotide; GAGAAT chr11 5360874 5360893 5360877 -
tgtccttgcgatagtttgct

SEQ ID NO: 61204 - DNA, 20 bp, Artificial Sequence
  Synthetic oligonucleotide; TTGGGT chr11 5360744 5360763 5360747 -
agtctatcattgttggacat

SEQ ID NO: 61205 - DNA, 20 bp, Artificial Sequence
  Synthetic oligonucleotide; GTGAAT chr11 5360717 5360736 5360720 -
ggttccaagtctttgctatt

SEQ ID NO: 61206 - DNA, 20 bp, Artificial Sequence
  Synthetic oligonucleotide; TTGAGT chr11 5360653 5360672 5360656 -
gcagcatgatttataatcct

SEQ ID NO: 61207 - DNA, 20 bp, Artificial Sequence
  Synthetic oligonucleotide; TGGGAT chr11 5360634 5360653 5360637 -
tttgagtatgtacccagtaa

SEQ ID NO: 61208 - DNA, 20 bp, Artificial Sequence
  Synthetic oligonucleotide; CTGGGT chr11 5360626 5360645 5360629 -
tgtacccagtaatgggatgg

SEQ ID NO: 61209 - DNA, 20 bp, Artificial Sequence
  Synthetic oligonucleotide; AGGAAT chr11 5360591 5360610 5360594 -
tttctagttctagatccctg

SEQ ID NO: 61210 - DNA, 20 bp, Artificial Sequence
  Synthetic oligonucleotide; TGGGGT chr11 5360314 5360333 5360317 -
atcctttgcccactttttga

SEQ ID NO: 61211 - DNA, 20 bp, Artificial Sequence
  Synthetic oligonucleotide; TTGAGT chr11 5360286 5360305 5360289 -
tttttttcttgtaaatttgt

SEQ ID NO: 61212 - DNA, 20 bp, Artificial Sequence
  Synthetic oligonucleotide; CTGGAT chr11 5360268 5360287 5360271 -
gtttgagttcatcatagatt

SEQ ID NO: 61213 - DNA, 20 bp, Artificial Sequence
  Synthetic oligonucleotide; TCGGAT chr11 5360250 5360269 5360253 -
ttctggatattagccctttg

SEQ ID NO: 61214 - DNA, 20 bp, Artificial Sequence
  Synthetic oligonucleotide; ATGAGT chr11 5360246 5360265 5360249 -
ggatattagccctttgtcgg

SEQ ID NO: 61215 - DNA, 20 bp, Artificial Sequence
  Synthetic oligonucleotide; CTGAAT chr11 5360071 5360090 5360074 -
tccttgcccatgcctatgtc

SEQ ID NO: 61216 - DNA, 20 bp, Artificial Sequence
  Synthetic oligonucleotide; CAGAGT chr11 5360044 5360063 5360047 -
gtattgcctaggttttcttc

SEQ ID NO: 61217 - DNA, 20 bp, Artificial Sequence
  Synthetic oligonucleotide; TTGAAT chr11 5359997 5360016 5360000 -
atttaagtctgtaatccatc

SEQ ID NO: 61218 - DNA, 20 bp, Artificial Sequence
  Synthetic oligonucleotide; AGGGAT chr11 5359967 5359986 5359970 -
ttttgtataaggtgtaagaa

SEQ ID NO: 61219 - DNA, 20 bp, Artificial Sequence
  Synthetic oligonucleotide; GGGAAT chr11 5359904 5359923 5359907 -
ccagcaccatttattaaata

SEQ ID NO: 61220 - DNA, 20 bp, Artificial Sequence
  Synthetic oligonucleotide; TAGGAT chr11 5359696 5359715 5359699 -
ccagctttgttcttttggct

SEQ ID NO: 61221 - DNA, 20 bp, Artificial Sequence
  Synthetic oligonucleotide; GGGGAT chr11 5359600 5359619 5359603 -
aaagtcattggtagcttgat

SEQ ID NO: 61222 - DNA, 20 bp, Artificial Sequence
  Synthetic oligonucleotide; TTGAAT chr11 5359590 5359609 5359593 -
gtagcttgatggggatggca

SEQ ID NO: 61223 - DNA, 20 bp, Artificial Sequence
  Synthetic oligonucleotide; TGGAAT chr11 5359522 5359541 5359525 -
attcttcctacccatgagca

SEQ ID NO: 61224 - DNA, 20 bp, Artificial Sequence
  Synthetic oligonucleotide; TTGGAT chr11 5359429 5359448 5359432 -
tccttcacctctcttgtaag

SEQ ID NO: 61225 - DNA, 20 bp, Artificial Sequence
  Synthetic oligonucleotide; GTGAAT chr11 5359392 5359411 5359395 -
ttattctctttgaagcaatt

SEQ ID NO: 61226 - DNA, 20 bp, Artificial Sequence
  Synthetic oligonucleotide; GGGAGT chr11 5359386 5359405 5359389 -
tctttgaagcaattgtgaat

SEQ ID NO: 61227 - DNA, 20 bp, Artificial Sequence
  Synthetic oligonucleotide; AAGAAT chr11 5359338 5359357 5359341 -
tttgtctgttattggtgtat

SEQ ID NO: 61228 - DNA, 20 bp, Artificial Sequence
  Synthetic oligonucleotide; TGGGGT chr11 5359247 5359266 5359250 -
gacattttgggctgagacag

SEQ ID NO: 61229 - DNA, 20 bp, Artificial Sequence
  Synthetic oligonucleotide; TTGAAT chr11 5359180 5359199 5359183 -
ttgacttcctcttttcctaa

SEQ ID NO: 61230 - DNA, 20 bp, Artificial Sequence
  Synthetic oligonucleotide; TTGAAT chr11 5359120 5359139 5359123 -
ccagaaattccaacactatg

SEQ ID NO: 61231 - DNA, 20 bp, Artificial Sequence
  Synthetic oligonucleotide; AGGAGT chr11 5359114 5359133 5359117 -
attccaacactatgttgaat

SEQ ID NO: 61232 - DNA, 20 bp, Artificial Sequence
  Synthetic oligonucleotide; GGGAAT chr11 5359069 5359088 5359072 -
gtcttgtgccagttttcaaa

SEQ ID NO: 61233 - DNA, 20 bp, Artificial Sequence
  Synthetic oligonucleotide; GTGGGT chr11 5359027 5359046 5359030 -
cattcagtatgatattggct

SEQ ID NO: 61234 - DNA, 20 bp, Artificial Sequence
  Synthetic oligonucleotide; GAGAGT chr11 5358965 5358984 5358968 -
ccatcaatacctaatttatt

SEQ ID NO: 61235 - DNA, 20 bp, Artificial Sequence
  Synthetic oligonucleotide; AAGGGT chr11 5358949 5358968 5358952 -
tattgagagtttttagcatg

SEQ ID NO: 61236 - DNA, 20 bp, Artificial Sequence
  Synthetic oligonucleotide; TTGAAT chr11 5358941 5358960 5358944 -
gtttttagcatgaagggttg

SEQ ID NO: 61237 - DNA, 20 bp, Artificial Sequence
  Synthetic oligonucleotide; CTGGAT chr11 5358866 5358885 5358869 -
tctttggttctgtttatatg

SEQ ID NO: 61238 - DNA, 20 bp, Artificial Sequence
  Synthetic oligonucleotide; AGGGAT chr11 5358818 5358837 5358821 -
ttgaaccagccttgcatccc

SEQ ID NO: 61239 - DNA, 20 bp, Artificial Sequence
  Synthetic oligonucleotide; GTGGAT chr11 5358794 5358813 5358797 -
atgaagcccacttgatcatg

SEQ ID NO: 61240 - DNA, 20 bp, Artificial Sequence
  Synthetic oligonucleotide; TTGGAT chr11 5358782 5358801 5358785 -
tgatcatggtggataagctt

SEQ ID NO: 61241 - DNA, 20 bp, Artificial Sequence
  Synthetic oligonucleotide; CTGGAT chr11 5358770 5358789 5358773 -
ataagcttttggatgtgctg

SEQ ID NO: 61242 - DNA, 20 bp, Artificial Sequence
  Synthetic oligonucleotide; AGGGAT chr11 5358718 5358737 5358721 -
tttttgcatcgatgtccatc

SEQ ID NO: 61243 - DNA, 20 bp, Artificial Sequence
  Synthetic oligonucleotide; CAGGAT chr11 5358662 5358681 5358665 -
tctctgcccggctttggtat

SEQ ID NO: 61244 - DNA, 20 bp, Artificial Sequence
  Synthetic oligonucleotide; ATGAGT chr11 5358639 5358658 5358642 -
gatgatgctggcctcataaa

SEQ ID NO: 61245 - DNA, 20 bp, Artificial Sequence
  Synthetic oligonucleotide; GAGGAT chr11 5358629 5358648 5358632 -
gcctcataaaatgagttagg

SEQ ID NO: 61246 - DNA, 20 bp, Artificial Sequence
  Synthetic oligonucleotide; TCGAAT chr11 5358604 5358623 5358607 -
ttccctcttttactattgat

SEQ ID NO: 61247 - DNA, 20 bp, Artificial Sequence
  Synthetic oligonucleotide; GGGAAT chr11 5358589 5358608 5358592 -
ttgattcgaatagtttcaga

SEQ ID NO: 61248 - DNA, 20 bp, Artificial Sequence
  Synthetic oligonucleotide; TAGAAT chr11 5358556 5358575 5358559 -
gctcctccttgtacctctgg

SEQ ID NO: 61249 - DNA, 20 bp, Artificial Sequence
  Synthetic oligonucleotide; GAGGGT chr11 5358428 5358447 5358431 -
tcttcctggtttagtcttgg

SEQ ID NO: 61250 - DNA, 20 bp, Artificial Sequence
  Synthetic oligonucleotide; AGGAAT chr11 5358412 5358431 5358415 -
ttgggagggtgtatgtgtca

SEQ ID NO: 61251 - DNA, 20 bp, Artificial Sequence
  Synthetic oligonucleotide; TGGGAT chr11 5358327 5358346 5358330 -
gatggtggtttgtatttctg

SEQ ID NO: 61252 - DNA, 20 bp, Artificial Sequence
  Synthetic oligonucleotide; CTGGAT chr11 5358202 5358221 5358205 -
tctttttgaaaaaccagctt

SEQ ID NO: 61253 - DNA, 20 bp, Artificial Sequence
  Synthetic oligonucleotide; AAGGGT chr11 5358182 5358201 5358185 -
ctggattcattgattttttg

SEQ ID NO: 61254 - DNA, 20 bp, Artificial Sequence
  Synthetic oligonucleotide; TTGAAT chr11 5358110 5358129 5358113 -
ttcttgccttctgctagcat

SEQ ID NO: 61255 - DNA, 20 bp, Artificial Sequence
  Synthetic oligonucleotide; TAGGGT chr11 5358064 5358083 5358067 -
agttcttttaattgtgatgt

SEQ ID NO: 61256 - DNA, 20 bp, Artificial Sequence
  Synthetic oligonucleotide; TTGAAT chr11 5357988 5358007 5357991 -
atttccctctacacactgct

SEQ ID NO: 61257 - DNA, 20 bp, Artificial Sequence
  Synthetic oligonucleotide; TTGAGT chr11 5357845 5357864 5357848 -
ttccatgtagttgagcggtt

SEQ ID NO: 61258 - DNA, 20 bp, Artificial Sequence
  Synthetic oligonucleotide; GTGAGT chr11 5357841 5357860 5357844 -
atgtagttgagcggttttga

SEQ ID NO: 61259 - DNA, 20 bp, Artificial Sequence
  Synthetic oligonucleotide; CTGAGT chr11 5357826 5357845 5357829 -
tttgagtgagtttcttaatc

SEQ ID NO: 61260 - DNA, 20 bp, Artificial Sequence
  Synthetic oligonucleotide; AGGAGT chr11 5357754 5357773 5357757 -
ctgttcttttacatttgctg

SEQ ID NO: 61261 - DNA, 20 bp, Artificial Sequence
  Synthetic oligonucleotide; TGGAAT chr11 5357720 5357739 5357723 -
tccaactatgtggtcaattt

SEQ ID NO: 61262 - DNA, 20 bp, Artificial Sequence
  Synthetic oligonucleotide; AAGAAT chr11 5357694 5357713 5357697 -
aggtgtggtgtggtgctgaa

SEQ ID NO: 61263 - DNA, 20 bp, Artificial Sequence
  Synthetic oligonucleotide; TGGGGT chr11 5357672 5357691 5357675 -
gaatgtatattctgttgatt

SEQ ID NO: 61264 - DNA, 20 bp, Artificial Sequence
  Synthetic oligonucleotide; GAGAGT chr11 5357665 5357684 5357668 -
tattctgttgatttggggtg

SEQ ID NO: 61265 - DNA, 20 bp, Artificial Sequence
  Synthetic oligonucleotide; CTGAGT chr11 5357624 5357643 5357627 -
taggtccgcttggtgcagag

SEQ ID NO: 61266 - DNA, 20 bp, Artificial Sequence
  Synthetic oligonucleotide; CTGGAT chr11 5357611 5357630 5357614 -
tgcagagctgagttcaattc

SEQ ID NO: 61267 - DNA, 20 bp, Artificial Sequence
  Synthetic oligonucleotide; TGGGGT chr11 5357545 5357564 5357548 -
gatctgtctaatgttgacag

SEQ ID NO: 61268 - DNA, 20 bp, Artificial Sequence
  Synthetic oligonucleotide; GAGAGT chr11 5357513 5357532 5357516 -
gtctcccattgttattgtgt

SEQ ID NO: 61269 - DNA, 20 bp, Artificial Sequence
  Synthetic oligonucleotide; CTGGGT chr11 5357466 5357485 5357469 -
taaggacttgctttatgaac

SEQ ID NO: 61270 - DNA, 20 bp, Artificial Sequence
  Synthetic oligonucleotide; TTGGGT chr11 5357451 5357470 5357454 -
tgaacctgggtgttcctgta

SEQ ID NO: 61271 - DNA, 20 bp, Artificial Sequence
  Synthetic oligonucleotide; TAGGAT chr11 5357434 5357453 5357437 -
gtattgggtgcatatatgtt

SEQ ID NO: 61272 - DNA, 20 bp, Artificial Sequence
  Synthetic oligonucleotide; TTGAAT chr11 5357413 5357432 5357416 -
aggatagttagctcttcttg

SEQ ID NO: 61273 - DNA, 20 bp, Artificial Sequence
  Synthetic oligonucleotide; GAGGAT chr11 5357329 5357348 5357332 -
aagcctgttttatcagagat

SEQ ID NO: 61274 - DNA, 20 bp, Artificial Sequence
  Synthetic oligonucleotide; ATGGGT chr11 5357233 5357252 5357236 -
tgtgtgtgtgtgcacatgag

SEQ ID NO: 61275 - DNA, 20 bp, Artificial Sequence
  Synthetic oligonucleotide; CTGAAT chr11 5357224 5357243 5357227 -
gtgcacatgagatgggtttc

SEQ ID NO: 61276 - DNA, 20 bp, Artificial Sequence
  Synthetic oligonucleotide; ATGGGT chr11 5357207 5357226 5357210 -
ttcctgaatacagcacactg

SEQ ID NO: 61277 - DNA, 20 bp, Artificial Sequence
  Synthetic oligonucleotide; GTGAAT chr11 5357118 5357137 5357121 -
taaggttaatattgttatgt

SEQ ID NO: 61278 - DNA, 20 bp, Artificial Sequence
  Synthetic oligonucleotide; CTGGAT chr11 5356869 5356888 5356872 -
acttatgaagcttagtttgg

SEQ ID NO: 61279 - DNA, 20 bp, Artificial Sequence
  Synthetic oligonucleotide; AAGGAT chr11 5356832 5356851 5356835 -
tgttgaaaattctttccttt

SEQ ID NO: 61280 - DNA, 20 bp, Artificial Sequence
  Synthetic oligonucleotide; TTGAAT chr11 5356825 5356844 5356828 -
aattctttcctttaaggatg

SEQ ID NO: 61281 - DNA, 20 bp, Artificial Sequence
  Synthetic oligonucleotide; TAGAGT chr11 5356793 5356812 5356796 -
ccccactctcttctggcttg

SEQ ID NO: 61282 - DNA, 20 bp, Artificial Sequence
  Synthetic oligonucleotide; GTGGGT chr11 5356745 5356764 5356748 -
attctgatgggcttcccttt

SEQ ID NO: 61283 - DNA, 20 bp, Artificial Sequence
  Synthetic oligonucleotide; GTGAAT chr11 5356684 5356703 5356687 -
ttcccttcatttcaactttg

SEQ ID NO: 61284 - DNA, 20 bp, Artificial Sequence
  Synthetic oligonucleotide; AGGAGT chr11 5356644 5356663 5356647 -
ccttgtagttgctcttctca

SEQ ID NO: 61285 - DNA, 20 bp, Artificial Sequence
  Synthetic oligonucleotide; CTGAAT chr11 5356613 5356632 5356616 -
tgtggcgttctctgtatttc

SEQ ID NO: 61286 - DNA, 20 bp, Artificial Sequence
  Synthetic oligonucleotide; TTGAAT chr11 5356607 5356626 5356610 -
gttctctgtatttcctgaat

SEQ ID NO: 61287 - DNA, 20 bp, Artificial Sequence
  Synthetic oligonucleotide; CTGGAT chr11 5356568 5356587 5356571 -
gctagattggggaagttctc

SEQ ID NO: 61288 - DNA, 20 bp, Artificial Sequence
  Synthetic oligonucleotide; CAGAGT chr11 5356553 5356572 5356556 -
ttctcctggataatatcctg

SEQ ID NO: 61289 - DNA, 20 bp, Artificial Sequence
  Synthetic oligonucleotide; TCGAAT chr11 5356354 5356373 5356357 -
ataccctttcttccagttga

SEQ ID NO: 61290 - DNA, 20 bp, Artificial Sequence
  Synthetic oligonucleotide; CTGAGT chr11 5356342 5356361 5356345 -
ccagttgatcgaatcagcta

SEQ ID NO: 61291 - DNA, 20 bp, Artificial Sequence
  Synthetic oligonucleotide; ATGGGT chr11 5356205 5356224 5356208 -
aggtttttaacttttttgcc

SEQ ID NO: 61292 - DNA, 20 bp, Artificial Sequence
  Synthetic oligonucleotide; CGGAGT chr11 5356179 5356198 5356182 -
tcgagcttcctcctttagct

SEQ ID NO: 61293 - DNA, 20 bp, Artificial Sequence
  Synthetic oligonucleotide; TAGAGT chr11 5356056 5356075 5356059 -
aggagaggcactctgatttt

SEQ ID NO: 61294 - DNA, 20 bp, Artificial Sequence
  Synthetic oligonucleotide; ATGGGT chr11 5355973 5355992 5355976 -
ttgatgatggtgacgtacag

SEQ ID NO: 61295 - DNA, 20 bp, Artificial Sequence
  Synthetic oligonucleotide; GTGGAT chr11 5355960 5355979 5355963 -
cgtacagatgggtttttggt

SEQ ID NO: 61296 - DNA, 20 bp, Artificial Sequence
  Synthetic oligonucleotide; AGGAAT chr11 5355848 5355867 5355851 -
attgacgcctatgtcactac

SEQ ID NO: 61297 - DNA, 20 bp, Artificial Sequence
  Synthetic oligonucleotide; GTGGAT chr11 5355679 5355698 5355682 -
ataacttttacagatgattt

SEQ ID NO: 61298 - DNA, 20 bp, Artificial Sequence
  Synthetic oligonucleotide; AAGAGT chr11 5355572 5355591 5355575 -
ttagacagatacaggactgc

SEQ ID NO: 61299 - DNA, 20 bp, Artificial Sequence
  Synthetic oligonucleotide; TGGGGT chr11 5355502 5355521 5355505 -
acttgaactagttgttgggc

SEQ ID NO: 61300 - DNA, 20 bp, Artificial Sequence
  Synthetic oligonucleotide; TGGAAT chr11 5355497 5355516 5355500 -
aactagttgttgggctgggg

SEQ ID NO: 61301 - DNA, 20 bp, Artificial Sequence
  Synthetic oligonucleotide; GTGGGT chr11 5355437 5355456 5355440 -
tgtggagaggacccaaatca

SEQ ID NO: 61302 - DNA, 20 bp, Artificial Sequence
  Synthetic oligonucleotide; TTGAAT chr11 5355423 5355442 5355426 -
aaatcagtgggtgttgctct

SEQ ID NO: 61303 - DNA, 20 bp, Artificial Sequence
  Synthetic oligonucleotide; AAGGAT chr11 5355038 5355057 5355041 -
ggtagttttccagtgttagc

SEQ ID NO: 61304 - DNA, 20 bp, Artificial Sequence
  Synthetic oligonucleotide; ATGAGT chr11 5355026 5355045 5355029 -
gtgttagcaaggatgcatcc

SEQ ID NO: 61305 - DNA, 20 bp, Artificial Sequence
  Synthetic oligonucleotide; GTGGAT chr11 5355015 5355034 5355018 -
gatgcatccatgagtttttt

SEQ ID NO: 61306 - DNA, 20 bp, Artificial Sequence
  Synthetic oligonucleotide; TTGAAT chr11 5354902 5354921 5354905 -
ctcagcttcgtcaaggtctc

SEQ ID NO: 61307 - DNA, 20 bp, Artificial Sequence
  Synthetic oligonucleotide; CAGAGT chr11 5354871 5354890 5354874 -
tgattgcttctaaacatcct

SEQ ID NO: 61308 - DNA, 20 bp, Artificial Sequence
  Synthetic oligonucleotide; GTGAGT chr11 5354752 5354771 5354755 -
cttctggaggacgttttcct

SEQ ID NO: 61309 - DNA, 20 bp, Artificial Sequence
  Synthetic oligonucleotide; CTGAGT chr11 5354744 5354763 5354747 -
ggacgttttcctgtgagtgg

SEQ ID NO: 61310 - DNA, 20 bp, Artificial Sequence
  Synthetic oligonucleotide; GAGGAT chr11 5354617 5354636 5354620 -
gaggggcgggaggaagtggg

SEQ ID NO: 61311 - DNA, 20 bp, Artificial Sequence
  Synthetic oligonucleotide; AGGGGT chr11 5354604 5354623 5354607 -
aagtggggaggatcatgagg

SEQ ID NO: 61312 - DNA, 20 bp, Artificial Sequence
  Synthetic oligonucleotide; CAGGGT chr11 5354411 5354430 5354414 -
agaaagggaggagagaaact

SEQ ID NO: 61313 - DNA, 20 bp, Artificial Sequence
  Synthetic oligonucleotide; CAGAAT chr11 5354382 5354401 5354385 -
cagtcaaatgtgtccattta

SEQ ID NO: 61314 - DNA, 20 bp, Artificial Sequence
  Synthetic oligonucleotide; CAGGAT chr11 5354320 5354339 5354323 -
tagcctgctatggcaggttt

SEQ ID NO: 61315 - DNA, 20 bp, Artificial Sequence
  Synthetic oligonucleotide; GAGGGT chr11 5354303 5354322 5354306 -
tttcaggatcactggaccta

SEQ ID NO: 61316 - DNA, 20 bp, Artificial Sequence
  Synthetic oligonucleotide; GTGAGT chr11 5354299 5354318 5354302 -
aggatcactggacctagagg

SEQ ID NO: 61317 - DNA, 20 bp, Artificial Sequence
  Synthetic oligonucleotide; CTGAAT chr11 5354258 5354277 5354261 -
ttgatgtggcttagatcccc

SEQ ID NO: 61318 - DNA, 20 bp, Artificial Sequence
  Synthetic oligonucleotide; CAGGAT chr11 5354222 5354241 5354225 -
aagcccaagggaagaaagaa

SEQ ID NO: 61319 - DNA, 20 bp, Artificial Sequence
  Synthetic oligonucleotide; ATGGGT chr11 5354136 5354155 5354139 -
tagcagacacacagaaagac

SEQ ID NO: 61320 - DNA, 20 bp, Artificial Sequence
  Synthetic oligonucleotide; GGGAAT chr11 5354047 5354066 5354050 -
agaagttctgtaatacagta

SEQ ID NO: 61321 - DNA, 20 bp, Artificial Sequence
  Synthetic oligonucleotide; TTGAGT chr11 5353959 5353978 5353962 -
aaatttcacacacagccaag

SEQ ID NO: 61322 - DNA, 20 bp, Artificial Sequence
  Synthetic oligonucleotide; AAGAAT chr11 5353843 5353862 5353846 -
ctgtgttatttatacatccc

SEQ ID NO: 61323 - DNA, 20 bp, Artificial Sequence
  Synthetic oligonucleotide; AAGAGT chr11 5353809 5353828 5353812 -
atccccacctttctgtgatg

SEQ ID NO: 61324 - DNA, 20 bp, Artificial Sequence
  Synthetic oligonucleotide; CTGAGT chr11 5353783 5353802 5353786 -
aggtgggcagccatagatca

SEQ ID NO: 61325 - DNA, 20 bp, Artificial Sequence
  Synthetic oligonucleotide; CTGGGT chr11 5353729 5353748 5353732 -
ggcatccagctgactggtca

SEQ ID NO: 61326 - DNA, 20 bp, Artificial Sequence
  Synthetic oligonucleotide; AAGAAT chr11 5353677 5353696 5353680 -
ataccctgtattttggtcaa

SEQ ID NO: 61327 - DNA, 20 bp, Artificial Sequence
  Synthetic oligonucleotide; TTGAGT chr11 5353637 5353656 5353640 -
attaatttaaaacttatcat

SEQ ID NO: 61328 - DNA, 20 bp, Artificial Sequence
  Synthetic oligonucleotide; ATGGAT chr11 5353630 5353649 5353633 -
taaaacttatcatttgagtc

SEQ ID NO: 61329 - DNA, 20 bp, Artificial Sequence
  Synthetic oligonucleotide; AAGAAT chr11 5353564 5353583 5353567 -
tctcatgcctagactctgaa

SEQ ID NO: 61330 - DNA, 20 bp, Artificial Sequence
  Synthetic oligonucleotide; TGGAAT chr11 5353334 5353353 5353337 -
tctctctgttcagtagtaac

SEQ ID NO: 61331 - DNA, 20 bp, Artificial Sequence
  Synthetic oligonucleotide; CTGAAT chr11 5353306 5353325 5353309 -
actatcaagacaatggtcat

SEQ ID NO: 61332 - DNA, 20 bp, Artificial Sequence
  Synthetic oligonucleotide; TTGAAT chr11 5353189 5353208 5353192 -
ctttccctagactcatcatt

SEQ ID NO: 61333 - DNA, 20 bp, Artificial Sequence
  Synthetic oligonucleotide; CTGGAT chr11 5353055 5353074 5353058 -
gctccatatatgcaagagaa

SEQ ID NO: 61334 - DNA, 20 bp, Artificial Sequence
  Synthetic oligonucleotide; AAGAAT chr11 5352935 5352954 5352938 -
gtgacccaaatcatagaccc

SEQ ID NO: 61335 - DNA, 20 bp, Artificial Sequence
  Synthetic oligonucleotide; ATGGGT chr11 5352794 5352813 5352797 -
ttaaatatatataatagtgt

SEQ ID NO: 61336 - DNA, 20 bp, Artificial Sequence
  Synthetic oligonucleotide; GTGAGT chr11 5352710 5352729 5352713 -
ccataagctaatcaaacaat

SEQ ID NO: 61337 - DNA, 20 bp, Artificial Sequence
  Synthetic oligonucleotide; CAGGGT chr11 5352615 5352634 5352618 -
acaaatcagcaatagacagg

SEQ ID NO: 61338 - DNA, 20 bp, Artificial Sequence
  Synthetic oligonucleotide; AGGGAT chr11 5352587 5352606 5352590 -
aataatgttctaagtagcag

SEQ ID NO: 61339 - DNA, 20 bp, Artificial Sequence
  Synthetic oligonucleotide; AGGGAT chr11 5352557 5352576 5352560 -
tgatttccactgaaatgctc

SEQ ID NO: 61340 - DNA, 20 bp, Artificial Sequence
  Synthetic oligonucleotide; CTGAAT chr11 5352480 5352499 5352483 -
tgtcatcctgtccaggtccc

SEQ ID NO: 61341 - DNA, 20 bp, Artificial Sequence
  Synthetic oligonucleotide; TAGAGT chr11 5352439 5352458 5352442 -
agtgaaacaatgtcatgctc

SEQ ID NO: 61342 - DNA, 20 bp, Artificial Sequence
  Synthetic oligonucleotide; GAGAAT chr11 5352425 5352444 5352428 -
atgctctagagtgaggcaga

SEQ ID NO: 61343 - DNA, 20 bp, Artificial Sequence
  Synthetic oligonucleotide; CTGAAT chr11 5352402 5352421 5352405 -
aataaacgaagtatgccact

SEQ ID NO: 61344 - DNA, 20 bp, Artificial Sequence
  Synthetic oligonucleotide; ATGGGT chr11 5352370 5352389 5352373 -
agttttaatgctatagataa

SEQ ID NO: 61345 - DNA, 20 bp, Artificial Sequence
  Synthetic oligonucleotide; GTGGAT chr11 5352342 5352361 5352345 -
ataaaaggtgggaaaaggaa

SEQ ID NO: 61346 - DNA, 20 bp, Artificial Sequence
  Synthetic oligonucleotide; ATGAAT chr11 5352288 5352307 5352291 -
ggaacatgctttccaaacct

SEQ ID NO: 61347 - DNA, 20 bp, Artificial Sequence
  Synthetic oligonucleotide; CAGGAT chr11 5352249 5352268 5352252 -
actacagtgacatagaagac

SEQ ID NO: 61348 - DNA, 20 bp, Artificial Sequence
  Synthetic oligonucleotide; GAGAAT chr11 5352168 5352187 5352171 -
ccaatgcccatgacagtctt

SEQ ID NO: 61349 - DNA, 20 bp, Artificial Sequence
  Synthetic oligonucleotide; CTGGAT chr11 5352100 5352119 5352103 -
cattgcaaataaaactacaa

SEQ ID NO: 61350 - DNA, 20 bp, Artificial Sequence
  Synthetic oligonucleotide; GAGAGT chr11 5352026 5352045 5352029 -
ggtgtagacagaaagcatgg

SEQ ID NO: 61351 - DNA, 20 bp, Artificial Sequence
  Synthetic oligonucleotide; TGGGAT chr11 5352017 5352036 5352020 -
agaaagcatgggagagtaca

SEQ ID NO: 61352 - DNA, 20 bp, Artificial Sequence
  Synthetic oligonucleotide; CTGGGT chr11 5351922 5351941 5351925 -
cgcacaccaatcttcattac

SEQ ID NO: 61353 - DNA, 20 bp, Artificial Sequence
  Synthetic oligonucleotide; CAGGAT chr11 5351910 5351929 5351913 -
ttcattacctgggtgttggt

SEQ ID NO: 61354 - DNA, 20 bp, Artificial Sequence
  Synthetic oligonucleotide; GCGGAT chr11 5351883 5351902 5351886 -
gaggtatatcttaaggggct

SEQ ID NO: 61355 - DNA, 20 bp, Artificial Sequence
  Synthetic oligonucleotide; AAGAGT chr11 5351823 5351842 5351826 -
acacctgactccatgacaga

SEQ ID NO: 61356 - DNA, 20 bp, Artificial Sequence
  Synthetic oligonucleotide; ATGGAT chr11 5351817 5351836 5351820 -
gactccatgacagaaagagt

SEQ ID NO: 61357 - DNA, 20 bp, Artificial Sequence
  Synthetic oligonucleotide; AAGAGT chr11 5351637 5351656 5351640 -
tcattcctgatgagaaagag

SEQ ID NO: 61358 - DNA, 20 bp, Artificial Sequence
  Synthetic oligonucleotide; TGGGAT chr11 5351592 5351611 5351595 -
gagatgtaggctgccaataa

SEQ ID NO: 61359 - DNA, 20 bp, Artificial Sequence
  Synthetic oligonucleotide; ATGAAT chr11 5351588 5351607 5351591 -
tgtaggctgccaataatggg

SEQ ID NO: 61360 - DNA, 20 bp, Artificial Sequence
  Synthetic oligonucleotide; GAGAAT chr11 5351434 5351453 5351437 -
ttgtataaaagttgctcctt

SEQ ID NO: 61361 - DNA, 20 bp, Artificial Sequence
  Synthetic oligonucleotide; AAGGAT chr11 5351381 5351400 5351384 -
tcctgactttcagtgacagc

SEQ ID NO: 61362 - DNA, 20 bp, Artificial Sequence
  Synthetic oligonucleotide; TAGAAT chr11 5351334 5351353 5351337 -
agatcctaggtatgggaaaa

SEQ ID NO: 61363 - DNA, 20 bp, Artificial Sequence
  Synthetic oligonucleotide; TAGGGT chr11 5351309 5351328 5351312 -
tgtataaagaagatattatt

SEQ ID NO: 61364 - DNA, 20 bp, Artificial Sequence
  Synthetic oligonucleotide; TTGGAT chr11 5351285 5351304 5351288 -
gtttactctatgtaagatta

SEQ ID NO: 61365 - DNA, 20 bp, Artificial Sequence
  Synthetic oligonucleotide; GGGGAT chr11 5351271 5351290 5351274 -
agattattggatactacgtt

SEQ ID NO: 61366 - DNA, 20 bp, Artificial Sequence
  Synthetic oligonucleotide; CAGAAT chr11 5351252 5351271 5351255 -
tggggatacagctattcatg

SEQ ID NO: 61367 - DNA, 20 bp, Artificial Sequence
  Synthetic oligonucleotide; TTGAAT chr11 5351238 5351257 5351241 -
ttcatgcagaataaacattg

SEQ ID NO: 61368 - DNA, 20 bp, Artificial Sequence
  Synthetic oligonucleotide; TTGAAT chr11 5351173 5351192 5351176 -
gaaagaagaaatcactatat

SEQ ID NO: 61369 - DNA, 20 bp, Artificial Sequence
  Synthetic oligonucleotide; TAGGGT chr11 5351099 5351118 5351102 -
catcctgactggtggtatta

SEQ ID NO: 61370 - DNA, 20 bp, Artificial Sequence
  Synthetic oligonucleotide; GTGGAT chr11 5351095 5351114 5351098 -
ctgactggtggtattatagg

SEQ ID NO: 61371 - DNA, 20 bp, Artificial Sequence
  Synthetic oligonucleotide; TTGGGT chr11 5350878 5350897 5350881 -
tgatgaagctccagagactt

SEQ ID NO: 61372 - DNA, 20 bp, Artificial Sequence
  Synthetic oligonucleotide; AAGAGT chr11 5350856 5350875 5350859 -
gggtagttagaaaatgacgt

SEQ ID NO: 61373 - DNA, 20 bp, Artificial Sequence
  Synthetic oligonucleotide; AAGAAT chr11 5350768 5350787 5350771 -
gttattgatacactgcttca

SEQ ID NO: 61374 - DNA, 20 bp, Artificial Sequence
  Synthetic oligonucleotide; AAGAAT chr11 5350739 5350758 5350742 -
aattttcataatataaattg

SEQ ID NO: 61375 - DNA, 20 bp, Artificial Sequence
  Synthetic oligonucleotide; GTGGAT chr11 5350721 5350740 5350724 -
tgaagaataaacagtaaaat

SEQ ID NO: 61376 - DNA, 20 bp, Artificial Sequence
  Synthetic oligonucleotide; GAGAAT chr11 5350606 5350625 5350609 -
gtaatttaggcaagatcaag

SEQ ID NO: 61377 - DNA, 20 bp, Artificial Sequence
  Synthetic oligonucleotide; TGGAAT chr11 5350584 5350603 5350587 -
gaattttttttttaaaacta

SEQ ID NO: 61378 - DNA, 20 bp, Artificial Sequence
  Synthetic oligonucleotide; TGGGAT chr11 5350574 5350593 5350577 -
tttaaaactatggaatctga

SEQ ID NO: 61379 - DNA, 20 bp, Artificial Sequence
  Synthetic oligonucleotide; TAGAAT chr11 5350537 5350556 5350540 -
gagaaggctctgtgactcat

SEQ ID NO: 61380 - DNA, 20 bp, Artificial Sequence
  Synthetic oligonucleotide; GAGAAT chr11 5350496 5350515 5350499 -
ggtgcaggcagccaacctct

SEQ ID NO: 61381 - DNA, 20 bp, Artificial Sequence
  Synthetic oligonucleotide; AAGAAT chr11 5350342 5350361 5350345 -
gacctctttctgtccatgaa

SEQ ID NO: 61382 - DNA, 20 bp, Artificial Sequence
  Synthetic oligonucleotide; AAGAAT chr11 5350305 5350324 5350308 -
tactggactttcattttcag

SEQ ID NO: 61383 - DNA, 20 bp, Artificial Sequence
  Synthetic oligonucleotide; AAGAGT chr11 5350147 5350166 5350150 -
gtaaggggaaatgttttgta

SEQ ID NO: 61384 - DNA, 20 bp, Artificial Sequence
  Synthetic oligonucleotide; GTGGAT chr11 5350143 5350162 5350146 -
ggggaaatgttttgtaaaga

SEQ ID NO: 61385 - DNA, 20 bp, Artificial Sequence
  Synthetic oligonucleotide; GTGAGT chr11 5350075 5350094 5350078 -
acctcctttctctttctcta

SEQ ID NO: 61386 - DNA, 20 bp, Artificial Sequence
  Synthetic oligonucleotide; CAGGAT chr11 5350063 5350082 5350066 -
tttctctagtgagtacatgt

SEQ ID NO: 61387 - DNA, 20 bp, Artificial Sequence
  Synthetic oligonucleotide; TGGGGT chr11 5349984 5350003 5349987 -
gaacagatataagatgatga

SEQ ID NO: 61388 - DNA, 20 bp, Artificial Sequence
  Synthetic oligonucleotide; CTGGGT chr11 5349900 5349919 5349903 -
gcagataaaatgtgatatgt

SEQ ID NO: 61389 - DNA, 20 bp, Artificial Sequence
  Synthetic oligonucleotide; CAGGAT chr11 5349700 5349719 5349703 -
cagacaatactcagcttatg

SEQ ID NO: 61390 - DNA, 20 bp, Artificial Sequence
  Synthetic oligonucleotide; AGGAGT chr11 5349404 5349423 5349407 -
ttgataaattaaaaaaaaac

SEQ ID NO: 61391 - DNA, 20 bp, Artificial Sequence
  Synthetic oligonucleotide; AGGAAT chr11 5349398 5349417 5349401 -
aattaaaaaaaaacaggagt

SEQ ID NO: 61392 - DNA, 20 bp, Artificial Sequence
  Synthetic oligonucleotide; TTGAAT chr11 5349341 5349360 5349344 -
atgtatggaacaaataattg

SEQ ID NO: 61393 - DNA, 20 bp, Artificial Sequence
  Synthetic oligonucleotide; AAGAAT chr11 5349280 5349299 5349283 -
tatacacctcattttttggg

SEQ ID NO: 61394 - DNA, 20 bp, Artificial Sequence
  Synthetic oligonucleotide; CTGAGT chr11 5349232 5349251 5349235 -
gtctgttttcatattgaaaa

SEQ ID NO: 61395 - DNA, 20 bp, Artificial Sequence
  Synthetic oligonucleotide; GTGAGT chr11 5349178 5349197 5349181 -
tgtggtatatgagatgatct

SEQ ID NO: 61396 - DNA, 20 bp, Artificial Sequence
  Synthetic oligonucleotide; GGGGAT chr11 5349166 5349185 5349169 -
gatgatctgtgagtttcaga

SEQ ID NO: 61397 - DNA, 20 bp, Artificial Sequence
  Synthetic oligonucleotide; CAGGGT chr11 5349113 5349132 5349116 -
tgcagccattcaccctcttc

SEQ ID NO: 61398 - DNA, 20 bp, Artificial Sequence
  Synthetic oligonucleotide; TAGAAT chr11 5349099 5349118 5349102 -
ctcttccagggtctctgtca

SEQ ID NO: 61399 - DNA, 20 bp, Artificial Sequence
  Synthetic oligonucleotide; TTGAGT chr11 5349089 5349108 5349092 -
gtctctgtcatagaatagac

SEQ ID NO: 61400 - DNA, 20 bp, Artificial Sequence
  Synthetic oligonucleotide; TTGAGT chr11 5348845 5348864 5348848 -
cctttctgtgatggttaata

SEQ ID NO: 61401 - DNA, 20 bp, Artificial Sequence
  Synthetic oligonucleotide; TTGGAT chr11 5348829 5348848 5348832 -
aatattgagtgcaaacttga

SEQ ID NO: 61402 - DNA, 20 bp, Artificial Sequence
  Synthetic oligonucleotide; AAGGAT chr11 5348821 5348840 5348824 -
gtgcaaacttgattggattg

SEQ ID NO: 61403 - DNA, 20 bp, Artificial Sequence
  Synthetic oligonucleotide; CTGGGT chr11 5348801 5348820 5348804 -
aaggatgcaaagtattgttc

SEQ ID NO: 61404 - DNA, 20 bp, Artificial Sequence
  Synthetic oligonucleotide; AAGGGT chr11 5348788 5348807 5348791 -
attgttcctgggtgtgctgt

SEQ ID NO: 61405 - DNA, 20 bp, Artificial Sequence
  Synthetic oligonucleotide; TTGAGT chr11 5348761 5348780 5348764 -
ttgccaaaggagattaacat

SEQ ID NO: 61406 - DNA, 20 bp, Artificial Sequence
  Synthetic oligonucleotide; CTGGGT chr11 5348718 5348737 5348721 -
cagacccacccaccctccgt

SEQ ID NO: 61407 - DNA, 20 bp, Artificial Sequence
  Synthetic oligonucleotide; GTGGGT chr11 5348714 5348733 5348717 -
cccacccaccctccgtctgg

SEQ ID NO: 61408 - DNA, 20 bp, Artificial Sequence
  Synthetic oligonucleotide; AAGAGT chr11 5348655 5348674 5348658 -
aagcaggcaaaagaagatgg

SEQ ID NO: 61409 - DNA, 20 bp, Artificial Sequence
  Synthetic oligonucleotide; GTGGAT chr11 5348648 5348667 5348651 -
caaaagaagatggaagagta

SEQ ID NO: 61410 - DNA, 20 bp, Artificial Sequence
  Synthetic oligonucleotide; GTGAAT chr11 5348592 5348611 5348595 -
gctaaagtcacacaggctat

SEQ ID NO: 61411 - DNA, 20 bp, Artificial Sequence
  Synthetic oligonucleotide; TTGAAT chr11 5348533 5348552 5348536 -
agctccgtccaagcttaatt

SEQ ID NO: 61412 - DNA, 20 bp, Artificial Sequence
  Synthetic oligonucleotide; AAGAAT chr11 5348443 5348462 5348446 -
ttacagaggtatacctcctc

SEQ ID NO: 61413 - DNA, 20 bp, Artificial Sequence
  Synthetic oligonucleotide; AAGAGT chr11 5348433 5348452 5348436 -
atacctcctcaagaatttgg

SEQ ID NO: 61414 - DNA, 20 bp, Artificial Sequence
  Synthetic oligonucleotide; TGGGGT chr11 5348382 5348401 5348385 -
gacttctaaggtaaaagaca

SEQ ID NO: 61415 - DNA, 20 bp, Artificial Sequence
  Synthetic oligonucleotide; CAGGGT chr11 5348358 5348377 5348361 -
gttgggggcagggggactct

SEQ ID NO: 61416 - DNA, 20 bp, Artificial Sequence
  Synthetic oligonucleotide; TAGAAT chr11 5348352 5348371 5348355 -
ggcagggggactctcagggt

SEQ ID NO: 61417 - DNA, 20 bp, Artificial Sequence
  Synthetic oligonucleotide; AAGAAT chr11 5348329 5348348 5348332 -
aatggaagccagagagatta

SEQ ID NO: 61418 - DNA, 20 bp, Artificial Sequence
  Synthetic oligonucleotide; CTGAGT chr11 5348281 5348300 5348284 -
tacaaccccataattcatgc

SEQ ID NO: 61419 - DNA, 20 bp, Artificial Sequence
  Synthetic oligonucleotide; TAGAAT chr11 5348250 5348269 5348253 -
cccatgctctggtttgttcg

SEQ ID NO: 61420 - DNA, 20 bp, Artificial Sequence
  Synthetic oligonucleotide; CAGAAT chr11 5348226 5348245 5348229 -
attgtttgccttatgtgttc

SEQ ID NO: 61421 - DNA, 20 bp, Artificial Sequence
  Synthetic oligonucleotide; GGGAGT chr11 5348156 5348175 5348159 -
accaagttttagagatgtca

SEQ ID NO: 61422 - DNA, 20 bp, Artificial Sequence
  Synthetic oligonucleotide; CAGAAT chr11 5347906 5347925 5347909 -
agatttgggcatcatctttt

SEQ ID NO: 61423 - DNA, 20 bp, Artificial Sequence
  Synthetic oligonucleotide; GTGGGT chr11 5347724 5347743 5347727 -
ttatttgtgccctcagcctt

SEQ ID NO: 61424 - DNA, 20 bp, Artificial Sequence
  Synthetic oligonucleotide; TTGAAT chr11 5347642 5347661 5347645 -
aggttttcctctgttggagg

SEQ ID NO: 61425 - DNA, 20 bp, Artificial Sequence
  Synthetic oligonucleotide; TGGAAT chr11 5347595 5347614 5347598 -
tggctcttgctgtgctactt

SEQ ID NO: 61426 - DNA, 20 bp, Artificial Sequence
  Synthetic oligonucleotide; ATGAGT chr11 5347492 5347511 5347495 -
cttggctgaagcaccatgtg

SEQ ID NO: 61427 - DNA, 20 bp, Artificial Sequence
  Synthetic oligonucleotide; GGGAAT chr11 5347431 5347450 5347434 -
tggtaggctaaactcaagaa

SEQ ID NO: 61428 - DNA, 20 bp, Artificial Sequence
  Synthetic oligonucleotide; CAGAAT chr11 5347410 5347429 5347413 -
ggaatagttagtgataactg

SEQ ID NO: 61429 - DNA, 20 bp, Artificial Sequence
  Synthetic oligonucleotide; TTGGGT chr11 5347393 5347412 5347396 -
ctgcagaatgtgcgttcacg

SEQ ID NO: 61430 - DNA, 20 bp, Artificial Sequence
  Synthetic oligonucleotide; CTGAAT chr11 5347372 5347391 5347375 -
tgggtactagagaaggctgc

SEQ ID NO: 61431 - DNA, 20 bp, Artificial Sequence
  Synthetic oligonucleotide; GGGAAT chr11 5347203 5347222 5347206 -
tgactgttgaagtaaatgta

SEQ ID NO: 61432 - DNA, 20 bp, Artificial Sequence
  Synthetic oligonucleotide; CAGAGT chr11 5347174 5347193 5347177 -
ttacctcccagaggtgatac

SEQ ID NO: 61433 - DNA, 20 bp, Artificial Sequence
  Synthetic oligonucleotide; AGGAGT chr11 5347022 5347041 5347025 -
tgttccagctccctctaagg

SEQ ID NO: 61434 - DNA, 20 bp, Artificial Sequence
  Synthetic oligonucleotide; CAGAGT chr11 5347011 5347030 5347014 -
cctctaaggaggagttaata

SEQ ID NO: 61435 - DNA, 20 bp, Artificial Sequence
  Synthetic oligonucleotide; GGGAGT chr11 5346824 5346843 5346827 -
tcaaacaagttatggtacct

SEQ ID NO: 61436 - DNA, 20 bp, Artificial Sequence
  Synthetic oligonucleotide; AAGAGT chr11 5346793 5346812 5346796 -
gaaatactcctagatatata

SEQ ID NO: 61437 - DNA, 20 bp, Artificial Sequence
  Synthetic oligonucleotide; AAGGAT chr11 5346734 5346753 5346737 -
aaagatacggagaagaagtg

SEQ ID NO: 61438 - DNA, 20 bp, Artificial Sequence
  Synthetic oligonucleotide; TTGGAT chr11 5346711 5346730 5346714 -
gatctcaatagtccacagct

SEQ ID NO: 61439 - DNA, 20 bp, Artificial Sequence
  Synthetic oligonucleotide; GTGAAT chr11 5346612 5346631 5346615 -
gaccttctgtactcagtgat

SEQ ID NO: 61440 - DNA, 20 bp, Artificial Sequence
  Synthetic oligonucleotide; TAGAAT chr11 5346455 5346474 5346458 -
attttctaggtgttccatta

SEQ ID NO: 61441 - DNA, 20 bp, Artificial Sequence
  Synthetic oligonucleotide; AAGAAT chr11 5346324 5346343 5346327 -
ccacgactagctgaggacac

SEQ ID NO: 61442 - DNA, 20 bp, Artificial Sequence
  Synthetic oligonucleotide; TAGAGT chr11 5346303 5346322 5346306 -
agaattttcacaaaacaaag

SEQ ID NO: 61443 - DNA, 20 bp, Artificial Sequence
  Synthetic oligonucleotide; TGGAAT chr11 5346251 5346270 5346254 -
cattaccaggtatgtctgca

SEQ ID NO: 61444 - DNA, 20 bp, Artificial Sequence
  Synthetic oligonucleotide; GGGAAT chr11 5346241 5346260 5346244 -
tatgtctgcatggaattctt

SEQ ID NO: 61445 - DNA, 20 bp, Artificial Sequence
  Synthetic oligonucleotide; AGGAAT chr11 5346116 5346135 5346119 -
ctgcatattctctgataaga

SEQ ID NO: 61446 - DNA, 20 bp, Artificial Sequence
  Synthetic oligonucleotide; AAGAGT chr11 5346042 5346061 5346045 -
tgctgaaacgtcagagaagt

SEQ ID NO: 61447 - DNA, 20 bp, Artificial Sequence
  Synthetic oligonucleotide; CTGGAT chr11 5345988 5346007 5345991 -
acagaaggggaggagctaag

SEQ ID NO: 61448 - DNA, 20 bp, Artificial Sequence
  Synthetic oligonucleotide; AAGAAT chr11 5345961 5345980 5345964 -
atctttgcgtctagtaactg

SEQ ID NO: 61449 - DNA, 20 bp, Artificial Sequence
  Synthetic oligonucleotide; CTGAAT chr11 5345925 5345944 5345928 -
cattgtatgttcagtaggca

SEQ ID NO: 61450 - DNA, 20 bp, Artificial Sequence
  Synthetic oligonucleotide; CAGAAT chr11 5345892 5345911 5345895 -
tatgtctctcagtcctagga

SEQ ID NO: 61451 - DNA, 20 bp, Artificial Sequence
  Synthetic oligonucleotide; ATGGAT chr11 5345886 5345905 5345889 -
tctcagtcctaggacagaat

SEQ ID NO: 61452 - DNA, 20 bp, Artificial Sequence
  Synthetic oligonucleotide; CTGAGT chr11 5345855 5345874 5345858 -
aaaatgattctttcaaagtg

SEQ ID NO: 61453 - DNA, 20 bp, Artificial Sequence
  Synthetic oligonucleotide; ATGGGT chr11 5345784 5345803 5345787 -
tacagttagatctcatctct

SEQ ID NO: 61454 - DNA, 20 bp, Artificial Sequence
  Synthetic oligonucleotide; GAGGAT chr11 5345769 5345788 5345772 -
tctctatgggtggaaggtaa

SEQ ID NO: 61455 - DNA, 20 bp, Artificial Sequence
  Synthetic oligonucleotide; TAGGGT chr11 5345742 5345761 5345745 -
gtttcctttggtggcatctt

SEQ ID NO: 61456 - DNA, 20 bp, Artificial Sequence
  Synthetic oligonucleotide; AGGGGT chr11 5345707 5345726 5345710 -
cactgacaaagtaactctga

SEQ ID NO: 61457 - DNA, 20 bp, Artificial Sequence
  Synthetic oligonucleotide; TTGGAT chr11 5345697 5345716 5345700 -
gtaactctgaaggggtatat

SEQ ID NO: 61458 - DNA, 20 bp, Artificial Sequence
  Synthetic oligonucleotide; TAGGAT chr11 5345673 5345692 5345676 -
atacgaccatctttttaact

SEQ ID NO: 61459 - DNA, 20 bp, Artificial Sequence
  Synthetic oligonucleotide; AGGGAT chr11 5345618 5345637 5345621 -
tgtgacaagaaaaaaaagca

SEQ ID NO: 61460 - DNA, 20 bp, Artificial Sequence
  Synthetic oligonucleotide; GTGAAT chr11 5345560 5345579 5345563 -
gactcttgatttcctcacaa

SEQ ID NO: 61461 - DNA, 20 bp, Artificial Sequence
  Synthetic oligonucleotide; TTGAGT chr11 5345530 5345549 5345533 -
atccccctcagacttccatt

SEQ ID NO: 61462 - DNA, 20 bp, Artificial Sequence
  Synthetic oligonucleotide; ATGGAT chr11 5345320 5345339 5345323 -
aggtcaccatgactcttcat

SEQ ID NO: 61463 - DNA, 20 bp, Artificial Sequence
  Synthetic oligonucleotide; GTGAGT chr11 5345245 5345264 5345248 -
ttcttcacatagcagtctaa

SEQ ID NO: 61464 - DNA, 20 bp, Artificial Sequence
  Synthetic oligonucleotide; CAGAAT chr11 5345222 5345241 5345225 -
agtaatttaaaaatacaaat

SEQ ID NO: 61465 - DNA, 20 bp, Artificial Sequence
  Synthetic oligonucleotide; AGGAAT chr11 5344583 5344602 5344586 -
gcccctagtctagtggcaga

SEQ ID NO: 61466 - DNA, 20 bp, Artificial Sequence
  Synthetic oligonucleotide; GGGGAT chr11 5344461 5344480 5344464 -
agattcagaagcctatggct

SEQ ID NO: 61467 - DNA, 20 bp, Artificial Sequence
  Synthetic oligonucleotide; ATGGAT chr11 5344434 5344453 5344437 -
aagggaaggaaaccaggaag

SEQ ID NO: 61468 - DNA, 20 bp, Artificial Sequence
  Synthetic oligonucleotide; GGGAAT chr11 5344382 5344401 5344385 -
atgagagaggtcagattcta

SEQ ID NO: 61469 - DNA, 20 bp, Artificial Sequence
  Synthetic oligonucleotide; GTGAGT chr11 5344194 5344213 5344197 -
ctgagctattgtcacaagta

SEQ ID NO: 61470 - DNA, 20 bp, Artificial Sequence
  Synthetic oligonucleotide; AAGGAT chr11 5344181 5344200 5344184 -
acaagtagtgagtagtactg

SEQ ID NO: 61471 - DNA, 20 bp, Artificial Sequence
  Synthetic oligonucleotide; GAGGGT chr11 5344168 5344187 5344171 -
agtactgaaggattctacaa

SEQ ID NO: 61472 - DNA, 20 bp, Artificial Sequence
  Synthetic oligonucleotide; GTGAAT chr11 5344148 5344167 5344151 -
gagggtaattcacactaatc

SEQ ID NO: 61473 - DNA, 20 bp, Artificial Sequence
  Synthetic oligonucleotide; CAGAGT chr11 5344056 5344075 5344059 -
cttagctacagtggtagtgg

SEQ ID NO: 61474 - DNA, 20 bp, Artificial Sequence
  Synthetic oligonucleotide; GTGGAT chr11 5343971 5343990 5343974 -
gtctttacatgcaggaaaat

SEQ ID NO: 61475 - DNA, 20 bp, Artificial Sequence
  Synthetic oligonucleotide; AGGGAT chr11 5343964 5343983 5343967 -
catgcaggaaaatgtggatt

SEQ ID NO: 61476 - DNA, 20 bp, Artificial Sequence
  Synthetic oligonucleotide; TTGAAT chr11 5343884 5343903 5343887 -
ttagctttctggaaatcccc

SEQ ID NO: 61477 - DNA, 20 bp, Artificial Sequence
  Synthetic oligonucleotide; TAGAAT chr11 5343872 5343891 5343875 -
aaatccccttgaatgcccca

SEQ ID NO: 61478 - DNA, 20 bp, Artificial Sequence
  Synthetic oligonucleotide; ACGAAT chr11 5343866 5343885 5343869 -
ccttgaatgccccatagaat

SEQ ID NO: 61479 - DNA, 20 bp, Artificial Sequence
  Synthetic oligonucleotide; AAGGGT chr11 5343840 5343859 5343843 -
tctttaaaatctgcatagtt

SEQ ID NO: 61480 - DNA, 20 bp, Artificial Sequence
  Synthetic oligonucleotide; GAGAAT chr11 5343793 5343812 5343796 -
tacataattttttttctgaa

SEQ ID NO: 61481 - DNA, 20 bp, Artificial Sequence
  Synthetic oligonucleotide; AAGAAT chr11 5343757 5343776 5343760 -
atataaacagttgaaactcc

SEQ ID NO: 61482 - DNA, 20 bp, Artificial Sequence
  Synthetic oligonucleotide; TGGAAT chr11 5343724 5343743 5343727 -
cgtaggtaggagatagatcc

SEQ ID NO: 61483 - DNA, 20 bp, Artificial Sequence
  Synthetic oligonucleotide; AAGAAT chr11 5343710 5343729 5343713 -
agatcctggaatgtgcagtt

SEQ ID NO: 61484 - DNA, 20 bp, Artificial Sequence
  Synthetic oligonucleotide; ATGAGT chr11 5343695 5343714 5343698 -
cagttaagaatacaaatagt

SEQ ID NO: 61485 - DNA, 20 bp, Artificial Sequence
  Synthetic oligonucleotide; GAGAAT chr11 5343683 5343702 5343686 -
caaatagtatgagtaaccct

SEQ ID NO: 61486 - DNA, 20 bp, Artificial Sequence
  Synthetic oligonucleotide; GAGAAT chr11 5343619 5343638 5343622 -
tatctttaggaaaaaattct

SEQ ID NO: 61487 - DNA, 20 bp, Artificial Sequence
  Synthetic oligonucleotide; CAGGAT chr11 5343529 5343548 5343532 -
acatttcttctatataaacc

SEQ ID NO: 61488 - DNA, 20 bp, Artificial Sequence
  Synthetic oligonucleotide; CTGGAT chr11 5343457 5343476 5343460 -
ggcttggaggaagctcatca

SEQ ID NO: 61489 - DNA, 20 bp, Artificial Sequence
  Synthetic oligonucleotide; GGGAGT chr11 5343286 5343305 5343289 -
accacaatgcccacggtgct

SEQ ID NO: 61490 - DNA, 20 bp, Artificial Sequence
  Synthetic oligonucleotide; CTGGAT chr11 5343273 5343292 5343276 -
cggtgctgggagtcctctgg

SEQ ID NO: 61491 - DNA, 20 bp, Artificial Sequence
  Synthetic oligonucleotide; TCGAGT chr11 5343203 5343222 5343206 -
tatacactcactttcctttc

SEQ ID NO: 61492 - DNA, 20 bp, Artificial Sequence
  Synthetic oligonucleotide; TCGAGT chr11 5343115 5343134 5343118 -
acctctgtacttactaatac

SEQ ID NO: 61493 - DNA, 20 bp, Artificial Sequence
  Synthetic oligonucleotide; GGGAGT chr11 5343094 5343113 5343097 -
cgagtagtgaagattgggct

SEQ ID NO: 61494 - DNA, 20 bp, Artificial Sequence
  Synthetic oligonucleotide; GGGGAT chr11 5343080 5343099 5343083 -
tgggctgggagttctgatga

SEQ ID NO: 61495 - DNA, 20 bp, Artificial Sequence
  Synthetic oligonucleotide; CAGGAT chr11 5342988 5343007 5342991 -
cacatgcattctgccttcac

SEQ ID NO: 61496 - DNA, 20 bp, Artificial Sequence
  Synthetic oligonucleotide; CTGGAT chr11 5342907 5342926 5342910 -
ttgtagtctttatatttgtg

SEQ ID NO: 61497 - DNA, 20 bp, Artificial Sequence
  Synthetic oligonucleotide; TTGGAT chr11 5342765 5342784 5342768 -
ggttttttatgtcacagtga

SEQ ID NO: 61498 - DNA, 20 bp, Artificial Sequence
  Synthetic oligonucleotide; ATGAAT chr11 5342673 5342692 5342676 -
attttctgttccctccacta

SEQ ID NO: 61499 - DNA, 20 bp, Artificial Sequence
  Synthetic oligonucleotide; CAGAAT chr11 5342634 5342653 5342637 -
gtgtcaagaccaagcagatt

SEQ ID NO: 61500 - DNA, 20 bp, Artificial Sequence
  Synthetic oligonucleotide; TAGAAT chr11 5342602 5342621 5342605 -
cttcacctttttactaccca

SEQ ID NO: 61501 - DNA, 20 bp, Artificial Sequence
  Synthetic oligonucleotide; CAGAAT chr11 5342561 5342580 5342564 -
aatcatcacagtcactctca

SEQ ID NO: 61502 - DNA, 20 bp, Artificial Sequence
  Synthetic oligonucleotide; CGGAAT chr11 5342379 5342398 5342382 -
ttttgttgcattcctgtaaa

SEQ ID NO: 61503 - DNA, 20 bp, Artificial Sequence
  Synthetic oligonucleotide; CAGAAT chr11 5342257 5342276 5342260 -
ataaagttagcagataggaa

SEQ ID NO: 61504 - DNA, 20 bp, Artificial Sequence
  Synthetic oligonucleotide; TCGAGT chr11 5342224 5342243 5342227 -
atataaaattattagttggt

SEQ ID NO: 61505 - DNA, 20 bp, Artificial Sequence
  Synthetic oligonucleotide; TGGAAT chr11 5342214 5342233 5342217 -
attagttggttcgagtgaaa

SEQ ID NO: 61506 - DNA, 20 bp, Artificial Sequence
  Synthetic oligonucleotide; TAGAGT chr11 5342209 5342228 5342212 -
ttggttcgagtgaaatggaa

SEQ ID NO: 61507 - DNA, 20 bp, Artificial Sequence
  Synthetic oligonucleotide; ATGAAT chr11 5342168 5342187 5342171 -
aaatctaatttccaactctt

SEQ ID NO: 61508 - DNA, 20 bp, Artificial Sequence
  Synthetic oligonucleotide; AGGAAT chr11 5342105 5342124 5342108 -
aaatttggtcactgaagtcc

SEQ ID NO: 61509 - DNA, 20 bp, Artificial Sequence
  Synthetic oligonucleotide; AAGAAT chr11 5342087 5342106 5342090 -
ccaggaattttcctgcaaaa

SEQ ID NO: 61510 - DNA, 20 bp, Artificial Sequence
  Synthetic oligonucleotide; ATGAAT chr11 5342002 5342021 5342005 -
cctccctccatcaaattata

SEQ ID NO: 61511 - DNA, 20 bp, Artificial Sequence
  Synthetic oligonucleotide; AGGAAT chr11 5341916 5341935 5341919 -
taacaaaaaaatgtgagaag

SEQ ID NO: 61512 - DNA, 20 bp, Artificial Sequence
  Synthetic oligonucleotide; ACGGAT chr11 5341909 5341928 5341912 -
aaaatgtgagaagaggaatc

SEQ ID NO: 61513 - DNA, 20 bp, Artificial Sequence
  Synthetic oligonucleotide; AAGAAT chr11 5341689 5341708 5341692 -
taggtttctgcatttttttg

SEQ ID NO: 61514 - DNA, 20 bp, Artificial Sequence
  Synthetic oligonucleotide; AAGAAT chr11 5341630 5341649 5341633 -
taataagtgtaaatttccca

SEQ ID NO: 61515 - DNA, 20 bp, Artificial Sequence
  Synthetic oligonucleotide; ATGAGT chr11 5341588 5341607 5341591 -
catttgattaaaattgtctg

SEQ ID NO: 61516 - DNA, 20 bp, Artificial Sequence
  Synthetic oligonucleotide; CAGAAT chr11 5341421 5341440 5341424 -
gttttaccccgatcatttta

SEQ ID NO: 61517 - DNA, 20 bp, Artificial Sequence
  Synthetic oligonucleotide; GTGAAT chr11 5341406 5341425 5341409 -
ttttacagaattgtgcacct

SEQ ID NO: 61518 - DNA, 20 bp, Artificial Sequence
  Synthetic oligonucleotide; TTGAAT chr11 5341156 5341175 5341159 -
cattaataaattgcacacat

SEQ ID NO: 61519 - DNA, 20 bp, Artificial Sequence
  Synthetic oligonucleotide; GAGAGT chr11 5341127 5341146 5341130 -
tatctcaggtattgctcata

SEQ ID NO: 61520 - DNA, 20 bp, Artificial Sequence
  Synthetic oligonucleotide; CTGAAT chr11 5340982 5341001 5340985 -
tgtcacctgagcaacacagt

SEQ ID NO: 61521 - DNA, 20 bp, Artificial Sequence
  Synthetic oligonucleotide; GTGAGT chr11 5340968 5340987 5340971 -
cacagtctgaatactaaatt

SEQ ID NO: 61522 - DNA, 20 bp, Artificial Sequence
  Synthetic oligonucleotide; GTGAGT chr11 5340962 5340981 5340965 -
ctgaatactaaattgtgagt

SEQ ID NO: 61523 - DNA, 20 bp, Artificial Sequence
  Synthetic oligonucleotide; TGGGGT chr11 5340842 5340861 5340845 -
ttttattcataaaaatattg

SEQ ID NO: 61524 - DNA, 20 bp, Artificial Sequence
  Synthetic oligonucleotide; GTGAAT chr11 5340708 5340727 5340711 -
cttctaactataaggccagt

SEQ ID NO: 61525 - DNA, 20 bp, Artificial Sequence
  Synthetic oligonucleotide; AAGAAT chr11 5340511 5340530 5340514 -
agtagaagaacttttttaaa

SEQ ID NO: 61526 - DNA, 20 bp, Artificial Sequence
  Synthetic oligonucleotide; AAGAGT chr11 5340478 5340497 5340481 -
tatgacattgcaaaaaaaaa

SEQ ID NO: 61527 - DNA, 20 bp, Artificial Sequence
  Synthetic oligonucleotide; TAGAAT chr11 5340459 5340478 5340462 -
aaagagtaatgcttttgttg

SEQ ID NO: 61528 - DNA, 20 bp, Artificial Sequence
  Synthetic oligonucleotide; TAGAAT chr11 5340436 5340455 5340439 -
aattactaaaatgcaatgct

SEQ ID NO: 61529 - DNA, 20 bp, Artificial Sequence
  Synthetic oligonucleotide; TAGAGT chr11 5340376 5340395 5340379 -
ttcaaactataataaatatt

SEQ ID NO: 61530 - DNA, 20 bp, Artificial Sequence
  Synthetic oligonucleotide; AAGAAT chr11 5340338 5340357 5340341 -
aagaaatgataataaataaa

SEQ ID NO: 61531 - DNA, 20 bp, Artificial Sequence
  Synthetic oligonucleotide; TTGAAT chr11 5340279 5340298 5340282 -
tcagtgacaaggaggacagt

SEQ ID NO: 61532 - DNA, 20 bp, Artificial Sequence
  Synthetic oligonucleotide; TTGAGT chr11 5340205 5340224 5340208 -
tttgttcagcctagtttcag

SEQ ID NO: 61533 - DNA, 20 bp, Artificial Sequence
  Synthetic oligonucleotide; GTGAAT chr11 5340147 5340166 5340150 -
atcatctcagttatagatat

SEQ ID NO: 61534 - DNA, 20 bp, Artificial Sequence
  Synthetic oligonucleotide; GTGAAT chr11 5340031 5340050 5340034 -
gcaggaaagttgaccatttg

SEQ ID NO: 61535 - DNA, 20 bp, Artificial Sequence
  Synthetic oligonucleotide; TAGGAT chr11 5339940 5339959 5339943 -
aattcactgagaagatgctg

SEQ ID NO: 61536 - DNA, 20 bp, Artificial Sequence
  Synthetic oligonucleotide; ATGAAT chr11 5339936 5339955 5339939 -
cactgagaagatgctgtagg

SEQ ID NO: 61537 - DNA, 20 bp, Artificial Sequence
  Synthetic oligonucleotide; ATGAGT chr11 5339656 5339675 5339659 -
aataccacgtgttctcactt

SEQ ID NO: 61538 - DNA, 20 bp, Artificial Sequence
  Synthetic oligonucleotide; GAGGAT chr11 5339587 5339606 5339590 -
tcacacactggggcctattg

SEQ ID NO: 61539 - DNA, 20 bp, Artificial Sequence
  Synthetic oligonucleotide; GAGGGT chr11 5339580 5339599 5339583 -
ctggggcctattggaggatg

SEQ ID NO: 61540 - DNA, 20 bp, Artificial Sequence
  Synthetic oligonucleotide; GAGGAT chr11 5339563 5339582 5339566 -
atggagggtgaaaggaggga

SEQ ID NO: 61541 - DNA, 20 bp, Artificial Sequence
  Synthetic oligonucleotide; AAGGGT chr11 5339542 5339561 5339545 -
aggatcaggaaaagtaacaa

SEQ ID NO: 61542 - DNA, 20 bp, Artificial Sequence
  Synthetic oligonucleotide; CTGAGT chr11 5339522 5339541 5339525 -
aagggtactaggcttaatac

SEQ ID NO: 61543 - DNA, 20 bp, Artificial Sequence
  Synthetic oligonucleotide; GTGAGT chr11 5339518 5339537 5339521 -
gtactaggcttaatacctga

SEQ ID NO: 61544 - DNA, 20 bp, Artificial Sequence
  Synthetic oligonucleotide; ATGAAT chr11 5339371 5339390 5339374 -
tctcctaggaaacactgcac

SEQ ID NO: 61545 - DNA, 20 bp, Artificial Sequence
  Synthetic oligonucleotide; AAGAGT chr11 5339352 5339371 5339355 -
catgaatttgtattcataag

SEQ ID NO: 61546 - DNA, 20 bp, Artificial Sequence
  Synthetic oligonucleotide; TAGAAT chr11 5339347 5339366 5339350 -
atttgtattcataagaagag

SEQ ID NO: 61547 - DNA, 20 bp, Artificial Sequence
  Synthetic oligonucleotide; CAGAGT chr11 5339340 5339359 5339343 -
ttcataagaagagtagaatt

SEQ ID NO: 61548 - DNA, 20 bp, Artificial Sequence
  Synthetic oligonucleotide; AAGAAT chr11 5339248 5339267 5339251 -
tcatcattcaagactgaaag

SEQ ID NO: 61549 - DNA, 20 bp, Artificial Sequence
  Synthetic oligonucleotide; AGGAAT chr11 5339215 5339234 5339218 -
atatagagaaggacctcatg

SEQ ID NO: 61550 - DNA, 20 bp, Artificial Sequence
  Synthetic oligonucleotide; AAGAAT chr11 5339146 5339165 5339149 -
atgggaaatctaaggtgtaa

SEQ ID NO: 61551 - DNA, 20 bp, Artificial Sequence
  Synthetic oligonucleotide; AGGGAT chr11 5339063 5339082 5339066 -
cttgtgtagtatgggcttga

SEQ ID NO: 61552 - DNA, 20 bp, Artificial Sequence
  Synthetic oligonucleotide; AAGAAT chr11 5339047 5339066 5339050 -
ttgaagggataacataccat

SEQ ID NO: 61553 - DNA, 20 bp, Artificial Sequence
  Synthetic oligonucleotide; TTGAGT chr11 5339034 5339053 5339037 -
ataccataagaatatttaat

SEQ ID NO: 61554 - DNA, 20 bp, Artificial Sequence
  Synthetic oligonucleotide; AAGAAT chr11 5338958 5338977 5338961 -
aaatgattaagaagacgtgg

SEQ ID NO: 61555 - DNA, 20 bp, Artificial Sequence
  Synthetic oligonucleotide; ATGAGT chr11 5338918 5338937 5338921 -
gaaaaaatatgtatggtcta

SEQ ID NO: 61556 - DNA, 20 bp, Artificial Sequence
  Synthetic oligonucleotide; ATGAAT chr11 5338884 5338903 5338887 -
cacttttcctcccatataaa

SEQ ID NO: 61557 - DNA, 20 bp, Artificial Sequence
  Synthetic oligonucleotide; CTGGGT chr11 5338825 5338844 5338828 -
ctctcattaacaaataattg

SEQ ID NO: 61558 - DNA, 20 bp, Artificial Sequence
  Synthetic oligonucleotide; TAGGGT chr11 5338793 5338812 5338796 -
accagagatgcagattttta

SEQ ID NO: 61559 - DNA, 20 bp, Artificial Sequence
  Synthetic oligonucleotide; ATGAGT chr11 5338747 5338766 5338750 -
aaagatacttactagattat

SEQ ID NO: 61560 - DNA, 20 bp, Artificial Sequence
  Synthetic oligonucleotide; AAGGAT chr11 5338726 5338745 5338729 -
tgagtattaaattgggcagc

SEQ ID NO: 61561 - DNA, 20 bp, Artificial Sequence
  Synthetic oligonucleotide; AAGAAT chr11 5338677 5338696 5338680 -
gaggtctccatgtccaatta

SEQ ID NO: 61562 - DNA, 20 bp, Artificial Sequence
  Synthetic oligonucleotide; AGGAGT chr11 5338579 5338598 5338582 -
atttattttatgggaaattt

SEQ ID NO: 61563 - DNA, 20 bp, Artificial Sequence
  Synthetic oligonucleotide; TAGAAT chr11 5338462 5338481 5338465 -
gtcatggttctccagaaaaa

SEQ ID NO: 61564 - DNA, 20 bp, Artificial Sequence
  Synthetic oligonucleotide; CAGGAT chr11 5338453 5338472 5338456 -
ctccagaaaaatagaatcaa

SEQ ID NO: 61565 - DNA, 20 bp, Artificial Sequence
  Synthetic oligonucleotide; CAGAAT chr11 5338358 5338377 5338361 -
agacacactgactaatggaa

SEQ ID NO: 61566 - DNA, 20 bp, Artificial Sequence
  Synthetic oligonucleotide; AGGGAT chr11 5338276 5338295 5338279 -
gtaaaaacaagtaatgggga

SEQ ID NO: 61567 - DNA, 20 bp, Artificial Sequence
  Synthetic oligonucleotide; GTGGGT chr11 5337954 5337973 5337957 -
cagcactttgggaggccaag

SEQ ID NO: 61568 - DNA, 20 bp, Artificial Sequence
  Synthetic oligonucleotide; GTGGAT chr11 5337950 5337969 5337953 -
actttgggaggccaaggtgg

SEQ ID NO: 61569 - DNA, 20 bp, Artificial Sequence
  Synthetic oligonucleotide; GGGAGT chr11 5337933 5337952 5337936 -
tgggtggatcacttgaggtg

SEQ ID NO: 61570 - DNA, 20 bp, Artificial Sequence
  Synthetic oligonucleotide; CTGGGT chr11 5337867 5337886 5337870 -
ctaaaaatacaaaaaatgtg

SEQ ID NO: 61571 - DNA, 20 bp, Artificial Sequence
  Synthetic oligonucleotide; GAGAAT chr11 5337814 5337833 5337817 -
tactcaggaggctgaggcag

SEQ ID NO: 61572 - DNA, 20 bp, Artificial Sequence
  Synthetic oligonucleotide; ATGGGT chr11 5337749 5337768 5337752 -
tcgcaccactgcactctagc

SEQ ID NO: 61573 - DNA, 20 bp, Artificial Sequence
  Synthetic oligonucleotide; AAGAGT chr11 5337741 5337760 5337744 -
ctgcactctagcatgggtga

SEQ ID NO: 61574 - DNA, 20 bp, Artificial Sequence
  Synthetic oligonucleotide; CAGAAT chr11 5337644 5337663 5337647 -
cagagcgaacaggcaaccta

SEQ ID NO: 61575 - DNA, 20 bp, Artificial Sequence
  Synthetic oligonucleotide; CAGAAT chr11 5337592 5337611 5337595 -
tctgacaaaggtctaatatc

SEQ ID NO: 61576 - DNA, 20 bp, Artificial Sequence
  Synthetic oligonucleotide; CAGAAT chr11 5337392 5337411 5337395 -
aaataccatctgacaccagt

SEQ ID NO: 61577 - DNA, 20 bp, Artificial Sequence
  Synthetic oligonucleotide; CTGGGT chr11 5337216 5337235 5337219 -
ttgacctcacaatcccatta

SEQ ID NO: 61578 - DNA, 20 bp, Artificial Sequence
  Synthetic oligonucleotide; AGGAGT chr11 5337200 5337219 5337203 -
attactgggtatatacctaa

SEQ ID NO: 61579 - DNA, 20 bp, Artificial Sequence
  Synthetic oligonucleotide; TAGAAT chr11 5337123 5337142 5337126 -
tattcacaatagcaaagaca

SEQ ID NO: 61580 - DNA, 20 bp, Artificial Sequence
  Synthetic oligonucleotide; AGGGAT chr11 5337038 5337057 5337041 -
aatactatctaaccataaaa

SEQ ID NO: 61581 - DNA, 20 bp, Artificial Sequence
  Synthetic oligonucleotide; ATGGAT chr11 5337009 5337028 5337012 -
atcatgccctttgctgggac

SEQ ID NO: 61582 - DNA, 20 bp, Artificial Sequence
  Synthetic oligonucleotide; GAGAAT chr11 5336913 5336932 5336916 -
agaagtgggagctgaacaat

SEQ ID NO: 61583 - DNA, 20 bp, Artificial Sequence
  Synthetic oligonucleotide; TGGGGT chr11 5336853 5336872 5336856 -
cactggagcctgtcagggca

SEQ ID NO: 61584 - DNA, 20 bp, Artificial Sequence
  Synthetic oligonucleotide; ATGGGT chr11 5336788 5336807 5336791 -
ctgggcttaacacctaggtg

SEQ ID NO: 61585 - DNA, 20 bp, Artificial Sequence
  Synthetic oligonucleotide; TTGAAT chr11 5336688 5336707 5336691 -
gaacttaaaaattaaaaaaa

SEQ ID NO: 61586 - DNA, 20 bp, Artificial Sequence
  Synthetic oligonucleotide; CAGAGT chr11 5336541 5336560 5336544 -
aaggcaagtcccaagatatg

SEQ ID NO: 61587 - DNA, 20 bp, Artificial Sequence
  Synthetic oligonucleotide; GTGAGT chr11 5336537 5336556 5336540 -
caagtcccaagatatgcaga

SEQ ID NO: 61588 - DNA, 20 bp, Artificial Sequence
  Synthetic oligonucleotide; GAGGAT chr11 5336462 5336481 5336465 -
tctgaaggcctgggaaacag

SEQ ID NO: 61589 - DNA, 20 bp, Artificial Sequence
  Synthetic oligonucleotide; AGGAAT chr11 5336339 5336358 5336342 -
cagtttgaaggccatcaata

SEQ ID NO: 61590 - DNA, 20 bp, Artificial Sequence
  Synthetic oligonucleotide; AAGGGT chr11 5336314 5336333 5336317 -
taattctctctgatttgggg

SEQ ID NO: 61591 - DNA, 20 bp, Artificial Sequence
  Synthetic oligonucleotide; TAGAAT chr11 5336178 5336197 5336181 -
aacaccctcacaaaaacatc

SEQ ID NO: 61592 - DNA, 20 bp, Artificial Sequence
  Synthetic oligonucleotide; GAGGAT chr11 5336099 5336118 5336102 -
attaaccatcagagcctgta

SEQ ID NO: 61593 - DNA, 20 bp, Artificial Sequence
  Synthetic oligonucleotide; ATGAGT chr11 5336095 5336114 5336098 -
accatcagagcctgtagagg

SEQ ID NO: 61594 - DNA, 20 bp, Artificial Sequence
  Synthetic oligonucleotide; AAGGAT chr11 5336087 5336106 5336090 -
agcctgtagaggatgagtta

SEQ ID NO: 61595 - DNA, 20 bp, Artificial Sequence
  Synthetic oligonucleotide; TGGAAT chr11 5336082 5336101 5336085 -
gtagaggatgagttaaagga

SEQ ID NO: 61596 - DNA, 20 bp, Artificial Sequence
  Synthetic oligonucleotide; TGGAAT chr11 5336061 5336080 5336064 -
ggaatcttcggagataattg

SEQ ID NO: 61597 - DNA, 20 bp, Artificial Sequence
  Synthetic oligonucleotide; TAGAAT chr11 5336036 5336055 5336039 -
tccagaaggctgacagataa

SEQ ID NO: 61598 - DNA, 20 bp, Artificial Sequence
  Synthetic oligonucleotide; TAGGAT chr11 5335956 5335975 5335959 -
tcaacaaacagcaaaaatcc

SEQ ID NO: 61599 - DNA, 20 bp, Artificial Sequence
  Synthetic oligonucleotide; CTGAAT chr11 5335940 5335959 5335943 -
atcctaggatagagaccttc

SEQ ID NO: 61600 - DNA, 20 bp, Artificial Sequence
  Synthetic oligonucleotide; TTGAAT chr11 5335909 5335928 5335912 -
gcgatataagcttattatac

SEQ ID NO: 61601 - DNA, 20 bp, Artificial Sequence
  Synthetic oligonucleotide; AGGAAT chr11 5335823 5335842 5335826 -
agagctcagaccaagagcca

SEQ ID NO: 61602 - DNA, 20 bp, Artificial Sequence
  Synthetic oligonucleotide; CTGAGT chr11 5335756 5335775 5335759 -
atttctaataatgtggctgc

SEQ ID NO: 61603 - DNA, 20 bp, Artificial Sequence
  Synthetic oligonucleotide; GCGGAT chr11 5335687 5335706 5335690 -
tagaaagagacaggcactca

SEQ ID NO: 61604 - DNA, 20 bp, Artificial Sequence
  Synthetic oligonucleotide; AAGAAT chr11 5335553 5335572 5335556 -
aatacagcaggaaatatgaa

SEQ ID NO: 61605 - DNA, 20 bp, Artificial Sequence
  Synthetic oligonucleotide; ATGAAT chr11 5335526 5335545 5335529 -
aacaaggtcttagaaaatac

SEQ ID NO: 61606 - DNA, 20 bp, Artificial Sequence
  Synthetic oligonucleotide; TTGGGT chr11 5335479 5335498 5335482 -
ttaaggaaatagaagatatt

SEQ ID NO: 61607 - DNA, 20 bp, Artificial Sequence
  Synthetic oligonucleotide; TTGAGT chr11 5335432 5335451 5335435 -
tgcccctaagcttggtgact

SEQ ID NO: 61608 - DNA, 20 bp, Artificial Sequence
  Synthetic oligonucleotide; AGGAAT chr11 5335287 5335306 5335290 -
ctaagataagtgatgtttcc

SEQ ID NO: 61609 - DNA, 20 bp, Artificial Sequence
  Synthetic oligonucleotide; TAGAGT chr11 5335282 5335301 5335285 -
ataagtgatgtttccaggaa

SEQ ID NO: 61610 - DNA, 20 bp, Artificial Sequence
  Synthetic oligonucleotide; GAGGGT chr11 5335238 5335257 5335241 -
gattcgtgtactgccagtga

SEQ ID NO: 61611 - DNA, 20 bp, Artificial Sequence
  Synthetic oligonucleotide; CAGGGT chr11 5335179 5335198 5335182 -
tgaaattaaatcagttatct

SEQ ID NO: 61612 - DNA, 20 bp, Artificial Sequence
  Synthetic oligonucleotide; CAGAAT chr11 5334995 5335014 5334998 -
catttaggaagacctatgag

SEQ ID NO: 61613 - DNA, 20 bp, Artificial Sequence
  Synthetic oligonucleotide; CAGGAT chr11 5334876 5334895 5334879 -
ctcatagttgggctaagttc

SEQ ID NO: 61614 - DNA, 20 bp, Artificial Sequence
  Synthetic oligonucleotide; TAGGAT chr11 5334865 5334884 5334868 -
gctaagttccaggataaatt

SEQ ID NO: 61615 - DNA, 20 bp, Artificial Sequence
  Synthetic oligonucleotide; AGGGAT chr11 5334765 5334784 5334768 -
acaaattgtcagacaaagcc

SEQ ID NO: 61616 - DNA, 20 bp, Artificial Sequence
  Synthetic oligonucleotide; AAGAAT chr11 5334757 5334776 5334760 -
tcagacaaagccagggatta

SEQ ID NO: 61617 - DNA, 20 bp, Artificial Sequence
  Synthetic oligonucleotide; GTGAGT chr11 5334584 5334603 5334587 -
cttatcagcagcactcattt

SEQ ID NO: 61618 - DNA, 20 bp, Artificial Sequence
  Synthetic oligonucleotide; AGGGAT chr11 5334531 5334550 5334534 -
ccaagaaaagattaagtgtg

SEQ ID NO: 61619 - DNA, 20 bp, Artificial Sequence
  Synthetic oligonucleotide; TTGAGT chr11 5334507 5334526 5334510 -
attattaagctttgtctaag

SEQ ID NO: 61620 - DNA, 20 bp, Artificial Sequence
  Synthetic oligonucleotide; CAGGGT chr11 5334487 5334506 5334490 -
ttgagtgagcttattggcta

SEQ ID NO: 61621 - DNA, 20 bp, Artificial Sequence
  Synthetic oligonucleotide; AGGAAT chr11 5334479 5334498 5334482 -
gcttattggctacagggtta

SEQ ID NO: 61622 - DNA, 20 bp, Artificial Sequence
  Synthetic oligonucleotide; GGGAAT chr11 5334435 5334454 5334438 -
ggtatcttctttttgaggtg

SEQ ID NO: 61623 - DNA, 20 bp, Artificial Sequence
  Synthetic oligonucleotide; CTGGAT chr11 5334388 5334407 5334391 -
gatagcatgacttccatgtg

SEQ ID NO: 61624 - DNA, 20 bp, Artificial Sequence
  Synthetic oligonucleotide; TTGAAT chr11 5334232 5334251 5334235 -
acagatactggggaacaatt

SEQ ID NO: 61625 - DNA, 20 bp, Artificial Sequence
  Synthetic oligonucleotide; GAGAAT chr11 5334094 5334113 5334097 -
tcaggctctagtgactatgg

SEQ ID NO: 61626 - DNA, 20 bp, Artificial Sequence
  Synthetic oligonucleotide; TGGAAT chr11 5334089 5334108 5334092 -
ctctagtgactatgggagaa

SEQ ID NO: 61627 - DNA, 20 bp, Artificial Sequence
  Synthetic oligonucleotide; TTGGAT chr11 5334048 5334067 5334051 -
gaaaataaagactaatcttc

SEQ ID NO: 61628 - DNA, 20 bp, Artificial Sequence
  Synthetic oligonucleotide; GAGGGT chr11 5334016 5334035 5334019 -
ccaccacatagttgttgcaa

SEQ ID NO: 61629 - DNA, 20 bp, Artificial Sequence
  Synthetic oligonucleotide; CCGGGT chr11 5333968 5333987 5333971 -
atctgtatctacagattctg

SEQ ID NO: 61630 - DNA, 20 bp, Artificial Sequence
  Synthetic oligonucleotide; ATGGGT chr11 5333888 5333907 5333891 -
aaaaacagtagttttatgtg

SEQ ID NO: 61631 - DNA, 20 bp, Artificial Sequence
  Synthetic oligonucleotide; ATGAAT chr11 5333876 5333895 5333879 -
tttatgtgatgggtgcttac

SEQ ID NO: 61632 - DNA, 20 bp, Artificial Sequence
  Synthetic oligonucleotide; AAGAGT chr11 5333866 5333885 5333869 -
gggtgcttacatgaataatt

SEQ ID NO: 61633 - DNA, 20 bp, Artificial Sequence
  Synthetic oligonucleotide; CTGAGT chr11 5333859 5333878 5333862 -
tacatgaataattaagagtt

SEQ ID NO: 61634 - DNA, 20 bp, Artificial Sequence
  Synthetic oligonucleotide; GGGAGT chr11 5333753 5333772 5333756 -
agaggaaagagactgactct

SEQ ID NO: 61635 - DNA, 20 bp, Artificial Sequence
  Synthetic oligonucleotide; GTGAAT chr11 5333749 5333768 5333752 -
gaaagagactgactctggga

SEQ ID NO: 61636 - DNA, 20 bp, Artificial Sequence
  Synthetic oligonucleotide; CAGGGT chr11 5333740 5333759 5333743 -
tgactctgggagtgaatgtg

SEQ ID NO: 61637 - DNA, 20 bp, Artificial Sequence
  Synthetic oligonucleotide; TGGGGT chr11 5333735 5333754 5333738 -
ctgggagtgaatgtgcaggg

SEQ ID NO: 61638 - DNA, 20 bp, Artificial Sequence
  Synthetic oligonucleotide; TGGAGT chr11 5333362 5333381 5333365 -
aaagtaagcaatgttagtgt

SEQ ID NO: 61639 - DNA, 20 bp, Artificial Sequence
  Synthetic oligonucleotide; GGGAGT chr11 5333356 5333375 5333359 -
agcaatgttagtgttggagt

SEQ ID NO: 61640 - DNA, 20 bp, Artificial Sequence
  Synthetic oligonucleotide; ATGAGT chr11 5333329 5333348 5333332 -
gaaccgtgttttttactaca

SEQ ID NO: 61641 - DNA, 20 bp, Artificial Sequence
  Synthetic oligonucleotide; AAGAAT chr11 5333294 5333313 5333297 -
taggtctgagagactagtaa

SEQ ID NO: 61642 - DNA, 20 bp, Artificial Sequence
  Synthetic oligonucleotide; CTGGGT chr11 5333248 5333267 5333251 -
gctaagttttatgctaaagt

SEQ ID NO: 61643 - DNA, 20 bp, Artificial Sequence
  Synthetic oligonucleotide; TGGGGT chr11 5333225 5333244 5333228 -
ggtgatgcaaaagagacatc

SEQ ID NO: 61644 - DNA, 20 bp, Artificial Sequence
  Synthetic oligonucleotide; AAGGGT chr11 5333170 5333189 5333173 -
tatagaaatagatacaacaa

SEQ ID NO: 61645 - DNA, 20 bp, Artificial Sequence
  Synthetic oligonucleotide; ATGGAT chr11 5333163 5333182 5333166 -
atagatacaacaaaagggtg

SEQ ID NO: 61646 - DNA, 20 bp, Artificial Sequence
  Synthetic oligonucleotide; TAGGAT chr11 5333131 5333150 5333134 -
agaacgacacaggaaaacaa

SEQ ID NO: 61647 - DNA, 20 bp, Artificial Sequence
  Synthetic oligonucleotide; AGGGAT chr11 5333125 5333144 5333128 -
acacaggaaaacaataggat

SEQ ID NO: 61648 - DNA, 20 bp, Artificial Sequence
  Synthetic oligonucleotide; TAGAGT chr11 5333025 5333044 5333028 -
aaataagttgaaccatgcat

SEQ ID NO: 61649 - DNA, 20 bp, Artificial Sequence
  Synthetic oligonucleotide; ATGGAT chr11 5332869 5332888 5332872 -
ctataaactcttaataaaat

SEQ ID NO: 61650 - DNA, 20 bp, Artificial Sequence
  Synthetic oligonucleotide; CTGAGT chr11 5332742 5332761 5332745 -
ctgcactctcataggcttaa

SEQ ID NO: 61651 - DNA, 20 bp, Artificial Sequence
  Synthetic oligonucleotide; TAGGGT chr11 5332728 5332747 5332731 -
gcttaactgagttctctgct

SEQ ID NO: 61652 - DNA, 20 bp, Artificial Sequence
  Synthetic oligonucleotide; AAGAAT chr11 5332663 5332682 5332666 -
cttatccaaaggctctgggg

SEQ ID NO: 61653 - DNA, 20 bp, Artificial Sequence
  Synthetic oligonucleotide; TGGAGT chr11 5332581 5332600 5332584 -
ttttttttttttttttgaga

SEQ ID NO: 61654 - DNA, 20 bp, Artificial Sequence
  Synthetic oligonucleotide; TGGAGT chr11 5332556 5332575 5332559 -
tctcgctctgtcacccagcc

SEQ ID NO: 61655 - DNA, 20 bp, Artificial Sequence
  Synthetic oligonucleotide; CCGGGT chr11 5332511 5332530 5332514 -
ctccctgcaacctgtgcctc

SEQ ID NO: 61656 - DNA, 20 bp, Artificial Sequence
  Synthetic oligonucleotide; AGGGAT chr11 5332418 5332437 5332421 -
taatttttatattttttggt

SEQ ID NO: 61657 - DNA, 20 bp, Artificial Sequence
  Synthetic oligonucleotide; TGGAAT chr11 5332413 5332432 5332416 -
tttatattttttggtaggga

SEQ ID NO: 61658 - DNA, 20 bp, Artificial Sequence
  Synthetic oligonucleotide; TGGGAT chr11 5332334 5332353 5332337 -
gccttggcctcccaaagtgc

SEQ ID NO: 61659 - DNA, 20 bp, Artificial Sequence
  Synthetic oligonucleotide; TTGAAT chr11 5332321 5332340 5332324 -
aaagtgctgggattacaggc

SEQ ID NO: 61660 - DNA, 20 bp, Artificial Sequence
  Synthetic oligonucleotide; CAGAGT chr11 5332295 5332314 5332298 -
gagccattgcacccggctgt

SEQ ID NO: 61661 - DNA, 20 bp, Artificial Sequence
  Synthetic oligonucleotide; TAGGAT chr11 5332209 5332228 5332212 -
tttgtttgcaggctgttagc

SEQ ID NO: 61662 - DNA, 20 bp, Artificial Sequence
  Synthetic oligonucleotide; TTGAAT chr11 5332110 5332129 5332113 -
ccatgaacctttctcaaatt

SEQ ID NO: 61663 - DNA, 20 bp, Artificial Sequence
  Synthetic oligonucleotide; TGGAAT chr11 5332048 5332067 5332051 -
actctgcttttaggggctca

SEQ ID NO: 61664 - DNA, 20 bp, Artificial Sequence
  Synthetic oligonucleotide; CTGAGT chr11 5332028 5332047 5332031 -
tggaattagactaggttccc

SEQ ID NO: 61665 - DNA, 20 bp, Artificial Sequence
  Synthetic oligonucleotide; TAGGAT chr11 5331921 5331940 5331924 -
atattcacagtcctagaaat

SEQ ID NO: 61666 - DNA, 20 bp, Artificial Sequence
  Synthetic oligonucleotide; AAGGGT chr11 5331751 5331770 5331754 -
tgatgaagcacaatgtctga

SEQ ID NO: 61667 - DNA, 20 bp, Artificial Sequence
  Synthetic oligonucleotide; TGGAGT chr11 5331732 5331751 5331735 -
aaagggtggtagaaagcagc

SEQ ID NO: 61668 - DNA, 20 bp, Artificial Sequence
  Synthetic oligonucleotide; GAGGAT chr11 5331719 5331738 5331722 -
aagcagctggagtcgaaact

SEQ ID NO: 61669 - DNA, 20 bp, Artificial Sequence
  Synthetic oligonucleotide; TTGAGT chr11 5331661 5331680 5331664 -
aacagtagcatctggttagc

SEQ ID NO: 61670 - DNA, 20 bp, Artificial Sequence
  Synthetic oligonucleotide; CAGAAT chr11 5331655 5331674 5331658 -
agcatctggttagcttgagt

SEQ ID NO: 61671 - DNA, 20 bp, Artificial Sequence
  Synthetic oligonucleotide; AAGAAT chr11 5331621 5331640 5331624 -
agtgtaaacactcgattttg

SEQ ID NO: 61672 - DNA, 20 bp, Artificial Sequence
  Synthetic oligonucleotide; TGGAGT chr11 5331292 5331311 5331295 -
gtctggagagatttcatcct

SEQ ID NO: 61673 - DNA, 20 bp, Artificial Sequence
  Synthetic oligonucleotide; TGGAGT chr11 5331039 5331058 5331042 -
aatccactccctctctatcg

SEQ ID NO: 61674 - DNA, 20 bp, Artificial Sequence
  Synthetic oligonucleotide; CAGAGT chr11 5331032 5331051 5331035 -
tccctctctatcgtggagtc

SEQ ID NO: 61675 - DNA, 20 bp, Artificial Sequence
  Synthetic oligonucleotide; GGGGGT chr11 5330930 5330949 5330933 -
aaggtggtgaagatagatct

SEQ ID NO: 61676 - DNA, 20 bp, Artificial Sequence
  Synthetic oligonucleotide; GGGGAT chr11 5330916 5330935 5330919 -
agatctgggggttcaaatga

SEQ ID NO: 61677 - DNA, 20 bp, Artificial Sequence
  Synthetic oligonucleotide; CTGGAT chr11 5330874 5330893 5330877 -
gcccataatcatcaccctct

SEQ ID NO: 61678 - DNA, 20 bp, Artificial Sequence
  Synthetic oligonucleotide; GGGAAT chr11 5330688 5330707 5330691 -
ctgatccttaagaaggtcat

SEQ ID NO: 61679 - DNA, 20 bp, Artificial Sequence
  Synthetic oligonucleotide; AAGAAT chr11 5330554 5330573 5330557 -
tgcttcatcaaaaaaatgtt

SEQ ID NO: 61680 - DNA, 20 bp, Artificial Sequence
  Synthetic oligonucleotide; TAGAAT chr11 5330467 5330486 5330470 -
agataccatctcacaccagt

SEQ ID NO: 61681 - DNA, 20 bp, Artificial Sequence
  Synthetic oligonucleotide; GAGGAT chr11 5330423 5330442 5330426 -
agggaacaacaggtgctgga

SEQ ID NO: 61682 - DNA, 20 bp, Artificial Sequence
  Synthetic oligonucleotide; AGGGAT chr11 5330334 5330353 5330337 -
agtcagtgtggcgattcctc

SEQ ID NO: 61683 - DNA, 20 bp, Artificial Sequence
  Synthetic oligonucleotide; CTGGGT chr11 5330289 5330308 5330292 -
ttgacccagccatcccatta

SEQ ID NO: 61684 - DNA, 20 bp, Artificial Sequence
  Synthetic oligonucleotide; ACGGAT chr11 5330274 5330293 5330277 -
cattactgggtatataccca

SEQ ID NO: 61685 - DNA, 20 bp, Artificial Sequence
  Synthetic oligonucleotide; CTGAAT chr11 5330164 5330183 5330167 -
aaatgtccaacaatgataga

SEQ ID NO: 61686 - DNA, 20 bp, Artificial Sequence
  Synthetic oligonucleotide; TGGAAT chr11 5330132 5330151 5330135 -
aatgtggcacatatacacca

SEQ ID NO: 61687 - DNA, 20 bp, Artificial Sequence
  Synthetic oligonucleotide; AAGAGT chr11 5330105 5330124 5330108 -
ctatgcagccataaaaaatg

SEQ ID NO: 61688 - DNA, 20 bp, Artificial Sequence
  Synthetic oligonucleotide; ATGGAT chr11 5330080 5330099 5330083 -
ttcatgtcatttgtagggac

SEQ ID NO: 61689 - DNA, 20 bp, Artificial Sequence
  Synthetic oligonucleotide; GGGAAT chr11 5329998 5330017 5330001 -
gcatgttctcactcataggt

SEQ ID NO: 61690 - DNA, 20 bp, Artificial Sequence
  Synthetic oligonucleotide; ATGGGT chr11 5329872 5329891 5329875 -
taatgctaagtgacaagtta

SEQ ID NO: 61691 - DNA, 20 bp, Artificial Sequence
  Synthetic oligonucleotide; TTGGAT chr11 5329758 5329777 5329761 -
aataataaaaatacattatt

SEQ ID NO: 61692 - DNA, 20 bp, Artificial Sequence
  Synthetic oligonucleotide; TAGAAT chr11 5329677 5329696 5329680 -
ttttgttattctggctctgc

SEQ ID NO: 61693 - DNA, 20 bp, Artificial Sequence
  Synthetic oligonucleotide; TTGAGT chr11 5329662 5329681 5329665 -
tctgctagaattctcttgat

SEQ ID NO: 61694 - DNA, 20 bp, Artificial Sequence
  Synthetic oligonucleotide; GTGAAT chr11 5329395 5329414 5329398 -
ttacacactatttacattct

SEQ ID NO: 61695 - DNA, 20 bp, Artificial Sequence
  Synthetic oligonucleotide; CTGAAT chr11 5329304 5329323 5329307 -
tataattttaagataaaaag

SEQ ID NO: 61696 - DNA, 20 bp, Artificial Sequence
  Synthetic oligonucleotide; GAGGGT chr11 5329244 5329263 5329247 -
cagcactttgggaggccaag

SEQ ID NO: 61697 - DNA, 20 bp, Artificial Sequence
  Synthetic oligonucleotide; GTGGAT chr11 5329240 5329259 5329243 -
actttgggaggccaaggagg

SEQ ID NO: 61698 - DNA, 20 bp, Artificial Sequence
  Synthetic oligonucleotide; CTGGGT chr11 5329160 5329179 5329163 -
actaaaaatacaaaaattag

SEQ ID NO: 61699 - DNA, 20 bp, Artificial Sequence
  Synthetic oligonucleotide; GAGAAT chr11 5329107 5329126 5329110 -
ttctcaggaggctgtggcag

SEQ ID NO: 61700 - DNA, 20 bp, Artificial Sequence
  Synthetic oligonucleotide; TGGAGT chr11 5329084 5329103 5329087 -
aatcacttgaacctgggagg

SEQ ID NO: 61701 - DNA, 20 bp, Artificial Sequence
  Synthetic oligonucleotide; CAGAGT chr11 5329035 5329054 5329038 -
actgcactccagcctggcga

SEQ ID NO: 61702 - DNA, 20 bp, Artificial Sequence
  Synthetic oligonucleotide; CTGAAT chr11 5328988 5329007 5328991 -
aaaaaaaaaaaaaaaaaaag

SEQ ID NO: 61703 - DNA, 20 bp, Artificial Sequence
  Synthetic oligonucleotide; ATGAAT chr11 5328979 5328998 5328982 -
aaaaaaaaaagctgaatgtc

SEQ ID NO: 61704 - DNA, 20 bp, Artificial Sequence
  Synthetic oligonucleotide; TGGAAT chr11 5328889 5328908 5328892 -
aggaaagacaaaaacgcaat

SEQ ID NO: 61705 - DNA, 20 bp, Artificial Sequence
  Synthetic oligonucleotide; TTGGGT chr11 5328785 5328804 5328788 -
agttatgatgctgagcctcc

SEQ ID NO: 61706 - DNA, 20 bp, Artificial Sequence
  Synthetic oligonucleotide; TTGAAT chr11 5328735 5328754 5328738 -
tatcttacatcagctggttt

SEQ ID NO: 61707 - DNA, 20 bp, Artificial Sequence
  Synthetic oligonucleotide; AGGGGT chr11 5328623 5328642 5328626 -
aagagagggaagggagatca

SEQ ID NO: 61708 - DNA, 20 bp, Artificial Sequence
  Synthetic oligonucleotide; GTGAGT chr11 5328534 5328553 5328537 -
tgaggcctcatgagaggtct

SEQ ID NO: 61709 - DNA, 20 bp, Artificial Sequence
  Synthetic oligonucleotide; GTGAAT chr11 5328530 5328549 5328533 -
gcctcatgagaggtctgtga

SEQ ID NO: 61710 - DNA, 20 bp, Artificial Sequence
  Synthetic oligonucleotide; CTGAGT chr11 5328516 5328535 5328519 -
ctgtgagtgaatgatctgaa

SEQ ID NO: 61711 - DNA, 20 bp, Artificial Sequence
  Synthetic oligonucleotide; AGGAAT chr11 5328497 5328516 5328500 -
actgagtcctcaaagaggac

SEQ ID NO: 61712 - DNA, 20 bp, Artificial Sequence
  Synthetic oligonucleotide; GTGAGT chr11 5328466 5328485 5328469 -
cctattttagccacaatact

SEQ ID NO: 61713 - DNA, 20 bp, Artificial Sequence
  Synthetic oligonucleotide; GTGGGT chr11 5328462 5328481 5328465 -
ttttagccacaatactgtga

SEQ ID NO: 61714 - DNA, 20 bp, Artificial Sequence
  Synthetic oligonucleotide; GTGAGT chr11 5328458 5328477 5328461 -
agccacaatactgtgagtgg

SEQ ID NO: 61715 - DNA, 20 bp, Artificial Sequence
  Synthetic oligonucleotide; TTGAAT chr11 5328443 5328462 5328446 -
agtgggtgagtgccaggaac

SEQ ID NO: 61716 - DNA, 20 bp, Artificial Sequence
  Synthetic oligonucleotide; TGGAAT chr11 5328436 5328455 5328439 -
gagtgccaggaacttgaata

SEQ ID NO: 61717 - DNA, 20 bp, Artificial Sequence
  Synthetic oligonucleotide; TGGGAT chr11 5328337 5328356 5328340 -
ggtaaagatcacagctgagg

SEQ ID NO: 61718 - DNA, 20 bp, Artificial Sequence
  Synthetic oligonucleotide; AAGAGT chr11 5328296 5328315 5328299 -
tttttttttttcttttttga

SEQ ID NO: 61719 - DNA, 20 bp, Artificial Sequence
  Synthetic oligonucleotide; TTGGAT chr11 5328246 5328265 5328249 -
ggttttctaatctgggaccc

SEQ ID NO: 61720 - DNA, 20 bp, Artificial Sequence
  Synthetic oligonucleotide; GAGAAT chr11 5328147 5328166 5328150 -
tgtttatagcttttttttca

SEQ ID NO: 61721 - DNA, 20 bp, Artificial Sequence
  Synthetic oligonucleotide; AGGAAT chr11 5327994 5328013 5327997 -
tttgaaaataagaagcagaa

SEQ ID NO: 61722 - DNA, 20 bp, Artificial Sequence
  Synthetic oligonucleotide; GAGGAT chr11 5327806 5327825 5327809 -
attgataactttcctgttca

SEQ ID NO: 61723 - DNA, 20 bp, Artificial Sequence
  Synthetic oligonucleotide; AAGAGT chr11 5327777 5327796 5327780 -
ttgttgatagtttttctctg

SEQ ID NO: 61724 - DNA, 20 bp, Artificial Sequence
  Synthetic oligonucleotide; CTGAAT chr11 5327759 5327778 5327762 -
tgaagagtagacaaaaaatt

SEQ ID NO: 61725 - DNA, 20 bp, Artificial Sequence
  Synthetic oligonucleotide; TCGAGT chr11 5327754 5327773 5327757 -
agtagacaaaaaattctgaa

SEQ ID NO: 61726 - DNA, 20 bp, Artificial Sequence
  Synthetic oligonucleotide; TTGGAT chr11 5327701 5327720 5327704 -
ttaagatctaagaaagcaaa

SEQ ID NO: 61727 - DNA, 20 bp, Artificial Sequence
  Synthetic oligonucleotide; CTGGGT chr11 5327653 5327672 5327656 -
gcagatgataatatattgga

SEQ ID NO: 61728 - DNA, 20 bp, Artificial Sequence
  Synthetic oligonucleotide; AGGAAT chr11 5327634 5327653 5327637 -
actgggttggagaaggcagg

SEQ ID NO: 61729 - DNA, 20 bp, Artificial Sequence
  Synthetic oligonucleotide; GAGAGT chr11 5327604 5327623 5327607 -
cttgtggacaatagaaatct

SEQ ID NO: 61730 - DNA, 20 bp, Artificial Sequence
  Synthetic oligonucleotide; TTGGGT chr11 5327599 5327618 5327602 -
ggacaatagaaatctgagag

SEQ ID NO: 61731 - DNA, 20 bp, Artificial Sequence
  Synthetic oligonucleotide; CGGAGT chr11 5327512 5327531 5327515 -
aaagacaatgcgtgagagca

SEQ ID NO: 61732 - DNA, 20 bp, Artificial Sequence
  Synthetic oligonucleotide; ATGAGT chr11 5327329 5327348 5327332 -
gaactgctctaagagatggc

SEQ ID NO: 61733 - DNA, 20 bp, Artificial Sequence
  Synthetic oligonucleotide; CAGAGT chr11 5327230 5327249 5327233 -
catccaactcagaaggaggg

SEQ ID NO: 61734 - DNA, 20 bp, Artificial Sequence
  Synthetic oligonucleotide; AGGAAT chr11 5327199 5327218 5327202 -
atgagaagatgagggaaagg

SEQ ID NO: 61735 - DNA, 20 bp, Artificial Sequence
  Synthetic oligonucleotide; GAGAGT chr11 5326970 5326989 5326973 -
atgtatttatgcatcttggt

SEQ ID NO: 61736 - DNA, 20 bp, Artificial Sequence
  Synthetic oligonucleotide; AGGAAT chr11 5326950 5326969 5326953 -
gagagtgttgctacaagtat

SEQ ID NO: 61737 - DNA, 20 bp, Artificial Sequence
  Synthetic oligonucleotide; TAGAAT chr11 5326892 5326911 5326895 -
attcaggtcaatagaacatc

SEQ ID NO: 61738 - DNA, 20 bp, Artificial Sequence
  Synthetic oligonucleotide; TAGAAT chr11 5326881 5326900 5326884 -
tagaacatctagaatgaagc

SEQ ID NO: 61739 - DNA, 20 bp, Artificial Sequence
  Synthetic oligonucleotide; ATGGAT chr11 5326831 5326850 5326834 -
tttctcaagttttcagcatt

SEQ ID NO: 61740 - DNA, 20 bp, Artificial Sequence
  Synthetic oligonucleotide; GAGAAT chr11 5326781 5326800 5326784 -
attctgcataaaattgaagg

SEQ ID NO: 61741 - DNA, 20 bp, Artificial Sequence
  Synthetic oligonucleotide; GTGAAT chr11 5326607 5326626 5326610 -
acttgtcccagatggtattg

SEQ ID NO: 61742 - DNA, 20 bp, Artificial Sequence
  Synthetic oligonucleotide; CTGAGT chr11 5326488 5326507 5326491 -
aatcactaaacatttatgtt

SEQ ID NO: 61743 - DNA, 20 bp, Artificial Sequence
  Synthetic oligonucleotide; CTGAAT chr11 5326372 5326391 5326375 -
cttgttaatagctaagccat

SEQ ID NO: 61744 - DNA, 20 bp, Artificial Sequence
  Synthetic oligonucleotide; TGGAAT chr11 5326367 5326386 5326370 -
taatagctaagccatctgaa

SEQ ID NO: 61745 - DNA, 20 bp, Artificial Sequence
  Synthetic oligonucleotide; TAGAAT chr11 5326258 5326277 5326261 -
atgacagtatctagctctcc

SEQ ID NO: 61746 - DNA, 20 bp, Artificial Sequence
  Synthetic oligonucleotide; CTGGGT chr11 5326236 5326255 5326239 -
gaatccccacacgcctgcct

SEQ ID NO: 61747 - DNA, 20 bp, Artificial Sequence
  Synthetic oligonucleotide; AGGAAT chr11 5325897 5325916 5325900 -
ccttacacaattttttttaa

SEQ ID NO: 61748 - DNA, 20 bp, Artificial Sequence
  Synthetic oligonucleotide; CAGAAT chr11 5325788 5325807 5325791 -
tttcttctatgtttaccctt

SEQ ID NO: 61749 - DNA, 20 bp, Artificial Sequence
  Synthetic oligonucleotide; AAGGAT chr11 5325683 5325702 5325686 -
aatctgtgtttttaagcatg

SEQ ID NO: 61750 - DNA, 20 bp, Artificial Sequence
  Synthetic oligonucleotide; ATGAAT chr11 5325626 5325645 5325629 -
attataattcagtcttctat

SEQ ID NO: 61751 - DNA, 20 bp, Artificial Sequence
  Synthetic oligonucleotide; AGGGAT chr11 5325602 5325621 5325605 -
attcaatgtgatttaatttt

SEQ ID NO: 61752 - DNA, 20 bp, Artificial Sequence
  Synthetic oligonucleotide; CAGGAT chr11 5325409 5325428 5325412 -
aggtgctaaagacttgcctc

SEQ ID NO: 61753 - DNA, 20 bp, Artificial Sequence
  Synthetic oligonucleotide; CTGAAT chr11 5325402 5325421 5325405 -
aaagacttgcctccaggatt

SEQ ID NO: 61754 - DNA, 20 bp, Artificial Sequence
  Synthetic oligonucleotide; TTGGAT chr11 5325334 5325353 5325337 -
ttctttctcccatacccctc

SEQ ID NO: 61755 - DNA, 20 bp, Artificial Sequence
  Synthetic oligonucleotide; AGGAGT chr11 5325230 5325249 5325233 -
cagaactgcaacagttcctc

SEQ ID NO: 61756 - DNA, 20 bp, Artificial Sequence
  Synthetic oligonucleotide; TGGAGT chr11 5325223 5325242 5325226 -
gcaacagttcctcaggagtt

SEQ ID NO: 61757 - DNA, 20 bp, Artificial Sequence
  Synthetic oligonucleotide; CTGGAT chr11 5325051 5325070 5325054 -
ggagaaaatgagaaaatcaa

SEQ ID NO: 61758 - DNA, 20 bp, Artificial Sequence
  Synthetic oligonucleotide; ATGGAT chr11 5325015 5325034 5325018 -
aaaggtttctatctcgaaag

SEQ ID NO: 61759 - DNA, 20 bp, Artificial Sequence
  Synthetic oligonucleotide; TGGAAT chr11 5324962 5324981 5324965 -
gcccagacattgttttgcac

SEQ ID NO: 61760 - DNA, 20 bp, Artificial Sequence
  Synthetic oligonucleotide; GCGAAT chr11 5324936 5324955 5324939 -
cacctgaggacctgaaaaaa

SEQ ID NO: 61761 - DNA, 20 bp, Artificial Sequence
  Synthetic oligonucleotide; CAGAAT chr11 5324924 5324943 5324927 -
tgaaaaaagcgaatttgatt

SEQ ID NO: 61762 - DNA, 20 bp, Artificial Sequence
  Synthetic oligonucleotide; CAGAAT chr11 5324907 5324926 5324910 -
attcagaatgttggaagggg

SEQ ID NO: 61763 - DNA, 20 bp, Artificial Sequence
  Synthetic oligonucleotide; TAGAGT chr11 5324813 5324832 5324816 -
ggccaagctcaagtaactgt

SEQ ID NO: 61764 - DNA, 20 bp, Artificial Sequence
  Synthetic oligonucleotide; GCGGAT chr11 5324532 5324551 5324535 -
taagtaccctcaaaatagtt

SEQ ID NO: 61765 - DNA, 20 bp, Artificial Sequence
  Synthetic oligonucleotide; TTGAAT chr11 5324499 5324518 5324502 -
ttaaaattaatgaaaaattt

SEQ ID NO: 61766 - DNA, 20 bp, Artificial Sequence
  Synthetic oligonucleotide; CAGAGT chr11 5324401 5324420 5324404 -
cttcttcaggaaaatagttg

SEQ ID NO: 61767 - DNA, 20 bp, Artificial Sequence
  Synthetic oligonucleotide; GTGGAT chr11 5324309 5324328 5324312 -
aagaaatctgatctttaccg

SEQ ID NO: 61768 - DNA, 20 bp, Artificial Sequence
  Synthetic oligonucleotide; CTGGAT chr11 5324230 5324249 5324233 -
gggctggaggcagctcatca

SEQ ID NO: 61769 - DNA, 20 bp, Artificial Sequence
  Synthetic oligonucleotide; ATGGGT chr11 5324050 5324069 5324053 -
cctactgtaatgggcatcct

SEQ ID NO: 61770 - DNA, 20 bp, Artificial Sequence
  Synthetic oligonucleotide; GTGAAT chr11 5324046 5324065 5324049 -
ctgtaatgggcatcctatgg

SEQ ID NO: 61771 - DNA, 20 bp, Artificial Sequence
  Synthetic oligonucleotide; TGGAAT chr11 5323976 5323995 5323979 -
tattcactccctttctgttg

SEQ ID NO: 61772 - DNA, 20 bp, Artificial Sequence
  Synthetic oligonucleotide; TAGAGT chr11 5323888 5323907 5323891 -
gcttccattctcaccaatac

SEQ ID NO: 61773 - DNA, 20 bp, Artificial Sequence
  Synthetic oligonucleotide; AGGAGT chr11 5323873 5323892 5323876 -
aatactagagtcatagcgtt

SEQ ID NO: 61774 - DNA, 20 bp, Artificial Sequence
  Synthetic oligonucleotide; GGGAGT chr11 5323867 5323886 5323870 -
agagtcatagcgttaggagt

SEQ ID NO: 61775 - DNA, 20 bp, Artificial Sequence
  Synthetic oligonucleotide; AGGGGT chr11 5323854 5323873 5323857 -
taggagtgggagtgtttcta

SEQ ID NO: 61776 - DNA, 20 bp, Artificial Sequence
  Synthetic oligonucleotide; ATGGGT chr11 5323539 5323558 5323542 -
ttatcttctatgttacagtg

SEQ ID NO: 61777 - DNA, 20 bp, Artificial Sequence
  Synthetic oligonucleotide; AAGAAT chr11 5323509 5323528 5323512 -
cattcatttacagatttggg

SEQ ID NO: 61778 - DNA, 20 bp, Artificial Sequence
  Synthetic oligonucleotide; ATGAGT chr11 5323479 5323498 5323482 -
cagaggttgtccacattatc

SEQ ID NO: 61779 - DNA, 20 bp, Artificial Sequence
  Synthetic oligonucleotide; TCGGAT chr11 5323357 5323376 5323360 -
cataggtttagtagttaaac

SEQ ID NO: 61780 - DNA, 20 bp, Artificial Sequence
  Synthetic oligonucleotide; GAGAAT chr11 5323348 5323367 5323351 -
agtagttaaactcggatctg

SEQ ID NO: 61781 - DNA, 20 bp, Artificial Sequence
  Synthetic oligonucleotide; CAGAAT chr11 5323318 5323337 5323321 -
cacagacataaaaatgaagc

SEQ ID NO: 61782 - DNA, 20 bp, Artificial Sequence
  Synthetic oligonucleotide; TGGAGT chr11 5323298 5323317 5323301 -
cagaatgaaaaatgaaagcc

SEQ ID NO: 61783 - DNA, 20 bp, Artificial Sequence
  Synthetic oligonucleotide; AAGGGT chr11 5323274 5323293 5323277 -
gttctttcttagcaaagagc

SEQ ID NO: 61784 - DNA, 20 bp, Artificial Sequence
  Synthetic oligonucleotide; TAGGGT chr11 5323220 5323239 5323223 -
aggacttaagtactttacca

SEQ ID NO: 61785 - DNA, 20 bp, Artificial Sequence
  Synthetic oligonucleotide; CTGAAT chr11 5323177 5323196 5323180 -
agaagtctggtgacagaaca

SEQ ID NO: 61786 - DNA, 20 bp, Artificial Sequence
  Synthetic oligonucleotide; CTGAGT chr11 5322840 5322859 5322843 -
tcttttaactgtcctctacc

SEQ ID NO: 61787 - DNA, 20 bp, Artificial Sequence
  Synthetic oligonucleotide; TAGGGT chr11 5322834 5322853 5322837 -
aactgtcctctaccctgagt

SEQ ID NO: 61788 - DNA, 20 bp, Artificial Sequence
  Synthetic oligonucleotide; CAGAGT chr11 5322770 5322789 5322773 -
atacagtcgtaagtcactta

SEQ ID NO: 61789 - DNA, 20 bp, Artificial Sequence
  Synthetic oligonucleotide; CAGGAT chr11 5322725 5322744 5322728 -
aattttcaatacattccttg

SEQ ID NO: 61790 - DNA, 20 bp, Artificial Sequence
  Synthetic oligonucleotide; CTGGAT chr11 5322717 5322736 5322720 -
atacattccttgcaggatgt

SEQ ID NO: 61791 - DNA, 20 bp, Artificial Sequence
  Synthetic oligonucleotide; GTGAGT chr11 5322598 5322617 5322601 -
agctcgtaaaaaagtaaaaa

SEQ ID NO: 61792 - DNA, 20 bp, Artificial Sequence
  Synthetic oligonucleotide; AAGAGT chr11 5322588 5322607 5322591 -
aaagtaaaaagtgagttttt

SEQ ID NO: 61793 - DNA, 20 bp, Artificial Sequence
  Synthetic oligonucleotide; AAGGGT chr11 5322529 5322548 5322532 -
tcccttggcctaataatagg

SEQ ID NO: 61794 - DNA, 20 bp, Artificial Sequence
  Synthetic oligonucleotide; TAGAAT chr11 5322487 5322506 5322490 -
aatagaaaatatagccattc

SEQ ID NO: 61795 - DNA, 20 bp, Artificial Sequence
  Synthetic oligonucleotide; ATGGAT chr11 5322328 5322347 5322331 -
gaccaacaatgttgagagaa

SEQ ID NO: 61796 - DNA, 20 bp, Artificial Sequence
  Synthetic oligonucleotide; AGGAGT chr11 5322287 5322306 5322290 -
gactaaaaaattgtggtggg

SEQ ID NO: 61797 - DNA, 20 bp, Artificial Sequence
  Synthetic oligonucleotide; CAGGAT chr11 5322229 5322248 5322232 -
agactgatttaattgtgaaa

SEQ ID NO: 61798 - DNA, 20 bp, Artificial Sequence
  Synthetic oligonucleotide; CAGAGT chr11 5322187 5322206 5322190 -
caaaaggggaaaacctatct

SEQ ID NO: 61799 - DNA, 20 bp, Artificial Sequence
  Synthetic oligonucleotide; CTGAAT chr11 5322160 5322179 5322163 -
taatgttcaagttattgatg

SEQ ID NO: 61800 - DNA, 20 bp, Artificial Sequence
  Synthetic oligonucleotide; TCGGAT chr11 5322045 5322064 5322048 -
cttaatggaaaaatctcatt

SEQ ID NO: 61801 - DNA, 20 bp, Artificial Sequence
  Synthetic oligonucleotide; GAGGAT chr11 5321876 5321895 5321879 -
ccatctgatatctaaatttt

SEQ ID NO: 61802 - DNA, 20 bp, Artificial Sequence
  Synthetic oligonucleotide; GTGGGT chr11 5321706 5321725 5321709 -
gcatgccttttgtgtatatg

SEQ ID NO: 61803 - DNA, 20 bp, Artificial Sequence
  Synthetic oligonucleotide; GAGGAT chr11 5321699 5321718 5321702 -
ttttgtgtatatggtgggtt

SEQ ID NO: 61804 - DNA, 20 bp, Artificial Sequence
  Synthetic oligonucleotide; CTGAAT chr11 5321673 5321692 5321676 -
atggcaatattgcagcctca

SEQ ID NO: 61805 - DNA, 20 bp, Artificial Sequence
  Synthetic oligonucleotide; TTGGAT chr11 5321646 5321665 5321649 -
ggtataaggaggtgcttact

SEQ ID NO: 61806 - DNA, 20 bp, Artificial Sequence
  Synthetic oligonucleotide; TTGAAT chr11 5321551 5321570 5321554 -
tccttaaactggtttagacg

SEQ ID NO: 61807 - DNA, 20 bp, Artificial Sequence
  Synthetic oligonucleotide; GAGGGT chr11 5321486 5321505 5321489 -
atttttcaaattgattctaa

SEQ ID NO: 61808 - DNA, 20 bp, Artificial Sequence
  Synthetic oligonucleotide; CTGAAT chr11 5321477 5321496 5321480 -
attgattctaagagggtgat

SEQ ID NO: 61809 - DNA, 20 bp, Artificial Sequence
  Synthetic oligonucleotide; ATGAGT chr11 5321131 5321150 5321134 -
ctgttagaaaagaaaatgat

SEQ ID NO: 61810 - DNA, 20 bp, Artificial Sequence
  Synthetic oligonucleotide; CAGGGT chr11 5321116 5321135 5321119 -
atgatatgagtaattttctc

SEQ ID NO: 61811 - DNA, 20 bp, Artificial Sequence
  Synthetic oligonucleotide; GTGAAT chr11 5320997 5321016 5321000 -
caataaataactgttgatta

SEQ ID NO: 61812 - DNA, 20 bp, Artificial Sequence
  Synthetic oligonucleotide; TAGAAT chr11 5320849 5320868 5320852 -
ctcagttctattctaagtca

SEQ ID NO: 61813 - DNA, 20 bp, Artificial Sequence
  Synthetic oligonucleotide; TTGAAT chr11 5320490 5320509 5320493 -
atacttccttaatgtatatt

SEQ ID NO: 61814 - DNA, 20 bp, Artificial Sequence
  Synthetic oligonucleotide; TTGAAT chr11 5320470 5320489 5320473 -
ttgaataaaattatttttat

SEQ ID NO: 61815 - DNA, 20 bp, Artificial Sequence
  Synthetic oligonucleotide; ATGAAT chr11 5320204 5320223 5320207 -
cgtagtaatgatagtgttgt

SEQ ID NO: 61816 - DNA, 20 bp, Artificial Sequence
  Synthetic oligonucleotide; TTGGGT chr11 5320167 5320186 5320170 -
attttctttctagtgcctgc

SEQ ID NO: 61817 - DNA, 20 bp, Artificial Sequence
  Synthetic oligonucleotide; TGGGAT chr11 5320100 5320119 5320103 -
ttctttgtggctgttcttaa

SEQ ID NO: 61818 - DNA, 20 bp, Artificial Sequence
  Synthetic oligonucleotide; AAGAAT chr11 5319970 5319989 5319973 -
cagttctagcagccttttgg

SEQ ID NO: 61819 - DNA, 20 bp, Artificial Sequence
  Synthetic oligonucleotide; TAGGAT chr11 5319961 5319980 5319964 -
cagccttttggaagaatctg

SEQ ID NO: 61820 - DNA, 20 bp, Artificial Sequence
  Synthetic oligonucleotide; TAGAGT chr11 5319945 5319964 5319948 -
tctgtaggattttctaagta

SEQ ID NO: 61821 - DNA, 20 bp, Artificial Sequence
  Synthetic oligonucleotide; AGGAGT chr11 5319830 5319849 5319833 -
cttccaattttatgttcact

SEQ ID NO: 61822 - DNA, 20 bp, Artificial Sequence
  Synthetic oligonucleotide; GAGAAT chr11 5319821 5319840 5319824 -
ttatgttcactaggagtggt

SEQ ID NO: 61823 - DNA, 20 bp, Artificial Sequence
  Synthetic oligonucleotide; GGGAAT chr11 5319815 5319834 5319818 -
tcactaggagtggtgagaat

SEQ ID NO: 61824 - DNA, 20 bp, Artificial Sequence
  Synthetic oligonucleotide; GAGAAT chr11 5319785 5319804 5319788 -
gtcttgttgcagttttcgag

SEQ ID NO: 61825 - DNA, 20 bp, Artificial Sequence
  Synthetic oligonucleotide; ATGGGT chr11 5319743 5319762 5319746 -
cattcagtatggttttggtt

SEQ ID NO: 61826 - DNA, 20 bp, Artificial Sequence
  Synthetic oligonucleotide; AGGGAT chr11 5319664 5319683 5319667 -
gttggaggtttttatcatga

SEQ ID NO: 61827 - DNA, 20 bp, Artificial Sequence
  Synthetic oligonucleotide; TTGAAT chr11 5319657 5319676 5319660 -
gtttttatcatgaagggatg

SEQ ID NO: 61828 - DNA, 20 bp, Artificial Sequence
  Synthetic oligonucleotide; ATGGAT chr11 5319510 5319529 5319513 -
aataaaagctttccaggctc

SEQ ID NO: 61829 - DNA, 20 bp, Artificial Sequence
  Synthetic oligonucleotide; AAGAAT chr11 5319501 5319520 5319504 -
tttccaggctcatggattgg

SEQ ID NO: 61830 - DNA, 20 bp, Artificial Sequence
  Synthetic oligonucleotide; ATGAAT chr11 5319491 5319510 5319494 -
catggattggaagaatcaat

SEQ ID NO: 61831 - DNA, 20 bp, Artificial Sequence
  Synthetic oligonucleotide; GTGGGT chr11 5319241 5319260 5319244 -
tagcactttagggggctgag

SEQ ID NO: 61832 - DNA, 20 bp, Artificial Sequence
  Synthetic oligonucleotide; AGGAGT chr11 5319220 5319239 5319223 -
tgggtgtatcacctgaggtc

SEQ ID NO: 61833 - DNA, 20 bp, Artificial Sequence
  Synthetic oligonucleotide; GAGAAT chr11 5319104 5319123 5319107 -
tactcggaaggctgaggcag

SEQ ID NO: 61834 - DNA, 20 bp, Artificial Sequence
  Synthetic oligonucleotide; CTGGGT chr11 5319039 5319058 5319042 -
tcgcaccactgcactccagc

SEQ ID NO: 61835 - DNA, 20 bp, Artificial Sequence
  Synthetic oligonucleotide; CAGAGT chr11 5319031 5319050 5319034 -
ctgcactccagcctgggtga

SEQ ID NO: 61836 - DNA, 20 bp, Artificial Sequence
  Synthetic oligonucleotide; TGGAAT chr11 5318783 5318802 5318786 -
acctatccaataaactgtgc

SEQ ID NO: 61837 - DNA, 20 bp, Artificial Sequence
  Synthetic oligonucleotide; AAGAAT chr11 5318757 5318776 5318760 -
acgtggctagccatatgcag

SEQ ID NO: 61838 - DNA, 20 bp, Artificial Sequence
  Synthetic oligonucleotide; ATGAAT chr11 5318706 5318725 5318709 -
tttagagaaatcaactgaaa

SEQ ID NO: 61839 - DNA, 20 bp, Artificial Sequence
  Synthetic oligonucleotide; TAGAAT chr11 5318524 5318543 5318527 -
acccaaatgtccaacaatga

SEQ ID NO: 61840 - DNA, 20 bp, Artificial Sequence
  Synthetic oligonucleotide; ATGGAT chr11 5318520 5318539 5318523 -
aaatgtccaacaatgataga

SEQ ID NO: 61841 - DNA, 20 bp, Artificial Sequence
  Synthetic oligonucleotide; TGGAAT chr11 5318488 5318507 5318491 -
aatgtggcacatatacacca

SEQ ID NO: 61842 - DNA, 20 bp, Artificial Sequence
  Synthetic oligonucleotide; ATGAGT chr11 5318461 5318480 5318464 -
ctatgcagccataaaaaatg

SEQ ID NO: 61843 - DNA, 20 bp, Artificial Sequence
  Synthetic oligonucleotide; ATGGAT chr11 5318436 5318455 5318439 -
ttcatgtcctttgtagggac

SEQ ID NO: 61844 - DNA, 20 bp, Artificial Sequence
  Synthetic oligonucleotide; GGGAAT chr11 5318354 5318373 5318357 -
acatgttctcacttataggt

SEQ ID NO: 61845 - DNA, 20 bp, Artificial Sequence
  Synthetic oligonucleotide; TGGGGT chr11 5318291 5318310 5318294 -
tcacacaccagggcctgttg

SEQ ID NO: 61846 - DNA, 20 bp, Artificial Sequence
  Synthetic oligonucleotide; GGGGGT chr11 5318285 5318304 5318288 -
accagggcctgttgtggggt

SEQ ID NO: 61847 - DNA, 20 bp, Artificial Sequence
  Synthetic oligonucleotide; GGGGGT chr11 5318278 5318297 5318281 -
cctgttgtggggtgggggtg

SEQ ID NO: 61848 - DNA, 20 bp, Artificial Sequence
  Synthetic oligonucleotide; AGGGAT chr11 5318268 5318287 5318271 -
ggtgggggtggggggtggag

SEQ ID NO: 61849 - DNA, 20 bp, Artificial Sequence
  Synthetic oligonucleotide; ATGAGT chr11 5318233 5318252 5318236 -
agatatacctaatgtaaatg

SEQ ID NO: 61850 - DNA, 20 bp, Artificial Sequence
  Synthetic oligonucleotide; ATGGGT chr11 5318225 5318244 5318228 -
ctaatgtaaatgatgagtta

SEQ ID NO: 61851 - DNA, 20 bp, Artificial Sequence
  Synthetic oligonucleotide; CAGAGT chr11 5318093 5318112 5318096 -
gcagcagaagaaactatcaa

SEQ ID NO: 61852 - DNA, 20 bp, Artificial Sequence
  Synthetic oligonucleotide; CAGGAT chr11 5318073 5318092 5318076 -
cagagtaaactgacaatcta

SEQ ID NO: 61853 - DNA, 20 bp, Artificial Sequence
  Synthetic oligonucleotide; CAGAAT chr11 5318021 5318040 5318024 -
tctggaaaaggtctaatatt

SEQ ID NO: 61854 - DNA, 20 bp, Artificial Sequence
  Synthetic oligonucleotide; AGGAAT chr11 5318010 5318029 5318013 -
tctaatattcagaatctata

SEQ ID NO: 61855 - DNA, 20 bp, Artificial Sequence
  Synthetic oligonucleotide; CAGAAT chr11 5317827 5317846 5317830 -
agatactatctcataccagt

SEQ ID NO: 61856 - DNA, 20 bp, Artificial Sequence
  Synthetic oligonucleotide; GGGGAT chr11 5317747 5317766 5317750 -
aacacttatacaatgatgat

SEQ ID NO: 61857 - DNA, 20 bp, Artificial Sequence
  Synthetic oligonucleotide; GAGAGT chr11 5317707 5317726 5317710 -
ccactgcagaaaacagtttg

SEQ ID NO: 61858 - DNA, 20 bp, Artificial Sequence
  Synthetic oligonucleotide; CTGGGT chr11 5317652 5317671 5317655 -
ttgacacagcaatcccgcta

SEQ ID NO: 61859 - DNA, 20 bp, Artificial Sequence
  Synthetic oligonucleotide; TAGAAT chr11 5317575 5317594 5317578 -
atgttcactgtaatgctgtt

SEQ ID NO: 61860 - DNA, 20 bp, Artificial Sequence
  Synthetic oligonucleotide; CGGGAT chr11 5317527 5317546 5317530 -
aggtgtctatcaaaggcgga

SEQ ID NO: 61861 - DNA, 20 bp, Artificial Sequence
  Synthetic oligonucleotide; ATGGGT chr11 5317447 5317466 5317450 -
atcatgtccttttcagcaac

SEQ ID NO: 61862 - DNA, 20 bp, Artificial Sequence
  Synthetic oligonucleotide; TTGAGT chr11 5317353 5317372 5317356 -
ttataagtggaagctaaaca

SEQ ID NO: 61863 - DNA, 20 bp, Artificial Sequence
  Synthetic oligonucleotide; GTGGAT chr11 5317343 5317362 5317346 -
aagctaaacattgagtacac

SEQ ID NO: 61864 - DNA, 20 bp, Artificial Sequence
  Synthetic oligonucleotide; GAGGGT chr11 5317278 5317297 5317281 -
gggcagggagagatgcggga

SEQ ID NO: 61865 - DNA, 20 bp, Artificial Sequence
  Synthetic oligonucleotide; TTGGAT chr11 5317261 5317280 5317264 -
ggagagggttaaaaaatcta

SEQ ID NO: 61866 - DNA, 20 bp, Artificial Sequence
  Synthetic oligonucleotide; GTGGAT chr11 5317025 5317044 5317028 -
atagatccattgaggttcct

SEQ ID NO: 61867 - DNA, 20 bp, Artificial Sequence
  Synthetic oligonucleotide; ATGGAT chr11 5316872 5316891 5316875 -
agacaatgcaaagtacacac

SEQ ID NO: 61868 - DNA, 20 bp, Artificial Sequence
  Synthetic oligonucleotide; TAGGGT chr11 5316848 5316867 5316851 -
atatactgtgtactgatgct

SEQ ID NO: 61869 - DNA, 20 bp, Artificial Sequence
  Synthetic oligonucleotide; AAGGGT chr11 5316838 5316857 5316841 -
tactgatgcttagggtcctg

SEQ ID NO: 61870 - DNA, 20 bp, Artificial Sequence
  Synthetic oligonucleotide; TGGAGT chr11 5316792 5316811 5316795 -
tcccaatgtagaggtggcat

SEQ ID NO: 61871 - DNA, 20 bp, Artificial Sequence
  Synthetic oligonucleotide; AAGGGT chr11 5316686 5316705 5316689 -
cagaggagggaggggagatc

SEQ ID NO: 61872 - DNA, 20 bp, Artificial Sequence
  Synthetic oligonucleotide; CTGAGT chr11 5316676 5316695 5316679 -
aggggagatcaagggttctt

SEQ ID NO: 61873 - DNA, 20 bp, Artificial Sequence
  Synthetic oligonucleotide; TTGAAT chr11 5316607 5316626 5316610 -
aaactctctaatttggcctc

SEQ ID NO: 61874 - DNA, 20 bp, Artificial Sequence
  Synthetic oligonucleotide; GTGAGT chr11 5316589 5316608 5316592 -
tcttgaatagtctttgagaa

SEQ ID NO: 61875 - DNA, 20 bp, Artificial Sequence
  Synthetic oligonucleotide; CTGAGT chr11 5316576 5316595 5316579 -
ttgagaagtgagtgtctgaa

SEQ ID NO: 61876 - DNA, 20 bp, Artificial Sequence
  Synthetic oligonucleotide; AGGAAT chr11 5316557 5316576 5316560 -
actgagtcttcaaatagagc

SEQ ID NO: 61877 - DNA, 20 bp, Artificial Sequence
  Synthetic oligonucleotide; ATGGGT chr11 5316553 5316572 5316556 -
agtcttcaaatagagcagga

SEQ ID NO: 61878 - DNA, 20 bp, Artificial Sequence
  Synthetic oligonucleotide; GTGAGT chr11 5316517 5316536 5316520 -
gcaagaaaatgacagcatag

SEQ ID NO: 61879 - DNA, 20 bp, Artificial Sequence
  Synthetic oligonucleotide; AGGAAT chr11 5316502 5316521 5316505 -
cataggtgagtgccaggaac

SEQ ID NO: 61880 - DNA, 20 bp, Artificial Sequence
  Synthetic oligonucleotide; AGGAAT chr11 5316495 5316514 5316498 -
gagtgccaggaacaggaata

SEQ ID NO: 61881 - DNA, 20 bp, Artificial Sequence
  Synthetic oligonucleotide; TGGGAT chr11 5316405 5316424 5316408 -
ataggagaacatactccatc

SEQ ID NO: 61882 - DNA, 20 bp, Artificial Sequence
  Synthetic oligonucleotide; ATGGAT chr11 5316322 5316341 5316325 -
aagtttcaaatgtggtgctc

SEQ ID NO: 61883 - DNA, 20 bp, Artificial Sequence
  Synthetic oligonucleotide; GTGAAT chr11 5316299 5316318 5316302 -
gattagcttcaggaaaacgt

SEQ ID NO: 61884 - DNA, 20 bp, Artificial Sequence
  Synthetic oligonucleotide; TAGAAT chr11 5316224 5316243 5316227 -
agagggctcatggcttttgt

SEQ ID NO: 61885 - DNA, 20 bp, Artificial Sequence
  Synthetic oligonucleotide; AAGAAT chr11 5315946 5315965 5315949 -
taaaatgtgttttttagatt

SEQ ID NO: 61886 - DNA, 20 bp, Artificial Sequence
  Synthetic oligonucleotide; ATGAAT chr11 5315806 5315825 5315809 -
ccaataaattattgctaaat

SEQ ID NO: 61887 - DNA, 20 bp, Artificial Sequence
  Synthetic oligonucleotide; TAGGAT chr11 5315798 5315817 5315801 -
ttattgctaaatatgaatat

SEQ ID NO: 61888 - DNA, 20 bp, Artificial Sequence
  Synthetic oligonucleotide; AGGGAT chr11 5315741 5315760 5315744 -
gtagtaaaaactgataaggc

SEQ ID NO: 61889 - DNA, 20 bp, Artificial Sequence
  Synthetic oligonucleotide; GTGGAT chr11 5315458 5315477 5315461 -
cccactgtaatgggcgtctt

SEQ ID NO: 61890 - DNA, 20 bp, Artificial Sequence
  Synthetic oligonucleotide; ATGAAT chr11 5315454 5315473 5315457 -
ctgtaatgggcgtcttgtgg

SEQ ID NO: 61891 - DNA, 20 bp, Artificial Sequence
  Synthetic oligonucleotide; CAGAAT chr11 5315381 5315400 5315384 -
ccactcccattatccacttg

SEQ ID NO: 61892 - DNA, 20 bp, Artificial Sequence
  Synthetic oligonucleotide; TTGGGT chr11 5315295 5315314 5315298 -
ataactatttctactaaatc

SEQ ID NO: 61893 - DNA, 20 bp, Artificial Sequence
  Synthetic oligonucleotide; CAGAAT chr11 5314785 5314804 5314788 -
gttcgcctattttctgggca

SEQ ID NO: 61894 - DNA, 20 bp, Artificial Sequence
  Synthetic oligonucleotide; CAGAAT chr11 5314762 5314781 5314765 -
aatggcttgagccctttttt

SEQ ID NO: 61895 - DNA, 20 bp, Artificial Sequence
  Synthetic oligonucleotide; TTGAGT chr11 5314728 5314747 5314731 -
cttcatgatttctgggcctt

SEQ ID NO: 61896 - DNA, 20 bp, Artificial Sequence
  Synthetic oligonucleotide; ATGAAT chr11 5314621 5314640 5314624 -
ctacatggaacaataataca

SEQ ID NO: 61897 - DNA, 20 bp, Artificial Sequence
  Synthetic oligonucleotide; TGGAAT chr11 5314488 5314507 5314491 -
attgagagatactaggaaag

SEQ ID NO: 61898 - DNA, 20 bp, Artificial Sequence
  Synthetic oligonucleotide; TTGAAT chr11 5314478 5314497 5314481 -
actaggaaagtggaatacta

SEQ ID NO: 61899 - DNA, 20 bp, Artificial Sequence
  Synthetic oligonucleotide; AAGAGT chr11 5314377 5314396 5314380 -
actgaaagtaccattttagg

SEQ ID NO: 61900 - DNA, 20 bp, Artificial Sequence
  Synthetic oligonucleotide; ATGAAT chr11 5314293 5314312 5314296 -
ctagttttggccatataaag

SEQ ID NO: 61901 - DNA, 20 bp, Artificial Sequence
  Synthetic oligonucleotide; GTGAAT chr11 5314279 5314298 5314282 -
ataaagatgaattatagcat

SEQ ID NO: 61902 - DNA, 20 bp, Artificial Sequence
  Synthetic oligonucleotide; CAGGGT chr11 5314230 5314249 5314233 -
atctcaaaactactctattt

SEQ ID NO: 61903 - DNA, 20 bp, Artificial Sequence
  Synthetic oligonucleotide; CAGGAT chr11 5314086 5314105 5314089 -
taagttccagggcacatgtg

SEQ ID NO: 61904 - DNA, 20 bp, Artificial Sequence
  Synthetic oligonucleotide; GAGGAT chr11 5313867 5313886 5313870 -
tgttcctgtgttagtttgat

SEQ ID NO: 61905 - DNA, 20 bp, Artificial Sequence
  Synthetic oligonucleotide; TTGGGT chr11 5313737 5313756 5313740 -
actctatcattgatggacat

SEQ ID NO: 61906 - DNA, 20 bp, Artificial Sequence
  Synthetic oligonucleotide; ATGAAT chr11 5313710 5313729 5313713 -
gattccacatcttggctatt

SEQ ID NO: 61907 - DNA, 20 bp, Artificial Sequence
  Synthetic oligonucleotide; TTGGGT chr11 5313646 5313665 5313649 -
atagattgatttatattcct

SEQ ID NO: 61908 - DNA, 20 bp, Artificial Sequence
  Synthetic oligonucleotide; CTGAGT chr11 5313619 5313638 5313622 -
tatacccagtaatgagattg

SEQ ID NO: 61909 - DNA, 20 bp, Artificial Sequence
  Synthetic oligonucleotide; ATGAAT chr11 5313351 5313370 5313354 -
ttcatatgtttattagaagc

SEQ ID NO: 61910 - DNA, 20 bp, Artificial Sequence
  Synthetic oligonucleotide; TGGGGT chr11 5313299 5313318 5313302 -
tgtcattccccactttttaa

SEQ ID NO: 61911 - DNA, 20 bp, Artificial Sequence
  Synthetic oligonucleotide; TTGAGT chr11 5313093 5313112 5313096 -
ttgcagttgcttttggtgtc

SEQ ID NO: 61912 - DNA, 20 bp, Artificial Sequence
  Synthetic oligonucleotide; ATGAGT chr11 5313003 5313022 5313006 -
atttcctagttgctcatttc

SEQ ID NO: 61913 - DNA, 20 bp, Artificial Sequence
  Synthetic oligonucleotide; CTGGAT chr11 5312960 5312979 5312963 -
tcttgtgttctctctaaatg

SEQ ID NO: 61914 - DNA, 20 bp, Artificial Sequence
  Synthetic oligonucleotide; TAGGAT chr11 5312825 5312844 5312828 -
cagcaacttggaaatctcac

SEQ ID NO: 61915 - DNA, 20 bp, Artificial Sequence
  Synthetic oligonucleotide; AAGGGT chr11 5312535 5312554 5312538 -
tgtacatatcctatgtttaa

SEQ ID NO: 61916 - DNA, 20 bp, Artificial Sequence
  Synthetic oligonucleotide; GAGAGT chr11 5312517 5312536 5312520 -
aaaagggtttgtgtttggag

SEQ ID NO: 61917 - DNA, 20 bp, Artificial Sequence
  Synthetic oligonucleotide; ATGGGT chr11 5312420 5312439 5312423 -
aattttttaagggcactatt

SEQ ID NO: 61918 - DNA, 20 bp, Artificial Sequence
  Synthetic oligonucleotide; AAGAAT chr11 5312334 5312353 5312337 -
ttcaaataagtggggactca

SEQ ID NO: 61919 - DNA, 20 bp, Artificial Sequence
  Synthetic oligonucleotide; CTGAAT chr11 5312270 5312289 5312273 -
cataaagcagaaagaagaca

SEQ ID NO: 61920 - DNA, 20 bp, Artificial Sequence
  Synthetic oligonucleotide; GAGAGT chr11 5312263 5312282 5312266 -
cagaaagaagacactgaatg

SEQ ID NO: 61921 - DNA, 20 bp, Artificial Sequence
  Synthetic oligonucleotide; GTGGGT chr11 5312257 5312276 5312260 -
gaagacactgaatggagagt

SEQ ID NO: 61922 - DNA, 20 bp, Artificial Sequence
  Synthetic oligonucleotide; AAGGGT chr11 5312219 5312238 5312222 -
ttgaggttatggcttgaaat

SEQ ID NO: 61923 - DNA, 20 bp, Artificial Sequence
  Synthetic oligonucleotide; ATGGAT chr11 5312172 5312191 5312175 -
ccttcagctgagacctgaaa

SEQ ID NO: 61924 - DNA, 20 bp, Artificial Sequence
  Synthetic oligonucleotide; AAGAAT chr11 5312139 5312158 5312142 -
taactggtgaaaatacagac

SEQ ID NO: 61925 - DNA, 20 bp, Artificial Sequence
  Synthetic oligonucleotide; AGGAGT chr11 5312120 5312139 5312123 -
caagaatattctaagactga

SEQ ID NO: 61926 - DNA, 20 bp, Artificial Sequence
  Synthetic oligonucleotide; GAGGGT chr11 5312060 5312079 5312063 -
agggaaggtggctactggaa

SEQ ID NO: 61927 - DNA, 20 bp, Artificial Sequence
  Synthetic oligonucleotide; AGGAAT chr11 5312025 5312044 5312028 -
gagaagaggctgaagaggga

SEQ ID NO: 61928 - DNA, 20 bp, Artificial Sequence
  Synthetic oligonucleotide; AAGAGT chr11 5312001 5312020 5312004 -
atggccttattggtcatcat

SEQ ID NO: 61929 - DNA, 20 bp, Artificial Sequence
  Synthetic oligonucleotide; TTGAGT chr11 5311995 5312014 5311998 -
ttattggtcatcataagagt

SEQ ID NO: 61930 - DNA, 20 bp, Artificial Sequence
  Synthetic oligonucleotide; CGGAGT chr11 5311982 5312001 5311985 -
taagagtttgagtctctact

SEQ ID NO: 61931 - DNA, 20 bp, Artificial Sequence
  Synthetic oligonucleotide; TGGAAT chr11 5311905 5311924 5311908 -
cttcaatattatttataaaa

SEQ ID NO: 61932 - DNA, 20 bp, Artificial Sequence
  Synthetic oligonucleotide; CAGAAT chr11 5311879 5311898 5311882 -
tgagggaggcagggaaaggg

SEQ ID NO: 61933 - DNA, 20 bp, Artificial Sequence
  Synthetic oligonucleotide; TAGAGT chr11 5311871 5311890 5311874 -
gcagggaaagggcagaatat

SEQ ID NO: 61934 - DNA, 20 bp, Artificial Sequence
  Synthetic oligonucleotide; AAGAGT chr11 5311741 5311760 5311744 -
ttagaaaagcagaggaaaga

SEQ ID NO: 61935 - DNA, 20 bp, Artificial Sequence
  Synthetic oligonucleotide; AAGAAT chr11 5311634 5311653 5311637 -
atgtattgtctataaataag

SEQ ID NO: 61936 - DNA, 20 bp, Artificial Sequence
  Synthetic oligonucleotide; GAGAAT chr11 5311599 5311618 5311602 -
ttttaaagttgtgggacact

SEQ ID NO: 61937 - DNA, 20 bp, Artificial Sequence
  Synthetic oligonucleotide; ATGAGT chr11 5311595 5311614 5311598 -
aaagttgtgggacactgaga

SEQ ID NO: 61938 - DNA, 20 bp, Artificial Sequence
  Synthetic oligonucleotide; AAGAGT chr11 5311439 5311458 5311442 -
tttctttttgcctgatcatg

SEQ ID NO: 61939 - DNA, 20 bp, Artificial Sequence
  Synthetic oligonucleotide; GAGAAT chr11 5311399 5311418 5311402 -
gacatatgtcagaaaatgat

SEQ ID NO: 61940 - DNA, 20 bp, Artificial Sequence
  Synthetic oligonucleotide; GAGAAT chr11 5311337 5311356 5311340 -
atgacacccaaagaaggtca

SEQ ID NO: 61941 - DNA, 20 bp, Artificial Sequence
  Synthetic oligonucleotide; CAGGAT chr11 5311297 5311316 5311300 -
ctcactatcctaggagaaag

SEQ ID NO: 61942 - DNA, 20 bp, Artificial Sequence
  Synthetic oligonucleotide; CCGGGT chr11 5311287 5311306 5311290 -
taggagaaagcaggatagat

SEQ ID NO: 61943 - DNA, 20 bp, Artificial Sequence
  Synthetic oligonucleotide; TTGGGT chr11 5311276 5311295 5311279 -
aggatagatccgggtttttc

SEQ ID NO: 61944 - DNA, 20 bp, Artificial Sequence
  Synthetic oligonucleotide; ATGGAT chr11 5311141 5311160 5311144 -
atacaaacataaataggaag

SEQ ID NO: 61945 - DNA, 20 bp, Artificial Sequence
  Synthetic oligonucleotide; CTGAAT chr11 5311125 5311144 5311128 -
gaagatggattaactaaatt

SEQ ID NO: 61946 - DNA, 20 bp, Artificial Sequence
  Synthetic oligonucleotide; ATGAGT chr11 5311113 5311132 5311116 -
actaaattctgaattaccag

SEQ ID NO: 61947 - DNA, 20 bp, Artificial Sequence
  Synthetic oligonucleotide; AAGAAT chr11 5311100 5311119 5311103 -
ttaccagatgagtaaataac

SEQ ID NO: 61948 - DNA, 20 bp, Artificial Sequence
  Synthetic oligonucleotide; ATGAGT chr11 5311071 5311090 5311074 -
ttgaaaaatgaagttttttc

SEQ ID NO: 61949 - DNA, 20 bp, Artificial Sequence
  Synthetic oligonucleotide; TTGAGT chr11 5310943 5310962 5310946 -
ctttctctcaagtgaaattg

SEQ ID NO: 61950 - DNA, 20 bp, Artificial Sequence
  Synthetic oligonucleotide; TGGAAT chr11 5310820 5310839 5310823 -
tgtgtggacacctgcacatg

SEQ ID NO: 61951 - DNA, 20 bp, Artificial Sequence
  Synthetic oligonucleotide; ATGAAT chr11 5310738 5310757 5310741 -
aacctttcacaataaattta

SEQ ID NO: 61952 - DNA, 20 bp, Artificial Sequence
  Synthetic oligonucleotide; ATGAAT chr11 5310497 5310516 5310500 -
ctaatctactttttgtctct

SEQ ID NO: 61953 - DNA, 20 bp, Artificial Sequence
  Synthetic oligonucleotide; TAGGAT chr11 5310423 5310442 5310426 -
tgcgtatgacttattgcact

SEQ ID NO: 61954 - DNA, 20 bp, Artificial Sequence
  Synthetic oligonucleotide; GTGAAT chr11 5310274 5310293 5310277 -
gtttctattccttggctact

SEQ ID NO: 61955 - DNA, 20 bp, Artificial Sequence
  Synthetic oligonucleotide; CTGAAT chr11 5310203 5310222 5310206 -
tctctctacttcctctcact

SEQ ID NO: 61956 - DNA, 20 bp, Artificial Sequence
  Synthetic oligonucleotide; AAGAAT chr11 5310184 5310203 5310187 -
tctgaatattctgcttttca

SEQ ID NO: 61957 - DNA, 20 bp, Artificial Sequence
  Synthetic oligonucleotide; TGGAAT chr11 5310172 5310191 5310175 -
gcttttcaaagaatattcct

SEQ ID NO: 61958 - DNA, 20 bp, Artificial Sequence
  Synthetic oligonucleotide; CTGGGT chr11 5310079 5310098 5310082 -
ctgactgcaacctctgcctc

SEQ ID NO: 61959 - DNA, 20 bp, Artificial Sequence
  Synthetic oligonucleotide; CTGAGT chr11 5309876 5309895 5309879 -
aatctttgctctggacttca

SEQ ID NO: 61960 - DNA, 20 bp, Artificial Sequence
  Synthetic oligonucleotide; TGGAGT chr11 5309833 5309852 5309836 -
gttttgttttgtttttgaga

SEQ ID NO: 61961 - DNA, 20 bp, Artificial Sequence
  Synthetic oligonucleotide; TGGAGT chr11 5309808 5309827 5309811 -
tctcgctctgtcgcccaggc

SEQ ID NO: 61962 - DNA, 20 bp, Artificial Sequence
  Synthetic oligonucleotide; CCGGGT chr11 5309764 5309783 5309767 -
ctcactgcaagctctgcctc

SEQ ID NO: 61963 - DNA, 20 bp, Artificial Sequence
  Synthetic oligonucleotide; CCGAGT chr11 5309732 5309751 5309735 -
cattctcctgcctcagcctc

SEQ ID NO: 61964 - DNA, 20 bp, Artificial Sequence
  Synthetic oligonucleotide; CGGGGT chr11 5309665 5309684 5309668 -
ttttgtctttttagtagaga

SEQ ID NO: 61965 - DNA, 20 bp, Artificial Sequence
  Synthetic oligonucleotide; CAGGAT chr11 5309645 5309664 5309648 -
cggggtttcactgtgttagc

SEQ ID NO: 61966 - DNA, 20 bp, Artificial Sequence
  Synthetic oligonucleotide; TGGGAT chr11 5309588 5309607 5309591 -
gcctcggcctcccaaagtgc

SEQ ID NO: 61967 - DNA, 20 bp, Artificial Sequence
  Synthetic oligonucleotide; CTGAGT chr11 5309556 5309575 5309559 -
cgtgagccaccgcgcccggc

SEQ ID NO: 61968 - DNA, 20 bp, Artificial Sequence
  Synthetic oligonucleotide; TGGAAT chr11 5309496 5309515 5309499 -
gagaaatgagatccaatcta

SEQ ID NO: 61969 - DNA, 20 bp, Artificial Sequence
  Synthetic oligonucleotide; CTGAAT chr11 5309428 5309447 5309431 -
tgtattaaaactttttcata

SEQ ID NO: 61970 - DNA, 20 bp, Artificial Sequence
  Synthetic oligonucleotide; TTGAGT chr11 5309367 5309386 5309370 -
gtaagcaaaattatatgcta

SEQ ID NO: 61971 - DNA, 20 bp, Artificial Sequence
  Synthetic oligonucleotide; CTGAGT chr11 5309340 5309359 5309343 -
caatgtttaagctattgata

SEQ ID NO: 61972 - DNA, 20 bp, Artificial Sequence
  Synthetic oligonucleotide; CTGGGT chr11 5309197 5309216 5309200 -
ttccatcttgatttgctgac

SEQ ID NO: 61973 - DNA, 20 bp, Artificial Sequence
  Synthetic oligonucleotide; AAGAAT chr11 5309144 5309163 5309147 -
gtctttgtaagttattttgg

SEQ ID NO: 61974 - DNA, 20 bp, Artificial Sequence
  Synthetic oligonucleotide; GTGGAT chr11 5308815 5308834 5308818 -
aacggttatctgggcctgtt

SEQ ID NO: 61975 - DNA, 20 bp, Artificial Sequence
  Synthetic oligonucleotide; GTGAAT chr11 5308808 5308827 5308811 -
atctgggcctgttgtggatt

SEQ ID NO: 61976 - DNA, 20 bp, Artificial Sequence
  Synthetic oligonucleotide; TTGAAT chr11 5308792 5308811 5308795 -
gattgtgaatatgacaatat

SEQ ID NO: 61977 - DNA, 20 bp, Artificial Sequence
  Synthetic oligonucleotide; TTGAAT chr11 5308751 5308770 5308754 -
taagagagggacactcactt

SEQ ID NO: 61978 - DNA, 20 bp, Artificial Sequence
  Synthetic oligonucleotide; AGGAAT chr11 5308708 5308727 5308711 -
tgatggaggaaagagattgg

SEQ ID NO: 61979 - DNA, 20 bp, Artificial Sequence
  Synthetic oligonucleotide; ATGGGT chr11 5308694 5308713 5308697 -
gattggaggaatgtagattt

SEQ ID NO: 61980 - DNA, 20 bp, Artificial Sequence
  Synthetic oligonucleotide; TTGGAT chr11 5308668 5308687 5308671 -
gaagttgtttggcttggaag

SEQ ID NO: 61981 - DNA, 20 bp, Artificial Sequence
  Synthetic oligonucleotide; TGGGGT chr11 5308188 5308207 5308191 -
aatgtctgatatattattgt

SEQ ID NO: 61982 - DNA, 20 bp, Artificial Sequence
  Synthetic oligonucleotide; GAGAAT chr11 5308169 5308188 5308172 -
ttggggtacagttctttatt

SEQ ID NO: 61983 - DNA, 20 bp, Artificial Sequence
  Synthetic oligonucleotide; AAGAGT chr11 5308163 5308182 5308166 -
tacagttctttattgagaat

SEQ ID NO: 61984 - DNA, 20 bp, Artificial Sequence
  Synthetic oligonucleotide; TGGAAT chr11 5308047 5308066 5308050 -
tttcaaagtagtcttttcat

SEQ ID NO: 61985 - DNA, 20 bp, Artificial Sequence
  Synthetic oligonucleotide; GAGAAT chr11 5308039 5308058 5308042 -
tagtcttttcattggaatgg

SEQ ID NO: 61986 - DNA, 20 bp, Artificial Sequence
  Synthetic oligonucleotide; CTGGGT chr11 5307843 5307862 5307846 -
tctcaccactgcactccctc

SEQ ID NO: 61987 - DNA, 20 bp, Artificial Sequence
  Synthetic oligonucleotide; GAGAAT chr11 5307793 5307812 5307796 -
agagaggaaagaaaagaaaa

SEQ ID NO: 61988 - DNA, 20 bp, Artificial Sequence
  Synthetic oligonucleotide; AGGAAT chr11 5307700 5307719 5307703 -
aagaaagaaaaaagaaagga

SEQ ID NO: 61989 - DNA, 20 bp, Artificial Sequence
  Synthetic oligonucleotide; ATGGAT chr11 5307596 5307615 5307599 -
tctttcttcttgatgttgtt

SEQ ID NO: 61990 - DNA, 20 bp, Artificial Sequence
  Synthetic oligonucleotide; AAGAAT chr11 5307423 5307442 5307426 -
aaaaccaatggcttgatcac

SEQ ID NO: 61991 - DNA, 20 bp, Artificial Sequence
  Synthetic oligonucleotide; GTGAGT chr11 5307307 5307326 5307310 -
ttcagaagttttgttttact

SEQ ID NO: 61992 - DNA, 20 bp, Artificial Sequence
  Synthetic oligonucleotide; TAGAAT chr11 5307239 5307258 5307242 -
tcacttcttagctacaagtc

SEQ ID NO: 61993 - DNA, 20 bp, Artificial Sequence
  Synthetic oligonucleotide; ATGAAT chr11 5307217 5307236 5307220 -
gaatcaacaggttctgcaaa

SEQ ID NO: 61994 - DNA, 20 bp, Artificial Sequence
  Synthetic oligonucleotide; TGGAAT chr11 5307209 5307228 5307212 -
aggttctgcaaaatgaattc

SEQ ID NO: 61995 - DNA, 20 bp, Artificial Sequence
  Synthetic oligonucleotide; CTGAAT chr11 5307156 5307175 5307159 -
acgttttggcaaaatcttac

SEQ ID NO: 61996 - DNA, 20 bp, Artificial Sequence
  Synthetic oligonucleotide; GAGGAT chr11 5307144 5307163 5307147 -
aatcttacctgaatatatga

SEQ ID NO: 61997 - DNA, 20 bp, Artificial Sequence
  Synthetic oligonucleotide; TAGAGT chr11 5307096 5307115 5307099 -
tataaacaggtgatagtaaa

SEQ ID NO: 61998 - DNA, 20 bp, Artificial Sequence
  Synthetic oligonucleotide; GCGAGT chr11 5307082 5307101 5307085 -
agtaaatagagtaacttgct

SEQ ID NO: 61999 - DNA, 20 bp, Artificial Sequence
  Synthetic oligonucleotide; TAGAAT chr11 5307061 5307080 5307064 -
cgagtgtcacatatattatg

SEQ ID NO: 62000 - DNA, 20 bp, Artificial Sequence
  Synthetic oligonucleotide; CTGAAT chr11 5307023 5307042 5307026 -
actattttaaatctgaaaga

SEQ ID NO: 62001 - DNA, 20 bp, Artificial Sequence
  Synthetic oligonucleotide; AAGAGT chr11 5307000 5307019 5307003 -
aatttgacatgttttgagat

SEQ ID NO: 62002 - DNA, 20 bp, Artificial Sequence
  Synthetic oligonucleotide; TAGGGT chr11 5306993 5307012 5306996 -
catgttttgagataagagtt

SEQ ID NO: 62003 - DNA, 20 bp, Artificial Sequence
  Synthetic oligonucleotide; TAGAGT chr11 5306988 5307007 5306991 -
tttgagataagagtttaggg

SEQ ID NO: 62004 - DNA, 20 bp, Artificial Sequence
  Synthetic oligonucleotide; CAGAAT chr11 5306913 5306932 5306916 -
tccaatgaaaaaagagattt

SEQ ID NO: 62005 - DNA, 20 bp, Artificial Sequence
  Synthetic oligonucleotide; CTGGAT chr11 5306888 5306907 5306891 -
tgggactaatatgacaacat

SEQ ID NO: 62006 - DNA, 20 bp, Artificial Sequence
  Synthetic oligonucleotide; CAGGAT chr11 5306843 5306862 5306846 -
gagcatcataggaaataaat

SEQ ID NO: 62007 - DNA, 20 bp, Artificial Sequence
  Synthetic oligonucleotide; AGGAAT chr11 5306836 5306855 5306839 -
ataggaaataaatcaggatt

SEQ ID NO: 62008 - DNA, 20 bp, Artificial Sequence
  Synthetic oligonucleotide; TAGGGT chr11 5306769 5306788 5306772 -
acccatcaggaaagaagtct

SEQ ID NO: 62009 - DNA, 20 bp, Artificial Sequence
  Synthetic oligonucleotide; ATGAAT chr11 5306721 5306740 5306724 -
catctagaaaaaaattatgt

SEQ ID NO: 62010 - DNA, 20 bp, Artificial Sequence
  Synthetic oligonucleotide; AGGAGT chr11 5306665 5306684 5306668 -
ggagatcagacctaaatata

SEQ ID NO: 62011 - DNA, 20 bp, Artificial Sequence
  Synthetic oligonucleotide; GTGAAT chr11 5306601 5306620 5306604 -
ctctctcactgtctctgtct

SEQ ID NO: 62012 - DNA, 20 bp, Artificial Sequence
  Synthetic oligonucleotide; ATGAAT chr11 5306497 5306516 5306500 -
taaatgaaacccacatatat

SEQ ID NO: 62013 - DNA, 20 bp, Artificial Sequence
  Synthetic oligonucleotide; CAGGGT chr11 5306482 5306501 5306485 -
tatatatgaatgagatagct

SEQ ID NO: 62014 - DNA, 20 bp, Artificial Sequence
  Synthetic oligonucleotide; TAGGGT chr11 5306477 5306496 5306480 -
atgaatgagatagctcaggg

SEQ ID NO: 62015 - DNA, 20 bp, Artificial Sequence
  Synthetic oligonucleotide; GTGAGT chr11 5306470 5306489 5306473 -
agatagctcagggtagggta

SEQ ID NO: 62016 - DNA, 20 bp, Artificial Sequence
  Synthetic oligonucleotide; TTGAAT chr11 5306463 5306482 5306466 -
tcagggtagggtagtgagtt

SEQ ID NO: 62017 - DNA, 20 bp, Artificial Sequence
  Synthetic oligonucleotide; AAGAAT chr11 5306450 5306469 5306453 -
gtgagttttgaatcaataga

SEQ ID NO: 62018 - DNA, 20 bp, Artificial Sequence
  Synthetic oligonucleotide; ATGAAT chr11 5306431 5306450 5306434 -
aaagaataaataaatgtctg

SEQ ID NO: 62019 - DNA, 20 bp, Artificial Sequence
  Synthetic oligonucleotide; AAGGAT chr11 5306392 5306411 5306395 -
aaaaggtttggtggtggctc

SEQ ID NO: 62020 - DNA, 20 bp, Artificial Sequence
  Synthetic oligonucleotide; AAGGGT chr11 5306380 5306399 5306383 -
ggtggctcaaggattttgta

SEQ ID NO: 62021 - DNA, 20 bp, Artificial Sequence
  Synthetic oligonucleotide; TTGAAT chr11 5306375 5306394 5306378 -
ctcaaggattttgtaaaggg

SEQ ID NO: 62022 - DNA, 20 bp, Artificial Sequence
  Synthetic oligonucleotide; GAGAAT chr11 5306367 5306386 5306370 -
ttttgtaaagggttgaatta

SEQ ID NO: 62023 - DNA, 20 bp, Artificial Sequence
  Synthetic oligonucleotide; GAGAGT chr11 5306266 5306285 5306269 -
ctaagaccaatggaacactt

SEQ ID NO: 62024 - DNA, 20 bp, Artificial Sequence
  Synthetic oligonucleotide; GAGAAT chr11 5306128 5306147 5306131 -
tcccaggttggggaggaaaa

SEQ ID NO: 62025 - DNA, 20 bp, Artificial Sequence
  Synthetic oligonucleotide; TAGAAT chr11 5306080 5306099 5306083 -
tatcctatgtggaaatgagc

SEQ ID NO: 62026 - DNA, 20 bp, Artificial Sequence
  Synthetic oligonucleotide; GAGAGT chr11 5306066 5306085 5306069 -
atgagctagaataacccctt

SEQ ID NO: 62027 - DNA, 20 bp, Artificial Sequence
  Synthetic oligonucleotide; CAGAAT chr11 5306033 5306052 5306036 -
gtaacaaatatatctctcat

SEQ ID NO: 62028 - DNA, 20 bp, Artificial Sequence
  Synthetic oligonucleotide; AAGAGT chr11 5306026 5306045 5306029 -
atatatctctcatcagaatt

SEQ ID NO: 62029 - DNA, 20 bp, Artificial Sequence
  Synthetic oligonucleotide; GAGGAT chr11 5306013 5306032 5306016 -
cagaattaagagtaaatact

SEQ ID NO: 62030 - DNA, 20 bp, Artificial Sequence
  Synthetic oligonucleotide; AAGGAT chr11 5305934 5305953 5305937 -
tggctcaggtaagaaaagcc

SEQ ID NO: 62031 - DNA, 20 bp, Artificial Sequence
  Synthetic oligonucleotide; GAGAAT chr11 5305879 5305898 5305882 -
ccatttgatggacattggtt

SEQ ID NO: 62032 - DNA, 20 bp, Artificial Sequence
  Synthetic oligonucleotide; TTGGGT chr11 5305867 5305886 5305870 -
cattggttgagaatatgagc

SEQ ID NO: 62033 - DNA, 20 bp, Artificial Sequence
  Synthetic oligonucleotide; TTGGGT chr11 5305860 5305879 5305863 -
tgagaatatgagcttgggtt

SEQ ID NO: 62034 - DNA, 20 bp, Artificial Sequence
  Synthetic oligonucleotide; TTGAAT chr11 5305839 5305858 5305842 -
tgggttagataaacctgtgt

SEQ ID NO: 62035 - DNA, 20 bp, Artificial Sequence
  Synthetic oligonucleotide; TAGAGT chr11 5305657 5305676 5305660 -
tttttctctgttgcccaggc

SEQ ID NO: 62036 - DNA, 20 bp, Artificial Sequence
  Synthetic oligonucleotide; CAGGGT chr11 5305613 5305632 5305616 -
ctcactgcgacctcctccac

SEQ ID NO: 62037 - DNA, 20 bp, Artificial Sequence
  Synthetic oligonucleotide; GGGGAT chr11 5305604 5305623 5305607 -
acctcctccaccagggttca

SEQ ID NO: 62038 - DNA, 20 bp, Artificial Sequence
  Synthetic oligonucleotide; CAGAGT chr11 5305581 5305600 5305584 -
gattctcatgcctcagcctc

SEQ ID NO: 62039 - DNA, 20 bp, Artificial Sequence
  Synthetic oligonucleotide; TGGGAT chr11 5305572 5305591 5305575 -
gcctcagcctccagagtagc

SEQ ID NO: 62040 - DNA, 20 bp, Artificial Sequence
  Synthetic oligonucleotide; TGGGAT chr11 5305437 5305456 5305440 -
tcctcggcctcccaaagtgc

SEQ ID NO: 62041 - DNA, 20 bp, Artificial Sequence
  Synthetic oligonucleotide; CCGAGT chr11 5304951 5304970 5304954 -
aattctcctgcctcagcctc

SEQ ID NO: 62042 - DNA, 20 bp, Artificial Sequence
  Synthetic oligonucleotide; TGGGAT chr11 5304942 5304961 5304945 -
gcctcagcctcccgagtagc

SEQ ID NO: 62043 - DNA, 20 bp, Artificial Sequence
  Synthetic oligonucleotide; CAGGGT chr11 5304886 5304905 5304889 -
ttttgtatttttagtagaga

SEQ ID NO: 62044 - DNA, 20 bp, Artificial Sequence
  Synthetic oligonucleotide; TAGGAT chr11 5304813 5304832 5304816 -
acctcagccttccaaagtgc

SEQ ID NO: 62045 - DNA, 20 bp, Artificial Sequence
  Synthetic oligonucleotide; GTGGAT chr11 5304592 5304611 5304595 -
caatatgtggagatgaaaaa

SEQ ID NO: 62046 - DNA, 20 bp, Artificial Sequence
  Synthetic oligonucleotide; CTGGAT chr11 5304408 5304427 5304411 -
catggcaagttgaagaagct

SEQ ID NO: 62047 - DNA, 20 bp, Artificial Sequence
  Synthetic oligonucleotide; ATGGAT chr11 5304401 5304420 5304404 -
agttgaagaagctctggatg

SEQ ID NO: 62048 - DNA, 20 bp, Artificial Sequence
  Synthetic oligonucleotide; TGGGAT chr11 5304364 5304383 5304367 -
tcagaaactcttgaggactc

SEQ ID NO: 62049 - DNA, 20 bp, Artificial Sequence
  Synthetic oligonucleotide; AAGAAT chr11 5304347 5304366 5304350 -
ctctgggatagttgctgtca

SEQ ID NO: 62050 - DNA, 20 bp, Artificial Sequence
  Synthetic oligonucleotide; GAGAGT chr11 5304259 5304278 5304262 -
gggggcctctatgcttgcct

SEQ ID NO: 62051 - DNA, 20 bp, Artificial Sequence
  Synthetic oligonucleotide; TGGAAT chr11 5304165 5304184 5304168 -
attagggcaactattctccc

SEQ ID NO: 62052 - DNA, 20 bp, Artificial Sequence
  Synthetic oligonucleotide; TTGGGT chr11 5304157 5304176 5304160 -
aactattctccctggaatat

SEQ ID NO: 62053 - DNA, 20 bp, Artificial Sequence
  Synthetic oligonucleotide; AAGAAT chr11 5303926 5303945 5303929 -
tgaaaacacgactatagttt

SEQ ID NO: 62054 - DNA, 20 bp, Artificial Sequence
  Synthetic oligonucleotide; CTGGGT chr11 5303881 5303900 5303884 -
tcctccatctggtccattat

SEQ ID NO: 62055 - DNA, 20 bp, Artificial Sequence
  Synthetic oligonucleotide; GTGGAT chr11 5303701 5303720 5303704 -
actatgcaggtcataattca

SEQ ID NO: 62056 - DNA, 20 bp, Artificial Sequence
  Synthetic oligonucleotide; CTGAAT chr11 5303423 5303442 5303426 -
ttgttatcacttcattttta

SEQ ID NO: 62057 - DNA, 20 bp, Artificial Sequence
  Synthetic oligonucleotide; TTGAAT chr11 5303381 5303400 5303384 -
cggtagtaatatttataata

SEQ ID NO: 62058 - DNA, 20 bp, Artificial Sequence
  Synthetic oligonucleotide; CAGAAT chr11 5303348 5303367 5303351 -
taaaagactctggacacata

SEQ ID NO: 62059 - DNA, 20 bp, Artificial Sequence
  Synthetic oligonucleotide; TTGAAT chr11 5303339 5303358 5303342 -
ctggacacatacagaatcaa

SEQ ID NO: 62060 - DNA, 20 bp, Artificial Sequence
  Synthetic oligonucleotide; CTGAGT chr11 5303323 5303342 5303326 -
tcaattgaatttgggagaaa

SEQ ID NO: 62061 - DNA, 20 bp, Artificial Sequence
  Synthetic oligonucleotide; GAGGAT chr11 5303175 5303194 5303178 -
tagacttcatagttccctat

SEQ ID NO: 62062 - DNA, 20 bp, Artificial Sequence
  Synthetic oligonucleotide; GTGAAT chr11 5303165 5303184 5303168 -
agttccctatgaggatcctt

SEQ ID NO: 62063 - DNA, 20 bp, Artificial Sequence
  Synthetic oligonucleotide; ACGAGT chr11 5303149 5303168 5303152 -
ccttgtgaatttttctcaat

SEQ ID NO: 62064 - DNA, 20 bp, Artificial Sequence
  Synthetic oligonucleotide; GAGGGT chr11 5303122 5303141 5303125 -
ttacagattcataatgatta

SEQ ID NO: 62065 - DNA, 20 bp, Artificial Sequence
  Synthetic oligonucleotide; GGGAGT chr11 5303069 5303088 5303072 -
agttgccgtattttctctct

SEQ ID NO: 62066 - DNA, 20 bp, Artificial Sequence
  Synthetic oligonucleotide; ACGAAT chr11 5302972 5302991 5302975 -
cccttcagatcaacatactt

SEQ ID NO: 62067 - DNA, 20 bp, Artificial Sequence
  Synthetic oligonucleotide; ATGAGT chr11 5302880 5302899 5302883 -
ttccgttatgagcttccaac

SEQ ID NO: 62068 - DNA, 20 bp, Artificial Sequence
  Synthetic oligonucleotide; CTGAGT chr11 5302810 5302829 5302813 -
tttgcagcatagggaacttg

SEQ ID NO: 62069 - DNA, 20 bp, Artificial Sequence
  Synthetic oligonucleotide; CTGAGT chr11 5302794 5302813 5302797 -
cttgctgagtcccaagtcca

SEQ ID NO: 62070 - DNA, 20 bp, Artificial Sequence
  Synthetic oligonucleotide; ATGAGT chr11 5302771 5302790 5302774 -
agtaattacacctttctaaa

SEQ ID NO: 62071 - DNA, 20 bp, Artificial Sequence
  Synthetic oligonucleotide; ATGAGT chr11 5302709 5302728 5302712 -
tctgtggaaactcacaatag

SEQ ID NO: 62072 - DNA, 20 bp, Artificial Sequence
  Synthetic oligonucleotide; CAGAGT chr11 5302663 5302682 5302666 -
tattttattttttatagaga

SEQ ID NO: 62073 - DNA, 20 bp, Artificial Sequence
  Synthetic oligonucleotide; CAGGGT chr11 5302526 5302545 5302529 -
tcttttttttttggtggagg

SEQ ID NO: 62074 - DNA, 20 bp, Artificial Sequence
  Synthetic oligonucleotide; CTGGGT chr11 5302502 5302521 5302505 -
gtctagctatgttgcccagg

SEQ ID NO: 62075 - DNA, 20 bp, Artificial Sequence
  Synthetic oligonucleotide; TTGAAT chr11 5302431 5302450 5302434 -
atatttctcagtcatttcta

SEQ ID NO: 62076 - DNA, 20 bp, Artificial Sequence
  Synthetic oligonucleotide; TTGGAT chr11 5302348 5302367 5302351 -
aaaatttgaactgactcaac

SEQ ID NO: 62077 - DNA, 20 bp, Artificial Sequence
  Synthetic oligonucleotide; AGGAAT chr11 5302303 5302322 5302306 -
atatgataaataataggagg

SEQ ID NO: 62078 - DNA, 20 bp, Artificial Sequence
  Synthetic oligonucleotide; AAGAGT chr11 5302295 5302314 5302298 -
aataataggaggaggaataa

SEQ ID NO: 62079 - DNA, 20 bp, Artificial Sequence
  Synthetic oligonucleotide; GAGAAT chr11 5302286 5302305 5302289 -
aggaggaataaaagagtaaa

SEQ ID NO: 62080 - DNA, 20 bp, Artificial Sequence
  Synthetic oligonucleotide; AGGAGT chr11 5302268 5302287 5302271 -
aagagaataaaagggaacaa

SEQ ID NO: 62081 - DNA, 20 bp, Artificial Sequence
  Synthetic oligonucleotide; AAGAGT chr11 5302249 5302268 5302252 -
aaggagtcctatttgggacc

SEQ ID NO: 62082 - DNA, 20 bp, Artificial Sequence
  Synthetic oligonucleotide; ATGAGT chr11 5302219 5302238 5302222 -
gctatgagcacagacgtaag

SEQ ID NO: 62083 - DNA, 20 bp, Artificial Sequence
  Synthetic oligonucleotide; GTGAAT chr11 5302183 5302202 5302186 -
taaaggttgtatgcttcata

SEQ ID NO: 62084 - DNA, 20 bp, Artificial Sequence
  Synthetic oligonucleotide; TGGAAT chr11 5302177 5302196 5302180 -
ttgtatgcttcatagtgaat

SEQ ID NO: 62085 - DNA, 20 bp, Artificial Sequence
  Synthetic oligonucleotide; GTGAGT chr11 5302121 5302140 5302124 -
ttattctagggaaaggcctt

SEQ ID NO: 62086 - DNA, 20 bp, Artificial Sequence
  Synthetic oligonucleotide; CCGGAT chr11 5301879 5301898 5301882 -
ggctcagaggcagttcacta

SEQ ID NO: 62087 - DNA, 20 bp, Artificial Sequence
  Synthetic oligonucleotide; TGGAAT chr11 5301806 5301825 5301809 -
gcactcttcttgtcctcatt

SEQ ID NO: 62088 - DNA, 20 bp, Artificial Sequence
  Synthetic oligonucleotide; TGGGAT chr11 5301741 5301760 5301744 -
atgctggcagacacggacct

SEQ ID NO: 62089 - DNA, 20 bp, Artificial Sequence
  Synthetic oligonucleotide; CTGGGT chr11 5301710 5301729 5301713 -
tcactacaatgcccacagtc

SEQ ID NO: 62090 - DNA, 20 bp, Artificial Sequence
  Synthetic oligonucleotide; TAGAAT chr11 5301628 5301647 5301631 -
cattcattcactggccattg

SEQ ID NO: 62091 - DNA, 20 bp, Artificial Sequence
  Synthetic oligonucleotide; CCGAGT chr11 5301540 5301559 5301543 -
aactgcattcttaccaattc

SEQ ID NO: 62092 - DNA, 20 bp, Artificial Sequence
  Synthetic oligonucleotide; GGGGGT chr11 5301519 5301538 5301522 -
cgagtgatgaacataggact

SEQ ID NO: 62093 - DNA, 20 bp, Artificial Sequence
  Synthetic oligonucleotide; GTGAAT chr11 5301098 5301117 5301101 -
attttctctttcctccattc

SEQ ID NO: 62094 - DNA, 20 bp, Artificial Sequence
  Synthetic oligonucleotide; CAGAGT chr11 5301029 5301048 5301032 -
ttattcgcctattttctggg

SEQ ID NO: 62095 - DNA, 20 bp, Artificial Sequence
  Synthetic oligonucleotide; CAGAAT chr11 5301004 5301023 5301007 -
tagggcttgagcccttattt

SEQ ID NO: 62096 - DNA, 20 bp, Artificial Sequence
  Synthetic oligonucleotide; TAGGAT chr11 5300987 5301006 5300990 -
tttcagaatctcaagatctc

SEQ ID NO: 62097 - DNA, 20 bp, Artificial Sequence
  Synthetic oligonucleotide; CAGAGT chr11 5300920 5300939 5300923 -
tatccacacttttttttcct

SEQ ID NO: 62098 - DNA, 20 bp, Artificial Sequence
  Synthetic oligonucleotide; GGGAAT chr11 5300802 5300821 5300805 -
tatatatcacctaataaaga

SEQ ID NO: 62099 - DNA, 20 bp, Artificial Sequence
  Synthetic oligonucleotide; AAGAAT chr11 5300777 5300796 5300780 -
tgccagtgatgctgaagaaa

SEQ ID NO: 62100 - DNA, 20 bp, Artificial Sequence
  Synthetic oligonucleotide; AAGAGT chr11 5300738 5300757 5300741 -
gagatataacaatccaaaag

SEQ ID NO: 62101 - DNA, 20 bp, Artificial Sequence
  Synthetic oligonucleotide; TTGGGT chr11 5300688 5300707 5300691 -
gataagtggactaaagcagc

SEQ ID NO: 62102 - DNA, 20 bp, Artificial Sequence
  Synthetic oligonucleotide; GTGAAT chr11 5300620 5300639 5300623 -
attttatgtgtcttataaag

SEQ ID NO: 62103 - DNA, 20 bp, Artificial Sequence
  Synthetic oligonucleotide; TTGAAT chr11 5300614 5300633 5300617 -
tgtgtcttataaaggtgaat

SEQ ID NO: 62104 - DNA, 20 bp, Artificial Sequence
  Synthetic oligonucleotide; AAGGAT chr11 5300558 5300577 5300561 -
ttgaaactagttactctgaa

SEQ ID NO: 62105 - DNA, 20 bp, Artificial Sequence
  Synthetic oligonucleotide; TGGAAT chr11 5300102 5300121 5300105 -
ttttagaaatttttcactga

SEQ ID NO: 62106 - DNA, 20 bp, Artificial Sequence
  Synthetic oligonucleotide; TTGGGT chr11 5300044 5300063 5300047 -
gtaagtctttatgctgttca

SEQ ID NO: 62107 - DNA, 20 bp, Artificial Sequence
  Synthetic oligonucleotide; GGGGAT chr11 5300002 5300021 5300005 -
cacttgctattagtgtaaca

SEQ ID NO: 62108 - DNA, 20 bp, Artificial Sequence
  Synthetic oligonucleotide; TTGGAT chr11 5299641 5299660 5299644 -
ctccaaattagaaggcccat

SEQ ID NO: 62109 - DNA, 20 bp, Artificial Sequence
  Synthetic oligonucleotide; AAGGAT chr11 5299599 5299618 5299602 -
ctaataaatgactactcctg

SEQ ID NO: 62110 - DNA, 20 bp, Artificial Sequence
  Synthetic oligonucleotide; GCGAAT chr11 5299582 5299601 5299585 -
ctgaaggattcagttattgt

SEQ ID NO: 62111 - DNA, 20 bp, Artificial Sequence
  Synthetic oligonucleotide; GAGAGT chr11 5299569 5299588 5299572 -
ttattgtgcgaattgtttgt

SEQ ID NO: 62112 - DNA, 20 bp, Artificial Sequence
  Synthetic oligonucleotide; GGGGGT chr11 5299544 5299563 5299547 -
ttctttgaaagtaggacgtg

SEQ ID NO: 62113 - DNA, 20 bp, Artificial Sequence
  Synthetic oligonucleotide; CAGAGT chr11 5299468 5299487 5299471 -
gtttttccaaagttggcata

SEQ ID NO: 62114 - DNA, 20 bp, Artificial Sequence
  Synthetic oligonucleotide; AAGGAT chr11 5299349 5299368 5299352 -
gcatctctattgaccactga

SEQ ID NO: 62115 - DNA, 20 bp, Artificial Sequence
  Synthetic oligonucleotide; AAGAGT chr11 5299337 5299356 5299340 -
accactgaaaggatgtctgt

SEQ ID NO: 62116 - DNA, 20 bp, Artificial Sequence
  Synthetic oligonucleotide; GCGAAT chr11 5299302 5299321 5299305 -
agcggtattaaaattttcag

SEQ ID NO: 62117 - DNA, 20 bp, Artificial Sequence
  Synthetic oligonucleotide; AAGGGT chr11 5299296 5299315 5299299 -
attaaaattttcaggcgaat

SEQ ID NO: 62118 - DNA, 20 bp, Artificial Sequence
  Synthetic oligonucleotide; GGGGAT chr11 5299257 5299276 5299260 -
ggcaaatgtatttgtcagta

SEQ ID NO: 62119 - DNA, 20 bp, Artificial Sequence
  Synthetic oligonucleotide; AGGGAT chr11 5299061 5299080 5299064 -
agtttactcatatgttagca

SEQ ID NO: 62120 - DNA, 20 bp, Artificial Sequence
  Synthetic oligonucleotide; AAGGAT chr11 5298987 5299006 5298990 -
atagtcaaaaatcaattaaa

SEQ ID NO: 62121 - DNA, 20 bp, Artificial Sequence
  Synthetic oligonucleotide; AGGAAT chr11 5298651 5298670 5298654 -
tctcttagagatctgctctg

SEQ ID NO: 62122 - DNA, 20 bp, Artificial Sequence
  Synthetic oligonucleotide; GTGAGT chr11 5298611 5298630 5298614 -
agttaattctctgtcatact

SEQ ID NO: 62123 - DNA, 20 bp, Artificial Sequence
  Synthetic oligonucleotide; AAGGAT chr11 5298558 5298577 5298561 -
catcagcatattgtcttccc

SEQ ID NO: 62124 - DNA, 20 bp, Artificial Sequence
  Synthetic oligonucleotide; TGGAGT chr11 5298408 5298427 5298411 -
tcttgctctgttgcccaggc

SEQ ID NO: 62125 - DNA, 20 bp, Artificial Sequence
  Synthetic oligonucleotide; TTGAGT chr11 5298332 5298351 5298335 -
aatccttcttcctcagcttt

SEQ ID NO: 62126 - DNA, 20 bp, Artificial Sequence
  Synthetic oligonucleotide; TGGGAT chr11 5298267 5298286 5298270 -
gtttttattttttgtaaata

SEQ ID NO: 62127 - DNA, 20 bp, Artificial Sequence
  Synthetic oligonucleotide; CGGGGT chr11 5298152 5298171 5298155 -
aaattttaggcagaaaaggg

SEQ ID NO: 62128 - DNA, 20 bp, Artificial Sequence
  Synthetic oligonucleotide; ATGGGT chr11 5298139 5298158 5298142 -
aaaagggcggggtccctggc

SEQ ID NO: 62129 - DNA, 20 bp, Artificial Sequence
  Synthetic oligonucleotide; ATGAAT chr11 5297937 5297956 5297940 -
ctttattctctgtttgtctc

SEQ ID NO: 62130 - DNA, 20 bp, Artificial Sequence
  Synthetic oligonucleotide; CTGGAT chr11 5297787 5297806 5297790 -
gtgttaccacagttgaacag

SEQ ID NO: 62131 - DNA, 20 bp, Artificial Sequence
  Synthetic oligonucleotide; ATGGAT chr11 5297725 5297744 5297728 -
cttgcaatgtaaattataat

SEQ ID NO: 62132 - DNA, 20 bp, Artificial Sequence
  Synthetic oligonucleotide; CTGGAT chr11 5297618 5297637 5297621 -
gaaaagcctagatatagaaa

SEQ ID NO: 62133 - DNA, 20 bp, Artificial Sequence
  Synthetic oligonucleotide; ATGAGT chr11 5297606 5297625 5297609 -
tatagaaactggatcctcac

SEQ ID NO: 62134 - DNA, 20 bp, Artificial Sequence
  Synthetic oligonucleotide; CAGAAT chr11 5297583 5297602 5297586 -
agttcagtatataattgtaa

SEQ ID NO: 62135 - DNA, 20 bp, Artificial Sequence
  Synthetic oligonucleotide; TCGAGT chr11 5297498 5297517 5297501 -
ctgattatcacaaaaatact

SEQ ID NO: 62136 - DNA, 20 bp, Artificial Sequence
  Synthetic oligonucleotide; AGGGAT chr11 5297342 5297361 5297345 -
atgtggtataaatgagacag

SEQ ID NO: 62137 - DNA, 20 bp, Artificial Sequence
  Synthetic oligonucleotide; ATGAAT chr11 5297313 5297332 5297316 -
tctccttcctatgctgtcag

SEQ ID NO: 62138 - DNA, 20 bp, Artificial Sequence
  Synthetic oligonucleotide; TAGAAT chr11 5297300 5297319 5297303 -
ctgtcagatgaatactgaga

SEQ ID NO: 62139 - DNA, 20 bp, Artificial Sequence
  Synthetic oligonucleotide; TTGGGT chr11 5297238 5297257 5297241 -
catttctgtctgttgaagat

SEQ ID NO: 62140 - DNA, 20 bp, Artificial Sequence
  Synthetic oligonucleotide; GGGGAT chr11 5297230 5297249 5297233 -
tctgttgaagatttgggtgt

SEQ ID NO: 62141 - DNA, 20 bp, Artificial Sequence
  Synthetic oligonucleotide; AGGGAT chr11 5297204 5297223 5297207 -
aactcaaggtatcatatcca

SEQ ID NO: 62142 - DNA, 20 bp, Artificial Sequence
  Synthetic oligonucleotide; ATGGAT chr11 5297200 5297219 5297203 -
caaggtatcatatccaaggg

SEQ ID NO: 62143 - DNA, 20 bp, Artificial Sequence
  Synthetic oligonucleotide; AAGGAT chr11 5297166 5297185 5297169 -
gtgactctaacagaaaggga

SEQ ID NO: 62144 - DNA, 20 bp, Artificial Sequence
  Synthetic oligonucleotide; ATGAAT chr11 5297085 5297104 5297088 -
tgcatgcattggcaatgttt

SEQ ID NO: 62145 - DNA, 20 bp, Artificial Sequence
  Synthetic oligonucleotide; AGGGGT chr11 5297030 5297049 5297033 -
caaaagtgtttcatgtgcct

SEQ ID NO: 62146 - DNA, 20 bp, Artificial Sequence
  Synthetic oligonucleotide; TTGAGT chr11 5297014 5297033 5297017 -
gcctaggggtgtcaaatact

SEQ ID NO: 62147 - DNA, 20 bp, Artificial Sequence
  Synthetic oligonucleotide; CTGAAT chr11 5296979 5296998 5296982 -
tatacttctctgtaatgtgt

SEQ ID NO: 62148 - DNA, 20 bp, Artificial Sequence
  Synthetic oligonucleotide; AGGGAT chr11 5296795 5296814 5296798 -
aacagctgtgtagcctaatt

SEQ ID NO: 62149 - DNA, 20 bp, Artificial Sequence
  Synthetic oligonucleotide; TAGGGT chr11 5296714 5296733 5296717 -
gtatatttatcagaagtctt

SEQ ID NO: 62150 - DNA, 20 bp, Artificial Sequence
  Synthetic oligonucleotide; AGGAAT chr11 5296701 5296720 5296704 -
aagtctttagggtcatgaaa

SEQ ID NO: 62151 - DNA, 20 bp, Artificial Sequence
  Synthetic oligonucleotide; TGGAGT chr11 5296506 5296525 5296509 -
gttttaatctaaatctatct

SEQ ID NO: 62152 - DNA, 20 bp, Artificial Sequence
  Synthetic oligonucleotide; ATGGAT chr11 5296339 5296358 5296342 -
gtttacataaagaaaataag

SEQ ID NO: 62153 - DNA, 20 bp, Artificial Sequence
  Synthetic oligonucleotide; CTGAGT chr11 5296280 5296299 5296283 -
gaaaaaaaatactccatatt

SEQ ID NO: 62154 - DNA, 20 bp, Artificial Sequence
  Synthetic oligonucleotide; CAGAGT chr11 5296191 5296210 5296194 -
tatataaaagatattttaaa

SEQ ID NO: 62155 - DNA, 20 bp, Artificial Sequence
  Synthetic oligonucleotide; AGGAAT chr11 5296087 5296106 5296090 -
tcatagcattttaaatagtt

SEQ ID NO: 62156 - DNA, 20 bp, Artificial Sequence
  Synthetic oligonucleotide; TAGAGT chr11 5296041 5296060 5296044 -
ttctaagtttcccacaaact

SEQ ID NO: 62157 - DNA, 20 bp, Artificial Sequence
  Synthetic oligonucleotide; ATGGGT chr11 5295951 5295970 5295954 -
gtcaaaaatatatgtacatt

SEQ ID NO: 62158 - DNA, 20 bp, Artificial Sequence
  Synthetic oligonucleotide; AAGAGT chr11 5295806 5295825 5295809 -
tttagtacatctaagaagaa

SEQ ID NO: 62159 - DNA, 20 bp, Artificial Sequence
  Synthetic oligonucleotide; CTGAGT chr11 5295782 5295801 5295785 -
gttttgtctcttatccacct

SEQ ID NO: 62160 - DNA, 20 bp, Artificial Sequence
  Synthetic oligonucleotide; CTGGAT chr11 5295722 5295741 5295725 -
tcccacagccccacttagct

SEQ ID NO: 62161 - DNA, 20 bp, Artificial Sequence
  Synthetic oligonucleotide; TGGAGT chr11 5295716 5295735 5295719 -
agccccacttagctctggat

SEQ ID NO: 62162 - DNA, 20 bp, Artificial Sequence
  Synthetic oligonucleotide; ATGGAT chr11 5295670 5295689 5295673 -
actacatggacgtaaaatgc

SEQ ID NO: 62163 - DNA, 20 bp, Artificial Sequence
  Synthetic oligonucleotide; TAGGAT chr11 5295487 5295506 5295490 -
tacatcctcaatctacacac

SEQ ID NO: 62164 - DNA, 20 bp, Artificial Sequence
  Synthetic oligonucleotide; TAGAAT chr11 5295236 5295255 5295239 -
caactcatgatatttggctc

SEQ ID NO: 62165 - DNA, 20 bp, Artificial Sequence
  Synthetic oligonucleotide; CTGAAT chr11 5295223 5295242 5295226 -
ttggctctagaatacatgct

SEQ ID NO: 62166 - DNA, 20 bp, Artificial Sequence
  Synthetic oligonucleotide; TGGGGT chr11 5295144 5295163 5295147 -
ctctgaaataagacataatt

SEQ ID NO: 62167 - DNA, 20 bp, Artificial Sequence
  Synthetic oligonucleotide; CAGGGT chr11 5294993 5295012 5294996 -
tcctgttatttttggaagca

SEQ ID NO: 62168 - DNA, 20 bp, Artificial Sequence
  Synthetic oligonucleotide; TGGGAT chr11 5294986 5295005 5294989 -
atttttggaagcacagggtg

SEQ ID NO: 62169 - DNA, 20 bp, Artificial Sequence
  Synthetic oligonucleotide; GGGAGT chr11 5294732 5294751 5294735 -
gggctgtgcgccgtgcttga

SEQ ID NO: 62170 - DNA, 20 bp, Artificial Sequence
  Synthetic oligonucleotide; CCGGGT chr11 5294725 5294744 5294728 -
gcgccgtgcttgagggagtt

SEQ ID NO: 62171 - DNA, 20 bp, Artificial Sequence
  Synthetic oligonucleotide; AAGAGT chr11 5294451 5294470 5294454 -
catcgaccacccaagggctg

SEQ ID NO: 62172 - DNA, 20 bp, Artificial Sequence
  Synthetic oligonucleotide; CGGGAT chr11 5294395 5294414 5294398 -
ctccccctgcagcccaggtg

SEQ ID NO: 62173 - DNA, 20 bp, Artificial Sequence
  Synthetic oligonucleotide; CTGGGT chr11 5294386 5294405 5294389 -
cagcccaggtgcgggatcca

SEQ ID NO: 62174 - DNA, 20 bp, Artificial Sequence
  Synthetic oligonucleotide; CTGAGT chr11 5294364 5294383 5294367 -
gggtgaagccggctaggctc

SEQ ID NO: 62175 - DNA, 20 bp, Artificial Sequence
  Synthetic oligonucleotide; GGGGAT chr11 5294353 5294372 5294356 -
gctaggctcctgagtttgct

SEQ ID NO: 62176 - DNA, 20 bp, Artificial Sequence
  Synthetic oligonucleotide; AGGGAT chr11 5294323 5294342 5294326 -
agaacccttatgtctagata

SEQ ID NO: 62177 - DNA, 20 bp, Artificial Sequence
  Synthetic oligonucleotide; CAGGGT chr11 5294242 5294261 5294245 -
tcagcaccctgtgtctagct

SEQ ID NO: 62178 - DNA, 20 bp, Artificial Sequence
  Synthetic oligonucleotide; GTGAAT chr11 5294234 5294253 5294237 -
ctgtgtctagctcagggttt

SEQ ID NO: 62179 - DNA, 20 bp, Artificial Sequence
  Synthetic oligonucleotide; AGGGAT chr11 5294165 5294184 5294168 -
agaacctttatgtctagctc

SEQ ID NO: 62180 - DNA, 20 bp, Artificial Sequence
  Synthetic oligonucleotide; CAGGGT chr11 5294084 5294103 5294087 -
tcagcaccctgtgtctagct

SEQ ID NO: 62181 - DNA, 20 bp, Artificial Sequence
  Synthetic oligonucleotide; GTGAAT chr11 5294076 5294095 5294079 -
ctgtgtctagctcagggttt

SEQ ID NO: 62182 - DNA, 20 bp, Artificial Sequence
  Synthetic oligonucleotide; AGGGAT chr11 5294005 5294024 5294008 -
agaacctttatgtctagctc

SEQ ID NO: 62183 - DNA, 20 bp, Artificial Sequence
  Synthetic oligonucleotide; CAGGGT chr11 5293924 5293943 5293927 -
tcagcaccctgtgtctagct

SEQ ID NO: 62184 - DNA, 20 bp, Artificial Sequence
  Synthetic oligonucleotide; GTGAAT chr11 5293916 5293935 5293919 -
ctgtgtctagctcagggttt

SEQ ID NO: 62185 - DNA, 20 bp, Artificial Sequence
  Synthetic oligonucleotide; ATGGAT chr11 5293795 5293814 5293798 -
agaacctttgtgtctagctc

SEQ ID NO: 62186 - DNA, 20 bp, Artificial Sequence
  Synthetic oligonucleotide; CAGGAT chr11 5293733 5293752 5293736 -
cactgggctctaccaatcag

SEQ ID NO: 62187 - DNA, 20 bp, Artificial Sequence
  Synthetic oligonucleotide; GTGGGT chr11 5293727 5293746 5293730 -
gctctaccaatcagcaggat

SEQ ID NO: 62188 - DNA, 20 bp, Artificial Sequence
  Synthetic oligonucleotide; GAGAAT chr11 5293709 5293728 5293712 -
atgtgggtggggccagataa

SEQ ID NO: 62189 - DNA, 20 bp, Artificial Sequence
  Synthetic oligonucleotide; TCGGGT chr11 5293667 5293686 5293670 -
agccagcagtggcaacccgc

SEQ ID NO: 62190 - DNA, 20 bp, Artificial Sequence
  Synthetic oligonucleotide; TTGGGT chr11 5293595 5293614 5293598 -
atcttgctgctgctcactgt

SEQ ID NO: 62191 - DNA, 20 bp, Artificial Sequence
  Synthetic oligonucleotide; GAGGGT chr11 5293321 5293340 5293324 -
agaactgtaacactcaccac

SEQ ID NO: 62192 - DNA, 20 bp, Artificial Sequence
  Synthetic oligonucleotide; ATGAGT chr11 5293244 5293263 5293247 -
cacagtatgtcagaaacaat

SEQ ID NO: 62193 - DNA, 20 bp, Artificial Sequence
  Synthetic oligonucleotide; CAGAGT chr11 5293126 5293145 5293129 -
taatgtgttactccctaagg

SEQ ID NO: 62194 - DNA, 20 bp, Artificial Sequence
  Synthetic oligonucleotide; ATGAAT chr11 5292800 5292819 5292803 -
ttctttacaggccgagaaaa

SEQ ID NO: 62195 - DNA, 20 bp, Artificial Sequence
  Synthetic oligonucleotide; CTGAAT chr11 5292794 5292813 5292797 -
acaggccgagaaaaatgaat

SEQ ID NO: 62196 - DNA, 20 bp, Artificial Sequence
  Synthetic oligonucleotide; AGGAAT chr11 5292689 5292708 5292692 -
atcattattcatgatttgca

SEQ ID NO: 62197 - DNA, 20 bp, Artificial Sequence
  Synthetic oligonucleotide; TTGAAT chr11 5292615 5292634 5292618 -
tttaactatgttccagattt

SEQ ID NO: 62198 - DNA, 20 bp, Artificial Sequence
  Synthetic oligonucleotide; AAGAGT chr11 5292608 5292627 5292611 -
atgttccagatttttgaatg

SEQ ID NO: 62199 - DNA, 20 bp, Artificial Sequence
  Synthetic oligonucleotide; GTGGAT chr11 5292557 5292576 5292560 -
aaaaataagtatgtgaagtg

SEQ ID NO: 62200 - DNA, 20 bp, Artificial Sequence
  Synthetic oligonucleotide; ATGAAT chr11 5292485 5292504 5292488 -
aaagcatcatgttgtacccc

SEQ ID NO: 62201 - DNA, 20 bp, Artificial Sequence
  Synthetic oligonucleotide; ATGGGT chr11 5292283 5292302 5292286 -
gttttctctacgttatttat

SEQ ID NO: 62202 - DNA, 20 bp, Artificial Sequence
  Synthetic oligonucleotide; AAGGAT chr11 5292163 5292182 5292166 -
accaccctttccacagtcaa

SEQ ID NO: 62203 - DNA, 20 bp, Artificial Sequence
  Synthetic oligonucleotide; CAGAGT chr11 5292140 5292159 5292143 -
gatattgtagtttaatgcct

SEQ ID NO: 62204 - DNA, 20 bp, Artificial Sequence
  Synthetic oligonucleotide; TGGAAT chr11 5292083 5292102 5292086 -
cctctttaggttctccttta

SEQ ID NO: 62205 - DNA, 20 bp, Artificial Sequence
  Synthetic oligonucleotide; CAGAGT chr11 5291998 5292017 5292001 -
tatgcctctacctttattag

SEQ ID NO: 62206 - DNA, 20 bp, Artificial Sequence
  Synthetic oligonucleotide; CTGGAT chr11 5291846 5291865 5291849 -
cacgtagtctgtgcttatga

SEQ ID NO: 62207 - DNA, 20 bp, Artificial Sequence
  Synthetic oligonucleotide; ATGGGT chr11 5291798 5291817 5291801 -
ctaatgttgttcgtcataat

SEQ ID NO: 62208 - DNA, 20 bp, Artificial Sequence
  Synthetic oligonucleotide; GAGGAT chr11 5291662 5291681 5291665 -
cagtttaggctagtaagcat

SEQ ID NO: 62209 - DNA, 20 bp, Artificial Sequence
  Synthetic oligonucleotide; CAGAAT chr11 5291619 5291638 5291622 -
ttcccacagtctgttggtca

SEQ ID NO: 62210 - DNA, 20 bp, Artificial Sequence
  Synthetic oligonucleotide; CTGAGT chr11 5291610 5291629 5291613 -
tctgttggtcacagaataac

SEQ ID NO: 62211 - DNA, 20 bp, Artificial Sequence
  Synthetic oligonucleotide; AAGAGT chr11 5291592 5291611 5291595 -
acctgagtgattactgatga

SEQ ID NO: 62212 - DNA, 20 bp, Artificial Sequence
  Synthetic oligonucleotide; GAGAAT chr11 5291586 5291605 5291589 -
gtgattactgatgaaagagt

SEQ ID NO: 62213 - DNA, 20 bp, Artificial Sequence
  Synthetic oligonucleotide; GTGGAT chr11 5291517 5291536 5291520 -
aaatgtttctctttttatta

SEQ ID NO: 62214 - DNA, 20 bp, Artificial Sequence
  Synthetic oligonucleotide; GTGGGT chr11 5291357 5291376 5291360 -
aggagcccttttgattgaag

SEQ ID NO: 62215 - DNA, 20 bp, Artificial Sequence
  Synthetic oligonucleotide; CTGGAT chr11 5291325 5291344 5291328 -
accttacagggacaggacat

SEQ ID NO: 62216 - DNA, 20 bp, Artificial Sequence
  Synthetic oligonucleotide; AAGAGT chr11 5291143 5291162 5291146 -
catcggtctttctttatttc

SEQ ID NO: 62217 - DNA, 20 bp, Artificial Sequence
  Synthetic oligonucleotide; AAGAAT chr11 5291073 5291092 5291076 -
ctctttcaagagacagagaa

SEQ ID NO: 62218 - DNA, 20 bp, Artificial Sequence
  Synthetic oligonucleotide; AAGGAT chr11 5290964 5290983 5290967 -
ttctcagaagtatattttga

SEQ ID NO: 62219 - DNA, 20 bp, Artificial Sequence
  Synthetic oligonucleotide; TAGGGT chr11 5290902 5290921 5290905 -
aagaagtgatattgagaagg

SEQ ID NO: 62220 - DNA, 20 bp, Artificial Sequence
  Synthetic oligonucleotide; TAGAAT chr11 5290851 5290870 5290854 -
tttatatacatctgtattgt

SEQ ID NO: 62221 - DNA, 20 bp, Artificial Sequence
  Synthetic oligonucleotide; GTGGAT chr11 5290792 5290811 5290795 -
atatactagctatgtaacct

SEQ ID NO: 62222 - DNA, 20 bp, Artificial Sequence
  Synthetic oligonucleotide; AAGGAT chr11 5290711 5290730 5290714 -
cctgcttcatagttattaat

SEQ ID NO: 62223 - DNA, 20 bp, Artificial Sequence
  Synthetic oligonucleotide; AAGGAT chr11 5290637 5290656 5290640 -
tacacacacacacacattga

SEQ ID NO: 62224 - DNA, 20 bp, Artificial Sequence
  Synthetic oligonucleotide; CTGGAT chr11 5290533 5290552 5290536 -
ggtattatctaaatttcata

SEQ ID NO: 62225 - DNA, 20 bp, Artificial Sequence
  Synthetic oligonucleotide; AAGGGT chr11 5290474 5290493 5290477 -
tttgtcatatatttattcaa

SEQ ID NO: 62226 - DNA, 20 bp, Artificial Sequence
  Synthetic oligonucleotide; GAGGAT chr11 5290376 5290395 5290379 -
aattattctcaagttattat

SEQ ID NO: 62227 - DNA, 20 bp, Artificial Sequence
  Synthetic oligonucleotide; GAGGAT chr11 5290357 5290376 5290360 -
tgaggatgttgaaagacaga

SEQ ID NO: 62228 - DNA, 20 bp, Artificial Sequence
  Synthetic oligonucleotide; TGGGGT chr11 5290352 5290371 5290355 -
atgttgaaagacagagagga

SEQ ID NO: 62229 - DNA, 20 bp, Artificial Sequence
  Synthetic oligonucleotide; AAGAGT chr11 5290306 5290325 5290309 -
cacaattaagctaagcagct

SEQ ID NO: 62230 - DNA, 20 bp, Artificial Sequence
  Synthetic oligonucleotide; CAGGGT chr11 5290296 5290315 5290299 -
ctaagcagctaagagtcttg

SEQ ID NO: 62231 - DNA, 20 bp, Artificial Sequence
  Synthetic oligonucleotide; CAGGGT chr11 5290277 5290296 5290280 -
gcagggtagtgtagggacca

SEQ ID NO: 62232 - DNA, 20 bp, Artificial Sequence
  Synthetic oligonucleotide; TAGAAT chr11 5290260 5290279 5290263 -
ccacagggttaagggggcag

SEQ ID NO: 62233 - DNA, 20 bp, Artificial Sequence
  Synthetic oligonucleotide; GTGGAT chr11 5290150 5290169 5290153 -
ttgtttaaatgtataaataa

SEQ ID NO: 62234 - DNA, 20 bp, Artificial Sequence
  Synthetic oligonucleotide; AAGAAT chr11 5290142 5290161 5290145 -
atgtataaataagtggatga

SEQ ID NO: 62235 - DNA, 20 bp, Artificial Sequence
  Synthetic oligonucleotide; TAGAAT chr11 5290106 5290125 5290109 -
atagacagatagatgataga

SEQ ID NO: 62236 - DNA, 20 bp, Artificial Sequence
  Synthetic oligonucleotide; GTGAGT chr11 5289898 5289917 5289901 -
atttcagccatatcttaaca

SEQ ID NO: 62237 - DNA, 20 bp, Artificial Sequence
  Synthetic oligonucleotide; AAGGGT chr11 5289703 5289722 5289706 -
ctctaatcttaaaggtaaac

SEQ ID NO: 62238 - DNA, 20 bp, Artificial Sequence
  Synthetic oligonucleotide; TTGAAT chr11 5289433 5289452 5289436 -
gcctttttggtcataaaaca

SEQ ID NO: 62239 - DNA, 20 bp, Artificial Sequence
  Synthetic oligonucleotide; AGGAAT chr11 5289342 5289361 5289345 -
agtatccctcaagtagtgtc

SEQ ID NO: 62240 - DNA, 20 bp, Artificial Sequence
  Synthetic oligonucleotide; AGGAGT chr11 5289311 5289330 5289314 -
atttaaatagtctgcaagcc

SEQ ID NO: 62241 - DNA, 20 bp, Artificial Sequence
  Synthetic oligonucleotide; AAGAGT chr11 5289244 5289263 5289247 -
tgggaggactgcttgagctc

SEQ ID NO: 62242 - DNA, 20 bp, Artificial Sequence
  Synthetic oligonucleotide; GAGGAT chr11 5289123 5289142 5289126 -
tactcaggaggccgaaatgg

SEQ ID NO: 62243 - DNA, 20 bp, Artificial Sequence
  Synthetic oligonucleotide; CAGAGT chr11 5289050 5289069 5289053 -
ctgcactccagcctggacag

SEQ ID NO: 62244 - DNA, 20 bp, Artificial Sequence
  Synthetic oligonucleotide; CAGAAT chr11 5289025 5289044 5289028 -
tgaaaccttgcctcacgaaa

SEQ ID NO: 62245 - DNA, 20 bp, Artificial Sequence
  Synthetic oligonucleotide; CTGGGT chr11 5288956 5288975 5288959 -
tgatgctctaccacataggt

SEQ ID NO: 62246 - DNA, 20 bp, Artificial Sequence
  Synthetic oligonucleotide; TAGAGT chr11 5288797 5288816 5288800 -
tcaccatgttgtaactttct

SEQ ID NO: 62247 - DNA, 20 bp, Artificial Sequence
  Synthetic oligonucleotide; GTGAGT chr11 5288771 5288790 5288774 -
agtaacaatataaagttatt

SEQ ID NO: 62248 - DNA, 20 bp, Artificial Sequence
  Synthetic oligonucleotide; AGGAAT chr11 5288656 5288675 5288659 -
ttctactaagccattgaaac

SEQ ID NO: 62249 - DNA, 20 bp, Artificial Sequence
  Synthetic oligonucleotide; AAGAAT chr11 5288634 5288653 5288637 -
gaataacagaacaagattga

SEQ ID NO: 62250 - DNA, 20 bp, Artificial Sequence
  Synthetic oligonucleotide; TTGAGT chr11 5288611 5288630 5288614 -
aatacattttccgaaattac

SEQ ID NO: 62251 - DNA, 20 bp, Artificial Sequence
  Synthetic oligonucleotide; GAGGGT chr11 5288573 5288592 5288576 -
caagcacgtggacctgggag

SEQ ID NO: 62252 - DNA, 20 bp, Artificial Sequence
  Synthetic oligonucleotide; TGGGAT chr11 5288520 5288539 5288523 -
aaatgcaggtttataataga

SEQ ID NO: 62253 - DNA, 20 bp, Artificial Sequence
  Synthetic oligonucleotide; CAGGGT chr11 5288443 5288462 5288446 -
ccagtacacaagaggggacg

SEQ ID NO: 62254 - DNA, 20 bp, Artificial Sequence
  Synthetic oligonucleotide; GAGAAT chr11 5288405 5288424 5288408 -
ctcattctttttcttagtgt

SEQ ID NO: 62255 - DNA, 20 bp, Artificial Sequence
  Synthetic oligonucleotide; AAGAAT chr11 5288399 5288418 5288402 -
ctttttcttagtgtgagaat

SEQ ID NO: 62256 - DNA, 20 bp, Artificial Sequence
  Synthetic oligonucleotide; CTGAGT chr11 5288384 5288403 5288387 -
agaataagaatagccatgac

SEQ ID NO: 62257 - DNA, 20 bp, Artificial Sequence
  Synthetic oligonucleotide; AGGGGT chr11 5288227 5288246 5288230 -
ctgcagagccagggccgaga

SEQ ID NO: 62258 - DNA, 20 bp, Artificial Sequence
  Synthetic oligonucleotide; CAGGGT chr11 5288189 5288208 5288192 -
ctctccctcccattcccgag

SEQ ID NO: 62259 - DNA, 20 bp, Artificial Sequence
  Synthetic oligonucleotide; TAGAAT chr11 5288096 5288115 5288099 -
gctgtgacatggaaactatg

SEQ ID NO: 62260 - DNA, 20 bp, Artificial Sequence
  Synthetic oligonucleotide; TTGGGT chr11 5288087 5288106 5288090 -
tggaaactatgtagaatatt

SEQ ID NO: 62261 - DNA, 20 bp, Artificial Sequence
  Synthetic oligonucleotide; TTGAAT chr11 5288006 5288025 5288009 -
tagacagaaagtcaggagct

SEQ ID NO: 62262 - DNA, 20 bp, Artificial Sequence
  Synthetic oligonucleotide; AGGAGT chr11 5287924 5287943 5287927 -
cagtttctctttttataagt

SEQ ID NO: 62263 - DNA, 20 bp, Artificial Sequence
  Synthetic oligonucleotide; TGGAGT chr11 5287917 5287936 5287920 -
tctttttataagtaggagtc

SEQ ID NO: 62264 - DNA, 20 bp, Artificial Sequence
  Synthetic oligonucleotide; CTGAGT chr11 5287742 5287761 5287745 -
ctcaccttcacccaggccca

SEQ ID NO: 62265 - DNA, 20 bp, Artificial Sequence
  Synthetic oligonucleotide; GAGGAT chr11 5287699 5287718 5287702 -
tagttcacgtgtgtaaaaag

SEQ ID NO: 62266 - DNA, 20 bp, Artificial Sequence
  Synthetic oligonucleotide; AAGAGT chr11 5287559 5287578 5287562 -
ggcagtatagagcagagatt

SEQ ID NO: 62267 - DNA, 20 bp, Artificial Sequence
  Synthetic oligonucleotide; CTGAGT chr11 5287531 5287550 5287534 -
agatgctggagccagaccac

SEQ ID NO: 62268 - DNA, 20 bp, Artificial Sequence
  Synthetic oligonucleotide; GAGGGT chr11 5287466 5287485 5287469 -
gtttcttcatctgtaaaatg

SEQ ID NO: 62269 - DNA, 20 bp, Artificial Sequence
  Synthetic oligonucleotide; AAGGGT chr11 5287436 5287455 5287439 -
taattagtttgtttttgaga

SEQ ID NO: 62270 - DNA, 20 bp, Artificial Sequence
  Synthetic oligonucleotide; GGGAGT chr11 5287411 5287430 5287414 -
tctcactctgtcacccaaat

SEQ ID NO: 62271 - DNA, 20 bp, Artificial Sequence
  Synthetic oligonucleotide; CTGAGT chr11 5287335 5287354 5287338 -
ggtcctcccacctcaacatc

SEQ ID NO: 62272 - DNA, 20 bp, Artificial Sequence
  Synthetic oligonucleotide; TGGGGT chr11 5287269 5287288 5287272 -
ttttgtatttttggtagaga

SEQ ID NO: 62273 - DNA, 20 bp, Artificial Sequence
  Synthetic oligonucleotide; CAGGAT chr11 5287250 5287269 5287253 -
atggggtttcacatgttaca

SEQ ID NO: 62274 - DNA, 20 bp, Artificial Sequence
  Synthetic oligonucleotide; TGGGAT chr11 5287191 5287210 5287194 -
acctcagccttccaaagtgc

SEQ ID NO: 62275 - DNA, 20 bp, Artificial Sequence
  Synthetic oligonucleotide; AGGAGT chr11 5287170 5287189 5287173 -
gggattataagcatgattac

SEQ ID NO: 62276 - DNA, 20 bp, Artificial Sequence
  Synthetic oligonucleotide; CCGAGT chr11 5287134 5287153 5287137 -
tcataagattgttctgcagc

SEQ ID NO: 62277 - DNA, 20 bp, Artificial Sequence
  Synthetic oligonucleotide; GTGAGT chr11 5287130 5287149 5287133 -
aagattgttctgcagcccga

SEQ ID NO: 62278 - DNA, 20 bp, Artificial Sequence
  Synthetic oligonucleotide; AAGAGT chr11 5287113 5287132 5287116 -
cgagtgagttaatacatgca

SEQ ID NO: 62279 - DNA, 20 bp, Artificial Sequence
  Synthetic oligonucleotide; TTGGAT chr11 5286896 5286915 5286899 -
attaatcatatttaatactc

SEQ ID NO: 62280 - DNA, 20 bp, Artificial Sequence
  Synthetic oligonucleotide; TAGAAT chr11 5286777 5286796 5286780 -
cataaactactagcaaatag

SEQ ID NO: 62281 - DNA, 20 bp, Artificial Sequence
  Synthetic oligonucleotide; CTGGAT chr11 5286693 5286712 5286696 -
acttcttggcagtctgtatg

SEQ ID NO: 62282 - DNA, 20 bp, Artificial Sequence
  Synthetic oligonucleotide; GGGGAT chr11 5286684 5286703 5286687 -
cagtctgtatgctggatgct

SEQ ID NO: 62283 - DNA, 20 bp, Artificial Sequence
  Synthetic oligonucleotide; TGGGAT chr11 5286529 5286548 5286532 -
tattcgtctgtgtcctgctc

SEQ ID NO: 62284 - DNA, 20 bp, Artificial Sequence
  Synthetic oligonucleotide; AGGGGT chr11 5286456 5286475 5286459 -
aagactacaccatgtggaga

SEQ ID NO: 62285 - DNA, 20 bp, Artificial Sequence
  Synthetic oligonucleotide; TAGAGT chr11 5286372 5286391 5286375 -
gtggctctctggttgactgt

SEQ ID NO: 62286 - DNA, 20 bp, Artificial Sequence
  Synthetic oligonucleotide; ATGAAT chr11 5286328 5286347 5286331 -
gcctattatttaacaaatgc

SEQ ID NO: 62287 - DNA, 20 bp, Artificial Sequence
  Synthetic oligonucleotide; CAGAAT chr11 5286318 5286337 5286321 -
taacaaatgcatgaatgctt

SEQ ID NO: 62288 - DNA, 20 bp, Artificial Sequence
  Synthetic oligonucleotide; GGGAAT chr11 5286310 5286329 5286313 -
gcatgaatgcttcagaatat

SEQ ID NO: 62289 - DNA, 20 bp, Artificial Sequence
  Synthetic oligonucleotide; TGGAAT chr11 5286295 5286314 5286298 -
aatatgggaatattatcttc

SEQ ID NO: 62290 - DNA, 20 bp, Artificial Sequence
  Synthetic oligonucleotide; GGGAAT chr11 5286288 5286307 5286291 -
gaatattatcttctggaata

SEQ ID NO: 62291 - DNA, 20 bp, Artificial Sequence
  Synthetic oligonucleotide; CAGGAT chr11 5286263 5286282 5286266 -
tcaagttatattatgtaacc

SEQ ID NO: 62292 - DNA, 20 bp, Artificial Sequence
  Synthetic oligonucleotide; AAGAAT chr11 5286237 5286256 5286240 -
tagaagattcttctgtgtgt

SEQ ID NO: 62293 - DNA, 20 bp, Artificial Sequence
  Synthetic oligonucleotide; TTGAAT chr11 5286146 5286165 5286149 -
agaaagcttttaacccatca

SEQ ID NO: 62294 - DNA, 20 bp, Artificial Sequence
  Synthetic oligonucleotide; GGGGAT chr11 5286129 5286148 5286132 -
tcattgaataaatccctata

SEQ ID NO: 62295 - DNA, 20 bp, Artificial Sequence
  Synthetic oligonucleotide; ATGAAT chr11 5285962 5285981 5285965 -
ctctcataattcttggttgc

SEQ ID NO: 62296 - DNA, 20 bp, Artificial Sequence
  Synthetic oligonucleotide; CAGGGT chr11 5285916 5285935 5285919 -
tgagacaaactatggggaag

SEQ ID NO: 62297 - DNA, 20 bp, Artificial Sequence
  Synthetic oligonucleotide; CTGAAT chr11 5285899 5285918 5285902 -
aagcagggtatgaaagagct

SEQ ID NO: 62298 - DNA, 20 bp, Artificial Sequence
  Synthetic oligonucleotide; TTGGAT chr11 5285800 5285819 5285803 -
gcttaaaatcagaagcccca

SEQ ID NO: 62299 - DNA, 20 bp, Artificial Sequence
  Synthetic oligonucleotide; AAGAGT chr11 5285794 5285813 5285797 -
aatcagaagccccattggat

SEQ ID NO: 62300 - DNA, 20 bp, Artificial Sequence
  Synthetic oligonucleotide; AGGGAT chr11 5285717 5285736 5285720 -
gcctcctgccccgaacttcc

SEQ ID NO: 62301 - DNA, 20 bp, Artificial Sequence
  Synthetic oligonucleotide; TGGAAT chr11 5285690 5285709 5285693 -
ctctcttaagtgtttcctgc

SEQ ID NO: 62302 - DNA, 20 bp, Artificial Sequence
  Synthetic oligonucleotide; AAGAGT chr11 5285629 5285648 5285632 -
tccagcccctggctagttga

SEQ ID NO: 62303 - DNA, 20 bp, Artificial Sequence
  Synthetic oligonucleotide; CTGGAT chr11 5285554 5285573 5285557 -
tactttcagcgttggacaac

SEQ ID NO: 62304 - DNA, 20 bp, Artificial Sequence
  Synthetic oligonucleotide; GAGAAT chr11 5285460 5285479 5285463 -
gctgagatgatctatgtggg

SEQ ID NO: 62305 - DNA, 20 bp, Artificial Sequence
  Synthetic oligonucleotide; CAGAAT chr11 5285394 5285413 5285397 -
ctcattcccactttaatatc

SEQ ID NO: 62306 - DNA, 20 bp, Artificial Sequence
  Synthetic oligonucleotide; AAGAAT chr11 5285379 5285398 5285382 -
atatccagaatcactataag

SEQ ID NO: 62307 - DNA, 20 bp, Artificial Sequence
  Synthetic oligonucleotide; AGGAAT chr11 5285365 5285384 5285368 -
tataagaagaatataataag

SEQ ID NO: 62308 - DNA, 20 bp, Artificial Sequence
  Synthetic oligonucleotide; TGGGAT chr11 5285317 5285336 5285320 -
aaattaagaggcatacgtga

SEQ ID NO: 62309 - DNA, 20 bp, Artificial Sequence
  Synthetic oligonucleotide; ATGAGT chr11 5285313 5285332 5285316 -
taagaggcatacgtgatggg

SEQ ID NO: 62310 - DNA, 20 bp, Artificial Sequence
  Synthetic oligonucleotide; AAGGAT chr11 5285293 5285312 5285296 -
atgagtaagagaggagaggg

SEQ ID NO: 62311 - DNA, 20 bp, Artificial Sequence
  Synthetic oligonucleotide; AAGAGT chr11 5285147 5285166 5285150 -
catgacaagactgagctcag

SEQ ID NO: 62312 - DNA, 20 bp, Artificial Sequence
  Synthetic oligonucleotide; GAGGAT chr11 5285045 5285064 5285048 -
ccctgtgctgcactgatgag

SEQ ID NO: 62313 - DNA, 20 bp, Artificial Sequence
  Synthetic oligonucleotide; ATGGAT chr11 5285036 5285055 5285039 -
gcactgatgaggaggatcag

SEQ ID NO: 62314 - DNA, 20 bp, Artificial Sequence
  Synthetic oligonucleotide; AGGAAT chr11 5285015 5285034 5285018 -
tggatggggcaatgaagcaa

SEQ ID NO: 62315 - DNA, 20 bp, Artificial Sequence
  Synthetic oligonucleotide; GTGGAT chr11 5285003 5285022 5285006 -
tgaagcaaaggaatcattct

SEQ ID NO: 62316 - DNA, 20 bp, Artificial Sequence
  Synthetic oligonucleotide; AGGAGT chr11 5284952 5284971 5284955 -
atgactgtaaatttgggagc

SEQ ID NO: 62317 - DNA, 20 bp, Artificial Sequence
  Synthetic oligonucleotide; TTGGAT chr11 5284936 5284955 5284939 -
gagcaggagtctctaaggac

SEQ ID NO: 62318 - DNA, 20 bp, Artificial Sequence
  Synthetic oligonucleotide; AGGAAT chr11 5284926 5284945 5284929 -
ctctaaggacttggatttca

SEQ ID NO: 62319 - DNA, 20 bp, Artificial Sequence
  Synthetic oligonucleotide; GAGGGT chr11 5284843 5284862 5284846 -
tgtctatcagaggttccagg

SEQ ID NO: 62320 - DNA, 20 bp, Artificial Sequence
  Synthetic oligonucleotide; TGGGGT chr11 5284838 5284857 5284841 -
atcagaggttccagggaggg

SEQ ID NO: 62321 - DNA, 20 bp, Artificial Sequence
  Synthetic oligonucleotide; TGGGGT chr11 5284833 5284852 5284836 -
aggttccagggagggtgggg

SEQ ID NO: 62322 - DNA, 20 bp, Artificial Sequence
  Synthetic oligonucleotide; ATGGGT chr11 5284797 5284816 5284800 -
caccagctatcagggcccag

SEQ ID NO: 62323 - DNA, 20 bp, Artificial Sequence
  Synthetic oligonucleotide; CTGGGT chr11 5284745 5284764 5284748 -
gttaggtcaggttggtggtg

SEQ ID NO: 62324 - DNA, 20 bp, Artificial Sequence
  Synthetic oligonucleotide; TGGAGT chr11 5284740 5284759 5284743 -
gtcaggttggtggtgctggg

SEQ ID NO: 62325 - DNA, 20 bp, Artificial Sequence
  Synthetic oligonucleotide; ATGAGT chr11 5284702 5284721 5284705 -
ggagccaggagagatagacc

SEQ ID NO: 62326 - DNA, 20 bp, Artificial Sequence
  Synthetic oligonucleotide; CAGGAT chr11 5284575 5284594 5284578 -
tgccttgactcctatgtttt

SEQ ID NO: 62327 - DNA, 20 bp, Artificial Sequence
  Synthetic oligonucleotide; AAGAGT chr11 5284554 5284573 5284557 -
aggatcatcatctataaagt

SEQ ID NO: 62328 - DNA, 20 bp, Artificial Sequence
  Synthetic oligonucleotide; TAGGGT chr11 5284529 5284548 5284532 -
taataattgtgtctatctca

SEQ ID NO: 62329 - DNA, 20 bp, Artificial Sequence
  Synthetic oligonucleotide; GAGGAT chr11 5284517 5284536 5284520 -
ctatctcatagggttattat

SEQ ID NO: 62330 - DNA, 20 bp, Artificial Sequence
  Synthetic oligonucleotide; ATGGGT chr11 5284443 5284462 5284446 -
gagctatgggcttcctatgt

SEQ ID NO: 62331 - DNA, 20 bp, Artificial Sequence
  Synthetic oligonucleotide; TCGAAT chr11 5284289 5284308 5284292 -
accagctgctgcagtcaaag

SEQ ID NO: 62332 - DNA, 20 bp, Artificial Sequence
  Synthetic oligonucleotide; AGGAAT chr11 5284122 5284141 5284125 -
tctgaacatgagaaattttt

SEQ ID NO: 62333 - DNA, 20 bp, Artificial Sequence
  Synthetic oligonucleotide; AGGAGT chr11 5284110 5284129 5284113 -
aaatttttaggaatctgcac

SEQ ID NO: 62334 - DNA, 20 bp, Artificial Sequence
  Synthetic oligonucleotide; GGGAAT chr11 5284010 5284029 5284013 -
gaggtaaatgaaagagaagt

SEQ ID NO: 62335 - DNA, 20 bp, Artificial Sequence
  Synthetic oligonucleotide; TTGAGT chr11 5283871 5283890 5283874 -
ctaatgataagtaacacctc

SEQ ID NO: 62336 - DNA, 20 bp, Artificial Sequence
  Synthetic oligonucleotide; TAGAAT chr11 5283852 5283871 5283855 -
cttgagtacttagtatatgc

SEQ ID NO: 62337 - DNA, 20 bp, Artificial Sequence
  Synthetic oligonucleotide; TGGGAT chr11 5283801 5283820 5283804 -
cgggcacggtggctcatata

SEQ ID NO: 62338 - DNA, 20 bp, Artificial Sequence
  Synthetic oligonucleotide; TTGGAT chr11 5283755 5283774 5283758 -
actttgggaggccaaggcaa

SEQ ID NO: 62339 - DNA, 20 bp, Artificial Sequence
  Synthetic oligonucleotide; AGGAGT chr11 5283738 5283757 5283741 -
caattggatcacctgaggtc

SEQ ID NO: 62340 - DNA, 20 bp, Artificial Sequence
  Synthetic oligonucleotide; GAGAAT chr11 5283618 5283637 5283621 -
tactcaggaggctgaggcag

SEQ ID NO: 62341 - DNA, 20 bp, Artificial Sequence
  Synthetic oligonucleotide; CAGAGT chr11 5283545 5283564 5283548 -
ctgcactccagcctaggcga

SEQ ID NO: 62342 - DNA, 20 bp, Artificial Sequence
  Synthetic oligonucleotide; ATGAAT chr11 5283501 5283520 5283504 -
aaaaaaaagaagtttattat

SEQ ID NO: 62343 - DNA, 20 bp, Artificial Sequence
  Synthetic oligonucleotide; TAGGAT chr11 5283242 5283261 5283245 -
gaaccaccaagtagtaaggc

SEQ ID NO: 62344 - DNA, 20 bp, Artificial Sequence
  Synthetic oligonucleotide; GTGGAT chr11 5283170 5283189 5283173 -
aaaacacaaactcagatatt

SEQ ID NO: 62345 - DNA, 20 bp, Artificial Sequence
  Synthetic oligonucleotide; CAGAAT chr11 5282987 5283006 5282990 -
gaaaaatttagaaacaactt

SEQ ID NO: 62346 - DNA, 20 bp, Artificial Sequence
  Synthetic oligonucleotide; TTGGGT chr11 5282967 5282986 5282970 -
cagaataaagagattttctc

SEQ ID NO: 62347 - DNA, 20 bp, Artificial Sequence
  Synthetic oligonucleotide; GGGAGT chr11 5282851 5282870 5282854 -
aagctgcaactttggttaaa

SEQ ID NO: 62348 - DNA, 20 bp, Artificial Sequence
  Synthetic oligonucleotide; AGGAAT chr11 5282683 5282702 5282686 -
tgagggccctaaactatgct

SEQ ID NO: 62349 - DNA, 20 bp, Artificial Sequence
  Synthetic oligonucleotide; CCGGGT chr11 5282608 5282627 5282611 -
attctctgcatctccctttg

SEQ ID NO: 62350 - DNA, 20 bp, Artificial Sequence
  Synthetic oligonucleotide; AAGAAT chr11 5282498 5282517 5282501 -
ttgtctttctcatctgtaaa

SEQ ID NO: 62351 - DNA, 20 bp, Artificial Sequence
  Synthetic oligonucleotide; TAGAGT chr11 5282446 5282465 5282449 -
ctatgtcttccctgatgggc

SEQ ID NO: 62352 - DNA, 20 bp, Artificial Sequence
  Synthetic oligonucleotide; AAGGGT chr11 5282334 5282353 5282337 -
gtcaaaagtaggctaagtag

SEQ ID NO: 62353 - DNA, 20 bp, Artificial Sequence
  Synthetic oligonucleotide; GTGGGT chr11 5282300 5282319 5282303 -
aggaacagagagcaaaagag

SEQ ID NO: 62354 - DNA, 20 bp, Artificial Sequence
  Synthetic oligonucleotide; GTGAAT chr11 5282296 5282315 5282299 -
acagagagcaaaagaggtgg

SEQ ID NO: 62355 - DNA, 20 bp, Artificial Sequence
  Synthetic oligonucleotide; GAGGGT chr11 5282288 5282307 5282291 -
caaaagaggtgggtgaatga

SEQ ID NO: 62356 - DNA, 20 bp, Artificial Sequence
  Synthetic oligonucleotide; GGGAAT chr11 5282222 5282241 5282225 -
tgttgtctaaatatctccta

SEQ ID NO: 62357 - DNA, 20 bp, Artificial Sequence
  Synthetic oligonucleotide; CTGAAT chr11 5282203 5282222 5282206 -
agggaattattgtgagaggt

SEQ ID NO: 62358 - DNA, 20 bp, Artificial Sequence
  Synthetic oligonucleotide; CTGAAT chr11 5282181 5282200 5282184 -
gaatagtgttgtaaaataag

SEQ ID NO: 62359 - DNA, 20 bp, Artificial Sequence
  Synthetic oligonucleotide; CCGAAT chr11 5282143 5282162 5282146 -
ttaacagtcaagaaatacct

SEQ ID NO: 62360 - DNA, 20 bp, Artificial Sequence
  Synthetic oligonucleotide; CTGAAT chr11 5282047 5282066 5282050 -
actgtaacagaaaacactta

SEQ ID NO: 62361 - DNA, 20 bp, Artificial Sequence
  Synthetic oligonucleotide; AGGGAT chr11 5281823 5281842 5281826 -
gttgattgccttaattcatc

SEQ ID NO: 62362 - DNA, 20 bp, Artificial Sequence
  Synthetic oligonucleotide; ATGAGT chr11 5281695 5281714 5281698 -
gaaaggcagagctgactgtg

SEQ ID NO: 62363 - DNA, 20 bp, Artificial Sequence
  Synthetic oligonucleotide; CTGGGT chr11 5281670 5281689 5281673 -
tgatgaaggtgccttctcat

SEQ ID NO: 62364 - DNA, 20 bp, Artificial Sequence
  Synthetic oligonucleotide; GAGAAT chr11 5281583 5281602 5281586 -
gcttgccctgatgggagata

SEQ ID NO: 62365 - DNA, 20 bp, Artificial Sequence
  Synthetic oligonucleotide; ATGGGT chr11 5281579 5281598 5281582 -
gccctgatgggagatagaga

SEQ ID NO: 62366 - DNA, 20 bp, Artificial Sequence
  Synthetic oligonucleotide; GTGGGT chr11 5281363 5281382 5281366 -
cagcactttgggaggctgag

SEQ ID NO: 62367 - DNA, 20 bp, Artificial Sequence
  Synthetic oligonucleotide; AGGAGT chr11 5281341 5281360 5281344 -
gggtggactgcttggagctc

SEQ ID NO: 62368 - DNA, 20 bp, Artificial Sequence
  Synthetic oligonucleotide; TAGGGT chr11 5281240 5281259 5281243 -
gcacctgtaatcccagctat

SEQ ID NO: 62369 - DNA, 20 bp, Artificial Sequence
  Synthetic oligonucleotide; GAGAAT chr11 5281223 5281242 5281226 -
tattagggtggctgaggcag

SEQ ID NO: 62370 - DNA, 20 bp, Artificial Sequence
  Synthetic oligonucleotide; GGGAAT chr11 5281104 5281123 5281107 -
tttttacttggactcttgtg

SEQ ID NO: 62371 - DNA, 20 bp, Artificial Sequence
  Synthetic oligonucleotide; CTGAAT chr11 5281017 5281036 5281020 -
aggtgcttcaaaaccatttg

SEQ ID NO: 62372 - DNA, 20 bp, Artificial Sequence
  Synthetic oligonucleotide; CGGGGT chr11 5280848 5280867 5280851 -
agttctggccaggcccctgt

SEQ ID NO: 62373 - DNA, 20 bp, Artificial Sequence
  Synthetic oligonucleotide; CTGAGT chr11 5280771 5280790 5280774 -
ctggctcaagcacagcaatg

SEQ ID NO: 62374 - DNA, 20 bp, Artificial Sequence
  Synthetic oligonucleotide; ATGAGT chr11 5280761 5280780 5280764 -
cacagcaatgctgagtcatg

SEQ ID NO: 62375 - DNA, 20 bp, Artificial Sequence
  Synthetic oligonucleotide; TAGGGT chr11 5280743 5280762 5280746 -
tgatgagtcatgctgaggct

SEQ ID NO: 62376 - DNA, 20 bp, Artificial Sequence
  Synthetic oligonucleotide; TAGAGT chr11 5280715 5280734 5280718 -
gtgcccagatgttctcagcc

SEQ ID NO: 62377 - DNA, 20 bp, Artificial Sequence
  Synthetic oligonucleotide; CTGGGT chr11 5280697 5280716 5280700 -
cctagagtgatgactcctat

SEQ ID NO: 62378 - DNA, 20 bp, Artificial Sequence
  Synthetic oligonucleotide; CAGGAT chr11 5280685 5280704 5280688 -
actcctatctgggtccccag

SEQ ID NO: 62379 - DNA, 20 bp, Artificial Sequence
  Synthetic oligonucleotide; ATGGAT chr11 5280600 5280619 5280603 -
caaacggcatcataaagaaa

SEQ ID NO: 62380 - DNA, 20 bp, Artificial Sequence
  Synthetic oligonucleotide; CAGAAT chr11 5280586 5280605 5280589 -
aagaaaatggatgcctgaga

SEQ ID NO: 62381 - DNA, 20 bp, Artificial Sequence
  Synthetic oligonucleotide; TAGAAT chr11 5280569 5280588 5280572 -
agacagaatgtgacatattc

SEQ ID NO: 62382 - DNA, 20 bp, Artificial Sequence
  Synthetic oligonucleotide; CTGAAT chr11 5280553 5280572 5280556 -
attctagaatatattatttc

SEQ ID NO: 62383 - DNA, 20 bp, Artificial Sequence
  Synthetic oligonucleotide; TAGAAT chr11 5280480 5280499 5280483 -
tttgttgttatcaattgcca

SEQ ID NO: 62384 - DNA, 20 bp, Artificial Sequence
  Synthetic oligonucleotide; GTGAAT chr11 5280463 5280482 5280466 -
ccatagaatgattagttatt

SEQ ID NO: 62385 - DNA, 20 bp, Artificial Sequence
  Synthetic oligonucleotide; CAGAAT chr11 5280416 5280435 5280419 -
gcctctatacctagaagcgg

SEQ ID NO: 62386 - DNA, 20 bp, Artificial Sequence
  Synthetic oligonucleotide; TAGGAT chr11 5280379 5280398 5280382 -
aatacatgtgtatagatttt

SEQ ID NO: 62387 - DNA, 20 bp, Artificial Sequence
  Synthetic oligonucleotide; AAGGAT chr11 5280348 5280367 5280351 -
cacatgtattaatatgaaac

SEQ ID NO: 62388 - DNA, 20 bp, Artificial Sequence
  Synthetic oligonucleotide; CGGGGT chr11 5280224 5280243 5280227 -
agaggacacatgctcacata

SEQ ID NO: 62389 - DNA, 20 bp, Artificial Sequence
  Synthetic oligonucleotide; TGGGGT chr11 5280207 5280226 5280210 -
atacggggtcagatctgact

SEQ ID NO: 62390 - DNA, 20 bp, Artificial Sequence
  Synthetic oligonucleotide; AAGGAT chr11 5280179 5280198 5280182 -
tactgggaagctctcatctt

SEQ ID NO: 62391 - DNA, 20 bp, Artificial Sequence
  Synthetic oligonucleotide; AAGGGT chr11 5280088 5280107 5280091 -
cattcctccaggagagctaa

SEQ ID NO: 62392 - DNA, 20 bp, Artificial Sequence
  Synthetic oligonucleotide; GTGGGT chr11 5280074 5280093 5280077 -
agctaaaagggttcacctgt

SEQ ID NO: 62393 - DNA, 20 bp, Artificial Sequence
  Synthetic oligonucleotide; GAGGAT chr11 5280050 5280069 5280053 -
gtaactgtgaaggactacaa

SEQ ID NO: 62394 - DNA, 20 bp, Artificial Sequence
  Synthetic oligonucleotide; GGGGAT chr11 5279990 5280009 5279993 -
gagaaaaaacaggaggtcaa

SEQ ID NO: 62395 - DNA, 20 bp, Artificial Sequence
  Synthetic oligonucleotide; AAGAAT chr11 5279969 5279988 5279972 -
gggatagagaaggcttccag

SEQ ID NO: 62396 - DNA, 20 bp, Artificial Sequence
  Synthetic oligonucleotide; AGGAGT chr11 5279942 5279961 5279945 -
gctttgaagctggcttctgt

SEQ ID NO: 62397 - DNA, 20 bp, Artificial Sequence
  Synthetic oligonucleotide; AGGAAT chr11 5279833 5279852 5279836 -
attagttcaacagacatgca

SEQ ID NO: 62398 - DNA, 20 bp, Artificial Sequence
  Synthetic oligonucleotide; ATGAAT chr11 5279821 5279840 5279824 -
gacatgcaaggaattttcag

SEQ ID NO: 62399 - DNA, 20 bp, Artificial Sequence
  Synthetic oligonucleotide; GAGGGT chr11 5279777 5279796 5279780 -
ttcttgaggttagcagctgt

SEQ ID NO: 62400 - DNA, 20 bp, Artificial Sequence
  Synthetic oligonucleotide; GTGAAT chr11 5279707 5279726 5279710 -
actgttttttgtattcattt

SEQ ID NO: 62401 - DNA, 20 bp, Artificial Sequence
  Synthetic oligonucleotide; ATGAAT chr11 5279703 5279722 5279706 -
ttttttgtattcatttgtga

SEQ ID NO: 62402 - DNA, 20 bp, Artificial Sequence
  Synthetic oligonucleotide; GTGAAT chr11 5279668 5279687 5279671 -
tcagtctactcggtttcgct

SEQ ID NO: 62403 - DNA, 20 bp, Artificial Sequence
  Synthetic oligonucleotide; ATGAAT chr11 5279664 5279683 5279667 -
tctactcggtttcgctgtga

SEQ ID NO: 62404 - DNA, 20 bp, Artificial Sequence
  Synthetic oligonucleotide; AAGAGT chr11 5279489 5279508 5279492 -
taagaaaggaaatcaacctg

SEQ ID NO: 62405 - DNA, 20 bp, Artificial Sequence
  Synthetic oligonucleotide; GAGAGT chr11 5279460 5279479 5279463 -
tatacagataacaaaataca

SEQ ID NO: 62406 - DNA, 20 bp, Artificial Sequence
  Synthetic oligonucleotide; GTGAGT chr11 5279456 5279475 5279459 -
cagataacaaaatacagaga

SEQ ID NO: 62407 - DNA, 20 bp, Artificial Sequence
  Synthetic oligonucleotide; TGGAAT chr11 5279423 5279442 5279426 -
gtaataactgtggcacaggc

SEQ ID NO: 62408 - DNA, 20 bp, Artificial Sequence
  Synthetic oligonucleotide; ATGGAT chr11 5279362 5279381 5279365 -
aacagtggggaaaaaattcc

SEQ ID NO: 62409 - DNA, 20 bp, Artificial Sequence
  Synthetic oligonucleotide; ATGGGT chr11 5279358 5279377 5279361 -
gtggggaaaaaattccatgg

SEQ ID NO: 62410 - DNA, 20 bp, Artificial Sequence
  Synthetic oligonucleotide; TTGAGT chr11 5279327 5279346 5279330 -
aagactagcattgttttagg

SEQ ID NO: 62411 - DNA, 20 bp, Artificial Sequence
  Synthetic oligonucleotide; AAGGGT chr11 5279310 5279329 5279313 -
aggttgagtggcagtgttta

SEQ ID NO: 62412 - DNA, 20 bp, Artificial Sequence
  Synthetic oligonucleotide; TAGAAT chr11 5279267 5279286 5279270 -
gaaatatgtggctaaataac

SEQ ID NO: 62413 - DNA, 20 bp, Artificial Sequence
  Synthetic oligonucleotide; ATGAAT chr11 5279241 5279260 5279244 -
actctttattttttcgtatc

SEQ ID NO: 62414 - DNA, 20 bp, Artificial Sequence
  Synthetic oligonucleotide; TTGAAT chr11 5279013 5279032 5279016 -
agtactcaaagcttgttaaa

SEQ ID NO: 62415 - DNA, 20 bp, Artificial Sequence
  Synthetic oligonucleotide; AGGGAT chr11 5278963 5278982 5278966 -
acatggaggaaaaactcatc

SEQ ID NO: 62416 - DNA, 20 bp, Artificial Sequence
  Synthetic oligonucleotide; TTGGGT chr11 5278913 5278932 5278916 -
ggtgtggctctgcagtgtga

SEQ ID NO: 62417 - DNA, 20 bp, Artificial Sequence
  Synthetic oligonucleotide; AAGGGT chr11 5278895 5278914 5278898 -
gattgggtacttgcaggacg

SEQ ID NO: 62418 - DNA, 20 bp, Artificial Sequence
  Synthetic oligonucleotide; TGGGGT chr11 5278890 5278909 5278893 -
ggtacttgcaggacgaaggg

SEQ ID NO: 62419 - DNA, 20 bp, Artificial Sequence
  Synthetic oligonucleotide; GGGAGT chr11 5278884 5278903 5278887 -
tgcaggacgaagggtggggt

SEQ ID NO: 62420 - DNA, 20 bp, Artificial Sequence
  Synthetic oligonucleotide; AGGAGT chr11 5278756 5278775 5278759 -
tgggcagatcacttgaggtc

SEQ ID NO: 62421 - DNA, 20 bp, Artificial Sequence
  Synthetic oligonucleotide; GAGAAT chr11 5278638 5278657 5278641 -
tacttgggaggctgaggcag

SEQ ID NO: 62422 - DNA, 20 bp, Artificial Sequence
  Synthetic oligonucleotide; TGGAGT chr11 5278615 5278634 5278618 -
aatcgcttgaaccggggagg

SEQ ID NO: 62423 - DNA, 20 bp, Artificial Sequence
  Synthetic oligonucleotide; CAGAAT chr11 5278490 5278509 5278493 -
catcaaattccctgaccgaa

SEQ ID NO: 62424 - DNA, 20 bp, Artificial Sequence
  Synthetic oligonucleotide; TAGAGT chr11 5278152 5278171 5278155 -
agccagaaattagcatgcac

SEQ ID NO: 62425 - DNA, 20 bp, Artificial Sequence
  Synthetic oligonucleotide; ATGAGT chr11 5278142 5278161 5278145 -
tagcatgcactagagtgtgc

SEQ ID NO: 62426 - DNA, 20 bp, Artificial Sequence
  Synthetic oligonucleotide; AAGGAT chr11 5278075 5278094 5278078 -
atcctgttggtttttcgtga

SEQ ID NO: 62427 - DNA, 20 bp, Artificial Sequence
  Synthetic oligonucleotide; TAGAGT chr11 5277720 5277739 5277723 -
tatatttatgtgtatgtgtg

SEQ ID NO: 62428 - DNA, 20 bp, Artificial Sequence
  Synthetic oligonucleotide; CCGAAT chr11 5277620 5277639 5277623 -
atcttttattctccccttca

SEQ ID NO: 62429 - DNA, 20 bp, Artificial Sequence
  Synthetic oligonucleotide; TAGGGT chr11 5277557 5277576 5277560 -
ttctaagcatcttacatctt

SEQ ID NO: 62430 - DNA, 20 bp, Artificial Sequence
  Synthetic oligonucleotide; ATGGGT chr11 5277498 5277517 5277501 -
ttaatcatagtttcatataa

SEQ ID NO: 62431 - DNA, 20 bp, Artificial Sequence
  Synthetic oligonucleotide; ATGGGT chr11 5277480 5277499 5277483 -
aaatgggttcctcatcatct

SEQ ID NO: 62432 - DNA, 20 bp, Artificial Sequence
  Synthetic oligonucleotide; TTGAAT chr11 5277214 5277233 5277217 -
ttcttagcaattttacaatt

SEQ ID NO: 62433 - DNA, 20 bp, Artificial Sequence
  Synthetic oligonucleotide; ATGAAT chr11 5277210 5277229 5277213 -
tagcaattttacaattttga

SEQ ID NO: 62434 - DNA, 20 bp, Artificial Sequence
  Synthetic oligonucleotide; ATGAAT chr11 5277206 5277225 5277209 -
aattttacaattttgaatga

SEQ ID NO: 62435 - DNA, 20 bp, Artificial Sequence
  Synthetic oligonucleotide; AAGGAT chr11 5277168 5277187 5277171 -
acatatacaactataattaa

SEQ ID NO: 62436 - DNA, 20 bp, Artificial Sequence
  Synthetic oligonucleotide; TGGAGT chr11 5277119 5277138 5277122 -
tgcacacacaaagaaatcag

SEQ ID NO: 62437 - DNA, 20 bp, Artificial Sequence
  Synthetic oligonucleotide; TGGGAT chr11 5277054 5277073 5277057 -
ctccgcaggcagagccttga

SEQ ID NO: 62438 - DNA, 20 bp, Artificial Sequence
  Synthetic oligonucleotide; CTGAGT chr11 5277046 5277065 5277049 -
gcagagccttgatgggatta

SEQ ID NO: 62439 - DNA, 20 bp, Artificial Sequence
  Synthetic oligonucleotide; TAGAAT chr11 5277038 5277057 5277041 -
ttgatgggattactgagttc

SEQ ID NO: 62440 - DNA, 20 bp, Artificial Sequence
  Synthetic oligonucleotide; ATGAAT chr11 5276960 5276979 5276963 -
caaaataaaaggctcaaaag

SEQ ID NO: 62441 - DNA, 20 bp, Artificial Sequence
  Synthetic oligonucleotide; CAGGGT chr11 5276946 5276965 5276949 -
caaaagatgaatatcgaaac

SEQ ID NO: 62442 - DNA, 20 bp, Artificial Sequence
  Synthetic oligonucleotide; TGGAAT chr11 5276929 5276948 5276932 -
aaccagggtgttttttacac

SEQ ID NO: 62443 - DNA, 20 bp, Artificial Sequence
  Synthetic oligonucleotide; AAGGAT chr11 5276760 5276779 5276763 -
tattcatccatcttcatggg

SEQ ID NO: 62444 - DNA, 20 bp, Artificial Sequence
  Synthetic oligonucleotide; GAGAAT chr11 5276620 5276639 5276623 -
taagcatacttctattcaat

SEQ ID NO: 62445 - DNA, 20 bp, Artificial Sequence
  Synthetic oligonucleotide; AAGAAT chr11 5276595 5276614 5276598 -
tattctgtaagattatagtt

SEQ ID NO: 62446 - DNA, 20 bp, Artificial Sequence
  Synthetic oligonucleotide; TGGGGT chr11 5276511 5276530 5276514 -
ttttaatatgctttaagttc

SEQ ID NO: 62447 - DNA, 20 bp, Artificial Sequence
  Synthetic oligonucleotide; ATGGAT chr11 5276375 5276394 5276378 -
atgttcccctccctgtgtcc

SEQ ID NO: 62448 - DNA, 20 bp, Artificial Sequence
  Synthetic oligonucleotide; TGGAAT chr11 5276318 5276337 5276321 -
taaagtctcagttaaatttt

SEQ ID NO: 62449 - DNA, 20 bp, Artificial Sequence
  Synthetic oligonucleotide; ATGGGT chr11 5275895 5275914 5275898 -
caagtctaaagaaaaaaata

SEQ ID NO: 62450 - DNA, 20 bp, Artificial Sequence
  Synthetic oligonucleotide; CTGAAT chr11 5275761 5275780 5275764 -
gagactggtgacactagtgt

SEQ ID NO: 62451 - DNA, 20 bp, Artificial Sequence
  Synthetic oligonucleotide; TTGAGT chr11 5275750 5275769 5275753 -
cactagtgtctgaatgaggc

SEQ ID NO: 62452 - DNA, 20 bp, Artificial Sequence
  Synthetic oligonucleotide; TAGAAT chr11 5275622 5275641 5275625 -
agaacaaactcctgtggggc

SEQ ID NO: 62453 - DNA, 20 bp, Artificial Sequence
  Synthetic oligonucleotide; ATGGAT chr11 5275514 5275533 5275517 -
gttttccatatttcctcatg

SEQ ID NO: 62454 - DNA, 20 bp, Artificial Sequence
  Synthetic oligonucleotide; CAGAAT chr11 5275295 5275314 5275298 -
gctttatgttgctgttgttt

SEQ ID NO: 62455 - DNA, 20 bp, Artificial Sequence
  Synthetic oligonucleotide; TGGAAT chr11 5275241 5275260 5275244 -
ctcagttctagcactagagg

SEQ ID NO: 62456 - DNA, 20 bp, Artificial Sequence
  Synthetic oligonucleotide; TTGAAT chr11 5275161 5275180 5275164 -
tgcacttaaaatagtctcat

SEQ ID NO: 62457 - DNA, 20 bp, Artificial Sequence
  Synthetic oligonucleotide; CAGAGT chr11 5275115 5275134 5275118 -
aagcacattctgaactactt

SEQ ID NO: 62458 - DNA, 20 bp, Artificial Sequence
  Synthetic oligonucleotide; AAGAAT chr11 5275043 5275062 5275046 -
caatttaattaaaaaaaccc

SEQ ID NO: 62459 - DNA, 20 bp, Artificial Sequence
  Synthetic oligonucleotide; TAGAAT chr11 5275033 5275052 5275036 -
aaaaaaacccaagaatttct

SEQ ID NO: 62460 - DNA, 20 bp, Artificial Sequence
  Synthetic oligonucleotide; TGGGAT chr11 5274933 5274952 5274936 -
agctatatttcagcggaaaa

SEQ ID NO: 62461 - DNA, 20 bp, Artificial Sequence
  Synthetic oligonucleotide; ATGAGT chr11 5274923 5274942 5274926 -
cagcggaaaatgggatattt

SEQ ID NO: 62462 - DNA, 20 bp, Artificial Sequence
  Synthetic oligonucleotide; TAGGAT chr11 5274734 5274753 5274737 -
tcccgaggtcagtcacacaa

SEQ ID NO: 62463 - DNA, 20 bp, Artificial Sequence
  Synthetic oligonucleotide; GAGAAT chr11 5274690 5274709 5274693 -
cagagagagagattactctt

SEQ ID NO: 62464 - DNA, 20 bp, Artificial Sequence
  Synthetic oligonucleotide; GAGGGT chr11 5274544 5274563 5274547 -
acgcatactggggcctatca

SEQ ID NO: 62465 - DNA, 20 bp, Artificial Sequence
  Synthetic oligonucleotide; GAGGGT chr11 5274537 5274556 5274540 -
ctggggcctatcagagggtg

SEQ ID NO: 62466 - DNA, 20 bp, Artificial Sequence
  Synthetic oligonucleotide; GAGGAT chr11 5274521 5274540 5274524 -
ggtggagggtgagagaagga

SEQ ID NO: 62467 - DNA, 20 bp, Artificial Sequence
  Synthetic oligonucleotide; ATGGAT chr11 5274500 5274519 5274503 -
aggatcaggaaaaatcacta

SEQ ID NO: 62468 - DNA, 20 bp, Artificial Sequence
  Synthetic oligonucleotide; CTGAGT chr11 5274480 5274499 5274483 -
atggatgctaagcgtaatac

SEQ ID NO: 62469 - DNA, 20 bp, Artificial Sequence
  Synthetic oligonucleotide; CAGAAT chr11 5274275 5274294 5274278 -
ggcttcctgcaaggcagcca

SEQ ID NO: 62470 - DNA, 20 bp, Artificial Sequence
  Synthetic oligonucleotide; CTGGAT chr11 5274242 5274261 5274245 -
ttgtgatatccaagtcattc

SEQ ID NO: 62471 - DNA, 20 bp, Artificial Sequence
  Synthetic oligonucleotide; TAGAAT chr11 5274210 5274229 5274213 -
aaatctaacacaaaatctag

SEQ ID NO: 62472 - DNA, 20 bp, Artificial Sequence
  Synthetic oligonucleotide; GAGAAT chr11 5274178 5274197 5274181 -
cttacatctatttttgttct

SEQ ID NO: 62473 - DNA, 20 bp, Artificial Sequence
  Synthetic oligonucleotide; CAGAAT chr11 5274148 5274167 5274151 -
atttagatacataatggaag

SEQ ID NO: 62474 - DNA, 20 bp, Artificial Sequence
  Synthetic oligonucleotide; TAGAAT chr11 5274122 5274141 5274125 -
aatttaaaatctggctaatt

SEQ ID NO: 62475 - DNA, 20 bp, Artificial Sequence
  Synthetic oligonucleotide; AAGAAT chr11 5274025 5274044 5274028 -
aaagtaagttatttgtggta

SEQ ID NO: 62476 - DNA, 20 bp, Artificial Sequence
  Synthetic oligonucleotide; AAGAAT chr11 5273944 5273963 5273947 -
aagggcctactttacttaac

SEQ ID NO: 62477 - DNA, 20 bp, Artificial Sequence
  Synthetic oligonucleotide; TTGGAT chr11 5273832 5273851 5273835 -
cagaaagatttaagaaaata

SEQ ID NO: 62478 - DNA, 20 bp, Artificial Sequence
  Synthetic oligonucleotide; TAGAAT chr11 5273792 5273811 5273795 -
attaggcatcttacagtttt

SEQ ID NO: 62479 - DNA, 20 bp, Artificial Sequence
  Synthetic oligonucleotide; AGGAAT chr11 5273736 5273755 5273739 -
taaagcaaacccaaacaggc

SEQ ID NO: 62480 - DNA, 20 bp, Artificial Sequence
  Synthetic oligonucleotide; TCGAAT chr11 5273721 5273740 5273724 -
caggcaggaattaatcttca

SEQ ID NO: 62481 - DNA, 20 bp, Artificial Sequence
  Synthetic oligonucleotide; TTGGGT chr11 5273715 5273734 5273718 -
ggaattaatcttcatcgaat

SEQ ID NO: 62482 - DNA, 20 bp, Artificial Sequence
  Synthetic oligonucleotide; ATGAAT chr11 5273624 5273643 5273627 -
tttaattatatagacaataa

SEQ ID NO: 62483 - DNA, 20 bp, Artificial Sequence
  Synthetic oligonucleotide; CTGGAT chr11 5273571 5273590 5273574 -
tctaatctttctgatctatc

SEQ ID NO: 62484 - DNA, 20 bp, Artificial Sequence
  Synthetic oligonucleotide; CTGAGT chr11 5273381 5273400 5273384 -
gcccgcagcctacctgactt

SEQ ID NO: 62485 - DNA, 20 bp, Artificial Sequence
  Synthetic oligonucleotide; CAGGAT chr11 5273375 5273394 5273378 -
agcctacctgacttctgagt

SEQ ID NO: 62486 - DNA, 20 bp, Artificial Sequence
  Synthetic oligonucleotide; TGGAAT chr11 5273275 5273294 5273278 -
cctttagccataaggaaaca

SEQ ID NO: 62487 - DNA, 20 bp, Artificial Sequence
  Synthetic oligonucleotide; ATGGGT chr11 5273271 5273290 5273274 -
tagccataaggaaacatgga

SEQ ID NO: 62488 - DNA, 20 bp, Artificial Sequence
  Synthetic oligonucleotide; CTGGAT chr11 5273258 5273277 5273261 -
acatggaatgggtcagatcc

SEQ ID NO: 62489 - DNA, 20 bp, Artificial Sequence
  Synthetic oligonucleotide; GAGGAT chr11 5273175 5273194 5273178 -
ctggctccgagggagcagga

SEQ ID NO: 62490 - DNA, 20 bp, Artificial Sequence
  Synthetic oligonucleotide; CTGAAT chr11 5273157 5273176 5273160 -
gagaggatcaaccccatact

SEQ ID NO: 62491 - DNA, 20 bp, Artificial Sequence
  Synthetic oligonucleotide; CTGAAT chr11 5273126 5273145 5273129 -
agaagactggtgtccatact

SEQ ID NO: 62492 - DNA, 20 bp, Artificial Sequence
  Synthetic oligonucleotide; AAGAAT chr11 5273117 5273136 5273120 -
gtgtccatactctgaatggg

SEQ ID NO: 62493 - DNA, 20 bp, Artificial Sequence
  Synthetic oligonucleotide; TGGGAT chr11 5273109 5273128 5273112 -
actctgaatgggaagaatga

SEQ ID NO: 62494 - DNA, 20 bp, Artificial Sequence
  Synthetic oligonucleotide; GTGGAT chr11 5272966 5272985 5272969 -
agggccactgccttcatact

SEQ ID NO: 62495 - DNA, 20 bp, Artificial Sequence
  Synthetic oligonucleotide; CTGAGT chr11 5272878 5272897 5272881 -
atctcaacgactgttcttct

SEQ ID NO: 62496 - DNA, 20 bp, Artificial Sequence
  Synthetic oligonucleotide; GTGGAT chr11 5272800 5272819 5272803 -
gtcattgttcttttatttca

SEQ ID NO: 62497 - DNA, 20 bp, Artificial Sequence
  Synthetic oligonucleotide; TAGGAT chr11 5272773 5272792 5272776 -
aaatacgttctttccaaacc

SEQ ID NO: 62498 - DNA, 20 bp, Artificial Sequence
  Synthetic oligonucleotide; TGGGGT chr11 5272723 5272742 5272726 -
tgtcccaggaagtcttaatc

SEQ ID NO: 62499 - DNA, 20 bp, Artificial Sequence
  Synthetic oligonucleotide; TTGAAT chr11 5272627 5272646 5272630 -
atttagcattttcttctact

SEQ ID NO: 62500 - DNA, 20 bp, Artificial Sequence
  Synthetic oligonucleotide; TAGAAT chr11 5272608 5272627 5272611 -
tttgaatgcaaaggacaaac

SEQ ID NO: 62501 - DNA, 20 bp, Artificial Sequence
  Synthetic oligonucleotide; TGGAGT chr11 5272499 5272518 5272502 -
gtttttgtttttgtttgaga

SEQ ID NO: 62502 - DNA, 20 bp, Artificial Sequence
  Synthetic oligonucleotide; TGGAGT chr11 5272473 5272492 5272476 -
ttcgctcttattgcccaggc

SEQ ID NO: 62503 - DNA, 20 bp, Artificial Sequence
  Synthetic oligonucleotide; CTGAGT chr11 5272397 5272416 5272400 -
aattctcctgccttggcctc

SEQ ID NO: 62504 - DNA, 20 bp, Artificial Sequence
  Synthetic oligonucleotide; GGGGAT chr11 5272387 5272406 5272390 -
ccttggcctcctgagtagct

SEQ ID NO: 62505 - DNA, 20 bp, Artificial Sequence
  Synthetic oligonucleotide; TGGGGT chr11 5272331 5272350 5272334 -
ttttgtatttttagtagaga

SEQ ID NO: 62506 - DNA, 20 bp, Artificial Sequence
  Synthetic oligonucleotide; TGGGAT chr11 5272252 5272271 5272255 -
gccttggcctcctgaagtgc

SEQ ID NO: 62507 - DNA, 20 bp, Artificial Sequence
  Synthetic oligonucleotide; TTGGAT chr11 5272178 5272197 5272181 -
acatttatctgcatcactac

SEQ ID NO: 62508 - DNA, 20 bp, Artificial Sequence
  Synthetic oligonucleotide; AGGAAT chr11 5271958 5271977 5271961 -
ctgtgacacaaaaaaagttt

SEQ ID NO: 62509 - DNA, 20 bp, Artificial Sequence
  Synthetic oligonucleotide; TAGAAT chr11 5271923 5271942 5271926 -
tgtctgtgttagccaatggt

SEQ ID NO: 62510 - DNA, 20 bp, Artificial Sequence
  Synthetic oligonucleotide; TGGAGT chr11 5271875 5271894 5271878 -
ggttaatagctaaaagaaaa

SEQ ID NO: 62511 - DNA, 20 bp, Artificial Sequence
  Synthetic oligonucleotide; TGGAAT chr11 5271854 5271873 5271857 -
ggagtagaaattcagtggcc

SEQ ID NO: 62512 - DNA, 20 bp, Artificial Sequence
  Synthetic oligonucleotide; TGGAAT chr11 5271808 5271827 5271811 -
ttaagtcaggtgaagacttc

SEQ ID NO: 62513 - DNA, 20 bp, Artificial Sequence
  Synthetic oligonucleotide; TGGAAT chr11 5271667 5271686 5271670 -
agaaacgctcttagtaaact

SEQ ID NO: 62514 - DNA, 20 bp, Artificial Sequence
  Synthetic oligonucleotide; TGGAAT chr11 5271660 5271679 5271663 -
ctcttagtaaacttggaata

SEQ ID NO: 62515 - DNA, 20 bp, Artificial Sequence
  Synthetic oligonucleotide; ATGGAT chr11 5271502 5271521 5271505 -
aggagaaagaaatggtagaa

SEQ ID NO: 62516 - DNA, 20 bp, Artificial Sequence
  Synthetic oligonucleotide; GAGAAT chr11 5271343 5271362 5271346 -
tgctcgggaggctgaggcag

SEQ ID NO: 62517 - DNA, 20 bp, Artificial Sequence
  Synthetic oligonucleotide; CAGAGT chr11 5271271 5271290 5271274 -
attgcactccagtctggcaa

SEQ ID NO: 62518 - DNA, 20 bp, Artificial Sequence
  Synthetic oligonucleotide; ATGGAT chr11 5271200 5271219 5271203 -
aaagaaaaaagaaaaaataa

SEQ ID NO: 62519 - DNA, 20 bp, Artificial Sequence
  Synthetic oligonucleotide; TAGAAT chr11 5271128 5271147 5271131 -
ggtgatgtaagggactttta

SEQ ID NO: 62520 - DNA, 20 bp, Artificial Sequence
  Synthetic oligonucleotide; TGGAAT chr11 5271113 5271132 5271116 -
ttttatagaattaacaatgc

SEQ ID NO: 62521 - DNA, 20 bp, Artificial Sequence
  Synthetic oligonucleotide; GTGAAT chr11 5271039 5271058 5271042 -
ttgatagttaaataatttct

SEQ ID NO: 62522 - DNA, 20 bp, Artificial Sequence
  Synthetic oligonucleotide; GAGGAT chr11 5271011 5271030 5271014 -
attccttgattctaaaatat

SEQ ID NO: 62523 - DNA, 20 bp, Artificial Sequence
  Synthetic oligonucleotide; ATGGAT chr11 5270943 5270962 5270946 -
gagcaatattcttcaggcac

SEQ ID NO: 62524 - DNA, 20 bp, Artificial Sequence
  Synthetic oligonucleotide; TCGAAT chr11 5270938 5270957 5270941 -
atattcttcaggcacatgga

SEQ ID NO: 62525 - DNA, 20 bp, Artificial Sequence
  Synthetic oligonucleotide; TTGAAT chr11 5270933 5270952 5270936 -
cttcaggcacatggatcgaa

SEQ ID NO: 62526 - DNA, 20 bp, Artificial Sequence
  Synthetic oligonucleotide; AGGAAT chr11 5270832 5270851 5270835 -
gaaaaaaaaaaggacactag

SEQ ID NO: 62527 - DNA, 20 bp, Artificial Sequence
  Synthetic oligonucleotide; TAGGAT chr11 5270743 5270762 5270746 -
attctggctttaaataattt

SEQ ID NO: 62528 - DNA, 20 bp, Artificial Sequence
  Synthetic oligonucleotide; GAGGAT chr11 5270609 5270628 5270612 -
catagagaaatgaaaagaga

SEQ ID NO: 62529 - DNA, 20 bp, Artificial Sequence
  Synthetic oligonucleotide; CTGGAT chr11 5270591 5270610 5270594 -
gagaggattctctggaagca

SEQ ID NO: 62530 - DNA, 20 bp, Artificial Sequence
  Synthetic oligonucleotide; GGGAAT chr11 5270559 5270578 5270562 -
ttttctgtctgtcctctcta

SEQ ID NO: 62531 - DNA, 20 bp, Artificial Sequence
  Synthetic oligonucleotide; TGGGAT chr11 5270533 5270552 5270536 -
caccccaaggtactgtactt

SEQ ID NO: 62532 - DNA, 20 bp, Artificial Sequence
  Synthetic oligonucleotide; CTGGGT chr11 5270392 5270411 5270395 -
actccttaagagagctagaa

SEQ ID NO: 62533 - DNA, 20 bp, Artificial Sequence
  Synthetic oligonucleotide; GAGAAT chr11 5270236 5270255 5270239 -
atgaggctttcttggaaaag

SEQ ID NO: 62534 - DNA, 20 bp, Artificial Sequence
  Synthetic oligonucleotide; ATGGAT chr11 5270223 5270242 5270226 -
ggaaaaggagaatgggagag

SEQ ID NO: 62535 - DNA, 20 bp, Artificial Sequence
  Synthetic oligonucleotide; GAGGGT chr11 5270196 5270215 5270199 -
tcattttggaagatgatgaa

SEQ ID NO: 62536 - DNA, 20 bp, Artificial Sequence
  Synthetic oligonucleotide; CAGGAT chr11 5270128 5270147 5270131 -
gagccaacaaaaaagagcct

SEQ ID NO: 62537 - DNA, 20 bp, Artificial Sequence
  Synthetic oligonucleotide; AAGAAT chr11 5269978 5269997 5269981 -
gggccagaacttcggcagta

SEQ ID NO: 62538 - DNA, 20 bp, Artificial Sequence
  Synthetic oligonucleotide; ATGAAT chr11 5269837 5269856 5269840 -
tcactagcctgtggagcaag

SEQ ID NO: 62539 - DNA, 20 bp, Artificial Sequence
  Synthetic oligonucleotide; GGGAAT chr11 5269776 5269795 5269779 -
agcattggttctcaatgcat

SEQ ID NO: 62540 - DNA, 20 bp, Artificial Sequence
  Synthetic oligonucleotide; AAGGGT chr11 5269769 5269788 5269772 -
gttctcaatgcatgggaatg

SEQ ID NO: 62541 - DNA, 20 bp, Artificial Sequence
  Synthetic oligonucleotide; GTGAAT chr11 5269765 5269784 5269768 -
tcaatgcatgggaatgaagg

SEQ ID NO: 62542 - DNA, 20 bp, Artificial Sequence
  Synthetic oligonucleotide; CTGAGT chr11 5269505 5269524 5269508 -
tcaagcccgcctttgctaag

SEQ ID NO: 62543 - DNA, 20 bp, Artificial Sequence
  Synthetic oligonucleotide; GTGGAT chr11 5269475 5269494 5269478 -
tgcactgtgacaagctgcat

SEQ ID NO: 62544 - DNA, 20 bp, Artificial Sequence
  Synthetic oligonucleotide; GTGAGT chr11 5269454 5269473 5269457 -
tggatcctgagaacttcaag

SEQ ID NO: 62545 - DNA, 20 bp, Artificial Sequence
  Synthetic oligonucleotide; ATGGGT chr11 5269354 5269373 5269357 -
caacaaagatctcagaaatc

SEQ ID NO: 62546 - DNA, 20 bp, Artificial Sequence
  Synthetic oligonucleotide; CTGAAT chr11 5269258 5269277 5269261 -
agtaaaggactactaacagc

SEQ ID NO: 62547 - DNA, 20 bp, Artificial Sequence
  Synthetic oligonucleotide; GAGAAT chr11 5269203 5269222 5269206 -
aacttgatgtgtttatccca

SEQ ID NO: 62548 - DNA, 20 bp, Artificial Sequence
  Synthetic oligonucleotide; TAGAAT chr11 5269190 5269209 5269193 -
tatcccagagaattgtatta

SEQ ID NO: 62549 - DNA, 20 bp, Artificial Sequence
  Synthetic oligonucleotide; AAGAAT chr11 5269168 5269187 5269171 -
gaattgtagacttgtgaaag

SEQ ID NO: 62550 - DNA, 20 bp, Artificial Sequence
  Synthetic oligonucleotide; GTGGGT chr11 5269102 5269121 5269105 -
atagaaatgccttattttat

SEQ ID NO: 62551 - DNA, 20 bp, Artificial Sequence
  Synthetic oligonucleotide; CCGAAT chr11 5268967 5268986 5268970 -
gaccaagtgaaggcttgttt

SEQ ID NO: 62552 - DNA, 20 bp, Artificial Sequence
  Synthetic oligonucleotide; GGGGAT chr11 5268956 5268975 5268959 -
ggcttgtttccgaatttgtt

SEQ ID NO: 62553 - DNA, 20 bp, Artificial Sequence
  Synthetic oligonucleotide; GGGGGT chr11 5268833 5268852 5268836 -
aatactggtaaaatggggaa

SEQ ID NO: 62554 - DNA, 20 bp, Artificial Sequence
  Synthetic oligonucleotide; GAGGGT chr11 5268827 5268846 5268830 -
ggtaaaatggggaagggggt

SEQ ID NO: 62555 - DNA, 20 bp, Artificial Sequence
  Synthetic oligonucleotide; TAGAAT chr11 5268812 5268831 5268815 -
ggggtgagggtgtaggtagg

SEQ ID NO: 62556 - DNA, 20 bp, Artificial Sequence
  Synthetic oligonucleotide; TTGAAT chr11 5268805 5268824 5268808 -
gggtgtaggtaggtagaatg

SEQ ID NO: 62557 - DNA, 20 bp, Artificial Sequence
  Synthetic oligonucleotide; TAGAAT chr11 5268789 5268808 5268792 -
aatgttgaatgtagggctca

SEQ ID NO: 62558 - DNA, 20 bp, Artificial Sequence
  Synthetic oligonucleotide; CTGAAT chr11 5268763 5268782 5268766 -
aaaattgaacctaagctcat

SEQ ID NO: 62559 - DNA, 20 bp, Artificial Sequence
  Synthetic oligonucleotide; TTGGGT chr11 5268754 5268773 5268757 -
cctaagctcatctgaatttt

SEQ ID NO: 62560 - DNA, 20 bp, Artificial Sequence
  Synthetic oligonucleotide; CAGGGT chr11 5268720 5268739 5268723 -
accttggaacagtttgaggt

SEQ ID NO: 62561 - DNA, 20 bp, Artificial Sequence
  Synthetic oligonucleotide; AGGAAT chr11 5268709 5268728 5268712 -
gtttgaggtcagggttgtct

SEQ ID NO: 62562 - DNA, 20 bp, Artificial Sequence
  Synthetic oligonucleotide; CTGGGT chr11 5268595 5268614 5268598 -
tgtcttttgcctaacagctc

SEQ ID NO: 62563 - DNA, 20 bp, Artificial Sequence
  Synthetic oligonucleotide; AGGAGT chr11 5268552 5268571 5268555 -
tctggctactcactttggca

SEQ ID NO: 62564 - DNA, 20 bp, Artificial Sequence
  Synthetic oligonucleotide; CTGAGT chr11 5268473 5268492 5268476 -
gccctggcccataagtacca

SEQ ID NO: 62565 - DNA, 20 bp, Artificial Sequence
  Synthetic oligonucleotide; AGGGAT chr11 5268283 5268302 5268286 -
gaaaaagtgttcatgggctg

SEQ ID NO: 62566 - DNA, 20 bp, Artificial Sequence
  Synthetic oligonucleotide; GTGGAT chr11 5268213 5268232 5268216 -
tgggggcttgtaaaattaat

SEQ ID NO: 62567 - DNA, 20 bp, Artificial Sequence
  Synthetic oligonucleotide; GAGAAT chr11 5268200 5268219 5268203 -
aattaatgtggatgttatgg

SEQ ID NO: 62568 - DNA, 20 bp, Artificial Sequence
  Synthetic oligonucleotide; CAGGAT chr11 5268192 5268211 5268195 -
tggatgttatgggagaattc

SEQ ID NO: 62569 - DNA, 20 bp, Artificial Sequence
  Synthetic oligonucleotide; GAGGAT chr11 5268180 5268199 5268183 -
gagaattccaggattccaag

SEQ ID NO: 62570 - DNA, 20 bp, Artificial Sequence
  Synthetic oligonucleotide; CGGGGT chr11 5268150 5268169 5268153 -
tgatggagaaaaatctttat

SEQ ID NO: 62571 - DNA, 20 bp, Artificial Sequence
  Synthetic oligonucleotide; TAGAAT chr11 5267975 5267994 5267978 -
tagatatccaagatataggc

SEQ ID NO: 62572 - DNA, 20 bp, Artificial Sequence
  Synthetic oligonucleotide; ATGAGT chr11 5267890 5267909 5267893 -
gaaattgatttggagataag

SEQ ID NO: 62573 - DNA, 20 bp, Artificial Sequence
  Synthetic oligonucleotide; AAGGAT chr11 5267854 5267873 5267857 -
aatagcctgctctttccatg

SEQ ID NO: 62574 - DNA, 20 bp, Artificial Sequence
  Synthetic oligonucleotide; ATGGGT chr11 5267837 5267856 5267840 -
atgaaggattccattatttc

SEQ ID NO: 62575 - DNA, 20 bp, Artificial Sequence
  Synthetic oligonucleotide; TAGAAT chr11 5267786 5267805 5267789 -
cattgtgcattatcttctga

SEQ ID NO: 62576 - DNA, 20 bp, Artificial Sequence
  Synthetic oligonucleotide; TAGAGT chr11 5267758 5267777 5267761 -
aacatgcactaaaataaagt

SEQ ID NO: 62577 - DNA, 20 bp, Artificial Sequence
  Synthetic oligonucleotide; CTGAGT chr11 5267746 5267765 5267749 -
aataaagttagagttaggac

SEQ ID NO: 62578 - DNA, 20 bp, Artificial Sequence
  Synthetic oligonucleotide; GAGAGT chr11 5267727 5267746 5267730 -
cctgagtgggaaagtttttg

SEQ ID NO: 62579 - DNA, 20 bp, Artificial Sequence
  Synthetic oligonucleotide; TAGAAT chr11 5267697 5267716 5267700 -
tgaagactttccgtgggaga

SEQ ID NO: 62580 - DNA, 20 bp, Artificial Sequence
  Synthetic oligonucleotide; GAGAGT chr11 5267611 5267630 5267614 -
ggctctctggaagtagaagg

SEQ ID NO: 62581 - DNA, 20 bp, Artificial Sequence
  Synthetic oligonucleotide; TAGGAT chr11 5267506 5267525 5267509 -
caatactaaacgataagcat

SEQ ID NO: 62582 - DNA, 20 bp, Artificial Sequence
  Synthetic oligonucleotide; ATGGAT chr11 5267443 5267462 5267446 -
aatctgcttatgtgcacaaa

SEQ ID NO: 62583 - DNA, 20 bp, Artificial Sequence
  Synthetic oligonucleotide; ATGGAT chr11 5267413 5267432 5267416 -
gtttgcagataaaataaaat

SEQ ID NO: 62584 - DNA, 20 bp, Artificial Sequence
  Synthetic oligonucleotide; GTGAGT chr11 5267361 5267380 5267364 -
gttcaaacccaagaggagca

SEQ ID NO: 62585 - DNA, 20 bp, Artificial Sequence
  Synthetic oligonucleotide; TGGAAT chr11 5267352 5267371 5267355 -
caagaggagcagtgagtctg

SEQ ID NO: 62586 - DNA, 20 bp, Artificial Sequence
  Synthetic oligonucleotide; AAGGAT chr11 5267343 5267362 5267346 -
cagtgagtctgtggaatttg

SEQ ID NO: 62587 - DNA, 20 bp, Artificial Sequence
  Synthetic oligonucleotide; TGGGGT chr11 5267328 5267347 5267331 -
atttgaaggatggacaaagg

SEQ ID NO: 62588 - DNA, 20 bp, Artificial Sequence
  Synthetic oligonucleotide; AAGGGT chr11 5267191 5267210 5267194 -
cctggtgactctcatgtgtg

SEQ ID NO: 62589 - DNA, 20 bp, Artificial Sequence
  Synthetic oligonucleotide; AGGGAT chr11 5267183 5267202 5267186 -
ctctcatgtgtgaagggtag

SEQ ID NO: 62590 - DNA, 20 bp, Artificial Sequence
  Synthetic oligonucleotide; GGGAGT chr11 5267138 5267157 5267141 -
aggaagtgctagattggtca

SEQ ID NO: 62591 - DNA, 20 bp, Artificial Sequence
  Synthetic oligonucleotide; TAGAGT chr11 5267077 5267096 5267080 -
aacctttgcattttccaagt

SEQ ID NO: 62592 - DNA, 20 bp, Artificial Sequence
  Synthetic oligonucleotide; GTGAAT chr11 5267002 5267021 5267005 -
cattgatcagactttttcct

SEQ ID NO: 62593 - DNA, 20 bp, Artificial Sequence
  Synthetic oligonucleotide; TTGAAT chr11 5266991 5267010 5266994 -
ctttttcctgtgaattactt

SEQ ID NO: 62594 - DNA, 20 bp, Artificial Sequence
  Synthetic oligonucleotide; CAGAAT chr11 5266970 5266989 5266973 -
tgaatttggctgtatatatc

SEQ ID NO: 62595 - DNA, 20 bp, Artificial Sequence
  Synthetic oligonucleotide; CAGAGT chr11 5266875 5266894 5266878 -
cctttcaatatgcccataaa

SEQ ID NO: 62596 - DNA, 20 bp, Artificial Sequence
  Synthetic oligonucleotide; AGGGAT chr11 5266865 5266884 5266868 -
tgcccataaacagagtaaac

SEQ ID NO: 62597 - DNA, 20 bp, Artificial Sequence
  Synthetic oligonucleotide; TGGGGT chr11 5266775 5266794 5266778 -
tacatatttttatatattta

SEQ ID NO: 62598 - DNA, 20 bp, Artificial Sequence
  Synthetic oligonucleotide; TAGGAT chr11 5266719 5266738 5266722 -
gatgattaagtctagatatt

SEQ ID NO: 62599 - DNA, 20 bp, Artificial Sequence
  Synthetic oligonucleotide; ATGAAT chr11 5266438 5266457 5266441 -
cacttttttagctcccacag

SEQ ID NO: 62600 - DNA, 20 bp, Artificial Sequence
  Synthetic oligonucleotide; AAGAGT chr11 5266368 5266387 5266371 -
atctatctctttggcatacc

SEQ ID NO: 62601 - DNA, 20 bp, Artificial Sequence
  Synthetic oligonucleotide; GTGAAT chr11 5266183 5266202 5266186 -
gatcccaaaccttaactatt

SEQ ID NO: 62602 - DNA, 20 bp, Artificial Sequence
  Synthetic oligonucleotide; ATGAGT chr11 5266162 5266181 5266165 -
tgaatagtgcttcaataaac

SEQ ID NO: 62603 - DNA, 20 bp, Artificial Sequence
  Synthetic oligonucleotide; TTGGAT chr11 5266144 5266163 5266147 -
acatgagtgtaatgtgtcca

SEQ ID NO: 62604 - DNA, 20 bp, Artificial Sequence
  Synthetic oligonucleotide; TTGGAT chr11 5266120 5266139 5266123 -
atatactgatttcctttctt

SEQ ID NO: 62605 - DNA, 20 bp, Artificial Sequence
  Synthetic oligonucleotide; CTGGAT chr11 5266093 5266112 5266096 -
aataaccactagtgagattg

SEQ ID NO: 62606 - DNA, 20 bp, Artificial Sequence
  Synthetic oligonucleotide; AAGAGT chr11 5265992 5266011 5265995 -
cccaccaacagtgtgtaaga

SEQ ID NO: 62607 - DNA, 20 bp, Artificial Sequence
  Synthetic oligonucleotide; AAGGAT chr11 5265964 5265983 5265967 -
ccttttctccatatcctcac

SEQ ID NO: 62608 - DNA, 20 bp, Artificial Sequence
  Synthetic oligonucleotide; TAGAGT chr11 5265919 5265938 5265922 -
ttgttaatagccgttttaac

SEQ ID NO: 62609 - DNA, 20 bp, Artificial Sequence
  Synthetic oligonucleotide; GAGAAT chr11 5265858 5265877 5265861 -
ccctgatcattagtgatgtt

SEQ ID NO: 62610 - DNA, 20 bp, Artificial Sequence
  Synthetic oligonucleotide; GAGAAT chr11 5265813 5265832 5265816 -
tcatttgtatatctttttct

SEQ ID NO: 62611 - DNA, 20 bp, Artificial Sequence
  Synthetic oligonucleotide; TGGGAT chr11 5265776 5265795 5265779 -
gtccttagcctactttttat

SEQ ID NO: 62612 - DNA, 20 bp, Artificial Sequence
  Synthetic oligonucleotide; CTGGAT chr11 5265726 5265745 5265729 -
atttgtgttcattttagagc

SEQ ID NO: 62613 - DNA, 20 bp, Artificial Sequence
  Synthetic oligonucleotide; GTGGGT chr11 5265672 5265691 5265675 -
tgaagattttctcccactct

SEQ ID NO: 62614 - DNA, 20 bp, Artificial Sequence
  Synthetic oligonucleotide; AAGGGT chr11 5265528 5265547 5265531 -
tttcctaagccaatgtgtag

SEQ ID NO: 62615 - DNA, 20 bp, Artificial Sequence
  Synthetic oligonucleotide; TAGAAT chr11 5265504 5265523 5265507 -
gtttttccgatgttattttc

SEQ ID NO: 62616 - DNA, 20 bp, Artificial Sequence
  Synthetic oligonucleotide; TTGAGT chr11 5265457 5265476 5265460 -
atttaagtccttgatccatc

SEQ ID NO: 62617 - DNA, 20 bp, Artificial Sequence
  Synthetic oligonucleotide; TTGAAT chr11 5265371 5265390 5265374 -
agctatccccgcaccatttg

SEQ ID NO: 62618 - DNA, 20 bp, Artificial Sequence
  Synthetic oligonucleotide; TAGGGT chr11 5265366 5265385 5265369 -
tccccgcaccatttgttgaa

SEQ ID NO: 62619 - DNA, 20 bp, Artificial Sequence
  Synthetic oligonucleotide; TTGGAT chr11 5265315 5265334 5265318 -
tttgctttgtcaaagatcag

SEQ ID NO: 62620 - DNA, 20 bp, Artificial Sequence
  Synthetic oligonucleotide; TTGAGT chr11 5265301 5265320 5265304 -
gatcagttggatgtaagtat

SEQ ID NO: 62621 - DNA, 20 bp, Artificial Sequence
  Synthetic oligonucleotide; CTGGGT chr11 5265289 5265308 5265292 -
gtaagtatttgagtttattt

SEQ ID NO: 62622 - DNA, 20 bp, Artificial Sequence
  Synthetic oligonucleotide; AAGAAT chr11 5265119 5265138 5265122 -
gggctcttttttggttccat

SEQ ID NO: 62623 - DNA, 20 bp, Artificial Sequence
  Synthetic oligonucleotide; TAGGAT chr11 5265111 5265130 5265114 -
ttttggttccataagaattt

SEQ ID NO: 62624 - DNA, 20 bp, Artificial Sequence
  Synthetic oligonucleotide; GGGAAT chr11 5265063 5265082 5265066 -
actaatggtggtattttgat

SEQ ID NO: 62625 - DNA, 20 bp, Artificial Sequence
  Synthetic oligonucleotide; ATGAAT chr11 5265053 5265072 5265056 -
gtattttgatgggaattgca

SEQ ID NO: 62626 - DNA, 20 bp, Artificial Sequence
  Synthetic oligonucleotide; GAGAAT chr11 5264990 5265009 5264993 -
tattgattctacccatctat

SEQ ID NO: 62627 - DNA, 20 bp, Artificial Sequence
  Synthetic oligonucleotide; AGGGGT chr11 5264836 5264855 5264839 -
ttttttgcagctattgtaaa

SEQ ID NO: 62628 - DNA, 20 bp, Artificial Sequence
  Synthetic oligonucleotide; TTGAGT chr11 5264831 5264850 5264834 -
tgcagctattgtaaaagggg

SEQ ID NO: 62629 - DNA, 20 bp, Artificial Sequence
  Synthetic oligonucleotide; CTGAAT chr11 5264739 5264758 5264742 -
ttttgtatccagaaactttg

SEQ ID NO: 62630 - DNA, 20 bp, Artificial Sequence
  Synthetic oligonucleotide; GGGGGT chr11 5264717 5264736 5264720 -
gaattattttatcagttcta

SEQ ID NO: 62631 - DNA, 20 bp, Artificial Sequence
  Synthetic oligonucleotide; AGGAGT chr11 5264706 5264725 5264709 -
tcagttctagggggttttgg

SEQ ID NO: 62632 - DNA, 20 bp, Artificial Sequence
  Synthetic oligonucleotide; TAGAGT chr11 5264697 5264716 5264700 -
gggggttttggaggagtctt

SEQ ID NO: 62633 - DNA, 20 bp, Artificial Sequence
  Synthetic oligonucleotide; TTGGAT chr11 5264630 5264649 5264633 -
ttgactttctctttaacaat

SEQ ID NO: 62634 - DNA, 20 bp, Artificial Sequence
  Synthetic oligonucleotide; GAGAGT chr11 5264554 5264573 5264557 -
atatgttaaagagaagtggt

SEQ ID NO: 62635 - DNA, 20 bp, Artificial Sequence
  Synthetic oligonucleotide; GTGGGT chr11 5264550 5264569 5264553 -
gttaaagagaagtggtgaga

SEQ ID NO: 62636 - DNA, 20 bp, Artificial Sequence
  Synthetic oligonucleotide; CAGAAT chr11 5264518 5264537 5264521 -
gtctcattccagttttcaga

SEQ ID NO: 62637 - DNA, 20 bp, Artificial Sequence
  Synthetic oligonucleotide; CTGAGT chr11 5264416 5264435 5264419 -
tcctttgtaaaccgattttg

SEQ ID NO: 62638 - DNA, 20 bp, Artificial Sequence
  Synthetic oligonucleotide; TTGAAT chr11 5264392 5264411 5264395 -
gttttagtcataaagtgatg

SEQ ID NO: 62639 - DNA, 20 bp, Artificial Sequence
  Synthetic oligonucleotide; TTGAAT chr11 5264382 5264401 5264385 -
taaagtgatgttgaattttg

SEQ ID NO: 62640 - DNA, 20 bp, Artificial Sequence
  Synthetic oligonucleotide; ATGGGT chr11 5264248 5264267 5264251 -
cgcatgaaacccacttgatc

SEQ ID NO: 62641 - DNA, 20 bp, Artificial Sequence
  Synthetic oligonucleotide; TCGGAT chr11 5264230 5264249 5264233 -
tcatgggttttgatatgctg

SEQ ID NO: 62642 - DNA, 20 bp, Artificial Sequence
  Synthetic oligonucleotide; AAGGAT chr11 5264203 5264222 5264206 -
ctattagctagtattttgtc

SEQ ID NO: 62643 - DNA, 20 bp, Artificial Sequence
  Synthetic oligonucleotide; AGGGAT chr11 5264178 5264197 5264181 -
tgttggcatctatgttcatc

SEQ ID NO: 62644 - DNA, 20 bp, Artificial Sequence
  Synthetic oligonucleotide; TAGAAT chr11 5264100 5264119 5264103 -
ttaaggtgatactggcttca

SEQ ID NO: 62645 - DNA, 20 bp, Artificial Sequence
  Synthetic oligonucleotide; GAGGAT chr11 5264086 5264105 5264089 -
gcttcatagaatgatttagg

SEQ ID NO: 62646 - DNA, 20 bp, Artificial Sequence
  Synthetic oligonucleotide; TAGAAT chr11 5264061 5264080 5264064 -
ttctctctttctctatcttg

SEQ ID NO: 62647 - DNA, 20 bp, Artificial Sequence
  Synthetic oligonucleotide; TAGGAT chr11 5264047 5264066 5264050 -
atcttgtagaatactgtcaa

SEQ ID NO: 62648 - DNA, 20 bp, Artificial Sequence
  Synthetic oligonucleotide; TTGAAT chr11 5264025 5264044 5264028 -
ggattggtatcaattcttct

SEQ ID NO: 62649 - DNA, 20 bp, Artificial Sequence
  Synthetic oligonucleotide; TAGAAT chr11 5264013 5264032 5264016 -
attcttctttgaatgtctgg

SEQ ID NO: 62650 - DNA, 20 bp, Artificial Sequence
  Synthetic oligonucleotide; GTGAAT chr11 5264001 5264020 5264004 -
atgtctggtagaattcagct

SEQ ID NO: 62651 - DNA, 20 bp, Artificial Sequence
  Synthetic oligonucleotide; CAGGGT chr11 5263918 5263937 5263921 -
ctgcttattactggtctgtt

SEQ ID NO: 62652 - DNA, 20 bp, Artificial Sequence
  Synthetic oligonucleotide; AGGAAT chr11 5263870 5263889 5263873 -
ctagagccctgtatctttcc

SEQ ID NO: 62653 - DNA, 20 bp, Artificial Sequence
  Synthetic oligonucleotide; TTGAAT chr11 5263808 5263827 5263811 -
taaaggtgttcatagtagcc

SEQ ID NO: 62654 - DNA, 20 bp, Artificial Sequence
  Synthetic oligonucleotide; TTGAGT chr11 5263749 5263768 5263752 -
atctcctgttttgtttctaa

SEQ ID NO: 62655 - DNA, 20 bp, Artificial Sequence
  Synthetic oligonucleotide; CTGGGT chr11 5263575 5263594 5263578 -
tagttattccctttcttttg

SEQ ID NO: 62656 - DNA, 20 bp, Artificial Sequence
  Synthetic oligonucleotide; TGGGAT chr11 5263358 5263377 5263361 -
tcttattatactttaagttc

SEQ ID NO: 62657 - DNA, 20 bp, Artificial Sequence
  Synthetic oligonucleotide; CAGAAT chr11 5263345 5263364 5263348 -
taagttctgggatacatgtg

SEQ ID NO: 62658 - DNA, 20 bp, Artificial Sequence
  Synthetic oligonucleotide; ATGAGT chr11 5263156 5263175 5263159 -
tcattgttcaactcccactt

SEQ ID NO: 62659 - DNA, 20 bp, Artificial Sequence
  Synthetic oligonucleotide; CAGAAT chr11 5263105 5263124 5263108 -
tgttcctgtgttagtttgct

SEQ ID NO: 62660 - DNA, 20 bp, Artificial Sequence
  Synthetic oligonucleotide; TTGGGT chr11 5262977 5262996 5262980 -
attatatcgctgatggccat

SEQ ID NO: 62661 - DNA, 20 bp, Artificial Sequence
  Synthetic oligonucleotide; GTGAAT chr11 5262950 5262969 5262953 -
ggttccaagtctttgctatt

SEQ ID NO: 62662 - DNA, 20 bp, Artificial Sequence
  Synthetic oligonucleotide; TAGAAT chr11 5262905 5262924 5262908 -
gtgtgcacgtgtctttatag

SEQ ID NO: 62663 - DNA, 20 bp, Artificial Sequence
  Synthetic oligonucleotide; TTGGGT chr11 5262886 5262905 5262889 -
gtagaatgatttctaattct

SEQ ID NO: 62664 - DNA, 20 bp, Artificial Sequence
  Synthetic oligonucleotide; TGGGAT chr11 5262867 5262886 5262870 -
tttgggtatatacccagtaa

SEQ ID NO: 62665 - DNA, 20 bp, Artificial Sequence
  Synthetic oligonucleotide; CTGGGT chr11 5262859 5262878 5262862 -
tatacccagtaatgggattg

SEQ ID NO: 62666 - DNA, 20 bp, Artificial Sequence
  Synthetic oligonucleotide; AGGAAT chr11 5262824 5262843 5262827 -
tttctggttctagatccttg

SEQ ID NO: 62667 - DNA, 20 bp, Artificial Sequence
  Synthetic oligonucleotide; TGGGGT chr11 5262547 5262566 5262550 -
atcctttgtccactttttga

SEQ ID NO: 62668 - DNA, 20 bp, Artificial Sequence
  Synthetic oligonucleotide; TTGGAT chr11 5262497 5262516 5262500 -
gttgaagttctttgtagatt

SEQ ID NO: 62669 - DNA, 20 bp, Artificial Sequence
  Synthetic oligonucleotide; ATGGAT chr11 5262475 5262494 5262478 -
ggatgttagccctttgtcag

SEQ ID NO: 62670 - DNA, 20 bp, Artificial Sequence
  Synthetic oligonucleotide; GTGAAT chr11 5262328 5262347 5262331 -
ttgcttttgatgttttagtc

SEQ ID NO: 62671 - DNA, 20 bp, Artificial Sequence
  Synthetic oligonucleotide; CTGAAT chr11 5262303 5262322 5262306 -
tttttgcccatgcctatgtc

SEQ ID NO: 62672 - DNA, 20 bp, Artificial Sequence
  Synthetic oligonucleotide; TAGGAT chr11 5262276 5262295 5262279 -
gtattgcctaggttatcttc

SEQ ID NO: 62673 - DNA, 20 bp, Artificial Sequence
  Synthetic oligonucleotide; TTGAGT chr11 5262229 5262248 5262232 -
atttaagtctttaatccacc

SEQ ID NO: 62674 - DNA, 20 bp, Artificial Sequence
  Synthetic oligonucleotide; AGGGGT chr11 5262199 5262218 5262202 -
ttttgtataaggtgtaagga

SEQ ID NO: 62675 - DNA, 20 bp, Artificial Sequence
  Synthetic oligonucleotide; GGGAAT chr11 5262136 5262155 5262139 -
ccagcaccatttattaaata

SEQ ID NO: 62676 - DNA, 20 bp, Artificial Sequence
  Synthetic oligonucleotide; TAGGAT chr11 5261932 5261951 5261935 -
ccagctttgttctttttgtt

SEQ ID NO: 62677 - DNA, 20 bp, Artificial Sequence
  Synthetic oligonucleotide; GGGGAT chr11 5261836 5261855 5261839 -
aaagtcagtggtagcttgat

SEQ ID NO: 62678 - DNA, 20 bp, Artificial Sequence
  Synthetic oligonucleotide; TTGAAT chr11 5261826 5261845 5261829 -
gtagcttgatggggatagca

SEQ ID NO: 62679 - DNA, 20 bp, Artificial Sequence
  Synthetic oligonucleotide; TGGAAT chr11 5261758 5261777 5261761 -
attctttctatctatgagca

SEQ ID NO: 62680 - DNA, 20 bp, Artificial Sequence
  Synthetic oligonucleotide; GTGAGT chr11 5261711 5261730 5261714 -
ctctcttatttccttgagca

SEQ ID NO: 62681 - DNA, 20 bp, Artificial Sequence
  Synthetic oligonucleotide; GTGAAT chr11 5261619 5261638 5261622 -
ttattctctttgcagcaatt

SEQ ID NO: 62682 - DNA, 20 bp, Artificial Sequence
  Synthetic oligonucleotide; GGGAGT chr11 5261613 5261632 5261616 -
tctttgcagcaattgtgaat

SEQ ID NO: 62683 - DNA, 20 bp, Artificial Sequence
  Synthetic oligonucleotide; CAGGGT chr11 5261477 5261496 5261480 -
aagattttgggctgagatga

SEQ ID NO: 62684 - DNA, 20 bp, Artificial Sequence
  Synthetic oligonucleotide; TTGAAT chr11 5261410 5261429 5261413 -
ttgacttcctctcttcctat

SEQ ID NO: 62685 - DNA, 20 bp, Artificial Sequence
  Synthetic oligonucleotide; TTGAGT chr11 5261349 5261368 5261352 -
cgagaacttccaatactatg

SEQ ID NO: 62686 - DNA, 20 bp, Artificial Sequence
  Synthetic oligonucleotide; AAGAGT chr11 5261343 5261362 5261346 -
cttccaatactatgttgagt

SEQ ID NO: 62687 - DNA, 20 bp, Artificial Sequence
  Synthetic oligonucleotide; GAGAGT chr11 5261157 5261176 5261160 -
tttattctactgtggtctga

SEQ ID NO: 62688 - DNA, 20 bp, Artificial Sequence
  Synthetic oligonucleotide; ATGAAT chr11 5261062 5261081 5261065 -
ggagaaagttccatgtgctg

SEQ ID NO: 62689 - DNA, 20 bp, Artificial Sequence
  Synthetic oligonucleotide; TAGAAT chr11 5261057 5261076 5261060 -
aagttccatgtgctgatgaa

SEQ ID NO: 62690 - DNA, 20 bp, Artificial Sequence
  Synthetic oligonucleotide; TTGGGT chr11 5261035 5261054 5261038 -
gaatgtgtattctgcagttg

SEQ ID NO: 62691 - DNA, 20 bp, Artificial Sequence
  Synthetic oligonucleotide; TAGAAT chr11 5261030 5261049 5261033 -
tgtattctgcagttgttggg

SEQ ID NO: 62692 - DNA, 20 bp, Artificial Sequence
  Synthetic oligonucleotide; TGGAGT chr11 5260937 5260956 5260940 -
gacctgcctagtgcagtcag

SEQ ID NO: 62693 - DNA, 20 bp, Artificial Sequence
  Synthetic oligonucleotide; TGGGAT chr11 5260870 5260889 5260873 -
tagtaattgttttataaatt

SEQ ID NO: 62694 - DNA, 20 bp, Artificial Sequence
  Synthetic oligonucleotide; AAGAAT chr11 5260839 5260858 5260842 -
gtattagatgcatatatatt

SEQ ID NO: 62695 - DNA, 20 bp, Artificial Sequence
  Synthetic oligonucleotide; AAGAAT chr11 5260734 5260753 5260737 -
aagtttgttttgtctgacat

SEQ ID NO: 62696 - DNA, 20 bp, Artificial Sequence
  Synthetic oligonucleotide; TGGAAT chr11 5260694 5260713 5260697 -
gcttttggtgtccatttgtg

SEQ ID NO: 62697 - DNA, 20 bp, Artificial Sequence
  Synthetic oligonucleotide; GTGAGT chr11 5260657 5260676 5260660 -
cccctttaccttaagtttat

SEQ ID NO: 62698 - DNA, 20 bp, Artificial Sequence
  Synthetic oligonucleotide; GTGAGT chr11 5260638 5260657 5260641 -
tgtgagtccttatgtgttag

SEQ ID NO: 62699 - DNA, 20 bp, Artificial Sequence
  Synthetic oligonucleotide; GTGAAT chr11 5260605 5260624 5260608 -
aggcggcagataactggttg

SEQ ID NO: 62700 - DNA, 20 bp, Artificial Sequence
  Synthetic oligonucleotide; TGGGAT chr11 5260447 5260466 5260450 -
tttttgttgtatatgtccta

SEQ ID NO: 62701 - DNA, 20 bp, Artificial Sequence
  Synthetic oligonucleotide; CAGGGT chr11 5260406 5260425 5260409 -
gttctgttttgatgtgcttc

SEQ ID NO: 62702 - DNA, 20 bp, Artificial Sequence
  Synthetic oligonucleotide; CCGAAT chr11 5260344 5260363 5260347 -
gtagtgttggcttggtagtg

SEQ ID NO: 62703 - DNA, 20 bp, Artificial Sequence
  Synthetic oligonucleotide; CTGGAT chr11 5260274 5260293 5260277 -
atttgtgaagcttagtttca

SEQ ID NO: 62704 - DNA, 20 bp, Artificial Sequence
  Synthetic oligonucleotide; TTGGAT chr11 5260090 5260109 5260093 -
ctctttgtctttagataact

SEQ ID NO: 62705 - DNA, 20 bp, Artificial Sequence
  Synthetic oligonucleotide; ATGAAT chr11 5260045 5260064 5260048 -
taggcaatgatatttttgca

SEQ ID NO: 62706 - DNA, 20 bp, Artificial Sequence
  Synthetic oligonucleotide; TTGGAT chr11 5260010 5260029 5260013 -
gtttattgagcttcttgtat

SEQ ID NO: 62707 - DNA, 20 bp, Artificial Sequence
  Synthetic oligonucleotide; CTGGAT chr11 5259958 5259977 5259961 -
agttttccttgattatttcc

SEQ ID NO: 62708 - DNA, 20 bp, Artificial Sequence
  Synthetic oligonucleotide; AGGAAT chr11 5259917 5259936 5259920 -
ttagatttctcttctttctc

SEQ ID NO: 62709 - DNA, 20 bp, Artificial Sequence
  Synthetic oligonucleotide; TTGGAT chr11 5259820 5259839 5259823 -
ttcttttttctttgtctttg

SEQ ID NO: 62710 - DNA, 20 bp, Artificial Sequence
  Synthetic oligonucleotide; TTGGGT chr11 5259815 5259834 5259818 -
ttttctttgtctttgttgga

SEQ ID NO: 62711 - DNA, 20 bp, Artificial Sequence
  Synthetic oligonucleotide; CTGAAT chr11 5259783 5259802 5259786 -
aaaaactttgtcttcaagct

SEQ ID NO: 62712 - DNA, 20 bp, Artificial Sequence
  Synthetic oligonucleotide; TTGGAT chr11 5259768 5259787 5259771 -
aagctctgaatttcttctgc

SEQ ID NO: 62713 - DNA, 20 bp, Artificial Sequence
  Synthetic oligonucleotide; TTGAAT chr11 5259689 5259708 5259692 -
atccattgtttcctgaagtt

SEQ ID NO: 62714 - DNA, 20 bp, Artificial Sequence
  Synthetic oligonucleotide; TCGGAT chr11 5259590 5259609 5259593 -
aaaattggacttcaccttcc

SEQ ID NO: 62715 - DNA, 20 bp, Artificial Sequence
  Synthetic oligonucleotide; CTGAAT chr11 5259554 5259573 5259557 -
ttagcttaataactgacctt

SEQ ID NO: 62716 - DNA, 20 bp, Artificial Sequence
  Synthetic oligonucleotide; AGGGAT chr11 5259531 5259550 5259534 -
aattatttttcaggtaaatc

SEQ ID NO: 62717 - DNA, 20 bp, Artificial Sequence
  Synthetic oligonucleotide; TTGGAT chr11 5259514 5259533 5259517 -
atcagggatttcttcttggt

SEQ ID NO: 62718 - DNA, 20 bp, Artificial Sequence
  Synthetic oligonucleotide; GGGGGT chr11 5259478 5259497 5259481 -
tgagctagtatgattttttg

SEQ ID NO: 62719 - DNA, 20 bp, Artificial Sequence
  Synthetic oligonucleotide; CAGAGT chr11 5259445 5259464 5259448 -
aaccttgtttttcatattac

SEQ ID NO: 62720 - DNA, 20 bp, Artificial Sequence
  Synthetic oligonucleotide; TTGGGT chr11 5259417 5259436 5259420 -
gttttctggttccttctcac

SEQ ID NO: 62721 - DNA, 20 bp, Artificial Sequence
  Synthetic oligonucleotide; CTGGAT chr11 5259272 5259291 5259275 -
tagtgattgttatctctctt

SEQ ID NO: 62722 - DNA, 20 bp, Artificial Sequence
  Synthetic oligonucleotide; TGGGGT chr11 5259227 5259246 5259230 -
accagactccaggctggtac

SEQ ID NO: 62723 - DNA, 20 bp, Artificial Sequence
  Synthetic oligonucleotide; CAGAGT chr11 5259212 5259231 5259215 -
ggtactggggtttgtctgca

SEQ ID NO: 62724 - DNA, 20 bp, Artificial Sequence
  Synthetic oligonucleotide; GTGGGT chr11 5259187 5259206 5259190 -
tcttgtgacgtgaaccatct

SEQ ID NO: 62725 - DNA, 20 bp, Artificial Sequence
  Synthetic oligonucleotide; GAGGAT chr11 5259138 5259157 5259141 -
ctgctccaatggaggtggca

SEQ ID NO: 62726 - DNA, 20 bp, Artificial Sequence
  Synthetic oligonucleotide; GAGGGT chr11 5259118 5259137 5259121 -
gaggatgaaatggactctgt

SEQ ID NO: 62727 - DNA, 20 bp, Artificial Sequence
  Synthetic oligonucleotide; AAGAAT chr11 5258978 5258997 5258981 -
tggggcaccctagaactccc

SEQ ID NO: 62728 - DNA, 20 bp, Artificial Sequence
  Synthetic oligonucleotide; CAGGGT chr11 5258949 5258968 5258952 -
tgccctttgtcttcagctac

SEQ ID NO: 62729 - DNA, 20 bp, Artificial Sequence
  Synthetic oligonucleotide; GTGAGT chr11 5258945 5258964 5258948 -
ctttgtcttcagctaccagg

SEQ ID NO: 62730 - DNA, 20 bp, Artificial Sequence
  Synthetic oligonucleotide; CAGAGT chr11 5258894 5258913 5258897 -
ggactagtcgtgtctgagct

SEQ ID NO: 62731 - DNA, 20 bp, Artificial Sequence
  Synthetic oligonucleotide; GAGGAT chr11 5258855 5258874 5258858 -
tctttctgtggctactgtgg

SEQ ID NO: 62732 - DNA, 20 bp, Artificial Sequence
  Synthetic oligonucleotide; GGGGGT chr11 5258849 5258868 5258852 -
tgtggctactgtgggaggat

SEQ ID NO: 62733 - DNA, 20 bp, Artificial Sequence
  Synthetic oligonucleotide; ATGGAT chr11 5258828 5258847 5258831 -
ggggtgtagtttccaggtca

SEQ ID NO: 62734 - DNA, 20 bp, Artificial Sequence
  Synthetic oligonucleotide; CCGAAT chr11 5258670 5258689 5258673 -
caccctcccccgcaacagca

SEQ ID NO: 62735 - DNA, 20 bp, Artificial Sequence
  Synthetic oligonucleotide; TGGAGT chr11 5258574 5258593 5258577 -
ctgtcctacttccctgccag

SEQ ID NO: 62736 - DNA, 20 bp, Artificial Sequence
  Synthetic oligonucleotide; CAGAAT chr11 5258320 5258339 5258323 -
gactcagctccaggtaaggt

SEQ ID NO: 62737 - DNA, 20 bp, Artificial Sequence
  Synthetic oligonucleotide; GAGGAT chr11 5258279 5258298 5258282 -
agatcttcaggttccccagt

SEQ ID NO: 62738 - DNA, 20 bp, Artificial Sequence
  Synthetic oligonucleotide; GGGGGT chr11 5258265 5258284 5258268 -
cccagtgaggatgtgtgttt

SEQ ID NO: 62739 - DNA, 20 bp, Artificial Sequence
  Synthetic oligonucleotide; TGGGGT chr11 5258212 5258231 5258215 -
gtttgggcactcacaatatt

SEQ ID NO: 62740 - DNA, 20 bp, Artificial Sequence
  Synthetic oligonucleotide; CCGGGT chr11 5258201 5258220 5258204 -
cacaatatttggggtgtttc

SEQ ID NO: 62741 - DNA, 20 bp, Artificial Sequence
  Synthetic oligonucleotide; GAGGGT chr11 5258169 5258188 5258172 -
ggagcaatctgcttctttca

SEQ ID NO: 62742 - DNA, 20 bp, Artificial Sequence
  Synthetic oligonucleotide; CCGAGT chr11 5258071 5258090 5258074 -
tcacatgctgctctgtgcat

SEQ ID NO: 62743 - DNA, 20 bp, Artificial Sequence
  Synthetic oligonucleotide; AGGAAT chr11 5257928 5257947 5257931 -
tatactgccctttgatatca

SEQ ID NO: 62744 - DNA, 20 bp, Artificial Sequence
  Synthetic oligonucleotide; AGGGGT chr11 5257906 5257925 5257909 -
gaatcaaggacgtgatgttg

SEQ ID NO: 62745 - DNA, 20 bp, Artificial Sequence
  Synthetic oligonucleotide; GTGGAT chr11 5257895 5257914 5257898 -
gtgatgttgaggggtgggca

SEQ ID NO: 62746 - DNA, 20 bp, Artificial Sequence
  Synthetic oligonucleotide; ATGAAT chr11 5257809 5257828 5257812 -
taattgaaagcaaattcata

SEQ ID NO: 62747 - DNA, 20 bp, Artificial Sequence
  Synthetic oligonucleotide; AAGAAT chr11 5257756 5257775 5257759 -
acaagatttttaatagttga

SEQ ID NO: 62748 - DNA, 20 bp, Artificial Sequence
  Synthetic oligonucleotide; TAGAAT chr11 5257683 5257702 5257686 -
tgtgataaacaggtcattct

SEQ ID NO: 62749 - DNA, 20 bp, Artificial Sequence
  Synthetic oligonucleotide; CAGAGT chr11 5257631 5257650 5257634 -
cttagagattatgtcattac

SEQ ID NO: 62750 - DNA, 20 bp, Artificial Sequence
  Synthetic oligonucleotide; AGGAGT chr11 5257480 5257499 5257483 -
atctaactctctggcacagc

SEQ ID NO: 62751 - DNA, 20 bp, Artificial Sequence
  Synthetic oligonucleotide; TTGAAT chr11 5257451 5257470 5257454 -
ttttcttctgcttcagagct

SEQ ID NO: 62752 - DNA, 20 bp, Artificial Sequence
  Synthetic oligonucleotide; TCGAAT chr11 5257371 5257390 5257374 -
ttctgtcattttgcctctgt

SEQ ID NO: 62753 - DNA, 20 bp, Artificial Sequence
  Synthetic oligonucleotide; AAGAAT chr11 5257153 5257172 5257156 -
atgtttgaaaatacatggga

SEQ ID NO: 62754 - DNA, 20 bp, Artificial Sequence
  Synthetic oligonucleotide; TAGGAT chr11 5257099 5257118 5257102 -
aaagaaacagttttatcagt

SEQ ID NO: 62755 - DNA, 20 bp, Artificial Sequence
  Synthetic oligonucleotide; AGGAAT chr11 5257056 5257075 5257059 -
caatgatataggaaaaatcg

SEQ ID NO: 62756 - DNA, 20 bp, Artificial Sequence
  Synthetic oligonucleotide; ATGGAT chr11 5257041 5257060 5257044 -
aatcgaggaataagacagtt

SEQ ID NO: 62757 - DNA, 20 bp, Artificial Sequence
  Synthetic oligonucleotide; AAGGGT chr11 5256980 5256999 5256983 -
tcaaaagcataagaggaaat

SEQ ID NO: 62758 - DNA, 20 bp, Artificial Sequence
  Synthetic oligonucleotide; TTGGAT chr11 5256941 5256960 5256944 -
ttagaacactgccttggttt

SEQ ID NO: 62759 - DNA, 20 bp, Artificial Sequence
  Synthetic oligonucleotide; AGGGAT chr11 5256909 5256928 5256912 -
ggaagttgtttgaaaacagg

SEQ ID NO: 62760 - DNA, 20 bp, Artificial Sequence
  Synthetic oligonucleotide; GGGAGT chr11 5256848 5256867 5256851 -
gattcacttgtttagaggct

SEQ ID NO: 62761 - DNA, 20 bp, Artificial Sequence
  Synthetic oligonucleotide; CAGAAT chr11 5256821 5256840 5256824 -
gtggctcacgcctgtaatcc

SEQ ID NO: 62762 - DNA, 20 bp, Artificial Sequence
  Synthetic oligonucleotide; AAGAGT chr11 5256780 5256799 5256783 -
caggcagatcacctgaggtc

SEQ ID NO: 62763 - DNA, 20 bp, Artificial Sequence
  Synthetic oligonucleotide; GAGAAT chr11 5256663 5256682 5256666 -
tacttgggaggctgaggaag

SEQ ID NO: 62764 - DNA, 20 bp, Artificial Sequence
  Synthetic oligonucleotide; AGGAGT chr11 5256639 5256658 5256642 -
attgcttgaacctggaaggc

SEQ ID NO: 62765 - DNA, 20 bp, Artificial Sequence
  Synthetic oligonucleotide; CTGGGT chr11 5256598 5256617 5256601 -
tcataccactgcactccagc

SEQ ID NO: 62766 - DNA, 20 bp, Artificial Sequence
  Synthetic oligonucleotide; TTGGGT chr11 5256390 5256409 5256393 -
tatcttaaagagaccctaat

SEQ ID NO: 62767 - DNA, 20 bp, Artificial Sequence
  Synthetic oligonucleotide; GTGAGT chr11 5256297 5256316 5256300 -
gagaagtcacttattattat

SEQ ID NO: 62768 - DNA, 20 bp, Artificial Sequence
  Synthetic oligonucleotide; CAGGAT chr11 5256122 5256141 5256125 -
gagcagatataagccttaca

SEQ ID NO: 62769 - DNA, 20 bp, Artificial Sequence
  Synthetic oligonucleotide; AAGGAT chr11 5256104 5256123 5256107 -
cacaggattatgaagtctga

SEQ ID NO: 62770 - DNA, 20 bp, Artificial Sequence
  Synthetic oligonucleotide; CAGAGT chr11 5256020 5256039 5256023 -
cctccaataagccagatttc

SEQ ID NO: 62771 - DNA, 20 bp, Artificial Sequence
  Synthetic oligonucleotide; ATGGAT chr11 5255988 5256007 5255991 -
cgtcataatctaccaaggtc

SEQ ID NO: 62772 - DNA, 20 bp, Artificial Sequence
  Synthetic oligonucleotide; TCGAGT chr11 5255983 5256002 5255986 -
taatctaccaaggtcatgga

SEQ ID NO: 62773 - DNA, 20 bp, Artificial Sequence
  Synthetic oligonucleotide; ATGAAT chr11 5255901 5255920 5255904 -
aaaataaagaaaaaaacagc

SEQ ID NO: 62774 - DNA, 20 bp, Artificial Sequence
  Synthetic oligonucleotide; CTGAGT chr11 5255854 5255873 5255857 -
ccaatatgtcagaaacagca

SEQ ID NO: 62775 - DNA, 20 bp, Artificial Sequence
  Synthetic oligonucleotide; AAGAGT chr11 5255763 5255782 5255766 -
taaaacagtccctgcctctt

SEQ ID NO: 62776 - DNA, 20 bp, Artificial Sequence
  Synthetic oligonucleotide; TAGAAT chr11 5255726 5255745 5255729 -
caaatacatgtcttatgtct

SEQ ID NO: 62777 - DNA, 20 bp, Artificial Sequence
  Synthetic oligonucleotide; CTGGGT chr11 5255601 5255620 5255604 -
agaagagctacaccaaaacc

SEQ ID NO: 62778 - DNA, 20 bp, Artificial Sequence
  Synthetic oligonucleotide; TCGGGT chr11 5255552 5255571 5255555 -
ccagtgataaatacacatca

SEQ ID NO: 62779 - DNA, 20 bp, Artificial Sequence
  Synthetic oligonucleotide; CTGAAT chr11 5255532 5255551 5255535 -
tcgggtgcctacatacatac

SEQ ID NO: 62780 - DNA, 20 bp, Artificial Sequence
  Synthetic oligonucleotide; ACGGAT chr11 5255472 5255491 5255475 -
gtgatttatttcaaataggt

SEQ ID NO: 62781 - DNA, 20 bp, Artificial Sequence
  Synthetic oligonucleotide; AAGGAT chr11 5255450 5255469 5255453 -
ggataagtagatattgaagt

SEQ ID NO: 62782 - DNA, 20 bp, Artificial Sequence
  Synthetic oligonucleotide; TAGGAT chr11 5255385 5255404 5255388 -
gcactgaaactgttgcttta

SEQ ID NO: 62783 - DNA, 20 bp, Artificial Sequence
  Synthetic oligonucleotide; GAGAGT chr11 5255331 5255350 5255334 -
gataatggcctaaaaccaca

SEQ ID NO: 62784 - DNA, 20 bp, Artificial Sequence
  Synthetic oligonucleotide; AAGAAT chr11 5255073 5255092 5255076 -
gaagaaaactagctaaaggg

SEQ ID NO: 62785 - DNA, 20 bp, Artificial Sequence
  Synthetic oligonucleotide; TGGAAT chr11 5255052 5255071 5255055 -
agaataaattagagaaaaat

SEQ ID NO: 62786 - DNA, 20 bp, Artificial Sequence
  Synthetic oligonucleotide; CTGAAT chr11 5255044 5255063 5255047 -
ttagagaaaaattggaatga

SEQ ID NO: 62787 - DNA, 20 bp, Artificial Sequence
  Synthetic oligonucleotide; ATGGGT chr11 5254921 5254940 5254924 -
tccctggctaaactccaccc

SEQ ID NO: 62788 - DNA, 20 bp, Artificial Sequence
  Synthetic oligonucleotide; TAGAGT chr11 5254860 5254879 5254863 -
gcaaacttgaccaatagtct

SEQ ID NO: 62789 - DNA, 20 bp, Artificial Sequence
  Synthetic oligonucleotide; AGGGAT chr11 5254823 5254842 5254826 -
ccaggggccggcggctggct

SEQ ID NO: 62790 - DNA, 20 bp, Artificial Sequence
  Synthetic oligonucleotide; AAGAAT chr11 5254816 5254835 5254819 -
ccggcggctggctagggatg

SEQ ID NO: 62791 - DNA, 20 bp, Artificial Sequence
  Synthetic oligonucleotide; ATGGGT chr11 5254729 5254748 5254732 -
aagctcctagtccagacgcc

SEQ ID NO: 62792 - DNA, 20 bp, Artificial Sequence
  Synthetic oligonucleotide; GTGAAT chr11 5254675 5254694 5254678 -
tcacaagcctgtggggcaag

SEQ ID NO: 62793 - DNA, 20 bp, Artificial Sequence
  Synthetic oligonucleotide; CAGGAT chr11 5254566 5254585 5254569 -
caaaagtccaggtcgcttct

SEQ ID NO: 62794 - DNA, 20 bp, Artificial Sequence
  Synthetic oligonucleotide; CTGGAT chr11 5254373 5254392 5254376 -
tgggagatgccataaagcac

SEQ ID NO: 62795 - DNA, 20 bp, Artificial Sequence
  Synthetic oligonucleotide; CTGAGT chr11 5254343 5254362 5254346 -
tcaagggcacctttgcccag

SEQ ID NO: 62796 - DNA, 20 bp, Artificial Sequence
  Synthetic oligonucleotide; GTGGAT chr11 5254313 5254332 5254316 -
tgcactgtgacaagctgcat

SEQ ID NO: 62797 - DNA, 20 bp, Artificial Sequence
  Synthetic oligonucleotide; GTGAGT chr11 5254292 5254311 5254295 -
tggatcctgagaacttcaag

SEQ ID NO: 62798 - DNA, 20 bp, Artificial Sequence
  Synthetic oligonucleotide; CTGAGT chr11 5254235 5254254 5254238 -
tctcgaggcaacttagacaa

SEQ ID NO: 62799 - DNA, 20 bp, Artificial Sequence
  Synthetic oligonucleotide; CAGGGT chr11 5254213 5254232 5254216 -
gagtattgatctgagcacag

SEQ ID NO: 62800 - DNA, 20 bp, Artificial Sequence
  Synthetic oligonucleotide; TGGGGT chr11 5254188 5254207 5254191 -
tgtgagctgtttgaagatac

SEQ ID NO: 62801 - DNA, 20 bp, Artificial Sequence
  Synthetic oligonucleotide; GGGAGT chr11 5254181 5254200 5254184 -
tgtttgaagatactggggtt

SEQ ID NO: 62802 - DNA, 20 bp, Artificial Sequence
  Synthetic oligonucleotide; AGGAGT chr11 5254118 5254137 5254121 -
tggcaatgttttagggccta

SEQ ID NO: 62803 - DNA, 20 bp, Artificial Sequence
  Synthetic oligonucleotide; AGGGGT chr11 5253776 5253795 5253779 -
gatgggggcaaagtatgtcc

SEQ ID NO: 62804 - DNA, 20 bp, Artificial Sequence
  Synthetic oligonucleotide; TGGAGT chr11 5253746 5253765 5253749 -
aacaattgaaacatttgggc

SEQ ID NO: 62805 - DNA, 20 bp, Artificial Sequence
  Synthetic oligonucleotide; CAGGGT chr11 5253635 5253654 5253638 -
cgttttcagcctacagcata

SEQ ID NO: 62806 - DNA, 20 bp, Artificial Sequence
  Synthetic oligonucleotide; CTGGGT chr11 5253501 5253520 5253504 -
aagttaacataggcttgatt

SEQ ID NO: 62807 - DNA, 20 bp, Artificial Sequence
  Synthetic oligonucleotide; ATGGGT chr11 5253443 5253462 5253446 -
gctggagctctcagctcact

SEQ ID NO: 62808 - DNA, 20 bp, Artificial Sequence
  Synthetic oligonucleotide; AAGAAT chr11 5253360 5253379 5253363 -
tttggcaatccatttcggca

SEQ ID NO: 62809 - DNA, 20 bp, Artificial Sequence
  Synthetic oligonucleotide; TGGAGT chr11 5253314 5253333 5253317 -
tcctggcagaagatggtgac

SEQ ID NO: 62810 - DNA, 20 bp, Artificial Sequence
  Synthetic oligonucleotide; AAGGAT chr11 5253250 5253269 5253253 -
gcccatgatgcagagctttc

SEQ ID NO: 62811 - DNA, 20 bp, Artificial Sequence
  Synthetic oligonucleotide; AAGGGT chr11 5253139 5253158 5253142 -
ttttaaatatatgagccaca

SEQ ID NO: 62812 - DNA, 20 bp, Artificial Sequence
  Synthetic oligonucleotide; AGGGAT chr11 5253124 5253143 5253127 -
ccacaaagggttttatgttg

SEQ ID NO: 62813 - DNA, 20 bp, Artificial Sequence
  Synthetic oligonucleotide; GTGGGT chr11 5253041 5253060 5253044 -
cttttttgtttacgttagat

SEQ ID NO: 62814 - DNA, 20 bp, Artificial Sequence
  Synthetic oligonucleotide; GGGAGT chr11 5252989 5253008 5252992 -
caataaagaaacttgtacat

SEQ ID NO: 62815 - DNA, 20 bp, Artificial Sequence
  Synthetic oligonucleotide; GGGAGT chr11 5252974 5252993 5252977 -
tacatgggagttctgcaagt

SEQ ID NO: 62816 - DNA, 20 bp, Artificial Sequence
  Synthetic oligonucleotide; CTGGAT chr11 5252851 5252870 5252854 -
agggggctgaacccccttcc

SEQ ID NO: 62817 - DNA, 20 bp, Artificial Sequence
  Synthetic oligonucleotide; AGGGAT chr11 5252773 5252792 5252776 -
taggaagtcaaggtttaggc

SEQ ID NO: 62818 - DNA, 20 bp, Artificial Sequence
  Synthetic oligonucleotide; AAGAAT chr11 5252381 5252400 5252384 -
tcagatgaaaatatagtgtg

SEQ ID NO: 62819 - DNA, 20 bp, Artificial Sequence
  Synthetic oligonucleotide; TGGAGT chr11 5252343 5252362 5252346 -
aattgagaaggcagattcac

SEQ ID NO: 62820 - DNA, 20 bp, Artificial Sequence
  Synthetic oligonucleotide; AAGAGT chr11 5252301 5252320 5252304 -
gttaatgcacgttaataagc

SEQ ID NO: 62821 - DNA, 20 bp, Artificial Sequence
  Synthetic oligonucleotide; CTGAAT chr11 5252237 5252256 5252240 -
gtctccagaaaattcacatg

SEQ ID NO: 62822 - DNA, 20 bp, Artificial Sequence
  Synthetic oligonucleotide; TAGAAT chr11 5252144 5252163 5252147 -
atgagagcagatccccatca

SEQ ID NO: 62823 - DNA, 20 bp, Artificial Sequence
  Synthetic oligonucleotide; GTGGAT chr11 5251910 5251929 5251913 -
aaaataagcttcggtgttca

SEQ ID NO: 62824 - DNA, 20 bp, Artificial Sequence
  Synthetic oligonucleotide; CAGAAT chr11 5251852 5251871 5251855 -
tccacttgtcctctgtgttt

SEQ ID NO: 62825 - DNA, 20 bp, Artificial Sequence
  Synthetic oligonucleotide; TTGAAT chr11 5251779 5251798 5251782 -
ctgagcccttctgtctaact

SEQ ID NO: 62826 - DNA, 20 bp, Artificial Sequence
  Synthetic oligonucleotide; CAGAGT chr11 5251670 5251689 5251673 -
ttcttttttttcctcagcct

SEQ ID NO: 62827 - DNA, 20 bp, Artificial Sequence
  Synthetic oligonucleotide; AGGAAT chr11 5251491 5251510 5251494 -
acaagtttataaaaaattga

SEQ ID NO: 62828 - DNA, 20 bp, Artificial Sequence
  Synthetic oligonucleotide; ATGAAT chr11 5251483 5251502 5251486 -
ataaaaaattgaaggaataa

SEQ ID NO: 62829 - DNA, 20 bp, Artificial Sequence
  Synthetic oligonucleotide; CAGAGT chr11 5251463 5251482 5251466 -
atgaatggctacttcatagg

SEQ ID NO: 62830 - DNA, 20 bp, Artificial Sequence
  Synthetic oligonucleotide; AGGGGT chr11 5251398 5251417 5251401 -
tttcaatagtatgctaaaca

SEQ ID NO: 62831 - DNA, 20 bp, Artificial Sequence
  Synthetic oligonucleotide; CAGGAT chr11 5251278 5251297 5251281 -
taatttcgaaggtacatgtg

SEQ ID NO: 62832 - DNA, 20 bp, Artificial Sequence
  Synthetic oligonucleotide; ATGGGT chr11 5251257 5251276 5251260 -
aggatgtgcaggcttgttac

SEQ ID NO: 62833 - DNA, 20 bp, Artificial Sequence
  Synthetic oligonucleotide; CAGGAT chr11 5251191 5251210 5251194 -
gagcagatataagctttaca

SEQ ID NO: 62834 - DNA, 20 bp, Artificial Sequence
  Synthetic oligonucleotide; AAGGAT chr11 5251181 5251200 5251184 -
aagctttacacaggatcatg

SEQ ID NO: 62835 - DNA, 20 bp, Artificial Sequence
  Synthetic oligonucleotide; AAGAAT chr11 5251173 5251192 5251176 -
cacaggatcatgaaggatga

SEQ ID NO: 62836 - DNA, 20 bp, Artificial Sequence
  Synthetic oligonucleotide; GGGGAT chr11 5251126 5251145 5251129 -
tcaatcaacctgatagctta

SEQ ID NO: 62837 - DNA, 20 bp, Artificial Sequence
  Synthetic oligonucleotide; CAGAAT chr11 5251084 5251103 5251087 -
acagcttgcctccgataagc

SEQ ID NO: 62838 - DNA, 20 bp, Artificial Sequence
  Synthetic oligonucleotide; ATGGAT chr11 5251037 5251056 5251040 -
atctagcaaggttagagatc

SEQ ID NO: 62839 - DNA, 20 bp, Artificial Sequence
  Synthetic oligonucleotide; TCGAGT chr11 5250886 5250905 5250889 -
tgtctaaagtacactaatat

SEQ ID NO: 62840 - DNA, 20 bp, Artificial Sequence
  Synthetic oligonucleotide; TAGAGT chr11 5250832 5250851 5250835 -
aaaaacaacccttgcctctt

SEQ ID NO: 62841 - DNA, 20 bp, Artificial Sequence
  Synthetic oligonucleotide; TAGAGT chr11 5250795 5250814 5250798 -
tacacgcacatcttatgtct

SEQ ID NO: 62842 - DNA, 20 bp, Artificial Sequence
  Synthetic oligonucleotide; CTGGGT chr11 5250670 5250689 5250673 -
agaagagctacgccaaaacc

SEQ ID NO: 62843 - DNA, 20 bp, Artificial Sequence
  Synthetic oligonucleotide; CTGAAT chr11 5250601 5250620 5250604 -
tctggtgtatacatacatac

SEQ ID NO: 62844 - DNA, 20 bp, Artificial Sequence
  Synthetic oligonucleotide; TGGAAT chr11 5250594 5250613 5250597 -
tatacatacatacctgaata

SEQ ID NO: 62845 - DNA, 20 bp, Artificial Sequence
  Synthetic oligonucleotide; ACGGAT chr11 5250541 5250560 5250544 -
atgatttatttcaaataggt

SEQ ID NO: 62846 - DNA, 20 bp, Artificial Sequence
  Synthetic oligonucleotide; AAGAGT chr11 5250403 5250422 5250406 -
agataatggcaaaagtcaca

SEQ ID NO: 62847 - DNA, 20 bp, Artificial Sequence
  Synthetic oligonucleotide; AAGAAT chr11 5250145 5250164 5250148 -
gaaggaaactagctaaaggg

SEQ ID NO: 62848 - DNA, 20 bp, Artificial Sequence
  Synthetic oligonucleotide; TGGAAT chr11 5250124 5250143 5250127 -
agaataaattagagaaaaac

SEQ ID NO: 62849 - DNA, 20 bp, Artificial Sequence
  Synthetic oligonucleotide; CTGAAT chr11 5250116 5250135 5250119 -
ttagagaaaaactggaatga

SEQ ID NO: 62850 - DNA, 20 bp, Artificial Sequence
  Synthetic oligonucleotide; ATGGGT chr11 5249997 5250016 5250000 -
tccctggctaaactccaccc

SEQ ID NO: 62851 - DNA, 20 bp, Artificial Sequence
  Synthetic oligonucleotide; TAGAGT chr11 5249936 5249955 5249939 -
gcaaacttgaccaatagtct

SEQ ID NO: 62852 - DNA, 20 bp, Artificial Sequence
  Synthetic oligonucleotide; AGGGAT chr11 5249899 5249918 5249902 -
ccaggggccggcggctggct

SEQ ID NO: 62853 - DNA, 20 bp, Artificial Sequence
  Synthetic oligonucleotide; AAGAAT chr11 5249892 5249911 5249895 -
ccggcggctggctagggatg

SEQ ID NO: 62854 - DNA, 20 bp, Artificial Sequence
  Synthetic oligonucleotide; ATGGGT chr11 5249805 5249824 5249808 -
aagctcctagtccagacgcc

SEQ ID NO: 62855 - DNA, 20 bp, Artificial Sequence
  Synthetic oligonucleotide; GTGAAT chr11 5249751 5249770 5249754 -
tcacaagcctgtggggcaag

SEQ ID NO: 62856 - DNA, 20 bp, Artificial Sequence
  Synthetic oligonucleotide; CAGGAT chr11 5249642 5249661 5249645 -
caaaagtccaggtcgcttct

SEQ ID NO: 62857 - DNA, 20 bp, Artificial Sequence
  Synthetic oligonucleotide; CTGGAT chr11 5249449 5249468 5249452 -
tgggagatgccacaaagcac

SEQ ID NO: 62858 - DNA, 20 bp, Artificial Sequence
  Synthetic oligonucleotide; CTGAGT chr11 5249419 5249438 5249422 -
tcaagggcacctttgcccag

SEQ ID NO: 62859 - DNA, 20 bp, Artificial Sequence
  Synthetic oligonucleotide; GTGGAT chr11 5249389 5249408 5249392 -
tgcactgtgacaagctgcat

SEQ ID NO: 62860 - DNA, 20 bp, Artificial Sequence
  Synthetic oligonucleotide; GTGAGT chr11 5249368 5249387 5249371 -
tggatcctgagaacttcaag

SEQ ID NO: 62861 - DNA, 20 bp, Artificial Sequence
  Synthetic oligonucleotide; CGGAGT chr11 5249311 5249330 5249314 -
tctcgaggcaacttagacaa

SEQ ID NO: 62862 - DNA, 20 bp, Artificial Sequence
  Synthetic oligonucleotide; CAGGGT chr11 5249289 5249308 5249292 -
gagtattgatctgagcacag

SEQ ID NO: 62863 - DNA, 20 bp, Artificial Sequence
  Synthetic oligonucleotide; TGGGGT chr11 5249264 5249283 5249267 -
tgtgagctgtttgaagatac

SEQ ID NO: 62864 - DNA, 20 bp, Artificial Sequence
  Synthetic oligonucleotide; GGGGGT chr11 5249257 5249276 5249260 -
tgtttgaagatactggggtt

SEQ ID NO: 62865 - DNA, 20 bp, Artificial Sequence
  Synthetic oligonucleotide; AGGAGT chr11 5249194 5249213 5249197 -
tggtaatgttttagggccta

SEQ ID NO: 62866 - DNA, 20 bp, Artificial Sequence
  Synthetic oligonucleotide; AGGGGT chr11 5248856 5248875 5248859 -
gatgggggcaaagtatgtcc

SEQ ID NO: 62867 - DNA, 20 bp, Artificial Sequence
  Synthetic oligonucleotide; TGGAGT chr11 5248826 5248845 5248829 -
aacaattgaaacatttgggc

SEQ ID NO: 62868 - DNA, 20 bp, Artificial Sequence
  Synthetic oligonucleotide; CAGGGT chr11 5248717 5248736 5248720 -
cgtcttcagcctacaacata

SEQ ID NO: 62869 - DNA, 20 bp, Artificial Sequence
  Synthetic oligonucleotide; CTGGGT chr11 5248583 5248602 5248586 -
aagttaacataggcttgatt

SEQ ID NO: 62870 - DNA, 20 bp, Artificial Sequence
  Synthetic oligonucleotide; ATGGGT chr11 5248525 5248544 5248528 -
gctggagctctcagctcact

SEQ ID NO: 62871 - DNA, 20 bp, Artificial Sequence
  Synthetic oligonucleotide; AAGAAT chr11 5248442 5248461 5248445 -
tttggcaatccatttcggca

SEQ ID NO: 62872 - DNA, 20 bp, Artificial Sequence
  Synthetic oligonucleotide; AAGGAT chr11 5248332 5248351 5248335 -
gcccatgattcagagctttc

SEQ ID NO: 62873 - DNA, 20 bp, Artificial Sequence
  Synthetic oligonucleotide; AAGGGT chr11 5248219 5248238 5248222 -
ttttaaatatatgagccaca

SEQ ID NO: 62874 - DNA, 20 bp, Artificial Sequence
  Synthetic oligonucleotide; GGGAGT chr11 5248079 5248098 5248082 -
cagtaaagacacttgtacac

SEQ ID NO: 62875 - DNA, 20 bp, Artificial Sequence
  Synthetic oligonucleotide; GGGAGT chr11 5248064 5248083 5248067 -
tacacgggagttctgcaagt

SEQ ID NO: 62876 - DNA, 20 bp, Artificial Sequence
  Synthetic oligonucleotide; CTGGAT chr11 5247950 5247969 5247953 -
gttcagtgaagacctggggg

SEQ ID NO: 62877 - DNA, 20 bp, Artificial Sequence
  Synthetic oligonucleotide; CTGAGT chr11 5247935 5247954 5247938 -
gggggctggattgattgcag

SEQ ID NO: 62878 - DNA, 20 bp, Artificial Sequence
  Synthetic oligonucleotide; AAGGAT chr11 5247926 5247945 5247929 -
attgattgcagctgagtagc

SEQ ID NO: 62879 - DNA, 20 bp, Artificial Sequence
  Synthetic oligonucleotide; AGGAAT chr11 5247887 5247906 5247890 -
gggaaagtgttccaagcttt

SEQ ID NO: 62880 - DNA, 20 bp, Artificial Sequence
  Synthetic oligonucleotide; AGGAAT chr11 5247842 5247861 5247845 -
agcaattctattttattagg

SEQ ID NO: 62881 - DNA, 20 bp, Artificial Sequence
  Synthetic oligonucleotide; GTGGAT chr11 5247800 5247819 5247803 -
cttagcttttcacagccctt

SEQ ID NO: 62882 - DNA, 20 bp, Artificial Sequence
  Synthetic oligonucleotide; ATGAAT chr11 5247680 5247699 5247683 -
tggggacttaggtgtaagaa

SEQ ID NO: 62883 - DNA, 20 bp, Artificial Sequence
  Synthetic oligonucleotide; AAGAAT chr11 5247596 5247615 5247599 -
tgagatcaaaatgtagtggg

SEQ ID NO: 62884 - DNA, 20 bp, Artificial Sequence
  Synthetic oligonucleotide; TGGAAT chr11 5247559 5247578 5247562 -
taattggaaggcttacttaa

SEQ ID NO: 62885 - DNA, 20 bp, Artificial Sequence
  Synthetic oligonucleotide; TTGGAT chr11 5247543 5247562 5247546 -
ttaatggaatttttgtatag

SEQ ID NO: 62886 - DNA, 20 bp, Artificial Sequence
  Synthetic oligonucleotide; AAGAGT chr11 5247517 5247536 5247520 -
gttagtgcatctctataagt

SEQ ID NO: 62887 - DNA, 20 bp, Artificial Sequence
  Synthetic oligonucleotide; CTGAAT chr11 5247458 5247477 5247461 -
gtctcctcaaaattcacatg

SEQ ID NO: 62888 - DNA, 20 bp, Artificial Sequence
  Synthetic oligonucleotide; ACGAGT chr11 5247256 5247275 5247259 -
ccaggaagagaaccctgacc

SEQ ID NO: 62889 - DNA, 20 bp, Artificial Sequence
  Synthetic oligonucleotide; CTGAGT chr11 5247174 5247193 5247177 -
ttttgttatagcaccttgca

SEQ ID NO: 62890 - DNA, 20 bp, Artificial Sequence
  Synthetic oligonucleotide; TTGGGT chr11 5247137 5247156 5247140 -
agaaggagaaaaaaataagc

SEQ ID NO: 62891 - DNA, 20 bp, Artificial Sequence
  Synthetic oligonucleotide; TTGAGT chr11 5247130 5247149 5247133 -
gaaaaaaataagcttgggtt

SEQ ID NO: 62892 - DNA, 20 bp, Artificial Sequence
  Synthetic oligonucleotide; CAGAAT chr11 5246877 5246896 5246880 -
ttcttttttctcctcagcct

SEQ ID NO: 62893 - DNA, 20 bp, Artificial Sequence
  Synthetic oligonucleotide; CAGAAT chr11 5246772 5246791 5246775 -
aaatgcagtcactaccgttt

SEQ ID NO: 62894 - DNA, 20 bp, Artificial Sequence
  Synthetic oligonucleotide; GAGAGT chr11 5246709 5246728 5246712 -
agtcaaagcaaatttcttga

SEQ ID NO: 62895 - DNA, 20 bp, Artificial Sequence
  Synthetic oligonucleotide; ACGAAT chr11 5246693 5246712 5246696 -
ttgagagagtaaagaaataa

SEQ ID NO: 62896 - DNA, 20 bp, Artificial Sequence
  Synthetic oligonucleotide; TTGGAT chr11 5246605 5246624 5246608 -
gatgatatgttaaacaagtt

SEQ ID NO: 62897 - DNA, 20 bp, Artificial Sequence
  Synthetic oligonucleotide; TAGGGT chr11 5246571 5246590 5246574 -
ccttctctttttaggccata

SEQ ID NO: 62898 - DNA, 20 bp, Artificial Sequence
  Synthetic oligonucleotide; AGGGGT chr11 5246505 5246524 5246508 -
tttactgttaccttaaattc

SEQ ID NO: 62899 - DNA, 20 bp, Artificial Sequence
  Synthetic oligonucleotide; CAGGAT chr11 5246492 5246511 5246495 -
taaattcaggggtacacgta

SEQ ID NO: 62900 - DNA, 20 bp, Artificial Sequence
  Synthetic oligonucleotide; ATGGGT chr11 5246445 5246464 5246448 -
aaaagtgtgccatggtttta

SEQ ID NO: 62901 - DNA, 20 bp, Artificial Sequence
  Synthetic oligonucleotide; CTGGAT chr11 5246399 5246418 5246402 -
gtttaagtttcttgtttact

SEQ ID NO: 62902 - DNA, 20 bp, Artificial Sequence
  Synthetic oligonucleotide; AAGAAT chr11 5246377 5246396 5246380 -
ggatattaggcctttgtcag

SEQ ID NO: 62903 - DNA, 20 bp, Artificial Sequence
  Synthetic oligonucleotide; ATGAAT chr11 5246203 5246222 5246206 -
tctgtgcccgtgtttatatc

SEQ ID NO: 62904 - DNA, 20 bp, Artificial Sequence
  Synthetic oligonucleotide; TGGGGT chr11 5246160 5246179 5246163 -
tttctaggctttttatagtt

SEQ ID NO: 62905 - DNA, 20 bp, Artificial Sequence
  Synthetic oligonucleotide; TGGAGT chr11 5246129 5246148 5246132 -
atttaagtctctaatccatc

SEQ ID NO: 62906 - DNA, 20 bp, Artificial Sequence
  Synthetic oligonucleotide; TTGGAT chr11 5246118 5246137 5246121 -
taatccatctggagttaatt

SEQ ID NO: 62907 - DNA, 20 bp, Artificial Sequence
  Synthetic oligonucleotide; AGGAGT chr11 5246100 5246119 5246103 -
ttttggataaggtataagga

SEQ ID NO: 62908 - DNA, 20 bp, Artificial Sequence
  Synthetic oligonucleotide; GAGAAT chr11 5245862 5245881 5245865 -
agtgagggcaccattagcca

SEQ ID NO: 62909 - DNA, 20 bp, Artificial Sequence
  Synthetic oligonucleotide; CAGAAT chr11 5245829 5245848 5245832 -
tctagttcatgtaagattct

SEQ ID NO: 62910 - DNA, 20 bp, Artificial Sequence
  Synthetic oligonucleotide; ATGGAT chr11 5245815 5245834 5245818 -
gattctcagaattaagaaaa

SEQ ID NO: 62911 - DNA, 20 bp, Artificial Sequence
  Synthetic oligonucleotide; ATGAAT chr11 5245804 5245823 5245807 -
ttaagaaaaatggatggcat

SEQ ID NO: 62912 - DNA, 20 bp, Artificial Sequence
  Synthetic oligonucleotide; ATGGAT chr11 5245790 5245809 5245793 -
tggcatatgaatgaaacttc

SEQ ID NO: 62913 - DNA, 20 bp, Artificial Sequence
  Synthetic oligonucleotide; TGGAAT chr11 5245778 5245797 5245781 -
gaaacttcatggatgacata

SEQ ID NO: 62914 - DNA, 20 bp, Artificial Sequence
  Synthetic oligonucleotide; TTGAAT chr11 5245758 5245777 5245761 -
tggaatctaatatgtatttg

SEQ ID NO: 62915 - DNA, 20 bp, Artificial Sequence
  Synthetic oligonucleotide; AAGAGT chr11 5245689 5245708 5245692 -
taacctggtattgatgatat

SEQ ID NO: 62916 - DNA, 20 bp, Artificial Sequence
  Synthetic oligonucleotide; AAGAAT chr11 5245616 5245635 5245619 -
gggaacagccacaaacaaga

SEQ ID NO: 62917 - DNA, 20 bp, Artificial Sequence
  Synthetic oligonucleotide; GCGGGT chr11 5245569 5245588 5245572 -
tgcaggtcacttttcctgga

SEQ ID NO: 62918 - DNA, 20 bp, Artificial Sequence
  Synthetic oligonucleotide; CTGAAT chr11 5245534 5245553 5245537 -
gtggaagttagcagtaactg

SEQ ID NO: 62919 - DNA, 20 bp, Artificial Sequence
  Synthetic oligonucleotide; CAGGGT chr11 5245483 5245502 5245486 -
ggcagctgttcactggtacg

SEQ ID NO: 62920 - DNA, 20 bp, Artificial Sequence
  Synthetic oligonucleotide; AAGGAT chr11 5245460 5245479 5245463 -
ggttttagatgtatgtacct

SEQ ID NO: 62921 - DNA, 20 bp, Artificial Sequence
  Synthetic oligonucleotide; GGGAAT chr11 5245423 5245442 5245426 -
caatgaacagaaattctttt

SEQ ID NO: 62922 - DNA, 20 bp, Artificial Sequence
  Synthetic oligonucleotide; ATGAGT chr11 5245419 5245438 5245422 -
gaacagaaattcttttggga

SEQ ID NO: 62923 - DNA, 20 bp, Artificial Sequence
  Synthetic oligonucleotide; TTGGGT chr11 5245140 5245159 5245143 -
agaaattcagctttaatata

SEQ ID NO: 62924 - DNA, 20 bp, Artificial Sequence
  Synthetic oligonucleotide; TAGAGT chr11 5245118 5245137 5245121 -
gggtttaactctttgaaatt

SEQ ID NO: 62925 - DNA, 20 bp, Artificial Sequence
  Synthetic oligonucleotide; GGGGGT chr11 5245095 5245114 5245098 -
agtctccttgaaatacacat

SEQ ID NO: 62926 - DNA, 20 bp, Artificial Sequence
  Synthetic oligonucleotide; AAGGAT chr11 5245065 5245084 5245068 -
tcctaaactttatttcttgt

SEQ ID NO: 62927 - DNA, 20 bp, Artificial Sequence
  Synthetic oligonucleotide; AGGGGT chr11 5245052 5245071 5245055 -
ttcttgtaaggatttatctc

SEQ ID NO: 62928 - DNA, 20 bp, Artificial Sequence
  Synthetic oligonucleotide; AAGAAT chr11 5244996 5245015 5244999 -
gtatgaggacagtaagcctt

SEQ ID NO: 62929 - DNA, 20 bp, Artificial Sequence
  Synthetic oligonucleotide; TGGAAT chr11 5244878 5244897 5244881 -
gagacacgtgcagcagcctg

SEQ ID NO: 62930 - DNA, 20 bp, Artificial Sequence
  Synthetic oligonucleotide; AAGAAT chr11 5244862 5244881 5244865 -
cctgtggaatattgtcagtg

SEQ ID NO: 62931 - DNA, 20 bp, Artificial Sequence
  Synthetic oligonucleotide; CGGAAT chr11 5244757 5244776 5244760 -
ctaatgcccagcacgggcca

SEQ ID NO: 62932 - DNA, 20 bp, Artificial Sequence
  Synthetic oligonucleotide; TAGGAT chr11 5244671 5244690 5244674 -
ggcataattttgtagatatg

SEQ ID NO: 62933 - DNA, 20 bp, Artificial Sequence
  Synthetic oligonucleotide; ATGGAT chr11 5244596 5244615 5244599 -
ataagtacactgactactaa

SEQ ID NO: 62934 - DNA, 20 bp, Artificial Sequence
  Synthetic oligonucleotide; CTGGAT chr11 5244511 5244530 5244514 -
tgctttcttccaagttgatg

SEQ ID NO: 62935 - DNA, 20 bp, Artificial Sequence
  Synthetic oligonucleotide; GCGGAT chr11 5244413 5244432 5244416 -
actttgggaggctgaggtgg

SEQ ID NO: 62936 - DNA, 20 bp, Artificial Sequence
  Synthetic oligonucleotide; GCGGGT chr11 5244320 5244339 5244323 -
aaaattagccagagacagtg

SEQ ID NO: 62937 - DNA, 20 bp, Artificial Sequence
  Synthetic oligonucleotide; GAGAAT chr11 5244279 5244298 5244282 -
tactcgggaggctgaggcag

SEQ ID NO: 62938 - DNA, 20 bp, Artificial Sequence
  Synthetic oligonucleotide; CTGGGT chr11 5244212 5244231 5244215 -
gcgccactgcacactccagc

SEQ ID NO: 62939 - DNA, 20 bp, Artificial Sequence
  Synthetic oligonucleotide; GAGAAT chr11 5244105 5244124 5244108 -
tgtattcaatgtagtctcaa

SEQ ID NO: 62940 - DNA, 20 bp, Artificial Sequence
  Synthetic oligonucleotide; CTGGAT chr11 5244060 5244079 5244063 -
tggcttcttccacataaagc

SEQ ID NO: 62941 - DNA, 20 bp, Artificial Sequence
  Synthetic oligonucleotide; ATGAAT chr11 5244056 5244075 5244059 -
ttcttccacataaagcctgg

SEQ ID NO: 62942 - DNA, 20 bp, Artificial Sequence
  Synthetic oligonucleotide; CAGGAT chr11 5244048 5244067 5244051 -
cataaagcctggatgaataa

SEQ ID NO: 62943 - DNA, 20 bp, Artificial Sequence
  Synthetic oligonucleotide; AGGAAT chr11 5244009 5244028 5244012 -
attgtcacaactcctgatcc

SEQ ID NO: 62944 - DNA, 20 bp, Artificial Sequence
  Synthetic oligonucleotide; CTGGAT chr11 5243890 5243909 5243893 -
cttgagaaataaactgcaca

SEQ ID NO: 62945 - DNA, 20 bp, Artificial Sequence
  Synthetic oligonucleotide; GGGGGT chr11 5243881 5243900 5243884 -
taaactgcacactggatggt

SEQ ID NO: 62946 - DNA, 20 bp, Artificial Sequence
  Synthetic oligonucleotide; CTGGAT chr11 5243799 5243818 5243802 -
agttcccctgagaaggccac

SEQ ID NO: 62947 - DNA, 20 bp, Artificial Sequence
  Synthetic oligonucleotide; TCGAAT chr11 5243781 5243800 5243784 -
acctggattctatcagaaac

SEQ ID NO: 62948 - DNA, 20 bp, Artificial Sequence
  Synthetic oligonucleotide; TGGAGT chr11 5243737 5243756 5243740 -
ccttgcccaaaccccacccc

SEQ ID NO: 62949 - DNA, 20 bp, Artificial Sequence
  Synthetic oligonucleotide; AGGGAT chr11 5243396 5243415 5243399 -
gcagaaagtgtttctgaaag

SEQ ID NO: 62950 - DNA, 20 bp, Artificial Sequence
  Synthetic oligonucleotide; TTGGAT chr11 5243285 5243304 5243288 -
ctagaggtactttgaaagtt

SEQ ID NO: 62951 - DNA, 20 bp, Artificial Sequence
  Synthetic oligonucleotide; ACGGAT chr11 5243187 5243206 5243190 -
tcggaaaagctgttatgctc

SEQ ID NO: 62952 - DNA, 20 bp, Artificial Sequence
  Synthetic oligonucleotide; CTGAGT chr11 5243157 5243176 5243160 -
tcaaaggcacctttgctaca

SEQ ID NO: 62953 - DNA, 20 bp, Artificial Sequence
  Synthetic oligonucleotide; GTGAGT chr11 5243106 5243125 5243109 -
tggaccctgagaacttcctg

SEQ ID NO: 62954 - DNA, 20 bp, Artificial Sequence
  Synthetic oligonucleotide; ATGGGT chr11 5243054 5243073 5243057 -
tacccttagatatttgcact

SEQ ID NO: 62955 - DNA, 20 bp, Artificial Sequence
  Synthetic oligonucleotide; ATGAGT chr11 5243014 5243033 5243017 -
aggtggctttctcttgtgtt

SEQ ID NO: 62956 - DNA, 20 bp, Artificial Sequence
  Synthetic oligonucleotide; TGGGAT chr11 5243002 5243021 5243005 -
cttgtgttatgagtcagcta

SEQ ID NO: 62957 - DNA, 20 bp, Artificial Sequence
  Synthetic oligonucleotide; TGGGAT chr11 5242981 5243000 5242984 -
gggatatgatatttcagcag

SEQ ID NO: 62958 - DNA, 20 bp, Artificial Sequence
  Synthetic oligonucleotide; GAGAGT chr11 5242972 5242991 5242975 -
tatttcagcagtgggatttt

SEQ ID NO: 62959 - DNA, 20 bp, Artificial Sequence
  Synthetic oligonucleotide; ATGAAT chr11 5242920 5242939 5242923 -
aatttggtagagcaaggact

SEQ ID NO: 62960 - DNA, 20 bp, Artificial Sequence
  Synthetic oligonucleotide; CTGAGT chr11 5242844 5242863 5242847 -
aaattctggccaaaatcaaa

SEQ ID NO: 62961 - DNA, 20 bp, Artificial Sequence
  Synthetic oligonucleotide; TTGGAT chr11 5242834 5242853 5242837 -
caaaatcaaactgagtgttt

SEQ ID NO: 62962 - DNA, 20 bp, Artificial Sequence
  Synthetic oligonucleotide; GAGGAT chr11 5242684 5242703 5242687 -
tagtgggaagctgttaaaaa

SEQ ID NO: 62963 - DNA, 20 bp, Artificial Sequence
  Synthetic oligonucleotide; CCGAAT chr11 5242669 5242688 5242672 -
aaaaagaggattgtttccct

SEQ ID NO: 62964 - DNA, 20 bp, Artificial Sequence
  Synthetic oligonucleotide; CAGGAT chr11 5242634 5242653 5242637 -
atacttttgtacgcatggta

SEQ ID NO: 62965 - DNA, 20 bp, Artificial Sequence
  Synthetic oligonucleotide; ATGAGT chr11 5242620 5242639 5242623 -
atggtacaggattctttgtt

SEQ ID NO: 62966 - DNA, 20 bp, Artificial Sequence
  Synthetic oligonucleotide; TGGGGT chr11 5242469 5242488 5242472 -
atgaaacaatcacaatatgt

SEQ ID NO: 62967 - DNA, 20 bp, Artificial Sequence
  Synthetic oligonucleotide; GTGAGT chr11 5242462 5242481 5242465 -
aatcacaatatgttggggta

SEQ ID NO: 62968 - DNA, 20 bp, Artificial Sequence
  Synthetic oligonucleotide; AAGGAT chr11 5242438 5242457 5242441 -
gttggcatagcaagtaagag

SEQ ID NO: 62969 - DNA, 20 bp, Artificial Sequence
  Synthetic oligonucleotide; GAGAGT chr11 5242369 5242388 5242372 -
gatatctagcccataatggt

SEQ ID NO: 62970 - DNA, 20 bp, Artificial Sequence
  Synthetic oligonucleotide; AAGGAT chr11 5242344 5242363 5242347 -
ttgctcaaactctggtgaaa

SEQ ID NO: 62971 - DNA, 20 bp, Artificial Sequence
  Synthetic oligonucleotide; GAGGAT chr11 5242203 5242222 5242206 -
ttttggcaacccacttcagc

SEQ ID NO: 62972 - DNA, 20 bp, Artificial Sequence
  Synthetic oligonucleotide; CTGAGT chr11 5242124 5242143 5242127 -
tgctgtagcccacaagacca

SEQ ID NO: 62973 - DNA, 20 bp, Artificial Sequence
  Synthetic oligonucleotide; TAGAAT chr11 5241983 5242002 5241986 -
cagttcctgcatgataaaaa

SEQ ID NO: 62974 - DNA, 20 bp, Artificial Sequence
  Synthetic oligonucleotide; GAGAAT chr11 5241879 5241898 5241882 -
gcactatttctgatggaaat

SEQ ID NO: 62975 - DNA, 20 bp, Artificial Sequence
  Synthetic oligonucleotide; GAGAAT chr11 5241869 5241888 5241872 -
tgatggaaatgagaatgttg

SEQ ID NO: 62976 - DNA, 20 bp, Artificial Sequence
  Synthetic oligonucleotide; GGGAGT chr11 5241863 5241882 5241866 -
aaatgagaatgttggagaat

SEQ ID NO: 62977 - DNA, 20 bp, Artificial Sequence
  Synthetic oligonucleotide; GTGGGT chr11 5241805 5241824 5241808 -
tgcaagaaaagagagaactc

SEQ ID NO: 62978 - DNA, 20 bp, Artificial Sequence
  Synthetic oligonucleotide; GTGGAT chr11 5241801 5241820 5241804 -
agaaaagagagaactcgtgg

SEQ ID NO: 62979 - DNA, 20 bp, Artificial Sequence
  Synthetic oligonucleotide; TGGGGT chr11 5241791 5241810 5241794 -
gaactcgtgggtggatttag

SEQ ID NO: 62980 - DNA, 20 bp, Artificial Sequence
  Synthetic oligonucleotide; TAGAAT chr11 5241756 5241775 5241759 -
taggaaggggaaatcgtctc

SEQ ID NO: 62981 - DNA, 20 bp, Artificial Sequence
  Synthetic oligonucleotide; GAGGAT chr11 5241695 5241714 5241698 -
ggtactctttggaggtgtaa

SEQ ID NO: 62982 - DNA, 20 bp, Artificial Sequence
  Synthetic oligonucleotide; CAGGAT chr11 5241617 5241636 5241620 -
gctattatttgtatgaaact

SEQ ID NO: 62983 - DNA, 20 bp, Artificial Sequence
  Synthetic oligonucleotide; GGGGAT chr11 5241538 5241557 5241541 -
tttattatttataatgaagt

SEQ ID NO: 62984 - DNA, 20 bp, Artificial Sequence
  Synthetic oligonucleotide; GAGAAT chr11 5241463 5241482 5241466 -
cgtcttcaatggtattaata

SEQ ID NO: 62985 - DNA, 20 bp, Artificial Sequence
  Synthetic oligonucleotide; AAGGAT chr11 5241326 5241345 5241329 -
tatcatatgtattttcctta

SEQ ID NO: 62986 - DNA, 20 bp, Artificial Sequence
  Synthetic oligonucleotide; TTGAAT chr11 5241305 5241324 5241308 -
aggatttttgtaagaactaa

SEQ ID NO: 62987 - DNA, 20 bp, Artificial Sequence
  Synthetic oligonucleotide; ATGAAT chr11 5241129 5241148 5241132 -
cataaatatatacaattttt

SEQ ID NO: 62988 - DNA, 20 bp, Artificial Sequence
  Synthetic oligonucleotide; GAGAAT chr11 5241011 5241030 5241014 -
gttaagtcaagttgatagag

SEQ ID NO: 62989 - DNA, 20 bp, Artificial Sequence
  Synthetic oligonucleotide; CAGGAT chr11 5240987 5241006 5240990 -
atatggacatttaaaagagg

SEQ ID NO: 62990 - DNA, 20 bp, Artificial Sequence
  Synthetic oligonucleotide; CTGGAT chr11 5240963 5240982 5240966 -
atgatataaaattagggaaa

SEQ ID NO: 62991 - DNA, 20 bp, Artificial Sequence
  Synthetic oligonucleotide; GAGAGT chr11 5240888 5240907 5240891 -
cactgaagtttcttgcatat

SEQ ID NO: 62992 - DNA, 20 bp, Artificial Sequence
  Synthetic oligonucleotide; TTGGGT chr11 5240805 5240824 5240808 -
ctgattagacaaagtctaac

SEQ ID NO: 62993 - DNA, 20 bp, Artificial Sequence
  Synthetic oligonucleotide; ATGGAT chr11 5240763 5240782 5240766 -
gctgtaattatattgaggtg

SEQ ID NO: 62994 - DNA, 20 bp, Artificial Sequence
  Synthetic oligonucleotide; TCGAGT chr11 5240714 5240733 5240717 -
aatgaagttaagaaaaaaaa

SEQ ID NO: 62995 - DNA, 20 bp, Artificial Sequence
  Synthetic oligonucleotide; GAGAGT chr11 5240657 5240676 5240660 -
ctggaaaacattgtgaaaca

SEQ ID NO: 62996 - DNA, 20 bp, Artificial Sequence
  Synthetic oligonucleotide; GTGAAT chr11 5240624 5240643 5240627 -
gacagctaaaatccctgtct

SEQ ID NO: 62997 - DNA, 20 bp, Artificial Sequence
  Synthetic oligonucleotide; TTGGAT chr11 5240567 5240586 5240570 -
aatgcctacaagccccctgt

SEQ ID NO: 62998 - DNA, 20 bp, Artificial Sequence
  Synthetic oligonucleotide; TTGAGT chr11 5240346 5240365 5240349 -
agctcacctcaccatatctc

SEQ ID NO: 62999 - DNA, 20 bp, Artificial Sequence
  Synthetic oligonucleotide; TTGAGT chr11 5240279 5240298 5240282 -
gaaattcctttgtcatattt

SEQ ID NO: 63000 - DNA, 20 bp, Artificial Sequence
  Synthetic oligonucleotide; CAGAAT chr11 5240252 5240271 5240255 -
cccactaataacccacaaag

SEQ ID NO: 63001 - DNA, 20 bp, Artificial Sequence
  Synthetic oligonucleotide; TTGAAT chr11 5240175 5240194 5240178 -
acattaattaagcacattct

SEQ ID NO: 63002 - DNA, 20 bp, Artificial Sequence
  Synthetic oligonucleotide; CTGAAT chr11 5240109 5240128 5240112 -
ttgtgctatcccttgccctt

SEQ ID NO: 63003 - DNA, 20 bp, Artificial Sequence
  Synthetic oligonucleotide; GAGGGT chr11 5240076 5240095 5240079 -
tgtattttaaatgaagagat

SEQ ID NO: 63004 - DNA, 20 bp, Artificial Sequence
  Synthetic oligonucleotide; TTGAAT chr11 5240071 5240090 5240074 -
tttaaatgaagagatgaggg

SEQ ID NO: 63005 - DNA, 20 bp, Artificial Sequence
  Synthetic oligonucleotide; AGGAGT chr11 5240033 5240052 5240036 -
ttattgttcatttctcgatg

SEQ ID NO: 63006 - DNA, 20 bp, Artificial Sequence
  Synthetic oligonucleotide; ATGAAT chr11 5239953 5239972 5239956 -
ataccaaactgacatgtagc

SEQ ID NO: 63007 - DNA, 20 bp, Artificial Sequence
  Synthetic oligonucleotide; TTGAGT chr11 5239795 5239814 5239798 -
acactgttacagatgcatac

SEQ ID NO: 63008 - DNA, 20 bp, Artificial Sequence
  Synthetic oligonucleotide; GAGAAT chr11 5239760 5239779 5239763 -
aaattaccccagtcaatcta

SEQ ID NO: 63009 - DNA, 20 bp, Artificial Sequence
  Synthetic oligonucleotide; TTGGAT chr11 5239754 5239773 5239757 -
ccccagtcaatctagagaat

SEQ ID NO: 63010 - DNA, 20 bp, Artificial Sequence
  Synthetic oligonucleotide; CTGGGT chr11 5239703 5239722 5239706 -
gtacatgctgttcatttact

SEQ ID NO: 63011 - DNA, 20 bp, Artificial Sequence
  Synthetic oligonucleotide; ATGAGT chr11 5239369 5239388 5239372 -
agatctctcttttctacatt

SEQ ID NO: 63012 - DNA, 20 bp, Artificial Sequence
  Synthetic oligonucleotide; CAGAAT chr11 5239200 5239219 5239203 -
tgtcatgcatttattcacat

SEQ ID NO: 63013 - DNA, 20 bp, Artificial Sequence
  Synthetic oligonucleotide; TAGGGT chr11 5239141 5239160 5239144 -
agtttattagttatatcagt

SEQ ID NO: 63014 - DNA, 20 bp, Artificial Sequence
  Synthetic oligonucleotide; TAGAAT chr11 5239096 5239115 5239099 -
ccattatcagttactcaacc

SEQ ID NO: 63015 - DNA, 20 bp, Artificial Sequence
  Synthetic oligonucleotide; CAGAGT chr11 5238939 5238958 5238942 -
ggagaaaatgtttataccac

SEQ ID NO: 63016 - DNA, 20 bp, Artificial Sequence
  Synthetic oligonucleotide; CTGGAT chr11 5238903 5238922 5238906 -
agcccataaccagaggtcca

SEQ ID NO: 63017 - DNA, 20 bp, Artificial Sequence
  Synthetic oligonucleotide; GTGGGT chr11 5238886 5238905 5238889 -
ccactggattcagtgagcta

SEQ ID NO: 63018 - DNA, 20 bp, Artificial Sequence
  Synthetic oligonucleotide; CAGAAT chr11 5238722 5238741 5238725 -
tcagccagtgtttaccattg

SEQ ID NO: 63019 - DNA, 20 bp, Artificial Sequence
  Synthetic oligonucleotide; AAGGGT chr11 5238702 5238721 5238705 -
cagaatgtacatgcgactga

SEQ ID NO: 63020 - DNA, 20 bp, Artificial Sequence
  Synthetic oligonucleotide; AAGGAT chr11 5238647 5238666 5238650 -
aatacagagaacactgaggg

SEQ ID NO: 63021 - DNA, 20 bp, Artificial Sequence
  Synthetic oligonucleotide; ATGAAT chr11 5238618 5238637 5238621 -
aaataaatgtgaaagcagac

SEQ ID NO: 63022 - DNA, 20 bp, Artificial Sequence
  Synthetic oligonucleotide; TAGGAT chr11 5238592 5238611 5238595 -
ggtaattgacagaaggaaac

SEQ ID NO: 63023 - DNA, 20 bp, Artificial Sequence
  Synthetic oligonucleotide; ATGAAT chr11 5238575 5238594 5238578 -
aactaggatgtgtccagtaa

SEQ ID NO: 63024 - DNA, 20 bp, Artificial Sequence
  Synthetic oligonucleotide; CAGAAT chr11 5238509 5238528 5238512 -
gataagataatatgaaaaca

SEQ ID NO: 63025 - DNA, 20 bp, Artificial Sequence
  Synthetic oligonucleotide; TAGAAT chr11 5238481 5238500 5238484 -
aaacagcagtgaactgagat

SEQ ID NO: 63026 - DNA, 20 bp, Artificial Sequence
  Synthetic oligonucleotide; AAGAAT chr11 5238455 5238474 5238458 -
tgtggagagcactggcattt

SEQ ID NO: 63027 - DNA, 20 bp, Artificial Sequence
  Synthetic oligonucleotide; TAGAAT chr11 5238441 5238460 5238444 -
gcatttaagaatgtcacact

SEQ ID NO: 63028 - DNA, 20 bp, Artificial Sequence
  Synthetic oligonucleotide; ATGAAT chr11 5238378 5238397 5238381 -
atattcattatctgaaaatt

SEQ ID NO: 63029 - DNA, 20 bp, Artificial Sequence
  Synthetic oligonucleotide; TGGAGT chr11 5238280 5238299 5238283 -
attgctatggttgcccaggc

SEQ ID NO: 63030 - DNA, 20 bp, Artificial Sequence
  Synthetic oligonucleotide; GGGGGT chr11 5238137 5238156 5238140 -
ttttctatttttagtagata

SEQ ID NO: 63031 - DNA, 20 bp, Artificial Sequence
  Synthetic oligonucleotide; TGGGAT chr11 5238058 5238077 5238061 -
tcctcggcctctgaaagtgc

SEQ ID NO: 63032 - DNA, 20 bp, Artificial Sequence
  Synthetic oligonucleotide; AAGAAT chr11 5238025 5238044 5238028 -
gtgagccaccacacccagcc

SEQ ID NO: 63033 - DNA, 20 bp, Artificial Sequence
  Synthetic oligonucleotide; GTGAAT chr11 5238019 5238038 5238022 -
caccacacccagccaagaat

SEQ ID NO: 63034 - DNA, 20 bp, Artificial Sequence
  Synthetic oligonucleotide; AAGGAT chr11 5238006 5238025 5238009 -
caagaatgtgaattttgtag

SEQ ID NO: 63035 - DNA, 20 bp, Artificial Sequence
  Synthetic oligonucleotide; TAGAGT chr11 5237978 5237997 5237981 -
aacccatatttctctgaccc

SEQ ID NO: 63036 - DNA, 20 bp, Artificial Sequence
  Synthetic oligonucleotide; CTGAGT chr11 5237778 5237797 5237781 -
tacactaattaaaatcgata

SEQ ID NO: 63037 - DNA, 20 bp, Artificial Sequence
  Synthetic oligonucleotide; GGGGAT chr11 5237760 5237779 5237763 -
tactgagttctaaaatcatc

SEQ ID NO: 63038 - DNA, 20 bp, Artificial Sequence
  Synthetic oligonucleotide; TTGGAT chr11 5237656 5237675 5237659 -
actttgtattcatcacactc

SEQ ID NO: 63039 - DNA, 20 bp, Artificial Sequence
  Synthetic oligonucleotide; ATGGGT chr11 5237493 5237512 5237496 -
ataggcacctcagactcagc

SEQ ID NO: 63040 - DNA, 20 bp, Artificial Sequence
  Synthetic oligonucleotide; AAGAGT chr11 5237288 5237307 5237291 -
gtcctcattgtttcctgaac

SEQ ID NO: 63041 - DNA, 20 bp, Artificial Sequence
  Synthetic oligonucleotide; CTGGAT chr11 5237246 5237265 5237249 -
acttttagaccttatcctgg

SEQ ID NO: 63042 - DNA, 20 bp, Artificial Sequence
  Synthetic oligonucleotide; AGGAGT chr11 5237176 5237195 5237179 -
caggcagatcacttgaggtc

SEQ ID NO: 63043 - DNA, 20 bp, Artificial Sequence
  Synthetic oligonucleotide; GAGAAT chr11 5237060 5237079 5237063 -
tattcaggtggctgaggcag

SEQ ID NO: 63044 - DNA, 20 bp, Artificial Sequence
  Synthetic oligonucleotide; AGGGAT chr11 5236986 5237005 5236989 -
tgcactctagcttgggcaat

SEQ ID NO: 63045 - DNA, 20 bp, Artificial Sequence
  Synthetic oligonucleotide; TAGAAT chr11 5236907 5236926 5236910 -
tcctctcaatgcaatccata

SEQ ID NO: 63046 - DNA, 20 bp, Artificial Sequence
  Synthetic oligonucleotide; CAGAAT chr11 5236854 5236873 5236857 -
taaaatcatttcaggtagaa

SEQ ID NO: 63047 - DNA, 20 bp, Artificial Sequence
  Synthetic oligonucleotide; TGGAAT chr11 5236827 5236846 5236830 -
aaagtgaaaagccaagtctt

SEQ ID NO: 63048 - DNA, 20 bp, Artificial Sequence
  Synthetic oligonucleotide; AAGAAT chr11 5236784 5236803 5236787 -
ataacagtcctcatggcctt

SEQ ID NO: 63049 - DNA, 20 bp, Artificial Sequence
  Synthetic oligonucleotide; TAGAAT chr11 5236761 5236780 5236764 -
aatttacctaacattttttt

SEQ ID NO: 63050 - DNA, 20 bp, Artificial Sequence
  Synthetic oligonucleotide; ATGAAT chr11 5236741 5236760 5236744 -
tagaatcaattttcttatat

SEQ ID NO: 63051 - DNA, 20 bp, Artificial Sequence
  Synthetic oligonucleotide; AAGAGT chr11 5236519 5236538 5236522 -
tacatctttttgcattttac

SEQ ID NO: 63052 - DNA, 20 bp, Artificial Sequence
  Synthetic oligonucleotide; GAGAAT chr11 5236298 5236317 5236301 -
aatacatttcttcactaagt

SEQ ID NO: 63053 - DNA, 20 bp, Artificial Sequence
  Synthetic oligonucleotide; TTGAAT chr11 5236251 5236270 5236254 -
aaaccatgccaccacctttc

SEQ ID NO: 63054 - DNA, 20 bp, Artificial Sequence
  Synthetic oligonucleotide; CAGAAT chr11 5236134 5236153 5236137 -
ataacatttccccttgtgat

SEQ ID NO: 63055 - DNA, 20 bp, Artificial Sequence
  Synthetic oligonucleotide; TTGGAT chr11 5235864 5235883 5235867 -
aagcatttctatacatgtct

SEQ ID NO: 63056 - DNA, 20 bp, Artificial Sequence
  Synthetic oligonucleotide; CTGAAT chr11 5235840 5235859 5235843 -
atacacacatgcatgtgttt

SEQ ID NO: 63057 - DNA, 20 bp, Artificial Sequence
  Synthetic oligonucleotide; GTGGAT chr11 5235784 5235803 5235787 -
ttatcaagcatccagcattt

SEQ ID NO: 63058 - DNA, 20 bp, Artificial Sequence
  Synthetic oligonucleotide; AGGGGT chr11 5235759 5235778 5235762 -
tactattaaaggttttccaa

SEQ ID NO: 63059 - DNA, 20 bp, Artificial Sequence
  Synthetic oligonucleotide; CAGAGT chr11 5235729 5235748 5235732 -
ctattgtacagtgtcaccaa

SEQ ID NO: 63060 - DNA, 20 bp, Artificial Sequence
  Synthetic oligonucleotide; TTGAGT chr11 5235723 5235742 5235726 -
tacagtgtcaccaacagagt

SEQ ID NO: 63061 - DNA, 20 bp, Artificial Sequence
  Synthetic oligonucleotide; TTGGAT chr11 5235404 5235423 5235407 -
ctttccttcaatccttcctt

SEQ ID NO: 63062 - DNA, 20 bp, Artificial Sequence
  Synthetic oligonucleotide; ATGGGT chr11 5235392 5235411 5235395 -
ccttccttttggatatgctc

SEQ ID NO: 63063 - DNA, 20 bp, Artificial Sequence
  Synthetic oligonucleotide; TTGAAT chr11 5235358 5235377 5235361 -
gtctgccattgtggcattat

SEQ ID NO: 63064 - DNA, 20 bp, Artificial Sequence
  Synthetic oligonucleotide; AAGAGT chr11 5235346 5235365 5235349 -
ggcattatttgaattcagaa

SEQ ID NO: 63065 - DNA, 20 bp, Artificial Sequence
  Synthetic oligonucleotide; TGGGAT chr11 5235330 5235349 5235333 -
agaaaagagtgaaaaactac

SEQ ID NO: 63066 - DNA, 20 bp, Artificial Sequence
  Synthetic oligonucleotide; CTGGGT chr11 5235316 5235335 5235319 -
aactactgggatcttcattc

SEQ ID NO: 63067 - DNA, 20 bp, Artificial Sequence
  Synthetic oligonucleotide; CTGAAT chr11 5235224 5235243 5235227 -
cttcgttaaatttaatctgg

SEQ ID NO: 63068 - DNA, 20 bp, Artificial Sequence
  Synthetic oligonucleotide; ATGGAT chr11 5235033 5235052 5235036 -
attttttaaatattctttta

SEQ ID NO: 63069 - DNA, 20 bp, Artificial Sequence
  Synthetic oligonucleotide; TAGAGT chr11 5235003 5235022 5235006 -
atttcaatataataaaaaat

SEQ ID NO: 63070 - DNA, 20 bp, Artificial Sequence
  Synthetic oligonucleotide; AAGAAT chr11 5234986 5235005 5234989 -
aattagagttttattatagg

SEQ ID NO: 63071 - DNA, 20 bp, Artificial Sequence
  Synthetic oligonucleotide; TTGAGT chr11 5234864 5234883 5234867 -
aggcaaagaagaactttata

SEQ ID NO: 63072 - DNA, 20 bp, Artificial Sequence
  Synthetic oligonucleotide; GAGGAT chr11 5234733 5234752 5234736 -
ttctgcaaaaatgaaactag

SEQ ID NO: 63073 - DNA, 20 bp, Artificial Sequence
  Synthetic oligonucleotide; CAGGGT chr11 5234673 5234692 5234676 -
gggagatatgtagaggagaa

SEQ ID NO: 63074 - DNA, 20 bp, Artificial Sequence
  Synthetic oligonucleotide; CTGAGT chr11 5234665 5234684 5234668 -
tgtagaggagaacagggttt

SEQ ID NO: 63075 - DNA, 20 bp, Artificial Sequence
  Synthetic oligonucleotide; GGGAAT chr11 5234617 5234636 5234620 -
ccaatctcagggcaagttaa

SEQ ID NO: 63076 - DNA, 20 bp, Artificial Sequence
  Synthetic oligonucleotide; TGGAAT chr11 5234609 5234628 5234612 -
agggcaagttaagggaatag

SEQ ID NO: 63077 - DNA, 20 bp, Artificial Sequence
  Synthetic oligonucleotide; CAGAGT chr11 5234502 5234521 5234505 -
gaccagcataaaaggcaggg

SEQ ID NO: 63078 - DNA, 20 bp, Artificial Sequence
  Synthetic oligonucleotide; GTGGAT chr11 5234374 5234393 5234377 -
ccctgtggggcaaagtgaac

SEQ ID NO: 63079 - DNA, 20 bp, Artificial Sequence
  Synthetic oligonucleotide; TTGGGT chr11 5234270 5234289 5234273 -
tgtgtagacagagaagactc

SEQ ID NO: 63080 - DNA, 20 bp, Artificial Sequence
  Synthetic oligonucleotide; TTGAGT chr11 5234179 5234198 5234182 -
cccttggacccagaggttct

SEQ ID NO: 63081 - DNA, 20 bp, Artificial Sequence
  Synthetic oligonucleotide; GGGGAT chr11 5234168 5234187 5234171 -
agaggttctttgagtccttt

SEQ ID NO: 63082 - DNA, 20 bp, Artificial Sequence
  Synthetic oligonucleotide; CTGAGT chr11 5234042 5234061 5234045 -
tcaagggcactttttctcag

SEQ ID NO: 63083 - DNA, 20 bp, Artificial Sequence
  Synthetic oligonucleotide; GTGGAT chr11 5234012 5234031 5234015 -
tgcactgtgacaagctgcac

SEQ ID NO: 63084 - DNA, 20 bp, Artificial Sequence
  Synthetic oligonucleotide; CAGGGT chr11 5233995 5234014 5233998 -
cacgtggatcctgagaactt

SEQ ID NO: 63085 - DNA, 20 bp, Artificial Sequence
  Synthetic oligonucleotide; GTGAGT chr11 5233991 5234010 5233994 -
tggatcctgagaacttcagg

SEQ ID NO: 63086 - DNA, 20 bp, Artificial Sequence
  Synthetic oligonucleotide; TAGAAT chr11 5233694 5233713 5233697 -
tcacctgctaattctgcact

SEQ ID NO: 63087 - DNA, 20 bp, Artificial Sequence
  Synthetic oligonucleotide; ATGGGT chr11 5233669 5233688 5233672 -
taatccttttgtctctccac

SEQ ID NO: 63088 - DNA, 20 bp, Artificial Sequence
  Synthetic oligonucleotide; TAGAAT chr11 5233630 5233649 5233633 -
caactcaaagatgagaggca

SEQ ID NO: 63089 - DNA, 20 bp, Artificial Sequence
  Synthetic oligonucleotide; AGGAAT chr11 5233591 5233610 5233594 -
ctataaatcattttacaata

SEQ ID NO: 63090 - DNA, 20 bp, Artificial Sequence
  Synthetic oligonucleotide; TGGAAT chr11 5233582 5233601 5233585 -
attttacaataaggaataat

SEQ ID NO: 63091 - DNA, 20 bp, Artificial Sequence
  Synthetic oligonucleotide; TGGAAT chr11 5233556 5233575 5233559 -
tttataaattctgtagtaaa

SEQ ID NO: 63092 - DNA, 20 bp, Artificial Sequence
  Synthetic oligonucleotide; GTGAAT chr11 5233540 5233559 5233543 -
taaatggaatggaaaggaaa

SEQ ID NO: 63093 - DNA, 20 bp, Artificial Sequence
  Synthetic oligonucleotide; TGGAAT chr11 5233370 5233389 5233373 -
atacaaaattaaaactaatt

SEQ ID NO: 63094 - DNA, 20 bp, Artificial Sequence
  Synthetic oligonucleotide; GAGGAT chr11 5233289 5233308 5233292 -
acatgctagttaagtacata

SEQ ID NO: 63095 - DNA, 20 bp, Artificial Sequence
  Synthetic oligonucleotide; GGGAAT chr11 5233224 5233243 5233227 -
atgtacttatttatgctgat

SEQ ID NO: 63096 - DNA, 20 bp, Artificial Sequence
  Synthetic oligonucleotide; GGGGAT chr11 5233213 5233232 5233216 -
tatgctgatgggaataacct

SEQ ID NO: 63097 - DNA, 20 bp, Artificial Sequence
  Synthetic oligonucleotide; ATGGGT chr11 5233177 5233196 5233180 -
taagatttgggcagaaaaaa

SEQ ID NO: 63098 - DNA, 20 bp, Artificial Sequence
  Synthetic oligonucleotide; AGGAAT chr11 5233047 5233066 5233050 -
gctggcccgcaactttggca

SEQ ID NO: 63099 - DNA, 20 bp, Artificial Sequence
  Synthetic oligonucleotide; AAGGGT chr11 5232878 5232897 5232881 -
gggaacacaatgcctacttc

SEQ ID NO: 63100 - DNA, 20 bp, Artificial Sequence
  Synthetic oligonucleotide; AAGAAT chr11 5232855 5232874 5232858 -
ggtatggcttctgcctaata

SEQ ID NO: 63101 - DNA, 20 bp, Artificial Sequence
  Synthetic oligonucleotide; AAGAGT chr11 5232744 5232763 5232747 -
gagcacttgtttattttaca

SEQ ID NO: 63102 - DNA, 20 bp, Artificial Sequence
  Synthetic oligonucleotide; ATGGGT chr11 5232696 5232715 5232699 -
gggaaccgtacaaggcatta

SEQ ID NO: 63103 - DNA, 20 bp, Artificial Sequence
  Synthetic oligonucleotide; AAGGGT chr11 5232583 5232602 5232586 -
caaccctaagacatagcctc

SEQ ID NO: 63104 - DNA, 20 bp, Artificial Sequence
  Synthetic oligonucleotide; AAGAAT chr11 5232376 5232395 5232379 -
tgccccagaacatctctgta

SEQ ID NO: 63105 - DNA, 20 bp, Artificial Sequence
  Synthetic oligonucleotide; GTGAAT chr11 5232083 5232102 5232086 -
aatatttattcaagaaaaca

SEQ ID NO: 63106 - DNA, 20 bp, Artificial Sequence
  Synthetic oligonucleotide; ATGAAT chr11 5232079 5232098 5232082 -
tttattcaagaaaacagtga

SEQ ID NO: 63107 - DNA, 20 bp, Artificial Sequence
  Synthetic oligonucleotide; ACGAAT chr11 5232071 5232090 5232074 -
agaaaacagtgaatgaatga

SEQ ID NO: 63108 - DNA, 20 bp, Artificial Sequence
  Synthetic oligonucleotide; ATGAGT chr11 5232067 5232086 5232070 -
aacagtgaatgaatgaacga

SEQ ID NO: 63109 - DNA, 20 bp, Artificial Sequence
  Synthetic oligonucleotide; ATGAGT chr11 5232059 5232078 5232062 -
atgaatgaacgaatgagtaa

SEQ ID NO: 63110 - DNA, 20 bp, Artificial Sequence
  Synthetic oligonucleotide; AGGAAT chr11 5232047 5232066 5232050 -
atgagtaaatgagtaaatga

SEQ ID NO: 63111 - DNA, 20 bp, Artificial Sequence
  Synthetic oligonucleotide; TGGAAT chr11 5232017 5232036 5232020 -
attccttgctttagaacttc

SEQ ID NO: 63112 - DNA, 20 bp, Artificial Sequence
  Synthetic oligonucleotide; AGGAGT chr11 5231898 5231917 5231901 -
gttatttcctttctgatcat

SEQ ID NO: 63113 - DNA, 20 bp, Artificial Sequence
  Synthetic oligonucleotide; AAGGAT chr11 5231847 5231866 5231850 -
tttgccataggtaaaattag

SEQ ID NO: 63114 - DNA, 20 bp, Artificial Sequence
  Synthetic oligonucleotide; TTGAAT chr11 5231768 5231787 5231771 -
ttgattaattttaaacttac

SEQ ID NO: 63115 - DNA, 20 bp, Artificial Sequence
  Synthetic oligonucleotide; CAGAAT chr11 5231755 5231774 5231758 -
aacttacttgaatacctaaa

SEQ ID NO: 63116 - DNA, 20 bp, Artificial Sequence
  Synthetic oligonucleotide; CAGAAT chr11 5231696 5231715 5231699 -
agtaactctgtctgtactgc

SEQ ID NO: 63117 - DNA, 20 bp, Artificial Sequence
  Synthetic oligonucleotide; TTGAAT chr11 5231647 5231666 5231650 -
actgttttgatcacaacatt

SEQ ID NO: 63118 - DNA, 20 bp, Artificial Sequence
  Synthetic oligonucleotide; CTGAAT chr11 5231560 5231579 5231563 -
gcactgagaactctttatat

SEQ ID NO: 63119 - DNA, 20 bp, Artificial Sequence
  Synthetic oligonucleotide; AAGAGT chr11 5231453 5231472 5231456 -
gagcatagggaagttctcat

SEQ ID NO: 63120 - DNA, 20 bp, Artificial Sequence
  Synthetic oligonucleotide; GTGAGT chr11 5231278 5231297 5231281 -
tacaccattagaagtagtca

SEQ ID NO: 63121 - DNA, 20 bp, Artificial Sequence
  Synthetic oligonucleotide; GAGAAT chr11 5231236 5231255 5231239 -
ccctaaaaatccaaatacca

SEQ ID NO: 63122 - DNA, 20 bp, Artificial Sequence
  Synthetic oligonucleotide; CTGGAT chr11 5231215 5231234 5231218 -
agaattcatgagaacatcac

SEQ ID NO: 63123 - DNA, 20 bp, Artificial Sequence
  Synthetic oligonucleotide; TAGAGT chr11 5231087 5231106 5231090 -
gttatattaaaattatttgt

SEQ ID NO: 63124 - DNA, 20 bp, Artificial Sequence
  Synthetic oligonucleotide; AAGAGT chr11 5231070 5231089 5231073 -
tgttagagtagagcttttgt

SEQ ID NO: 63125 - DNA, 20 bp, Artificial Sequence
  Synthetic oligonucleotide; AGGAGT chr11 5231062 5231081 5231065 -
tagagcttttgtaagagtct

SEQ ID NO: 63126 - DNA, 20 bp, Artificial Sequence
  Synthetic oligonucleotide; GAGGGT chr11 5230992 5231011 5230995 -
acagacacccaggcctactt

SEQ ID NO: 63127 - DNA, 20 bp, Artificial Sequence
  Synthetic oligonucleotide; GAGGGT chr11 5230985 5231004 5230988 -
cccaggcctacttgagggtt

SEQ ID NO: 63128 - DNA, 20 bp, Artificial Sequence
  Synthetic oligonucleotide; TTGGGT chr11 5230949 5230968 5230952 -
agacgatgaaaaagaaccta

SEQ ID NO: 63129 - DNA, 20 bp, Artificial Sequence
  Synthetic oligonucleotide; CTGAGT chr11 5230930 5230949 5230933 -
attgggtattaagttcatca

SEQ ID NO: 63130 - DNA, 20 bp, Artificial Sequence
  Synthetic oligonucleotide; AGGAAT chr11 5230825 5230844 5230828 -
tgaaagttaaaacaaagtat

SEQ ID NO: 63131 - DNA, 20 bp, Artificial Sequence
  Synthetic oligonucleotide; TGGAAT chr11 5230820 5230839 5230823 -
gttaaaacaaagtataggaa

SEQ ID NO: 63132 - DNA, 20 bp, Artificial Sequence
  Synthetic oligonucleotide; CTGAAT chr11 5230713 5230732 5230716 -
ataaactatgttcagtatgt

SEQ ID NO: 63133 - DNA, 20 bp, Artificial Sequence
  Synthetic oligonucleotide; AAGGGT chr11 5230705 5230724 5230708 -
tgttcagtatgtctgaatga

SEQ ID NO: 63134 - DNA, 20 bp, Artificial Sequence
  Synthetic oligonucleotide; GTGAAT chr11 5230646 5230665 5230649 -
ggaagagaggacgtaataat

SEQ ID NO: 63135 - DNA, 20 bp, Artificial Sequence
  Synthetic oligonucleotide; TTGAGT chr11 5230640 5230659 5230643 -
gaggacgtaataatgtgaat

SEQ ID NO: 63136 - DNA, 20 bp, Artificial Sequence
  Synthetic oligonucleotide; GAGAAT chr11 5230598 5230617 5230601 -
ataaaataatttaatgtcag

SEQ ID NO: 63137 - DNA, 20 bp, Artificial Sequence
  Synthetic oligonucleotide; CTGAAT chr11 5230540 5230559 5230543 -
ttgagcttcagagcagtcct

SEQ ID NO: 63138 - DNA, 20 bp, Artificial Sequence
  Synthetic oligonucleotide; AAGGGT chr11 5230515 5230534 5230518 -
ttaatgcctacatgtttgta

SEQ ID NO: 63139 - DNA, 20 bp, Artificial Sequence
  Synthetic oligonucleotide; CTGAAT chr11 5230384 5230403 5230387 -
aggttaaaaaaaagctaatt

SEQ ID NO: 63140 - DNA, 20 bp, Artificial Sequence
  Synthetic oligonucleotide; ATGGGT chr11 5230178 5230197 5230181 -
tgtgtgtgcggtttgtttct

SEQ ID NO: 63141 - DNA, 20 bp, Artificial Sequence
  Synthetic oligonucleotide; CTGAGT chr11 5230117 5230136 5230120 -
ttaattaattctgagagctg

SEQ ID NO: 63142 - DNA, 20 bp, Artificial Sequence
  Synthetic oligonucleotide; GGGAAT chr11 5230005 5230024 5230008 -
ttgctaaaatgtctcacttg

SEQ ID NO: 63143 - DNA, 20 bp, Artificial Sequence
  Synthetic oligonucleotide; ATGAGT chr11 5229915 5229934 5229918 -
ataaaaccacactcccatag

SEQ ID NO: 63144 - DNA, 20 bp, Artificial Sequence
  Synthetic oligonucleotide; TGGAGT chr11 5229808 5229827 5229811 -
cttaagaaagattaatagac

SEQ ID NO: 63145 - DNA, 20 bp, Artificial Sequence
  Synthetic oligonucleotide; TGGAAT chr11 5229705 5229724 5229708 -
tgtgttgtggtcagtggggc

SEQ ID NO: 63146 - DNA, 20 bp, Artificial Sequence
  Synthetic oligonucleotide; TAGAAT chr11 5229694 5229713 5229697 -
cagtggggctggaataaaag

SEQ ID NO: 63147 - DNA, 20 bp, Artificial Sequence
  Synthetic oligonucleotide; CAGAGT chr11 5229659 5229678 5229662 -
cctgctgtggcatccattca

SEQ ID NO: 63148 - DNA, 20 bp, Artificial Sequence
  Synthetic oligonucleotide; TTGAAT chr11 5229617 5229636 5229620 -
tagtgaagatgtcagtaagc

SEQ ID NO: 63149 - DNA, 20 bp, Artificial Sequence
  Synthetic oligonucleotide; TTGAAT chr11 5229596 5229615 5229599 -
tgaatagtttttcaggaact

SEQ ID NO: 63150 - DNA, 20 bp, Artificial Sequence
  Synthetic oligonucleotide; CAGGGT chr11 5229461 5229480 5229464 -
agcttgcagccttgtccctg

SEQ ID NO: 63151 - DNA, 20 bp, Artificial Sequence
  Synthetic oligonucleotide; ATGGGT chr11 5229452 5229471 5229455 -
ccttgtccctgcagggtatt

SEQ ID NO: 63152 - DNA, 20 bp, Artificial Sequence
  Synthetic oligonucleotide; CAGGAT chr11 5229369 5229388 5229372 -
agcaacccctgccttgaagc

SEQ ID NO: 63153 - DNA, 20 bp, Artificial Sequence
  Synthetic oligonucleotide; AAGGAT chr11 5229331 5229350 5229334 -
agcagttgccaacacaagag

SEQ ID NO: 63154 - DNA, 20 bp, Artificial Sequence
  Synthetic oligonucleotide; TAGGGT chr11 5229256 5229275 5229259 -
tttctgagcataagaagttg

SEQ ID NO: 63155 - DNA, 20 bp, Artificial Sequence
  Synthetic oligonucleotide; CAGGAT chr11 5229218 5229237 5229221 -
aggtgacaatttctgccaat

SEQ ID NO: 63156 - DNA, 20 bp, Artificial Sequence
  Synthetic oligonucleotide; CAGAAT chr11 5229179 5229198 5229182 -
ctttgacaattttggtcttt

SEQ ID NO: 63157 - DNA, 20 bp, Artificial Sequence
  Synthetic oligonucleotide; CAGGAT chr11 5229118 5229137 5229121 -
tctgtgcattttctttgacc

SEQ ID NO: 63158 - DNA, 20 bp, Artificial Sequence
  Synthetic oligonucleotide; AGGGAT chr11 5229046 5229065 5229049 -
atatacatgcctcttatatc

SEQ ID NO: 63159 - DNA, 20 bp, Artificial Sequence
  Synthetic oligonucleotide; CAGGGT chr11 5229034 5229053 5229037 -
cttatatcagggatgtgaaa

SEQ ID NO: 63160 - DNA, 20 bp, Artificial Sequence
  Synthetic oligonucleotide; CAGGAT chr11 5228899 5228918 5228902 -
attttaaagacgtcttttcc

SEQ ID NO: 63161 - DNA, 20 bp, Artificial Sequence
  Synthetic oligonucleotide; AGGGAT chr11 5228871 5228890 5228874 -
aacatgtgaaatcttttctc

SEQ ID NO: 63162 - DNA, 20 bp, Artificial Sequence
  Synthetic oligonucleotide; AGGAAT chr11 5228825 5228844 5228828 -
attgctttagttttttacag

SEQ ID NO: 63163 - DNA, 20 bp, Artificial Sequence
  Synthetic oligonucleotide; ATGAAT chr11 5228821 5228840 5228824 -
ctttagttttttacagagga

SEQ ID NO: 63164 - DNA, 20 bp, Artificial Sequence
  Synthetic oligonucleotide; GAGAAT chr11 5228700 5228719 5228703 -
caaacactttctgcgtgtgt

SEQ ID NO: 63165 - DNA, 20 bp, Artificial Sequence
  Synthetic oligonucleotide; CAGAGT chr11 5228691 5228710 5228694 -
tctgcgtgtgtgagaataat

SEQ ID NO: 63166 - DNA, 20 bp, Artificial Sequence
  Synthetic oligonucleotide; GAGGGT chr11 5228661 5228680 5228664 -
ttttttcacaagtacctgat

SEQ ID NO: 63167 - DNA, 20 bp, Artificial Sequence
  Synthetic oligonucleotide; GAGAAT chr11 5228593 5228612 5228596 -
ataatagagaaagcatttaa

SEQ ID NO: 63168 - DNA, 20 bp, Artificial Sequence
  Synthetic oligonucleotide; GAGGAT chr11 5228536 5228555 5228539 -
ccttctgataactagaaata

SEQ ID NO: 63169 - DNA, 20 bp, Artificial Sequence
  Synthetic oligonucleotide; CAGAGT chr11 5228444 5228463 5228447 -
attttgtgtaatcgtagttt

SEQ ID NO: 63170 - DNA, 20 bp, Artificial Sequence
  Synthetic oligonucleotide; ATGGGT chr11 5228367 5228386 5228370 -
actttccttactaaaccgac

SEQ ID NO: 63171 - DNA, 20 bp, Artificial Sequence
  Synthetic oligonucleotide; CAGGAT chr11 5228348 5228367 5228351 -
catgggtttccaggtagggg

SEQ ID NO: 63172 - DNA, 20 bp, Artificial Sequence
  Synthetic oligonucleotide; CAGGAT chr11 5228341 5228360 5228344 -
ttccaggtaggggcaggatt

SEQ ID NO: 63173 - DNA, 20 bp, Artificial Sequence
  Synthetic oligonucleotide; AGGAGT chr11 5228203 5228222 5228206 -
caaaagtttttcctcacctg

SEQ ID NO: 63174 - DNA, 20 bp, Artificial Sequence
  Synthetic oligonucleotide; GGGGAT chr11 5228169 5228188 5228172 -
tacaaggggaaaaagtacag

SEQ ID NO: 63175 - DNA, 20 bp, Artificial Sequence
  Synthetic oligonucleotide; AAGAGT chr11 5228125 5228144 5228128 -
ttgggaagctatagagaaag

SEQ ID NO: 63176 - DNA, 20 bp, Artificial Sequence
  Synthetic oligonucleotide; TTGAAT chr11 5228067 5228086 5228070 -
atataaagagaaataggaac

SEQ ID NO: 63177 - DNA, 20 bp, Artificial Sequence
  Synthetic oligonucleotide; TTGGGT chr11 5227841 5227860 5227844 -
accccattgatagtcacact

SEQ ID NO: 63178 - DNA, 20 bp, Artificial Sequence
  Synthetic oligonucleotide; ATGAAT chr11 5227656 5227675 5227659 -
attaagaaaaacaacaacaa

SEQ ID NO: 63179 - DNA, 20 bp, Artificial Sequence
  Synthetic oligonucleotide; TAGAGT chr11 5227536 5227555 5227539 -
agatatgcttagaaccgagg

SEQ ID NO: 63180 - DNA, 20 bp, Artificial Sequence
  Synthetic oligonucleotide; CTGAAT chr11 5227455 5227474 5227458 -
tccatctacatatcccaaag

SEQ ID NO: 63181 - DNA, 20 bp, Artificial Sequence
  Synthetic oligonucleotide; GAGGAT chr11 5227319 5227338 5227322 -
acgtaaatacacttgcaaag

SEQ ID NO: 63182 - DNA, 20 bp, Artificial Sequence
  Synthetic oligonucleotide; GAGGGT chr11 5227251 5227270 5227254 -
tatatcttagagggagggct

SEQ ID NO: 63183 - DNA, 20 bp, Artificial Sequence
  Synthetic oligonucleotide; TAGGGT chr11 5227157 5227176 5227160 -
caccctgtggagccacaccc

SEQ ID NO: 63184 - DNA, 20 bp, Artificial Sequence
  Synthetic oligonucleotide; GTGGAT chr11 5226962 5226981 5226965 -
ccctgtggggcaaggtgaac

SEQ ID NO: 63185 - DNA, 20 bp, Artificial Sequence
  Synthetic oligonucleotide; TTGGGT chr11 5226858 5226877 5226861 -
tgtggagacagagaagactc

SEQ ID NO: 63186 - DNA, 20 bp, Artificial Sequence
  Synthetic oligonucleotide; TTGAGT chr11 5226765 5226784 5226768 -
cccttggacccagaggttct

SEQ ID NO: 63187 - DNA, 20 bp, Artificial Sequence
  Synthetic oligonucleotide; GGGGAT chr11 5226754 5226773 5226757 -
agaggttctttgagtccttt

SEQ ID NO: 63188 - DNA, 20 bp, Artificial Sequence
  Synthetic oligonucleotide; CTGAGT chr11 5226628 5226647 5226631 -
tcaagggcacctttgccaca

SEQ ID NO: 63189 - DNA, 20 bp, Artificial Sequence
  Synthetic oligonucleotide; GTGGAT chr11 5226598 5226617 5226601 -
tgcactgtgacaagctgcac

SEQ ID NO: 63190 - DNA, 20 bp, Artificial Sequence
  Synthetic oligonucleotide; CAGGGT chr11 5226581 5226600 5226584 -
cacgtggatcctgagaactt

SEQ ID NO: 63191 - DNA, 20 bp, Artificial Sequence
  Synthetic oligonucleotide; GTGAGT chr11 5226577 5226596 5226580 -
tggatcctgagaacttcagg

SEQ ID NO: 63192 - DNA, 20 bp, Artificial Sequence
  Synthetic oligonucleotide; GGGGAT chr11 5226509 5226528 5226512 -
ttaagttcatgtcataggaa

SEQ ID NO: 63193 - DNA, 20 bp, Artificial Sequence
  Synthetic oligonucleotide; CAGGGT chr11 5226497 5226516 5226500 -
cataggaaggggataagtaa

SEQ ID NO: 63194 - DNA, 20 bp, Artificial Sequence
  Synthetic oligonucleotide; TAGAAT chr11 5226485 5226504 5226488 -
ataagtaacagggtacagtt

SEQ ID NO: 63195 - DNA, 20 bp, Artificial Sequence
  Synthetic oligonucleotide; ACGAAT chr11 5226470 5226489 5226473 -
cagtttagaatgggaaacag

SEQ ID NO: 63196 - DNA, 20 bp, Artificial Sequence
  Synthetic oligonucleotide; CAGGAT chr11 5226442 5226461 5226445 -
ttgcatcagtgtggaagtct

SEQ ID NO: 63197 - DNA, 20 bp, Artificial Sequence
  Synthetic oligonucleotide; TGGAAT chr11 5226238 5226257 5226241 -
ctgcctagtacattactatt

SEQ ID NO: 63198 - DNA, 20 bp, Artificial Sequence
  Synthetic oligonucleotide; ATGGGT chr11 5226148 5226167 5226151 -
cataatcattatacatattt

SEQ ID NO: 63199 - DNA, 20 bp, Artificial Sequence
  Synthetic oligonucleotide; CAGGGT chr11 5226100 5226119 5226103 -
tgtacacatattgaccaaat

SEQ ID NO: 63200 - DNA, 20 bp, Artificial Sequence
  Synthetic oligonucleotide; AAGAAT chr11 5225955 5225974 5225958 -
tgcctctttgcaccattcta

SEQ ID NO: 63201 - DNA, 20 bp, Artificial Sequence
  Synthetic oligonucleotide; CTGGGT chr11 5225935 5225954 5225938 -
aagaataacagtgataattt

SEQ ID NO: 63202 - DNA, 20 bp, Artificial Sequence
  Synthetic oligonucleotide; TGGGAT chr11 5225807 5225826 5225810 -
ttctgcttttattttatggt

SEQ ID NO: 63203 - DNA, 20 bp, Artificial Sequence
  Synthetic oligonucleotide; CTGGAT chr11 5225797 5225816 5225800 -
attttatggttgggataagg

SEQ ID NO: 63204 - DNA, 20 bp, Artificial Sequence
  Synthetic oligonucleotide; CTGAGT chr11 5225787 5225806 5225790 -
tgggataaggctggattatt

SEQ ID NO: 63205 - DNA, 20 bp, Artificial Sequence
  Synthetic oligonucleotide; AAGAAT chr11 5225681 5225700 5225684 -
gctggcccatcactttggca

SEQ ID NO: 63206 - DNA, 20 bp, Artificial Sequence
  Synthetic oligonucleotide; GGGGAT chr11 5225531 5225550 5225534 -
taagtccaactactaaactg

SEQ ID NO: 63207 - DNA, 20 bp, Artificial Sequence
  Synthetic oligonucleotide; CTGGAT chr11 5225504 5225523 5225507 -
ttatgaagggccttgagcat

SEQ ID NO: 63208 - DNA, 20 bp, Artificial Sequence
  Synthetic oligonucleotide; CTGAAT chr11 5225445 5225464 5225448 -
atgatgtatttaaattattt

SEQ ID NO: 63209 - DNA, 20 bp, Artificial Sequence
  Synthetic oligonucleotide; GGGAAT chr11 5225426 5225445 5225429 -
tctgaatattttactaaaaa

SEQ ID NO: 63210 - DNA, 20 bp, Artificial Sequence
  Synthetic oligonucleotide; AAGGAT chr11 5225259 5225278 5225262 -
gccttattcatccctcagaa

SEQ ID NO: 63211 - DNA, 20 bp, Artificial Sequence
  Synthetic oligonucleotide; ATGAAT chr11 5225177 5225196 5225180 -
ttattgttttagctgtcctc

SEQ ID NO: 63212 - DNA, 20 bp, Artificial Sequence
  Synthetic oligonucleotide; AGGGGT chr11 5224979 5224998 5224982 -
ctacttgaagaaggaaaaac

SEQ ID NO: 63213 - DNA, 20 bp, Artificial Sequence
  Synthetic oligonucleotide; CGGAAT chr11 5224917 5224936 5224920 -
ctcccccactcacagtgacc

SEQ ID NO: 63214 - DNA, 20 bp, Artificial Sequence
  Synthetic oligonucleotide; AAGAAT chr11 5224827 5224846 5224830 -
tatgaaaagttaggactgag

SEQ ID NO: 63215 - DNA, 20 bp, Artificial Sequence
  Synthetic oligonucleotide; CAGGAT chr11 5224733 5224752 5224736 -
atggaagtcccattcttcct

SEQ ID NO: 63216 - DNA, 20 bp, Artificial Sequence
  Synthetic oligonucleotide; ATGAGT chr11 5224556 5224575 5224559 -
ctagattctggaaataaaat

SEQ ID NO: 63217 - DNA, 20 bp, Artificial Sequence
  Synthetic oligonucleotide; CTGAAT chr11 5224515 5224534 5224518 -
tcctctctcccagtcaaatt

SEQ ID NO: 63218 - DNA, 20 bp, Artificial Sequence
  Synthetic oligonucleotide; AAGGGT chr11 5224455 5224474 5224458 -
tcagtaataagtgatgatag

SEQ ID NO: 63219 - DNA, 20 bp, Artificial Sequence
  Synthetic oligonucleotide; AAGAAT chr11 5224443 5224462 5224446 -
gatgatagaagggtatatag

SEQ ID NO: 63220 - DNA, 20 bp, Artificial Sequence
  Synthetic oligonucleotide; GAGGGT chr11 5224425 5224444 5224428 -
agaagaattttattatatga

SEQ ID NO: 63221 - DNA, 20 bp, Artificial Sequence
  Synthetic oligonucleotide; TTGAAT chr11 5224360 5224379 5224363 -
caccataaacaaaaataaat

SEQ ID NO: 63222 - DNA, 20 bp, Artificial Sequence
  Synthetic oligonucleotide; ATGGGT chr11 5224356 5224375 5224359 -
ataaacaaaaataaatttga

SEQ ID NO: 63223 - DNA, 20 bp, Artificial Sequence
  Synthetic oligonucleotide; AAGAAT chr11 5224348 5224367 5224351 -
aaataaatttgaatgggtta

SEQ ID NO: 63224 - DNA, 20 bp, Artificial Sequence
  Synthetic oligonucleotide; TTGAAT chr11 5224263 5224282 5224266 -
attcacgttgcagccgtttt

SEQ ID NO: 63225 - DNA, 20 bp, Artificial Sequence
  Synthetic oligonucleotide; CAGAAT chr11 5223998 5224017 5224001 -
gaaaatcctgccatttatgg

SEQ ID NO: 63226 - DNA, 20 bp, Artificial Sequence
  Synthetic oligonucleotide; GAGGAT chr11 5223981 5224000 5223984 -
tggcagaattgatgaacctg

SEQ ID NO: 63227 - DNA, 20 bp, Artificial Sequence
  Synthetic oligonucleotide; AGGGGT chr11 5223860 5223879 5223863 -
acagtagaggtatggtttcc

SEQ ID NO: 63228 - DNA, 20 bp, Artificial Sequence
  Synthetic oligonucleotide; GGGGGT chr11 5223853 5223872 5223856 -
aggtatggtttccaggggtt

SEQ ID NO: 63229 - DNA, 20 bp, Artificial Sequence
  Synthetic oligonucleotide; GAGAAT chr11 5223845 5223864 5223848 -
tttccaggggttgggggtgg

SEQ ID NO: 63230 - DNA, 20 bp, Artificial Sequence
  Synthetic oligonucleotide; AAGGGT chr11 5223822 5223841 5223825 -
aatcaggaaactattactca

SEQ ID NO: 63231 - DNA, 20 bp, Artificial Sequence
  Synthetic oligonucleotide; TGGGAT chr11 5223799 5223818 5223802 -
ggtataaaatttcagttatg

SEQ ID NO: 63232 - DNA, 20 bp, Artificial Sequence
  Synthetic oligonucleotide; ATGAAT chr11 5223795 5223814 5223798 -
taaaatttcagttatgtggg

SEQ ID NO: 63233 - DNA, 20 bp, Artificial Sequence
  Synthetic oligonucleotide; GAGAGT chr11 5223716 5223735 5223719 -
gtatatttaaaatttgcaaa

SEQ ID NO: 63234 - DNA, 20 bp, Artificial Sequence
  Synthetic oligonucleotide; TGGAGT chr11 5223689 5223708 5223692 -
gatttttttttttttttaga

SEQ ID NO: 63235 - DNA, 20 bp, Artificial Sequence
  Synthetic oligonucleotide; TGGAGT chr11 5223663 5223682 5223666 -
tttgctcttgttgtccaggc

SEQ ID NO: 63236 - DNA, 20 bp, Artificial Sequence
  Synthetic oligonucleotide; CTGGGT chr11 5223619 5223638 5223622 -
ctcactgcaacctccgcctc

SEQ ID NO: 63237 - DNA, 20 bp, Artificial Sequence
  Synthetic oligonucleotide; CCGAGT chr11 5223587 5223606 5223590 -
aaatctcctgcctcagcctc

SEQ ID NO: 63238 - DNA, 20 bp, Artificial Sequence
  Synthetic oligonucleotide; TGGGAT chr11 5223578 5223597 5223581 -
gcctcagcctcccgagtagc

SEQ ID NO: 63239 - DNA, 20 bp, Artificial Sequence
  Synthetic oligonucleotide; CGGGGT chr11 5223523 5223542 5223526 -
ttttgtatttttagtagaga

SEQ ID NO: 63240 - DNA, 20 bp, Artificial Sequence
  Synthetic oligonucleotide; TGGGAT chr11 5223468 5223487 5223471 -
gcctcggccacccaaagggc

SEQ ID NO: 63241 - DNA, 20 bp, Artificial Sequence
  Synthetic oligonucleotide; GAGAGT chr11 5223435 5223454 5223438 -
gtgagccaccgggcctggcc

SEQ ID NO: 63242 - DNA, 20 bp, Artificial Sequence
  Synthetic oligonucleotide; ATGGGT chr11 5223382 5223401 5223385 -
aaaggtaactatgtgagata

SEQ ID NO: 63243 - DNA, 20 bp, Artificial Sequence
  Synthetic oligonucleotide; GTGAAT chr11 5223283 5223302 5223286 -
aatatatacaatttttattt

SEQ ID NO: 63244 - DNA, 20 bp, Artificial Sequence
  Synthetic oligonucleotide; AAGAAT chr11 5223259 5223278 5223262 -
atgatacctcaataaagttg

SEQ ID NO: 63245 - DNA, 20 bp, Artificial Sequence
  Synthetic oligonucleotide; AAGAAT chr11 5223246 5223265 5223249 -
aaagttgaagaataataaaa

SEQ ID NO: 63246 - DNA, 20 bp, Artificial Sequence
  Synthetic oligonucleotide; ATGAAT chr11 5223231 5223250 5223234 -
taaaaaagaatagacatcac

SEQ ID NO: 63247 - DNA, 20 bp, Artificial Sequence
  Synthetic oligonucleotide; TAGAAT chr11 5223188 5223207 5223191 -
aaaaaatgcatcttgatgat

SEQ ID NO: 63248 - DNA, 20 bp, Artificial Sequence
  Synthetic oligonucleotide; TGGAAT chr11 5222785 5222804 5222788 -
ctcatgtgtaagtaagatag

SEQ ID NO: 63249 - DNA, 20 bp, Artificial Sequence
  Synthetic oligonucleotide; AAGAGT chr11 5222658 5222677 5222661 -
gaacaactatactttttgaa

SEQ ID NO: 63250 - DNA, 20 bp, Artificial Sequence
  Synthetic oligonucleotide; TAGAAT chr11 5222574 5222593 5222577 -
aaattcagtcacgaaaaaac

SEQ ID NO: 63251 - DNA, 20 bp, Artificial Sequence
  Synthetic oligonucleotide; GCGGAT chr11 5222386 5222405 5222389 -
actttgggaggcctagacag

SEQ ID NO: 63252 - DNA, 20 bp, Artificial Sequence
  Synthetic oligonucleotide; AGGAGT chr11 5222371 5222390 5222374 -
gacaggcggatcacgacgtc

SEQ ID NO: 63253 - DNA, 20 bp, Artificial Sequence
  Synthetic oligonucleotide; GAGAAT chr11 5222252 5222271 5222255 -
aatttgggaggctgaggcag

SEQ ID NO: 63254 - DNA, 20 bp, Artificial Sequence
  Synthetic oligonucleotide; CCGAAT chr11 5222110 5222129 5222113 -
gagcggtggagccaagatga

SEQ ID NO: 63255 - DNA, 20 bp, Artificial Sequence
  Synthetic oligonucleotide; GTGAGT chr11 5222075 5222094 5222078 -
tccagtctatagctcccatc

SEQ ID NO: 63256 - DNA, 20 bp, Artificial Sequence
  Synthetic oligonucleotide; ACGGGT chr11 5222059 5222078 5222062 -
catcgtgagtgacgcagaag

SEQ ID NO: 63257 - DNA, 20 bp, Artificial Sequence
  Synthetic oligonucleotide; GTGGGT chr11 5221997 5222016 5222000 -
tcacagggaagtgccaggca

SEQ ID NO: 63258 - DNA, 20 bp, Artificial Sequence
  Synthetic oligonucleotide; AGGGGT chr11 5221919 5221938 5221922 -
cacctcacccgggaagcaca

SEQ ID NO: 63259 - DNA, 20 bp, Artificial Sequence
  Synthetic oligonucleotide; GGGAAT chr11 5221911 5221930 5221914 -
ccgggaagcacaaggggtca

SEQ ID NO: 63260 - DNA, 20 bp, Artificial Sequence
  Synthetic oligonucleotide; AAGGGT chr11 5221885 5221904 5221888 -
tccctttcctagtcaaagaa

SEQ ID NO: 63261 - DNA, 20 bp, Artificial Sequence
  Synthetic oligonucleotide; TCGGGT chr11 5221859 5221878 5221862 -
gacagatggcacctggaaaa

SEQ ID NO: 63262 - DNA, 20 bp, Artificial Sequence
  Synthetic oligonucleotide; GAGGGT chr11 5221774 5221793 5221777 -
tatatcccatgcctggctca

SEQ ID NO: 63263 - DNA, 20 bp, Artificial Sequence
  Synthetic oligonucleotide; AGGGGT chr11 5221691 5221710 5221694 -
ggtggcagtgaggctggggg

SEQ ID NO: 63264 - DNA, 20 bp, Artificial Sequence
  Synthetic oligonucleotide; CTGGGT chr11 5221632 5221651 5221635 -
aagccgcctggaagctcgaa

SEQ ID NO: 63265 - DNA, 20 bp, Artificial Sequence
  Synthetic oligonucleotide; GAGAGT chr11 5221499 5221518 5221502 -
ccctgtctgacagctttgaa

SEQ ID NO: 63266 - DNA, 20 bp, Artificial Sequence
  Synthetic oligonucleotide; GTGGGT chr11 5221437 5221456 5221440 -
caggcagactgcctcctcaa

SEQ ID NO: 63267 - DNA, 20 bp, Artificial Sequence
  Synthetic oligonucleotide; CCGAGT chr11 5221422 5221441 5221425 -
ctcaagtgggtccctgaccc

SEQ ID NO: 63268 - DNA, 20 bp, Artificial Sequence
  Synthetic oligonucleotide; AGGAAT chr11 5221336 5221355 5221339 -
ctctaagacaaaacttccag

SEQ ID NO: 63269 - DNA, 20 bp, Artificial Sequence
  Synthetic oligonucleotide; TGGAGT chr11 5221251 5221270 5221254 -
atacccaggaaaacagcttc

SEQ ID NO: 63270 - DNA, 20 bp, Artificial Sequence
  Synthetic oligonucleotide; GAGGGT chr11 5221212 5221231 5221215 -
actccaacagacctgcagct

SEQ ID NO: 63271 - DNA, 20 bp, Artificial Sequence
  Synthetic oligonucleotide; GAGAGT chr11 5221060 5221079 5221063 -
aaactggacactctaaaaat

SEQ ID NO: 63272 - DNA, 20 bp, Artificial Sequence
  Synthetic oligonucleotide; GAGAAT chr11 5220997 5221016 5221000 -
caatggaacaaagctgggca

SEQ ID NO: 63273 - DNA, 20 bp, Artificial Sequence
  Synthetic oligonucleotide; ACGAGT chr11 5220984 5221003 5220987 -
ctgggcagagaatgactttg

SEQ ID NO: 63274 - DNA, 20 bp, Artificial Sequence
  Synthetic oligonucleotide; ATGAAT chr11 5220882 5220901 5220885 -
aaactttgaaaaaaaattag

SEQ ID NO: 63275 - DNA, 20 bp, Artificial Sequence
  Synthetic oligonucleotide; ATGGAT chr11 5220878 5220897 5220881 -
tttgaaaaaaaattagatga

SEQ ID NO: 63276 - DNA, 20 bp, Artificial Sequence
  Synthetic oligonucleotide; TAGAAT chr11 5220869 5220888 5220872 -
aaattagatgaatggataac

SEQ ID NO: 63277 - DNA, 20 bp, Artificial Sequence
  Synthetic oligonucleotide; AAGGGT chr11 5220755 5220774 5220758 -
cgatgagatcaactggaaga

SEQ ID NO: 63278 - DNA, 20 bp, Artificial Sequence
  Synthetic oligonucleotide; ATGAAT chr11 5220730 5220749 5220733 -
tatcaatgacgaaagatgaa

SEQ ID NO: 63279 - DNA, 20 bp, Artificial Sequence
  Synthetic oligonucleotide; AAGAAT chr11 5220692 5220711 5220695 -
gaagagaagtttagagaaaa

SEQ ID NO: 63280 - DNA, 20 bp, Artificial Sequence
  Synthetic oligonucleotide; GAGAAT chr11 5220598 5220617 5220601 -
gtgtagctgaaagtgatggg

SEQ ID NO: 63281 - DNA, 20 bp, Artificial Sequence
  Synthetic oligonucleotide; CAGGAT chr11 5220568 5220587 5220571 -
ccaagttggaaaacactctg

SEQ ID NO: 63282 - DNA, 20 bp, Artificial Sequence
  Synthetic oligonucleotide; TCGGGT chr11 5220389 5220408 5220392 -
agggcagccagagagaaagg

SEQ ID NO: 63283 - DNA, 20 bp, Artificial Sequence
  Synthetic oligonucleotide; AAGAAT chr11 5220283 5220302 5220286 -
tattcaacattgttaaagaa

SEQ ID NO: 63284 - DNA, 20 bp, Artificial Sequence
  Synthetic oligonucleotide; CAGAAT chr11 5220269 5220288 5220272 -
aaagaaaagaattttcaacc

SEQ ID NO: 63285 - DNA, 20 bp, Artificial Sequence
  Synthetic oligonucleotide; CAGGAT chr11 5220022 5220041 5220025 -
accagctaacatcataatga

SEQ ID NO: 63286 - DNA, 20 bp, Artificial Sequence
  Synthetic oligonucleotide; TTGGAT chr11 5219940 5219959 5219943 -
aaaagacacagactggcaaa

SEQ ID NO: 63287 - DNA, 20 bp, Artificial Sequence
  Synthetic oligonucleotide; AGGAGT chr11 5219933 5219952 5219936 -
acagactggcaaattggata

SEQ ID NO: 63288 - DNA, 20 bp, Artificial Sequence
  Synthetic oligonucleotide; AAGGAT chr11 5219857 5219876 5219860 -
cacacataggctcgaaataa

SEQ ID NO: 63289 - DNA, 20 bp, Artificial Sequence
  Synthetic oligonucleotide; AGGAAT chr11 5219849 5219868 5219852 -
ggctcgaaataaaaggatgg

SEQ ID NO: 63290 - DNA, 20 bp, Artificial Sequence
  Synthetic oligonucleotide; AGGGGT chr11 5219811 5219830 5219814 -
aatggaaaacaaaaaaaggc

SEQ ID NO: 63291 - DNA, 20 bp, Artificial Sequence
  Synthetic oligonucleotide; AGGGAT chr11 5219725 5219744 5219728 -
aggccattacataatggcaa

SEQ ID NO: 63292 - DNA, 20 bp, Artificial Sequence
  Synthetic oligonucleotide; CTGAGT chr11 5219642 5219661 5219645 -
ccagattcataaaacaagtc

SEQ ID NO: 63293 - DNA, 20 bp, Artificial Sequence
  Synthetic oligonucleotide; AAGGAT chr11 5219540 5219559 5219543 -
caacgagacagaaagttaac

SEQ ID NO: 63294 - DNA, 20 bp, Artificial Sequence
  Synthetic oligonucleotide; AGGAAT chr11 5219530 5219549 5219533 -
gaaagttaacaaggatatcc

SEQ ID NO: 63295 - DNA, 20 bp, Artificial Sequence
  Synthetic oligonucleotide; CAGAAT chr11 5219461 5219480 5219464 -
aactctccaccccaaatcaa

SEQ ID NO: 63296 - DNA, 20 bp, Artificial Sequence
  Synthetic oligonucleotide; CAGGAT chr11 5219316 5219335 5219319 -
agtgcaatcaaactagaact

SEQ ID NO: 63297 - DNA, 20 bp, Artificial Sequence
  Synthetic oligonucleotide; CTGAAT chr11 5219258 5219277 5219261 -
ggaaactgaacagcctgctc

SEQ ID NO: 63298 - DNA, 20 bp, Artificial Sequence
  Synthetic oligonucleotide; CTGGGT chr11 5219247 5219266 5219250 -
agcctgctcctgaatgacta

SEQ ID NO: 63299 - DNA, 20 bp, Artificial Sequence
  Synthetic oligonucleotide; CAGAAT chr11 5219174 5219193 5219177 -
agaacaaagacacaacacac

SEQ ID NO: 63300 - DNA, 20 bp, Artificial Sequence
  Synthetic oligonucleotide; ATGAAT chr11 5218947 5218966 5218950 -
aaaacccttcaaaaaaatca

SEQ ID NO: 63301 - DNA, 20 bp, Artificial Sequence
  Synthetic oligonucleotide; AAGAAT chr11 5218867 5218886 5218870 -
taataaagaagaaaagagag

SEQ ID NO: 63302 - DNA, 20 bp, Artificial Sequence
  Synthetic oligonucleotide; CGGGGT chr11 5218836 5218855 5218839 -
agacgcaataaaaaatgaca

SEQ ID NO: 63303 - DNA, 20 bp, Artificial Sequence
  Synthetic oligonucleotide; GAGAAT chr11 5218793 5218812 5218796 -
agaaatacaaactaccgtca

SEQ ID NO: 63304 - DNA, 20 bp, Artificial Sequence
  Synthetic oligonucleotide; ATGGAT chr11 5218743 5218762 5218746 -
aactagaaaatctagaagaa

SEQ ID NO: 63305 - DNA, 20 bp, Artificial Sequence
  Synthetic oligonucleotide; CTGAAT chr11 5218683 5218702 5218686 -
accaggaagaagttgtatct

SEQ ID NO: 63306 - DNA, 20 bp, Artificial Sequence
  Synthetic oligonucleotide; TAGGAT chr11 5218607 5218626 5218610 -
caaaaaaagtccgggaccag

SEQ ID NO: 63307 - DNA, 20 bp, Artificial Sequence
  Synthetic oligonucleotide; CCGAAT chr11 5218595 5218614 5218598 -
gggaccagtaggattcatag

SEQ ID NO: 63308 - DNA, 20 bp, Artificial Sequence
  Synthetic oligonucleotide; GGGAAT chr11 5218522 5218541 5218525 -
ttccaatcaatagaaaaaga

SEQ ID NO: 63309 - DNA, 20 bp, Artificial Sequence
  Synthetic oligonucleotide; GAGAAT chr11 5218446 5218465 5218449 -
acagagacacaacaaaaaaa

SEQ ID NO: 63310 - DNA, 20 bp, Artificial Sequence
  Synthetic oligonucleotide; CTGAGT chr11 5218126 5218145 5218129 -
aacccacagccaatatcata

SEQ ID NO: 63311 - DNA, 20 bp, Artificial Sequence
  Synthetic oligonucleotide; AGGGAT chr11 5218077 5218096 5218080 -
tttgaaaactggcacaaggc

SEQ ID NO: 63312 - DNA, 20 bp, Artificial Sequence
  Synthetic oligonucleotide; CAGGAT chr11 5217867 5217886 5217870 -
aagcaacttcagcaaagtct

SEQ ID NO: 63313 - DNA, 20 bp, Artificial Sequence
  Synthetic oligonucleotide; ATGAGT chr11 5217793 5217812 5217796 -
gacaaacagagagccaaatc

SEQ ID NO: 63314 - DNA, 20 bp, Artificial Sequence
  Synthetic oligonucleotide; GAGAAT chr11 5217761 5217780 5217764 -
ccattcacaattgcttcaaa

SEQ ID NO: 63315 - DNA, 20 bp, Artificial Sequence
  Synthetic oligonucleotide; AGGAAT chr11 5217746 5217765 5217749 -
tcaaagagaataaaatacct

SEQ ID NO: 63316 - DNA, 20 bp, Artificial Sequence
  Synthetic oligonucleotide; AGGGAT chr11 5217730 5217749 5217733 -
acctaggaatccaacttaca

SEQ ID NO: 63317 - DNA, 20 bp, Artificial Sequence
  Synthetic oligonucleotide; GAGGAT chr11 5217673 5217692 5217676 -
cactgctcaatgaaataaaa

SEQ ID NO: 63318 - DNA, 20 bp, Artificial Sequence
  Synthetic oligonucleotide; ATGGGT chr11 5217638 5217657 5217641 -
tggaagaacattccatgctc

SEQ ID NO: 63319 - DNA, 20 bp, Artificial Sequence
  Synthetic oligonucleotide; AAGAAT chr11 5217629 5217648 5217632 -
attccatgctcatgggtagg

SEQ ID NO: 63320 - DNA, 20 bp, Artificial Sequence
  Synthetic oligonucleotide; AAGGAT chr11 5217271 5217290 5217274 -
agagaaacaagcaatgggga

SEQ ID NO: 63321 - DNA, 20 bp, Artificial Sequence
  Synthetic oligonucleotide; CTGGAT chr11 5217208 5217227 5217211 -
ccatatgtagaaagctgaaa

SEQ ID NO: 63322 - DNA, 20 bp, Artificial Sequence
  Synthetic oligonucleotide; ATGGAT chr11 5217167 5217186 5217170 -
tatacaaaaattaattcaag

SEQ ID NO: 63323 - DNA, 20 bp, Artificial Sequence
  Synthetic oligonucleotide; CGGGAT chr11 5217022 5217041 5217025 -
caaaagacaaaatggacaaa

SEQ ID NO: 63324 - DNA, 20 bp, Artificial Sequence
  Synthetic oligonucleotide; CAGAGT chr11 5216972 5216991 5216975 -
acagctaaagaaactaccat

SEQ ID NO: 63325 - DNA, 20 bp, Artificial Sequence
  Synthetic oligonucleotide; CAGAAT chr11 5216900 5216919 5216903 -
tctgacaaagggctaatatc

SEQ ID NO: 63326 - DNA, 20 bp, Artificial Sequence
  Synthetic oligonucleotide; AAGGAT chr11 5216834 5216853 5216837 -
accccatcaaaaagtgggca

SEQ ID NO: 63327 - DNA, 20 bp, Artificial Sequence
  Synthetic oligonucleotide; TAGAAT chr11 5216703 5216722 5216706 -
agataccatctcacaccagt

SEQ ID NO: 63328 - DNA, 20 bp, Artificial Sequence
  Synthetic oligonucleotide; GAGGAT chr11 5216659 5216678 5216662 -
aggaaacaacaggtgctgga

SEQ ID NO: 63329 - DNA, 20 bp, Artificial Sequence
  Synthetic oligonucleotide; AGGAAT chr11 5216569 5216588 5216572 -
agtcagtgtggcaattcctc

SEQ ID NO: 63330 - DNA, 20 bp, Artificial Sequence
  Synthetic oligonucleotide; CTGGGT chr11 5216524 5216543 5216527 -
ttgacccagccatcccatta

SEQ ID NO: 63331 - DNA, 20 bp, Artificial Sequence
  Synthetic oligonucleotide; AAGGAT chr11 5216509 5216528 5216512 -
cattactgggtacataccca

SEQ ID NO: 63332 - DNA, 20 bp, Artificial Sequence
  Synthetic oligonucleotide; CTGGAT chr11 5216399 5216418 5216402 -
aaatgtccaacaacgataga

SEQ ID NO: 63333 - DNA, 20 bp, Artificial Sequence
  Synthetic oligonucleotide; TGGAAT chr11 5216367 5216386 5216370 -
aatgtggcacatatacacca

SEQ ID NO: 63334 - DNA, 20 bp, Artificial Sequence
  Synthetic oligonucleotide; ATGAGT chr11 5216340 5216359 5216343 -
ctatgcagccataaaaaatg

SEQ ID NO: 63335 - DNA, 20 bp, Artificial Sequence
  Synthetic oligonucleotide; ATGGAT chr11 5216315 5216334 5216318 -
ttcatgtcctttgtagggac

SEQ ID NO: 63336 - DNA, 20 bp, Artificial Sequence
  Synthetic oligonucleotide; GAGAAT chr11 5216271 5216290 5216274 -
tctcagcaaactatcacaag

SEQ ID NO: 63337 - DNA, 20 bp, Artificial Sequence
  Synthetic oligonucleotide; GGGAAT chr11 5216233 5216252 5216236 -
gcatgttctcactcataggt

SEQ ID NO: 63338 - DNA, 20 bp, Artificial Sequence
  Synthetic oligonucleotide; TGGGGT chr11 5216170 5216189 5216173 -
tcacactctggggactgtta

SEQ ID NO: 63339 - DNA, 20 bp, Artificial Sequence
  Synthetic oligonucleotide; AGGGAT chr11 5216151 5216170 5216154 -
atggggtggggggcaggggc

SEQ ID NO: 63340 - DNA, 20 bp, Artificial Sequence
  Synthetic oligonucleotide; ACGAGT chr11 5216115 5216134 5216118 -
gatatacctaatgctaaatg

SEQ ID NO: 63341 - DNA, 20 bp, Artificial Sequence
  Synthetic oligonucleotide; ATGGGT chr11 5216107 5216126 5216110 -
taatgctaaatgacgagtta

SEQ ID NO: 63342 - DNA, 20 bp, Artificial Sequence
  Synthetic oligonucleotide; GAGAGT chr11 5215834 5215853 5215837 -
cagtctctccatatatttct

SEQ ID NO: 63343 - DNA, 20 bp, Artificial Sequence
  Synthetic oligonucleotide; AAGAAT chr11 5215808 5215827 5215811 -
cttccttcttatttgtttat

SEQ ID NO: 63344 - DNA, 20 bp, Artificial Sequence
  Synthetic oligonucleotide; TAGAAT chr11 5215704 5215723 5215707 -
tactaaacaggagccaagcc

SEQ ID NO: 63345 - DNA, 20 bp, Artificial Sequence
  Synthetic oligonucleotide; TTGAAT chr11 5215694 5215713 5215697 -
gagccaagcctagaataaag

SEQ ID NO: 63346 - DNA, 20 bp, Artificial Sequence
  Synthetic oligonucleotide; TGGAAT chr11 5215685 5215704 5215688 -
ctagaataaagttgaatttc

SEQ ID NO: 63347 - DNA, 20 bp, Artificial Sequence
  Synthetic oligonucleotide; TAGGAT chr11 5215490 5215509 5215493 -
aacccaggaggctgaagtga

SEQ ID NO: 63348 - DNA, 20 bp, Artificial Sequence
  Synthetic oligonucleotide; CAGGAT chr11 5215474 5215493 5215477 -
gtgataggatcacttgagcc

SEQ ID NO: 63349 - DNA, 20 bp, Artificial Sequence
  Synthetic oligonucleotide; CAGGGT chr11 5215466 5215485 5215469 -
atcacttgagcccaggattt

SEQ ID NO: 63350 - DNA, 20 bp, Artificial Sequence
  Synthetic oligonucleotide; GTGGAT chr11 5215266 5215285 5215269 -
gcctcggggctgtttctcca

SEQ ID NO: 63351 - DNA, 20 bp, Artificial Sequence
  Synthetic oligonucleotide; TTGGGT chr11 5215258 5215277 5215261 -
gctgtttctccagtggattc

SEQ ID NO: 63352 - DNA, 20 bp, Artificial Sequence
  Synthetic oligonucleotide; TTGGAT chr11 5215186 5215205 5215189 -
tcacctgtcttattcagagc

SEQ ID NO: 63353 - DNA, 20 bp, Artificial Sequence
  Synthetic oligonucleotide; TGGGAT chr11 5215156 5215175 5215159 -
gactagctttttctatttct

SEQ ID NO: 63354 - DNA, 20 bp, Artificial Sequence
  Synthetic oligonucleotide; TAGAGT chr11 5215055 5215074 5215058 -
gtattctggggagggggaca

SEQ ID NO: 63355 - DNA, 20 bp, Artificial Sequence
  Synthetic oligonucleotide; AGGAAT chr11 5215037 5215056 5215040 -
catagagttgagagaaatac

SEQ ID NO: 63356 - DNA, 20 bp, Artificial Sequence
  Synthetic oligonucleotide; TGGGGT chr11 5214873 5214892 5214876 -
gatgattatttgtatttctg

SEQ ID NO: 63357 - DNA, 20 bp, Artificial Sequence
  Synthetic oligonucleotide; GTGAGT chr11 5214869 5214888 5214872 -
attatttgtatttctgtggg

SEQ ID NO: 63358 - DNA, 20 bp, Artificial Sequence
  Synthetic oligonucleotide; TTGGAT chr11 5214827 5214846 5214830 -
tcatttctaactgtgcttat

SEQ ID NO: 63359 - DNA, 20 bp, Artificial Sequence
  Synthetic oligonucleotide; TTGAAT chr11 5214735 5214754 5214738 -
ctcttggactcattaatctt

SEQ ID NO: 63360 - DNA, 20 bp, Artificial Sequence
  Synthetic oligonucleotide; TAGGGT chr11 5214662 5214681 5214665 -
ttcttgtcttctgctagatt

SEQ ID NO: 63361 - DNA, 20 bp, Artificial Sequence
  Synthetic oligonucleotide; GAGAGT chr11 5214349 5214368 5214352 -
tttttattcctctgtggtct

SEQ ID NO: 63362 - DNA, 20 bp, Artificial Sequence
  Synthetic oligonucleotide; GAGGAT chr11 5214313 5214332 5214316 -
attttttttttgcatttgct

SEQ ID NO: 63363 - DNA, 20 bp, Artificial Sequence
  Synthetic oligonucleotide; AAGAGT chr11 5214152 5214171 5214155 -
attctatcagatgcacaaag

SEQ ID NO: 63364 - DNA, 20 bp, Artificial Sequence
  Synthetic oligonucleotide; AGGGAT chr11 5214104 5214123 5214107 -
actccaaaaaattgaggggg

SEQ ID NO: 63365 - DNA, 20 bp, Artificial Sequence
  Synthetic oligonucleotide; CAGAAT chr11 5213694 5213713 5213697 -
aacccacagccaacatcata

SEQ ID NO: 63366 - DNA, 20 bp, Artificial Sequence
  Synthetic oligonucleotide; AAGGAT chr11 5213645 5213664 5213648 -
cttgaaaactggcacaagac

SEQ ID NO: 63367 - DNA, 20 bp, Artificial Sequence
  Synthetic oligonucleotide; GGGAAT chr11 5213572 5213591 5213575 -
agagcaatcaggcaagagaa

SEQ ID NO: 63368 - DNA, 20 bp, Artificial Sequence
  Synthetic oligonucleotide; CAGGAT chr11 5213453 5213472 5213456 -
tgataacttcagcaaagttt

SEQ ID NO: 63369 - DNA, 20 bp, Artificial Sequence
  Synthetic oligonucleotide; AAGAAT chr11 5213347 5213366 5213350 -
ccatttaccgttgccacaaa

SEQ ID NO: 63370 - DNA, 20 bp, Artificial Sequence
  Synthetic oligonucleotide; AAGGAT chr11 5213332 5213351 5213335 -
acaaaaagaataaaatacct

SEQ ID NO: 63371 - DNA, 20 bp, Artificial Sequence
  Synthetic oligonucleotide; ATGGAT chr11 5213224 5213243 5213227 -
tggaaaaactttccatgctc

SEQ ID NO: 63372 - DNA, 20 bp, Artificial Sequence
  Synthetic oligonucleotide; AAGAAT chr11 5213215 5213234 5213218 -
tttccatgctcatggataaa

SEQ ID NO: 63373 - DNA, 20 bp, Artificial Sequence
  Synthetic oligonucleotide; GGGAAT chr11 5213039 5213058 5213042 -
aaatcctaatactcacaggt

SEQ ID NO: 63374 - DNA, 20 bp, Artificial Sequence
  Synthetic oligonucleotide; CAGGGT chr11 5213010 5213029 5213013 -
aaaatgagaacacttggaca

SEQ ID NO: 63375 - DNA, 20 bp, Artificial Sequence
  Synthetic oligonucleotide; TGGGGT chr11 5212976 5212995 5212979 -
tcacacaccggggcctgtcg

SEQ ID NO: 63376 - DNA, 20 bp, Artificial Sequence
  Synthetic oligonucleotide; AGGGAT chr11 5212957 5212976 5212960 -
gtggggtggtaggagagagg

SEQ ID NO: 63377 - DNA, 20 bp, Artificial Sequence
  Synthetic oligonucleotide; ACGAGT chr11 5212922 5212941 5212925 -
agatatatctaatgtaaatg

SEQ ID NO: 63378 - DNA, 20 bp, Artificial Sequence
  Synthetic oligonucleotide; ACGGGT chr11 5212914 5212933 5212917 -
ctaatgtaaatgacgagtta

SEQ ID NO: 63379 - DNA, 20 bp, Artificial Sequence
  Synthetic oligonucleotide; TAGAGT chr11 5212847 5212866 5212850 -
tgcacaggtaccgtagaact

SEQ ID NO: 63380 - DNA, 20 bp, Artificial Sequence
  Synthetic oligonucleotide; CAGAAT chr11 5212711 5212730 5212714 -
agacacacagacaaatggaa

SEQ ID NO: 63381 - DNA, 20 bp, Artificial Sequence
  Synthetic oligonucleotide; TGGGAT chr11 5212602 5212621 5212605 -
ccctattcaacaagtggtgt

SEQ ID NO: 63382 - DNA, 20 bp, Artificial Sequence
  Synthetic oligonucleotide; ATGGAT chr11 5212526 5212545 5212529 -
tatacacaaataaactcaag

SEQ ID NO: 63383 - DNA, 20 bp, Artificial Sequence
  Synthetic oligonucleotide; TAGGAT chr11 5212382 5212401 5212385 -
caaaagcaaaaattgacaaa

SEQ ID NO: 63384 - DNA, 20 bp, Artificial Sequence
  Synthetic oligonucleotide; CTGAGT chr11 5212334 5212353 5212337 -
acagcaaaagaaactatcaa

SEQ ID NO: 63385 - DNA, 20 bp, Artificial Sequence
  Synthetic oligonucleotide; TAGAAT chr11 5212318 5212337 5212321 -
tcaactgagtaaacaaccta

SEQ ID NO: 63386 - DNA, 20 bp, Artificial Sequence
  Synthetic oligonucleotide; CAGAAT chr11 5212266 5212285 5212269 -
tccaacaaaggcctaatatt

SEQ ID NO: 63387 - DNA, 20 bp, Artificial Sequence
  Synthetic oligonucleotide; ATGAAT chr11 5212245 5212264 5212248 -
agaatctataaggaacttaa

SEQ ID NO: 63388 - DNA, 20 bp, Artificial Sequence
  Synthetic oligonucleotide; ATGGGT chr11 5212207 5212226 5212210 -
aacaaacaatgccacaaaaa

SEQ ID NO: 63389 - DNA, 20 bp, Artificial Sequence
  Synthetic oligonucleotide; GTGGGT chr11 5212032 5212051 5212035 -
atagtcaaaaaataacagat

SEQ ID NO: 63390 - DNA, 20 bp, Artificial Sequence
  Synthetic oligonucleotide; GGGAAT chr11 5212010 5212029 5212013 -
gggtaaggttgtggagaaaa

SEQ ID NO: 63391 - DNA, 20 bp, Artificial Sequence
  Synthetic oligonucleotide; TTGAGT chr11 5211892 5211911 5211895 -
ttaacccaacaatcctatta

SEQ ID NO: 63392 - DNA, 20 bp, Artificial Sequence
  Synthetic oligonucleotide; TAGAAT chr11 5211800 5211819 5211803 -
taatcacaatagcaaagaca

SEQ ID NO: 63393 - DNA, 20 bp, Artificial Sequence
  Synthetic oligonucleotide; TGGAAT chr11 5211740 5211759 5211743 -
gaacatgtacatatacacca

SEQ ID NO: 63394 - DNA, 20 bp, Artificial Sequence
  Synthetic oligonucleotide; AAGAAT chr11 5211717 5211736 5211720 -
aatactatgtggccataaaa

SEQ ID NO: 63395 - DNA, 20 bp, Artificial Sequence
  Synthetic oligonucleotide; ATGGAT chr11 5211688 5211707 5211691 -
atcatgtcctttgcaggaac

SEQ ID NO: 63396 - DNA, 20 bp, Artificial Sequence
  Synthetic oligonucleotide; TTGAGT chr11 5211546 5211565 5211549 -
caaaagacactgcagcctaa

SEQ ID NO: 63397 - DNA, 20 bp, Artificial Sequence
  Synthetic oligonucleotide; GAGGGT chr11 5211537 5211556 5211540 -
ctgcagcctaattgagtttg

SEQ ID NO: 63398 - DNA, 20 bp, Artificial Sequence
  Synthetic oligonucleotide; TTGAGT chr11 5211499 5211518 5211502 -
aagagcagaaaaagtaacta

SEQ ID NO: 63399 - DNA, 20 bp, Artificial Sequence
  Synthetic oligonucleotide; GTGAGT chr11 5211428 5211447 5211431 -
tagctatgtaacaaaccatc

SEQ ID NO: 63400 - DNA, 20 bp, Artificial Sequence
  Synthetic oligonucleotide; CTGAAT chr11 5211089 5211108 5211092 -
attcagttacttctgacaac

SEQ ID NO: 63401 - DNA, 20 bp, Artificial Sequence
  Synthetic oligonucleotide; CAGGGT chr11 5211041 5211060 5211044 -
tctcttttttttttttttga

SEQ ID NO: 63402 - DNA, 20 bp, Artificial Sequence
  Synthetic oligonucleotide; TGGAGT chr11 5211016 5211035 5211019 -
tctcgctgtgttgcccaggt

SEQ ID NO: 63403 - DNA, 20 bp, Artificial Sequence
  Synthetic oligonucleotide; AGGGGT chr11 5210875 5210894 5210878 -
ttttaaaattttttgtagag

SEQ ID NO: 63404 - DNA, 20 bp, Artificial Sequence
  Synthetic oligonucleotide; GAGAGT chr11 5210666 5210685 5210669 -
gagattaggaagtgccccga

SEQ ID NO: 63405 - DNA, 20 bp, Artificial Sequence
  Synthetic oligonucleotide; GAGGGT chr11 5210650 5210669 5210653 -
ccgagagagtgcatagagga

SEQ ID NO: 63406 - DNA, 20 bp, Artificial Sequence
  Synthetic oligonucleotide; CTGGGT chr11 5210634 5210653 5210637 -
aggagagggtagaagtaaag

SEQ ID NO: 63407 - DNA, 20 bp, Artificial Sequence
  Synthetic oligonucleotide; AGGAAT chr11 5210613 5210632 5210616 -
tgggtttgctttgttagtga

SEQ ID NO: 63408 - DNA, 20 bp, Artificial Sequence
  Synthetic oligonucleotide; CTGGAT chr11 5210446 5210465 5210449 -
tccccatccacttgctcatt

SEQ ID NO: 63409 - DNA, 20 bp, Artificial Sequence
  Synthetic oligonucleotide; CAGGAT chr11 5210438 5210457 5210441 -
cacttgctcattctggatgg

SEQ ID NO: 63410 - DNA, 20 bp, Artificial Sequence
  Synthetic oligonucleotide; TGGGGT chr11 5210339 5210358 5210342 -
aaaggaaaaagtacatttag

SEQ ID NO: 63411 - DNA, 20 bp, Artificial Sequence
  Synthetic oligonucleotide; TTGGAT chr11 5210324 5210343 5210327 -
tttagtggggtgtgggactg

SEQ ID NO: 63412 - DNA, 20 bp, Artificial Sequence
  Synthetic oligonucleotide; AAGAAT chr11 5210257 5210276 5210260 -
gccagcttgcttcccactag

SEQ ID NO: 63413 - DNA, 20 bp, Artificial Sequence
  Synthetic oligonucleotide; TGGGAT chr11 5210183 5210202 5210186 -
ttcatttattattgtttttc

SEQ ID NO: 63414 - DNA, 20 bp, Artificial Sequence
  Synthetic oligonucleotide; TGGAGT chr11 5210152 5210171 5210155 -
caggagcaatttaaacttgc

SEQ ID NO: 63415 - DNA, 20 bp, Artificial Sequence
  Synthetic oligonucleotide; GAGAAT chr11 5210125 5210144 5210128 -
caatttcttcaactacaaat

SEQ ID NO: 63416 - DNA, 20 bp, Artificial Sequence
  Synthetic oligonucleotide; AAGGAT chr11 5210062 5210081 5210065 -
gaactaaatgtaaatataca

SEQ ID NO: 63417 - DNA, 20 bp, Artificial Sequence
  Synthetic oligonucleotide; CAGAAT chr11 5209901 5209920 5209904 -
ttttatgacctagcaattta

SEQ ID NO: 63418 - DNA, 20 bp, Artificial Sequence
  Synthetic oligonucleotide; AAGAAT chr11 5209877 5209896 5209880 -
atatatatacaaaaatatat

SEQ ID NO: 63419 - DNA, 20 bp, Artificial Sequence
  Synthetic oligonucleotide; TGGAGT chr11 5209809 5209828 5209812 -
actcaaatatctatcaactg

SEQ ID NO: 63420 - DNA, 20 bp, Artificial Sequence
  Synthetic oligonucleotide; TAGAAT chr11 5209773 5209792 5209776 -
attgtggtatatacataaaa

SEQ ID NO: 63421 - DNA, 20 bp, Artificial Sequence
  Synthetic oligonucleotide; ATGAAT chr11 5209726 5209745 5209729 -
aactacagtcatacactagt

SEQ ID NO: 63422 - DNA, 20 bp, Artificial Sequence
  Synthetic oligonucleotide; TTGAAT chr11 5209701 5209720 5209704 -
tgcaattcacaaacataata

SEQ ID NO: 63423 - DNA, 20 bp, Artificial Sequence
  Synthetic oligonucleotide; ATGAGT chr11 5209635 5209654 5209638 -
acacttttaaaaaaagggac

SEQ ID NO: 63424 - DNA, 20 bp, Artificial Sequence
  Synthetic oligonucleotide; ATGAAT chr11 5209615 5209634 5209618 -
atgagtcaatcgtgataaaa

SEQ ID NO: 63425 - DNA, 20 bp, Artificial Sequence
  Synthetic oligonucleotide; CAGGAT chr11 5209604 5209623 5209607 -
gtgataaaaatgaattatat

SEQ ID NO: 63426 - DNA, 20 bp, Artificial Sequence
  Synthetic oligonucleotide; TGGAAT chr11 5209573 5209592 5209576 -
ttaactttggagacaattag

SEQ ID NO: 63427 - DNA, 20 bp, Artificial Sequence
  Synthetic oligonucleotide; AAGAGT chr11 5209563 5209582 5209566 -
agacaattagtggaatgata

SEQ ID NO: 63428 - DNA, 20 bp, Artificial Sequence
  Synthetic oligonucleotide; ATGGGT chr11 5209513 5209532 5209516 -
cctatcttattagttgttac

SEQ ID NO: 63429 - DNA, 20 bp, Artificial Sequence
  Synthetic oligonucleotide; TGGGAT chr11 5209090 5209109 5209093 -
gtcttttacacacactgtct

SEQ ID NO: 63430 - DNA, 20 bp, Artificial Sequence
  Synthetic oligonucleotide; AGGGAT chr11 5208942 5208961 5208945 -
gaacttcattgctctctgtt

SEQ ID NO: 63431 - DNA, 20 bp, Artificial Sequence
  Synthetic oligonucleotide; GCGAGT chr11 5208848 5208867 5208851 -
ctatggacctcttaaactca

SEQ ID NO: 63432 - DNA, 20 bp, Artificial Sequence
  Synthetic oligonucleotide; ATGAAT chr11 5208783 5208802 5208786 -
ctctaatgcttccaaacttg

SEQ ID NO: 63433 - DNA, 20 bp, Artificial Sequence
  Synthetic oligonucleotide; TAGAAT chr11 5208674 5208693 5208677 -
aataatcaatttctcacaac

SEQ ID NO: 63434 - DNA, 20 bp, Artificial Sequence
  Synthetic oligonucleotide; TTGAGT chr11 5208644 5208663 5208647 -
atcataaatactgatagctt

SEQ ID NO: 63435 - DNA, 20 bp, Artificial Sequence
  Synthetic oligonucleotide; TGGGAT chr11 5208316 5208335 5208319 -
cctatttgtgtcttgcaaca

SEQ ID NO: 63436 - DNA, 20 bp, Artificial Sequence
  Synthetic oligonucleotide; GAGGAT chr11 5208245 5208264 5208248 -
taagttaatagctttgtttt

SEQ ID NO: 63437 - DNA, 20 bp, Artificial Sequence
  Synthetic oligonucleotide; TGGAAT chr11 5208188 5208207 5208191 -
taataaattaagagctataa

SEQ ID NO: 63438 - DNA, 20 bp, Artificial Sequence
  Synthetic oligonucleotide; GTGAGT chr11 5208161 5208180 5208164 -
tactttataaatttcttata

SEQ ID NO: 63439 - DNA, 20 bp, Artificial Sequence
  Synthetic oligonucleotide; AAGGGT chr11 5207856 5207875 5207859 -
aacagaaaaaaaacgataca

SEQ ID NO: 63440 - DNA, 20 bp, Artificial Sequence
  Synthetic oligonucleotide; AAGGAT chr11 5207847 5207866 5207850 -
aaaacgatacaaagggtatg

SEQ ID NO: 63441 - DNA, 20 bp, Artificial Sequence
  Synthetic oligonucleotide; TTGAGT chr11 5207842 5207861 5207845 -
gatacaaagggtatgaagga

SEQ ID NO: 63442 - DNA, 20 bp, Artificial Sequence
  Synthetic oligonucleotide; GTGAAT chr11 5207838 5207857 5207841 -
caaagggtatgaaggattga

SEQ ID NO: 63443 - DNA, 20 bp, Artificial Sequence
  Synthetic oligonucleotide; CTGGGT chr11 5207802 5207821 5207805 -
ctacggcaccagtggtcttt

SEQ ID NO: 63444 - DNA, 20 bp, Artificial Sequence
  Synthetic oligonucleotide; GAGAAT chr11 5207623 5207642 5207626 -
ataaacctttgtcacctcta

SEQ ID NO: 63445 - DNA, 20 bp, Artificial Sequence
  Synthetic oligonucleotide; AGGAAT chr11 5207589 5207608 5207592 -
tccacagatttagaaattct

SEQ ID NO: 63446 - DNA, 20 bp, Artificial Sequence
  Synthetic oligonucleotide; ATGGGT chr11 5207496 5207515 5207499 -
tttatttacataaataaaag

SEQ ID NO: 63447 - DNA, 20 bp, Artificial Sequence
  Synthetic oligonucleotide; TAGGGT chr11 5207469 5207488 5207472 -
tgtcacacaatttaaaaatc

SEQ ID NO: 63448 - DNA, 20 bp, Artificial Sequence
  Synthetic oligonucleotide; GGGGAT chr11 5207353 5207372 5207356 -
ttgcctcaaataatccctgt

SEQ ID NO: 63449 - DNA, 20 bp, Artificial Sequence
  Synthetic oligonucleotide; ACGAGT chr11 5207282 5207301 5207285 -
atcctagcaataatatcctg

SEQ ID NO: 63450 - DNA, 20 bp, Artificial Sequence
  Synthetic oligonucleotide; TGGAAT chr11 5207194 5207213 5207197 -
atccctcatttggttgaggt

SEQ ID NO: 63451 - DNA, 20 bp, Artificial Sequence
  Synthetic oligonucleotide; ATGGGT chr11 5207184 5207203 5207187 -
tggttgaggttggaatttca

SEQ ID NO: 63452 - DNA, 20 bp, Artificial Sequence
  Synthetic oligonucleotide; GTGGGT chr11 5207180 5207199 5207183 -
tgaggttggaatttcaatgg

SEQ ID NO: 63453 - DNA, 20 bp, Artificial Sequence
  Synthetic oligonucleotide; TTGAAT chr11 5207175 5207194 5207178 -
ttggaatttcaatgggtggg

SEQ ID NO: 63454 - DNA, 20 bp, Artificial Sequence
  Synthetic oligonucleotide; TTGGGT chr11 5207011 5207030 5207014 -
cccttcttgtctttggggac

SEQ ID NO: 63455 - DNA, 20 bp, Artificial Sequence
  Synthetic oligonucleotide; TTGAAT chr11 5206972 5206991 5206975 -
taggagatttcgccaggcat

SEQ ID NO: 63456 - DNA, 20 bp, Artificial Sequence
  Synthetic oligonucleotide; CAGAAT chr11 5206902 5206921 5206905 -
tctctcctatgttctgaggt

SEQ ID NO: 63457 - DNA, 20 bp, Artificial Sequence
  Synthetic oligonucleotide; GGGGAT chr11 5206829 5206848 5206832 -
tagtcatgatctcctctgtt

SEQ ID NO: 63458 - DNA, 20 bp, Artificial Sequence
  Synthetic oligonucleotide; GTGAAT chr11 5206681 5206700 5206684 -
acataaataattatggtaat

SEQ ID NO: 63459 - DNA, 20 bp, Artificial Sequence
  Synthetic oligonucleotide; TGGAGT chr11 5206457 5206476 5206460 -
ccctggagaaaaattggacc

SEQ ID NO: 63460 - DNA, 20 bp, Artificial Sequence
  Synthetic oligonucleotide; ATGGGT chr11 5206437 5206456 5206440 -
tggagtctagcagcctaggt

SEQ ID NO: 63461 - DNA, 20 bp, Artificial Sequence
  Synthetic oligonucleotide; AAGGGT chr11 5206385 5206404 5206388 -
atttcctttatcttaaaaat

SEQ ID NO: 63462 - DNA, 20 bp, Artificial Sequence
  Synthetic oligonucleotide; TAGAAT chr11 5206372 5206391 5206375 -
taaaaataagggtattgaag

SEQ ID NO: 63463 - DNA, 20 bp, Artificial Sequence
  Synthetic oligonucleotide; TAGAAT chr11 5206364 5206383 5206367 -
agggtattgaagtagaattc

SEQ ID NO: 63464 - DNA, 20 bp, Artificial Sequence
  Synthetic oligonucleotide; AAGGAT chr11 5206278 5206297 5206281 -
ctgttcattttaatatattt

SEQ ID NO: 63465 - DNA, 20 bp, Artificial Sequence
  Synthetic oligonucleotide; ATGAAT chr11 5206274 5206293 5206277 -
tcattttaatatatttaagg

SEQ ID NO: 63466 - DNA, 20 bp, Artificial Sequence
  Synthetic oligonucleotide; GGGAAT chr11 5206241 5206260 5206244 -
aaagttgatttcataaaaac

SEQ ID NO: 63467 - DNA, 20 bp, Artificial Sequence
  Synthetic oligonucleotide; GAGAGT chr11 5206210 5206229 5206213 -
gatggttccataggctgact

SEQ ID NO: 63468 - DNA, 20 bp, Artificial Sequence
  Synthetic oligonucleotide; AGGGAT chr11 5206197 5206216 5206200 -
gctgactgagagtgtagagg

SEQ ID NO: 63469 - DNA, 20 bp, Artificial Sequence
  Synthetic oligonucleotide; AGGAAT chr11 5206156 5206175 5206159 -
ttgatcttcagttagactag

SEQ ID NO: 63470 - DNA, 20 bp, Artificial Sequence
  Synthetic oligonucleotide; GGGAAT chr11 5205539 5205558 5205542 -
aaaaatattttagtaatgat

SEQ ID NO: 63471 - DNA, 20 bp, Artificial Sequence
  Synthetic oligonucleotide; CAGAAT chr11 5205140 5205159 5205143 -
tctctctgaactagcatatt

SEQ ID NO: 63472 - DNA, 20 bp, Artificial Sequence
  Synthetic oligonucleotide; TAGAAT chr11 5205102 5205121 5205105 -
agttctttggacaagtctta

SEQ ID NO: 63473 - DNA, 20 bp, Artificial Sequence
  Synthetic oligonucleotide; AGGAAT chr11 5204946 5204965 5204949 -
tgtccagaaaagaccattaa

SEQ ID NO: 63474 - DNA, 20 bp, Artificial Sequence
  Synthetic oligonucleotide; AAGGAT chr11 5204932 5204951 5204935 -
cattaaaggaatgaccttta

SEQ ID NO: 63475 - DNA, 20 bp, Artificial Sequence
  Synthetic oligonucleotide; GTGGGT chr11 5204892 5204911 5204895 -
ttgtccaaggcaggacatgt

SEQ ID NO: 63476 - DNA, 20 bp, Artificial Sequence
  Synthetic oligonucleotide; AGGAAT chr11 5204832 5204851 5204835 -
actccactgccttggcaaat

SEQ ID NO: 63477 - DNA, 20 bp, Artificial Sequence
  Synthetic oligonucleotide; TAGAAT chr11 5204814 5204833 5204817 -
ataggaatgttttagttcta

SEQ ID NO: 63478 - DNA, 20 bp, Artificial Sequence
  Synthetic oligonucleotide; GGGAAT chr11 5204707 5204726 5204710 -
agtaagcaagtaatcacaca

SEQ ID NO: 63479 - DNA, 20 bp, Artificial Sequence
  Synthetic oligonucleotide; AAGAAT chr11 5204610 5204629 5204613 -
gcatcagaaaagactcctga

SEQ ID NO: 63480 - DNA, 20 bp, Artificial Sequence
  Synthetic oligonucleotide; GGGGAT chr11 5204544 5204563 5204547 -
cattccagacagtgctcaga

SEQ ID NO: 63481 - DNA, 20 bp, Artificial Sequence
  Synthetic oligonucleotide; ATGGAT chr11 5204180 5204199 5204183 -
atagtctctatggtggcaac

SEQ ID NO: 63482 - DNA, 20 bp, Artificial Sequence
  Synthetic oligonucleotide; CTGAAT chr11 5204119 5204138 5204122 -
tgtatctagtctgaagaagc

SEQ ID NO: 63483 - DNA, 20 bp, Artificial Sequence
  Synthetic oligonucleotide; CAGAGT chr11 5204019 5204038 5204022 -
attttttttttcctttggga

SEQ ID NO: 63484 - DNA, 20 bp, Artificial Sequence
  Synthetic oligonucleotide; TGGAGT chr11 5203994 5204013 5203997 -
tcttgctctgtcgcccagac

SEQ ID NO: 63485 - DNA, 20 bp, Artificial Sequence
  Synthetic oligonucleotide; CAGGAT chr11 5203949 5203968 5203952 -
tcactgcaacttccacctcc

SEQ ID NO: 63486 - DNA, 20 bp, Artificial Sequence
  Synthetic oligonucleotide; TGGGAT chr11 5203909 5203928 5203912 -
gcctcagtctcccaagtaac

SEQ ID NO: 63487 - DNA, 20 bp, Artificial Sequence
  Synthetic oligonucleotide; CAGGGT chr11 5203851 5203870 5203854 -
tttttgtgttttagtagaga

SEQ ID NO: 63488 - DNA, 20 bp, Artificial Sequence
  Synthetic oligonucleotide; TAGGAT chr11 5203772 5203791 5203775 -
gcctcggcctcccaaagtgc

SEQ ID NO: 63489 - DNA, 20 bp, Artificial Sequence
  Synthetic oligonucleotide; CAGAAT chr11 5203705 5203724 5203708 -
ttaacacatacctacattca

SEQ ID NO: 63490 - DNA, 20 bp, Artificial Sequence
  Synthetic oligonucleotide; CTGAGT chr11 5203657 5203676 5203660 -
ccagatccttgacgatatgt

SEQ ID NO: 63491 - DNA, 20 bp, Artificial Sequence
  Synthetic oligonucleotide; TGGAGT chr11 5203618 5203637 5203621 -
agagaaatcatgtttgaaat

SEQ ID NO: 63492 - DNA, 20 bp, Artificial Sequence
  Synthetic oligonucleotide; AGGAGT chr11 5203474 5203493 5203477 -
gattttacacacactttgat

SEQ ID NO: 63493 - DNA, 20 bp, Artificial Sequence
  Synthetic oligonucleotide; TAGAAT chr11 5203416 5203435 5203419 -
attgtctagctcttatttca

SEQ ID NO: 63494 - DNA, 20 bp, Artificial Sequence
  Synthetic oligonucleotide; ATGAAT chr11 5203306 5203325 5203309 -
ctaatcttctacagcctcta

SEQ ID NO: 63495 - DNA, 20 bp, Artificial Sequence
  Synthetic oligonucleotide; GAGAGT chr11 5203244 5203263 5203247 -
ataaactagtatactgtgat

SEQ ID NO: 63496 - DNA, 20 bp, Artificial Sequence
  Synthetic oligonucleotide; GGGGGT chr11 5203227 5203246 5203230 -
gatgagagtaagttagttaa

SEQ ID NO: 63497 - DNA, 20 bp, Artificial Sequence
  Synthetic oligonucleotide; AGGAAT chr11 5203133 5203152 5203136 -
actcaaaagttaatggtgaa

SEQ ID NO: 63498 - DNA, 20 bp, Artificial Sequence
  Synthetic oligonucleotide; TGGGGT chr11 5203112 5203131 5203115 -
ggaattgctgtgcaaatact

SEQ ID NO: 63499 - DNA, 20 bp, Artificial Sequence
  Synthetic oligonucleotide; AGGAGT chr11 5203011 5203030 5203014 -
ataaagatacctaaatatta

SEQ ID NO: 63500 - DNA, 20 bp, Artificial Sequence
  Synthetic oligonucleotide; AAGAAT chr11 5202930 5202949 5202933 -
aaggctttttgactatgata

SEQ ID NO: 63501 - DNA, 20 bp, Artificial Sequence
  Synthetic oligonucleotide; ATGGGT chr11 5202903 5202922 5202906 -
tgtattttacattacgagca

SEQ ID NO: 63502 - DNA, 20 bp, Artificial Sequence
  Synthetic oligonucleotide; AAGAGT chr11 5202885 5202904 5202888 -
caatgggtaagtgaccatca

SEQ ID NO: 63503 - DNA, 20 bp, Artificial Sequence
  Synthetic oligonucleotide; TGGGAT chr11 5202665 5202684 5202668 -
tgtgtaaaagtgggcctatc

SEQ ID NO: 63504 - DNA, 20 bp, Artificial Sequence
  Synthetic oligonucleotide; TGGAGT chr11 5202535 5202554 5202538 -
ttatgcaattgtgttattgg

SEQ ID NO: 63505 - DNA, 20 bp, Artificial Sequence
  Synthetic oligonucleotide; ATGAAT chr11 5202430 5202449 5202433 -
ttttaagattaaacactcag

SEQ ID NO: 63506 - DNA, 20 bp, Artificial Sequence
  Synthetic oligonucleotide; ATGAAT chr11 5202401 5202420 5202404 -
ttaaatagccagttgtattc

SEQ ID NO: 63507 - DNA, 20 bp, Artificial Sequence
  Synthetic oligonucleotide; AGGAGT chr11 5202385 5202404 5202388 -
attcatgaatttgagctctc

SEQ ID NO: 63508 - DNA, 20 bp, Artificial Sequence
  Synthetic oligonucleotide; AGGAAT chr11 5202375 5202394 5202378 -
ttgagctctcaggagtggtc

SEQ ID NO: 63509 - DNA, 20 bp, Artificial Sequence
  Synthetic oligonucleotide; GAGAAT chr11 5202304 5202323 5202307 -
agtctgcacattaaggaact

SEQ ID NO: 63510 - DNA, 20 bp, Artificial Sequence
  Synthetic oligonucleotide; ATGGAT chr11 5202176 5202195 5202179 -
gataccaaaataatagatat

SEQ ID NO: 63511 - DNA, 20 bp, Artificial Sequence
  Synthetic oligonucleotide; TTGAGT chr11 5202135 5202154 5202138 -
aacttcttgaaaagtgattg

SEQ ID NO: 63512 - DNA, 20 bp, Artificial Sequence
  Synthetic oligonucleotide; AAGGGT chr11 5202112 5202131 5202115 -
agttgcaagatcgttttaaa

SEQ ID NO: 63513 - DNA, 20 bp, Artificial Sequence
  Synthetic oligonucleotide; ATGAAT chr11 5202083 5202102 5202086 -
aagaaattgaggaaaagatg

SEQ ID NO: 63514 - DNA, 20 bp, Artificial Sequence
  Synthetic oligonucleotide; AGGAGT chr11 5201894 5201913 5201897 -
taagttattcaatgctgaga

SEQ ID NO: 63515 - DNA, 20 bp, Artificial Sequence
  Synthetic oligonucleotide; GAGAGT chr11 5201837 5201856 5201840 -
gaagacgtcagtgtagtata

SEQ ID NO: 63516 - DNA, 20 bp, Artificial Sequence
  Synthetic oligonucleotide; TTGAAT chr11 5201485 5201504 5201488 -
aaacacaattggccaataca

SEQ ID NO: 63517 - DNA, 20 bp, Artificial Sequence
  Synthetic oligonucleotide; TTGAAT chr11 5201470 5201489 5201473 -
atacattgaataaatgtata

SEQ ID NO: 63518 - DNA, 20 bp, Artificial Sequence
  Synthetic oligonucleotide; CTGAAT chr11 5201442 5201461 5201445 -
atagttaatcagctcattaa

SEQ ID NO: 63519 - DNA, 20 bp, Artificial Sequence
  Synthetic oligonucleotide; AGGAAT chr11 5201430 5201449 5201433 -
ctcattaactgaataaataa

SEQ ID NO: 63520 - DNA, 20 bp, Artificial Sequence
  Synthetic oligonucleotide; ATGAGT chr11 5201356 5201375 5201359 -
tctacatcacaaaggcacaa

SEQ ID NO: 63521 - DNA, 20 bp, Artificial Sequence
  Synthetic oligonucleotide; AGGAGT chr11 5201218 5201237 5201221 -
catctggagggggagaaaac

SEQ ID NO: 63522 - DNA, 20 bp, Artificial Sequence
  Synthetic oligonucleotide; TCGAAT chr11 5201091 5201110 5201094 -
cccaaagattactcttcact

SEQ ID NO: 63523 - DNA, 20 bp, Artificial Sequence
  Synthetic oligonucleotide; ATGAAT chr11 5201080 5201099 5201083 -
ctcttcacttcgaatgttta

SEQ ID NO: 63524 - DNA, 20 bp, Artificial Sequence
  Synthetic oligonucleotide; AAGGAT chr11 5200918 5200937 5200921 -
tgtttttgcttatggcttct

SEQ ID NO: 63525 - DNA, 20 bp, Artificial Sequence
  Synthetic oligonucleotide; ATGGAT chr11 5200839 5200858 5200842 -
agaccattttctcaaaggca

SEQ ID NO: 63526 - DNA, 20 bp, Artificial Sequence
  Synthetic oligonucleotide; CAGAAT chr11 5200816 5200835 5200819 -
gatactatgtctcaaagaaa

SEQ ID NO: 63527 - DNA, 20 bp, Artificial Sequence
  Synthetic oligonucleotide; TAGGGT chr11 5200778 5200797 5200781 -
ttttttaagtcagtaagttt

SEQ ID NO: 63528 - DNA, 20 bp, Artificial Sequence
  Synthetic oligonucleotide; CAGAAT chr11 5200687 5200706 5200690 -
tctcacatgtttctcagttc

SEQ ID NO: 63529 - DNA, 20 bp, Artificial Sequence
  Synthetic oligonucleotide; ACGAAT chr11 5200653 5200672 5200656 -
cagtaagccctagcaccagc

SEQ ID NO: 63530 - DNA, 20 bp, Artificial Sequence
  Synthetic oligonucleotide; CTGGAT chr11 5200631 5200650 5200634 -
gaattcttcctttcttctca

SEQ ID NO: 63531 - DNA, 20 bp, Artificial Sequence
  Synthetic oligonucleotide; GGGGAT chr11 5200429 5200448 5200432 -
tccactgtgtacacagtgct

SEQ ID NO: 63532 - DNA, 20 bp, Artificial Sequence
  Synthetic oligonucleotide; GGGGAT chr11 5200417 5200436 5200420 -
acagtgctggggatcctgtg

SEQ ID NO: 63533 - DNA, 20 bp, Artificial Sequence
  Synthetic oligonucleotide; TTGGAT chr11 5200395 5200414 5200398 -
ggatcattcgagagatcagc

SEQ ID NO: 63534 - DNA, 20 bp, Artificial Sequence
  Synthetic oligonucleotide; TGGAGT chr11 5200346 5200365 5200349 -
catccatggtctgtccttca

SEQ ID NO: 63535 - DNA, 20 bp, Artificial Sequence
  Synthetic oligonucleotide; CAGAAT chr11 5200258 5200277 5200261 -
tcctccatcctgactaattc

SEQ ID NO: 63536 - DNA, 20 bp, Artificial Sequence
  Synthetic oligonucleotide; AGGAGT chr11 5200224 5200243 5200227 -
ttgggctcactataataggt

SEQ ID NO: 63537 - DNA, 20 bp, Artificial Sequence
  Synthetic oligonucleotide; CAGGAT chr11 5200131 5200150 5200134 -
ctcactctttctgcctgcac

SEQ ID NO: 63538 - DNA, 20 bp, Artificial Sequence
  Synthetic oligonucleotide; TTGGAT chr11 5200050 5200069 5200053 -
tggttatttgcatactgttg

SEQ ID NO: 63539 - DNA, 20 bp, Artificial Sequence
  Synthetic oligonucleotide; ATGAAT chr11 5199816 5199835 5199819 -
acatccttttcccaccttta

SEQ ID NO: 63540 - DNA, 20 bp, Artificial Sequence
  Synthetic oligonucleotide; CAGAAT chr11 5199772 5199791 5199775 -
aagacccaacagattcatac

SEQ ID NO: 63541 - DNA, 20 bp, Artificial Sequence
  Synthetic oligonucleotide; CTGAGT chr11 5199628 5199647 5199631 -
attaaaattgtagatttact

SEQ ID NO: 63542 - DNA, 20 bp, Artificial Sequence
  Synthetic oligonucleotide; GAGAAT chr11 5199583 5199602 5199586 -
aaaatatttaaatatagtca

SEQ ID NO: 63543 - DNA, 20 bp, Artificial Sequence
  Synthetic oligonucleotide; CTGGAT chr11 5199441 5199460 5199444 -
tcctttgctgtaaaacaaag

SEQ ID NO: 63544 - DNA, 20 bp, Artificial Sequence
  Synthetic oligonucleotide; AGGAAT chr11 5199331 5199350 5199334 -
ggagactatagccaactcac

SEQ ID NO: 63545 - DNA, 20 bp, Artificial Sequence
  Synthetic oligonucleotide; CAGAAT chr11 5199305 5199324 5199308 -
gttgtgatatctgtatggac

SEQ ID NO: 63546 - DNA, 20 bp, Artificial Sequence
  Synthetic oligonucleotide; TGGAAT chr11 5199236 5199255 5199239 -
ataccataaaatggctaaag

SEQ ID NO: 63547 - DNA, 20 bp, Artificial Sequence
  Synthetic oligonucleotide; TTGGAT chr11 5199046 5199065 5199049 -
ggacacaaagaaatatgact

SEQ ID NO: 63548 - DNA, 20 bp, Artificial Sequence
  Synthetic oligonucleotide; TAGAAT chr11 5199013 5199032 5199016 -
ctaccatgtctaatttaaat

SEQ ID NO: 63549 - DNA, 20 bp, Artificial Sequence
  Synthetic oligonucleotide; GGGGAT chr11 5198918 5198937 5198921 -
tttgcttttatatctaagtg

SEQ ID NO: 63550 - DNA, 20 bp, Artificial Sequence
  Synthetic oligonucleotide; CTGAGT chr11 5198875 5198894 5198878 -
ctgtccgctaccgacttatt

SEQ ID NO: 63551 - DNA, 20 bp, Artificial Sequence
  Synthetic oligonucleotide; ATGGAT chr11 5198763 5198782 5198766 -
aatcaggtacaaaactatgc

SEQ ID NO: 63552 - DNA, 20 bp, Artificial Sequence
  Synthetic oligonucleotide; AAGAGT chr11 5198673 5198692 5198676 -
aattggacaaattaatgcat

SEQ ID NO: 63553 - DNA, 20 bp, Artificial Sequence
  Synthetic oligonucleotide; CAGAGT chr11 5198453 5198472 5198456 -
gtgaggaaattgtttctgga

SEQ ID NO: 63554 - DNA, 20 bp, Artificial Sequence
  Synthetic oligonucleotide; CTGGGT chr11 5198388 5198407 5198391 -
agaacaataaattaggtctt

SEQ ID NO: 63555 - DNA, 20 bp, Artificial Sequence
  Synthetic oligonucleotide; AAGGAT chr11 5198362 5198381 5198365 -
tacagtataaggttaatttg

SEQ ID NO: 63556 - DNA, 20 bp, Artificial Sequence
  Synthetic oligonucleotide; AGGAGT chr11 5198354 5198373 5198357 -
aaggttaatttgaaggataa

SEQ ID NO: 63557 - DNA, 20 bp, Artificial Sequence
  Synthetic oligonucleotide; GTGAAT chr11 5198350 5198369 5198353 -
ttaatttgaaggataaagga

SEQ ID NO: 63558 - DNA, 20 bp, Artificial Sequence
  Synthetic oligonucleotide; GAGGAT chr11 5198330 5198349 5198333 -
gtgaatttcctgatgtcaaa

SEQ ID NO: 63559 - DNA, 20 bp, Artificial Sequence
  Synthetic oligonucleotide; GCGGAT chr11 5198210 5198229 5198213 -
catagtagctgccgaggcgg

SEQ ID NO: 63560 - DNA, 20 bp, Artificial Sequence
  Synthetic oligonucleotide; GAGAAT chr11 5198073 5198092 5198076 -
tactcgggaggctgagacag

SEQ ID NO: 63561 - DNA, 20 bp, Artificial Sequence
  Synthetic oligonucleotide; GTGAGT chr11 5198039 5198058 5198042 -
cccgggaggtggagcttgca

SEQ ID NO: 63562 - DNA, 20 bp, Artificial Sequence
  Synthetic oligonucleotide; ATGAAT chr11 5197941 5197960 5197944 -
aaaaaaaaagaaaagttgat

SEQ ID NO: 63563 - DNA, 20 bp, Artificial Sequence
  Synthetic oligonucleotide; TGGAAT chr11 5197867 5197886 5197870 -
catggtccctcctggccgac

SEQ ID NO: 63564 - DNA, 20 bp, Artificial Sequence
  Synthetic oligonucleotide; CTGAAT chr11 5197802 5197821 5197805 -
atgaaaagagaagttagctg

SEQ ID NO: 63565 - DNA, 20 bp, Artificial Sequence
  Synthetic oligonucleotide; GTGAAT chr11 5197783 5197802 5197786 -
gctgaatctgtagaggtcat

SEQ ID NO: 63566 - DNA, 20 bp, Artificial Sequence
  Synthetic oligonucleotide; GTGAAT chr11 5197726 5197745 5197729 -
ttccttctaatgctttgaaa

SEQ ID NO: 63567 - DNA, 20 bp, Artificial Sequence
  Synthetic oligonucleotide; GAGAAT chr11 5197669 5197688 5197672 -
gacacaacactggggaagca

SEQ ID NO: 63568 - DNA, 20 bp, Artificial Sequence
  Synthetic oligonucleotide; CAGAAT chr11 5197613 5197632 5197616 -
agccactcatagggaagcat

SEQ ID NO: 63569 - DNA, 20 bp, Artificial Sequence
  Synthetic oligonucleotide; ATGAAT chr11 5197609 5197628 5197612 -
actcatagggaagcatcaga

SEQ ID NO: 63570 - DNA, 20 bp, Artificial Sequence
  Synthetic oligonucleotide; CTGAGT chr11 5197563 5197582 5197566 -
atattacatgtctgacacaa

SEQ ID NO: 63571 - DNA, 20 bp, Artificial Sequence
  Synthetic oligonucleotide; GAGAGT chr11 5197548 5197567 5197551 -
cacaactgagttgttggttt

SEQ ID NO: 63572 - DNA, 20 bp, Artificial Sequence
  Synthetic oligonucleotide; GAGAGT chr11 5197529 5197548 5197532 -
tgagagttatgtttaacagg

SEQ ID NO: 63573 - DNA, 20 bp, Artificial Sequence
  Synthetic oligonucleotide; ATGAGT chr11 5197495 5197514 5197498 -
tcatctgaagacttcatact

SEQ ID NO: 63574 - DNA, 20 bp, Artificial Sequence
  Synthetic oligonucleotide; TAGAAT chr11 5197463 5197482 5197466 -
gcttcagattaggcaaccta

SEQ ID NO: 63575 - DNA, 20 bp, Artificial Sequence
  Synthetic oligonucleotide; AAGAGT chr11 5197400 5197419 5197403 -
acagttaataaaaaatacct

SEQ ID NO: 63576 - DNA, 20 bp, Artificial Sequence
  Synthetic oligonucleotide; CAGAAT chr11 5197324 5197343 5197327 -
ataagatttatgaagaactt

SEQ ID NO: 63577 - DNA, 20 bp, Artificial Sequence
  Synthetic oligonucleotide; ATGAAT chr11 5196957 5196976 5196960 -
tctaaggaaacttgttttcc

SEQ ID NO: 63578 - DNA, 20 bp, Artificial Sequence
  Synthetic oligonucleotide; CAGGAT chr11 5196553 5196572 5196556 -
agaagtgagaggacatgatt

SEQ ID NO: 63579 - DNA, 20 bp, Artificial Sequence
  Synthetic oligonucleotide; CAGGAT chr11 5196410 5196429 5196413 -
ggtgcaggagggcatggttt

SEQ ID NO: 63580 - DNA, 20 bp, Artificial Sequence
  Synthetic oligonucleotide; GAGAAT chr11 5196327 5196346 5196330 -
gatcccttgcatgcctctat

SEQ ID NO: 63581 - DNA, 20 bp, Artificial Sequence
  Synthetic oligonucleotide; TAGGAT chr11 5196102 5196121 5196105 -
gaggttgtgtctccattccc

SEQ ID NO: 63582 - DNA, 20 bp, Artificial Sequence
  Synthetic oligonucleotide; TAGAGT chr11 5196064 5196083 5196067 -
tacttgcagaagataattgc

SEQ ID NO: 63583 - DNA, 20 bp, Artificial Sequence
  Synthetic oligonucleotide; GTGAAT chr11 5196057 5196076 5196060 -
agaagataattgctagagta

SEQ ID NO: 63584 - DNA, 20 bp, Artificial Sequence
  Synthetic oligonucleotide; AGGAGT chr11 5195949 5195968 5195952 -
gccaagaacacccctgcagt

SEQ ID NO: 63585 - DNA, 20 bp, Artificial Sequence
  Synthetic oligonucleotide; AGGAAT chr11 5195836 5195855 5195839 -
tcaggttgcagccagaactg

SEQ ID NO: 63586 - DNA, 20 bp, Artificial Sequence
  Synthetic oligonucleotide; CTGAGT chr11 5195782 5195801 5195785 -
gtaatgttctctttcttggt

SEQ ID NO: 63587 - DNA, 20 bp, Artificial Sequence
  Synthetic oligonucleotide; CTGAAT chr11 5195705 5195724 5195708 -
tatttatgtatttttctgta

SEQ ID NO: 63588 - DNA, 20 bp, Artificial Sequence
  Synthetic oligonucleotide; ATGAGT chr11 5195676 5195695 5195679 -
aaaatataaatttaagaaat

SEQ ID NO: 63589 - DNA, 20 bp, Artificial Sequence
  Synthetic oligonucleotide; CTGAAT chr11 5195638 5195657 5195641 -
ttacatataaacctggcaga

SEQ ID NO: 63590 - DNA, 20 bp, Artificial Sequence
  Synthetic oligonucleotide; CAGGAT chr11 5195495 5195514 5195498 -
tgattttttaaaaaacagaa

SEQ ID NO: 63591 - DNA, 20 bp, Artificial Sequence
  Synthetic oligonucleotide; AAGGAT chr11 5195463 5195482 5195466 -
aaatctatatgtctacagaa

SEQ ID NO: 63592 - DNA, 20 bp, Artificial Sequence
  Synthetic oligonucleotide; AGGGGT chr11 5195383 5195402 5195386 -
ttacttataaagcattcgtg

SEQ ID NO: 63593 - DNA, 20 bp, Artificial Sequence
  Synthetic oligonucleotide; GTGAAT chr11 5195355 5195374 5195358 -
ggctaaaaatggtagaaaag

SEQ ID NO: 63594 - DNA, 20 bp, Artificial Sequence
  Synthetic oligonucleotide; AAGGAT chr11 5195230 5195249 5195233 -
acactgggaaattcagtgca

SEQ ID NO: 63595 - DNA, 20 bp, Artificial Sequence
  Synthetic oligonucleotide; AAGAAT chr11 5195181 5195200 5195184 -
gaaacagagagattatgcaa

SEQ ID NO: 63596 - DNA, 20 bp, Artificial Sequence
  Synthetic oligonucleotide; TTGAAT chr11 5195170 5195189 5195173 -
attatgcaaaagaatacata

SEQ ID NO: 63597 - DNA, 20 bp, Artificial Sequence
  Synthetic oligonucleotide; TTGAGT chr11 5195120 5195139 5195123 -
ggactaatagatattggcat

SEQ ID NO: 63598 - DNA, 20 bp, Artificial Sequence
  Synthetic oligonucleotide; CTGGAT chr11 5195105 5195124 5195108 -
ggcatttgagtattcgctta

SEQ ID NO: 63599 - DNA, 20 bp, Artificial Sequence
  Synthetic oligonucleotide; TAGGGT chr11 5194971 5194990 5194974 -
tattattatactttaagttt

SEQ ID NO: 63600 - DNA, 20 bp, Artificial Sequence
  Synthetic oligonucleotide; CAGAGT chr11 5194826 5194845 5194829 -
ccccaccccacaacagtccc

SEQ ID NO: 63601 - DNA, 20 bp, Artificial Sequence
  Synthetic oligonucleotide; ATGAGT chr11 5194769 5194788 5194772 -
tcattgttcaattcccacct

SEQ ID NO: 63602 - DNA, 20 bp, Artificial Sequence
  Synthetic oligonucleotide; GAGAAT chr11 5194719 5194738 5194722 -
cgtccttgcgatagtttact

SEQ ID NO: 63603 - DNA, 20 bp, Artificial Sequence
  Synthetic oligonucleotide; TTGGGT chr11 5194589 5194608 5194592 -
agtctatcattgttggacat

SEQ ID NO: 63604 - DNA, 20 bp, Artificial Sequence
  Synthetic oligonucleotide; GTGAAT chr11 5194562 5194581 5194565 -
ggttccaagtctttgctatt

SEQ ID NO: 63605 - DNA, 20 bp, Artificial Sequence
  Synthetic oligonucleotide; AAGAAT chr11 5194477 5194496 5194480 -
atatttcatggtgaggaaca

SEQ ID NO: 63606 - DNA, 20 bp, Artificial Sequence
  Synthetic oligonucleotide; GGGGAT chr11 5194466 5194485 5194469 -
tgaggaacaaagaatatggt

SEQ ID NO: 63607 - DNA, 20 bp, Artificial Sequence
  Synthetic oligonucleotide; AAGGAT chr11 5194278 5194297 5194281 -
agaacttttgtgtctagcta

SEQ ID NO: 63608 - DNA, 20 bp, Artificial Sequence
  Synthetic oligonucleotide; CAGGAT chr11 5194140 5194159 5194143 -
ctgtaaaatggaccaatcag

SEQ ID NO: 63609 - DNA, 20 bp, Artificial Sequence
  Synthetic oligonucleotide; GTGGGT chr11 5194134 5194153 5194137 -
aatggaccaatcagcaggat

SEQ ID NO: 63610 - DNA, 20 bp, Artificial Sequence
  Synthetic oligonucleotide; TGGGGT chr11 5194129 5194148 5194132 -
accaatcagcaggatgtggg

SEQ ID NO: 63611 - DNA, 20 bp, Artificial Sequence
  Synthetic oligonucleotide; TTGGGT chr11 5194074 5194093 5194077 -
agccagctgtgacaactgac

SEQ ID NO: 63612 - DNA, 20 bp, Artificial Sequence
  Synthetic oligonucleotide; TTGGAT chr11 5194002 5194021 5194005 -
atcttactgctgctcactct

SEQ ID NO: 63613 - DNA, 20 bp, Artificial Sequence
  Synthetic oligonucleotide; GGGGAT chr11 5193911 5193930 5193914 -
aagaccacgaacccagcatg

SEQ ID NO: 63614 - DNA, 20 bp, Artificial Sequence
  Synthetic oligonucleotide; AGGAAT chr11 5193888 5193907 5193891 -
gatgaacaacccaagacagg

SEQ ID NO: 63615 - DNA, 20 bp, Artificial Sequence
  Synthetic oligonucleotide; GGGGGT chr11 5193836 5193855 5193839 -
agagctgtaacactccccgt

SEQ ID NO: 63616 - DNA, 20 bp, Artificial Sequence
  Synthetic oligonucleotide; AAGAAT chr11 5193716 5193735 5193719 -
cctttgaacacaccatcttt

SEQ ID NO: 63617 - DNA, 20 bp, Artificial Sequence
  Synthetic oligonucleotide; GAGGGT chr11 5193695 5193714 5193698 -
agaattgtaacactcaccac

SEQ ID NO: 63618 - DNA, 20 bp, Artificial Sequence
  Synthetic oligonucleotide; AAGGAT chr11 5193633 5193652 5193636 -
cccaccaattccggacacag

SEQ ID NO: 63619 - DNA, 20 bp, Artificial Sequence
  Synthetic oligonucleotide; AGGAAT chr11 5193613 5193632 5193616 -
aaggatggacaaagattatc

SEQ ID NO: 63620 - DNA, 20 bp, Artificial Sequence
  Synthetic oligonucleotide; TAGAAT chr11 5193573 5193592 5193576 -
caacacaaaaattacatacc

SEQ ID NO: 63621 - DNA, 20 bp, Artificial Sequence
  Synthetic oligonucleotide; CAGAAT chr11 5193436 5193455 5193439 -
ttagatccttgatatttgaa

SEQ ID NO: 63622 - DNA, 20 bp, Artificial Sequence
  Synthetic oligonucleotide; AAGAGT chr11 5193336 5193355 5193339 -
gggggacaggaagtagattt

SEQ ID NO: 63623 - DNA, 20 bp, Artificial Sequence
  Synthetic oligonucleotide; AGGAAT chr11 5193313 5193332 5193316 -
agtgcagaaaaaaaggacaa

SEQ ID NO: 63624 - DNA, 20 bp, Artificial Sequence
  Synthetic oligonucleotide; TAGGGT chr11 5193281 5193300 5193284 -
ggggggcatggaggaaaaaa

SEQ ID NO: 63625 - DNA, 20 bp, Artificial Sequence
  Synthetic oligonucleotide; TGGAGT chr11 5193249 5193268 5193252 -
aggaactccaaaatcttaac

SEQ ID NO: 63626 - DNA, 20 bp, Artificial Sequence
  Synthetic oligonucleotide; GAGAGT chr11 5193237 5193256 5193240 -
atcttaactggagttcagga

SEQ ID NO: 63627 - DNA, 20 bp, Artificial Sequence
  Synthetic oligonucleotide; GAGAGT chr11 5193150 5193169 5193153 -
agaacacagcagttgaaatt

SEQ ID NO: 63628 - DNA, 20 bp, Artificial Sequence
  Synthetic oligonucleotide; GAGAAT chr11 5193089 5193108 5193092 -
aaaaattcatggtaagttaa

SEQ ID NO: 63629 - DNA, 20 bp, Artificial Sequence
  Synthetic oligonucleotide; AGGGAT chr11 5192741 5192760 5192744 -
aactctcacttattgcttgt

SEQ ID NO: 63630 - DNA, 20 bp, Artificial Sequence
  Synthetic oligonucleotide; ATGAGT chr11 5192637 5192656 5192640 -
actcctatgtatttacccaa

SEQ ID NO: 63631 - DNA, 20 bp, Artificial Sequence
  Synthetic oligonucleotide; ATGAAT chr11 5192544 5192563 5192547 -
aaaagttgaaagtaaccaag

SEQ ID NO: 63632 - DNA, 20 bp, Artificial Sequence
  Synthetic oligonucleotide; ATGGAT chr11 5192540 5192559 5192543 -
gttgaaagtaaccaagatga

SEQ ID NO: 63633 - DNA, 20 bp, Artificial Sequence
  Synthetic oligonucleotide; TAGGAT chr11 5192517 5192536 5192520 -
gataaactgtggaacatcca

SEQ ID NO: 63634 - DNA, 20 bp, Artificial Sequence
  Synthetic oligonucleotide; TAGAAT chr11 5192512 5192531 5192515 -
actgtggaacatccatagga

SEQ ID NO: 63635 - DNA, 20 bp, Artificial Sequence
  Synthetic oligonucleotide; GTGAAT chr11 5192275 5192294 5192278 -
tattcaataatagacaaata

SEQ ID NO: 63636 - DNA, 20 bp, Artificial Sequence
  Synthetic oligonucleotide; TAGAAT chr11 5192225 5192244 5192228 -
agtttcagacagctattgca

SEQ ID NO: 63637 - DNA, 20 bp, Artificial Sequence
  Synthetic oligonucleotide; ATGAGT chr11 5192094 5192113 5192097 -
ggtttcatgtcactttggac

SEQ ID NO: 63638 - DNA, 20 bp, Artificial Sequence
  Synthetic oligonucleotide; AGGAGT chr11 5192084 5192103 5192087 -
cactttggacatgagtaaag

SEQ ID NO: 63639 - DNA, 20 bp, Artificial Sequence
  Synthetic oligonucleotide; TTGAGT chr11 5192048 5192067 5192051 -
actcccaaatcttgatcaca

SEQ ID NO: 63640 - DNA, 20 bp, Artificial Sequence
  Synthetic oligonucleotide; TTGGAT chr11 5191986 5192005 5191989 -
gcattaaatatcatttatta

SEQ ID NO: 63641 - DNA, 20 bp, Artificial Sequence
  Synthetic oligonucleotide; CTGGGT chr11 5191924 5191943 5191927 -
ctgtaaaaaaatacctgaga

SEQ ID NO: 63642 - DNA, 20 bp, Artificial Sequence
  Synthetic oligonucleotide; CAGGGT chr11 5191757 5191776 5191760 -
atggccaggacagggagaag

SEQ ID NO: 63643 - DNA, 20 bp, Artificial Sequence
  Synthetic oligonucleotide; GGGGAT chr11 5191691 5191710 5191694 -
actcactatacagtaccaag

SEQ ID NO: 63644 - DNA, 20 bp, Artificial Sequence
  Synthetic oligonucleotide; TTGAAT chr11 5191649 5191668 5191652 -
tgagaactctgccaccatga

SEQ ID NO: 63645 - DNA, 20 bp, Artificial Sequence
  Synthetic oligonucleotide; TTGGGT chr11 5191589 5191608 5191592 -
attataatttaacatgatat

SEQ ID NO: 63646 - DNA, 20 bp, Artificial Sequence
  Synthetic oligonucleotide; TTGGGT chr11 5191340 5191359 5191343 -
acataatggaggtactggca

SEQ ID NO: 63647 - DNA, 20 bp, Artificial Sequence
  Synthetic oligonucleotide; ACGAGT chr11 5191276 5191295 5191279 -
aaaggggctaaagatcccac

SEQ ID NO: 63648 - DNA, 20 bp, Artificial Sequence
  Synthetic oligonucleotide; TTGAAT chr11 5191203 5191222 5191206 -
tttcccacccaaatttcttc

SEQ ID NO: 63649 - DNA, 20 bp, Artificial Sequence
  Synthetic oligonucleotide; TGGGAT chr11 5191156 5191175 5191159 -
ctgtcatggaaggaacacac

SEQ ID NO: 63650 - DNA, 20 bp, Artificial Sequence
  Synthetic oligonucleotide; TTGAAT chr11 5191146 5191165 5191149 -
aggaacacactgggatgtaa

SEQ ID NO: 63651 - DNA, 20 bp, Artificial Sequence
  Synthetic oligonucleotide; GGGGGT chr11 5191137 5191156 5191140 -
ctgggatgtaattgaatcat

SEQ ID NO: 63652 - DNA, 20 bp, Artificial Sequence
  Synthetic oligonucleotide; GTGAGT chr11 5191103 5191122 5191106 -
cacatgctgttctcatgata

SEQ ID NO: 63653 - DNA, 20 bp, Artificial Sequence
  Synthetic oligonucleotide; GTGGAT chr11 5190967 5190986 5190970 -
tgtaaggcctccccagcaat

SEQ ID NO: 63654 - DNA, 20 bp, Artificial Sequence
  Synthetic oligonucleotide; ATGAGT chr11 5190959 5190978 5190962 -
ctccccagcaatgtggatct

SEQ ID NO: 63655 - DNA, 20 bp, Artificial Sequence
  Synthetic oligonucleotide; TCGGGT chr11 5190917 5190936 5190920 -
tctttataaattacccagtc

SEQ ID NO: 63656 - DNA, 20 bp, Artificial Sequence
  Synthetic oligonucleotide; TTGAGT chr11 5190728 5190747 5190731 -
gctgctcttaagagattgta

SEQ ID NO: 63657 - DNA, 20 bp, Artificial Sequence
  Synthetic oligonucleotide; GTGGAT chr11 5190685 5190704 5190688 -
gtgcacggtgcaaactgtca

SEQ ID NO: 63658 - DNA, 20 bp, Artificial Sequence
  Synthetic oligonucleotide; TGGGGT chr11 5190670 5190689 5190673 -
tgtcagtggatctaccattc

SEQ ID NO: 63659 - DNA, 20 bp, Artificial Sequence
  Synthetic oligonucleotide; GGGGGT chr11 5190601 5190620 5190604 -
ccccagtggagactctgtga

SEQ ID NO: 63660 - DNA, 20 bp, Artificial Sequence
  Synthetic oligonucleotide; GAGGGT chr11 5190547 5190566 5190550 -
ccctattagaggttcttcat

SEQ ID NO: 63661 - DNA, 20 bp, Artificial Sequence
  Synthetic oligonucleotide; CAGGAT chr11 5190325 5190344 5190328 -
acagctggtgctggagcagc

SEQ ID NO: 63662 - DNA, 20 bp, Artificial Sequence
  Synthetic oligonucleotide; CAGGGT chr11 5190285 5190304 5190288 -
cctgaagctgctcaaggcag

SEQ ID NO: 63663 - DNA, 20 bp, Artificial Sequence
  Synthetic oligonucleotide; CTGAAT chr11 5190278 5190297 5190281 -
ctgctcaaggcagcagggtc

SEQ ID NO: 63664 - DNA, 20 bp, Artificial Sequence
  Synthetic oligonucleotide; AAGGGT chr11 5190210 5190229 5190213 -
gtgatgtgaggggctgctac

SEQ ID NO: 63665 - DNA, 20 bp, Artificial Sequence
  Synthetic oligonucleotide; TTGAAT chr11 5190117 5190136 5190120 -
tgcaaatttctacagcctgc

SEQ ID NO: 63666 - DNA, 20 bp, Artificial Sequence
  Synthetic oligonucleotide; TCGAAT chr11 5189893 5189912 5189896 -
cttaaataatattatcaact

SEQ ID NO: 63667 - DNA, 20 bp, Artificial Sequence
  Synthetic oligonucleotide; CAGAAT chr11 5189744 5189763 5189747 -
ttcattgtccatatcactat

SEQ ID NO: 63668 - DNA, 20 bp, Artificial Sequence
  Synthetic oligonucleotide; CTGGGT chr11 5189522 5189541 5189525 -
ctataaggaaatacctgaga

SEQ ID NO: 63669 - DNA, 20 bp, Artificial Sequence
  Synthetic oligonucleotide; GGGGAT chr11 5189217 5189236 5189220 -
caggccccatcttcaacact

SEQ ID NO: 63670 - DNA, 20 bp, Artificial Sequence
  Synthetic oligonucleotide; TAGGGT chr11 5189193 5189212 5189196 -
attacagctgaacatgagat

SEQ ID NO: 63671 - DNA, 20 bp, Artificial Sequence
  Synthetic oligonucleotide; ATGAAT chr11 5189087 5189106 5189090 -
caaaacacaacaacaaaacg

SEQ ID NO: 63672 - DNA, 20 bp, Artificial Sequence
  Synthetic oligonucleotide; AAGAGT chr11 5188829 5188848 5188832 -
cacaaactccacctggaaag

SEQ ID NO: 63673 - DNA, 20 bp, Artificial Sequence
  Synthetic oligonucleotide; AGGGAT chr11 5188721 5188740 5188724 -
ccactgagaaactctacagc

SEQ ID NO: 63674 - DNA, 20 bp, Artificial Sequence
  Synthetic oligonucleotide; TTGGAT chr11 5188588 5188607 5188591 -
aatgttttaagaaagttgtg

SEQ ID NO: 63675 - DNA, 20 bp, Artificial Sequence
  Synthetic oligonucleotide; TGGGAT chr11 5188565 5188584 5188568 -
gatagcattcaaagccatct

SEQ ID NO: 63676 - DNA, 20 bp, Artificial Sequence
  Synthetic oligonucleotide; AAGGAT chr11 5188368 5188387 5188371 -
ccaaattacttgttcgaaga

SEQ ID NO: 63677 - DNA, 20 bp, Artificial Sequence
  Synthetic oligonucleotide; TGGAAT chr11 5188358 5188377 5188361 -
tgttcgaagaaaggatcatc

SEQ ID NO: 63678 - DNA, 20 bp, Artificial Sequence
  Synthetic oligonucleotide; TTGGAT chr11 5188345 5188364 5188348 -
gatcatctggaattcttttc

SEQ ID NO: 63679 - DNA, 20 bp, Artificial Sequence
  Synthetic oligonucleotide; CAGAGT chr11 5188192 5188211 5188195 -
aagtatcttacatattgaag

SEQ ID NO: 63680 - DNA, 20 bp, Artificial Sequence
  Synthetic oligonucleotide; CTGAGT chr11 5188047 5188066 5188050 -
aatccatagaaatttaaaaa

SEQ ID NO: 63681 - DNA, 20 bp, Artificial Sequence
  Synthetic oligonucleotide; GAGAAT chr11 5187985 5188004 5187988 -
tttctgacatgaacttatgt

SEQ ID NO: 63682 - DNA, 20 bp, Artificial Sequence
  Synthetic oligonucleotide; TAGAAT chr11 5187714 5187733 5187717 -
taactattatttcatctgca

SEQ ID NO: 63683 - DNA, 20 bp, Artificial Sequence
  Synthetic oligonucleotide; TTGGAT chr11 5187650 5187669 5187653 -
tgtatcacagcagccgtagt

SEQ ID NO: 63684 - DNA, 20 bp, Artificial Sequence
  Synthetic oligonucleotide; TAGAGT chr11 5187564 5187583 5187567 -
aaaaaaaattcttcaagttt

SEQ ID NO: 63685 - DNA, 20 bp, Artificial Sequence
  Synthetic oligonucleotide; CAGAGT chr11 5187524 5187543 5187527 -
acattataataagttatcag

SEQ ID NO: 63686 - DNA, 20 bp, Artificial Sequence
  Synthetic oligonucleotide; TTGGAT chr11 5187511 5187530 5187514 -
ttatcagcagagtatacctc

SEQ ID NO: 63687 - DNA, 20 bp, Artificial Sequence
  Synthetic oligonucleotide; AAGGAT chr11 5187372 5187391 5187375 -
attcctttaatttcttttcc

SEQ ID NO: 63688 - DNA, 20 bp, Artificial Sequence
  Synthetic oligonucleotide; TTGAAT chr11 5187277 5187296 5187280 -
tcactatggtttcaagacct

SEQ ID NO: 63689 - DNA, 20 bp, Artificial Sequence
  Synthetic oligonucleotide; CAGGGT chr11 5187106 5187125 5187109 -
tccaatcaagatcatccagt

SEQ ID NO: 63690 - DNA, 20 bp, Artificial Sequence
  Synthetic oligonucleotide; AGGGAT chr11 5187015 5187034 5187018 -
tataggtgaaaaaagcttct

SEQ ID NO: 63691 - DNA, 20 bp, Artificial Sequence
  Synthetic oligonucleotide; GAGAAT chr11 5186960 5186979 5186963 -
atatggaaggctccacttga

SEQ ID NO: 63692 - DNA, 20 bp, Artificial Sequence
  Synthetic oligonucleotide; ATGAAT chr11 5186896 5186915 5186899 -
tgaagccagtttttaattcc

SEQ ID NO: 63693 - DNA, 20 bp, Artificial Sequence
  Synthetic oligonucleotide; GAGAAT chr11 5186828 5186847 5186831 -
ctcattaaagtatccttcaa

SEQ ID NO: 63694 - DNA, 20 bp, Artificial Sequence
  Synthetic oligonucleotide; TGGGAT chr11 5186823 5186842 5186826 -
taaagtatccttcaagagaa

SEQ ID NO: 63695 - DNA, 20 bp, Artificial Sequence
  Synthetic oligonucleotide; GAGAAT chr11 5186702 5186721 5186705 -
attaaagggaaataaaatga

SEQ ID NO: 63696 - DNA, 20 bp, Artificial Sequence
  Synthetic oligonucleotide; GAGAGT chr11 5186549 5186568 5186552 -
atgtattaacttaggtgtca

SEQ ID NO: 63697 - DNA, 20 bp, Artificial Sequence
  Synthetic oligonucleotide; GAGAAT chr11 5186505 5186524 5186508 -
atgcacaaattataatgaaa

SEQ ID NO: 63698 - DNA, 20 bp, Artificial Sequence
  Synthetic oligonucleotide; AGGAGT chr11 5186436 5186455 5186439 -
gtgtcatctccttccatggg

SEQ ID NO: 63699 - DNA, 20 bp, Artificial Sequence
  Synthetic oligonucleotide; CAGGAT chr11 5186306 5186325 5186309 -
ctcaacctgctaaatatctt

SEQ ID NO: 63700 - DNA, 20 bp, Artificial Sequence
  Synthetic oligonucleotide; CTGAGT chr11 5186277 5186296 5186280 -
agaaaatgcaagtaagtaaa

SEQ ID NO: 63701 - DNA, 20 bp, Artificial Sequence
  Synthetic oligonucleotide; TGGAAT chr11 5186153 5186172 5186156 -
tttccttgatttttgaccca

SEQ ID NO: 63702 - DNA, 20 bp, Artificial Sequence
  Synthetic oligonucleotide; TGGAGT chr11 5186129 5186148 5186132 -
atactagacttggctttagc

SEQ ID NO: 63703 - DNA, 20 bp, Artificial Sequence
  Synthetic oligonucleotide; AAGAAT chr11 5186068 5186087 5186071 -
ttaagtaagtcattttcaaa

SEQ ID NO: 63704 - DNA, 20 bp, Artificial Sequence
  Synthetic oligonucleotide; TAGAAT chr11 5186047 5186066 5186050 -
agaatattttagttttctct

SEQ ID NO: 63705 - DNA, 20 bp, Artificial Sequence
  Synthetic oligonucleotide; TTGAAT chr11 5186004 5186023 5186007 -
attttctttgatatgcagat

SEQ ID NO: 63706 - DNA, 20 bp, Artificial Sequence
  Synthetic oligonucleotide; ATGAAT chr11 5185982 5186001 5185985 -
gaatgttgtacaaagattca

SEQ ID NO: 63707 - DNA, 20 bp, Artificial Sequence
  Synthetic oligonucleotide; CAGGGT chr11 5185699 5185718 5185702 -
ataaaagtaaatgacagata

SEQ ID NO: 63708 - DNA, 20 bp, Artificial Sequence
  Synthetic oligonucleotide; ATGGAT chr11 5185623 5185642 5185626 -
aaaatttattcctagtattt

SEQ ID NO: 63709 - DNA, 20 bp, Artificial Sequence
  Synthetic oligonucleotide; ATGGAT chr11 5185590 5185609 5185593 -
atcaattcaatctcagtttg

SEQ ID NO: 63710 - DNA, 20 bp, Artificial Sequence
  Synthetic oligonucleotide; TGGGAT chr11 5185486 5185505 5185489 -
gtcctgatgtcatctattgt

SEQ ID NO: 63711 - DNA, 20 bp, Artificial Sequence
  Synthetic oligonucleotide; CAGGGT chr11 5185349 5185368 5185352 -
tttaaattaaatgacgtgtc

SEQ ID NO: 63712 - DNA, 20 bp, Artificial Sequence
  Synthetic oligonucleotide; TAGAGT chr11 5185341 5185360 5185344 -
aaatgacgtgtccagggtca

SEQ ID NO: 63713 - DNA, 20 bp, Artificial Sequence
  Synthetic oligonucleotide; CAGAAT chr11 5185335 5185354 5185338 -
cgtgtccagggtcatagagt

SEQ ID NO: 63714 - DNA, 20 bp, Artificial Sequence
  Synthetic oligonucleotide; GTGGAT chr11 5185248 5185267 5185251 -
caccacactatctttgctcc

SEQ ID NO: 63715 - DNA, 20 bp, Artificial Sequence
  Synthetic oligonucleotide; CAGAAT chr11 5185226 5185245 5185229 -
ggatacattcatgattcagt

SEQ ID NO: 63716 - DNA, 20 bp, Artificial Sequence
  Synthetic oligonucleotide; TAGAAT chr11 5185202 5185221 5185205 -
atatgctgtcagaaatatcc

SEQ ID NO: 63717 - DNA, 20 bp, Artificial Sequence
  Synthetic oligonucleotide; TTGGGT chr11 5185168 5185187 5185171 -
aaggaacccaggcctataat

SEQ ID NO: 63718 - DNA, 20 bp, Artificial Sequence
  Synthetic oligonucleotide; AGGAAT chr11 5184902 5184921 5184905 -
ctctggcctagaactgtgtc

SEQ ID NO: 63719 - DNA, 20 bp, Artificial Sequence
  Synthetic oligonucleotide; CAGAGT chr11 5184778 5184797 5184781 -
atgtaaataaagtagatcca

SEQ ID NO: 63720 - DNA, 20 bp, Artificial Sequence
  Synthetic oligonucleotide; AAGGGT chr11 5184715 5184734 5184718 -
acctcattccaacttaaagc

SEQ ID NO: 63721 - DNA, 20 bp, Artificial Sequence
  Synthetic oligonucleotide; GTGGGT chr11 5184694 5184713 5184697 -
agggtaaattgctcagctgt

SEQ ID NO: 63722 - DNA, 20 bp, Artificial Sequence
  Synthetic oligonucleotide; CAGAAT chr11 5184621 5184640 5184624 -
catcatataaaatttgagac

SEQ ID NO: 63723 - DNA, 20 bp, Artificial Sequence
  Synthetic oligonucleotide; TGGAAT chr11 5184542 5184561 5184545 -
atcagtatattgaactgtaa

SEQ ID NO: 63724 - DNA, 20 bp, Artificial Sequence
  Synthetic oligonucleotide; GAGAGT chr11 5184445 5184464 5184448 -
tacttgagaaagggaactta

SEQ ID NO: 63725 - DNA, 20 bp, Artificial Sequence
  Synthetic oligonucleotide; GAGGGT chr11 5184006 5184025 5184009 -
tctccctggtttagtcttgg

SEQ ID NO: 63726 - DNA, 20 bp, Artificial Sequence
  Synthetic oligonucleotide; AGGAAT chr11 5183990 5184009 5183993 -
ttgggagggtgtatgtgtcg

SEQ ID NO: 63727 - DNA, 20 bp, Artificial Sequence
  Synthetic oligonucleotide; TGGGAT chr11 5183905 5183924 5183908 -
gatggtagtttgtatgtctg

SEQ ID NO: 63728 - DNA, 20 bp, Artificial Sequence
  Synthetic oligonucleotide; TTGAGT chr11 5183859 5183878 5183862 -
tcatttcttattgcatctat

SEQ ID NO: 63729 - DNA, 20 bp, Artificial Sequence
  Synthetic oligonucleotide; CTGGAT chr11 5183780 5183799 5183783 -
tcttttcaaaaaaccagctc

SEQ ID NO: 63730 - DNA, 20 bp, Artificial Sequence
  Synthetic oligonucleotide; AAGGGT chr11 5183760 5183779 5183763 -
ctggattcattgattttttt

SEQ ID NO: 63731 - DNA, 20 bp, Artificial Sequence
  Synthetic oligonucleotide; TAGGGT chr11 5183643 5183662 5183646 -
agttcttttaattgtgatgt

SEQ ID NO: 63732 - DNA, 20 bp, Artificial Sequence
  Synthetic oligonucleotide; TTGAGT chr11 5183434 5183453 5183437 -
gctgttcagtttccatgtag

SEQ ID NO: 63733 - DNA, 20 bp, Artificial Sequence
  Synthetic oligonucleotide; TTGAGT chr11 5183424 5183443 5183427 -
ttccatgtagttgagtggtt

SEQ ID NO: 63734 - DNA, 20 bp, Artificial Sequence
  Synthetic oligonucleotide; GTGAGT chr11 5183420 5183439 5183423 -
atgtagttgagtggttttga

SEQ ID NO: 63735 - DNA, 20 bp, Artificial Sequence
  Synthetic oligonucleotide; CTGAGT chr11 5183405 5183424 5183408 -
tttgagtgagtttcttaatc

SEQ ID NO: 63736 - DNA, 20 bp, Artificial Sequence
  Synthetic oligonucleotide; AGGAGT chr11 5183333 5183352 5183336 -
ctgttcttttacgtttgctg

SEQ ID NO: 63737 - DNA, 20 bp, Artificial Sequence
  Synthetic oligonucleotide; TGGAAT chr11 5183301 5183320 5183304 -
cttccaactatgtggtcaac

SEQ ID NO: 63738 - DNA, 20 bp, Artificial Sequence
  Synthetic oligonucleotide; AAGAAT chr11 5183275 5183294 5183278 -
aggtgtggtgtggtgctgag

SEQ ID NO: 63739 - DNA, 20 bp, Artificial Sequence
  Synthetic oligonucleotide; TGGGAT chr11 5183253 5183272 5183256 -
gaatgtatattctattgatt

SEQ ID NO: 63740 - DNA, 20 bp, Artificial Sequence
  Synthetic oligonucleotide; GAGAGT chr11 5183246 5183265 5183249 -
tattctattgatttgggatg

SEQ ID NO: 63741 - DNA, 20 bp, Artificial Sequence
  Synthetic oligonucleotide; CTGAAT chr11 5183205 5183224 5183208 -
taggtctgcttggtgcagag

SEQ ID NO: 63742 - DNA, 20 bp, Artificial Sequence
  Synthetic oligonucleotide; CTGGAT chr11 5183192 5183211 5183195 -
tgcagagctgaattcaattc

SEQ ID NO: 63743 - DNA, 20 bp, Artificial Sequence
  Synthetic oligonucleotide; TGGGGT chr11 5183141 5183160 5183144 -
gatctgtctaatgttgacag

SEQ ID NO: 63744 - DNA, 20 bp, Artificial Sequence
  Synthetic oligonucleotide; GGGAGT chr11 5183109 5183128 5183112 -
gtctcccattattattgtgt

SEQ ID NO: 63745 - DNA, 20 bp, Artificial Sequence
  Synthetic oligonucleotide; ATGAAT chr11 5183068 5183087 5183071 -
ggtctctaaggacttgcttt

SEQ ID NO: 63746 - DNA, 20 bp, Artificial Sequence
  Synthetic oligonucleotide; CTGGGT chr11 5183062 5183081 5183065 -
taaggacttgctttatgaat

SEQ ID NO: 63747 - DNA, 20 bp, Artificial Sequence
  Synthetic oligonucleotide; TTGGGT chr11 5183047 5183066 5183050 -
tgaatctgggtgctgctgta

SEQ ID NO: 63748 - DNA, 20 bp, Artificial Sequence
  Synthetic oligonucleotide; TAGGAT chr11 5183030 5183049 5183033 -
gtattgggtgcatatatatt

SEQ ID NO: 63749 - DNA, 20 bp, Artificial Sequence
  Synthetic oligonucleotide; TTGAAT chr11 5183009 5183028 5183012 -
aggatagttagctcttcttg

SEQ ID NO: 63750 - DNA, 20 bp, Artificial Sequence
  Synthetic oligonucleotide; CTGAAT chr11 5182819 5182838 5182822 -
ctccacatgagattggtttc

SEQ ID NO: 63751 - DNA, 20 bp, Artificial Sequence
  Synthetic oligonucleotide; GAGAAT chr11 5182712 5182731 5182715 -
taaggttaatattgttatgt

SEQ ID NO: 63752 - DNA, 20 bp, Artificial Sequence
  Synthetic oligonucleotide; ATGGAT chr11 5182448 5182467 5182451 -
caaaaaaagtccaggaccag

SEQ ID NO: 63753 - DNA, 20 bp, Artificial Sequence
  Synthetic oligonucleotide; CCGAAT chr11 5182436 5182455 5182439 -
aggaccagatggattcacag

SEQ ID NO: 63754 - DNA, 20 bp, Artificial Sequence
  Synthetic oligonucleotide; GGGAAT chr11 5182363 5182382 5182366 -
ttccaatcaatagaaaaaga

SEQ ID NO: 63755 - DNA, 20 bp, Artificial Sequence
  Synthetic oligonucleotide; GAGAAT chr11 5182287 5182306 5182290 -
gcagacacacaacaaaaaaa

SEQ ID NO: 63756 - DNA, 20 bp, Artificial Sequence
  Synthetic oligonucleotide; TGGGAT chr11 5182165 5182184 5182168 -
gatcaagtgggcttcatccc

SEQ ID NO: 63757 - DNA, 20 bp, Artificial Sequence
  Synthetic oligonucleotide; CTGAAT chr11 5181942 5181961 5181945 -
aacccacagccaatatcata

SEQ ID NO: 63758 - DNA, 20 bp, Artificial Sequence
  Synthetic oligonucleotide; AGGGAT chr11 5181893 5181912 5181896 -
tttgaaaactggcacaagac

SEQ ID NO: 63759 - DNA, 20 bp, Artificial Sequence
  Synthetic oligonucleotide; ATGAGT chr11 5181609 5181628 5181612 -
gacaaacagagagccaaatc

SEQ ID NO: 63760 - DNA, 20 bp, Artificial Sequence
  Synthetic oligonucleotide; GAGAAT chr11 5181577 5181596 5181580 -
ccattcacaattgcctcaaa

SEQ ID NO: 63761 - DNA, 20 bp, Artificial Sequence
  Synthetic oligonucleotide; AGGAAT chr11 5181562 5181581 5181565 -
tcaaagagaataaaatacct

SEQ ID NO: 63762 - DNA, 20 bp, Artificial Sequence
  Synthetic oligonucleotide; AGGGAT chr11 5181546 5181565 5181549 -
acctaggaatccaacttaca

SEQ ID NO: 63763 - DNA, 20 bp, Artificial Sequence
  Synthetic oligonucleotide; GAGGAT chr11 5181489 5181508 5181492 -
cactgctcaacgaaataaaa

SEQ ID NO: 63764 - DNA, 20 bp, Artificial Sequence
  Synthetic oligonucleotide; ATGGAT chr11 5181454 5181473 5181457 -
tggaagaacattccatgctc

SEQ ID NO: 63765 - DNA, 20 bp, Artificial Sequence
  Synthetic oligonucleotide; AAGAAT chr11 5181445 5181464 5181448 -
attccatgctcatggatagg

SEQ ID NO: 63766 - DNA, 20 bp, Artificial Sequence
  Synthetic oligonucleotide; CAGAAT chr11 5181356 5181375 5181359 -
gctaccaatgactttcttca

SEQ ID NO: 63767 - DNA, 20 bp, Artificial Sequence
  Synthetic oligonucleotide; AAGGAT chr11 5181088 5181107 5181091 -
acaaaaacaagcaatgggga

SEQ ID NO: 63768 - DNA, 20 bp, Artificial Sequence
  Synthetic oligonucleotide; CTGGAT chr11 5181025 5181044 5181028 -
ccatatgtagaaagctgaaa

SEQ ID NO: 63769 - DNA, 20 bp, Artificial Sequence
  Synthetic oligonucleotide; ATGGAT chr11 5180984 5181003 5180987 -
tatacaaaaattatttcaag

SEQ ID NO: 63770 - DNA, 20 bp, Artificial Sequence
  Synthetic oligonucleotide; TGGGAT chr11 5180839 5180858 5180842 -
caaaagacaaaatggacaaa

SEQ ID NO: 63771 - DNA, 20 bp, Artificial Sequence
  Synthetic oligonucleotide; CAGAGT chr11 5180789 5180808 5180792 -
acagcaaaagaaactaccat

SEQ ID NO: 63772 - DNA, 20 bp, Artificial Sequence
  Synthetic oligonucleotide; CAGAAT chr11 5180717 5180736 5180720 -
tctgacaaagggctaatatc

SEQ ID NO: 63773 - DNA, 20 bp, Artificial Sequence
  Synthetic oligonucleotide; GGGGGT chr11 5180657 5180676 5180660 -
acaaacaactgcatcaacaa

SEQ ID NO: 63774 - DNA, 20 bp, Artificial Sequence
  Synthetic oligonucleotide; AAGGAT chr11 5180650 5180669 5180653 -
actgcatcaacaagggggtg

SEQ ID NO: 63775 - DNA, 20 bp, Artificial Sequence
  Synthetic oligonucleotide; TAGAAT chr11 5180519 5180538 5180522 -
agatatcatctcacaccagt

SEQ ID NO: 63776 - DNA, 20 bp, Artificial Sequence
  Synthetic oligonucleotide; GAGGAT chr11 5180475 5180494 5180478 -
aggaaaccacaggtgctgga

SEQ ID NO: 63777 - DNA, 20 bp, Artificial Sequence
  Synthetic oligonucleotide; AGGGAT chr11 5180386 5180405 5180389 -
agtcagtgtggcaattcctc

SEQ ID NO: 63778 - DNA, 20 bp, Artificial Sequence
  Synthetic oligonucleotide; CTGGGT chr11 5180341 5180360 5180344 -
ttgacccagccatcctatta

SEQ ID NO: 63779 - DNA, 20 bp, Artificial Sequence
  Synthetic oligonucleotide; AGGAAT chr11 5180325 5180344 5180328 -
attactgggtatatacccaa

SEQ ID NO: 63780 - DNA, 20 bp, Artificial Sequence
  Synthetic oligonucleotide; CTGGAT chr11 5180216 5180235 5180219 -
aaatgtccaacaatgataga

SEQ ID NO: 63781 - DNA, 20 bp, Artificial Sequence
  Synthetic oligonucleotide; TGGAAT chr11 5180184 5180203 5180187 -
aatgtggcacatatacatca

SEQ ID NO: 63782 - DNA, 20 bp, Artificial Sequence
  Synthetic oligonucleotide; ATGAGT chr11 5180157 5180176 5180160 -
ctatgcagccataaaaaatg

SEQ ID NO: 63783 - DNA, 20 bp, Artificial Sequence
  Synthetic oligonucleotide; ATGGAT chr11 5180132 5180151 5180135 -
ttcatgtcctttgtagggac

SEQ ID NO: 63784 - DNA, 20 bp, Artificial Sequence
  Synthetic oligonucleotide; GGGAGT chr11 5180050 5180069 5180053 -
acatattctcactcataggt

SEQ ID NO: 63785 - DNA, 20 bp, Artificial Sequence
  Synthetic oligonucleotide; TGGGGT chr11 5179987 5180006 5179990 -
tcacacaccggggcctgttg

SEQ ID NO: 63786 - DNA, 20 bp, Artificial Sequence
  Synthetic oligonucleotide; AGGGAT chr11 5179968 5179987 5179971 -
gtggggtgggggccgggggg

SEQ ID NO: 63787 - DNA, 20 bp, Artificial Sequence
  Synthetic oligonucleotide; ACGAGT chr11 5179933 5179952 5179936 -
agatatacctaatgtaaatg

SEQ ID NO: 63788 - DNA, 20 bp, Artificial Sequence
  Synthetic oligonucleotide; ATGGGT chr11 5179925 5179944 5179928 -
ctaatgtaaatgacgagtta

SEQ ID NO: 63789 - DNA, 20 bp, Artificial Sequence
  Synthetic oligonucleotide; GGGAGT chr11 5179719 5179738 5179722 -
atatacttttttttttgaga

SEQ ID NO: 63790 - DNA, 20 bp, Artificial Sequence
  Synthetic oligonucleotide; TGGAGT chr11 5179694 5179713 5179697 -
tctcgctctgtcacctaggc

SEQ ID NO: 63791 - DNA, 20 bp, Artificial Sequence
  Synthetic oligonucleotide; TTGAGT chr11 5179618 5179637 5179621 -
gattctcctgcctcagcctc

SEQ ID NO: 63792 - DNA, 20 bp, Artificial Sequence
  Synthetic oligonucleotide; TGGGAT chr11 5179609 5179628 5179612 -
gcctcagcctcttgagtagc

SEQ ID NO: 63793 - DNA, 20 bp, Artificial Sequence
  Synthetic oligonucleotide; CGGGGT chr11 5179553 5179572 5179556 -
ttttgtatttttagtagaga

SEQ ID NO: 63794 - DNA, 20 bp, Artificial Sequence
  Synthetic oligonucleotide; TGGGAT chr11 5179476 5179495 5179479 -
gcctcagcctctcaaagtgc

SEQ ID NO: 63795 - DNA, 20 bp, Artificial Sequence
  Synthetic oligonucleotide; AGGGAT chr11 5179167 5179186 5179170 -
cataactctctattttcctt

SEQ ID NO: 63796 - DNA, 20 bp, Artificial Sequence
  Synthetic oligonucleotide; TTGGAT chr11 5179102 5179121 5179105 -
ttttaccttgataggcagca

SEQ ID NO: 63797 - DNA, 20 bp, Artificial Sequence
  Synthetic oligonucleotide; TAGGGT chr11 5179038 5179057 5179041 -
actttaaatccagtagggcc

SEQ ID NO: 63798 - DNA, 20 bp, Artificial Sequence
  Synthetic oligonucleotide; GTGGGT chr11 5179016 5179035 5179019 -
gggtaagaggctgaaagtct

SEQ ID NO: 63799 - DNA, 20 bp, Artificial Sequence
  Synthetic oligonucleotide; TGGAAT chr11 5178682 5178701 5178685 -
ttcactaatggcactaggcc

SEQ ID NO: 63800 - DNA, 20 bp, Artificial Sequence
  Synthetic oligonucleotide; CAGGAT chr11 5178632 5178651 5178635 -
ttcgcaatcacactaattcc

SEQ ID NO: 63801 - DNA, 20 bp, Artificial Sequence
  Synthetic oligonucleotide; GGGAAT chr11 5178609 5178628 5178612 -
gatgtgtggtatgtcctgat

SEQ ID NO: 63802 - DNA, 20 bp, Artificial Sequence
  Synthetic oligonucleotide; CTGGAT chr11 5178579 5178598 5178582 -
gggctggaaggcttgcatac

SEQ ID NO: 63803 - DNA, 20 bp, Artificial Sequence
  Synthetic oligonucleotide; CAGAAT chr11 5178325 5178344 5178328 -
catacatttcatctttgtgg

SEQ ID NO: 63804 - DNA, 20 bp, Artificial Sequence
  Synthetic oligonucleotide; CTGGAT chr11 5178038 5178057 5178041 -
tggccctactctctacagga

SEQ ID NO: 63805 - DNA, 20 bp, Artificial Sequence
  Synthetic oligonucleotide; TGGGGT chr11 5177784 5177803 5177787 -
atgctaaaccccatcattta

SEQ ID NO: 63806 - DNA, 20 bp, Artificial Sequence
  Synthetic oligonucleotide; TCGAGT chr11 5177757 5177776 5177760 -
aagaccaaacaaattaaaga

SEQ ID NO: 63807 - DNA, 20 bp, Artificial Sequence
  Synthetic oligonucleotide; GGGAAT chr11 5177695 5177714 5177698 -
agattaaaaagtctgtttta

SEQ ID NO: 63808 - DNA, 20 bp, Artificial Sequence
  Synthetic oligonucleotide; TAGAAT chr11 5177690 5177709 5177693 -
aaaaagtctgttttagggaa

SEQ ID NO: 63809 - DNA, 20 bp, Artificial Sequence
  Synthetic oligonucleotide; CGGAAT chr11 5177623 5177642 5177626 -
ggtgtctatcaaagtgtcca

SEQ ID NO: 63810 - DNA, 20 bp, Artificial Sequence
  Synthetic oligonucleotide; ATGAAT chr11 5177533 5177552 5177536 -
ttttcagaaatactattttc

SEQ ID NO: 63811 - DNA, 20 bp, Artificial Sequence
  Synthetic oligonucleotide; TAGGGT chr11 5177479 5177498 5177482 -
gagaaaagagaaatatattt

SEQ ID NO: 63812 - DNA, 20 bp, Artificial Sequence
  Synthetic oligonucleotide; TGGGGT chr11 5177435 5177454 5177438 -
tcctacgtagagctaggaag

SEQ ID NO: 63813 - DNA, 20 bp, Artificial Sequence
  Synthetic oligonucleotide; TTGAGT chr11 5177428 5177447 5177431 -
tagagctaggaagtggggtt

SEQ ID NO: 63814 - DNA, 20 bp, Artificial Sequence
  Synthetic oligonucleotide; TAGAAT chr11 5177277 5177296 5177280 -
ttaagttaaaatgttatccc

SEQ ID NO: 63815 - DNA, 20 bp, Artificial Sequence
  Synthetic oligonucleotide; TGGAAT chr11 5177233 5177252 5177236 -
atctcacaaagtctcttgta

SEQ ID NO: 63816 - DNA, 20 bp, Artificial Sequence
  Synthetic oligonucleotide; GTGAAT chr11 5177199 5177218 5177202 -
aatacatatgtattcaacaa

SEQ ID NO: 63817 - DNA, 20 bp, Artificial Sequence
  Synthetic oligonucleotide; GTGAAT chr11 5177189 5177208 5177192 -
tattcaacaagtgaataata

SEQ ID NO: 63818 - DNA, 20 bp, Artificial Sequence
  Synthetic oligonucleotide; CTGGAT chr11 5177138 5177157 5177141 -
attaacaaatatgagattgc

SEQ ID NO: 63819 - DNA, 20 bp, Artificial Sequence
  Synthetic oligonucleotide; CTGGGT chr11 5177010 5177029 5177013 -
atgattgaaaatttctatac

SEQ ID NO: 63820 - DNA, 20 bp, Artificial Sequence
  Synthetic oligonucleotide; GAGAAT chr11 5176952 5176971 5176955 -
aaaagctagagaagattaag

SEQ ID NO: 63821 - DNA, 20 bp, Artificial Sequence
  Synthetic oligonucleotide; AAGAAT chr11 5176922 5176941 5176925 -
tccaagaaacttaaataaaa

SEQ ID NO: 63822 - DNA, 20 bp, Artificial Sequence
  Synthetic oligonucleotide; GAGAAT chr11 5176801 5176820 5176804 -
aaagcctagaacaatgccat

SEQ ID NO: 63823 - DNA, 20 bp, Artificial Sequence
  Synthetic oligonucleotide; GTGGAT chr11 5176598 5176617 5176601 -
taatttatctacatttatat

SEQ ID NO: 63824 - DNA, 20 bp, Artificial Sequence
  Synthetic oligonucleotide; AAGAAT chr11 5176508 5176527 5176511 -
acacacacgtttgtgcacca

SEQ ID NO: 63825 - DNA, 20 bp, Artificial Sequence
  Synthetic oligonucleotide; GAGAAT chr11 5176454 5176473 5176457 -
tatttccattattgggaagg

SEQ ID NO: 63826 - DNA, 20 bp, Artificial Sequence
  Synthetic oligonucleotide; TTGAAT chr11 5176378 5176397 5176381 -
ctaaatatttaagtgctatt

SEQ ID NO: 63827 - DNA, 20 bp, Artificial Sequence
  Synthetic oligonucleotide; GGGAAT chr11 5176223 5176242 5176226 -
aataatatgatggaaaatga

SEQ ID NO: 63828 - DNA, 20 bp, Artificial Sequence
  Synthetic oligonucleotide; GAGGAT chr11 5176194 5176213 5176197 -
tagattgcagtatgatgaca

SEQ ID NO: 63829 - DNA, 20 bp, Artificial Sequence
  Synthetic oligonucleotide; ATGAAT chr11 5176079 5176098 5176082 -
atgatatcttaaataggtat

SEQ ID NO: 63830 - DNA, 20 bp, Artificial Sequence
  Synthetic oligonucleotide; TTGAAT chr11 5175990 5176009 5175993 -
aatggtagaagtaaaaatga

SEQ ID NO: 63831 - DNA, 20 bp, Artificial Sequence
  Synthetic oligonucleotide; AAGGAT chr11 5175940 5175959 5175943 -
gttgagcactcagattctga

SEQ ID NO: 63832 - DNA, 20 bp, Artificial Sequence
  Synthetic oligonucleotide; CTGAAT chr11 5175906 5175925 5175909 -
tggctgttgctatgcagctg

SEQ ID NO: 63833 - DNA, 20 bp, Artificial Sequence
  Synthetic oligonucleotide; GGGAGT chr11 5175654 5175673 5175657 -
aaccaaacaattttaaagca

SEQ ID NO: 63834 - DNA, 20 bp, Artificial Sequence
  Synthetic oligonucleotide; CAGAAT chr11 5175609 5175628 5175612 -
aactgatatggtgttctaga

SEQ ID NO: 63835 - DNA, 20 bp, Artificial Sequence
  Synthetic oligonucleotide; CAGGGT chr11 5175578 5175597 5175581 -
aaaacaaaaaacaaaaggta

SEQ ID NO: 63836 - DNA, 20 bp, Artificial Sequence
  Synthetic oligonucleotide; GAGAAT chr11 5175553 5175572 5175556 -
tgctaagtgattgataaggt

SEQ ID NO: 63837 - DNA, 20 bp, Artificial Sequence
  Synthetic oligonucleotide; TGGGGT chr11 5175417 5175436 5175420 -
aaaaagaccaaattgtaatc

SEQ ID NO: 63838 - DNA, 20 bp, Artificial Sequence
  Synthetic oligonucleotide; AAGAGT chr11 5175322 5175341 5175325 -
ataagtcacctgaaagtaaa

SEQ ID NO: 63839 - DNA, 20 bp, Artificial Sequence
  Synthetic oligonucleotide; TAGAAT chr11 5175255 5175274 5175258 -
tgcaagaaccaataggaaaa

SEQ ID NO: 63840 - DNA, 20 bp, Artificial Sequence
  Synthetic oligonucleotide; GAGAAT chr11 5175162 5175181 5175165 -
tacatgggaggctgaggcag

SEQ ID NO: 63841 - DNA, 20 bp, Artificial Sequence
  Synthetic oligonucleotide; TTGAAT chr11 5175153 5175172 5175156 -
ggctgaggcaggagaatgat

SEQ ID NO: 63842 - DNA, 20 bp, Artificial Sequence
  Synthetic oligonucleotide; GAGGAT chr11 5174373 5174392 5174376 -
tggctaaaacagtgttattt

SEQ ID NO: 63843 - DNA, 20 bp, Artificial Sequence
  Synthetic oligonucleotide; GTGAAT chr11 5174178 5174197 5174181 -
gtttccaccttttggctatt

SEQ ID NO: 63844 - DNA, 20 bp, Artificial Sequence
  Synthetic oligonucleotide; AGGAAT chr11 5174099 5174118 5174102 -
ttttaatatatacctaggag

SEQ ID NO: 63845 - DNA, 20 bp, Artificial Sequence
  Synthetic oligonucleotide; TGGGGT chr11 5174091 5174110 5174094 -
tatacctaggagaggaattt

SEQ ID NO: 63846 - DNA, 20 bp, Artificial Sequence
  Synthetic oligonucleotide; GAGGAT chr11 5173995 5174014 5173998 -
catttttagcagcaatatat

SEQ ID NO: 63847 - DNA, 20 bp, Artificial Sequence
  Synthetic oligonucleotide; TTGAGT chr11 5173800 5173819 5173803 -
atcatttgcatatttttaaa

SEQ ID NO: 63848 - DNA, 20 bp, Artificial Sequence
  Synthetic oligonucleotide; TTGAGT chr11 5173777 5173796 5173780 -
agttgtttgtctttttgttt

SEQ ID NO: 63849 - DNA, 20 bp, Artificial Sequence
  Synthetic oligonucleotide; CTGGAT chr11 5173750 5173769 5173753 -
gtaggactttttcatacatt

SEQ ID NO: 63850 - DNA, 20 bp, Artificial Sequence
  Synthetic oligonucleotide; AAGAAT chr11 5173591 5173610 5173594 -
atactttttgtgtcatatct

SEQ ID NO: 63851 - DNA, 20 bp, Artificial Sequence
  Synthetic oligonucleotide; GAGGGT chr11 5173539 5173558 5173542 -
atttacccatgcttccttcc

SEQ ID NO: 63852 - DNA, 20 bp, Artificial Sequence
  Synthetic oligonucleotide; AAGAAT chr11 5173464 5173483 5173467 -
ggcttttaatccttatttga

SEQ ID NO: 63853 - DNA, 20 bp, Artificial Sequence
  Synthetic oligonucleotide; TTGAAT chr11 5173420 5173439 5173423 -
caaaaatatagcttgaccaa

SEQ ID NO: 63854 - DNA, 20 bp, Artificial Sequence
  Synthetic oligonucleotide; CAGAAT chr11 5173395 5173414 5173398 -
tatgaagttgtatataaaaa

SEQ ID NO: 63855 - DNA, 20 bp, Artificial Sequence
  Synthetic oligonucleotide; TAGAAT chr11 5173330 5173349 5173333 -
tcaaacaacagaaaacagtc

SEQ ID NO: 63856 - DNA, 20 bp, Artificial Sequence
  Synthetic oligonucleotide; GAGAAT chr11 5173213 5173232 5173216 -
gaaaaattgtttatatgttt

SEQ ID NO: 63857 - DNA, 20 bp, Artificial Sequence
  Synthetic oligonucleotide; TGGAAT chr11 5173160 5173179 5173163 -
tcccccaaacaaatttcagg

SEQ ID NO: 63858 - DNA, 20 bp, Artificial Sequence
  Synthetic oligonucleotide; AAGAAT chr11 5173153 5173172 5173156 -
aacaaatttcaggtggaatc

SEQ ID NO: 63859 - DNA, 20 bp, Artificial Sequence
  Synthetic oligonucleotide; TGGAAT chr11 5173006 5173025 5173009 -
tccactttttactttgtata

SEQ ID NO: 63860 - DNA, 20 bp, Artificial Sequence
  Synthetic oligonucleotide; AAGAAT chr11 5172992 5173011 5172995 -
tgtatatggaatagcttctt

SEQ ID NO: 63861 - DNA, 20 bp, Artificial Sequence
  Synthetic oligonucleotide; TTGGGT chr11 5172809 5172828 5172812 -
tgtaactattttatgtttat

SEQ ID NO: 63862 - DNA, 20 bp, Artificial Sequence
  Synthetic oligonucleotide; GGGAAT chr11 5172708 5172727 5172711 -
ctaatacacccgaagtttct

SEQ ID NO: 63863 - DNA, 20 bp, Artificial Sequence
  Synthetic oligonucleotide; AGGGAT chr11 5172676 5172695 5172679 -
tcttggttaattgcttcttg

SEQ ID NO: 63864 - DNA, 20 bp, Artificial Sequence
  Synthetic oligonucleotide; CTGAAT chr11 5172669 5172688 5172672 -
taattgcttcttgagggata

SEQ ID NO: 63865 - DNA, 20 bp, Artificial Sequence
  Synthetic oligonucleotide; ATGGAT chr11 5172563 5172582 5172566 -
aacagtaacaaatagtatgc

SEQ ID NO: 63866 - DNA, 20 bp, Artificial Sequence
  Synthetic oligonucleotide; TAGGAT chr11 5172513 5172532 5172516 -
ctaggtaagtatctgaggtc

SEQ ID NO: 63867 - DNA, 20 bp, Artificial Sequence
  Synthetic oligonucleotide; AGGAGT chr11 5172386 5172405 5172389 -
agtctgaaattgatcatggt

SEQ ID NO: 63868 - DNA, 20 bp, Artificial Sequence
  Synthetic oligonucleotide; AAGAGT chr11 5172266 5172285 5172269 -
ccctggcccaacacgggaag

SEQ ID NO: 63869 - DNA, 20 bp, Artificial Sequence
  Synthetic oligonucleotide; CTGAAT chr11 5172224 5172243 5172227 -
tcttatttctgagccccatc

SEQ ID NO: 63870 - DNA, 20 bp, Artificial Sequence
  Synthetic oligonucleotide; ATGGAT chr11 5171998 5172017 5172001 -
cagaggagcttttctaatct

SEQ ID NO: 63871 - DNA, 20 bp, Artificial Sequence
  Synthetic oligonucleotide; AAGAGT chr11 5171980 5171999 5171983 -
ctatggatagcaggtggaga

SEQ ID NO: 63872 - DNA, 20 bp, Artificial Sequence
  Synthetic oligonucleotide; CTGGGT chr11 5171791 5171810 5171794 -
attgtctttatagcaaatat

SEQ ID NO: 63873 - DNA, 20 bp, Artificial Sequence
  Synthetic oligonucleotide; GTGAAT chr11 5171618 5171637 5171621 -
tcttcagtcataatttccat

SEQ ID NO: 63874 - DNA, 20 bp, Artificial Sequence
  Synthetic oligonucleotide; TGGAAT chr11 5171517 5171536 5171520 -
atctggcatataggctatgt

SEQ ID NO: 63875 - DNA, 20 bp, Artificial Sequence
  Synthetic oligonucleotide; CTGAGT chr11 5171370 5171389 5171373 -
cagaacttgatgtgcaataa

SEQ ID NO: 63876 - DNA, 20 bp, Artificial Sequence
  Synthetic oligonucleotide; GTGGAT chr11 5171222 5171241 5171225 -
gactggaggcagaacattat

SEQ ID NO: 63877 - DNA, 20 bp, Artificial Sequence
  Synthetic oligonucleotide; CCGAAT chr11 5171150 5171169 5171153 -
ggcatcattcttcacatcat

SEQ ID NO: 63878 - DNA, 20 bp, Artificial Sequence
  Synthetic oligonucleotide; TGGAGT chr11 5170968 5170987 5170971 -
tatgcactctttcactctta

SEQ ID NO: 63879 - DNA, 20 bp, Artificial Sequence
  Synthetic oligonucleotide; ACGGGT chr11 5170867 5170886 5170870 -
caattgcctgcatttctggg

SEQ ID NO: 63880 - DNA, 20 bp, Artificial Sequence
  Synthetic oligonucleotide; AGGGGT chr11 5170366 5170385 5170369 -
ttcttacactatccaggaag

SEQ ID NO: 63881 - DNA, 20 bp, Artificial Sequence
  Synthetic oligonucleotide; GTGAGT chr11 5170362 5170381 5170365 -
tacactatccaggaagaggg

SEQ ID NO: 63882 - DNA, 20 bp, Artificial Sequence
  Synthetic oligonucleotide; CTGAAT chr11 5170299 5170318 5170302 -
cttagatcaggctttattac

SEQ ID NO: 63883 - DNA, 20 bp, Artificial Sequence
  Synthetic oligonucleotide; GAGAAT chr11 5170191 5170210 5170194 -
acagttttatatatttccct

SEQ ID NO: 63884 - DNA, 20 bp, Artificial Sequence
  Synthetic oligonucleotide; CTGAAT chr11 5170102 5170121 5170105 -
gtgatgacacactttgtgtg

SEQ ID NO: 63885 - DNA, 20 bp, Artificial Sequence
  Synthetic oligonucleotide; TTGAAT chr11 5170094 5170113 5170097 -
acactttgtgtgctgaatcc

SEQ ID NO: 63886 - DNA, 20 bp, Artificial Sequence
  Synthetic oligonucleotide; GGGAAT chr11 5170063 5170082 5170066 -
attcagtgacatttggttct

SEQ ID NO: 63887 - DNA, 20 bp, Artificial Sequence
  Synthetic oligonucleotide; AAGAGT chr11 5170050 5170069 5170053 -
tggttctgggaatatgtaga

SEQ ID NO: 63888 - DNA, 20 bp, Artificial Sequence
  Synthetic oligonucleotide; AAGAGT chr11 5169969 5169988 5169972 -
ggaaaataatcaggacacaa

SEQ ID NO: 63889 - DNA, 20 bp, Artificial Sequence
  Synthetic oligonucleotide; ATGGAT chr11 5169879 5169898 5169882 -
cagaaccctgcttacctctg

SEQ ID NO: 63890 - DNA, 20 bp, Artificial Sequence
  Synthetic oligonucleotide; AAGAAT chr11 5169863 5169882 5169866 -
tctgatggatataaagatgg

SEQ ID NO: 63891 - DNA, 20 bp, Artificial Sequence
  Synthetic oligonucleotide; AGGGAT chr11 5169806 5169825 5169809 -
tggaaatattttgttgtgtt

SEQ ID NO: 63892 - DNA, 20 bp, Artificial Sequence
  Synthetic oligonucleotide; CTGAAT chr11 5169715 5169734 5169718 -
tcaattttacatcaaaactt

SEQ ID NO: 63893 - DNA, 20 bp, Artificial Sequence
  Synthetic oligonucleotide; GTGAAT chr11 5169653 5169672 5169656 -
acagatgattagatttcata

SEQ ID NO: 63894 - DNA, 20 bp, Artificial Sequence
  Synthetic oligonucleotide; AAGAAT chr11 5169630 5169649 5169633 -
aatacaagtgtggaaaatac

SEQ ID NO: 63895 - DNA, 20 bp, Artificial Sequence
  Synthetic oligonucleotide; ATGGGT chr11 5169592 5169611 5169595 -
ataattgttgaagttgtgtc

SEQ ID NO: 63896 - DNA, 20 bp, Artificial Sequence
  Synthetic oligonucleotide; TTGAAT chr11 5169479 5169498 5169482 -
gtgctaatgttaaatcttaa

SEQ ID NO: 63897 - DNA, 20 bp, Artificial Sequence
  Synthetic oligonucleotide; ATGAGT chr11 5169397 5169416 5169400 -
agaaagctattttattttta

SEQ ID NO: 63898 - DNA, 20 bp, Artificial Sequence
  Synthetic oligonucleotide; AAGAAT chr11 5169226 5169245 5169229 -
aaaaaggtagggaggaccag

SEQ ID NO: 63899 - DNA, 20 bp, Artificial Sequence
  Synthetic oligonucleotide; AGGGAT chr11 5169201 5169220 5169204 -
ttctagaaaatccctcagac

SEQ ID NO: 63900 - DNA, 20 bp, Artificial Sequence
  Synthetic oligonucleotide; TTGAAT chr11 5169160 5169179 5169163 -
tttgttttcttcagataatt

SEQ ID NO: 63901 - DNA, 20 bp, Artificial Sequence
  Synthetic oligonucleotide; GTGAAT chr11 5169140 5169159 5169143 -
ttgaatttccatgaaccaca

SEQ ID NO: 63902 - DNA, 20 bp, Artificial Sequence
  Synthetic oligonucleotide; TTGAGT chr11 5169113 5169132 5169116 -
tcctattaaaccacacagtc

SEQ ID NO: 63903 - DNA, 20 bp, Artificial Sequence
  Synthetic oligonucleotide; ATGAGT chr11 5169046 5169065 5169049 -
ataaaaatatgtatcaagta

SEQ ID NO: 63904 - DNA, 20 bp, Artificial Sequence
  Synthetic oligonucleotide; TGGGAT chr11 5168925 5168944 5168928 -
gtgaagtcataaaaacaaca

SEQ ID NO: 63905 - DNA, 20 bp, Artificial Sequence
  Synthetic oligonucleotide; CAGAGT chr11 5168896 5168915 5168899 -
aaaaaaaattctcaaaattt

SEQ ID NO: 63906 - DNA, 20 bp, Artificial Sequence
  Synthetic oligonucleotide; TGGGAT chr11 5168663 5168682 5168666 -
tatcttgctattagtaattg

SEQ ID NO: 63907 - DNA, 20 bp, Artificial Sequence
  Synthetic oligonucleotide; TTGAAT chr11 5168636 5168655 5168639 -
ttgctagtagtatgacctgt

SEQ ID NO: 63908 - DNA, 20 bp, Artificial Sequence
  Synthetic oligonucleotide; ATGAAT chr11 5168611 5168630 5168614 -
tataatttattcatttataa

SEQ ID NO: 63909 - DNA, 20 bp, Artificial Sequence
  Synthetic oligonucleotide; GTGAAT chr11 5168458 5168477 5168461 -
accaaatctgactacaatac

SEQ ID NO: 63910 - DNA, 20 bp, Artificial Sequence
  Synthetic oligonucleotide; AAGAGT chr11 5168212 5168231 5168215 -
agtcatcatgccccaagtca

SEQ ID NO: 63911 - DNA, 20 bp, Artificial Sequence
  Synthetic oligonucleotide; CAGAAT chr11 5168196 5168215 5168199 -
gtcaaagagttaataagtgg

SEQ ID NO: 63912 - DNA, 20 bp, Artificial Sequence
  Synthetic oligonucleotide; TGGAAT chr11 5168091 5168110 5168094 -
ttcagatttgactttaaaat

SEQ ID NO: 63913 - DNA, 20 bp, Artificial Sequence
  Synthetic oligonucleotide; GAGGAT chr11 5167962 5167981 5167965 -
atgtataaaggttttctcaa

SEQ ID NO: 63914 - DNA, 20 bp, Artificial Sequence
  Synthetic oligonucleotide; TAGAGT chr11 5167742 5167761 5167745 -
aagtgtagtcctagatatag

SEQ ID NO: 63915 - DNA, 20 bp, Artificial Sequence
  Synthetic oligonucleotide; GAGAGT chr11 5167604 5167623 5167607 -
agaaatcacacagtccaaga

SEQ ID NO: 63916 - DNA, 20 bp, Artificial Sequence
  Synthetic oligonucleotide; TCGAAT chr11 5167599 5167618 5167602 -
tcacacagtccaagagagag

SEQ ID NO: 63917 - DNA, 20 bp, Artificial Sequence
  Synthetic oligonucleotide; AGGGAT chr11 5167575 5167594 5167578 -
atgaaattttcaaagcgctc

SEQ ID NO: 63918 - DNA, 20 bp, Artificial Sequence
  Synthetic oligonucleotide; AAGAAT chr11 5167551 5167570 5167554 -
ataaaagaaaactgatattc

SEQ ID NO: 63919 - DNA, 20 bp, Artificial Sequence
  Synthetic oligonucleotide; TAGGGT chr11 5167539 5167558 5167542 -
tgatattcaagaatatttta

SEQ ID NO: 63920 - DNA, 20 bp, Artificial Sequence
  Synthetic oligonucleotide; GAGAAT chr11 5167474 5167493 5167477 -
cccagacaaacaaaagttga

SEQ ID NO: 63921 - DNA, 20 bp, Artificial Sequence
  Synthetic oligonucleotide; GGGAGT chr11 5167432 5167451 5167435 -
atcttgcaaaaaatgctaaa

SEQ ID NO: 63922 - DNA, 20 bp, Artificial Sequence
  Synthetic oligonucleotide; TAGAAT chr11 5167334 5167353 5167337 -
attaagtacatagacaaacc

SEQ ID NO: 63923 - DNA, 20 bp, Artificial Sequence
  Synthetic oligonucleotide; GGGGGT chr11 5167178 5167197 5167181 -
tgagacaaaagtcaaaatgt

SEQ ID NO: 63924 - DNA, 20 bp, Artificial Sequence
  Synthetic oligonucleotide; TGGAGT chr11 5167173 5167192 5167176 -
caaaagtcaaaatgtggggg

SEQ ID NO: 63925 - DNA, 20 bp, Artificial Sequence
  Synthetic oligonucleotide; TGGAGT chr11 5167168 5167187 5167171 -
gtcaaaatgtgggggtggag

SEQ ID NO: 63926 - DNA, 20 bp, Artificial Sequence
  Synthetic oligonucleotide; TAGAAT chr11 5167155 5167174 5167158 -
ggtggagtggagttaaagtg

SEQ ID NO: 63927 - DNA, 20 bp, Artificial Sequence
  Synthetic oligonucleotide; AGGAGT chr11 5166928 5166947 5166931 -
gaaggaaaaaaaaggaagag

SEQ ID NO: 63928 - DNA, 20 bp, Artificial Sequence
  Synthetic oligonucleotide; CTGAGT chr11 5166851 5166870 5166854 -
atccttacttagtaactaca

SEQ ID NO: 63929 - DNA, 20 bp, Artificial Sequence
  Synthetic oligonucleotide; TAGAAT chr11 5166813 5166832 5166816 -
agttccccaattaaaagtaa

SEQ ID NO: 63930 - DNA, 20 bp, Artificial Sequence
  Synthetic oligonucleotide; ATGGAT chr11 5166802 5166821 5166805 -
taaaagtaatagaatggtaa

SEQ ID NO: 63931 - DNA, 20 bp, Artificial Sequence
  Synthetic oligonucleotide; AAGGGT chr11 5166721 5166740 5166724 -
ggcacacataaatgaaagtg

SEQ ID NO: 63932 - DNA, 20 bp, Artificial Sequence
  Synthetic oligonucleotide; GAGGGT chr11 5166613 5166632 5166616 -
aaactgtaagaaaagataag

SEQ ID NO: 63933 - DNA, 20 bp, Artificial Sequence
  Synthetic oligonucleotide; AGGGGT chr11 5166591 5166610 5166594 -
gggtcactgtataataataa

SEQ ID NO: 63934 - DNA, 20 bp, Artificial Sequence
  Synthetic oligonucleotide; GAGGAT chr11 5166574 5166593 5166577 -
taaaggggtcaattcagcaa

SEQ ID NO: 63935 - DNA, 20 bp, Artificial Sequence
  Synthetic oligonucleotide; TGGAAT chr11 5166199 5166218 5166202 -
agtatattttctgaccacag

SEQ ID NO: 63936 - DNA, 20 bp, Artificial Sequence
  Synthetic oligonucleotide; ATGAAT chr11 5166183 5166202 5166186 -
acagtggaataaaactagaa

SEQ ID NO: 63937 - DNA, 20 bp, Artificial Sequence
  Synthetic oligonucleotide; CTGAAT chr11 5166123 5166142 5166126 -
ggaaatcaaacagtatgctc

SEQ ID NO: 63938 - DNA, 20 bp, Artificial Sequence
  Synthetic oligonucleotide; AGGGAT chr11 5165285 5165304 5165288 -
tcagaggtgtcagaccacgc

SEQ ID NO: 63939 - DNA, 20 bp, Artificial Sequence
  Synthetic oligonucleotide; GGGGGT chr11 5165231 5165250 5165234 -
caaatcccacttttctggag

SEQ ID NO: 63940 - DNA, 20 bp, Artificial Sequence
  Synthetic oligonucleotide; GTGAGT chr11 5164867 5164886 5164870 -
accccttgcccatttttctg

SEQ ID NO: 63941 - DNA, 20 bp, Artificial Sequence
  Synthetic oligonucleotide; CTGAGT chr11 5164434 5164453 5164437 -
agtcccaactccaagcgtcg

SEQ ID NO: 63942 - DNA, 20 bp, Artificial Sequence
  Synthetic oligonucleotide; CCGAAT chr11 5164154 5164173 5164157 -
ttttctttatccgacctctc

SEQ ID NO: 63943 - DNA, 20 bp, Artificial Sequence
  Synthetic oligonucleotide; TAGAGT chr11 5163907 5163926 5163910 -
accttcaaggtgtacaataa

SEQ ID NO: 63944 - DNA, 20 bp, Artificial Sequence
  Synthetic oligonucleotide; TTGAGT chr11 5163875 5163894 5163878 -
agccaagtagcaacatattt

SEQ ID NO: 63945 - DNA, 20 bp, Artificial Sequence
  Synthetic oligonucleotide; AGGAAT chr11 5163716 5163735 5163719 -
gaaatctggccaccaggcca

SEQ ID NO: 63946 - DNA, 20 bp, Artificial Sequence
  Synthetic oligonucleotide; CAGGAT chr11 5163700 5163719 5163703 -
gccaaggaatgcccgcagcc

SEQ ID NO: 63947 - DNA, 20 bp, Artificial Sequence
  Synthetic oligonucleotide; GAGGGT chr11 5163471 5163490 5163474 -
tttaggtaattctcacagtg

SEQ ID NO: 63948 - DNA, 20 bp, Artificial Sequence
  Synthetic oligonucleotide; AAGGAT chr11 5163003 5163022 5163006 -
catcccacagcatgctttga

SEQ ID NO: 63949 - DNA, 20 bp, Artificial Sequence
  Synthetic oligonucleotide; CAGAAT chr11 5162884 5162903 5162887 -
acaagccttacaggttagtt

SEQ ID NO: 63950 - DNA, 20 bp, Artificial Sequence
  Synthetic oligonucleotide; CTGGAT chr11 5162776 5162795 5162779 -
ctataacccattattctgtt

SEQ ID NO: 63951 - DNA, 20 bp, Artificial Sequence
  Synthetic oligonucleotide; CAGAAT chr11 5162463 5162482 5162466 -
ctaggcatagttagtgcggt

SEQ ID NO: 63952 - DNA, 20 bp, Artificial Sequence
  Synthetic oligonucleotide; AGGGAT chr11 5161857 5161876 5161860 -
ctgctattctgctactcctc

SEQ ID NO: 63953 - DNA, 20 bp, Artificial Sequence
  Synthetic oligonucleotide; GAGGAT chr11 5161815 5161834 5161818 -
cttccctacacatcaagctc

SEQ ID NO: 63954 - DNA, 20 bp, Artificial Sequence
  Synthetic oligonucleotide; CTGAGT chr11 5161765 5161784 5161768 -
ttagatttactcaacatgcc

SEQ ID NO: 63955 - DNA, 20 bp, Artificial Sequence
  Synthetic oligonucleotide; CTGGAT chr11 5161718 5161737 5161721 -
agtctaggtagacactttca

SEQ ID NO: 63956 - DNA, 20 bp, Artificial Sequence
  Synthetic oligonucleotide; CAGGGT chr11 5161694 5161713 5161697 -
ataagtagaggtctttccta

SEQ ID NO: 63957 - DNA, 20 bp, Artificial Sequence
  Synthetic oligonucleotide; CAGAAT chr11 5161389 5161408 5161392 -
tcagaagtcagacctgtcct

SEQ ID NO: 63958 - DNA, 20 bp, Artificial Sequence
  Synthetic oligonucleotide; CAGGGT chr11 5161379 5161398 5161382 -
gacctgtcctcagaatgcta

SEQ ID NO: 63959 - DNA, 20 bp, Artificial Sequence
  Synthetic oligonucleotide; TAGAAT chr11 5161299 5161318 5161302 -
ttccagacaccagaccaact

SEQ ID NO: 63960 - DNA, 20 bp, Artificial Sequence
  Synthetic oligonucleotide; TTGAAT chr11 5161081 5161100 5161084 -
tctttgctggcaggactatg

SEQ ID NO: 63961 - DNA, 20 bp, Artificial Sequence
  Synthetic oligonucleotide; AGGAAT chr11 5160713 5160732 5160716 -
tcttattaatataagaagac

SEQ ID NO: 63962 - DNA, 20 bp, Artificial Sequence
  Synthetic oligonucleotide; AGGGAT chr11 5160311 5160330 5160314 -
ctgtttggtagtctcctcac

SEQ ID NO: 63963 - DNA, 20 bp, Artificial Sequence
  Synthetic oligonucleotide; CTGAAT chr11 5160295 5160314 5160298 -
tcacagggatgcgcatgaaa

SEQ ID NO: 63964 - DNA, 20 bp, Artificial Sequence
  Synthetic oligonucleotide; ATGAGT chr11 5160284 5160303 5160287 -
cgcatgaaactgaataacca

SEQ ID NO: 63965 - DNA, 20 bp, Artificial Sequence
  Synthetic oligonucleotide; CAGGAT chr11 5160202 5160221 5160205 -
atacaacataccaaaaccta

SEQ ID NO: 63966 - DNA, 20 bp, Artificial Sequence
  Synthetic oligonucleotide; AAGAGT chr11 5159928 5159947 5159931 -
tcaacaaaactttaagaaaa

SEQ ID NO: 63967 - DNA, 20 bp, Artificial Sequence
  Synthetic oligonucleotide; GAGGAT chr11 5159898 5159917 5159901 -
taaaattagaaaatgaaaaa

SEQ ID NO: 63968 - DNA, 20 bp, Artificial Sequence
  Synthetic oligonucleotide; TAGAAT chr11 5159813 5159832 5159816 -
ttccaacaaattggaaaatc

SEQ ID NO: 63969 - DNA, 20 bp, Artificial Sequence
  Synthetic oligonucleotide; ATGGAT chr11 5159805 5159824 5159808 -
aattggaaaatctagaataa

SEQ ID NO: 63970 - DNA, 20 bp, Artificial Sequence
  Synthetic oligonucleotide; ATGAAT chr11 5159730 5159749 5159733 -
aaaacctcaatagaacaata

SEQ ID NO: 63971 - DNA, 20 bp, Artificial Sequence
  Synthetic oligonucleotide; AAGAAT chr11 5159378 5159397 5159381 -
tctaaggactgaaataaggc

SEQ ID NO: 63972 - DNA, 20 bp, Artificial Sequence
  Synthetic oligonucleotide; CAGGAT chr11 5159172 5159191 5159175 -
taaaaaaatcaataaagtta

SEQ ID NO: 63973 - DNA, 20 bp, Artificial Sequence
  Synthetic oligonucleotide; AGGAGT chr11 5159054 5159073 5159057 -
aataaaaatataaaataccc

SEQ ID NO: 63974 - DNA, 20 bp, Artificial Sequence
  Synthetic oligonucleotide; AAGAAT chr11 5158934 5158953 5158937 -
attccatgctcatgaactag

SEQ ID NO: 63975 - DNA, 20 bp, Artificial Sequence
  Synthetic oligonucleotide; GGGGAT chr11 5158522 5158541 5158525 -
actttgtgaggctgaggtgg

SEQ ID NO: 63976 - DNA, 20 bp, Artificial Sequence
  Synthetic oligonucleotide; AGGAGT chr11 5158507 5158526 5158510 -
ggtggggggatcacgaggtc

SEQ ID NO: 63977 - DNA, 20 bp, Artificial Sequence
  Synthetic oligonucleotide; GAGAAT chr11 5158389 5158408 5158392 -
tactcaggaggctgaggcag

SEQ ID NO: 63978 - DNA, 20 bp, Artificial Sequence
  Synthetic oligonucleotide; CTGGAT chr11 5158240 5158259 5158243 -
aagaaacagtgctaggaaaa

SEQ ID NO: 63979 - DNA, 20 bp, Artificial Sequence
  Synthetic oligonucleotide; AAGAGT chr11 5158222 5158241 5158225 -
aactggatatccatttgcaa

SEQ ID NO: 63980 - DNA, 20 bp, Artificial Sequence
  Synthetic oligonucleotide; ATGGAT chr11 5158171 5158190 5158174 -
tatacaaaaatcaaatcaag

SEQ ID NO: 63981 - DNA, 20 bp, Artificial Sequence
  Synthetic oligonucleotide; TTGAAT chr11 5158158 5158177 5158161 -
aatcaagatggattaaagac

SEQ ID NO: 63982 - DNA, 20 bp, Artificial Sequence
  Synthetic oligonucleotide; TGGGAT chr11 5158024 5158043 5158027 -
ccaaaacaaaaatagacaat

SEQ ID NO: 63983 - DNA, 20 bp, Artificial Sequence
  Synthetic oligonucleotide; AAGAAT chr11 5157967 5157986 5157970 -
taaagtgaagagacaaccca

SEQ ID NO: 63984 - DNA, 20 bp, Artificial Sequence
  Synthetic oligonucleotide; AGGAAT chr11 5157928 5157947 5157931 -
tgcaaactatatattttaca

SEQ ID NO: 63985 - DNA, 20 bp, Artificial Sequence
  Synthetic oligonucleotide; CAGAAT chr11 5157915 5157934 5157918 -
ttttacaaggaattgataac

SEQ ID NO: 63986 - DNA, 20 bp, Artificial Sequence
  Synthetic oligonucleotide; CTGAAT chr11 5157847 5157866 5157850 -
ataaataatggccaaaagac

SEQ ID NO: 63987 - DNA, 20 bp, Artificial Sequence
  Synthetic oligonucleotide; GTGGAT chr11 5157684 5157703 5157687 -
aggaaataacagatgcttgt

SEQ ID NO: 63988 - DNA, 20 bp, Artificial Sequence
  Synthetic oligonucleotide; GGGAGT chr11 5157645 5157664 5157648 -
aaccctcttacactgttggt

SEQ ID NO: 63989 - DNA, 20 bp, Artificial Sequence
  Synthetic oligonucleotide; AAGAAT chr11 5157533 5157552 5157536 -
tcctaggtatatacccttaa

SEQ ID NO: 63990 - DNA, 20 bp, Artificial Sequence
  Synthetic oligonucleotide; ATGGAT chr11 5157426 5157445 5157429 -
atgtattcgtcaacagataa

SEQ ID NO: 63991 - DNA, 20 bp, Artificial Sequence
  Synthetic oligonucleotide; TGGAAT chr11 5157378 5157397 5157381 -
acacacacacacacacacaa

SEQ ID NO: 63992 - DNA, 20 bp, Artificial Sequence
  Synthetic oligonucleotide; AAGAAT chr11 5157355 5157374 5157358 -
aatattattcaaccataaaa

SEQ ID NO: 63993 - DNA, 20 bp, Artificial Sequence
  Synthetic oligonucleotide; GTGGAT chr11 5157233 5157252 5157236 -
ctcgtgtggaagttaaaaac

SEQ ID NO: 63994 - DNA, 20 bp, Artificial Sequence
  Synthetic oligonucleotide; GAGAGT chr11 5157215 5157234 5157218 -
acgtggatcttatgaagaca

SEQ ID NO: 63995 - DNA, 20 bp, Artificial Sequence
  Synthetic oligonucleotide; AGGAAT chr11 5157176 5157195 5157179 -
ccggcggcgggagggaagaa

SEQ ID NO: 63996 - DNA, 20 bp, Artificial Sequence
  Synthetic oligonucleotide; GTGAAT chr11 5157079 5157098 5157082 -
gtgtatatatatataaaaat

SEQ ID NO: 63997 - DNA, 20 bp, Artificial Sequence
  Synthetic oligonucleotide; CTGGGT chr11 5156991 5157010 5156994 -
tcaaaaatggtaaagatggg

SEQ ID NO: 63998 - DNA, 20 bp, Artificial Sequence
  Synthetic oligonucleotide; GTGGAT chr11 5156938 5156957 5156941 -
actttgggaggccaaggcag

SEQ ID NO: 63999 - DNA, 20 bp, Artificial Sequence
  Synthetic oligonucleotide; AGGAGT chr11 5156923 5156942 5156926 -
ggcaggtggatcatgaggtc

SEQ ID NO: 64000 - DNA, 20 bp, Artificial Sequence
  Synthetic oligonucleotide; GAGAAT chr11 5156804 5156823 5156807 -
tacttgggaggcttgggcag

SEQ ID NO: 64001 - DNA, 20 bp, Artificial Sequence
  Synthetic oligonucleotide; CTGGAT chr11 5156737 5156756 5156740 -
tcctaccactgcactccagc

SEQ ID NO: 64002 - DNA, 20 bp, Artificial Sequence
  Synthetic oligonucleotide; CCGGGT chr11 5156627 5156646 5156630 -
tttaaaaaatattcagtagg

SEQ ID NO: 64003 - DNA, 20 bp, Artificial Sequence
  Synthetic oligonucleotide; GCGGGT chr11 5156578 5156597 5156581 -
cagcactttgggaggcggag

SEQ ID NO: 64004 - DNA, 20 bp, Artificial Sequence
  Synthetic oligonucleotide; GTGGAT chr11 5156574 5156593 5156577 -
actttgggaggcggaggcgg

SEQ ID NO: 64005 - DNA, 20 bp, Artificial Sequence
  Synthetic oligonucleotide; GCGGGT chr11 5156479 5156498 5156482 -
aaaattagccgggcttggtg

SEQ ID NO: 64006 - DNA, 20 bp, Artificial Sequence
  Synthetic oligonucleotide; GAGAAT chr11 5156438 5156457 5156441 -
tactatggaggctgaggcgg

SEQ ID NO: 64007 - DNA, 20 bp, Artificial Sequence
  Synthetic oligonucleotide; TTGAAT chr11 5156232 5156251 5156235 -
acaatgaaaaaaaaataacc

SEQ ID NO: 64008 - DNA, 20 bp, Artificial Sequence
  Synthetic oligonucleotide; AAGGAT chr11 5156197 5156216 5156200 -
aactcattgacaatgtttca

SEQ ID NO: 64009 - DNA, 20 bp, Artificial Sequence
  Synthetic oligonucleotide; AGGGAT chr11 5156188 5156207 5156191 -
acaatgtttcaaaggatgtg

SEQ ID NO: 64010 - DNA, 20 bp, Artificial Sequence
  Synthetic oligonucleotide; AGGAGT chr11 5156103 5156122 5156106 -
tgggctggaaatattgttat

SEQ ID NO: 64011 - DNA, 20 bp, Artificial Sequence
  Synthetic oligonucleotide; TGGAGT chr11 5156068 5156087 5156071 -
aaggtgacaactaaattatt

SEQ ID NO: 64012 - DNA, 20 bp, Artificial Sequence
  Synthetic oligonucleotide; TGGAGT chr11 5156059 5156078 5156062 -
actaaattatttggagtaga

SEQ ID NO: 64013 - DNA, 20 bp, Artificial Sequence
  Synthetic oligonucleotide; GTGAAT chr11 5156042 5156061 5156045 -
agatggagtcaccagcacat

SEQ ID NO: 64014 - DNA, 20 bp, Artificial Sequence
  Synthetic oligonucleotide; TAGAAT chr11 5156031 5156050 5156034 -
ccagcacatgtgaatagttt

SEQ ID NO: 64015 - DNA, 20 bp, Artificial Sequence
  Synthetic oligonucleotide; AAGAAT chr11 5155914 5155933 5155917 -
aaattgtttcttagtgacaa

SEQ ID NO: 64016 - DNA, 20 bp, Artificial Sequence
  Synthetic oligonucleotide; CTGAAT chr11 5155905 5155924 5155908 -
cttagtgacaaaagaataac

SEQ ID NO: 64017 - DNA, 20 bp, Artificial Sequence
  Synthetic oligonucleotide; CTGAAT chr11 5155874 5155893 5155877 -
attagctgcctatatgctct

SEQ ID NO: 64018 - DNA, 20 bp, Artificial Sequence
  Synthetic oligonucleotide; TGGGGT chr11 5155797 5155816 5155800 -
gaaattctggaaagagcaca

SEQ ID NO: 64019 - DNA, 20 bp, Artificial Sequence
  Synthetic oligonucleotide; GAGAAT chr11 5155632 5155651 5155635 -
accagctgtaaaatgtcaag

SEQ ID NO: 64020 - DNA, 20 bp, Artificial Sequence
  Synthetic oligonucleotide; TAGAAT chr11 5155602 5155621 5155605 -
tcatatgcataagtcttgct

SEQ ID NO: 64021 - DNA, 20 bp, Artificial Sequence
  Synthetic oligonucleotide; TAGAAT chr11 5155503 5155522 5155506 -
ataatttttttcatttcatt

SEQ ID NO: 64022 - DNA, 20 bp, Artificial Sequence
  Synthetic oligonucleotide; AGGAAT chr11 5155472 5155491 5155475 -
acatctcactcataaatagt

SEQ ID NO: 64023 - DNA, 20 bp, Artificial Sequence
  Synthetic oligonucleotide; ATGGAT chr11 5155398 5155417 5155401 -
agaaagagagaaaagaggaa

SEQ ID NO: 64024 - DNA, 20 bp, Artificial Sequence
  Synthetic oligonucleotide; AAGAAT chr11 5155309 5155328 5155312 -
ccattataatttgtcactat

SEQ ID NO: 64025 - DNA, 20 bp, Artificial Sequence
  Synthetic oligonucleotide; AAGAAT chr11 5155253 5155272 5155256 -
cttcaataaaataaaatggg

SEQ ID NO: 64026 - DNA, 20 bp, Artificial Sequence
  Synthetic oligonucleotide; ATGAAT chr11 5155201 5155220 5155204 -
ttgtgtggtaaaaagtagtt

SEQ ID NO: 64027 - DNA, 20 bp, Artificial Sequence
  Synthetic oligonucleotide; CTGAAT chr11 5155180 5155199 5155183 -
tgaatacagatttttctttt

SEQ ID NO: 64028 - DNA, 20 bp, Artificial Sequence
  Synthetic oligonucleotide; AGGAAT chr11 5155120 5155139 5155123 -
accaagatatttatttaaat

SEQ ID NO: 64029 - DNA, 20 bp, Artificial Sequence
  Synthetic oligonucleotide; TAGAAT chr11 5155081 5155100 5155084 -
tgtttgcattaaatgggctt

SEQ ID NO: 64030 - DNA, 20 bp, Artificial Sequence
  Synthetic oligonucleotide; ATGAAT chr11 5155020 5155039 5155023 -
tgtaaaaaaattttttgcat

SEQ ID NO: 64031 - DNA, 20 bp, Artificial Sequence
  Synthetic oligonucleotide; GGGGAT chr11 5154942 5154961 5154945 -
gcaagtgtagaaataattac

SEQ ID NO: 64032 - DNA, 20 bp, Artificial Sequence
  Synthetic oligonucleotide; CTGGGT chr11 5154895 5154914 5154898 -
gagggctgacttaaaatttg

SEQ ID NO: 64033 - DNA, 20 bp, Artificial Sequence
  Synthetic oligonucleotide; AGGAAT chr11 5154810 5154829 5154813 -
acttctccacacattcataa

SEQ ID NO: 64034 - DNA, 20 bp, Artificial Sequence
  Synthetic oligonucleotide; GTGGAT chr11 5154795 5154814 5154798 -
cataaaggaatattaaattg

SEQ ID NO: 64035 - DNA, 20 bp, Artificial Sequence
  Synthetic oligonucleotide; CAGAAT chr11 5154742 5154761 5154745 -
aataaattcatcccgtgttt

SEQ ID NO: 64036 - DNA, 20 bp, Artificial Sequence
  Synthetic oligonucleotide; ATGAGT chr11 5154721 5154740 5154724 -
agaatgctacagacctcact

SEQ ID NO: 64037 - DNA, 20 bp, Artificial Sequence
  Synthetic oligonucleotide; GGGGAT chr11 5154708 5154727 5154711 -
cctcactatgagttttactg

SEQ ID NO: 64038 - DNA, 20 bp, Artificial Sequence
  Synthetic oligonucleotide; CAGAGT chr11 5154567 5154586 5154570 -
gcacatatcctggcaccaaa

SEQ ID NO: 64039 - DNA, 20 bp, Artificial Sequence
  Synthetic oligonucleotide; CTGGAT chr11 5154544 5154563 5154547 -
agtaaaatttatgacattag

SEQ ID NO: 64040 - DNA, 20 bp, Artificial Sequence
  Synthetic oligonucleotide; CAGAGT chr11 5154529 5154548 5154532 -
attagctggatgctgttaca

SEQ ID NO: 64041 - DNA, 20 bp, Artificial Sequence
  Synthetic oligonucleotide; GGGAAT chr11 5154483 5154502 5154486 -
tcacagaacccacaacttaa

SEQ ID NO: 64042 - DNA, 20 bp, Artificial Sequence
  Synthetic oligonucleotide; TGGAAT chr11 5154472 5154491 5154475 -
acaacttaagggaatgaagc

SEQ ID NO: 64043 - DNA, 20 bp, Artificial Sequence
  Synthetic oligonucleotide; GTGAGT chr11 5154447 5154466 5154450 -
tccttggagaagaaaaattg

SEQ ID NO: 64044 - DNA, 20 bp, Artificial Sequence
  Synthetic oligonucleotide; ATGAAT chr11 5154440 5154459 5154443 -
agaagaaaaattggtgagtg

SEQ ID NO: 64045 - DNA, 20 bp, Artificial Sequence
  Synthetic oligonucleotide; AGGAGT chr11 5154361 5154380 5154364 -
ccagctctcaataataattg

SEQ ID NO: 64046 - DNA, 20 bp, Artificial Sequence
  Synthetic oligonucleotide; TTGAAT chr11 5154199 5154218 5154202 -
cacatgtcagctctttggtc

SEQ ID NO: 64047 - DNA, 20 bp, Artificial Sequence
  Synthetic oligonucleotide; AAGGAT chr11 5154168 5154187 5154171 -
agacattgtgattgccatta

SEQ ID NO: 64048 - DNA, 20 bp, Artificial Sequence
  Synthetic oligonucleotide; ATGGAT chr11 5154094 5154113 5154097 -
ttagaaaaagccagtgactt

SEQ ID NO: 64049 - DNA, 20 bp, Artificial Sequence
  Synthetic oligonucleotide; GGGAGT chr11 5154088 5154107 5154091 -
aaagccagtgacttatggat

SEQ ID NO: 64050 - DNA, 20 bp, Artificial Sequence
  Synthetic oligonucleotide; GGGGAT chr11 5154064 5154083 5154067 -
gtgtcataaaactaagcatt

SEQ ID NO: 64051 - DNA, 20 bp, Artificial Sequence
  Synthetic oligonucleotide; TTGAAT chr11 5153915 5153934 5153918 -
cagcagttgaacatttgttg

SEQ ID NO: 64052 - DNA, 20 bp, Artificial Sequence
  Synthetic oligonucleotide; TTGAGT chr11 5153907 5153926 5153910 -
gaacatttgttgttgaatat

SEQ ID NO: 64053 - DNA, 20 bp, Artificial Sequence
  Synthetic oligonucleotide; CTGAAT chr11 5153789 5153808 5153792 -
tttcaaagaacagctacttc

SEQ ID NO: 64054 - DNA, 20 bp, Artificial Sequence
  Synthetic oligonucleotide; AAGAAT chr11 5153698 5153717 5153701 -
ctttattgaagtgtctagga

SEQ ID NO: 64055 - DNA, 20 bp, Artificial Sequence
  Synthetic oligonucleotide; AAGAGT chr11 5153091 5153110 5153094 -
ttttaaactcacaacatttc

SEQ ID NO: 64056 - DNA, 20 bp, Artificial Sequence
  Synthetic oligonucleotide; CTGAAT chr11 5152944 5152963 5152947 -
agcattctctttacattatt

SEQ ID NO: 64057 - DNA, 20 bp, Artificial Sequence
  Synthetic oligonucleotide; TTGGGT chr11 5152915 5152934 5152918 -
aaaagaaatatattatgttc

SEQ ID NO: 64058 - DNA, 20 bp, Artificial Sequence
  Synthetic oligonucleotide; GGGAAT chr11 5152877 5152896 5152880 -
tacctctattctctttcatt

SEQ ID NO: 64059 - DNA, 20 bp, Artificial Sequence
  Synthetic oligonucleotide; CAGAGT chr11 5152850 5152869 5152853 -
ttttacaccaatgtactggt

SEQ ID NO: 64060 - DNA, 20 bp, Artificial Sequence
  Synthetic oligonucleotide; AGGAAT chr11 5152786 5152805 5152789 -
tggaaatagttaaatactag

SEQ ID NO: 64061 - DNA, 20 bp, Artificial Sequence
  Synthetic oligonucleotide; TTGGAT chr11 5152619 5152638 5152622 -
ttttgctggttctaatgtat

SEQ ID NO: 64062 - DNA, 20 bp, Artificial Sequence
  Synthetic oligonucleotide; GTGAAT chr11 5152576 5152595 5152579 -
cctattatggcacagtgcct

SEQ ID NO: 64063 - DNA, 20 bp, Artificial Sequence
  Synthetic oligonucleotide; ATGAAT chr11 5152541 5152560 5152544 -
gaaaacagtgatgtatctcc

SEQ ID NO: 64064 - DNA, 20 bp, Artificial Sequence
  Synthetic oligonucleotide; GTGAAT chr11 5152514 5152533 5152517 -
catcttttcctttcaaaact

SEQ ID NO: 64065 - DNA, 20 bp, Artificial Sequence
  Synthetic oligonucleotide; ATGGAT chr11 5152505 5152524 5152508 -
ctttcaaaactgtgaataag

SEQ ID NO: 64066 - DNA, 20 bp, Artificial Sequence
  Synthetic oligonucleotide; TAGAGT chr11 5152494 5152513 5152497 -
gtgaataagatggatgattt

SEQ ID NO: 64067 - DNA, 20 bp, Artificial Sequence
  Synthetic oligonucleotide; ATGAGT chr11 5152460 5152479 5152463 -
aatcagacagactcaatata

SEQ ID NO: 64068 - DNA, 20 bp, Artificial Sequence
  Synthetic oligonucleotide; AGGGAT chr11 5152320 5152339 5152323 -
ccctctgtgttgacactagt

SEQ ID NO: 64069 - DNA, 20 bp, Artificial Sequence
  Synthetic oligonucleotide; TAGAAT chr11 5152306 5152325 5152309 -
actagtagggatcccaggcc

SEQ ID NO: 64070 - DNA, 20 bp, Artificial Sequence
  Synthetic oligonucleotide; CTGGAT chr11 5152290 5152309 5152293 -
ggcctagaatctgtgcagtg

SEQ ID NO: 64071 - DNA, 20 bp, Artificial Sequence
  Synthetic oligonucleotide; TGGGAT chr11 5152284 5152303 5152287 -
gaatctgtgcagtgctggat

SEQ ID NO: 64072 - DNA, 20 bp, Artificial Sequence
  Synthetic oligonucleotide; TGGAAT chr11 5152119 5152138 5152122 -
agcattatgccaaagatgct

SEQ ID NO: 64073 - DNA, 20 bp, Artificial Sequence
  Synthetic oligonucleotide; CAGGGT chr11 5152043 5152062 5152046 -
tgtggttcatccacacattg

SEQ ID NO: 64074 - DNA, 20 bp, Artificial Sequence
  Synthetic oligonucleotide; TAGAGT chr11 5152036 5152055 5152039 -
catccacacattgcagggta

SEQ ID NO: 64075 - DNA, 20 bp, Artificial Sequence
  Synthetic oligonucleotide; CAGGAT chr11 5151742 5151761 5151745 -
gtttgtggccttcactgtag

SEQ ID NO: 64076 - DNA, 20 bp, Artificial Sequence
  Synthetic oligonucleotide; TTGGGT chr11 5151571 5151590 5151574 -
ctccttcttcacacataggt

SEQ ID NO: 64077 - DNA, 20 bp, Artificial Sequence
  Synthetic oligonucleotide; CTGGGT chr11 5151344 5151363 5151347 -
aaaacatattatttgagatg

SEQ ID NO: 64078 - DNA, 20 bp, Artificial Sequence
  Synthetic oligonucleotide; TGGGAT chr11 5151280 5151299 5151283 -
tcatggctcatatcaatcag

SEQ ID NO: 64079 - DNA, 20 bp, Artificial Sequence
  Synthetic oligonucleotide; GTGAAT chr11 5151273 5151292 5151276 -
tcatatcaatcagtgggatt

SEQ ID NO: 64080 - DNA, 20 bp, Artificial Sequence
  Synthetic oligonucleotide; ATGAGT chr11 5151235 5151254 5151238 -
atgaaagtgagaagtgtgaa

SEQ ID NO: 64081 - DNA, 20 bp, Artificial Sequence
  Synthetic oligonucleotide; GTGAAT chr11 5151223 5151242 5151226 -
agtgtgaaatgagtgaagta

SEQ ID NO: 64082 - DNA, 20 bp, Artificial Sequence
  Synthetic oligonucleotide; TTGAGT chr11 5151180 5151199 5151183 -
ttttattctttagcccctgg

SEQ ID NO: 64083 - DNA, 20 bp, Artificial Sequence
  Synthetic oligonucleotide; AAGAAT chr11 5151165 5151184 5151168 -
cctggttgagttattcttct

SEQ ID NO: 64084 - DNA, 20 bp, Artificial Sequence
  Synthetic oligonucleotide; GAGGAT chr11 5151149 5151168 5151152 -
ttctaagaatatttctccag

SEQ ID NO: 64085 - DNA, 20 bp, Artificial Sequence
  Synthetic oligonucleotide; CTGAAT chr11 5151122 5151141 5151125 -
tataaattatgcctttgtca

SEQ ID NO: 64086 - DNA, 20 bp, Artificial Sequence
  Synthetic oligonucleotide; ATGAAT chr11 5150969 5150988 5150972 -
ttcttgtcaaagaaaatctt

SEQ ID NO: 64087 - DNA, 20 bp, Artificial Sequence
  Synthetic oligonucleotide; CAGAGT chr11 5150924 5150943 5150927 -
taaaaatttaaatacatttt

SEQ ID NO: 64088 - DNA, 20 bp, Artificial Sequence
  Synthetic oligonucleotide; AGGAAT chr11 5150912 5150931 5150915 -
tacattttcagagtcataca

SEQ ID NO: 64089 - DNA, 20 bp, Artificial Sequence
  Synthetic oligonucleotide; CAGAAT chr11 5150768 5150787 5150771 -
atattaaaaatactatacta

SEQ ID NO: 64090 - DNA, 20 bp, Artificial Sequence
  Synthetic oligonucleotide; GTGAAT chr11 5150736 5150755 5150739 -
ataatagtaaatctggcaca

SEQ ID NO: 64091 - DNA, 20 bp, Artificial Sequence
  Synthetic oligonucleotide; ATGAGT chr11 5150723 5150742 5150726 -
tggcacagtgaataattctc

SEQ ID NO: 64092 - DNA, 20 bp, Artificial Sequence
  Synthetic oligonucleotide; GGGAAT chr11 5150669 5150688 5150672 -
gactgaaaggaagagaggtg

SEQ ID NO: 64093 - DNA, 20 bp, Artificial Sequence
  Synthetic oligonucleotide; TAGGAT chr11 5150621 5150640 5150624 -
agaaataacaagtgtacaca

SEQ ID NO: 64094 - DNA, 20 bp, Artificial Sequence
  Synthetic oligonucleotide; TGGAGT chr11 5150614 5150633 5150617 -
acaagtgtacacataggatg

SEQ ID NO: 64095 - DNA, 20 bp, Artificial Sequence
  Synthetic oligonucleotide; GAGAAT chr11 5150603 5150622 5150606 -
cataggatgtggagttcaga

SEQ ID NO: 64096 - DNA, 20 bp, Artificial Sequence
  Synthetic oligonucleotide; GGGAGT chr11 5150571 5150590 5150574 -
ttgaaatctaaccaaagcag

SEQ ID NO: 64097 - DNA, 20 bp, Artificial Sequence
  Synthetic oligonucleotide; AGGAAT chr11 5150515 5150534 5150518 -
gtagttacctctgattcttg

SEQ ID NO: 64098 - DNA, 20 bp, Artificial Sequence
  Synthetic oligonucleotide; ATGGAT chr11 5150508 5150527 5150511 -
cctctgattcttgaggaatg

SEQ ID NO: 64099 - DNA, 20 bp, Artificial Sequence
  Synthetic oligonucleotide; ATGAGT chr11 5150504 5150523 5150507 -
tgattcttgaggaatgatgg

SEQ ID NO: 64100 - DNA, 20 bp, Artificial Sequence
  Synthetic oligonucleotide; ATGAGT chr11 5150401 5150420 5150404 -
tctagttttttcaatatggt

SEQ ID NO: 64101 - DNA, 20 bp, Artificial Sequence
  Synthetic oligonucleotide; ATGAAT chr11 5150364 5150383 5150367 -
cttggggagacaaggaaaat

SEQ ID NO: 64102 - DNA, 20 bp, Artificial Sequence
  Synthetic oligonucleotide; CAGAGT chr11 5150333 5150352 5150336 -
aaatggctattaatgttgtg

SEQ ID NO: 64103 - DNA, 20 bp, Artificial Sequence
  Synthetic oligonucleotide; GAGAGT chr11 5150290 5150309 5150293 -
aaagctataatgtgccattg

SEQ ID NO: 64104 - DNA, 20 bp, Artificial Sequence
  Synthetic oligonucleotide; AAGAAT chr11 5150113 5150132 5150116 -
ttgtctaaaattagtggcat

SEQ ID NO: 64105 - DNA, 24 bp, Artificial Sequence
  Synthetic oligonucleotide; GTTAGATT chr11 5150555 5150578 5150575 +
aataaatgcaactcccctgctttg

SEQ ID NO: 64106 - DNA, 24 bp, Artificial Sequence
  Synthetic oligonucleotide; GCCAGATT chr11 5150715 5150738 5150735 +
aaactcatgagaattattcactgt

SEQ ID NO: 64107 - DNA, 24 bp, Artificial Sequence
  Synthetic oligonucleotide; TCACGATT chr11 5150733 5150756 5150753 +
cactgtgccagatttactattatg

SEQ ID NO: 64108 - DNA, 24 bp, Artificial Sequence
  Synthetic oligonucleotide; ATAAGATT chr11 5150943 5150966 5150963 +
aggctttattgtctcttgatattc

SEQ ID NO: 64109 - DNA, 24 bp, Artificial Sequence
  Synthetic oligonucleotide; CTTTGATT chr11 5150984 5151007 5151004 +
aagaacacagttaacatgtacttc

SEQ ID NO: 64110 - DNA, 24 bp, Artificial Sequence
  Synthetic oligonucleotide; CACTGATT chr11 5151254 5151277 5151274 +
ttagtcacgtagaattcacaatcc

SEQ ID NO: 64111 - DNA, 24 bp, Artificial Sequence
  Synthetic oligonucleotide; GGCAGATT chr11 5151300 5151323 5151320 +
tgatctaaaaccagctattgtgct

SEQ ID NO: 64112 - DNA, 24 bp, Artificial Sequence
  Synthetic oligonucleotide; GGTGGATT chr11 5151399 5151422 5151419 +
aaaaagcatgtaggcattaattaa

SEQ ID NO: 64113 - DNA, 24 bp, Artificial Sequence
  Synthetic oligonucleotide; AGTGGATT chr11 5151468 5151491 5151488 +
tgtgtggtctttgcaccatagaca

SEQ ID NO: 64114 - DNA, 24 bp, Artificial Sequence
  Synthetic oligonucleotide; CATAGATT chr11 5151742 5151765 5151762 +
ctacagtgaaggccacaaacaaac

SEQ ID NO: 64115 - DNA, 24 bp, Artificial Sequence
  Synthetic oligonucleotide; AATAGATT chr11 5152060 5152083 5152080 +
acatttgaagcaagcaggaatcaa

SEQ ID NO: 64116 - DNA, 24 bp, Artificial Sequence
  Synthetic oligonucleotide; CTCAGATT chr11 5152184 5152207 5152204 +
gtacaagggctcatggagactgcg

SEQ ID NO: 64117 - DNA, 24 bp, Artificial Sequence
  Synthetic oligonucleotide; CACAGATT chr11 5152271 5152294 5152291 +
gaatggaatcccaatccagcactg

SEQ ID NO: 64118 - DNA, 24 bp, Artificial Sequence
  Synthetic oligonucleotide; TTCTGATT chr11 5152414 5152437 5152434 +
cagtgttactgttcctcttctgct

SEQ ID NO: 64119 - DNA, 24 bp, Artificial Sequence
  Synthetic oligonucleotide; GTCTGATT chr11 5152448 5152471 5152468 +
ctccaaactcattatattgagtct

SEQ ID NO: 64120 - DNA, 24 bp, Artificial Sequence
  Synthetic oligonucleotide; GATGGATT chr11 5152506 5152529 5152526 +
ttattcacagttttgaaaggaaaa

SEQ ID NO: 64121 - DNA, 24 bp, Artificial Sequence
  Synthetic oligonucleotide; AGGGGATT chr11 5152625 5152648 5152645 +
tagaaccagcaaaatcacctggac

SEQ ID NO: 64122 - DNA, 24 bp, Artificial Sequence
  Synthetic oligonucleotide; AAAAGATT chr11 5152842 5152865 5152862 +
agactctgaccagtacattggtgt

SEQ ID NO: 64123 - DNA, 24 bp, Artificial Sequence
  Synthetic oligonucleotide; GACAGATT chr11 5153384 5153407 5153404 +
ttagtaaaaataaaaaagctaaag

SEQ ID NO: 64124 - DNA, 24 bp, Artificial Sequence
  Synthetic oligonucleotide; TGATGATT chr11 5153509 5153532 5153529 +
aatttagtcacttttcaatttcac

SEQ ID NO: 64125 - DNA, 24 bp, Artificial Sequence
  Synthetic oligonucleotide; CTTTGATT chr11 5154014 5154037 5154034 +
gtaaactagtaggtcaattaaata

SEQ ID NO: 64126 - DNA, 24 bp, Artificial Sequence
  Synthetic oligonucleotide; CACAGATT chr11 5154024 5154047 5154044 +
aggtcaattaaatactttgatttc

SEQ ID NO: 64127 - DNA, 24 bp, Artificial Sequence
  Synthetic oligonucleotide; GAGTGATT chr11 5154266 5154289 5154286 +
tgtaagttcctggttagttggata

SEQ ID NO: 64128 - DNA, 24 bp, Artificial Sequence
  Synthetic oligonucleotide; CAAGGATT chr11 5154437 5154460 5154457 +
catcactcaccaatttttcttctc

SEQ ID NO: 64129 - DNA, 24 bp, Artificial Sequence
  Synthetic oligonucleotide; GAGGGATT chr11 5154829 5154852 5154849 +
taggaggagttatgagcatgaaat

SEQ ID NO: 64130 - DNA, 24 bp, Artificial Sequence
  Synthetic oligonucleotide; ATGGGATT chr11 5155525 5155548 5155545 +
tcttacctttaaattattagtaaa

SEQ ID NO: 64131 - DNA, 24 bp, Artificial Sequence
  Synthetic oligonucleotide; AATGGATT chr11 5155722 5155745 5155742 +
atactaatggtggagaatatttat

SEQ ID NO: 64132 - DNA, 24 bp, Artificial Sequence
  Synthetic oligonucleotide; AATTGATT chr11 5155839 5155862 5155859 +
atagtactgttgcatgttgaatga

SEQ ID NO: 64133 - DNA, 24 bp, Artificial Sequence
  Synthetic oligonucleotide; TACTGATT chr11 5155947 5155970 5155967 +
atttggtttcttcctcttctctta

SEQ ID NO: 64134 - DNA, 24 bp, Artificial Sequence
  Synthetic oligonucleotide; CCCAGATT chr11 5156095 5156118 5156115 +
taactcctataacaatatttccag

SEQ ID NO: 64135 - DNA, 24 bp, Artificial Sequence
  Synthetic oligonucleotide; TCTGGATT chr11 5156273 5156296 5156293 +
tttacatatgcatcaataactatc

SEQ ID NO: 64136 - DNA, 24 bp, Artificial Sequence
  Synthetic oligonucleotide; AAGCGATT chr11 5156769 5156792 5156789 +
gcaacctccgcccccaccaggttc

SEQ ID NO: 64137 - DNA, 24 bp, Artificial Sequence
  Synthetic oligonucleotide; GTGGGATT chr11 5156801 5156824 5156821 +
ctcctgcccaagcctcccaagtag

SEQ ID NO: 64138 - DNA, 24 bp, Artificial Sequence
  Synthetic oligonucleotide; CTGAGATT chr11 5156935 5156958 5156955 +
cacctgccttggcctcccaaagtg

SEQ ID NO: 64139 - DNA, 24 bp, Artificial Sequence
  Synthetic oligonucleotide; GCTTGATT chr11 5157134 5157157 5157154 +
gagagagagtgggagggttttttt

SEQ ID NO: 64140 - DNA, 24 bp, Artificial Sequence
  Synthetic oligonucleotide; AGTTGATT chr11 5157423 5157446 5157443 +
catttatctgttgacgaatacatc

SEQ ID NO: 64141 - DNA, 24 bp, Artificial Sequence
  Synthetic oligonucleotide; TTTTGATT chr11 5157732 5157755 5157752 +
aggtgagatgatatcacattgtgg

SEQ ID NO: 64142 - DNA, 24 bp, Artificial Sequence
  Synthetic oligonucleotide; TGGTGATT chr11 5157744 5157767 5157764 +
atcacattgtggttttgatttatc

SEQ ID NO: 64143 - DNA, 24 bp, Artificial Sequence
  Synthetic oligonucleotide; ATTGGATT chr11 5158123 5158146 5158143 +
tccagtagtttcataatttcaggt

SEQ ID NO: 64144 - DNA, 24 bp, Artificial Sequence
  Synthetic oligonucleotide; TCTTGATT chr11 5158146 5158169 5158166 +
tattggattcaagtctttaatcca

SEQ ID NO: 64145 - DNA, 24 bp, Artificial Sequence
  Synthetic oligonucleotide; ATTTGATT chr11 5158151 5158174 5158171 +
gattcaagtctttaatccatcttg

SEQ ID NO: 64146 - DNA, 24 bp, Artificial Sequence
  Synthetic oligonucleotide; GTCCGATT chr11 5158182 5158205 5158202 +
ttttgtatatagtgagagataggg

SEQ ID NO: 64147 - DNA, 24 bp, Artificial Sequence
  Synthetic oligonucleotide; AAGCGATT chr11 5158354 5158377 5158374 +
ctgcaacttctgcctcccaggttc

SEQ ID NO: 64148 - DNA, 24 bp, Artificial Sequence
  Synthetic oligonucleotide; CTGGGATT chr11 5158386 5158409 5158406 +
ctcctgcctcagcctcctgagtat

SEQ ID NO: 64149 - DNA, 24 bp, Artificial Sequence
  Synthetic oligonucleotide; CTGGGATT chr11 5158519 5158542 5158539 +
cccccacctcagcctcacaaagtg

SEQ ID NO: 64150 - DNA, 24 bp, Artificial Sequence
  Synthetic oligonucleotide; CCTGGATT chr11 5158613 5158636 5158633 +
taaagatgacttggttgttaagtg

SEQ ID NO: 64151 - DNA, 24 bp, Artificial Sequence
  Synthetic oligonucleotide; AGTAGATT chr11 5158705 5158728 5158725 +
gctgtttggctactgtagctttgt

SEQ ID NO: 64152 - DNA, 24 bp, Artificial Sequence
  Synthetic oligonucleotide; TCAGGATT chr11 5158756 5158779 5158776 +
tagctttggttttgttctttttgc

SEQ ID NO: 64153 - DNA, 24 bp, Artificial Sequence
  Synthetic oligonucleotide; TTAGGATT chr11 5158804 5158827 5158824 +
atcttttgtggttccatataaata

SEQ ID NO: 64154 - DNA, 24 bp, Artificial Sequence
  Synthetic oligonucleotide; GTTAGATT chr11 5159015 5159038 5159035 +
ttatagagatcttttacttcttgg

SEQ ID NO: 64155 - DNA, 24 bp, Artificial Sequence
  Synthetic oligonucleotide; ATAAGATT chr11 5159060 5159083 5159080 +
tttatatttttattgctattgtaa

SEQ ID NO: 64156 - DNA, 24 bp, Artificial Sequence
  Synthetic oligonucleotide; TATTGATT chr11 5159072 5159095 5159092 +
ttgctattgtaaataagattgttt

SEQ ID NO: 64157 - DNA, 24 bp, Artificial Sequence
  Synthetic oligonucleotide; TGCAGATT chr11 5159085 5159108 5159105 +
taagattgttttattgattttttt

SEQ ID NO: 64158 - DNA, 24 bp, Artificial Sequence
  Synthetic oligonucleotide; TACTGATT chr11 5159117 5159140 5159137 +
gataactttttatatatgaaatgc

SEQ ID NO: 64159 - DNA, 24 bp, Artificial Sequence
  Synthetic oligonucleotide; TATTGATT chr11 5159154 5159177 5159174 +
tttttatttcatatcctgtaactt

SEQ ID NO: 64160 - DNA, 24 bp, Artificial Sequence
  Synthetic oligonucleotide; GTACGATT chr11 5159602 5159625 5159622 +
tgtttgtttgtttgaggaatttga

SEQ ID NO: 64161 - DNA, 24 bp, Artificial Sequence
  Synthetic oligonucleotide; TCTAGATT chr11 5159785 5159808 5159805 +
gtgtccaggaatttatccatttat

SEQ ID NO: 64162 - DNA, 24 bp, Artificial Sequence
  Synthetic oligonucleotide; TGTTGATT chr11 5159918 5159941 5159938 +
tttgactcttttttcttaaagttt

SEQ ID NO: 64163 - DNA, 24 bp, Artificial Sequence
  Synthetic oligonucleotide; TAATGATT chr11 5159961 5159984 5159981 +
tccaagaaagcaactgtttgtttt

SEQ ID NO: 64164 - DNA, 24 bp, Artificial Sequence
  Synthetic oligonucleotide; ATAAGATT chr11 5160403 5160426 5160423 +
gggagataggagtggggctgtttt

SEQ ID NO: 64165 - DNA, 24 bp, Artificial Sequence
  Synthetic oligonucleotide; GCGGGATT chr11 5160805 5160828 5160825 +
cgatatttctcagggctgcttcga

SEQ ID NO: 64166 - DNA, 24 bp, Artificial Sequence
  Synthetic oligonucleotide; GAGAGATT chr11 5160839 5160862 5160859 +
gggcggcgtgggaacctagagtgg

SEQ ID NO: 64167 - DNA, 24 bp, Artificial Sequence
  Synthetic oligonucleotide; GGAAGATT chr11 5160855 5160878 5160875 +
tagagtgggagagattaagctgaa

SEQ ID NO: 64168 - DNA, 24 bp, Artificial Sequence
  Synthetic oligonucleotide; TATGGATT chr11 5160947 5160970 5160967 +
ggtgatggcctggatacggttttg

SEQ ID NO: 64169 - DNA, 24 bp, Artificial Sequence
  Synthetic oligonucleotide; ATCTGATT chr11 5161026 5161049 5161046 +
ctaagaagtgggaggacctaggac

SEQ ID NO: 64170 - DNA, 24 bp, Artificial Sequence
  Synthetic oligonucleotide; AGGAGATT chr11 5161046 5161069 5161066 +
ggacatctgattaaagagtgccta

SEQ ID NO: 64171 - DNA, 24 bp, Artificial Sequence
  Synthetic oligonucleotide; CAAAGATT chr11 5161071 5161094 5161091 +
ggagattcaacatagtcctgccag

SEQ ID NO: 64172 - DNA, 24 bp, Artificial Sequence
  Synthetic oligonucleotide; GGCTGATT chr11 5161550 5161573 5161570 +
tactaagagcctgaaaaactgctt

SEQ ID NO: 64173 - DNA, 24 bp, Artificial Sequence
  Synthetic oligonucleotide; GATAGATT chr11 5161882 5161905 5161902 +
acactgagaagttatttctttgag

SEQ ID NO: 64174 - DNA, 24 bp, Artificial Sequence
  Synthetic oligonucleotide; GCCGGATT chr11 5162135 5162158 5162155 +
gtggtatcaggaataatgtgggag

SEQ ID NO: 64175 - DNA, 24 bp, Artificial Sequence
  Synthetic oligonucleotide; AATAGATT chr11 5162247 5162270 5162267 +
atatgcatcaggtatgaggaagaa

SEQ ID NO: 64176 - DNA, 24 bp, Artificial Sequence
  Synthetic oligonucleotide; TTGTGATT chr11 5162296 5162319 5162316 +
tgtgaagagtgagctaagcatagt

SEQ ID NO: 64177 - DNA, 24 bp, Artificial Sequence
  Synthetic oligonucleotide; AAGGGATT chr11 5162485 5162508 5162505 +
aggaaaggagttgttgttttgtag

SEQ ID NO: 64178 - DNA, 24 bp, Artificial Sequence
  Synthetic oligonucleotide; GGGAGATT chr11 5162500 5162523 5162520 +
gttttgtagaagggattgaggttt

SEQ ID NO: 64179 - DNA, 24 bp, Artificial Sequence
  Synthetic oligonucleotide; TGCAGATT chr11 5162849 5162872 5162869 +
ggcaaaacaatttggttgataaga

SEQ ID NO: 64180 - DNA, 24 bp, Artificial Sequence
  Synthetic oligonucleotide; GAGTGATT chr11 5163023 5163046 5163043 +
ggatactggcattgagcggggtaa

SEQ ID NO: 64181 - DNA, 24 bp, Artificial Sequence
  Synthetic oligonucleotide; TGTGGATT chr11 5163098 5163121 5163118 +
gaggaagtagaggtgtcttatact

SEQ ID NO: 64182 - DNA, 24 bp, Artificial Sequence
  Synthetic oligonucleotide; TACTGATT chr11 5163416 5163439 5163436 +
gtaatgtggagtgggtagcctcca

SEQ ID NO: 64183 - DNA, 24 bp, Artificial Sequence
  Synthetic oligonucleotide; GTCCGATT chr11 5163621 5163644 5163641 +
agtggctgccaggtgagttgaaca

SEQ ID NO: 64184 - DNA, 24 bp, Artificial Sequence
  Synthetic oligonucleotide; GCCAGATT chr11 5163702 5163725 5163722 +
ctgcgggcattccttggcctggtg

SEQ ID NO: 64185 - DNA, 24 bp, Artificial Sequence
  Synthetic oligonucleotide; AGCAGATT chr11 5163974 5163997 5163994 +
tttggagttttatttaatgtcagg

SEQ ID NO: 64186 - DNA, 24 bp, Artificial Sequence
  Synthetic oligonucleotide; CTCTGATT chr11 5164119 5164142 5164139 +
atatttgatgaaagagcctaaacg

SEQ ID NO: 64187 - DNA, 24 bp, Artificial Sequence
  Synthetic oligonucleotide; AAAAGATT chr11 5164280 5164303 5164300 +
cgggtgtgaggaggggaggtgata

SEQ ID NO: 64188 - DNA, 24 bp, Artificial Sequence
  Synthetic oligonucleotide; GGAAGATT chr11 5164312 5164335 5164332 +
acagggtggaggagctgaggctga

SEQ ID NO: 64189 - DNA, 24 bp, Artificial Sequence
  Synthetic oligonucleotide; GGAAGATT chr11 5164390 5164413 5164410 +
gacgtcagatgggtctgtagaaaa

SEQ ID NO: 64190 - DNA, 24 bp, Artificial Sequence
  Synthetic oligonucleotide; GGAAGATT chr11 5164455 5164478 5164475 +
aggggacaggcgggagggaaagaa

SEQ ID NO: 64191 - DNA, 24 bp, Artificial Sequence
  Synthetic oligonucleotide; AAGGGATT chr11 5165045 5165068 5165065 +
gataagaggtcggggtgcagaaat

SEQ ID NO: 64192 - DNA, 24 bp, Artificial Sequence
  Synthetic oligonucleotide; AAGGGATT chr11 5165128 5165151 5165148 +
gataagaggttggggcacagaaat

SEQ ID NO: 64193 - DNA, 24 bp, Artificial Sequence
  Synthetic oligonucleotide; GTGGGATT chr11 5165217 5165240 5165237 +
gggtacttacccccctccagaaaa

SEQ ID NO: 64194 - DNA, 24 bp, Artificial Sequence
  Synthetic oligonucleotide; CAATGATT chr11 5165313 5165336 5165333 +
ttaataatcagagaggtgtccctg

SEQ ID NO: 64195 - DNA, 24 bp, Artificial Sequence
  Synthetic oligonucleotide; CCAAGATT chr11 5165460 5165483 5165480 +
gaagggagaaattgaagtgtggtg

SEQ ID NO: 64196 - DNA, 24 bp, Artificial Sequence
  Synthetic oligonucleotide; ACCGGATT chr11 5165532 5165555 5165552 +
gaagacagtaaaaagaggccactt

SEQ ID NO: 64197 - DNA, 24 bp, Artificial Sequence
  Synthetic oligonucleotide; AGGGGATT chr11 5165629 5165652 5165649 +
tcacggagcaaagagcaggaggac

SEQ ID NO: 64198 - DNA, 24 bp, Artificial Sequence
  Synthetic oligonucleotide; ATAAGATT chr11 5165814 5165837 5165834 +
gggagataggagtggggctgtttt

SEQ ID NO: 64199 - DNA, 24 bp, Artificial Sequence
  Synthetic oligonucleotide; GTTTGATT chr11 5166108 5166131 5166128 +
aggcctgacattcaggagcatact

SEQ ID NO: 64200 - DNA, 24 bp, Artificial Sequence
  Synthetic oligonucleotide; TGTTGATT chr11 5166383 5166406 5166403 +
ggtacattaactgtgttgttcatt

SEQ ID NO: 64201 - DNA, 24 bp, Artificial Sequence
  Synthetic oligonucleotide; ATCTGATT chr11 5166629 5166652 5166649 +
gtttttaaatttgtagtctatttt

SEQ ID NO: 64202 - DNA, 24 bp, Artificial Sequence
  Synthetic oligonucleotide; TAAGGATT chr11 5166840 5166863 5166860 +
tttacactcagtgtagttactaag

SEQ ID NO: 64203 - DNA, 24 bp, Artificial Sequence
  Synthetic oligonucleotide; ATGTGATT chr11 5166930 5166953 5166950 +
cttccttttttttccttcatggtt

SEQ ID NO: 64204 - DNA, 24 bp, Artificial Sequence
  Synthetic oligonucleotide; TATAGATT chr11 5166989 5167012 5167009 +
actttttatttttagtaaatctat

SEQ ID NO: 64205 - DNA, 24 bp, Artificial Sequence
  Synthetic oligonucleotide; GAAAGATT chr11 5167232 5167255 5167252 +
gttgctatagctattactgttttt

SEQ ID NO: 64206 - DNA, 24 bp, Artificial Sequence
  Synthetic oligonucleotide; TGTGGATT chr11 5167269 5167292 5167289 +
tttgggtttcatactggagttctg

SEQ ID NO: 64207 - DNA, 24 bp, Artificial Sequence
  Synthetic oligonucleotide; TTCAGATT chr11 5167389 5167412 5167409 +
tttgcatgttaatgtcttttttct

SEQ ID NO: 64208 - DNA, 24 bp, Artificial Sequence
  Synthetic oligonucleotide; GTGTGATT chr11 5167589 5167612 5167609 +
tttcattcgactctctcttggact

SEQ ID NO: 64209 - DNA, 24 bp, Artificial Sequence
  Synthetic oligonucleotide; ACAGGATT chr11 5167618 5167641 5167638 +
atttctattgagatgtttgttgtc

SEQ ID NO: 64210 - DNA, 24 bp, Artificial Sequence
  Synthetic oligonucleotide; TTCAGATT chr11 5168056 5168079 5168076 +
ggtttacagaattgcttggtgttc

SEQ ID NO: 64211 - DNA, 24 bp, Artificial Sequence
  Synthetic oligonucleotide; GTTGGATT chr11 5168140 5168163 5168160 +
gtgggctaaagaatcaggttttta

SEQ ID NO: 64212 - DNA, 24 bp, Artificial Sequence
  Synthetic oligonucleotide; TTGTGATT chr11 5168161 5168184 5168181 +
ttagttggattgtctggttttgag

SEQ ID NO: 64213 - DNA, 24 bp, Artificial Sequence
  Synthetic oligonucleotide; CGTGGATT chr11 5168280 5168303 5168300 +
gataatttcttcatatatttgttc

SEQ ID NO: 64214 - DNA, 24 bp, Artificial Sequence
  Synthetic oligonucleotide; GTCAGATT chr11 5168442 5168465 5168462 +
ttgactgtgtattcacgtattgta

SEQ ID NO: 64215 - DNA, 24 bp, Artificial Sequence
  Synthetic oligonucleotide; GCTGGATT chr11 5168563 5168586 5168583 +
catttaatcttcaagatcataaaa

SEQ ID NO: 64216 - DNA, 24 bp, Artificial Sequence
  Synthetic oligonucleotide; CTAAGATT chr11 5168660 5168683 5168680 +
ccacaattactaatagcaagatag

SEQ ID NO: 64217 - DNA, 24 bp, Artificial Sequence
  Synthetic oligonucleotide; GAGGGATT chr11 5169181 5169204 5169201 +
agttgggctctgcaatccctgtct

SEQ ID NO: 64218 - DNA, 24 bp, Artificial Sequence
  Synthetic oligonucleotide; GAGTGATT chr11 5169247 5169270 5169267 +
tttgtcagaagcttgtctactacc

SEQ ID NO: 64219 - DNA, 24 bp, Artificial Sequence
  Synthetic oligonucleotide; TTAAGATT chr11 5169455 5169478 5169475 +
ctctgcttcatggtgcatattcaa

SEQ ID NO: 64220 - DNA, 24 bp, Artificial Sequence
  Synthetic oligonucleotide; TTCTGATT chr11 5169870 5169893 5169890 +
tatatccatcagaggtaagcaggg

SEQ ID NO: 64221 - DNA, 24 bp, Artificial Sequence
  Synthetic oligonucleotide; TCCTGATT chr11 5169950 5169973 5169970 +
taatacaatatgtactcttttgtg

SEQ ID NO: 64222 - DNA, 24 bp, Artificial Sequence
  Synthetic oligonucleotide; CAAGGATT chr11 5170067 5170090 5170087 +
ccaaatgtcactgaattgagtatt

SEQ ID NO: 64223 - DNA, 24 bp, Artificial Sequence
  Synthetic oligonucleotide; CTTTGATT chr11 5170380 5170403 5170400 +
taagaacaacgctgttgcgaattt

SEQ ID NO: 64224 - DNA, 24 bp, Artificial Sequence
  Synthetic oligonucleotide; GACAGATT chr11 5171583 5171606 5171603 +
aacagttaaaataagcatagagat

SEQ ID NO: 64225 - DNA, 24 bp, Artificial Sequence
  Synthetic oligonucleotide; TTGGGATT chr11 5171718 5171741 5171738 +
ctaacatttaattgacgtgtaatc

SEQ ID NO: 64226 - DNA, 24 bp, Artificial Sequence
  Synthetic oligonucleotide; AGTTGATT chr11 5171733 5171756 5171753 +
cgtgtaatcttgggattatattaa

SEQ ID NO: 64227 - DNA, 24 bp, Artificial Sequence
  Synthetic oligonucleotide; CATAGATT chr11 5171971 5171994 5171991 +
ttcactctttctccacctgctatc

SEQ ID NO: 64228 - DNA, 24 bp, Artificial Sequence
  Synthetic oligonucleotide; CCCTGATT chr11 5172316 5172339 5172336 +
aataaatatttccaaataaaaatg

SEQ ID NO: 64229 - DNA, 24 bp, Artificial Sequence
  Synthetic oligonucleotide; TACCGATT chr11 5172333 5172356 5172353 +
aaaaatgccctgatttttaccagt

SEQ ID NO: 64230 - DNA, 24 bp, Artificial Sequence
  Synthetic oligonucleotide; GAATGATT chr11 5172634 5172657 5172654 +
agttgactggaggacatagagaca

SEQ ID NO: 64231 - DNA, 24 bp, Artificial Sequence
  Synthetic oligonucleotide; TAGAGATT chr11 5173118 5173141 5173138 +
gataaagacaggtaataatagtgt

SEQ ID NO: 64232 - DNA, 24 bp, Artificial Sequence
  Synthetic oligonucleotide; TCTTGATT chr11 5173125 5173148 5173145 +
acaggtaataatagtgttagagat

SEQ ID NO: 64233 - DNA, 24 bp, Artificial Sequence
  Synthetic oligonucleotide; GAGGGATT chr11 5173251 5173274 5173271 +
caagggttggtctccaagcatgat

SEQ ID NO: 64234 - DNA, 24 bp, Artificial Sequence
  Synthetic oligonucleotide; TAAGGATT chr11 5173445 5173468 5173465 +
atgctaactttgtattctttcaaa

SEQ ID NO: 64235 - DNA, 24 bp, Artificial Sequence
  Synthetic oligonucleotide; CTTTGATT chr11 5173544 5173567 5173564 +
gaagcatgggtaaatcttcatgaa

SEQ ID NO: 64236 - DNA, 24 bp, Artificial Sequence
  Synthetic oligonucleotide; AATAGATT chr11 5173556 5173579 5173576 +
aatcttcatgaactttgattttac

SEQ ID NO: 64237 - DNA, 24 bp, Artificial Sequence
  Synthetic oligonucleotide; ATTGGATT chr11 5173611 5173634 5173631 +
gagtaacaaaaaataaatacataa

SEQ ID NO: 64238 - DNA, 24 bp, Artificial Sequence
  Synthetic oligonucleotide; TAAAGATT chr11 5174102 5174125 5174122 +
ctaggtatatattaaaaatatata

SEQ ID NO: 64239 - DNA, 24 bp, Artificial Sequence
  Synthetic oligonucleotide; GACTGATT chr11 5174584 5174607 5174604 +
tatttatatgaattatctaaaata

SEQ ID NO: 64240 - DNA, 24 bp, Artificial Sequence
  Synthetic oligonucleotide; AGTAGATT chr11 5174605 5174628 5174625 +
atagactgatttagagaaacatat

SEQ ID NO: 64241 - DNA, 24 bp, Artificial Sequence
  Synthetic oligonucleotide; TTTTGATT chr11 5174867 5174890 5174887 +
aatttaaaacaagacaaattttta

SEQ ID NO: 64242 - DNA, 24 bp, Artificial Sequence
  Synthetic oligonucleotide; CTGGGATT chr11 5175159 5175182 5175179 +
ctcctgcctcagcctcccatgtag

SEQ ID NO: 64243 - DNA, 24 bp, Artificial Sequence
  Synthetic oligonucleotide; TATTGATT chr11 5175265 5175288 5175285 +
ggttcttgcagttgcataaaacat

SEQ ID NO: 64244 - DNA, 24 bp, Artificial Sequence
  Synthetic oligonucleotide; CCCAGATT chr11 5175389 5175412 5175409 +
aaagatgtaaataaagaaatacac

SEQ ID NO: 64245 - DNA, 24 bp, Artificial Sequence
  Synthetic oligonucleotide; GCTTGATT chr11 5175436 5175459 5175456 +
ttctccccccgaaatcaaaatttt

SEQ ID NO: 64246 - DNA, 24 bp, Artificial Sequence
  Synthetic oligonucleotide; GAAGGATT chr11 5175799 5175822 5175819 +
tccctttccctttcccttcctgct

SEQ ID NO: 64247 - DNA, 24 bp, Artificial Sequence
  Synthetic oligonucleotide; TAGAGATT chr11 5175948 5175971 5175968 +
tgagtgctcaactgaaagtttatt

SEQ ID NO: 64248 - DNA, 24 bp, Artificial Sequence
  Synthetic oligonucleotide; ATATGATT chr11 5176035 5176058 5176055 +
gttactgtgtagctatatatgtat

SEQ ID NO: 64249 - DNA, 24 bp, Artificial Sequence
  Synthetic oligonucleotide; ATTAGATT chr11 5176398 5176421 5176418 +
tgtagtactagcagaaacaaatta

SEQ ID NO: 64250 - DNA, 24 bp, Artificial Sequence
  Synthetic oligonucleotide; AGTAGATT chr11 5176680 5176703 5176700 +
aaagctaagcataagccaagcatg

SEQ ID NO: 64251 - DNA, 24 bp, Artificial Sequence
  Synthetic oligonucleotide; CTCAGATT chr11 5176708 5176731 5176728 +
gatttcaagtgtttaagatagtac

SEQ ID NO: 64252 - DNA, 24 bp, Artificial Sequence
  Synthetic oligonucleotide; GAGAGATT chr11 5176804 5176827 5176824 +
gcattgttctaggcttttaagaag

SEQ ID NO: 64253 - DNA, 24 bp, Artificial Sequence
  Synthetic oligonucleotide; AAGGGATT chr11 5176833 5176856 5176853 +
attgtaaaaatttgtattgatgtg

SEQ ID NO: 64254 - DNA, 24 bp, Artificial Sequence
  Synthetic oligonucleotide; CTGGGATT chr11 5176882 5176905 5176902 +
taatatcatagataattacttttg

SEQ ID NO: 64255 - DNA, 24 bp, Artificial Sequence
  Synthetic oligonucleotide; ATCAGATT chr11 5177093 5177116 5177113 +
tctccactatagggggaaatgtgt

SEQ ID NO: 64256 - DNA, 24 bp, Artificial Sequence
  Synthetic oligonucleotide; TCTGGATT chr11 5177439 5177462 5177459 +
ctagctctacgtaggaaaagtcaa

SEQ ID NO: 64257 - DNA, 24 bp, Artificial Sequence
  Synthetic oligonucleotide; TCTCGATT chr11 5177471 5177494 5177491 +
aaaccctaaaatatatttctcttt

SEQ ID NO: 64258 - DNA, 24 bp, Artificial Sequence
  Synthetic oligonucleotide; TGAGGATT chr11 5177636 5177659 5177656 +
agacaccatcattttaagtgtgtt

SEQ ID NO: 64259 - DNA, 24 bp, Artificial Sequence
  Synthetic oligonucleotide; TATGGATT chr11 5177646 5177669 5177666 +
attttaagtgtgtttgaggatttc

SEQ ID NO: 64260 - DNA, 24 bp, Artificial Sequence
  Synthetic oligonucleotide; AGCAGATT chr11 5178290 5178313 5178310 +
gtcaaatgccattgccaggagaat

SEQ ID NO: 64261 - DNA, 24 bp, Artificial Sequence
  Synthetic oligonucleotide; CTGGGATT chr11 5178574 5178597 5178594 +
tccaggtatgcaagccttccagcc

SEQ ID NO: 64262 - DNA, 24 bp, Artificial Sequence
  Synthetic oligonucleotide; GTGTGATT chr11 5178615 5178638 5178635 +
acataccacacatcctgggaatta

SEQ ID NO: 64263 - DNA, 24 bp, Artificial Sequence
  Synthetic oligonucleotide; TGAGGATT chr11 5178690 5178713 5178710 +
gccattagtgaaagactacaaagt

SEQ ID NO: 64264 - DNA, 24 bp, Artificial Sequence
  Synthetic oligonucleotide; ATCAGATT chr11 5178730 5178753 5178750 +
ctaccttaggctgaatgaggtctc

SEQ ID NO: 64265 - DNA, 24 bp, Artificial Sequence
  Synthetic oligonucleotide; ACTGGATT chr11 5179020 5179043 5179040 +
tttcagcctcttaccctaggccct

SEQ ID NO: 64266 - DNA, 24 bp, Artificial Sequence
  Synthetic oligonucleotide; AATAGATT chr11 5179212 5179235 5179232 +
atgggagggaattaagtctgacaa

SEQ ID NO: 64267 - DNA, 24 bp, Artificial Sequence
  Synthetic oligonucleotide; CATTGATT chr11 5179251 5179274 5179271 +
atatagcatgtatgccttcttcca

SEQ ID NO: 64268 - DNA, 24 bp, Artificial Sequence
  Synthetic oligonucleotide; CACTGATT chr11 5179764 5179787 5179784 +
tattttgtttctttccacttcagt

SEQ ID NO: 64269 - DNA, 24 bp, Artificial Sequence
  Synthetic oligonucleotide; GCATGATT chr11 5180284 5180307 5180304 +
acgtgtgcatgtgtctttatagca

SEQ ID NO: 64270 - DNA, 24 bp, Artificial Sequence
  Synthetic oligonucleotide; TTTTGATT chr11 5180523 5180546 5180543 +
gtgtgagatgatatctcattgtgg

SEQ ID NO: 64271 - DNA, 24 bp, Artificial Sequence
  Synthetic oligonucleotide; TGTAGATT chr11 5180682 5180705 5180702 +
tcttgtaaatttgtttgagttcat

SEQ ID NO: 64272 - DNA, 24 bp, Artificial Sequence
  Synthetic oligonucleotide; AGTAGATT chr11 5180715 5180738 5180735 +
tggatattagccctttgtcagatg

SEQ ID NO: 64273 - DNA, 24 bp, Artificial Sequence
  Synthetic oligonucleotide; TTAGGATT chr11 5181260 5181283 5181280 +
tgcctctagctttgttcttttggc

SEQ ID NO: 64274 - DNA, 24 bp, Artificial Sequence
  Synthetic oligonucleotide; TATTGATT chr11 5181410 5181433 5181430 +
tgggcagtaaggccattttcacga

SEQ ID NO: 64275 - DNA, 24 bp, Artificial Sequence
  Synthetic oligonucleotide; GTTGGATT chr11 5181527 5181550 5181547 +
agaggtccttcacatcccttgtaa

SEQ ID NO: 64276 - DNA, 24 bp, Artificial Sequence
  Synthetic oligonucleotide; TCATGATT chr11 5181581 5181604 5181601 +
aggcaattgtgaatgggagttcac

SEQ ID NO: 64277 - DNA, 24 bp, Artificial Sequence
  Synthetic oligonucleotide; TTGTGATT chr11 5181627 5181650 5181647 +
tctgttattggtgtataggaatgc

SEQ ID NO: 64278 - DNA, 24 bp, Artificial Sequence
  Synthetic oligonucleotide; CATTGATT chr11 5181641 5181664 5181661 +
ataggaatgcttgtgatttttgca

SEQ ID NO: 64279 - DNA, 24 bp, Artificial Sequence
  Synthetic oligonucleotide; AGGAGATT chr11 5181688 5181711 5181708 +
tttctgaagttgcttatcagctta

SEQ ID NO: 64280 - DNA, 24 bp, Artificial Sequence
  Synthetic oligonucleotide; GCCTGATT chr11 5181803 5181826 5181823 +
gaatgccctttatttctttctctt

SEQ ID NO: 64281 - DNA, 24 bp, Artificial Sequence
  Synthetic oligonucleotide; GCTGGATT chr11 5182091 5182114 5182111 +
ttgtgtctttggttctgtttatat

SEQ ID NO: 64282 - DNA, 24 bp, Artificial Sequence
  Synthetic oligonucleotide; TATTGATT chr11 5182104 5182127 5182124 +
tctgtttatatgctggattatgtt

SEQ ID NO: 64283 - DNA, 24 bp, Artificial Sequence
  Synthetic oligonucleotide; CCTGGATT chr11 5182187 5182210 5182207 +
ggtggataagctttttgatgtgct

SEQ ID NO: 64284 - DNA, 24 bp, Artificial Sequence
  Synthetic oligonucleotide; TGAGGATT chr11 5182214 5182237 5182234 +
ggatttggtttgccagtattttac

SEQ ID NO: 64285 - DNA, 24 bp, Artificial Sequence
  Synthetic oligonucleotide; GGAGGATT chr11 5182328 5182351 5182348 +
tgctggcctcataaaatgagttag

SEQ ID NO: 64286 - DNA, 24 bp, Artificial Sequence
  Synthetic oligonucleotide; TATTGATT chr11 5182347 5182370 5182367 +
gttagggaggattccctctttttc

SEQ ID NO: 64287 - DNA, 24 bp, Artificial Sequence
  Synthetic oligonucleotide; TGCTGATT chr11 5182497 5182520 5182517 +
taaaatactttacagacaagcaat

SEQ ID NO: 64288 - DNA, 24 bp, Artificial Sequence
  Synthetic oligonucleotide; CCCAGATT chr11 5183033 5183056 5183053 +
atatatgcacccaatacagcagca

SEQ ID NO: 64289 - DNA, 24 bp, Artificial Sequence
  Synthetic oligonucleotide; TCAGGATT chr11 5183377 5183400 5183397 +
accacagtgcaatcaaactagaac

SEQ ID NO: 64290 - DNA, 24 bp, Artificial Sequence
  Synthetic oligonucleotide; AGGAGATT chr11 5183710 5183733 5183730 +
taagtaagatcagagcagaagtga

SEQ ID NO: 64291 - DNA, 24 bp, Artificial Sequence
  Synthetic oligonucleotide; ATAAGATT chr11 5184217 5184240 5184237 +
agcaagtttaatattgagtggaaa

SEQ ID NO: 64292 - DNA, 24 bp, Artificial Sequence
  Synthetic oligonucleotide; GATAGATT chr11 5184261 5184284 5184281 +
accagggtaggtgacatatacaga

SEQ ID NO: 64293 - DNA, 24 bp, Artificial Sequence
  Synthetic oligonucleotide; TCTTGATT chr11 5184507 5184530 5184527 +
ttaagaaatgactgctcccccatc

SEQ ID NO: 64294 - DNA, 24 bp, Artificial Sequence
  Synthetic oligonucleotide; AACAGATT chr11 5185029 5185052 5185049 +
ggaatgaagataagggggaaagaa

SEQ ID NO: 64295 - DNA, 24 bp, Artificial Sequence
  Synthetic oligonucleotide; CTGAGATT chr11 5185570 5185593 5185590 +
acttcaggcttattatccatcaaa

SEQ ID NO: 64296 - DNA, 24 bp, Artificial Sequence
  Synthetic oligonucleotide; AATTGATT chr11 5185579 5185602 5185599 +
ttattatccatcaaactgagattg

SEQ ID NO: 64297 - DNA, 24 bp, Artificial Sequence
  Synthetic oligonucleotide; AGATGATT chr11 5186154 5186177 5186174 +
gggtcaaaaatcaaggaaaatgtt

SEQ ID NO: 64298 - DNA, 24 bp, Artificial Sequence
  Synthetic oligonucleotide; AAGAGATT chr11 5186321 5186344 5186341 +
ttgagaggagacaaaataaatgca

SEQ ID NO: 64299 - DNA, 24 bp, Artificial Sequence
  Synthetic oligonucleotide; GCCAGATT chr11 5186901 5186924 5186921 +
taaaaactggcttcacactgataa

SEQ ID NO: 64300 - DNA, 24 bp, Artificial Sequence
  Synthetic oligonucleotide; CTGTGATT chr11 5186958 5186981 5186978 +
tctcaagtggagccttccatatat

SEQ ID NO: 64301 - DNA, 24 bp, Artificial Sequence
  Synthetic oligonucleotide; TCTTGATT chr11 5187091 5187114 5187111 +
catcagctgaccctgactggatga

SEQ ID NO: 64302 - DNA, 24 bp, Artificial Sequence
  Synthetic oligonucleotide; TAATGATT chr11 5187581 5187604 5187601 +
ttttgagcaaatgttttcagtaaa

SEQ ID NO: 64303 - DNA, 24 bp, Artificial Sequence
  Synthetic oligonucleotide; ATATGATT chr11 5187878 5187901 5187898 +
tatgcccttaataatcatatatct

SEQ ID NO: 64304 - DNA, 24 bp, Artificial Sequence
  Synthetic oligonucleotide; TAAAGATT chr11 5187941 5187964 5187961 +
catgtaagtattatgtagaataaa

SEQ ID NO: 64305 - DNA, 24 bp, Artificial Sequence
  Synthetic oligonucleotide; AGCAGATT chr11 5187996 5188019 5188016 +
tgtcagaaattgccatcactttag

SEQ ID NO: 64306 - DNA, 24 bp, Artificial Sequence
  Synthetic oligonucleotide; TATGGATT chr11 5188035 5188058 5188055 +
taaaagactcagtttttaaatttc

SEQ ID NO: 64307 - DNA, 24 bp, Artificial Sequence
  Synthetic oligonucleotide; AAATGATT chr11 5188057 5188080 5188077 +
tctatggatttcaaggaaatggat

SEQ ID NO: 64308 - DNA, 24 bp, Artificial Sequence
  Synthetic oligonucleotide; TACTGATT chr11 5188106 5188129 5188126 +
aatagcagtaaaaatggctttggc

SEQ ID NO: 64309 - DNA, 24 bp, Artificial Sequence
  Synthetic oligonucleotide; GTTGGATT chr11 5188135 5188158 5188155 +
atttagtatctgtaaattaaggat

SEQ ID NO: 64310 - DNA, 24 bp, Artificial Sequence
  Synthetic oligonucleotide; TTGAGATT chr11 5188145 5188168 5188165 +
tgtaaattaaggatgttggattgc

SEQ ID NO: 64311 - DNA, 24 bp, Artificial Sequence
  Synthetic oligonucleotide; ATGAGATT chr11 5188584 5188607 5188604 +
ccaacacaactttcttaaaacatt

SEQ ID NO: 64312 - DNA, 24 bp, Artificial Sequence
  Synthetic oligonucleotide; TTGTGATT chr11 5188604 5188627 5188624 +
cattatgagattttatgggacatt

SEQ ID NO: 64313 - DNA, 24 bp, Artificial Sequence
  Synthetic oligonucleotide; AAAAGATT chr11 5188679 5188702 5188699 +
ttttatgtgtggcccagggaagcc

SEQ ID NO: 64314 - DNA, 24 bp, Artificial Sequence
  Synthetic oligonucleotide; CAAAGATT chr11 5188752 5188775 5188772 +
atttgcagagtcttgtagcttttt

SEQ ID NO: 64315 - DNA, 24 bp, Artificial Sequence
  Synthetic oligonucleotide; AAGTGATT chr11 5189218 5189241 5189238 +
gtgttgaagatggggcctggtggg

SEQ ID NO: 64316 - DNA, 24 bp, Artificial Sequence
  Synthetic oligonucleotide; CCATGATT chr11 5189382 5189405 5189402 +
cacatgctcctgtttttctctctg

SEQ ID NO: 64317 - DNA, 24 bp, Artificial Sequence
  Synthetic oligonucleotide; GAATGATT chr11 5190229 5190252 5190249 +
caggcctggtggcctaggagtact

SEQ ID NO: 64318 - DNA, 24 bp, Artificial Sequence
  Synthetic oligonucleotide; GTGAGATT chr11 5190243 5190266 5190263 +
taggagtactgaatgattttgtgg

SEQ ID NO: 64319 - DNA, 24 bp, Artificial Sequence
  Synthetic oligonucleotide; CCTAGATT chr11 5190452 5190475 5190472 +
aaagttgaggcttgtaagcctcca

SEQ ID NO: 64320 - DNA, 24 bp, Artificial Sequence
  Synthetic oligonucleotide; AGGAGATT chr11 5190826 5190849 5190846 +
ccctgatatgagacatggggtcaa

SEQ ID NO: 64321 - DNA, 24 bp, Artificial Sequence
  Synthetic oligonucleotide; AAGAGATT chr11 5190915 5190938 5190935 +
gagactgggtaatttataaagaaa

SEQ ID NO: 64322 - DNA, 24 bp, Artificial Sequence
  Synthetic oligonucleotide; CCATGATT chr11 5191111 5191134 5191131 +
gaacagcatgtgaaaaacctaccc

SEQ ID NO: 64323 - DNA, 24 bp, Artificial Sequence
  Synthetic oligonucleotide; CAGGGATT chr11 5191153 5191176 5191173 +
ccagtgtgttccttccatgacagg

SEQ ID NO: 64324 - DNA, 24 bp, Artificial Sequence
  Synthetic oligonucleotide; TTTTGATT chr11 5191356 5191379 5191376 +
atgtcttggaagtaactaacttgt

SEQ ID NO: 64325 - DNA, 24 bp, Artificial Sequence
  Synthetic oligonucleotide; TAATGATT chr11 5191474 5191497 5191494 +
agactttgtaggactgttgggaag

SEQ ID NO: 64326 - DNA, 24 bp, Artificial Sequence
  Synthetic oligonucleotide; ATGAGATT chr11 5191505 5191528 5191525 +
tgtattttgtgatgtgagaagaac

SEQ ID NO: 64327 - DNA, 24 bp, Artificial Sequence
  Synthetic oligonucleotide; CAGCGATT chr11 5191646 5191669 5191666 +
caatcatggtggcagagttctcat

SEQ ID NO: 64328 - DNA, 24 bp, Artificial Sequence
  Synthetic oligonucleotide; CCATGATT chr11 5191784 5191807 5191804 +
tacttgctcctgctttgtcttctg

SEQ ID NO: 64329 - DNA, 24 bp, Artificial Sequence
  Synthetic oligonucleotide; TCAAGATT chr11 5192029 5192052 5192049 +
tccttcctttgatactcaatgtga

SEQ ID NO: 64330 - DNA, 24 bp, Artificial Sequence
  Synthetic oligonucleotide; GTGTGATT chr11 5192631 5192654 5192651 +
actcatttgggtaaatacatagga

SEQ ID NO: 64331 - DNA, 24 bp, Artificial Sequence
  Synthetic oligonucleotide; ATTGGATT chr11 5192944 5192967 5192964 +
ttcagatcttttgcccactttgca

SEQ ID NO: 64332 - DNA, 24 bp, Artificial Sequence
  Synthetic oligonucleotide; TTAAGATT chr11 5193226 5193249 5193246 +
ttttcactctctcctgaactccag

SEQ ID NO: 64333 - DNA, 24 bp, Artificial Sequence
  Synthetic oligonucleotide; AATTGATT chr11 5193538 5193561 5193558 +
ctccaaataagttttctttattaa

SEQ ID NO: 64334 - DNA, 24 bp, Artificial Sequence
  Synthetic oligonucleotide; GTAAGATT chr11 5193991 5194014 5194011 +
cgcggatccaaagagtgagcagca

SEQ ID NO: 64335 - DNA, 24 bp, Artificial Sequence
  Synthetic oligonucleotide; TGCTGATT chr11 5194114 5194137 5194134 +
ccttatctgaccccacccacatcc

SEQ ID NO: 64336 - DNA, 24 bp, Artificial Sequence
  Synthetic oligonucleotide; AGCTGATT chr11 5194138 5194161 5194158 +
tgctgattggtccattttacagag

SEQ ID NO: 64337 - DNA, 24 bp, Artificial Sequence
  Synthetic oligonucleotide; TGCTGATT chr11 5194187 5194210 5194207 +
gctggttggtccgttttggcagag

SEQ ID NO: 64338 - DNA, 24 bp, Artificial Sequence
  Synthetic oligonucleotide; TGCTGATT chr11 5194228 5194251 5194248 +
acaaaccttgagctagacacagag

SEQ ID NO: 64339 - DNA, 24 bp, Artificial Sequence
  Synthetic oligonucleotide; ACTAGATT chr11 5194284 5194307 5194304 +
gacacaaaagttctccaagtcccc

SEQ ID NO: 64340 - DNA, 24 bp, Artificial Sequence
  Synthetic oligonucleotide; CACTGATT chr11 5194306 5194329 5194326 +
ccactagattagctagacacagag

SEQ ID NO: 64341 - DNA, 24 bp, Artificial Sequence
  Synthetic oligonucleotide; CACAGATT chr11 5194340 5194363 5194360 +
tgcatttacaaaccttgagttaga

SEQ ID NO: 64342 - DNA, 24 bp, Artificial Sequence
  Synthetic oligonucleotide; TGCTGATT chr11 5194347 5194370 5194367 +
acaaaccttgagttagacacagat

SEQ ID NO: 64343 - DNA, 24 bp, Artificial Sequence
  Synthetic oligonucleotide; ACTGGATT chr11 5194582 5194605 5194602 +
aacccaaatgtccaacaatgatag

SEQ ID NO: 64344 - DNA, 24 bp, Artificial Sequence
  Synthetic oligonucleotide; TGGGGATT chr11 5194998 5195021 5195018 +
aaaataattttaaaaagagtatag

SEQ ID NO: 64345 - DNA, 24 bp, Artificial Sequence
  Synthetic oligonucleotide; CATTGATT chr11 5195235 5195258 5195255 +
tgaatttcccagtgtctggatcat

SEQ ID NO: 64346 - DNA, 24 bp, Artificial Sequence
  Synthetic oligonucleotide; TATAGATT chr11 5195450 5195473 5195470 +
cattggtatccttttctgtagaca

SEQ ID NO: 64347 - DNA, 24 bp, Artificial Sequence
  Synthetic oligonucleotide; TTCAGATT chr11 5195457 5195480 5195477 +
atccttttctgtagacatatagat

SEQ ID NO: 64348 - DNA, 24 bp, Artificial Sequence
  Synthetic oligonucleotide; AGTGGATT chr11 5195574 5195597 5195594 +
gtctctgtgtacatctatagcttt

SEQ ID NO: 64349 - DNA, 24 bp, Artificial Sequence
  Synthetic oligonucleotide; CACCGATT chr11 5195797 5195820 5195817 +
attaccagcatctcaaaagctaaa

SEQ ID NO: 64350 - DNA, 24 bp, Artificial Sequence
  Synthetic oligonucleotide; GATTGATT chr11 5195801 5195824 5195821 +
ccagcatctcaaaagctaaacacc

SEQ ID NO: 64351 - DNA, 24 bp, Artificial Sequence
  Synthetic oligonucleotide; ATACGATT chr11 5196128 5196151 5196148 +
aacatctcttaagtctgtttaaca

SEQ ID NO: 64352 - DNA, 24 bp, Artificial Sequence
  Synthetic oligonucleotide; ATTAGATT chr11 5196292 5196315 5196312 +
tcctgtcacatcggcagtggcggc

SEQ ID NO: 64353 - DNA, 24 bp, Artificial Sequence
  Synthetic oligonucleotide; TGTGGATT chr11 5196476 5196499 5196496 +
gctggtgtacagtgaacatctgcc

SEQ ID NO: 64354 - DNA, 24 bp, Artificial Sequence
  Synthetic oligonucleotide; CACTGATT chr11 5196555 5196578 5196575 +
tcatgtcctctcacttctaagaat

SEQ ID NO: 64355 - DNA, 24 bp, Artificial Sequence
  Synthetic oligonucleotide; TTCTGATT chr11 5196628 5196651 5196648 +
aatagcaattgaatggactagact

SEQ ID NO: 64356 - DNA, 24 bp, Artificial Sequence
  Synthetic oligonucleotide; TACTGATT chr11 5197260 5197283 5197280 +
tcattggctttttttttttttttt

SEQ ID NO: 64357 - DNA, 24 bp, Artificial Sequence
  Synthetic oligonucleotide; TAAAGATT chr11 5197289 5197312 5197309 +
attttcctccctttggctgaattg

SEQ ID NO: 64358 - DNA, 24 bp, Artificial Sequence
  Synthetic oligonucleotide; CAATGATT chr11 5197353 5197376 5197373 +
acaattatatagctctaaaataag

SEQ ID NO: 64359 - DNA, 24 bp, Artificial Sequence
  Synthetic oligonucleotide; TACAGATT chr11 5197767 5197790 5197787 +
tctatgagacattcacatgacctc

SEQ ID NO: 64360 - DNA, 24 bp, Artificial Sequence
  Synthetic oligonucleotide; GTCAGATT chr11 5197823 5197846 5197843 +
ataaaactggggcataggaatctt

SEQ ID NO: 64361 - DNA, 24 bp, Artificial Sequence
  Synthetic oligonucleotide; CTATGATT chr11 5198201 5198224 5198221 +
atgatccgcccgcctcggcagcta

SEQ ID NO: 64362 - DNA, 24 bp, Artificial Sequence
  Synthetic oligonucleotide; GGAAGATT chr11 5198705 5198728 5198725 +
ttcttagatacctaatagaatata

SEQ ID NO: 64363 - DNA, 24 bp, Artificial Sequence
  Synthetic oligonucleotide; ACCTGATT chr11 5198751 5198774 5198771 +
cttgttatccatgcatagttttgt

SEQ ID NO: 64364 - DNA, 24 bp, Artificial Sequence
  Synthetic oligonucleotide; TAAGGATT chr11 5198978 5199001 5198998 +
agtccacatataaaatctaaaaaa

SEQ ID NO: 64365 - DNA, 24 bp, Artificial Sequence
  Synthetic oligonucleotide; TGTTGATT chr11 5199548 5199571 5199568 +
caggctgacacaatggaacttgtt

SEQ ID NO: 64366 - DNA, 24 bp, Artificial Sequence
  Synthetic oligonucleotide; CACTGATT chr11 5199643 5199666 5199663 +
ttaataattttttcttttttatgg

SEQ ID NO: 64367 - DNA, 24 bp, Artificial Sequence
  Synthetic oligonucleotide; ATGGGATT chr11 5199781 5199804 5199801 +
tgttgggtcttgacactgtagatg

SEQ ID NO: 64368 - DNA, 24 bp, Artificial Sequence
  Synthetic oligonucleotide; AGTGGATT chr11 5200261 5200284 5200281 +
ttagtcaggatggaggaataacgt

SEQ ID NO: 64369 - DNA, 24 bp, Artificial Sequence
  Synthetic oligonucleotide; CATAGATT chr11 5200544 5200567 5200564 +
tgcaattgcccaaaagcaccatgg

SEQ ID NO: 64370 - DNA, 24 bp, Artificial Sequence
  Synthetic oligonucleotide; AAGAGATT chr11 5200921 5200944 5200941 +
agccataagcaaaaacaaataagg

SEQ ID NO: 64371 - DNA, 24 bp, Artificial Sequence
  Synthetic oligonucleotide; AAATGATT chr11 5201285 5201308 5201305 +
atatttatgcatgagaccttgggt

SEQ ID NO: 64372 - DNA, 24 bp, Artificial Sequence
  Synthetic oligonucleotide; ATTAGATT chr11 5201354 5201377 5201374 +
atttgtgcctttgtgatgtagaga

SEQ ID NO: 64373 - DNA, 24 bp, Artificial Sequence
  Synthetic oligonucleotide; AGCTGATT chr11 5201424 5201447 5201444 +
attcctttatttattcagttaatg

SEQ ID NO: 64374 - DNA, 24 bp, Artificial Sequence
  Synthetic oligonucleotide; GTTTGATT chr11 5201685 5201708 5201705 +
atgttcaaaagtccatactttcat

SEQ ID NO: 64375 - DNA, 24 bp, Artificial Sequence
  Synthetic oligonucleotide; TTCAGATT chr11 5201719 5201742 5201739 +
gtaacttcgagatgttaaagtaac

SEQ ID NO: 64376 - DNA, 24 bp, Artificial Sequence
  Synthetic oligonucleotide; AGAGGATT chr11 5201949 5201972 5201969 +
gcttgaagtttcttcgtttcttgc

SEQ ID NO: 64377 - DNA, 24 bp, Artificial Sequence
  Synthetic oligonucleotide; CTCTGATT chr11 5202340 5202363 5202360 +
attatttgaaactaacatttgcac

SEQ ID NO: 64378 - DNA, 24 bp, Artificial Sequence
  Synthetic oligonucleotide; ACTTGATT chr11 5202447 5202470 5202467 +
aaataagaatgatgccaataaagt

SEQ ID NO: 64379 - DNA, 24 bp, Artificial Sequence
  Synthetic oligonucleotide; TCATGATT chr11 5202752 5202775 5202772 +
atttaatattattactagctaata

SEQ ID NO: 64380 - DNA, 24 bp, Artificial Sequence
  Synthetic oligonucleotide; AAATGATT chr11 5203131 5203154 5203151 +
ctttcaccattaacttttgagtta

SEQ ID NO: 64381 - DNA, 24 bp, Artificial Sequence
  Synthetic oligonucleotide; GGGGGATT chr11 5203148 5203171 5203168 +
tgagttaaaatgattacttcctca

SEQ ID NO: 64382 - DNA, 24 bp, Artificial Sequence
  Synthetic oligonucleotide; CCTAGATT chr11 5203175 5203198 5203195 +
ggatttttctaatactgctcccca

SEQ ID NO: 64383 - DNA, 24 bp, Artificial Sequence
  Synthetic oligonucleotide; ATTAGATT chr11 5203271 5203294 5203291 +
ccacttattatacactgaatttcc

SEQ ID NO: 64384 - DNA, 24 bp, Artificial Sequence
  Synthetic oligonucleotide; AGAAGATT chr11 5203292 5203315 5203312 +
tccattagattcattagaggctgt

SEQ ID NO: 64385 - DNA, 24 bp, Artificial Sequence
  Synthetic oligonucleotide; ACATGATT chr11 5203601 5203624 5203621 +
ttgaatacaacactccaatttcaa

SEQ ID NO: 64386 - DNA, 24 bp, Artificial Sequence
  Synthetic oligonucleotide; CTGGGATT chr11 5203649 5203672 5203669 +
tgactcagacatatcgtcaaggat

SEQ ID NO: 64387 - DNA, 24 bp, Artificial Sequence
  Synthetic oligonucleotide; AAAAGATT chr11 5203663 5203686 5203683 +
cgtcaaggatctgggattgatcac

SEQ ID NO: 64388 - DNA, 24 bp, Artificial Sequence
  Synthetic oligonucleotide; GGTGGATT chr11 5203769 5203792 5203789 +
ctagcactttgggaggccgaggca

SEQ ID NO: 64389 - DNA, 24 bp, Artificial Sequence
  Synthetic oligonucleotide; TTGGGATT chr11 5204183 5204206 5204203 +
gccaccatagagactatcagcctt

SEQ ID NO: 64390 - DNA, 24 bp, Artificial Sequence
  Synthetic oligonucleotide; GGAGGATT chr11 5204211 5204234 5204231 +
gattaccagagcaaaatacatgtt

SEQ ID NO: 64391 - DNA, 24 bp, Artificial Sequence
  Synthetic oligonucleotide; TGAAGATT chr11 5204278 5204301 5204298 +
catagttttgataaggtaaataaa

SEQ ID NO: 64392 - DNA, 24 bp, Artificial Sequence
  Synthetic oligonucleotide; AAAAGATT chr11 5204347 5204370 5204367 +
tgctccacctgtatttaaaaaaca

SEQ ID NO: 64393 - DNA, 24 bp, Artificial Sequence
  Synthetic oligonucleotide; CTGTGATT chr11 5204558 5204581 5204578 +
ggaatgttgacttggaaagcaaat

SEQ ID NO: 64394 - DNA, 24 bp, Artificial Sequence
  Synthetic oligonucleotide; CTCTGATT chr11 5204607 5204630 5204627 +
ctttcaggagtcttttctgatgcc

SEQ ID NO: 64395 - DNA, 24 bp, Artificial Sequence
  Synthetic oligonucleotide; GTGTGATT chr11 5204684 5204707 5204704 +
tctgtcttttcagaataattccct

SEQ ID NO: 64396 - DNA, 24 bp, Artificial Sequence
  Synthetic oligonucleotide; TAATGATT chr11 5205105 5205128 5205125 +
gacttgtccaaagaactgactgtt

SEQ ID NO: 64397 - DNA, 24 bp, Artificial Sequence
  Synthetic oligonucleotide; AATAGATT chr11 5205298 5205321 5205318 +
atatattatataagcataaaatgt

SEQ ID NO: 64398 - DNA, 24 bp, Artificial Sequence
  Synthetic oligonucleotide; ATAAGATT chr11 5205489 5205512 5205509 +
attacatatttcattatatatttt

SEQ ID NO: 64399 - DNA, 24 bp, Artificial Sequence
  Synthetic oligonucleotide; ATAAGATT chr11 5205627 5205650 5205647 +
catctaaccatttgagaagttttt

SEQ ID NO: 64400 - DNA, 24 bp, Artificial Sequence
  Synthetic oligonucleotide; ATTTGATT chr11 5205641 5205664 5205661 +
agaagtttttataagatttatagc

SEQ ID NO: 64401 - DNA, 24 bp, Artificial Sequence
  Synthetic oligonucleotide; GTCTGATT chr11 5206675 5206698 5206695 +
attcacattaccataattatttat

SEQ ID NO: 64402 - DNA, 24 bp, Artificial Sequence
  Synthetic oligonucleotide; GAAGGATT chr11 5206937 5206960 5206957 +
acagagtccaggatgactagcagt

SEQ ID NO: 64403 - DNA, 24 bp, Artificial Sequence
  Synthetic oligonucleotide; CCTTGATT chr11 5207109 5207132 5207129 +
gccttgtgtgaacagtaatgctag

SEQ ID NO: 64404 - DNA, 24 bp, Artificial Sequence
  Synthetic oligonucleotide; CAGGGATT chr11 5207330 5207353 5207350 +
aatacaaaagagtagacatcccca

SEQ ID NO: 64405 - DNA, 24 bp, Artificial Sequence
  Synthetic oligonucleotide; CCTAGATT chr11 5207441 5207464 5207461 +
gttgcctttgctgtggctttcgac

SEQ ID NO: 64406 - DNA, 24 bp, Artificial Sequence
  Synthetic oligonucleotide; CTTGGATT chr11 5207554 5207577 5207574 +
gtagtagatctaaaattgtaattt

SEQ ID NO: 64407 - DNA, 24 bp, Artificial Sequence
  Synthetic oligonucleotide; TGTGGATT chr11 5207579 5207602 5207599 +
ttggattcctagaatttctaaatc

SEQ ID NO: 64408 - DNA, 24 bp, Artificial Sequence
  Synthetic oligonucleotide; AGTAGATT chr11 5208153 5208176 5208173 +
ttactcactataagaaatttataa

SEQ ID NO: 64409 - DNA, 24 bp, Artificial Sequence
  Synthetic oligonucleotide; AATTGATT chr11 5208659 5208682 5208679 +
atgataataattctagttgtgaga

SEQ ID NO: 64410 - DNA, 24 bp, Artificial Sequence
  Synthetic oligonucleotide; AAATGATT chr11 5208712 5208735 5208732 +
gaagagagtggagagtaaaggcaa

SEQ ID NO: 64411 - DNA, 24 bp, Artificial Sequence
  Synthetic oligonucleotide; CCTAGATT chr11 5209240 5209263 5209260 +
tcttcaggaagttaagacagtcta

SEQ ID NO: 64412 - DNA, 24 bp, Artificial Sequence
  Synthetic oligonucleotide; TCACGATT chr11 5209596 5209619 5209616 +
ttatcctgatataattcattttta

SEQ ID NO: 64413 - DNA, 24 bp, Artificial Sequence
  Synthetic oligonucleotide; AGTTGATT chr11 5209718 5209741 5209738 +
gcattcatactagtgtatgactgt

SEQ ID NO: 64414 - DNA, 24 bp, Artificial Sequence
  Synthetic oligonucleotide; TGAAGATT chr11 5209842 5209865 5209862 +
tggctataatataaattgctgcta

SEQ ID NO: 64415 - DNA, 24 bp, Artificial Sequence
  Synthetic oligonucleotide; CCCAGATT chr11 5210016 5210039 5210036 +
ttctcttatagcagcctgcatgtg

SEQ ID NO: 64416 - DNA, 24 bp, Artificial Sequence
  Synthetic oligonucleotide; GAAGGATT chr11 5210708 5210731 5210728 +
ttcaagataggacttgagttcctc

SEQ ID NO: 64417 - DNA, 24 bp, Artificial Sequence
  Synthetic oligonucleotide; GAACGATT chr11 5210796 5210819 5210816 +
taatcacagccgaggccggaggga

SEQ ID NO: 64418 - DNA, 24 bp, Artificial Sequence
  Synthetic oligonucleotide; GGGAGATT chr11 5210952 5210975 5210972 +
gaaggatatcttgagccaaggagg

SEQ ID NO: 64419 - DNA, 24 bp, Artificial Sequence
  Synthetic oligonucleotide; CAAAGATT chr11 5210968 5210991 5210988 +
caaggagggggagattgcagtgag

SEQ ID NO: 64420 - DNA, 24 bp, Artificial Sequence
  Synthetic oligonucleotide; AGCTGATT chr11 5211311 5211334 5211331 +
aacattttgttagacttaaaaaca

SEQ ID NO: 64421 - DNA, 24 bp, Artificial Sequence
  Synthetic oligonucleotide; TACAGATT chr11 5211446 5211469 5211466 +
taaacacatgtcatgggtttgtcg

SEQ ID NO: 64422 - DNA, 24 bp, Artificial Sequence
  Synthetic oligonucleotide; GGTTGATT chr11 5211765 5211788 5211785 +
cggtataccactaatgggccttca

SEQ ID NO: 64423 - DNA, 24 bp, Artificial Sequence
  Synthetic oligonucleotide; TTGTGATT chr11 5211787 5211810 5211807 +
caggttgattctatgtctttgcta

SEQ ID NO: 64424 - DNA, 24 bp, Artificial Sequence
  Synthetic oligonucleotide; ATAGGATT chr11 5211870 5211893 5211890 +
tttcctttaggtatatactcaata

SEQ ID NO: 64425 - DNA, 24 bp, Artificial Sequence
  Synthetic oligonucleotide; GTTTGATT chr11 5212074 5212097 5212094 +
atgtgagatagtatctcattttgg

SEQ ID NO: 64426 - DNA, 24 bp, Artificial Sequence
  Synthetic oligonucleotide; TGTAGATT chr11 5212210 5212233 5212230 +
ttgtggcattgtttgttttgttct

SEQ ID NO: 64427 - DNA, 24 bp, Artificial Sequence
  Synthetic oligonucleotide; TATAGATT chr11 5212231 5212254 5212251 +
tcttgtagattcatttaagttcct

SEQ ID NO: 64428 - DNA, 24 bp, Artificial Sequence
  Synthetic oligonucleotide; TTAGGATT chr11 5213026 5213049 5213046 +
tttttcaattcccacctgtgagta

SEQ ID NO: 64429 - DNA, 24 bp, Artificial Sequence
  Synthetic oligonucleotide; TATTGATT chr11 5213180 5213203 5213200 +
taggcagtatggacattttaacaa

SEQ ID NO: 64430 - DNA, 24 bp, Artificial Sequence
  Synthetic oligonucleotide; CTCTGATT chr11 5213234 5213257 5213254 +
agtttttccatttgtttctatcag

SEQ ID NO: 64431 - DNA, 24 bp, Artificial Sequence
  Synthetic oligonucleotide; ATGGGATT chr11 5213339 5213362 5213359 +
ttattctttttgtggcaacggtaa

SEQ ID NO: 64432 - DNA, 24 bp, Artificial Sequence
  Synthetic oligonucleotide; TCCTGATT chr11 5213351 5213374 5213371 +
tggcaacggtaaatgggattgact

SEQ ID NO: 64433 - DNA, 24 bp, Artificial Sequence
  Synthetic oligonucleotide; TAGTGATT chr11 5213397 5213420 5213417 +
gctattgttgatgtatgggaatgc

SEQ ID NO: 64434 - DNA, 24 bp, Artificial Sequence
  Synthetic oligonucleotide; CATTGATT chr11 5213411 5213434 5213431 +
atgggaatgctagtgatttttgta

SEQ ID NO: 64435 - DNA, 24 bp, Artificial Sequence
  Synthetic oligonucleotide; GCCTGATT chr11 5213555 5213578 5213575 +
ggatgccctttattcccttctctt

SEQ ID NO: 64436 - DNA, 24 bp, Artificial Sequence
  Synthetic oligonucleotide; ACTTGATT chr11 5213905 5213928 5213925 +
tcttgcttctcagggataaagcct

SEQ ID NO: 64437 - DNA, 24 bp, Artificial Sequence
  Synthetic oligonucleotide; GGTGGATT chr11 5213915 5213938 5213935 +
cagggataaagcctacttgattga

SEQ ID NO: 64438 - DNA, 24 bp, Artificial Sequence
  Synthetic oligonucleotide; GCTGGATT chr11 5213939 5213962 5213959 +
ggtggattagctttgtgatgtgtt

SEQ ID NO: 64439 - DNA, 24 bp, Artificial Sequence
  Synthetic oligonucleotide; AATTGATT chr11 5214241 5214264 5214261 +
agctcatcatggatctcttcagga

SEQ ID NO: 64440 - DNA, 24 bp, Artificial Sequence
  Synthetic oligonucleotide; AATAGATT chr11 5214343 5214366 5214363 +
actctcagaccacagaggaataaa

SEQ ID NO: 64441 - DNA, 24 bp, Artificial Sequence
  Synthetic oligonucleotide; AAAAGATT chr11 5214709 5214732 5214729 +
atattaaaacacaaaataccattc

SEQ ID NO: 64442 - DNA, 24 bp, Artificial Sequence
  Synthetic oligonucleotide; TGTTGATT chr11 5215650 5215673 5215670 +
ttaatgggagactttcccctagct

SEQ ID NO: 64443 - DNA, 24 bp, Artificial Sequence
  Synthetic oligonucleotide; TTGAGATT chr11 5215708 5215731 5215728 +
tggctcctgtttagtattgctgct

SEQ ID NO: 64444 - DNA, 24 bp, Artificial Sequence
  Synthetic oligonucleotide; GCATGATT chr11 5216467 5216490 5216487 +
acgtgtgcatgtgtctttatagca

SEQ ID NO: 64445 - DNA, 24 bp, Artificial Sequence
  Synthetic oligonucleotide; TCTAGATT chr11 5216534 5216557 5216554 +
gctgggtcaaatggtatttctagt

SEQ ID NO: 64446 - DNA, 24 bp, Artificial Sequence
  Synthetic oligonucleotide; TTTTGATT chr11 5216707 5216730 5216727 +
gtgtgagatggtatctcattgtgg

SEQ ID NO: 64447 - DNA, 24 bp, Artificial Sequence
  Synthetic oligonucleotide; TTTTGATT chr11 5216761 5216784 5216781 +
atgatgagcattttttcatgtgtt

SEQ ID NO: 64448 - DNA, 24 bp, Artificial Sequence
  Synthetic oligonucleotide; TGTAGATT chr11 5216865 5216888 5216885 +
tcttgtaaatttgtttgagttcat

SEQ ID NO: 64449 - DNA, 24 bp, Artificial Sequence
  Synthetic oligonucleotide; AGTAGATT chr11 5216898 5216921 5216918 +
tggatattagccctttgtcagatg

SEQ ID NO: 64450 - DNA, 24 bp, Artificial Sequence
  Synthetic oligonucleotide; TTAGGATT chr11 5217444 5217467 5217464 +
tgcctccagctttgttcttttggc

SEQ ID NO: 64451 - DNA, 24 bp, Artificial Sequence
  Synthetic oligonucleotide; TATTGATT chr11 5217594 5217617 5217614 +
tgggcagtatgaccattttcacga

SEQ ID NO: 64452 - DNA, 24 bp, Artificial Sequence
  Synthetic oligonucleotide; GTTGGATT chr11 5217711 5217734 5217731 +
agaggtccttcacatcccttgtaa

SEQ ID NO: 64453 - DNA, 24 bp, Artificial Sequence
  Synthetic oligonucleotide; TCATGATT chr11 5217765 5217788 5217785 +
aagcaattgtgaatgggagttcac

SEQ ID NO: 64454 - DNA, 24 bp, Artificial Sequence
  Synthetic oligonucleotide; TTGTGATT chr11 5217811 5217834 5217831 +
tctgttattggtgcataggaatac

SEQ ID NO: 64455 - DNA, 24 bp, Artificial Sequence
  Synthetic oligonucleotide; CACTGATT chr11 5217825 5217848 5217845 +
ataggaatacttgtgatttttgca

SEQ ID NO: 64456 - DNA, 24 bp, Artificial Sequence
  Synthetic oligonucleotide; AGGAGATT chr11 5217872 5217895 5217892 +
ttgctgaagttgcttatcagctta

SEQ ID NO: 64457 - DNA, 24 bp, Artificial Sequence
  Synthetic oligonucleotide; GCCTGATT chr11 5217987 5218010 5218007 +
gaatgccctttatttccttctcct

SEQ ID NO: 64458 - DNA, 24 bp, Artificial Sequence
  Synthetic oligonucleotide; GCTGGATT chr11 5218275 5218298 5218295 +
ttgtgtctttggttctgtttatat

SEQ ID NO: 64459 - DNA, 24 bp, Artificial Sequence
  Synthetic oligonucleotide; TATTGATT chr11 5218288 5218311 5218308 +
tctgtttatatgctggattatgtt

SEQ ID NO: 64460 - DNA, 24 bp, Artificial Sequence
  Synthetic oligonucleotide; TGAGGATT chr11 5218373 5218396 5218393 +
tggatcagtttgccagtattttat

SEQ ID NO: 64461 - DNA, 24 bp, Artificial Sequence
  Synthetic oligonucleotide; GGAGGATT chr11 5218487 5218510 5218507 +
tgctggcctcataaaatgagttag

SEQ ID NO: 64462 - DNA, 24 bp, Artificial Sequence
  Synthetic oligonucleotide; TATTGATT chr11 5218506 5218529 5218526 +
gttagggaggattccctctttttc

SEQ ID NO: 64463 - DNA, 24 bp, Artificial Sequence
  Synthetic oligonucleotide; TCTAGATT chr11 5218723 5218746 5218743 +
gtgtcgaggaatttatccatttct

SEQ ID NO: 64464 - DNA, 24 bp, Artificial Sequence
  Synthetic oligonucleotide; ATTTGATT chr11 5218832 5218855 5218852 +
cccgtgtcattttttattgcgtct

SEQ ID NO: 64465 - DNA, 24 bp, Artificial Sequence
  Synthetic oligonucleotide; TCTGGATT chr11 5218912 5218935 5218932 +
gttgatcttttcaaaaaaacagct

SEQ ID NO: 64466 - DNA, 24 bp, Artificial Sequence
  Synthetic oligonucleotide; CATTGATT chr11 5218920 5218943 5218940 +
tttcaaaaaaacagcttctggatt

SEQ ID NO: 64467 - DNA, 24 bp, Artificial Sequence
  Synthetic oligonucleotide; CAGAGATT chr11 5219139 5219162 5219159 +
ctacacactgctttgaatgtgtct

SEQ ID NO: 64468 - DNA, 24 bp, Artificial Sequence
  Synthetic oligonucleotide; GTTTGATT chr11 5219299 5219322 5219319 +
tgagtttcttaatcctgagttcta

SEQ ID NO: 64469 - DNA, 24 bp, Artificial Sequence
  Synthetic oligonucleotide; TGTTGATT chr11 5219435 5219458 5219455 +
tggtgctgaaaagaatgtatattc

SEQ ID NO: 64470 - DNA, 24 bp, Artificial Sequence
  Synthetic oligonucleotide; CTAGGATT chr11 5219770 5219793 5219790 +
gtttaaaatctgttttatcagaga

SEQ ID NO: 64471 - DNA, 24 bp, Artificial Sequence
  Synthetic oligonucleotide; AAAGGATT chr11 5220187 5220210 5220207 +
atctctcagcatttgcttgtctgt

SEQ ID NO: 64472 - DNA, 24 bp, Artificial Sequence
  Synthetic oligonucleotide; GCTAGATT chr11 5220509 5220532 5220529 +
tgaatgtgaatttgggcttgcctt

SEQ ID NO: 64473 - DNA, 24 bp, Artificial Sequence
  Synthetic oligonucleotide; TGTAGATT chr11 5220602 5220625 5220622 +
tcactttcagctacaccaattaga

SEQ ID NO: 64474 - DNA, 24 bp, Artificial Sequence
  Synthetic oligonucleotide; ACCCGATT chr11 5221829 5221852 5221849 +
gagcgcagtattagggcgggagtg

SEQ ID NO: 64475 - DNA, 24 bp, Artificial Sequence
  Synthetic oligonucleotide; AAGCGATT chr11 5222217 5222240 5222237 +
ctgcaacctctgcctcccaggatc

SEQ ID NO: 64476 - DNA, 24 bp, Artificial Sequence
  Synthetic oligonucleotide; CTGGGATT chr11 5222249 5222272 5222269 +
ctcctgcctcagcctcccaaattg

SEQ ID NO: 64477 - DNA, 24 bp, Artificial Sequence
  Synthetic oligonucleotide; CTAAGATT chr11 5222512 5222535 5222532 +
gataattaaataacagtgttatct

SEQ ID NO: 64478 - DNA, 24 bp, Artificial Sequence
  Synthetic oligonucleotide; AATCGATT chr11 5222591 5222614 5222611 +
ttttaccttcacacctaattgtgt

SEQ ID NO: 64479 - DNA, 24 bp, Artificial Sequence
  Synthetic oligonucleotide; GTGAGATT chr11 5222727 5222750 5222747 +
tatatatcacattattatatttta

SEQ ID NO: 64480 - DNA, 24 bp, Artificial Sequence
  Synthetic oligonucleotide; TTTGGATT chr11 5222740 5222763 5222760 +
attatattttagtgagatttagtt

SEQ ID NO: 64481 - DNA, 24 bp, Artificial Sequence
  Synthetic oligonucleotide; ACATGATT chr11 5222794 5222817 5222814 +
ttacacatgagtggtattaattta

SEQ ID NO: 64482 - DNA, 24 bp, Artificial Sequence
  Synthetic oligonucleotide; TATAGATT chr11 5223049 5223072 5223069 +
atctaaaatatatatatatataat

SEQ ID NO: 64483 - DNA, 24 bp, Artificial Sequence
  Synthetic oligonucleotide; AAATGATT chr11 5223321 5223344 5223341 +
gttttaatatatgtataccttgtg

SEQ ID NO: 64484 - DNA, 24 bp, Artificial Sequence
  Synthetic oligonucleotide; AGGAGATT chr11 5223574 5223597 5223594 +
cccagctactcgggaggctgaggc

SEQ ID NO: 64485 - DNA, 24 bp, Artificial Sequence
  Synthetic oligonucleotide; TCCTGATT chr11 5223810 5223833 5223830 +
ttttataccctttgagtaatagtt

SEQ ID NO: 64486 - DNA, 24 bp, Artificial Sequence
  Synthetic oligonucleotide; GCAGGATT chr11 5223983 5224006 5224003 +
ggttcatcaattctgccataaatg

SEQ ID NO: 64487 - DNA, 24 bp, Artificial Sequence
  Synthetic oligonucleotide; TTTTGATT chr11 5224274 5224297 5224294 +
aacgtgaatattagaattttcttc

SEQ ID NO: 64488 - DNA, 24 bp, Artificial Sequence
  Synthetic oligonucleotide; GTCTGATT chr11 5224366 5224389 5224386 +
ttttgtttatggtgtaagacaagg

SEQ ID NO: 64489 - DNA, 24 bp, Artificial Sequence
  Synthetic oligonucleotide; TACTGATT chr11 5224445 5224468 5224465 +
atatacccttctatcatcacttat

SEQ ID NO: 64490 - DNA, 24 bp, Artificial Sequence
  Synthetic oligonucleotide; CCTTGATT chr11 5224458 5224481 5224478 +
tcatcacttattactgattatatg

SEQ ID NO: 64491 - DNA, 24 bp, Artificial Sequence
  Synthetic oligonucleotide; ACTAGATT chr11 5224480 5224503 5224500 +
tgccttgatttcagaatcttgcca

SEQ ID NO: 64492 - DNA, 24 bp, Artificial Sequence
  Synthetic oligonucleotide; TGCAGATT chr11 5224882 5224905 5224902 +
gtgatagttccgggagactagcac

SEQ ID NO: 64493 - DNA, 24 bp, Artificial Sequence
  Synthetic oligonucleotide; ACATGATT chr11 5225729 5225752 5225749 +
gtgggaggaagataagaggtatga

SEQ ID NO: 64494 - DNA, 24 bp, Artificial Sequence
  Synthetic oligonucleotide; GCTGGATT chr11 5225808 5225831 5225828 +
ccataaaataaaagcagaatggta

SEQ ID NO: 64495 - DNA, 24 bp, Artificial Sequence
  Synthetic oligonucleotide; AAGAGATT chr11 5225982 5226005 5226002 +
ttgtatcattattgccctgaaaga

SEQ ID NO: 64496 - DNA, 24 bp, Artificial Sequence
  Synthetic oligonucleotide; CCCTGATT chr11 5226071 5226094 5226091 +
tttaaaattacaaatgcaaaatta

SEQ ID NO: 64497 - DNA, 24 bp, Artificial Sequence
  Synthetic oligonucleotide; TAATGATT chr11 5226133 5226156 5226153 +
tacactttaacccataaatatgta

SEQ ID NO: 64498 - DNA, 24 bp, Artificial Sequence
  Synthetic oligonucleotide; GGGAGATT chr11 5226174 5226197 5226194 +
ttaaaaataaaagaaaataaagta

SEQ ID NO: 64499 - DNA, 24 bp, Artificial Sequence
  Synthetic oligonucleotide; AGTAGATT chr11 5227114 5227137 5227134 +
gctcctgccctccctgctcctggg

SEQ ID NO: 64500 - DNA, 24 bp, Artificial Sequence
  Synthetic oligonucleotide; TTTGGATT chr11 5227540 5227563 5227560 +
ggttctaagcatatcttctcctta

SEQ ID NO: 64501 - DNA, 24 bp, Artificial Sequence
  Synthetic oligonucleotide; CTCAGATT chr11 5227977 5228000 5227997 +
gaggggaaaaggtcttctacttgg

SEQ ID NO: 64502 - DNA, 24 bp, Artificial Sequence
  Synthetic oligonucleotide; CCTTGATT chr11 5228032 5228055 5228052 +
gaatactgcgttttaaaatcattt

SEQ ID NO: 64503 - DNA, 24 bp, Artificial Sequence
  Synthetic oligonucleotide; CTACGATT chr11 5228423 5228446 5228443 +
cctttcagctctaacactctgaaa

SEQ ID NO: 64504 - DNA, 24 bp, Artificial Sequence
  Synthetic oligonucleotide; CTCTGATT chr11 5228662 5228685 5228682 +
tcaggtacttgtgaaaaaatctca

SEQ ID NO: 64505 - DNA, 24 bp, Artificial Sequence
  Synthetic oligonucleotide; GTATGATT chr11 5228742 5228765 5228762 +
cctaggttaaaaaattatgcctat

SEQ ID NO: 64506 - DNA, 24 bp, Artificial Sequence
  Synthetic oligonucleotide; AAAAGATT chr11 5228850 5228873 5228870 +
tctaggcacacgtgtatccctgag

SEQ ID NO: 64507 - DNA, 24 bp, Artificial Sequence
  Synthetic oligonucleotide; TGCAGATT chr11 5228913 5228936 5228933 +
taaaatattttaaatgttaaaaca

SEQ ID NO: 64508 - DNA, 24 bp, Artificial Sequence
  Synthetic oligonucleotide; GTTAGATT chr11 5228931 5228954 5228951 +
aaaacatgcagatttgacttggct

SEQ ID NO: 64509 - DNA, 24 bp, Artificial Sequence
  Synthetic oligonucleotide; TTTGGATT chr11 5228938 5228961 5228958 +
gcagatttgacttggctgttagat

SEQ ID NO: 64510 - DNA, 24 bp, Artificial Sequence
  Synthetic oligonucleotide; TTTAGATT chr11 5228981 5229004 5229001 +
aatttaaacctgcattagcattgt

SEQ ID NO: 64511 - DNA, 24 bp, Artificial Sequence
  Synthetic oligonucleotide; TCCTGATT chr11 5229189 5229212 5229209 +
attgtcaaagcaagagctttgaaa

SEQ ID NO: 64512 - DNA, 24 bp, Artificial Sequence
  Synthetic oligonucleotide; CTCAGATT chr11 5230343 5230366 5230363 +
ttcattaatatttcctccactggg

SEQ ID NO: 64513 - DNA, 24 bp, Artificial Sequence
  Synthetic oligonucleotide; TTGAGATT chr11 5230438 5230461 5230458 +
cagaggtacagtcttcagataaat

SEQ ID NO: 64514 - DNA, 24 bp, Artificial Sequence
  Synthetic oligonucleotide; GGATGATT chr11 5230541 5230564 5230561 +
ggactgctctgaagctcaagagat

SEQ ID NO: 64515 - DNA, 24 bp, Artificial Sequence
  Synthetic oligonucleotide; TACAGATT chr11 5230884 5230907 5230904 +
attgcatatcactgggtcttgatg

SEQ ID NO: 64516 - DNA, 24 bp, Artificial Sequence
  Synthetic oligonucleotide; TTTGGATT chr11 5231217 5231240 5231237 +
gatgttctcatgaattctctggta

SEQ ID NO: 64517 - DNA, 24 bp, Artificial Sequence
  Synthetic oligonucleotide; AACAGATT chr11 5231720 5231743 5231740 +
aagcactttcaaacacaaggaaac

SEQ ID NO: 64518 - DNA, 24 bp, Artificial Sequence
  Synthetic oligonucleotide; TACAGATT chr11 5231775 5231798 5231795 +
taaaattaatcaacatgcatataa

SEQ ID NO: 64519 - DNA, 24 bp, Artificial Sequence
  Synthetic oligonucleotide; GAAAGATT chr11 5232236 5232259 5232256 +
aaaaatggtgtgggggagggtttg

SEQ ID NO: 64520 - DNA, 24 bp, Artificial Sequence
  Synthetic oligonucleotide; AACAGATT chr11 5233398 5233421 5233418 +
agcatatacaaattaattactata

SEQ ID NO: 64521 - DNA, 24 bp, Artificial Sequence
  Synthetic oligonucleotide; AATTGATT chr11 5233420 5233443 5233440 +
taaacagattaatagatacaaatt

SEQ ID NO: 64522 - DNA, 24 bp, Artificial Sequence
  Synthetic oligonucleotide; AAATGATT chr11 5233574 5233597 5233594 +
aaattccaattattccttattgta

SEQ ID NO: 64523 - DNA, 24 bp, Artificial Sequence
  Synthetic oligonucleotide; AAAGGATT chr11 5233656 5233679 5233676 +
ctcccatacccatgtggagagaca

SEQ ID NO: 64524 - DNA, 24 bp, Artificial Sequence
  Synthetic oligonucleotide; GCAAGATT chr11 5233784 5233807 5233804 +
caggatattaaataatttaaaata

SEQ ID NO: 64525 - DNA, 24 bp, Artificial Sequence
  Synthetic oligonucleotide; GTAAGATT chr11 5233918 5233941 5233938 +
gcaggtaggtaaaagaaccaaaat

SEQ ID NO: 64526 - DNA, 24 bp, Artificial Sequence
  Synthetic oligonucleotide; CTGAGATT chr11 5234603 5234626 5234623 +
attccactattcccttaacttgcc

SEQ ID NO: 64527 - DNA, 24 bp, Artificial Sequence
  Synthetic oligonucleotide; TAGAGATT chr11 5234861 5234884 5234881 +
caatataaagttcttctttgcctc

SEQ ID NO: 64528 - DNA, 24 bp, Artificial Sequence
  Synthetic oligonucleotide; AGTAGATT chr11 5235180 5235203 5235200 +
ctaaagaaagaatgcaaagtgaaa

SEQ ID NO: 64529 - DNA, 24 bp, Artificial Sequence
  Synthetic oligonucleotide; GCCAGATT chr11 5235199 5235222 5235219 +
tgaaaagtagatttaccatattca

SEQ ID NO: 64530 - DNA, 24 bp, Artificial Sequence
  Synthetic oligonucleotide; GAAGGATT chr11 5235383 5235406 5235403 +
cacacccatgagcatatccaaaag

SEQ ID NO: 64531 - DNA, 24 bp, Artificial Sequence
  Synthetic oligonucleotide; GGTTGATT chr11 5236025 5236048 5236045 +
atacaaatgcattttacagcattt

SEQ ID NO: 64532 - DNA, 24 bp, Artificial Sequence
  Synthetic oligonucleotide; CTGAGATT chr11 5236099 5236122 5236119 +
tatatagaaagatggatgatgtgc

SEQ ID NO: 64533 - DNA, 24 bp, Artificial Sequence
  Synthetic oligonucleotide; GTTTGATT chr11 5236243 5236266 5236263 +
taattcaagaaaggtggtggcatg

SEQ ID NO: 64534 - DNA, 24 bp, Artificial Sequence
  Synthetic oligonucleotide; AAAAGATT chr11 5236260 5236283 5236280 +
tggcatggtttgatttgtgtcttt

SEQ ID NO: 64535 - DNA, 24 bp, Artificial Sequence
  Synthetic oligonucleotide; AATTGATT chr11 5236726 5236749 5236746 +
atgtttccaattcatatataagaa

SEQ ID NO: 64536 - DNA, 24 bp, Artificial Sequence
  Synthetic oligonucleotide; AAATGATT chr11 5236839 5236862 5236859 +
ttcactttaattctgttctacctg

SEQ ID NO: 64537 - DNA, 24 bp, Artificial Sequence
  Synthetic oligonucleotide; TATGGATT chr11 5236883 5236906 5236903 +
agatctggttacatgtttattcta

SEQ ID NO: 64538 - DNA, 24 bp, Artificial Sequence
  Synthetic oligonucleotide; AGAGGATT chr11 5236897 5236920 5236917 +
gtttattctatatggattgcattg

SEQ ID NO: 64539 - DNA, 24 bp, Artificial Sequence
  Synthetic oligonucleotide; GGCTGATT chr11 5237086 5237109 5237106 +
actgcaggcatgcaccacacgccc

SEQ ID NO: 64540 - DNA, 24 bp, Artificial Sequence
  Synthetic oligonucleotide; TGGTGATT chr11 5237302 5237325 5237322 +
gaggacctgactgggcagtaagag

SEQ ID NO: 64541 - DNA, 24 bp, Artificial Sequence
  Synthetic oligonucleotide; TGTTGATT chr11 5237343 5237366 5237363 +
ggacaaattgaagcagaatcgaac

SEQ ID NO: 64542 - DNA, 24 bp, Artificial Sequence
  Synthetic oligonucleotide; AAATGATT chr11 5237361 5237384 5237381 +
tcgaactgttgattagaggtaggg

SEQ ID NO: 64543 - DNA, 24 bp, Artificial Sequence
  Synthetic oligonucleotide; TTGGGATT chr11 5237581 5237604 5237601 +
gaggttagaaatcagagttgggaa

SEQ ID NO: 64544 - DNA, 24 bp, Artificial Sequence
  Synthetic oligonucleotide; CGATGATT chr11 5237735 5237758 5237755 +
gtaagacatagtccccaaaatccc

SEQ ID NO: 64545 - DNA, 24 bp, Artificial Sequence
  Synthetic oligonucleotide; TATCGATT chr11 5237754 5237777 5237774 +
atccccgatgattttagaactcag

SEQ ID NO: 64546 - DNA, 24 bp, Artificial Sequence
  Synthetic oligonucleotide; TCTAGATT chr11 5237839 5237862 5237859 +
ttcagagcaggtaggagataaggt

SEQ ID NO: 64547 - DNA, 24 bp, Artificial Sequence
  Synthetic oligonucleotide; GCAAGATT chr11 5238730 5238753 5238750 +
aacactggctgagggaaagcataa

SEQ ID NO: 64548 - DNA, 24 bp, Artificial Sequence
  Synthetic oligonucleotide; TCTAGATT chr11 5238986 5239009 5239006 +
agaggttttctgatgttactaaca

SEQ ID NO: 64549 - DNA, 24 bp, Artificial Sequence
  Synthetic oligonucleotide; AGCAGATT chr11 5239480 5239503 5239500 +
atttagtggtaggaatatacaatg

SEQ ID NO: 64550 - DNA, 24 bp, Artificial Sequence
  Synthetic oligonucleotide; TCTAGATT chr11 5239734 5239757 5239754 +
agtcaaatgcagaaatccaaattc

SEQ ID NO: 64551 - DNA, 24 bp, Artificial Sequence
  Synthetic oligonucleotide; ACAAGATT chr11 5239893 5239916 5239913 +
atatcagagaatgtttacattgct

SEQ ID NO: 64552 - DNA, 24 bp, Artificial Sequence
  Synthetic oligonucleotide; GTGAGATT chr11 5240107 5240130 5240127 +
agaagggcaagggatagcacaagt

SEQ ID NO: 64553 - DNA, 24 bp, Artificial Sequence
  Synthetic oligonucleotide; GTGTGATT chr11 5240120 5240143 5240140 +
atagcacaagtgtgagattttaaa

SEQ ID NO: 64554 - DNA, 24 bp, Artificial Sequence
  Synthetic oligonucleotide; GAGTGATT chr11 5240190 5240213 5240210 +
aatgtatgctacaagacagcagtt

SEQ ID NO: 64555 - DNA, 24 bp, Artificial Sequence
  Synthetic oligonucleotide; TTGGGATT chr11 5240385 5240408 5240405 +
aggaaatactttgagaaagaggtt

SEQ ID NO: 64556 - DNA, 24 bp, Artificial Sequence
  Synthetic oligonucleotide; AAGTGATT chr11 5240501 5240524 5240521 +
aagggtcttgggtacaggagtttg

SEQ ID NO: 64557 - DNA, 24 bp, Artificial Sequence
  Synthetic oligonucleotide; CAGGGATT chr11 5240603 5240626 5240623 +
aatttccttcttttcattcacaga

SEQ ID NO: 64558 - DNA, 24 bp, Artificial Sequence
  Synthetic oligonucleotide; ACTCGATT chr11 5240684 5240707 5240704 +
caatcactgccacaatggtctctt

SEQ ID NO: 64559 - DNA, 24 bp, Artificial Sequence
  Synthetic oligonucleotide; CAGTGATT chr11 5240879 5240902 5240899 +
gtcactctcatatgcaagaaactt

SEQ ID NO: 64560 - DNA, 24 bp, Artificial Sequence
  Synthetic oligonucleotide; TATTGATT chr11 5241077 5241100 5241097 +
taaacaaaaatcagtggttttcaa

SEQ ID NO: 64561 - DNA, 24 bp, Artificial Sequence
  Synthetic oligonucleotide; AAGAGATT chr11 5241225 5241248 5241245 +
tttatagaaacagagagctgaaca

SEQ ID NO: 64562 - DNA, 24 bp, Artificial Sequence
  Synthetic oligonucleotide; CCTTGATT chr11 5241483 5241506 5241503 +
ttaagagaaagttcaaggtttggc

SEQ ID NO: 64563 - DNA, 24 bp, Artificial Sequence
  Synthetic oligonucleotide; AGACGATT chr11 5241733 5241756 5241753 +
tgtaaaaacattgtcttattctag

SEQ ID NO: 64564 - DNA, 24 bp, Artificial Sequence
  Synthetic oligonucleotide; GCAGGATT chr11 5241798 5241821 5241818 +
cacccacgagttctctcttttctt

SEQ ID NO: 64565 - DNA, 24 bp, Artificial Sequence
  Synthetic oligonucleotide; ATGAGATT chr11 5242031 5242054 5242051 +
cccaacctcccccatctaaaggag

SEQ ID NO: 64566 - DNA, 24 bp, Artificial Sequence
  Synthetic oligonucleotide; TTGTGATT chr11 5242450 5242473 5242470 +
atgccaactcactaccccaacata

SEQ ID NO: 64567 - DNA, 24 bp, Artificial Sequence
  Synthetic oligonucleotide; GTTTGATT chr11 5242819 5242842 5242839 +
tgttccctcatccaaaaacactca

SEQ ID NO: 64568 - DNA, 24 bp, Artificial Sequence
  Synthetic oligonucleotide; CTGGGATT chr11 5244410 5244433 5244430 +
cgcccacctcagcctcccaaagtg

SEQ ID NO: 64569 - DNA, 24 bp, Artificial Sequence
  Synthetic oligonucleotide; AGGAGATT chr11 5244600 5244623 5244620 +
tagtcagtgtacttatctgaacaa

SEQ ID NO: 64570 - DNA, 24 bp, Artificial Sequence
  Synthetic oligonucleotide; AGGAGATT chr11 5244722 5244745 5244742 +
gctgctctgttcaagcaagaggat

SEQ ID NO: 64571 - DNA, 24 bp, Artificial Sequence
  Synthetic oligonucleotide; CCAAGATT chr11 5245245 5245268 5245265 +
agtgacaaacagtttgaggcaaaa

SEQ ID NO: 64572 - DNA, 24 bp, Artificial Sequence
  Synthetic oligonucleotide; TATTGATT chr11 5245581 5245604 5245601 +
gacctgcagtcactttcctggaag

SEQ ID NO: 64573 - DNA, 24 bp, Artificial Sequence
  Synthetic oligonucleotide; CCATGATT chr11 5245628 5245651 5245648 +
ctgttccccatttccaattgtttt

SEQ ID NO: 64574 - DNA, 24 bp, Artificial Sequence
  Synthetic oligonucleotide; ATTAGATT chr11 5245743 5245766 5245763 +
tatgcattaattcaacaaatacat

SEQ ID NO: 64575 - DNA, 24 bp, Artificial Sequence
  Synthetic oligonucleotide; GACAGATT chr11 5245827 5245850 5245847 +
tgagaatcttacatgaactagaca

SEQ ID NO: 64576 - DNA, 24 bp, Artificial Sequence
  Synthetic oligonucleotide; AAGAGATT chr11 5245906 5245929 5245926 +
acatactaaaagaaatgaattaat

SEQ ID NO: 64577 - DNA, 24 bp, Artificial Sequence
  Synthetic oligonucleotide; AAAGGATT chr11 5246003 5246026 5246023 +
acctgacaaaagcaagcaatgggg

SEQ ID NO: 64578 - DNA, 24 bp, Artificial Sequence
  Synthetic oligonucleotide; GATGGATT chr11 5246105 5246128 5246125 +
ataccttatccaaaattaactcca

SEQ ID NO: 64579 - DNA, 24 bp, Artificial Sequence
  Synthetic oligonucleotide; CACAGATT chr11 5246193 5246216 5246213 +
tactattcatgatataaacacggg

SEQ ID NO: 64580 - DNA, 24 bp, Artificial Sequence
  Synthetic oligonucleotide; AAAAGATT chr11 5246330 5246353 5246350 +
cgaaagacaatctacagaatggga

SEQ ID NO: 64581 - DNA, 24 bp, Artificial Sequence
  Synthetic oligonucleotide; CCTGGATT chr11 5247247 5247270 5247267 +
ctgactcgtggtcagggttctctt

SEQ ID NO: 64582 - DNA, 24 bp, Artificial Sequence
  Synthetic oligonucleotide; TGGGGATT chr11 5247423 5247446 5247443 +
ccacagataaggtcagttgggagt

SEQ ID NO: 64583 - DNA, 24 bp, Artificial Sequence
  Synthetic oligonucleotide; TGCTGATT chr11 5247645 5247668 5247665 +
tgctcatgctgacttgtgagcctc

SEQ ID NO: 64584 - DNA, 24 bp, Artificial Sequence
  Synthetic oligonucleotide; ATGGGATT chr11 5247744 5247767 5247764 +
tgaccaatctgcacacttgagggc

SEQ ID NO: 64585 - DNA, 24 bp, Artificial Sequence
  Synthetic oligonucleotide; ACCGGATT chr11 5248011 5248034 5248031 +
tgtcctatagaggtctttcttccc

SEQ ID NO: 64586 - DNA, 24 bp, Artificial Sequence
  Synthetic oligonucleotide; AATAGATT chr11 5248263 5248286 5248283 +
aaatcatgtgtgatctctcagcag

SEQ ID NO: 64587 - DNA, 24 bp, Artificial Sequence
  Synthetic oligonucleotide; AATGGATT chr11 5248424 5248447 5248444 +
cctcaggggtgaattctttgccga

SEQ ID NO: 64588 - DNA, 24 bp, Artificial Sequence
  Synthetic oligonucleotide; CTGAGATT chr11 5248589 5248612 5248609 +
gcctatgttaacttccctcaaagc

SEQ ID NO: 64589 - DNA, 24 bp, Artificial Sequence
  Synthetic oligonucleotide; TCTAGATT chr11 5249147 5249170 5249167 +
ttttctcaaagtcaaaattgtcca

SEQ ID NO: 64590 - DNA, 24 bp, Artificial Sequence
  Synthetic oligonucleotide; GTGAGATT chr11 5249569 5249592 5249589 +
ccatgggtagacaaccaggagcct

SEQ ID NO: 64591 - DNA, 24 bp, Artificial Sequence
  Synthetic oligonucleotide; TTCCGATT chr11 5250081 5250104 5250101 +
attttttttatagcctttgccttg

SEQ ID NO: 64592 - DNA, 24 bp, Artificial Sequence
  Synthetic oligonucleotide; CAGGGATT chr11 5250256 5250279 5250276 +
gcatgtaccaatttttgaaaagtt

SEQ ID NO: 64593 - DNA, 24 bp, Artificial Sequence
  Synthetic oligonucleotide; CCAGGATT chr11 5250288 5250311 5250308 +
gtgaaatgtgttttaggcataggt

SEQ ID NO: 64594 - DNA, 24 bp, Artificial Sequence
  Synthetic oligonucleotide; AATAGATT chr11 5250458 5250481 5250478 +
ataaagccacagtttcagcgcagt

SEQ ID NO: 64595 - DNA, 24 bp, Artificial Sequence
  Synthetic oligonucleotide; ATTTGATT chr11 5250559 5250582 5250579 +
atgactgtttcatcttagaaaaat

SEQ ID NO: 64596 - DNA, 24 bp, Artificial Sequence
  Synthetic oligonucleotide; TGTGGATT chr11 5250708 5250731 5250728 +
ggtagaatgttctttggcaggtac

SEQ ID NO: 64597 - DNA, 24 bp, Artificial Sequence
  Synthetic oligonucleotide; GCTAGATT chr11 5251026 5251049 5251046 +
aagtgatccatgatctctaacctt

SEQ ID NO: 64598 - DNA, 24 bp, Artificial Sequence
  Synthetic oligonucleotide; GGTTGATT chr11 5251112 5251135 5251132 +
attagtttatcccctaagctatca

SEQ ID NO: 64599 - DNA, 24 bp, Artificial Sequence
  Synthetic oligonucleotide; TTATGATT chr11 5251567 5251590 5251587 +
gtgatggcatttgaagtgggtcct

SEQ ID NO: 64600 - DNA, 24 bp, Artificial Sequence
  Synthetic oligonucleotide; TGGAGATT chr11 5251844 5251867 5251864 +
ttattctgaaacacagaggacaag

SEQ ID NO: 64601 - DNA, 24 bp, Artificial Sequence
  Synthetic oligonucleotide; ACAGGATT chr11 5251979 5252002 5251999 +
agcatagactgggtgacttcaaca

SEQ ID NO: 64602 - DNA, 24 bp, Artificial Sequence
  Synthetic oligonucleotide; ACCTGATT chr11 5252152 5252175 5252172 +
atctgctctcatgagctcctctaa

SEQ ID NO: 64603 - DNA, 24 bp, Artificial Sequence
  Synthetic oligonucleotide; TGGGGATT chr11 5252202 5252225 5252222 +
ccacaaatggagccaattgggagt

SEQ ID NO: 64604 - DNA, 24 bp, Artificial Sequence
  Synthetic oligonucleotide; ATGGGATT chr11 5252528 5252551 5252548 +
tgaccagtctgtagacttaagggt

SEQ ID NO: 64605 - DNA, 24 bp, Artificial Sequence
  Synthetic oligonucleotide; ACCAGATT chr11 5252921 5252944 5252941 +
tgtcctatagaggtctttcttcca

SEQ ID NO: 64606 - DNA, 24 bp, Artificial Sequence
  Synthetic oligonucleotide; AATAGATT chr11 5253182 5253205 5253202 +
caaccatgtgtgatctcttagcag

SEQ ID NO: 64607 - DNA, 24 bp, Artificial Sequence
  Synthetic oligonucleotide; ATTTGATT chr11 5253194 5253217 5253214 +
atctcttagcagaatagatttatt

SEQ ID NO: 64608 - DNA, 24 bp, Artificial Sequence
  Synthetic oligonucleotide; AATGGATT chr11 5253342 5253365 5253362 +
cctcaggggtgaattctttgccga

SEQ ID NO: 64609 - DNA, 24 bp, Artificial Sequence
  Synthetic oligonucleotide; CTGAGATT chr11 5253507 5253530 5253527 +
gcctatgttaacttccctcaaagc

SEQ ID NO: 64610 - DNA, 24 bp, Artificial Sequence
  Synthetic oligonucleotide; TCTAGATT chr11 5254071 5254094 5254091 +
ttttctcaaagtcaaagttgtcca

SEQ ID NO: 64611 - DNA, 24 bp, Artificial Sequence
  Synthetic oligonucleotide; GTGAGATT chr11 5254493 5254516 5254513 +
ccatgggtagacaaccaggagcct

SEQ ID NO: 64612 - DNA, 24 bp, Artificial Sequence
  Synthetic oligonucleotide; TTCCGATT chr11 5255009 5255032 5255029 +
attttttttatagcctttgccttg

SEQ ID NO: 64613 - DNA, 24 bp, Artificial Sequence
  Synthetic oligonucleotide; CAGGGATT chr11 5255184 5255207 5255204 +
gcatgtaccaatttttgaaaagtt

SEQ ID NO: 64614 - DNA, 24 bp, Artificial Sequence
  Synthetic oligonucleotide; CCAGGATT chr11 5255216 5255239 5255236 +
gtgaaatgtgttttaggcataggt

SEQ ID NO: 64615 - DNA, 24 bp, Artificial Sequence
  Synthetic oligonucleotide; AATAGATT chr11 5255384 5255407 5255404 +
ataaagcaacagtttcagtgcagg

SEQ ID NO: 64616 - DNA, 24 bp, Artificial Sequence
  Synthetic oligonucleotide; TATGGATT chr11 5255639 5255662 5255659 +
ggtagaatgctctttaccagatac

SEQ ID NO: 64617 - DNA, 24 bp, Artificial Sequence
  Synthetic oligonucleotide; TTGGGATT chr11 5255901 5255924 5255921 +
gctgtttttttctttattttttct

SEQ ID NO: 64618 - DNA, 24 bp, Artificial Sequence
  Synthetic oligonucleotide; GGTAGATT chr11 5255970 5255993 5255990 +
tctctgaactcgatccatgacctt

SEQ ID NO: 64619 - DNA, 24 bp, Artificial Sequence
  Synthetic oligonucleotide; AAAAGATT chr11 5256233 5256256 5256253 +
aaaagttgaataagaaaggaaaga

SEQ ID NO: 64620 - DNA, 24 bp, Artificial Sequence
  Synthetic oligonucleotide; GAAAGATT chr11 5256312 5256335 5256332 +
ttctctcaatctaaggatgggtga

SEQ ID NO: 64621 - DNA, 24 bp, Artificial Sequence
  Synthetic oligonucleotide; TACAGATT chr11 5256336 5256359 5256356 +
gaaagatttttattggtatgctgg

SEQ ID NO: 64622 - DNA, 24 bp, Artificial Sequence
  Synthetic oligonucleotide; CTGGGATT chr11 5256660 5256683 5256680 +
ctccttcctcagcctcccaagtag

SEQ ID NO: 64623 - DNA, 24 bp, Artificial Sequence
  Synthetic oligonucleotide; ATGGGATT chr11 5256715 5256738 5256735 +
tctaatttttgtatttttgtagag

SEQ ID NO: 64624 - DNA, 24 bp, Artificial Sequence
  Synthetic oligonucleotide; CTGGGATT chr11 5256794 5256817 5256814 +
tgcctgccttggcctcccaaaatt

SEQ ID NO: 64625 - DNA, 24 bp, Artificial Sequence
  Synthetic oligonucleotide; TGTTGATT chr11 5256996 5257019 5257016 +
ttgaggcaatatcttttaagagtt

SEQ ID NO: 64626 - DNA, 24 bp, Artificial Sequence
  Synthetic oligonucleotide; CCTCGATT chr11 5257029 5257052 5257049 +
ctccttatccataactgtcttatt

SEQ ID NO: 64627 - DNA, 24 bp, Artificial Sequence
  Synthetic oligonucleotide; CATTGATT chr11 5257059 5257082 5257079 +
tttttcctatatcattgcttctga

SEQ ID NO: 64628 - DNA, 24 bp, Artificial Sequence
  Synthetic oligonucleotide; TGAAGATT chr11 5257238 5257261 5257258 +
aagtcagagaataaaactttcctc

SEQ ID NO: 64629 - DNA, 24 bp, Artificial Sequence
  Synthetic oligonucleotide; GCTGGATT chr11 5257642 5257665 5257662 +
atctctaagcaacctgtactattg

SEQ ID NO: 64630 - DNA, 24 bp, Artificial Sequence
  Synthetic oligonucleotide; CCTTGATT chr11 5257893 5257916 5257913 +
actgcccacccctcaacatcacgt

SEQ ID NO: 64631 - DNA, 24 bp, Artificial Sequence
  Synthetic oligonucleotide; AAAAGATT chr11 5257958 5257981 5257978 +
agaagaaaaagagagagagagaaa

SEQ ID NO: 64632 - DNA, 24 bp, Artificial Sequence
  Synthetic oligonucleotide; GATTGATT chr11 5257962 5257985 5257982 +
gaaaaagagagagagagaaaaaaa

SEQ ID NO: 64633 - DNA, 24 bp, Artificial Sequence
  Synthetic oligonucleotide; AGCAGATT chr11 5258152 5258175 5258172 +
agaacgcacacaccctctgaaaga

SEQ ID NO: 64634 - DNA, 24 bp, Artificial Sequence
  Synthetic oligonucleotide; AGAAGATT chr11 5258285 5258308 5258305 +
gaacctgaagatctagaccacagg

SEQ ID NO: 64635 - DNA, 24 bp, Artificial Sequence
  Synthetic oligonucleotide; AACAGATT chr11 5258635 5258658 5258655 +
agccttgctcactgactgcatgga

SEQ ID NO: 64636 - DNA, 24 bp, Artificial Sequence
  Synthetic oligonucleotide; CCCTGATT chr11 5259503 5259526 5259523 +
aatgcatccaaaccaagaagaaat

SEQ ID NO: 64637 - DNA, 24 bp, Artificial Sequence
  Synthetic oligonucleotide; CTGGGATT chr11 5259847 5259870 5259867 +
atatgaacaaagcctccaagaaat

SEQ ID NO: 64638 - DNA, 24 bp, Artificial Sequence
  Synthetic oligonucleotide; ATCAGATT chr11 5260138 5260161 5260158 +
caggtaacctatgaaagaaaacct

SEQ ID NO: 64639 - DNA, 24 bp, Artificial Sequence
  Synthetic oligonucleotide; AGCAGATT chr11 5260149 5260172 5260169 +
tgaaagaaaacctatcagattaac

SEQ ID NO: 64640 - DNA, 24 bp, Artificial Sequence
  Synthetic oligonucleotide; AATGGATT chr11 5260956 5260979 5260976 +
catcaagacagtctacaaagaaac

SEQ ID NO: 64641 - DNA, 24 bp, Artificial Sequence
  Synthetic oligonucleotide; ACATGATT chr11 5261426 5261449 5261446 +
tcaaattgtctctgtttgcagatg

SEQ ID NO: 64642 - DNA, 24 bp, Artificial Sequence
  Synthetic oligonucleotide; TATAGATT chr11 5261791 5261814 5261811 +
atggccatactgcccaaagtaatt

SEQ ID NO: 64643 - DNA, 24 bp, Artificial Sequence
  Synthetic oligonucleotide; GGTGGATT chr11 5262205 5262228 5262225 +
caccttatacaaaaattaactcaa

SEQ ID NO: 64644 - DNA, 24 bp, Artificial Sequence
  Synthetic oligonucleotide; TGGCGATT chr11 5262789 5262812 5262809 +
gttcaaccattgtggaagacagtg

SEQ ID NO: 64645 - DNA, 24 bp, Artificial Sequence
  Synthetic oligonucleotide; GCAAGATT chr11 5263680 5263703 5263700 +
ataaataaaactgatagaccatta

SEQ ID NO: 64646 - DNA, 24 bp, Artificial Sequence
  Synthetic oligonucleotide; AAAAGATT chr11 5263770 5263793 5263790 +
ctattactgataccacagaaatac

SEQ ID NO: 64647 - DNA, 24 bp, Artificial Sequence
  Synthetic oligonucleotide; GATAGATT chr11 5263966 5263989 5263986 +
caacaacaaaaaagtccaggacca

SEQ ID NO: 64648 - DNA, 24 bp, Artificial Sequence
  Synthetic oligonucleotide; ATGTGATT chr11 5264321 5264344 5264341 +
taaagagaattggaaacaaaaatc

SEQ ID NO: 64649 - DNA, 24 bp, Artificial Sequence
  Synthetic oligonucleotide; ATATGATT chr11 5264646 5264669 5264666 +
tcaaactgtcactgtttgctgatg

SEQ ID NO: 64650 - DNA, 24 bp, Artificial Sequence
  Synthetic oligonucleotide; AAAGGATT chr11 5265521 5265544 5265541 +
aacccttctacacattggcttagg

SEQ ID NO: 64651 - DNA, 24 bp, Artificial Sequence
  Synthetic oligonucleotide; AATAGATT chr11 5265719 5265742 5265739 +
tatccaggctctaaaatgaacaca

SEQ ID NO: 64652 - DNA, 24 bp, Artificial Sequence
  Synthetic oligonucleotide; TGAAGATT chr11 5266023 5266046 5266043 +
gtacaaccattatggaaaacagta

SEQ ID NO: 64653 - DNA, 24 bp, Artificial Sequence
  Synthetic oligonucleotide; AACGGATT chr11 5266203 5266226 5266223 +
aacctaagtgtctatcaacagatg

SEQ ID NO: 64654 - DNA, 24 bp, Artificial Sequence
  Synthetic oligonucleotide; AGGGGATT chr11 5266501 5266524 5266521 +
ggaaaaagtgtgagtgtgtatggg

SEQ ID NO: 64655 - DNA, 24 bp, Artificial Sequence
  Synthetic oligonucleotide; GAAGGATT chr11 5266548 5266571 5266568 +
aataggtacaaacacagttggata

SEQ ID NO: 64656 - DNA, 24 bp, Artificial Sequence
  Synthetic oligonucleotide; TGAGGATT chr11 5266633 5266656 5266653 +
tatatatttcaaaatggctagaaa

SEQ ID NO: 64657 - DNA, 24 bp, Artificial Sequence
  Synthetic oligonucleotide; AGCAGATT chr11 5267431 5267454 5267451 +
acttgaatccattttgtgcacata

SEQ ID NO: 64658 - DNA, 24 bp, Artificial Sequence
  Synthetic oligonucleotide; TAAAGATT chr11 5268127 5268150 5268147 +
taattaaccattttcccaccccga

SEQ ID NO: 64659 - DNA, 24 bp, Artificial Sequence
  Synthetic oligonucleotide; TTTTGATT chr11 5268322 5268345 5268342 +
agatggagaagataaaattgcaat

SEQ ID NO: 64660 - DNA, 24 bp, Artificial Sequence
  Synthetic oligonucleotide; GCAAGATT chr11 5269202 5269225 5269222 +
ctgggataaacacatcaagttctg

SEQ ID NO: 64661 - DNA, 24 bp, Artificial Sequence
  Synthetic oligonucleotide; CCATGATT chr11 5269326 5269349 5269346 +
tgctgttctaacatcaagctcgac

SEQ ID NO: 64662 - DNA, 24 bp, Artificial Sequence
  Synthetic oligonucleotide; ATAAGATT chr11 5269359 5269382 5269379 +
ctgagatctttgttggtctttcca

SEQ ID NO: 64663 - DNA, 24 bp, Artificial Sequence
  Synthetic oligonucleotide; TAGTGATT chr11 5269889 5269912 5269909 +
atgatgccaggcctgagagcttgc

SEQ ID NO: 64664 - DNA, 24 bp, Artificial Sequence
  Synthetic oligonucleotide; GGGTGATT chr11 5270524 5270547 5270544 +
ttaatcccaaagtacagtaccttg

SEQ ID NO: 64665 - DNA, 24 bp, Artificial Sequence
  Synthetic oligonucleotide; AAAAGATT chr11 5270551 5270574 5270571 +
tgattccctagagaggacagacag

SEQ ID NO: 64666 - DNA, 24 bp, Artificial Sequence
  Synthetic oligonucleotide; TTGGGATT chr11 5270887 5270910 5270907 +
acttggtagagctgaaactggaag

SEQ ID NO: 64667 - DNA, 24 bp, Artificial Sequence
  Synthetic oligonucleotide; TAATGATT chr11 5271046 5271069 5271066 +
atttaactatcaatgtgacagaag

SEQ ID NO: 64668 - DNA, 24 bp, Artificial Sequence
  Synthetic oligonucleotide; AAACGATT chr11 5271308 5271331 5271328 +
ctgcaaccttcgcctcctgggttc

SEQ ID NO: 64669 - DNA, 24 bp, Artificial Sequence
  Synthetic oligonucleotide; ACGGGATT chr11 5271396 5271419 5271416 +
ctaatttttttatttttagtagag

SEQ ID NO: 64670 - DNA, 24 bp, Artificial Sequence
  Synthetic oligonucleotide; TGGGGATT chr11 5271625 5271648 5271645 +
cctgtctcccaagtcaagtgcctt

SEQ ID NO: 64671 - DNA, 24 bp, Artificial Sequence
  Synthetic oligonucleotide; CCATGATT chr11 5271773 5271796 5271793 +
aagaatgtctcccttgcttttctc

SEQ ID NO: 64672 - DNA, 24 bp, Artificial Sequence
  Synthetic oligonucleotide; CTAGGATT chr11 5272120 5272143 5272140 +
tgcttctttatgaaagcattagat

SEQ ID NO: 64673 - DNA, 24 bp, Artificial Sequence
  Synthetic oligonucleotide; TACAGATT chr11 5272645 5272668 5272665 +
atttcagttacatgtaagtaaaaa

SEQ ID NO: 64674 - DNA, 24 bp, Artificial Sequence
  Synthetic oligonucleotide; CCCAGATT chr11 5272695 5272718 5272715 +
ccagccccctagtgttctgtggac

SEQ ID NO: 64675 - DNA, 24 bp, Artificial Sequence
  Synthetic oligonucleotide; CTTAGATT chr11 5273122 5273145 5273142 +
tcagagtatggacaccagtcttct

SEQ ID NO: 64676 - DNA, 24 bp, Artificial Sequence
  Synthetic oligonucleotide; AATGGATT chr11 5273476 5273499 5273496 +
tttatcatatgagataccatgaaa

SEQ ID NO: 64677 - DNA, 24 bp, Artificial Sequence
  Synthetic oligonucleotide; GAAAGATT chr11 5273556 5273579 5273576 +
gttatggccatccaggatagatca

SEQ ID NO: 64678 - DNA, 24 bp, Artificial Sequence
  Synthetic oligonucleotide; TGAAGATT chr11 5273697 5273720 5273717 +
ttagaaagaaacacccaaattcga

SEQ ID NO: 64679 - DNA, 24 bp, Artificial Sequence
  Synthetic oligonucleotide; GCAGGATT chr11 5273757 5273780 5273777 +
catttgtaatttcttaagttctat

SEQ ID NO: 64680 - DNA, 24 bp, Artificial Sequence
  Synthetic oligonucleotide; ATTAGATT chr11 5273909 5273932 5273929 +
ctattagtatgaaaaattatataa

SEQ ID NO: 64681 - DNA, 24 bp, Artificial Sequence
  Synthetic oligonucleotide; TTAGGATT chr11 5274087 5274110 5274107 +
aaccactgataggaaaagagctgc

SEQ ID NO: 64682 - DNA, 24 bp, Artificial Sequence
  Synthetic oligonucleotide; GCCAGATT chr11 5274103 5274126 5274123 +
agagctgcttaggattctaaatta

SEQ ID NO: 64683 - DNA, 24 bp, Artificial Sequence
  Synthetic oligonucleotide; AAATGATT chr11 5274175 5274198 5274195 +
ctcagaacaaaaatagatgtaagc

SEQ ID NO: 64684 - DNA, 24 bp, Artificial Sequence
  Synthetic oligonucleotide; ACTAGATT chr11 5274185 5274208 5274205 +
aaatagatgtaagcaaatgattct

SEQ ID NO: 64685 - DNA, 24 bp, Artificial Sequence
  Synthetic oligonucleotide; GTTAGATT chr11 5274197 5274220 5274217 +
gcaaatgattctactagattttgt

SEQ ID NO: 64686 - DNA, 24 bp, Artificial Sequence
  Synthetic oligonucleotide; TAGTGATT chr11 5274476 5274499 5274496 +
tcaggtattacgcttagcatccat

SEQ ID NO: 64687 - DNA, 24 bp, Artificial Sequence
  Synthetic oligonucleotide; TCATGATT chr11 5274992 5275015 5275012 +
aagtaaagatgccttcatttattt

SEQ ID NO: 64688 - DNA, 24 bp, Artificial Sequence
  Synthetic oligonucleotide; CTCTGATT chr11 5275193 5275216 5275213 +
ttatgtctagaaattttgaaaaac

SEQ ID NO: 64689 - DNA, 24 bp, Artificial Sequence
  Synthetic oligonucleotide; CTAAGATT chr11 5275206 5275229 5275226 +
ttttgaaaaacctctgattatatg

SEQ ID NO: 64690 - DNA, 24 bp, Artificial Sequence
  Synthetic oligonucleotide; CTTTGATT chr11 5275329 5275352 5275349 +
tgcctatgcatgctatcttcagta

SEQ ID NO: 64691 - DNA, 24 bp, Artificial Sequence
  Synthetic oligonucleotide; TGAGGATT chr11 5275410 5275433 5275430 +
tatttctctggagaaggttaaaac

SEQ ID NO: 64692 - DNA, 24 bp, Artificial Sequence
  Synthetic oligonucleotide; GAATGATT chr11 5275550 5275573 5275570 +
tgtgtcactaagggtgaggatgct

SEQ ID NO: 64693 - DNA, 24 bp, Artificial Sequence
  Synthetic oligonucleotide; GCATGATT chr11 5276094 5276117 5276114 +
tataggttagtgtttgagagtcct

SEQ ID NO: 64694 - DNA, 24 bp, Artificial Sequence
  Synthetic oligonucleotide; ATGTGATT chr11 5276210 5276233 5276230 +
tgtgtgtgtgttgtgtttacaaat

SEQ ID NO: 64695 - DNA, 24 bp, Artificial Sequence
  Synthetic oligonucleotide; TAGAGATT chr11 5276620 5276643 5276640 +
attgaatagaagtatgcttatcat

SEQ ID NO: 64696 - DNA, 24 bp, Artificial Sequence
  Synthetic oligonucleotide; CACTGATT chr11 5277093 5277116 5277113 +
ggcttagcacttccagctctactc

SEQ ID NO: 64697 - DNA, 24 bp, Artificial Sequence
  Synthetic oligonucleotide; ATGAGATT chr11 5277313 5277336 5277333 +
gcaaatgaaacatgttatatacca

SEQ ID NO: 64698 - DNA, 24 bp, Artificial Sequence
  Synthetic oligonucleotide; GTGTGATT chr11 5277363 5277386 5277383 +
aaaaaaactgaaatgaaggccaga

SEQ ID NO: 64699 - DNA, 24 bp, Artificial Sequence
  Synthetic oligonucleotide; CTATGATT chr11 5277484 5277507 5277504 +
gatgaggaacccatttatatgaaa

SEQ ID NO: 64700 - DNA, 24 bp, Artificial Sequence
  Synthetic oligonucleotide; ATGAGATT chr11 5277585 5277608 5277605 +
gaatatcaataaggccaatgtagg

SEQ ID NO: 64701 - DNA, 24 bp, Artificial Sequence
  Synthetic oligonucleotide; TAAGGATT chr11 5277796 5277819 5277816 +
atgaacaactattgtagagaattg

SEQ ID NO: 64702 - DNA, 24 bp, Artificial Sequence
  Synthetic oligonucleotide; GGAAGATT chr11 5277940 5277963 5277960 +
tgtagtggggcagtggtagaagca

SEQ ID NO: 64703 - DNA, 24 bp, Artificial Sequence
  Synthetic oligonucleotide; ACAGGATT chr11 5278064 5278087 5278084 +
aaaacatcctttcacgaaaaacca

SEQ ID NO: 64704 - DNA, 24 bp, Artificial Sequence
  Synthetic oligonucleotide; TAAGGATT chr11 5278165 5278188 5278185 +
tctggctgtgagtatatgtcagag

SEQ ID NO: 64705 - DNA, 24 bp, Artificial Sequence
  Synthetic oligonucleotide; AAGCGATT chr11 5278603 5278626 5278623 +
gtgcaaactccacctccccggttc

SEQ ID NO: 64706 - DNA, 24 bp, Artificial Sequence
  Synthetic oligonucleotide; GTTGGATT chr11 5278634 5278657 5278654 +
tctcctgcctcagcctcccaagta

SEQ ID NO: 64707 - DNA, 24 bp, Artificial Sequence
  Synthetic oligonucleotide; CTGTGATT chr11 5278770 5278793 5278790 +
tgcccaccttggcgtcccaaactg

SEQ ID NO: 64708 - DNA, 24 bp, Artificial Sequence
  Synthetic oligonucleotide; TAAGGATT chr11 5279144 5279167 5279164 +
atgaatagcccctttgtcaaaaat

SEQ ID NO: 64709 - DNA, 24 bp, Artificial Sequence
  Synthetic oligonucleotide; TTGTGATT chr11 5279373 5279396 5279393 +
cccactgttttttttctaattaat

SEQ ID NO: 64710 - DNA, 24 bp, Artificial Sequence
  Synthetic oligonucleotide; GGTTGATT chr11 5279467 5279490 5279487 +
tgttatctgtataaatactcttca

SEQ ID NO: 64711 - DNA, 24 bp, Artificial Sequence
  Synthetic oligonucleotide; GCCTGATT chr11 5280381 5280404 5280401 +
aatctatacacatgtattaataaa

SEQ ID NO: 64712 - DNA, 24 bp, Artificial Sequence
  Synthetic oligonucleotide; ATTTGATT chr11 5280428 5280451 5280448 +
atagaggccacctgcaagataaat

SEQ ID NO: 64713 - DNA, 24 bp, Artificial Sequence
  Synthetic oligonucleotide; CTGGGATT chr11 5281220 5281243 5281240 +
ctcctgcctcagccaccctaatag

SEQ ID NO: 64714 - DNA, 24 bp, Artificial Sequence
  Synthetic oligonucleotide; CTGGGATT chr11 5281356 5281379 5281376 +
cacccacctcagcctcccaaagtg

SEQ ID NO: 64715 - DNA, 24 bp, Artificial Sequence
  Synthetic oligonucleotide; CCCAGATT chr11 5281383 5281406 5281403 +
ggattacaggtgtgagacaccatg

SEQ ID NO: 64716 - DNA, 24 bp, Artificial Sequence
  Synthetic oligonucleotide; TGTGGATT chr11 5281445 5281468 5281465 +
gggggaaaagaatgtttctctcac

SEQ ID NO: 64717 - DNA, 24 bp, Artificial Sequence
  Synthetic oligonucleotide; TCAAGATT chr11 5281474 5281497 5281494 +
attattttagagagtggagaatgg

SEQ ID NO: 64718 - DNA, 24 bp, Artificial Sequence
  Synthetic oligonucleotide; GAGAGATT chr11 5281842 5281865 5281862 +
cactttaggcagccatgttgccat

SEQ ID NO: 64719 - DNA, 24 bp, Artificial Sequence
  Synthetic oligonucleotide; ATGAGATT chr11 5281974 5281997 5281994 +
gtattagctaatagaattatgagg

SEQ ID NO: 64720 - DNA, 24 bp, Artificial Sequence
  Synthetic oligonucleotide; AGCAGATT chr11 5282146 5282169 5282166 +
tatttcttgactgttaatgttggc

SEQ ID NO: 64721 - DNA, 24 bp, Artificial Sequence
  Synthetic oligonucleotide; AAATGATT chr11 5282505 5282528 5282525 +
atgagaaagacaatgtgaagcccc

SEQ ID NO: 64722 - DNA, 24 bp, Artificial Sequence
  Synthetic oligonucleotide; CTTTGATT chr11 5283265 5283288 5283285 +
aagcttggacaaattatttcatgt

SEQ ID NO: 64723 - DNA, 24 bp, Artificial Sequence
  Synthetic oligonucleotide; AAGTGATT chr11 5283583 5283606 5283603 +
ctgcaacctccacctcctgggttc

SEQ ID NO: 64724 - DNA, 24 bp, Artificial Sequence
  Synthetic oligonucleotide; CTGGGATT chr11 5283615 5283638 5283635 +
ctcctgcctcagcctcctgagtag

SEQ ID NO: 64725 - DNA, 24 bp, Artificial Sequence
  Synthetic oligonucleotide; GGCTGATT chr11 5283645 5283668 5283665 +
ttatagacgcgtgccaccacacct

SEQ ID NO: 64726 - DNA, 24 bp, Artificial Sequence
  Synthetic oligonucleotide; CTGGGATT chr11 5283752 5283775 5283772 +
caattgccttggcctcccaaagtg

SEQ ID NO: 64727 - DNA, 24 bp, Artificial Sequence
  Synthetic oligonucleotide; ATTTGATT chr11 5283817 5283840 5283837 +
cccggcctcatatgataaacttaa

SEQ ID NO: 64728 - DNA, 24 bp, Artificial Sequence
  Synthetic oligonucleotide; ATGAGATT chr11 5283919 5283942 5283939 +
tatctcacagaattaccatatgta

SEQ ID NO: 64729 - DNA, 24 bp, Artificial Sequence
  Synthetic oligonucleotide; GAAAGATT chr11 5283959 5283982 5283979 +
tcataaaatggcacctgacatata

SEQ ID NO: 64730 - DNA, 24 bp, Artificial Sequence
  Synthetic oligonucleotide; TGCAGATT chr11 5284087 5284110 5284107 +
atcttgtttccctctcaactcctg

SEQ ID NO: 64731 - DNA, 24 bp, Artificial Sequence
  Synthetic oligonucleotide; GTCAGATT chr11 5284145 5284168 5284165 +
ttgggcttccatgtttccagtgaa

SEQ ID NO: 64732 - DNA, 24 bp, Artificial Sequence
  Synthetic oligonucleotide; GAATGATT chr11 5284980 5285003 5285000 +
tcatggctgtctcctttatccaca

SEQ ID NO: 64733 - DNA, 24 bp, Artificial Sequence
  Synthetic oligonucleotide; AATTGATT chr11 5285207 5285230 5285227 +
cgtgaggatggaaaacaatagcaa

SEQ ID NO: 64734 - DNA, 24 bp, Artificial Sequence
  Synthetic oligonucleotide; AGTAGATT chr11 5285242 5285265 5285262 +
ctataaaaggtctcaacaaatagt

SEQ ID NO: 64735 - DNA, 24 bp, Artificial Sequence
  Synthetic oligonucleotide; TAGTGATT chr11 5285359 5285382 5285379 +
attcctcttattatattcttctta

SEQ ID NO: 64736 - DNA, 24 bp, Artificial Sequence
  Synthetic oligonucleotide; AGGAGATT chr11 5285655 5285678 5285675 +
agaaaccatttccagatagaagtg

SEQ ID NO: 64737 - DNA, 24 bp, Artificial Sequence
  Synthetic oligonucleotide; TTCTGATT chr11 5285782 5285805 5285802 +
ttccctactcttatccaatggggc

SEQ ID NO: 64738 - DNA, 24 bp, Artificial Sequence
  Synthetic oligonucleotide; CCCAGATT chr11 5285811 5285834 5285831 +
attttaagccagtcttcacaaagc

SEQ ID NO: 64739 - DNA, 24 bp, Artificial Sequence
  Synthetic oligonucleotide; ATCTGATT chr11 5285927 5285950 5285947 +
tttgtctcaacatttctgttgata

SEQ ID NO: 64740 - DNA, 24 bp, Artificial Sequence
  Synthetic oligonucleotide; TAGGGATT chr11 5286107 5286130 5286127 +
tttgctcagggtagaaatccccta

SEQ ID NO: 64741 - DNA, 24 bp, Artificial Sequence
  Synthetic oligonucleotide; CACAGATT chr11 5286157 5286180 5286177 +
aagctttctatatggtgaggagct

SEQ ID NO: 64742 - DNA, 24 bp, Artificial Sequence
  Synthetic oligonucleotide; ACTTGATT chr11 5286253 5286276 5286273 +
tctaatcctgggttacataatata

SEQ ID NO: 64743 - DNA, 24 bp, Artificial Sequence
  Synthetic oligonucleotide; ATATGATT chr11 5286881 5286904 5286901 +
cctgaaagaatccaagagtattaa

SEQ ID NO: 64744 - DNA, 24 bp, Artificial Sequence
  Synthetic oligonucleotide; GAATGATT chr11 5287009 5287032 5287029 +
aacactagttttcacctgcagcaa

SEQ ID NO: 64745 - DNA, 24 bp, Artificial Sequence
  Synthetic oligonucleotide; GGCAGATT chr11 5287188 5287211 5287208 +
ccagcactttggaaggctgaggtg

SEQ ID NO: 64746 - DNA, 24 bp, Artificial Sequence
  Synthetic oligonucleotide; CCGAGATT chr11 5287363 5287386 5287383 +
ctgggaagtgcaagttgcagtgag

SEQ ID NO: 64747 - DNA, 24 bp, Artificial Sequence
  Synthetic oligonucleotide; CTTGGATT chr11 5287971 5287994 5287991 +
cagtatgacatggaaatgatcagg

SEQ ID NO: 64748 - DNA, 24 bp, Artificial Sequence
  Synthetic oligonucleotide; GGGAGATT chr11 5289392 5289415 5289412 +
aaatgggtgactgtagggttgaga

SEQ ID NO: 64749 - DNA, 24 bp, Artificial Sequence
  Synthetic oligonucleotide; TTAAGATT chr11 5289687 5289710 5289707 +
aagaaatgagacccttgtttacct

SEQ ID NO: 64750 - DNA, 24 bp, Artificial Sequence
  Synthetic oligonucleotide; AGGAGATT chr11 5289852 5289875 5289872 +
tgggatctcagatgtagggaaaag

SEQ ID NO: 64751 - DNA, 24 bp, Artificial Sequence
  Synthetic oligonucleotide; AATTGATT chr11 5289987 5290010 5290007 +
tttgacatcagaatataacctagg

SEQ ID NO: 64752 - DNA, 24 bp, Artificial Sequence
  Synthetic oligonucleotide; TATGGATT chr11 5290193 5290216 5290213 +
tgtaagtgctcagggctgtgtgtg

SEQ ID NO: 64753 - DNA, 24 bp, Artificial Sequence
  Synthetic oligonucleotide; GGCTGATT chr11 5290303 5290326 5290323 +
cttagctgcttagcttaattgtga

SEQ ID NO: 64754 - DNA, 24 bp, Artificial Sequence
  Synthetic oligonucleotide; AAAGGATT chr11 5291713 5291736 5291733 +
tacagatattttccacaaagagta

SEQ ID NO: 64755 - DNA, 24 bp, Artificial Sequence
  Synthetic oligonucleotide; AAATGATT chr11 5291939 5291962 5291959 +
aaaggaaaggcaagtcatattaac

SEQ ID NO: 64756 - DNA, 24 bp, Artificial Sequence
  Synthetic oligonucleotide; AGAAGATT chr11 5292048 5292071 5292068 +
gttaaaggacatggccatcagtac

SEQ ID NO: 64757 - DNA, 24 bp, Artificial Sequence
  Synthetic oligonucleotide; AATAGATT chr11 5292635 5292658 5292655 +
atgtcatatgtgtcaggatgcagt

SEQ ID NO: 64758 - DNA, 24 bp, Artificial Sequence
  Synthetic oligonucleotide; GAATGATT chr11 5292654 5292677 5292674 +
gcagtaatagatttagaaaacatt

SEQ ID NO: 64759 - DNA, 24 bp, Artificial Sequence
  Synthetic oligonucleotide; TTCAGATT chr11 5292765 5292788 5292785 +
ttgatcacttttggaggtcaggaa

SEQ ID NO: 64760 - DNA, 24 bp, Artificial Sequence
  Synthetic oligonucleotide; AGTGGATT chr11 5292830 5292853 5292850 +
cattatagcagaatgtaggccttg

SEQ ID NO: 64761 - DNA, 24 bp, Artificial Sequence
  Synthetic oligonucleotide; CTGTGATT chr11 5293020 5293043 5293040 +
tgggccaggagtccaggtgccttc

SEQ ID NO: 64762 - DNA, 24 bp, Artificial Sequence
  Synthetic oligonucleotide; TATTGATT chr11 5293201 5293224 5293221 +
gctgttggaaattgttgagaagta

SEQ ID NO: 64763 - DNA, 24 bp, Artificial Sequence
  Synthetic oligonucleotide; GCAAGATT chr11 5293584 5293607 5293604 +
tgtagacccaaacagtgagcagca

SEQ ID NO: 64764 - DNA, 24 bp, Artificial Sequence
  Synthetic oligonucleotide; TGCTGATT chr11 5293707 5293730 5293727 +
tcttatctggccccacccacatcc

SEQ ID NO: 64765 - DNA, 24 bp, Artificial Sequence
  Synthetic oligonucleotide; CACTGATT chr11 5293745 5293768 5293765 +
gcccagtggtctgttttgacaggg

SEQ ID NO: 64766 - DNA, 24 bp, Artificial Sequence
  Synthetic oligonucleotide; ACCAGATT chr11 5293801 5293824 5293821 +
gacacaaaggttctccacgtcccc

SEQ ID NO: 64767 - DNA, 24 bp, Artificial Sequence
  Synthetic oligonucleotide; TGTTGATT chr11 5293873 5293896 5293893 +
ccaccagagtagctagatacagag

SEQ ID NO: 64768 - DNA, 24 bp, Artificial Sequence
  Synthetic oligonucleotide; TGCTGATT chr11 5293914 5293937 5293934 +
acaaaccctgagctagacacaggg

SEQ ID NO: 64769 - DNA, 24 bp, Artificial Sequence
  Synthetic oligonucleotide; TGTTGATT chr11 5294033 5294056 5294053 +
ccaccagagtagctagatacagag

SEQ ID NO: 64770 - DNA, 24 bp, Artificial Sequence
  Synthetic oligonucleotide; TGCTGATT chr11 5294074 5294097 5294094 +
acaaaccctgagctagacacaggg

SEQ ID NO: 64771 - DNA, 24 bp, Artificial Sequence
  Synthetic oligonucleotide; TGCCGATT chr11 5294115 5294138 5294135 +
acaaaccttgagctagatacagac

SEQ ID NO: 64772 - DNA, 24 bp, Artificial Sequence
  Synthetic oligonucleotide; TGTTGATT chr11 5294191 5294214 5294211 +
ccccaccagagtagctagatagag

SEQ ID NO: 64773 - DNA, 24 bp, Artificial Sequence
  Synthetic oligonucleotide; TGCTGATT chr11 5294232 5294255 5294252 +
acaaaccctgagctagacacaggg

SEQ ID NO: 64774 - DNA, 24 bp, Artificial Sequence
  Synthetic oligonucleotide; TAATGATT chr11 5295188 5295211 5295208 +
gtttcctcatgaattattattgta

SEQ ID NO: 64775 - DNA, 24 bp, Artificial Sequence
  Synthetic oligonucleotide; TGTAGATT chr11 5295466 5295489 5295486 +
tattacttttatactatcctagtg

SEQ ID NO: 64776 - DNA, 24 bp, Artificial Sequence
  Synthetic oligonucleotide; CAAGGATT chr11 5295553 5295576 5295573 +
aataaatagatgagatgacattgt

SEQ ID NO: 64777 - DNA, 24 bp, Artificial Sequence
  Synthetic oligonucleotide; ATGTGATT chr11 5295843 5295866 5295863 +
gtatttagaaggctttggagagga

SEQ ID NO: 64778 - DNA, 24 bp, Artificial Sequence
  Synthetic oligonucleotide; AAATGATT chr11 5296082 5296105 5296102 +
ttcctaactatttaaaatgctatg

SEQ ID NO: 64779 - DNA, 24 bp, Artificial Sequence
  Synthetic oligonucleotide; TGCAGATT chr11 5296091 5296114 5296111 +
atttaaaatgctatgaaatgattt

SEQ ID NO: 64780 - DNA, 24 bp, Artificial Sequence
  Synthetic oligonucleotide; AGCAGATT chr11 5296221 5296244 5296241 +
atctatctctttgtaacttaccac

SEQ ID NO: 64781 - DNA, 24 bp, Artificial Sequence
  Synthetic oligonucleotide; CAAGGATT chr11 5296363 5296386 5296383 +
gttttatctcttctcattttctat

SEQ ID NO: 64782 - DNA, 24 bp, Artificial Sequence
  Synthetic oligonucleotide; AATAGATT chr11 5296371 5296394 5296391 +
tcttctcattttctatcaaggatt

SEQ ID NO: 64783 - DNA, 24 bp, Artificial Sequence
  Synthetic oligonucleotide; GATAGATT chr11 5296483 5296506 5296503 +
agcaaatgcattttaacactccaa

SEQ ID NO: 64784 - DNA, 24 bp, Artificial Sequence
  Synthetic oligonucleotide; TTTAGATT chr11 5296489 5296512 5296509 +
tgcattttaacactccaagataga

SEQ ID NO: 64785 - DNA, 24 bp, Artificial Sequence
  Synthetic oligonucleotide; TACAGATT chr11 5296803 5296826 5296823 +
tacacagctgtttaaattaggaat

SEQ ID NO: 64786 - DNA, 24 bp, Artificial Sequence
  Synthetic oligonucleotide; TACAGATT chr11 5296834 5296857 5296854 +
ttcgccagataattgtatatctga

SEQ ID NO: 64787 - DNA, 24 bp, Artificial Sequence
  Synthetic oligonucleotide; TGTGGATT chr11 5297094 5297117 5297114 +
caatgcatgcagaaagaagcttaa

SEQ ID NO: 64788 - DNA, 24 bp, Artificial Sequence
  Synthetic oligonucleotide; AATTGATT chr11 5297541 5297564 5297561 +
aagacactagcaacttgaatacat

SEQ ID NO: 64789 - DNA, 24 bp, Artificial Sequence
  Synthetic oligonucleotide; AAGTGATT chr11 5297975 5297998 5297995 +
tataatataggcatgttaatatac

SEQ ID NO: 64790 - DNA, 24 bp, Artificial Sequence
  Synthetic oligonucleotide; GGAGGATT chr11 5298185 5298208 5298205 +
ccctatcattaggaggccagggtg

SEQ ID NO: 64791 - DNA, 24 bp, Artificial Sequence
  Synthetic oligonucleotide; GAAGGATT chr11 5298320 5298343 5298340 +
ctaggtactcaaaaagctgaggaa

SEQ ID NO: 64792 - DNA, 24 bp, Artificial Sequence
  Synthetic oligonucleotide; CCAGGATT chr11 5298336 5298359 5298356 +
ctgaggaagaaggattgcttgagc

SEQ ID NO: 64793 - DNA, 24 bp, Artificial Sequence
  Synthetic oligonucleotide; CACTGATT chr11 5298765 5298788 5298785 +
ggaagctgcacttgtttgaaagga

SEQ ID NO: 64794 - DNA, 24 bp, Artificial Sequence
  Synthetic oligonucleotide; AAAGGATT chr11 5298843 5298866 5298863 +
aggtggatgctgacttaataattg

SEQ ID NO: 64795 - DNA, 24 bp, Artificial Sequence
  Synthetic oligonucleotide; GAGTGATT chr11 5298939 5298962 5298959 +
aaatatacatttacttaagaaaat

SEQ ID NO: 64796 - DNA, 24 bp, Artificial Sequence
  Synthetic oligonucleotide; AATTGATT chr11 5298966 5298989 5298986 +
tgatttttaaaatttatccttttt

SEQ ID NO: 64797 - DNA, 24 bp, Artificial Sequence
  Synthetic oligonucleotide; GAAAGATT chr11 5299736 5299759 5299756 +
actgtccagatgtaaaataaatat

SEQ ID NO: 64798 - DNA, 24 bp, Artificial Sequence
  Synthetic oligonucleotide; TTGAGATT chr11 5299899 5299922 5299919 +
ttcagagaggaatgaatgcaactt

SEQ ID NO: 64799 - DNA, 24 bp, Artificial Sequence
  Synthetic oligonucleotide; AGAAGATT chr11 5300051 5300074 5300071 +
cataaagacttacaaacactttga

SEQ ID NO: 64800 - DNA, 24 bp, Artificial Sequence
  Synthetic oligonucleotide; TCGAGATT chr11 5300163 5300186 5300183 +
actatttcatgaagtgaaaaagtc

SEQ ID NO: 64801 - DNA, 24 bp, Artificial Sequence
  Synthetic oligonucleotide; TTTGGATT chr11 5300716 5300739 5300736 +
ttctgaaatcatagttactcttct

SEQ ID NO: 64802 - DNA, 24 bp, Artificial Sequence
  Synthetic oligonucleotide; TTGAGATT chr11 5300969 5300992 5300989 +
agaggcccagaaatcctagagatc

SEQ ID NO: 64803 - DNA, 24 bp, Artificial Sequence
  Synthetic oligonucleotide; ATAGGATT chr11 5301063 5301086 5301083 +
tgcttggtcttgatgctataaatg

SEQ ID NO: 64804 - DNA, 24 bp, Artificial Sequence
  Synthetic oligonucleotide; GAGAGATT chr11 5301218 5301241 5301238 +
gctaatatgggagacacaagtgtt

SEQ ID NO: 64805 - DNA, 24 bp, Artificial Sequence
  Synthetic oligonucleotide; TGAGGATT chr11 5301265 5301288 5301285 +
cagacgcaatgcccatcactgtct

SEQ ID NO: 64806 - DNA, 24 bp, Artificial Sequence
  Synthetic oligonucleotide; TGATGATT chr11 5301289 5301312 5301309 +
tgaggattagtatataagaaaaga

SEQ ID NO: 64807 - DNA, 24 bp, Artificial Sequence
  Synthetic oligonucleotide; ATGTGATT chr11 5301342 5301365 5301362 +
aaagaagtctgaataattggatat

SEQ ID NO: 64808 - DNA, 24 bp, Artificial Sequence
  Synthetic oligonucleotide; ACCTGATT chr11 5301593 5301616 5301613 +
gtcataggccaaaacaagcaagat

SEQ ID NO: 64809 - DNA, 24 bp, Artificial Sequence
  Synthetic oligonucleotide; GAAGGATT chr11 5301623 5301646 5301643 +
ttctacaatggccagtgaatgaat

SEQ ID NO: 64810 - DNA, 24 bp, Artificial Sequence
  Synthetic oligonucleotide; TCTGGATT chr11 5302054 5302077 5302074 +
tttacctcaaaacttaaatatttt

SEQ ID NO: 64811 - DNA, 24 bp, Artificial Sequence
  Synthetic oligonucleotide; TTAGGATT chr11 5302373 5302396 5302393 +
ttgaaactaatgggacagctgtat

SEQ ID NO: 64812 - DNA, 24 bp, Artificial Sequence
  Synthetic oligonucleotide; CTATGATT chr11 5302590 5302613 5302610 +
ccaggactgtgaggctgcagggag

SEQ ID NO: 64813 - DNA, 24 bp, Artificial Sequence
  Synthetic oligonucleotide; CATAGATT chr11 5302937 5302960 5302957 +
caaaagcctaatacttgttagagt

SEQ ID NO: 64814 - DNA, 24 bp, Artificial Sequence
  Synthetic oligonucleotide; TCAAGATT chr11 5303217 5303240 5303237 +
atttataattacacttttacaaag

SEQ ID NO: 64815 - DNA, 24 bp, Artificial Sequence
  Synthetic oligonucleotide; AATTGATT chr11 5303313 5303336 5303333 +
ggaaactcagtttctcccaaattc

SEQ ID NO: 64816 - DNA, 24 bp, Artificial Sequence
  Synthetic oligonucleotide; AATGGATT chr11 5303787 5303810 5303807 +
ccttccaatgttgccttataagag

SEQ ID NO: 64817 - DNA, 24 bp, Artificial Sequence
  Synthetic oligonucleotide; GCCTGATT chr11 5303888 5303911 5303908 +
accagatggaggaagccggaggag

SEQ ID NO: 64818 - DNA, 24 bp, Artificial Sequence
  Synthetic oligonucleotide; GACTGATT chr11 5304312 5304335 5304332 +
cttgcccctttctgagtgcctttg

SEQ ID NO: 64819 - DNA, 24 bp, Artificial Sequence
  Synthetic oligonucleotide; CCAAGATT chr11 5304986 5305009 5305006 +
gggagcagaggtcgtcgcagtgag

SEQ ID NO: 64820 - DNA, 24 bp, Artificial Sequence
  Synthetic oligonucleotide; TGTTGATT chr11 5305276 5305299 5305296 +
tatcaattaatataaacatagagg

SEQ ID NO: 64821 - DNA, 24 bp, Artificial Sequence
  Synthetic oligonucleotide; TGATGATT chr11 5306393 5306416 5306413 +
agccaccaccaaaccttttcgtct

SEQ ID NO: 64822 - DNA, 24 bp, Artificial Sequence
  Synthetic oligonucleotide; TATTGATT chr11 5306428 5306451 5306448 +
catcagacatttatttattctttc

SEQ ID NO: 64823 - DNA, 24 bp, Artificial Sequence
  Synthetic oligonucleotide; TCCTGATT chr11 5306814 5306837 5306834 +
tgtttatcatgtaattattcctaa

SEQ ID NO: 64824 - DNA, 24 bp, Artificial Sequence
  Synthetic oligonucleotide; ATTGGATT chr11 5306903 5306926 5306923 +
tcccattctgaaatctcttttttc

SEQ ID NO: 64825 - DNA, 24 bp, Artificial Sequence
  Synthetic oligonucleotide; TTCAGATT chr11 5307002 5307025 5307022 +
ctcaaaacatgtcaaattcagtct

SEQ ID NO: 64826 - DNA, 24 bp, Artificial Sequence
  Synthetic oligonucleotide; GTAAGATT chr11 5307132 5307155 5307152 +
ctaaatatcctctcatatattcag

SEQ ID NO: 64827 - DNA, 24 bp, Artificial Sequence
  Synthetic oligonucleotide; ACGTGATT chr11 5307148 5307171 5307168 +
atattcaggtaagattttgccaaa

SEQ ID NO: 64828 - DNA, 24 bp, Artificial Sequence
  Synthetic oligonucleotide; TGTTGATT chr11 5307204 5307227 5307224 +
ttccagaattcattttgcagaacc

SEQ ID NO: 64829 - DNA, 24 bp, Artificial Sequence
  Synthetic oligonucleotide; GAAAGATT chr11 5307300 5307323 5307320 +
tactcacagtaaaacaaaacttct

SEQ ID NO: 64830 - DNA, 24 bp, Artificial Sequence
  Synthetic oligonucleotide; ATAAGATT chr11 5307462 5307485 5307482 +
ttacaacctctacatctgtttgta

SEQ ID NO: 64831 - DNA, 24 bp, Artificial Sequence
  Synthetic oligonucleotide; GAAAGATT chr11 5307586 5307609 5307606 +
aaaaatccataacaacatcaagaa

SEQ ID NO: 64832 - DNA, 24 bp, Artificial Sequence
  Synthetic oligonucleotide; AAGTGATT chr11 5307873 5307896 5307893 +
ctgcagcctcaagcttttaggctt

SEQ ID NO: 64833 - DNA, 24 bp, Artificial Sequence
  Synthetic oligonucleotide; TGGAGATT chr11 5308369 5308392 5308389 +
aggtatgcagtaaaacttgttttc

SEQ ID NO: 64834 - DNA, 24 bp, Artificial Sequence
  Synthetic oligonucleotide; GTAAGATT chr11 5308533 5308556 5308553 +
aattgcactttgggcccctgctga

SEQ ID NO: 64835 - DNA, 24 bp, Artificial Sequence
  Synthetic oligonucleotide; GAGAGATT chr11 5308757 5308780 5308777 +
gtgtccctctcttatacctcgtca

SEQ ID NO: 64836 - DNA, 24 bp, Artificial Sequence
  Synthetic oligonucleotide; GATAGATT chr11 5308834 5308857 5308854 +
tcagtgatgctggtcatcactgaa

SEQ ID NO: 64837 - DNA, 24 bp, Artificial Sequence
  Synthetic oligonucleotide; ACCAGATT chr11 5309285 5309308 5309305 +
aaacagaggagtctttgggggata

SEQ ID NO: 64838 - DNA, 24 bp, Artificial Sequence
  Synthetic oligonucleotide; TTAAGATT chr11 5309293 5309316 5309313 +
gagtctttgggggataaccagatt

SEQ ID NO: 64839 - DNA, 24 bp, Artificial Sequence
  Synthetic oligonucleotide; AATTGATT chr11 5309393 5309416 5309413 +
cattgggtaaataatcggttttac

SEQ ID NO: 64840 - DNA, 24 bp, Artificial Sequence
  Synthetic oligonucleotide; CATAGATT chr11 5309470 5309493 5309490 +
ctacacctatttttttaagcattc

SEQ ID NO: 64841 - DNA, 24 bp, Artificial Sequence
  Synthetic oligonucleotide; CAAAGATT chr11 5309864 5309887 5309884 +
aactttactcagtgaagtccagag

SEQ ID NO: 64842 - DNA, 24 bp, Artificial Sequence
  Synthetic oligonucleotide; GAAGGATT chr11 5309954 5309977 5309974 +
ggatgccacatatttttaggtctg

SEQ ID NO: 64843 - DNA, 24 bp, Artificial Sequence
  Synthetic oligonucleotide; GTCTGATT chr11 5310429 5310452 5310449 +
ataagtcatacgcaaaagaacatt

SEQ ID NO: 64844 - DNA, 24 bp, Artificial Sequence
  Synthetic oligonucleotide; AGTAGATT chr11 5310483 5310506 5310503 +
ataggcaaattcatagagacaaaa

SEQ ID NO: 64845 - DNA, 24 bp, Artificial Sequence
  Synthetic oligonucleotide; CATGGATT chr11 5310516 5310539 5310536 +
gaagttaccagagtgtaggaagaa

SEQ ID NO: 64846 - DNA, 24 bp, Artificial Sequence
  Synthetic oligonucleotide; AACTGATT chr11 5310531 5310554 5310551 +
taggaagaacatggattggggagt

SEQ ID NO: 64847 - DNA, 24 bp, Artificial Sequence
  Synthetic oligonucleotide; TGGTGATT chr11 5310590 5310613 5310610 +
aatacaaaattttagaaatagtgg

SEQ ID NO: 64848 - DNA, 24 bp, Artificial Sequence
  Synthetic oligonucleotide; AAAAGATT chr11 5310781 5310804 5310801 +
aaattatgtctaagataaaatatt

SEQ ID NO: 64849 - DNA, 24 bp, Artificial Sequence
  Synthetic oligonucleotide; ATTTGATT chr11 5310881 5310904 5310901 +
tctcttatatcttaaagaccattt

SEQ ID NO: 64850 - DNA, 24 bp, Artificial Sequence
  Synthetic oligonucleotide; CATAGATT chr11 5310946 5310969 5310966 +
tttcacttgagagaaagaatcaag

SEQ ID NO: 64851 - DNA, 24 bp, Artificial Sequence
  Synthetic oligonucleotide; CTATGATT chr11 5310986 5311009 5311006 +
ttccatatggtcctcctcaaatat

SEQ ID NO: 64852 - DNA, 24 bp, Artificial Sequence
  Synthetic oligonucleotide; ATCAGATT chr11 5311135 5311158 5311155 +
atccatcttcctatttatgtttgt

SEQ ID NO: 64853 - DNA, 24 bp, Artificial Sequence
  Synthetic oligonucleotide; AAATGATT chr11 5311444 5311467 5311464 +
tcaggcaaaaagaaatacatactg

SEQ ID NO: 64854 - DNA, 24 bp, Artificial Sequence
  Synthetic oligonucleotide; GAATGATT chr11 5311457 5311480 5311477 +
aatacatactgaaatgatttgaat

SEQ ID NO: 64855 - DNA, 24 bp, Artificial Sequence
  Synthetic oligonucleotide; TAATGATT chr11 5311599 5311622 5311619 +
agtgtcccacaactttaaaaatta

SEQ ID NO: 64856 - DNA, 24 bp, Artificial Sequence
  Synthetic oligonucleotide; TGGTGATT chr11 5311689 5311712 5311709 +
ttccaagaacatgtcagaaattga

SEQ ID NO: 64857 - DNA, 24 bp, Artificial Sequence
  Synthetic oligonucleotide; TTATGATT chr11 5312261 5312284 5312281 +
tccattcagtgtcttctttctgct

SEQ ID NO: 64858 - DNA, 24 bp, Artificial Sequence
  Synthetic oligonucleotide; TTTGGATT chr11 5312290 5312313 5312310 +
attaatcacagcacttgttttaaa

SEQ ID NO: 64859 - DNA, 24 bp, Artificial Sequence
  Synthetic oligonucleotide; GAATGATT chr11 5312424 5312447 5312444 +
gtgcccttaaaaaattaaccaaag

SEQ ID NO: 64860 - DNA, 24 bp, Artificial Sequence
  Synthetic oligonucleotide; GAATGATT chr11 5312470 5312493 5312490 +
tttccacgaaaataggcacatgag

SEQ ID NO: 64861 - DNA, 24 bp, Artificial Sequence
  Synthetic oligonucleotide; GTGAGATT chr11 5312801 5312824 5312821 +
aaatatatgatcaaataaatccta

SEQ ID NO: 64862 - DNA, 24 bp, Artificial Sequence
  Synthetic oligonucleotide; TTGTGATT chr11 5312838 5312861 5312858 +
gttgctgcaacaaattgagatcac

SEQ ID NO: 64863 - DNA, 24 bp, Artificial Sequence
  Synthetic oligonucleotide; ATCAGATT chr11 5312887 5312910 5312907 +
aattgaatatacaaaaaggaaaat

SEQ ID NO: 64864 - DNA, 24 bp, Artificial Sequence
  Synthetic oligonucleotide; AAAGGATT chr11 5313790 5313813 5313810 +
aatactatacagccataaaaagga

SEQ ID NO: 64865 - DNA, 24 bp, Artificial Sequence
  Synthetic oligonucleotide; TTGAGATT chr11 5314219 5314242 5314239 +
aatctaccctgaaatagagtagtt

SEQ ID NO: 64866 - DNA, 24 bp, Artificial Sequence
  Synthetic oligonucleotide; CCCTGATT chr11 5314407 5314430 5314427 +
acaggttatgaataaccatatttt

SEQ ID NO: 64867 - DNA, 24 bp, Artificial Sequence
  Synthetic oligonucleotide; AAGTGATT chr11 5315100 5315123 5315120 +
aaagcaaccagaatagctgggtat

SEQ ID NO: 64868 - DNA, 24 bp, Artificial Sequence
  Synthetic oligonucleotide; CCAAGATT chr11 5315267 5315290 5315287 +
aaatagccacagttctatcttcac

SEQ ID NO: 64869 - DNA, 24 bp, Artificial Sequence
  Synthetic oligonucleotide; ACCTGATT chr11 5315346 5315369 5315366 +
gtcataggccattgacaggagaat

SEQ ID NO: 64870 - DNA, 24 bp, Artificial Sequence
  Synthetic oligonucleotide; TTGTGATT chr11 5315419 5315442 5315439 +
aagcaggccccatggataacctct

SEQ ID NO: 64871 - DNA, 24 bp, Artificial Sequence
  Synthetic oligonucleotide; ACTTGATT chr11 5316090 5316113 5316110 +
aattgcatatttggatacatttaa

SEQ ID NO: 64872 - DNA, 24 bp, Artificial Sequence
  Synthetic oligonucleotide; AATAGATT chr11 5317235 5317258 5317255 +
catgcagtggtgagcatactatcc

SEQ ID NO: 64873 - DNA, 24 bp, Artificial Sequence
  Synthetic oligonucleotide; TTAGGATT chr11 5317394 5317417 5317414 +
ttttgtgttcttgcgttaatttgc

SEQ ID NO: 64874 - DNA, 24 bp, Artificial Sequence
  Synthetic oligonucleotide; ACATGATT chr11 5317436 5317459 5317456 +
gctccacccatgttgctgaaaagg

SEQ ID NO: 64875 - DNA, 24 bp, Artificial Sequence
  Synthetic oligonucleotide; GCGGGATT chr11 5317630 5317653 5317650 +
tttcctatggatatatacccagta

SEQ ID NO: 64876 - DNA, 24 bp, Artificial Sequence
  Synthetic oligonucleotide; TTTTGATT chr11 5317830 5317853 5317850 +
ggtatgagatagtatctcttgtgg

SEQ ID NO: 64877 - DNA, 24 bp, Artificial Sequence
  Synthetic oligonucleotide; CGTGGATT chr11 5317921 5317944 5317941 +
gtcttctcttgagaagagtctgtt

SEQ ID NO: 64878 - DNA, 24 bp, Artificial Sequence
  Synthetic oligonucleotide; TATAGATT chr11 5317986 5318009 5318006 +
gcttgctgatatgttcgaattcct

SEQ ID NO: 64879 - DNA, 24 bp, Artificial Sequence
  Synthetic oligonucleotide; TGTAGATT chr11 5318047 5318070 5318067 +
gtttgtgaatagtttctcctatcc

SEQ ID NO: 64880 - DNA, 24 bp, Artificial Sequence
  Synthetic oligonucleotide; GTAAGATT chr11 5318644 5318667 5318664 +
gccaaaaatgcactgccagtgcag

SEQ ID NO: 64881 - DNA, 24 bp, Artificial Sequence
  Synthetic oligonucleotide; AGTTGATT chr11 5318686 5318709 5318706 +
catttaagttttgaattcattttc

SEQ ID NO: 64882 - DNA, 24 bp, Artificial Sequence
  Synthetic oligonucleotide; CTGGGATT chr11 5319101 5319124 5319121 +
ctcctgcctcagccttccgagtag

SEQ ID NO: 64883 - DNA, 24 bp, Artificial Sequence
  Synthetic oligonucleotide; TTAAGATT chr11 5319317 5319340 5319337 +
tgcttccaattttgttctttctgc

SEQ ID NO: 64884 - DNA, 24 bp, Artificial Sequence
  Synthetic oligonucleotide; TATTGATT chr11 5319466 5319489 5319486 +
gagcagtatggccatttaaattca

SEQ ID NO: 64885 - DNA, 24 bp, Artificial Sequence
  Synthetic oligonucleotide; TTCTGATT chr11 5319522 5319545 5319542 +
cttttatttatttatttgtgttgt

SEQ ID NO: 64886 - DNA, 24 bp, Artificial Sequence
  Synthetic oligonucleotide; CAAGGATT chr11 5319780 5319803 5319800 +
ttctcctcgaaaactgcaacaaga

SEQ ID NO: 64887 - DNA, 24 bp, Artificial Sequence
  Synthetic oligonucleotide; TACAGATT chr11 5319935 5319958 5319955 +
tatgactctatacttagaaaatcc

SEQ ID NO: 64888 - DNA, 24 bp, Artificial Sequence
  Synthetic oligonucleotide; GCAAGATT chr11 5320421 5320444 5320441 +
tgtaaaatgtacattggtaatggg

SEQ ID NO: 64889 - DNA, 24 bp, Artificial Sequence
  Synthetic oligonucleotide; GAGAGATT chr11 5320814 5320837 5320834 +
agcattagaaaggcttgaatagaa

SEQ ID NO: 64890 - DNA, 24 bp, Artificial Sequence
  Synthetic oligonucleotide; GAGTGATT chr11 5320842 5320865 5320862 +
gattctatgacttagaatagaact

SEQ ID NO: 64891 - DNA, 24 bp, Artificial Sequence
  Synthetic oligonucleotide; AGTAGATT chr11 5320856 5320879 5320876 +
gaatagaactgagtgattgaaggt

SEQ ID NO: 64892 - DNA, 24 bp, Artificial Sequence
  Synthetic oligonucleotide; TATTGATT chr11 5320988 5321011 5321008 +
tttattcactaatcaacagttatt

SEQ ID NO: 64893 - DNA, 24 bp, Artificial Sequence
  Synthetic oligonucleotide; AGTGGATT chr11 5321442 5321465 5321462 +
aaagtctcaatgaaataaaatgct

SEQ ID NO: 64894 - DNA, 24 bp, Artificial Sequence
  Synthetic oligonucleotide; TTGTGATT chr11 5321892 5321915 5321912 +
atggggatataatatcgcagtaac

SEQ ID NO: 64895 - DNA, 24 bp, Artificial Sequence
  Synthetic oligonucleotide; ATGAGATT chr11 5322022 5322045 5322042 +
aaatcaagatgggaattatccgaa

SEQ ID NO: 64896 - DNA, 24 bp, Artificial Sequence
  Synthetic oligonucleotide; TTAGGATT chr11 5322113 5322136 5322133 +
aagtctttggtagataactgactt

SEQ ID NO: 64897 - DNA, 24 bp, Artificial Sequence
  Synthetic oligonucleotide; CTAAGATT chr11 5322622 5322645 5322642 +
agaagcttgtctaggtttttcctt

SEQ ID NO: 64898 - DNA, 24 bp, Artificial Sequence
  Synthetic oligonucleotide; TAGAGATT chr11 5323040 5323063 5323060 +
gcacactgaggcaaaagtttttca

SEQ ID NO: 64899 - DNA, 24 bp, Artificial Sequence
  Synthetic oligonucleotide; GTCTGATT chr11 5323313 5323336 5323333 +
ttctggcttcatttttatgtctgt

SEQ ID NO: 64900 - DNA, 24 bp, Artificial Sequence
  Synthetic oligonucleotide; GGAAGATT chr11 5323655 5323678 5323675 +
agaagaggatgatcagacagtcta

SEQ ID NO: 64901 - DNA, 24 bp, Artificial Sequence
  Synthetic oligonucleotide; TCATGATT chr11 5323724 5323747 5323744 +
aagttatgtcagcacaagccagtc

SEQ ID NO: 64902 - DNA, 24 bp, Artificial Sequence
  Synthetic oligonucleotide; ATGAGATT chr11 5323764 5323787 5323784 +
gaggcagaaagcacgtgtgataac

SEQ ID NO: 64903 - DNA, 24 bp, Artificial Sequence
  Synthetic oligonucleotide; AAAGGATT chr11 5323891 5323914 5323911 +
ttggtgagaatggaagcatatctc

SEQ ID NO: 64904 - DNA, 24 bp, Artificial Sequence
  Synthetic oligonucleotide; ACCTGATT chr11 5323941 5323964 5323961 +
atcatatgccattgccaggaggga

SEQ ID NO: 64905 - DNA, 24 bp, Artificial Sequence
  Synthetic oligonucleotide; CTGTGATT chr11 5324011 5324034 5324031 +
aagcagcccacactgctaatctcc

SEQ ID NO: 64906 - DNA, 24 bp, Artificial Sequence
  Synthetic oligonucleotide; ATCAGATT chr11 5324293 5324316 5324313 +
cacatagtgtatccaccggtaaag

SEQ ID NO: 64907 - DNA, 24 bp, Artificial Sequence
  Synthetic oligonucleotide; AGATGATT chr11 5324344 5324367 5324364 +
ggagcctccaatcttcctgcttgg

SEQ ID NO: 64908 - DNA, 24 bp, Artificial Sequence
  Synthetic oligonucleotide; GTTCGATT chr11 5324453 5324476 5324473 +
attagaaaaaatactgagttaatg

SEQ ID NO: 64909 - DNA, 24 bp, Artificial Sequence
  Synthetic oligonucleotide; CTGTGATT chr11 5324613 5324636 5324633 +
taatctggcttagttgtcttcttg

SEQ ID NO: 64910 - DNA, 24 bp, Artificial Sequence
  Synthetic oligonucleotide; AAATGATT chr11 5324634 5324657 5324654 +
ttgctgtgattactgaccatttgg

SEQ ID NO: 64911 - DNA, 24 bp, Artificial Sequence
  Synthetic oligonucleotide; TCACGATT chr11 5324658 5324681 5324678 +
aaatgattgttgtaattttacatt

SEQ ID NO: 64912 - DNA, 24 bp, Artificial Sequence
  Synthetic oligonucleotide; CTCAGATT chr11 5324872 5324895 5324892 +
cagcgggcttgttaggcatgcagc

SEQ ID NO: 64913 - DNA, 24 bp, Artificial Sequence
  Synthetic oligonucleotide; AGGTGATT chr11 5324927 5324950 5324947 +
caaattcgcttttttcaggtcctc

SEQ ID NO: 64914 - DNA, 24 bp, Artificial Sequence
  Synthetic oligonucleotide; AGTTGATT chr11 5325025 5325048 5325045 +
agaaaccttttaatgcttccatcc

SEQ ID NO: 64915 - DNA, 24 bp, Artificial Sequence
  Synthetic oligonucleotide; TCAGGATT chr11 5325527 5325550 5325547 +
tacctctgtatcagctcctgtgag

SEQ ID NO: 64916 - DNA, 24 bp, Artificial Sequence
  Synthetic oligonucleotide; CTGAGATT chr11 5325544 5325567 5325564 +
ctgtgagtcaggattactaactta

SEQ ID NO: 64917 - DNA, 24 bp, Artificial Sequence
  Synthetic oligonucleotide; CACAGATT chr11 5325671 5325694 5325691 +
cgaaagatccttcatgcttaaaaa

SEQ ID NO: 64918 - DNA, 24 bp, Artificial Sequence
  Synthetic oligonucleotide; GGCAGATT chr11 5325724 5325747 5325744 +
aatgaggtataggaggaagagaat

SEQ ID NO: 64919 - DNA, 24 bp, Artificial Sequence
  Synthetic oligonucleotide; CTGGGATT chr11 5325862 5325885 5325882 +
tttttaaaaagaaagccataaaat

SEQ ID NO: 64920 - DNA, 24 bp, Artificial Sequence
  Synthetic oligonucleotide; ACTAGATT chr11 5325898 5325921 5325918 +
taaaaaaaattgtgtaaggatcaa

SEQ ID NO: 64921 - DNA, 24 bp, Artificial Sequence
  Synthetic oligonucleotide; CTGAGATT chr11 5326139 5326162 5326159 +
aagaaaatgaaaggtaaatcatgt

SEQ ID NO: 64922 - DNA, 24 bp, Artificial Sequence
  Synthetic oligonucleotide; TGGGGATT chr11 5326223 5326246 5326243 +
gatatttacccagaggcaggcgtg

SEQ ID NO: 64923 - DNA, 24 bp, Artificial Sequence
  Synthetic oligonucleotide; TAGTGATT chr11 5326476 5326499 5326496 +
ctctcaactcagaacataaatgtt

SEQ ID NO: 64924 - DNA, 24 bp, Artificial Sequence
  Synthetic oligonucleotide; TGATGATT chr11 5326515 5326538 5326535 +
gatctggggtcctgacttgatgtg

SEQ ID NO: 64925 - DNA, 24 bp, Artificial Sequence
  Synthetic oligonucleotide; ATAAGATT chr11 5326915 5326938 5326935 +
acatgatgatatatttctagatga

SEQ ID NO: 64926 - DNA, 24 bp, Artificial Sequence
  Synthetic oligonucleotide; ATATGATT chr11 5327164 5327187 5327184 +
cataaacaagtgaaagaggaaaaa

SEQ ID NO: 64927 - DNA, 24 bp, Artificial Sequence
  Synthetic oligonucleotide; CTCAGATT chr11 5327577 5327600 5327597 +
cctgacagttgggactacccaact

SEQ ID NO: 64928 - DNA, 24 bp, Artificial Sequence
  Synthetic oligonucleotide; ATATGATT chr11 5327654 5327677 5327674 +
ccaatatattatcatctgccatca

SEQ ID NO: 64929 - DNA, 24 bp, Artificial Sequence
  Synthetic oligonucleotide; ACTCGATT chr11 5327724 5327747 5327744 +
ggctgcccttttctaagcctttca

SEQ ID NO: 64930 - DNA, 24 bp, Artificial Sequence
  Synthetic oligonucleotide; AGTTGATT chr11 5327847 5327870 5327867 +
ccctttctggataaacaaaaactg

SEQ ID NO: 64931 - DNA, 24 bp, Artificial Sequence
  Synthetic oligonucleotide; CCCAGATT chr11 5328226 5328249 5328246 +
ttatacttatgccaatccaagggt

SEQ ID NO: 64932 - DNA, 24 bp, Artificial Sequence
  Synthetic oligonucleotide; TCGGGATT chr11 5328657 5328680 5328677 +
aacagggccccacaactgatgtcc

SEQ ID NO: 64933 - DNA, 24 bp, Artificial Sequence
  Synthetic oligonucleotide; TGCAGATT chr11 5328944 5328967 5328964 +
cttcaatggatctgttaatagtca

SEQ ID NO: 64934 - DNA, 24 bp, Artificial Sequence
  Synthetic oligonucleotide; AAGTGATT chr11 5329072 5329095 5329092 +
ctgcaaactccacctcccaggttc

SEQ ID NO: 64935 - DNA, 24 bp, Artificial Sequence
  Synthetic oligonucleotide; CTGGGATT chr11 5329237 5329260 5329257 +
caccctccttggcctcccaaagtg

SEQ ID NO: 64936 - DNA, 24 bp, Artificial Sequence
  Synthetic oligonucleotide; GCATGATT chr11 5330232 5330255 5330252 +
acgtgtgcatgtgtctttatagca

SEQ ID NO: 64937 - DNA, 24 bp, Artificial Sequence
  Synthetic oligonucleotide; TAATGATT chr11 5330426 5330449 5330446 +
agcacctgttgttccctgactttt

SEQ ID NO: 64938 - DNA, 24 bp, Artificial Sequence
  Synthetic oligonucleotide; TTTTGATT chr11 5330471 5330494 5330491 +
gtgtgagatggtatctctttgtgg

SEQ ID NO: 64939 - DNA, 24 bp, Artificial Sequence
  Synthetic oligonucleotide; ATGGGATT chr11 5330824 5330847 5330844 +
caggcagaaagcatgggagaggac

SEQ ID NO: 64940 - DNA, 24 bp, Artificial Sequence
  Synthetic oligonucleotide; TGATGATT chr11 5330856 5330879 5330876 +
gacagtaggggaatccagagaggg

SEQ ID NO: 64941 - DNA, 24 bp, Artificial Sequence
  Synthetic oligonucleotide; AGGGGATT chr11 5330954 5330977 5330974 +
ttggtgagaatggaggtgtatctc

SEQ ID NO: 64942 - DNA, 24 bp, Artificial Sequence
  Synthetic oligonucleotide; AGTGGATT chr11 5331027 5331050 5331047 +
ctctggactccacgatagagaggg

SEQ ID NO: 64943 - DNA, 24 bp, Artificial Sequence
  Synthetic oligonucleotide; CCACGATT chr11 5331569 5331592 5331589 +
taaaaatcatatatgagatagttc

SEQ ID NO: 64944 - DNA, 24 bp, Artificial Sequence
  Synthetic oligonucleotide; ACAAGATT chr11 5331879 5331902 5331899 +
cataattttaaaaacctttctacc

SEQ ID NO: 64945 - DNA, 24 bp, Artificial Sequence
  Synthetic oligonucleotide; AAGAGATT chr11 5332508 5332531 5332528 +
cgggaggcacaggttgcagggagc

SEQ ID NO: 64946 - DNA, 24 bp, Artificial Sequence
  Synthetic oligonucleotide; TATTGATT chr11 5333413 5333436 5333433 +
tggaagcaatgacagagtttgaca

SEQ ID NO: 64947 - DNA, 24 bp, Artificial Sequence
  Synthetic oligonucleotide; TTATGATT chr11 5333450 5333473 5333470 +
gttatttataaaattttaattact

SEQ ID NO: 64948 - DNA, 24 bp, Artificial Sequence
  Synthetic oligonucleotide; TGCTGATT chr11 5333485 5333508 5333505 +
acattgatcactaactgactggta

SEQ ID NO: 64949 - DNA, 24 bp, Artificial Sequence
  Synthetic oligonucleotide; AGAAGATT chr11 5334023 5334046 5334043 +
aactatgtggtggaagagaatcca

SEQ ID NO: 64950 - DNA, 24 bp, Artificial Sequence
  Synthetic oligonucleotide; GTATGATT chr11 5334400 5334423 5334420 +
atgctatctaactacctttgcctt

SEQ ID NO: 64951 - DNA, 24 bp, Artificial Sequence
  Synthetic oligonucleotide; ATAAGATT chr11 5334533 5334556 5334553 +
cacttaatcttttcttggtttcaa

SEQ ID NO: 64952 - DNA, 24 bp, Artificial Sequence
  Synthetic oligonucleotide; ATGAGATT chr11 5334867 5334890 5334887 +
tttatcctggaacttagcccaact

SEQ ID NO: 64953 - DNA, 24 bp, Artificial Sequence
  Synthetic oligonucleotide; TCATGATT chr11 5335013 5335036 5335033 +
tgtaagcagaatagtagtaggaaa

SEQ ID NO: 64954 - DNA, 24 bp, Artificial Sequence
  Synthetic oligonucleotide; TCTGGATT chr11 5335093 5335116 5335113 +
ctttgtactaagttaaaatttagg

SEQ ID NO: 64955 - DNA, 24 bp, Artificial Sequence
  Synthetic oligonucleotide; GATTGATT chr11 5335097 5335120 5335117 +
gtactaagttaaaatttaggtctg

SEQ ID NO: 64956 - DNA, 24 bp, Artificial Sequence
  Synthetic oligonucleotide; AACTGATT chr11 5335159 5335182 5335179 +
ggtgaggtagtaagaccctgagat

SEQ ID NO: 64957 - DNA, 24 bp, Artificial Sequence
  Synthetic oligonucleotide; CTCAGATT chr11 5335586 5335609 5335606 +
agtatcatgtcacagcagcataat

SEQ ID NO: 64958 - DNA, 24 bp, Artificial Sequence
  Synthetic oligonucleotide; TAACGATT chr11 5335905 5335928 5335925 +
tcaagtataataagcttatatcgc

SEQ ID NO: 64959 - DNA, 24 bp, Artificial Sequence
  Synthetic oligonucleotide; CTAGGATT chr11 5335929 5335952 5335949 +
taacgattcaggaaggtctctatc

SEQ ID NO: 64960 - DNA, 24 bp, Artificial Sequence
  Synthetic oligonucleotide; GTTTGATT chr11 5336001 5336024 5336021 +
ttcttttttttttttttctgtgta

SEQ ID NO: 64961 - DNA, 24 bp, Artificial Sequence
  Synthetic oligonucleotide; TCTGGATT chr11 5336026 5336049 5336046 +
tttgattctattatctgtcagcct

SEQ ID NO: 64962 - DNA, 24 bp, Artificial Sequence
  Synthetic oligonucleotide; CGAAGATT chr11 5336047 5336070 5336067 +
ccttctggattccacaattatctc

SEQ ID NO: 64963 - DNA, 24 bp, Artificial Sequence
  Synthetic oligonucleotide; GCAAGATT chr11 5336179 5336202 5336199 +
atgtttttgtgagggtgtttttag

SEQ ID NO: 64964 - DNA, 24 bp, Artificial Sequence
  Synthetic oligonucleotide; TTTAGATT chr11 5336358 5336381 5336378 +
ggaatctagacctttttttctgcc

SEQ ID NO: 64965 - DNA, 24 bp, Artificial Sequence
  Synthetic oligonucleotide; GGTTGATT chr11 5337088 5337111 5337108 +
ttgtctatcattgatggccatttg

SEQ ID NO: 64966 - DNA, 24 bp, Artificial Sequence
  Synthetic oligonucleotide; GAATGATT chr11 5337159 5337182 5337179 +
acatgtgcatgtatcttagtaata

SEQ ID NO: 64967 - DNA, 24 bp, Artificial Sequence
  Synthetic oligonucleotide; ATGGGATT chr11 5337194 5337217 5337214 +
actcctttaggtatatacccagta

SEQ ID NO: 64968 - DNA, 24 bp, Artificial Sequence
  Synthetic oligonucleotide; TTTTGATT chr11 5337396 5337419 5337416 +
gtgtcagatggtatttcattgtgg

SEQ ID NO: 64969 - DNA, 24 bp, Artificial Sequence
  Synthetic oligonucleotide; CATAGATT chr11 5337557 5337580 5337577 +
ttttgtaaatatgtctaagttcct

SEQ ID NO: 64970 - DNA, 24 bp, Artificial Sequence
  Synthetic oligonucleotide; GGTAGATT chr11 5337590 5337613 5337610 +
tggatattagacctttgtcagatg

SEQ ID NO: 64971 - DNA, 24 bp, Artificial Sequence
  Synthetic oligonucleotide; CTGAGATT chr11 5337811 5337834 5337831 +
ctcctgcctcagcctcctgagtag

SEQ ID NO: 64972 - DNA, 24 bp, Artificial Sequence
  Synthetic oligonucleotide; CTGGGATT chr11 5337947 5337970 5337967 +
cacccaccttggcctcccaaagtg

SEQ ID NO: 64973 - DNA, 24 bp, Artificial Sequence
  Synthetic oligonucleotide; ATCAGATT chr11 5338286 5338309 5338306 +
ttgtttttaccaggtttgttgaag

SEQ ID NO: 64974 - DNA, 24 bp, Artificial Sequence
  Synthetic oligonucleotide; TGTTGATT chr11 5338427 5338450 5338447 +
tataatttgaagttgggtaaatcc

SEQ ID NO: 64975 - DNA, 24 bp, Artificial Sequence
  Synthetic oligonucleotide; TAAGGATT chr11 5338611 5338634 5338631 +
tttattaataacaatgactgtgtc

SEQ ID NO: 64976 - DNA, 24 bp, Artificial Sequence
  Synthetic oligonucleotide; AACAGATT chr11 5338636 5338659 5338656 +
aaggatttaggctataaaatcaaa

SEQ ID NO: 64977 - DNA, 24 bp, Artificial Sequence
  Synthetic oligonucleotide; CTAAGATT chr11 5338923 5338946 5338943 +
catacatattttttcagtgtgtct

SEQ ID NO: 64978 - DNA, 24 bp, Artificial Sequence
  Synthetic oligonucleotide; CTAAGATT chr11 5338954 5338977 5338974 +
tcttccacgtcttcttaatcattt

SEQ ID NO: 64979 - DNA, 24 bp, Artificial Sequence
  Synthetic oligonucleotide; CTTAGATT chr11 5339128 5339151 5339148 +
tttttaatgtatattcttttacac

SEQ ID NO: 64980 - DNA, 24 bp, Artificial Sequence
  Synthetic oligonucleotide; TACAGATT chr11 5339472 5339495 5339492 +
aacttgtgtcacgagggtttgttg

SEQ ID NO: 64981 - DNA, 24 bp, Artificial Sequence
  Synthetic oligonucleotide; TGTTGATT chr11 5339777 5339800 5339797 +
gataatactaacatactgtgttta

SEQ ID NO: 64982 - DNA, 24 bp, Artificial Sequence
  Synthetic oligonucleotide; AGTGGATT chr11 5339819 5339842 5339839 +
gttttgaatagaaaaacatgtctg

SEQ ID NO: 64983 - DNA, 24 bp, Artificial Sequence
  Synthetic oligonucleotide; AGAAGATT chr11 5340112 5340135 5340132 +
tttccagttttaaatattagttag

SEQ ID NO: 64984 - DNA, 24 bp, Artificial Sequence
  Synthetic oligonucleotide; AAAAGATT chr11 5340244 5340267 5340264 +
gtttattaggctgtggaatcaaaa

SEQ ID NO: 64985 - DNA, 24 bp, Artificial Sequence
  Synthetic oligonucleotide; CAGAGATT chr11 5340295 5340318 5340315 +
ctgagtctcaggaaaacatggaat

SEQ ID NO: 64986 - DNA, 24 bp, Artificial Sequence
  Synthetic oligonucleotide; TGAAGATT chr11 5340303 5340326 5340323 +
caggaaaacatggaatcagagatt

SEQ ID NO: 64987 - DNA, 24 bp, Artificial Sequence
  Synthetic oligonucleotide; GAATGATT chr11 5340889 5340912 5340909 +
taagggacacatgtttggttttat

SEQ ID NO: 64988 - DNA, 24 bp, Artificial Sequence
  Synthetic oligonucleotide; AGCTGATT chr11 5341007 5341030 5341027 +
tgacaaggataaaaaacatgataa

SEQ ID NO: 64989 - DNA, 24 bp, Artificial Sequence
  Synthetic oligonucleotide; TAAGGATT chr11 5341070 5341093 5341090 +
tctcttaatgaaacagaatataaa

SEQ ID NO: 64990 - DNA, 24 bp, Artificial Sequence
  Synthetic oligonucleotide; TAGGGATT chr11 5341121 5341144 5341141 +
actctctatgagcaatacctgaga

SEQ ID NO: 64991 - DNA, 24 bp, Artificial Sequence
  Synthetic oligonucleotide; CTCTGATT chr11 5341482 5341505 5341502 +
tgtctcactgaagtattatttttg

SEQ ID NO: 64992 - DNA, 24 bp, Artificial Sequence
  Synthetic oligonucleotide; CCGTGATT chr11 5341881 5341904 5341901 +
ctgtgtctacgtcctctcatttat

SEQ ID NO: 64993 - DNA, 24 bp, Artificial Sequence
  Synthetic oligonucleotide; AGAAGATT chr11 5342047 5342070 5342067 +
ataagtaattaggtcactgatcaa

SEQ ID NO: 64994 - DNA, 24 bp, Artificial Sequence
  Synthetic oligonucleotide; ATTAGATT chr11 5342155 5342178 5342175 +
cagagaaattcataagagttggaa

SEQ ID NO: 64995 - DNA, 24 bp, Artificial Sequence
  Synthetic oligonucleotide; TTATGATT chr11 5342222 5342245 5342242 +
gaaccaactaataattttatattt

SEQ ID NO: 64996 - DNA, 24 bp, Artificial Sequence
  Synthetic oligonucleotide; TGATGATT chr11 5342549 5342572 5342569 +
ttttacattctgtgagagtgactg

SEQ ID NO: 64997 - DNA, 24 bp, Artificial Sequence
  Synthetic oligonucleotide; ATAGGATT chr11 5342638 5342661 5342658 +
tgcttggtcttgacactatatgtt

SEQ ID NO: 64998 - DNA, 24 bp, Artificial Sequence
  Synthetic oligonucleotide; GCCTGATT chr11 5343023 5343046 5343043 +
gacaatacagaaaaaaatagaggg

SEQ ID NO: 64999 - DNA, 24 bp, Artificial Sequence
  Synthetic oligonucleotide; TGAAGATT chr11 5343340 5343363 5343360 +
gccagaaagaagtacatgggctca

SEQ ID NO: 65000 - DNA, 24 bp, Artificial Sequence
  Synthetic oligonucleotide; AAGTGATT chr11 5343631 5343654 5343651 +
taaagataataatgacatcaatat

SEQ ID NO: 65001 - DNA, 24 bp, Artificial Sequence
  Synthetic oligonucleotide; TGCAGATT chr11 5343821 5343844 5343841 +
cttctaaactgttacccttaacta

SEQ ID NO: 65002 - DNA, 24 bp, Artificial Sequence
  Synthetic oligonucleotide; AGGGGATT chr11 5343859 5343882 5343879 +
aattcgtattctatggggcattca

SEQ ID NO: 65003 - DNA, 24 bp, Artificial Sequence
  Synthetic oligonucleotide; GTCAGATT chr11 5344057 5344080 5344077 +
cactaccactgtagctaaggagca

SEQ ID NO: 65004 - DNA, 24 bp, Artificial Sequence
  Synthetic oligonucleotide; TCCAGATT chr11 5344084 5344107 5344104 +
agattgagaaagagacacttggcc

SEQ ID NO: 65005 - DNA, 24 bp, Artificial Sequence
  Synthetic oligonucleotide; TCACGATT chr11 5344120 5344143 5344140 +
ggactagtgatggggaacagacat

SEQ ID NO: 65006 - DNA, 24 bp, Artificial Sequence
  Synthetic oligonucleotide; AAATGATT chr11 5344222 5344245 5344242 +
taagttagactttggggctggaat

SEQ ID NO: 65007 - DNA, 24 bp, Artificial Sequence
  Synthetic oligonucleotide; AAGAGATT chr11 5344523 5344546 5344543 +
gtggtgctgtcttttactgaagag

SEQ ID NO: 65008 - DNA, 24 bp, Artificial Sequence
  Synthetic oligonucleotide; TGTAGATT chr11 5344840 5344863 5344860 +
ttaacataaaacagtactacttga

SEQ ID NO: 65009 - DNA, 24 bp, Artificial Sequence
  Synthetic oligonucleotide; TTCTGATT chr11 5345193 5345216 5345213 +
aatggaaaatagtgtggtgatata

SEQ ID NO: 65010 - DNA, 24 bp, Artificial Sequence
  Synthetic oligonucleotide; CCAAGATT chr11 5345399 5345422 5345419 +
gacagatgcatttttgaagtagtg

SEQ ID NO: 65011 - DNA, 24 bp, Artificial Sequence
  Synthetic oligonucleotide; CCTAGATT chr11 5345456 5345479 5345476 +
agggaaaaatcaaatgaggtttcc

SEQ ID NO: 65012 - DNA, 24 bp, Artificial Sequence
  Synthetic oligonucleotide; CAATGATT chr11 5346157 5346180 5346177 +
gggaaagctaaccaaactgtaagg

SEQ ID NO: 65013 - DNA, 24 bp, Artificial Sequence
  Synthetic oligonucleotide; AGAAGATT chr11 5346420 5346443 5346440 +
tcataaagactgaggatagaagca

SEQ ID NO: 65014 - DNA, 24 bp, Artificial Sequence
  Synthetic oligonucleotide; TGCAGATT chr11 5347871 5347894 5347891 +
atgttcctaccagccaggctcatg

SEQ ID NO: 65015 - DNA, 24 bp, Artificial Sequence
  Synthetic oligonucleotide; AGCTGATT chr11 5348048 5348071 5348068 +
gcaaaaaaaaaacagagagatcga

SEQ ID NO: 65016 - DNA, 24 bp, Artificial Sequence
  Synthetic oligonucleotide; GATAGATT chr11 5348191 5348214 5348211 +
ctcttcaaatataaaaaagtgaag

SEQ ID NO: 65017 - DNA, 24 bp, Artificial Sequence
  Synthetic oligonucleotide; GACTGATT chr11 5348294 5348317 5348314 +
ggttgtagtaatttctctccacct

SEQ ID NO: 65018 - DNA, 24 bp, Artificial Sequence
  Synthetic oligonucleotide; TACAGATT chr11 5348557 5348580 5348577 +
ttatgtgtgcctctggatcagggg

SEQ ID NO: 65019 - DNA, 24 bp, Artificial Sequence
  Synthetic oligonucleotide; AGCTGATT chr11 5348669 5348692 5348689 +
ctgctttcttctagccgccctggc

SEQ ID NO: 65020 - DNA, 24 bp, Artificial Sequence
  Synthetic oligonucleotide; TTTAGATT chr11 5349125 5349148 5349145 +
tggctgcagggatgaggcaaaggt

SEQ ID NO: 65021 - DNA, 24 bp, Artificial Sequence
  Synthetic oligonucleotide; TAAGGATT chr11 5349245 5349268 5349265 +
aacagacaagacaaacagctattt

SEQ ID NO: 65022 - DNA, 24 bp, Artificial Sequence
  Synthetic oligonucleotide; ACTAGATT chr11 5349435 5349458 5349455 +
tttagtagtaatataacacaatta

SEQ ID NO: 65023 - DNA, 24 bp, Artificial Sequence
  Synthetic oligonucleotide; GTTTGATT chr11 5349575 5349598 5349595 +
gtgaggtgatagatatattaatta

SEQ ID NO: 65024 - DNA, 24 bp, Artificial Sequence
  Synthetic oligonucleotide; GGCAGATT chr11 5349711 5349734 5349731 +
tattgtctgaacctctcactggca

SEQ ID NO: 65025 - DNA, 24 bp, Artificial Sequence
  Synthetic oligonucleotide; TGCTGATT chr11 5349893 5349916 5349913 +
cacccagacatatcacattttatc

SEQ ID NO: 65026 - DNA, 24 bp, Artificial Sequence
  Synthetic oligonucleotide; TCAAGATT chr11 5350211 5350234 5350231 +
ctttacaggttatgtaaccaaatc

SEQ ID NO: 65027 - DNA, 24 bp, Artificial Sequence
  Synthetic oligonucleotide; ATCAGATT chr11 5350549 5350572 5350569 +
gccttctcacttttgtcaaatccc

SEQ ID NO: 65028 - DNA, 24 bp, Artificial Sequence
  Synthetic oligonucleotide; TAGTGATT chr11 5351152 5351175 5351172 +
ggccattacagcactattcaaata

SEQ ID NO: 65029 - DNA, 24 bp, Artificial Sequence
  Synthetic oligonucleotide; ATATGATT chr11 5351192 5351215 5351212 +
cattttgtttttattttctgggtt

SEQ ID NO: 65030 - DNA, 24 bp, Artificial Sequence
  Synthetic oligonucleotide; AACTGATT chr11 5351428 5351451 5351448 +
attctcaaggagcaacttttatac

SEQ ID NO: 65031 - DNA, 24 bp, Artificial Sequence
  Synthetic oligonucleotide; GGGAGATT chr11 5351746 5351769 5351766 +
taggtgttctgtggttagatcaca

SEQ ID NO: 65032 - DNA, 24 bp, Artificial Sequence
  Synthetic oligonucleotide; TGAAGATT chr11 5351902 5351925 5351922 +
ctatcctgaccaacacccaggtaa

SEQ ID NO: 65033 - DNA, 24 bp, Artificial Sequence
  Synthetic oligonucleotide; TTTTGATT chr11 5352133 5352156 5352153 +
ttctcatcatctttttctcctaca

SEQ ID NO: 65034 - DNA, 24 bp, Artificial Sequence
  Synthetic oligonucleotide; AGCAGATT chr11 5352367 5352390 5352387 +
catttatctatagcattaaaacta

SEQ ID NO: 65035 - DNA, 24 bp, Artificial Sequence
  Synthetic oligonucleotide; TGCTGATT chr11 5352600 5352623 5352620 +
cattattttaccctgcctgtctat

SEQ ID NO: 65036 - DNA, 24 bp, Artificial Sequence
  Synthetic oligonucleotide; GTTTGATT chr11 5352689 5352712 5352709 +
ttctcaggtaatttaactcacatt

SEQ ID NO: 65037 - DNA, 24 bp, Artificial Sequence
  Synthetic oligonucleotide; CTATGATT chr11 5352915 5352938 5352935 +
caattatatatataattcttgggt

SEQ ID NO: 65038 - DNA, 24 bp, Artificial Sequence
  Synthetic oligonucleotide; TTTTGATT chr11 5353529 5353552 5353549 +
atggccttttctggctccaaatac

SEQ ID NO: 65039 - DNA, 24 bp, Artificial Sequence
  Synthetic oligonucleotide; TGGGGATT chr11 5353798 5353821 5353818 +
cacctactcttcatcacagaaagg

SEQ ID NO: 65040 - DNA, 24 bp, Artificial Sequence
  Synthetic oligonucleotide; TTAGGATT chr11 5353808 5353831 5353828 +
tcatcacagaaaggtggggatttt

SEQ ID NO: 65041 - DNA, 24 bp, Artificial Sequence
  Synthetic oligonucleotide; ATCTGATT chr11 5353897 5353920 5353917 +
tttccaggctagtaaatgatcttt

SEQ ID NO: 65042 - DNA, 24 bp, Artificial Sequence
  Synthetic oligonucleotide; AAAAGATT chr11 5353910 5353933 5353930 +
aaatgatctttatctgattagacc

SEQ ID NO: 65043 - DNA, 24 bp, Artificial Sequence
  Synthetic oligonucleotide; GCTGGATT chr11 5354918 5354941 5354938 +
tgagtcactgtgtgaagtctgtgc

SEQ ID NO: 65044 - DNA, 24 bp, Artificial Sequence
  Synthetic oligonucleotide; ATTGGATT chr11 5355255 5355278 5355275 +
ttaccattattatagtcaagacga

SEQ ID NO: 65045 - DNA, 24 bp, Artificial Sequence
  Synthetic oligonucleotide; CACTGATT chr11 5355410 5355433 5355430 +
cttcaacattcaaagagcaacacc

SEQ ID NO: 65046 - DNA, 24 bp, Artificial Sequence
  Synthetic oligonucleotide; CTCTGATT chr11 5355813 5355836 5355833 +
ttaaaggatcaatgtaatgccctg

SEQ ID NO: 65047 - DNA, 24 bp, Artificial Sequence
  Synthetic oligonucleotide; AGCTGATT chr11 5356319 5356342 5356339 +
catgatgaatgcacaagactcagt

SEQ ID NO: 65048 - DNA, 24 bp, Artificial Sequence
  Synthetic oligonucleotide; ATCTGATT chr11 5356470 5356493 5356490 +
actatgtgaaaagaccaaatctat

SEQ ID NO: 65049 - DNA, 24 bp, Artificial Sequence
  Synthetic oligonucleotide; GTCAGATT chr11 5356649 5356672 5356669 +
agagcaactacaaggcacataatt

SEQ ID NO: 65050 - DNA, 24 bp, Artificial Sequence
  Synthetic oligonucleotide; GAGAGATT chr11 5356903 5356926 5356923 +
atactttacagacaagcaaatgct

SEQ ID NO: 65051 - DNA, 24 bp, Artificial Sequence
  Synthetic oligonucleotide; TCAGGATT chr11 5357798 5357821 5357818 +
accacagtgcaatcaaactagaac

SEQ ID NO: 65052 - DNA, 24 bp, Artificial Sequence
  Synthetic oligonucleotide; ACATGATT chr11 5358870 5358893 5358890 +
taaacagaaccaaagacaaaaacc

SEQ ID NO: 65053 - DNA, 24 bp, Artificial Sequence
  Synthetic oligonucleotide; ACACGATT chr11 5359196 5359219 5359216 +
tcaaattgtccctgtttgcagatg

SEQ ID NO: 65054 - DNA, 24 bp, Artificial Sequence
  Synthetic oligonucleotide; TATAGATT chr11 5359555 5359578 5359575 +
atggccatacagcccaaggtaatt

SEQ ID NO: 65055 - DNA, 24 bp, Artificial Sequence
  Synthetic oligonucleotide; AAAGGATT chr11 5359869 5359892 5359889 +
acctgacaaaaaaaacaaatgggg

SEQ ID NO: 65056 - DNA, 24 bp, Artificial Sequence
  Synthetic oligonucleotide; GATGGATT chr11 5359973 5359996 5359993 +
caccttatacaaaaattaattcaa

SEQ ID NO: 65057 - DNA, 24 bp, Artificial Sequence
  Synthetic oligonucleotide; TGGCGATT chr11 5360556 5360579 5360576 +
gttcaaccattgtggaagtcagtg

SEQ ID NO: 65058 - DNA, 24 bp, Artificial Sequence
  Synthetic oligonucleotide; AAAGGATT chr11 5360627 5360650 5360647 +
catcccattactgggtacatactc

SEQ ID NO: 65059 - DNA, 24 bp, Artificial Sequence
  Synthetic oligonucleotide; ACTGGATT chr11 5360737 5360760 5360757 +
aacccaaatgtccaacaatgatag

SEQ ID NO: 65060 - DNA, 24 bp, Artificial Sequence
  Synthetic oligonucleotide; CAGAGATT chr11 5361550 5361573 5361570 +
atgagcagtagacggttggcttat

SEQ ID NO: 65061 - DNA, 24 bp, Artificial Sequence
  Synthetic oligonucleotide; TTTGGATT chr11 5361803 5361826 5361823 +
ctctggtgtagttccagactctgg

SEQ ID NO: 65062 - DNA, 24 bp, Artificial Sequence
  Synthetic oligonucleotide; AATAGATT chr11 5361972 5361995 5361992 +
actaacagaaagaaaaacttacca

SEQ ID NO: 65063 - DNA, 24 bp, Artificial Sequence
  Synthetic oligonucleotide; GTCAGATT chr11 5361983 5362006 5362003 +
gaaaaacttaccaaatagattagt

SEQ ID NO: 65064 - DNA, 24 bp, Artificial Sequence
  Synthetic oligonucleotide; TGCAGATT chr11 5362148 5362171 5362168 +
cattccatgctgagctatcagcac

SEQ ID NO: 65065 - DNA, 24 bp, Artificial Sequence
  Synthetic oligonucleotide; TGATGATT chr11 5362429 5362452 5362449 +
ttgttgagccttataatgagaatg

SEQ ID NO: 65066 - DNA, 24 bp, Artificial Sequence
  Synthetic oligonucleotide; ATCTGATT chr11 5362649 5362672 5362669 +
cggtcaacccagctgtcttccccc

SEQ ID NO: 65067 - DNA, 24 bp, Artificial Sequence
  Synthetic oligonucleotide; CAGGGATT chr11 5362975 5362998 5362995 +
aaaaaagaaataatagaagttagg

SEQ ID NO: 65068 - DNA, 24 bp, Artificial Sequence
  Synthetic oligonucleotide; GAATGATT chr11 5363139 5363162 5363159 +
tcaaaactcaaagttttacgaaca

SEQ ID NO: 65069 - DNA, 24 bp, Artificial Sequence
  Synthetic oligonucleotide; GGTAGATT chr11 5363580 5363603 5363600 +
gaatgcagaaagaagatatattga

SEQ ID NO: 65070 - DNA, 24 bp, Artificial Sequence
  Synthetic oligonucleotide; CTAAGATT chr11 5363604 5363627 5363624 +
ggtagatttttctcatagatacta

SEQ ID NO: 65071 - DNA, 24 bp, Artificial Sequence
  Synthetic oligonucleotide; TGAGGATT chr11 5363739 5363762 5363759 +
gaaagcgggaaagtagcattttca

SEQ ID NO: 65072 - DNA, 24 bp, Artificial Sequence
  Synthetic oligonucleotide; GATAGATT chr11 5363991 5364014 5364011 +
aacagggcttcacaacagtgtagt

SEQ ID NO: 65073 - DNA, 24 bp, Artificial Sequence
  Synthetic oligonucleotide; GGTCGATT chr11 5364065 5364088 5364085 +
tctcattctccatggttgcaataa

SEQ ID NO: 65074 - DNA, 24 bp, Artificial Sequence
  Synthetic oligonucleotide; TATAGATT chr11 5364072 5364095 5364092 +
ctccatggttgcaataaggtcgat

SEQ ID NO: 65075 - DNA, 24 bp, Artificial Sequence
  Synthetic oligonucleotide; CTCTGATT chr11 5364639 5364662 5364659 +
atcctcatgtgcatctctgaatat

SEQ ID NO: 65076 - DNA, 24 bp, Artificial Sequence
  Synthetic oligonucleotide; AAATGATT chr11 5364861 5364884 5364881 +
atttccatttaatatagttttatt

SEQ ID NO: 65077 - DNA, 24 bp, Artificial Sequence
  Synthetic oligonucleotide; AGGGGATT chr11 5364963 5364986 5364983 +
aaaatgaagtaacagaaggctaca

SEQ ID NO: 65078 - DNA, 24 bp, Artificial Sequence
  Synthetic oligonucleotide; CCCTGATT chr11 5365657 5365680 5365677 +
tgttgaggccctaatgagaaacat

SEQ ID NO: 65079 - DNA, 24 bp, Artificial Sequence
  Synthetic oligonucleotide; TTGAGATT chr11 5366735 5366758 5366755 +
aaggaaggaaatcagggtattcac

SEQ ID NO: 65080 - DNA, 24 bp, Artificial Sequence
  Synthetic oligonucleotide; ATCTGATT chr11 5366862 5366885 5366882 +
tgggaaggtttaggcaggggtgct

SEQ ID NO: 65081 - DNA, 24 bp, Artificial Sequence
  Synthetic oligonucleotide; AGGAGATT chr11 5367174 5367197 5367194 +
gaactggaataaaatcattttgaa

SEQ ID NO: 65082 - DNA, 24 bp, Artificial Sequence
  Synthetic oligonucleotide; CTTGGATT chr11 5367239 5367262 5367259 +
caatccagaccctaagagagggtt

SEQ ID NO: 65083 - DNA, 24 bp, Artificial Sequence
  Synthetic oligonucleotide; GGTGGATT chr11 5367411 5367434 5367431 +
ttattgatgatatgctaaacaagg

SEQ ID NO: 65084 - DNA, 24 bp, Artificial Sequence
  Synthetic oligonucleotide; TTCAGATT chr11 5368094 5368117 5368114 +
ctttctttgttttttcctctgcca

SEQ ID NO: 65085 - DNA, 24 bp, Artificial Sequence
  Synthetic oligonucleotide; TAATGATT chr11 5368364 5368387 5368384 +
agtacccacatggttgaattattt

SEQ ID NO: 65086 - DNA, 24 bp, Artificial Sequence
  Synthetic oligonucleotide; TGTGGATT chr11 5368846 5368869 5368866 +
atgttggaatttacaccattctta

SEQ ID NO: 65087 - DNA, 24 bp, Artificial Sequence
  Synthetic oligonucleotide; ATCTGATT chr11 5368926 5368949 5368946 +
tttctttccggatcatgcttacag

SEQ ID NO: 65088 - DNA, 24 bp, Artificial Sequence
  Synthetic oligonucleotide; TACTGATT chr11 5369186 5369209 5369206 +
attcacacatataacctgagtccc

SEQ ID NO: 65089 - DNA, 24 bp, Artificial Sequence
  Synthetic oligonucleotide; TCAGGATT chr11 5369911 5369934 5369931 +
tagaaagaaagggaagacattttc

SEQ ID NO: 65090 - DNA, 24 bp, Artificial Sequence
  Synthetic oligonucleotide; CCAGGATT chr11 5370285 5370308 5370305 +
gatagtatcttttatgctgactgt

SEQ ID NO: 65091 - DNA, 24 bp, Artificial Sequence
  Synthetic oligonucleotide; ACATGATT chr11 5370981 5371004 5371001 +
tcatacttcaggaaaaagacttac

SEQ ID NO: 65092 - DNA, 24 bp, Artificial Sequence
  Synthetic oligonucleotide; TAGTGATT chr11 5371044 5371067 5371064 +
agcagataatttgagtgataaaaa

SEQ ID NO: 65093 - DNA, 24 bp, Artificial Sequence
  Synthetic oligonucleotide; AGATGATT chr11 5371661 5371684 5371681 +
tataggatatatgtgtacatagtg

SEQ ID NO: 65094 - DNA, 24 bp, Artificial Sequence
  Synthetic oligonucleotide; TTGAGATT chr11 5371940 5371963 5371960 +
tatgcatttgaccttatttttctt

SEQ ID NO: 65095 - DNA, 24 bp, Artificial Sequence
  Synthetic oligonucleotide; CTTAGATT chr11 5372156 5372179 5372176 +
ctgttcatctatatatagatacca

SEQ ID NO: 65096 - DNA, 24 bp, Artificial Sequence
  Synthetic oligonucleotide; TGCGGATT chr11 5372231 5372254 5372251 +
gagagtgcagatagctctagaaaa

SEQ ID NO: 65097 - DNA, 24 bp, Artificial Sequence
  Synthetic oligonucleotide; TTTTGATT chr11 5372462 5372485 5372482 +
aacaggtgtgagtgatacttgtgg

SEQ ID NO: 65098 - DNA, 24 bp, Artificial Sequence
  Synthetic oligonucleotide; TGATGATT chr11 5372480 5372503 5372500 +
ttgtggttttgatttgcattttcc

SEQ ID NO: 65099 - DNA, 24 bp, Artificial Sequence
  Synthetic oligonucleotide; AGTTGATT chr11 5372604 5372627 5372624 +
ttactattatattttttcatattt

SEQ ID NO: 65100 - DNA, 24 bp, Artificial Sequence
  Synthetic oligonucleotide; TGATGATT chr11 5372690 5372713 5372710 +
tattttctcccaaactgttccttt

SEQ ID NO: 65101 - DNA, 24 bp, Artificial Sequence
  Synthetic oligonucleotide; TTCTGATT chr11 5372882 5372905 5372902 +
aaaccaacttgatggcagcacacg

SEQ ID NO: 65102 - DNA, 24 bp, Artificial Sequence
  Synthetic oligonucleotide; AATAGATT chr11 5373141 5373164 5373161 +
accttaagccataagtcaactcaa

SEQ ID NO: 65103 - DNA, 24 bp, Artificial Sequence
  Synthetic oligonucleotide; TCTTGATT chr11 5373246 5373269 5373266 +
gtctcggcaattttttagatattg

SEQ ID NO: 65104 - DNA, 24 bp, Artificial Sequence
  Synthetic oligonucleotide; GATCGATT chr11 5373284 5373307 5373304 +
aaattttcactggaagtctatatt

SEQ ID NO: 65105 - DNA, 24 bp, Artificial Sequence
  Synthetic oligonucleotide; GGGTGATT chr11 5373387 5373410 5373407 +
cccagcgtgaacaacacagaagac

SEQ ID NO: 65106 - DNA, 24 bp, Artificial Sequence
  Synthetic oligonucleotide; AGGAGATT chr11 5373643 5373666 5373663 +
gacaggcttaggaaatggcgcacc

SEQ ID NO: 65107 - DNA, 24 bp, Artificial Sequence
  Synthetic oligonucleotide; CCCTGATT chr11 5373694 5373717 5373714 +
gagggtcctacgcccacggagtct

SEQ ID NO: 65108 - DNA, 24 bp, Artificial Sequence
  Synthetic oligonucleotide; GTCTGATT chr11 5374827 5374850 5374847 +
actatgtgaaaagatcaaatctag

SEQ ID NO: 65109 - DNA, 24 bp, Artificial Sequence
  Synthetic oligonucleotide; TTCAGATT chr11 5374935 5374958 5374955 +
ccaatctagcaaggcaggccaaca

SEQ ID NO: 65110 - DNA, 24 bp, Artificial Sequence
  Synthetic oligonucleotide; GTCAGATT chr11 5375006 5375029 5375026 +
agagcaactccaagacacataatt

SEQ ID NO: 65111 - DNA, 24 bp, Artificial Sequence
  Synthetic oligonucleotide; GAGAGATT chr11 5375260 5375283 5375280 +
atactttacagacaagcaaatgct

SEQ ID NO: 65112 - DNA, 24 bp, Artificial Sequence
  Synthetic oligonucleotide; CCCAGATT chr11 5375772 5375795 5375792 +
atatatgcacccaatacaggagca

SEQ ID NO: 65113 - DNA, 24 bp, Artificial Sequence
  Synthetic oligonucleotide; TCAGGATT chr11 5376119 5376142 5376139 +
accacagtgcaatcaaactagaac

SEQ ID NO: 65114 - DNA, 24 bp, Artificial Sequence
  Synthetic oligonucleotide; GATGGATT chr11 5376826 5376849 5376846 +
ccaaccaaaaagagtccaggacca

SEQ ID NO: 65115 - DNA, 24 bp, Artificial Sequence
  Synthetic oligonucleotide; ACATGATT chr11 5377187 5377210 5377207 +
taaacagaaccaaagacaaaaacc

SEQ ID NO: 65116 - DNA, 24 bp, Artificial Sequence
  Synthetic oligonucleotide; ACATGATT chr11 5377514 5377537 5377534 +
tcaaattgtccctgtttgcagacg

SEQ ID NO: 65117 - DNA, 24 bp, Artificial Sequence
  Synthetic oligonucleotide; TATAGATT chr11 5377873 5377896 5377893 +
atggccataatgcccaaggtaatt

SEQ ID NO: 65118 - DNA, 24 bp, Artificial Sequence
  Synthetic oligonucleotide; CAATGATT chr11 5377904 5377927 5377924 +
tcaatgccatccccatcaagctac

SEQ ID NO: 65119 - DNA, 24 bp, Artificial Sequence
  Synthetic oligonucleotide; AAAGGATT chr11 5378186 5378209 5378206 +
acctgagaaaaacaagaaatgggg

SEQ ID NO: 65120 - DNA, 24 bp, Artificial Sequence
  Synthetic oligonucleotide; GATGGATT chr11 5378290 5378313 5378310 +
caccttatacaaaaattaattcaa

SEQ ID NO: 65121 - DNA, 24 bp, Artificial Sequence
  Synthetic oligonucleotide; TGGCGATT chr11 5378877 5378900 5378897 +
gttcaaccattgtggaagtcagtg

SEQ ID NO: 65122 - DNA, 24 bp, Artificial Sequence
  Synthetic oligonucleotide; ACTGGATT chr11 5379058 5379081 5379078 +
aacccaaatgtccaacaatgatag

SEQ ID NO: 65123 - DNA, 24 bp, Artificial Sequence
  Synthetic oligonucleotide; TTAAGATT chr11 5379558 5379581 5379578 +
atgtgtctttttctatgtctgctt

SEQ ID NO: 65124 - DNA, 24 bp, Artificial Sequence
  Synthetic oligonucleotide; AATAGATT chr11 5379663 5379686 5379683 +
caaggttagctaaagatatgaatt

SEQ ID NO: 65125 - DNA, 24 bp, Artificial Sequence
  Synthetic oligonucleotide; TAAGGATT chr11 5380530 5380553 5380550 +
tggagacattgagaaccctgtgag

SEQ ID NO: 65126 - DNA, 24 bp, Artificial Sequence
  Synthetic oligonucleotide; TGGGGATT chr11 5380564 5380587 5380584 +
atttaggtctgtttctggtcagag

SEQ ID NO: 65127 - DNA, 24 bp, Artificial Sequence
  Synthetic oligonucleotide; ATATGATT chr11 5380585 5380608 5380605 +
gagtggggatttaaggcttggtca

SEQ ID NO: 65128 - DNA, 24 bp, Artificial Sequence
  Synthetic oligonucleotide; CATAGATT chr11 5380611 5380634 5380631 +
atgattaagactaaaggccacaca

SEQ ID NO: 65129 - DNA, 24 bp, Artificial Sequence
  Synthetic oligonucleotide; GTGAGATT chr11 5380622 5380645 5380642 +
taaaggccacacacatagatttgt

SEQ ID NO: 65130 - DNA, 24 bp, Artificial Sequence
  Synthetic oligonucleotide; TGGGGATT chr11 5380954 5380977 5380974 +
aaaccacagcatgtgtacagacct

SEQ ID NO: 65131 - DNA, 24 bp, Artificial Sequence
  Synthetic oligonucleotide; AATGGATT chr11 5381242 5381265 5381262 +
acagtgacacttttcacttttagt

SEQ ID NO: 65132 - DNA, 24 bp, Artificial Sequence
  Synthetic oligonucleotide; TTTAGATT chr11 5381248 5381271 5381268 +
acacttttcacttttagtaatgga

SEQ ID NO: 65133 - DNA, 24 bp, Artificial Sequence
  Synthetic oligonucleotide; GCATGATT chr11 5381371 5381394 5381391 +
ccacattcacttcacctaatattc

SEQ ID NO: 65134 - DNA, 24 bp, Artificial Sequence
  Synthetic oligonucleotide; ATATGATT chr11 5382035 5382058 5382055 +
attgttaacaatgtactctggaaa

SEQ ID NO: 65135 - DNA, 24 bp, Artificial Sequence
  Synthetic oligonucleotide; GGTTGATT chr11 5382297 5382320 5382317 +
acctttctataaagccctatctgt

SEQ ID NO: 65136 - DNA, 24 bp, Artificial Sequence
  Synthetic oligonucleotide; GCAGGATT chr11 5382567 5382590 5382587 +
gctaaaatcatgttcttaataaat

SEQ ID NO: 65137 - DNA, 24 bp, Artificial Sequence
  Synthetic oligonucleotide; GTAGGATT chr11 5383235 5383258 5383255 +
cactgacctggacatttgtttggg

SEQ ID NO: 65138 - DNA, 24 bp, Artificial Sequence
  Synthetic oligonucleotide; GCAAGATT chr11 5383249 5383272 5383269 +
tttgtttggggtaggattgaatat

SEQ ID NO: 65139 - DNA, 24 bp, Artificial Sequence
  Synthetic oligonucleotide; TGGTGATT chr11 5383379 5383402 5383399 +
aggagtgagagaatcttgaagtag

SEQ ID NO: 65140 - DNA, 24 bp, Artificial Sequence
  Synthetic oligonucleotide; ATAGGATT chr11 5383696 5383719 5383716 +
ggagataaagaaagtttcctgccc

SEQ ID NO: 65141 - DNA, 24 bp, Artificial Sequence
  Synthetic oligonucleotide; AATGGATT chr11 5384079 5384102 5384099 +
caaatgtttgaatgtccttagcca

SEQ ID NO: 65142 - DNA, 24 bp, Artificial Sequence
  Synthetic oligonucleotide; ATGGGATT chr11 5384112 5384135 5384132 +
cccacattccctgcactaagccta

SEQ ID NO: 65143 - DNA, 24 bp, Artificial Sequence
  Synthetic oligonucleotide; ACCGGATT chr11 5384238 5384261 5384258 +
aatcatagctcactgtaaactcaa

SEQ ID NO: 65144 - DNA, 24 bp, Artificial Sequence
  Synthetic oligonucleotide; CCAGGATT chr11 5384279 5384302 5384299 +
ctcccaccttattcttccaagttg

SEQ ID NO: 65145 - DNA, 24 bp, Artificial Sequence
  Synthetic oligonucleotide; CTTAGATT chr11 5384321 5384344 5384341 +
accaccatatacagcagtctgggc

SEQ ID NO: 65146 - DNA, 24 bp, Artificial Sequence
  Synthetic oligonucleotide; GAGAGATT chr11 5386055 5386078 5386075 +
cctaatgctacagaaggaagtcag

SEQ ID NO: 65147 - DNA, 24 bp, Artificial Sequence
  Synthetic oligonucleotide; TCCTGATT chr11 5386344 5386367 5386364 +
agagagacaaaggttcatatctta

SEQ ID NO: 65148 - DNA, 24 bp, Artificial Sequence
  Synthetic oligonucleotide; GGATGATT chr11 5386373 5386396 5386393 +
attttcgctcactaccaggccttg

SEQ ID NO: 65149 - DNA, 24 bp, Artificial Sequence
  Synthetic oligonucleotide; TCATGATT chr11 5386447 5386470 5386467 +
atgtttcatagttacatgaaatat

SEQ ID NO: 65150 - DNA, 24 bp, Artificial Sequence
  Synthetic oligonucleotide; CAGTGATT chr11 5386579 5386602 5386599 +
gctactgaagtactgaaaacagtg

SEQ ID NO: 65151 - DNA, 24 bp, Artificial Sequence
  Synthetic oligonucleotide; AATAGATT chr11 5386739 5386762 5386759 +
acattggctacagagatgaagatg

SEQ ID NO: 65152 - DNA, 24 bp, Artificial Sequence
  Synthetic oligonucleotide; GATAGATT chr11 5386752 5386775 5386772 +
agatgaagatgaatagattacagg

SEQ ID NO: 65153 - DNA, 24 bp, Artificial Sequence
  Synthetic oligonucleotide; TAGAGATT chr11 5387014 5387037 5387034 +
gatatgtaacggagttatctggac

SEQ ID NO: 65154 - DNA, 24 bp, Artificial Sequence
  Synthetic oligonucleotide; GTATGATT chr11 5387277 5387300 5387297 +
gcacaaaaaaatcaataaaagcag

SEQ ID NO: 65155 - DNA, 24 bp, Artificial Sequence
  Synthetic oligonucleotide; AGTGGATT chr11 5387581 5387604 5387601 +
acgtagcatttagctgctacttca

SEQ ID NO: 65156 - DNA, 24 bp, Artificial Sequence
  Synthetic oligonucleotide; CTCTGATT chr11 5387740 5387763 5387760 +
ccctaagatagccacacacttgcc

SEQ ID NO: 65157 - DNA, 24 bp, Artificial Sequence
  Synthetic oligonucleotide; TTTTGATT chr11 5387746 5387769 5387766 +
gatagccacacacttgccctctga

SEQ ID NO: 65158 - DNA, 24 bp, Artificial Sequence
  Synthetic oligonucleotide; ATAAGATT chr11 5388110 5388133 5388130 +
ttgaatattgaaataattattgaa

SEQ ID NO: 65159 - DNA, 24 bp, Artificial Sequence
  Synthetic oligonucleotide; AAAGGATT chr11 5388161 5388184 5388181 +
taataatttattcaaataatattt

SEQ ID NO: 65160 - DNA, 24 bp, Artificial Sequence
  Synthetic oligonucleotide; CAAAGATT chr11 5388443 5388466 5388463 +
ttatattagtagaagttaactaga

SEQ ID NO: 65161 - DNA, 24 bp, Artificial Sequence
  Synthetic oligonucleotide; TGGTGATT chr11 5388848 5388871 5388868 +
tcagtaaacagaaaccctaggact

SEQ ID NO: 65162 - DNA, 24 bp, Artificial Sequence
  Synthetic oligonucleotide; GGTTGATT chr11 5388856 5388879 5388876 +
cagaaaccctaggacttggtgatt

SEQ ID NO: 65163 - DNA, 24 bp, Artificial Sequence
  Synthetic oligonucleotide; GTGAGATT chr11 5389228 5389251 5389248 +
tatcaaagaaagttcaataaagta

SEQ ID NO: 65164 - DNA, 24 bp, Artificial Sequence
  Synthetic oligonucleotide; CCTGGATT chr11 5389462 5389485 5389482 +
cccatattctatctcaccagcttt

SEQ ID NO: 65165 - DNA, 24 bp, Artificial Sequence
  Synthetic oligonucleotide; ACTGGATT chr11 5389484 5389507 5389504 +
ttcctggattggaaggcatcaaac

SEQ ID NO: 65166 - DNA, 24 bp, Artificial Sequence
  Synthetic oligonucleotide; TAAAGATT chr11 5390444 5390467 5390464 +
agtattgagtatatagcatgctct

SEQ ID NO: 65167 - DNA, 24 bp, Artificial Sequence
  Synthetic oligonucleotide; CTTAGATT chr11 5390528 5390551 5390548 +
ctttaaaaaactgaacttctcttg

SEQ ID NO: 65168 - DNA, 24 bp, Artificial Sequence
  Synthetic oligonucleotide; CTCTGATT chr11 5390994 5391017 5391014 +
gatcctatccttgactcctctcat

SEQ ID NO: 65169 - DNA, 24 bp, Artificial Sequence
  Synthetic oligonucleotide; GGAGGATT chr11 5391774 5391797 5391794 +
ccagcactttgggagaccaaggtg

SEQ ID NO: 65170 - DNA, 24 bp, Artificial Sequence
  Synthetic oligonucleotide; AGAAGATT chr11 5391817 5391840 5391837 +
ggagtttgagaccaacttcaggca

SEQ ID NO: 65171 - DNA, 24 bp, Artificial Sequence
  Synthetic oligonucleotide; CCCCGATT chr11 5392028 5392051 5392048 +
tactgcctgggtgaccaagtgaga

SEQ ID NO: 65172 - DNA, 24 bp, Artificial Sequence
  Synthetic oligonucleotide; TTAGGATT chr11 5392393 5392416 5392413 +
ttggtagaatggggtacaaaaaat

SEQ ID NO: 65173 - DNA, 24 bp, Artificial Sequence
  Synthetic oligonucleotide; TTTGGATT chr11 5392399 5392422 5392419 +
gaatggggtacaaaaaatttagga

SEQ ID NO: 65174 - DNA, 24 bp, Artificial Sequence
  Synthetic oligonucleotide; TTTAGATT chr11 5392405 5392428 5392425 +
ggtacaaaaaatttaggatttgga

SEQ ID NO: 65175 - DNA, 24 bp, Artificial Sequence
  Synthetic oligonucleotide; TATAGATT chr11 5393459 5393482 5393479 +
tgttatatataatcttattttcta

SEQ ID NO: 65176 - DNA, 24 bp, Artificial Sequence
  Synthetic oligonucleotide; ATACGATT chr11 5393558 5393581 5393578 +
tttacaatgactataaaaagttat

SEQ ID NO: 65177 - DNA, 24 bp, Artificial Sequence
  Synthetic oligonucleotide; ATCTGATT chr11 5393834 5393857 5393854 +
gaactgaaattcaatatcaagcgc

SEQ ID NO: 65178 - DNA, 24 bp, Artificial Sequence
  Synthetic oligonucleotide; ACTTGATT chr11 5394058 5394081 5394078 +
attgtattaaatactttttaatag

SEQ ID NO: 65179 - DNA, 24 bp, Artificial Sequence
  Synthetic oligonucleotide; TATAGATT chr11 5394074 5394097 5394094 +
tttaatagacttgattttaagagt

SEQ ID NO: 65180 - DNA, 24 bp, Artificial Sequence
  Synthetic oligonucleotide; ACTAGATT chr11 5394230 5394253 5394250 +
caataaccttatgagatggatact

SEQ ID NO: 65181 - DNA, 24 bp, Artificial Sequence
  Synthetic oligonucleotide; CACTGATT chr11 5394346 5394369 5394366 +
gtgcttgtagttttaactatgctc

SEQ ID NO: 65182 - DNA, 24 bp, Artificial Sequence
  Synthetic oligonucleotide; AGAGGATT chr11 5394953 5394976 5394973 +
gggaaaagaaaagaaagacaaaaa

SEQ ID NO: 65183 - DNA, 24 bp, Artificial Sequence
  Synthetic oligonucleotide; GGGAGATT chr11 5395161 5395184 5395181 +
attcatcaagtctgcgtccatcta

SEQ ID NO: 65184 - DNA, 24 bp, Artificial Sequence
  Synthetic oligonucleotide; GAAAGATT chr11 5395714 5395737 5395734 +
acatagtaaaaaagctaaggttta

SEQ ID NO: 65185 - DNA, 24 bp, Artificial Sequence
  Synthetic oligonucleotide; GAAGGATT chr11 5395746 5395769 5395766 +
cagtaactttgccaaagccatatg

SEQ ID NO: 65186 - DNA, 24 bp, Artificial Sequence
  Synthetic oligonucleotide; GTCAGATT chr11 5395815 5395838 5395835 +
ccaaataccttacgcttcattgtt

SEQ ID NO: 65187 - DNA, 24 bp, Artificial Sequence
  Synthetic oligonucleotide; CTAAGATT chr11 5396003 5396026 5396023 +
gtctcaatttttcagatgaagaaa

SEQ ID NO: 65188 - DNA, 24 bp, Artificial Sequence
  Synthetic oligonucleotide; TTATGATT chr11 5396054 5396077 5396074 +
tcatagagtgaagagctattgaag

SEQ ID NO: 65189 - DNA, 24 bp, Artificial Sequence
  Synthetic oligonucleotide; ACGTGATT chr11 5396273 5396296 5396293 +
tcaaattgtccctgtttgcagatg

SEQ ID NO: 65190 - DNA, 24 bp, Artificial Sequence
  Synthetic oligonucleotide; TATAGATT chr11 5396615 5396638 5396635 +
atggccatactgcccaaggtaatt

SEQ ID NO: 65191 - DNA, 24 bp, Artificial Sequence
  Synthetic oligonucleotide; ACCTGATT chr11 5396764 5396787 5396784 +
gaacaaagctggaggcatcacact

SEQ ID NO: 65192 - DNA, 24 bp, Artificial Sequence
  Synthetic oligonucleotide; AAAGGATT chr11 5396929 5396952 5396949 +
acctgagaaaaacaagaaatgggg

SEQ ID NO: 65193 - DNA, 24 bp, Artificial Sequence
  Synthetic oligonucleotide; GATGGATT chr11 5397033 5397056 5397053 +
caccttatacaaaaattaactcaa

SEQ ID NO: 65194 - DNA, 24 bp, Artificial Sequence
  Synthetic oligonucleotide; TGGTGATT chr11 5397616 5397639 5397636 +
gttcaaacattgtggaagtcagtg

SEQ ID NO: 65195 - DNA, 24 bp, Artificial Sequence
  Synthetic oligonucleotide; AAAGGATT chr11 5397687 5397710 5397707 +
catcccattactgggtatacaccc

SEQ ID NO: 65196 - DNA, 24 bp, Artificial Sequence
  Synthetic oligonucleotide; ACTGGATT chr11 5397797 5397820 5397817 +
aacccaaatgtccaacaatgatag

SEQ ID NO: 65197 - DNA, 24 bp, Artificial Sequence
  Synthetic oligonucleotide; GGGAGATT chr11 5398635 5398658 5398655 +
tatatgtcgggggagggaccaggt

SEQ ID NO: 65198 - DNA, 24 bp, Artificial Sequence
  Synthetic oligonucleotide; CTGTGATT chr11 5399299 5399322 5399319 +
aataaaaagttggaaataagctga

SEQ ID NO: 65199 - DNA, 24 bp, Artificial Sequence
  Synthetic oligonucleotide; ATAAGATT chr11 5399484 5399507 5399504 +
aaagtacgtaaagttataccgaac

SEQ ID NO: 65200 - DNA, 24 bp, Artificial Sequence
  Synthetic oligonucleotide; TTCTGATT chr11 5399552 5399575 5399572 +
tcactgtcccacattctacttttt

SEQ ID NO: 65201 - DNA, 24 bp, Artificial Sequence
  Synthetic oligonucleotide; GAATGATT chr11 5399655 5399678 5399675 +
gtcaaacaaatcctaaactcagga

SEQ ID NO: 65202 - DNA, 24 bp, Artificial Sequence
  Synthetic oligonucleotide; TCAAGATT chr11 5399845 5399868 5399865 +
agagactctagtttcaagtatcag

SEQ ID NO: 65203 - DNA, 24 bp, Artificial Sequence
  Synthetic oligonucleotide; CAAGGATT chr11 5399914 5399937 5399934 +
gcaagatacagggtgcagtgggat

SEQ ID NO: 65204 - DNA, 24 bp, Artificial Sequence
  Synthetic oligonucleotide; TTAGGATT chr11 5399671 5399694 5399674 -
taaaacacaatcattctcctgagt

SEQ ID NO: 65205 - DNA, 24 bp, Artificial Sequence
  Synthetic oligonucleotide; ATGTGATT chr11 5399084 5399107 5399087 -
ttttccatctgccaccaatttagg

SEQ ID NO: 65206 - DNA, 24 bp, Artificial Sequence
  Synthetic oligonucleotide; TGGGGATT chr11 5398951 5398974 5398954 -
aatgctgcttcagaaggcagggct

SEQ ID NO: 65207 - DNA, 24 bp, Artificial Sequence
  Synthetic oligonucleotide; TAGGGATT chr11 5398637 5398660 5398640 -
ccacctggtccctcccccgacata

SEQ ID NO: 65208 - DNA, 24 bp, Artificial Sequence
  Synthetic oligonucleotide; TGGGGATT chr11 5398628 5398651 5398631 -
ccctcccccgacatatagggatta

SEQ ID NO: 65209 - DNA, 24 bp, Artificial Sequence
  Synthetic oligonucleotide; GCATGATT chr11 5397730 5397753 5397733 -
acgtgtgcatgtgtctttatagca

SEQ ID NO: 65210 - DNA, 24 bp, Artificial Sequence
  Synthetic oligonucleotide; TAATGATT chr11 5397536 5397559 5397539 -
agcacctgttgtttcctgactttt

SEQ ID NO: 65211 - DNA, 24 bp, Artificial Sequence
  Synthetic oligonucleotide; TTTTGATT chr11 5397491 5397514 5397494 -
gtgtgagatggtatctcattgtgg

SEQ ID NO: 65212 - DNA, 24 bp, Artificial Sequence
  Synthetic oligonucleotide; TGTAGATT chr11 5397336 5397359 5397339 -
tcttgtaaatttgtttgagttcat

SEQ ID NO: 65213 - DNA, 24 bp, Artificial Sequence
  Synthetic oligonucleotide; AGTAGATT chr11 5397303 5397326 5397306 -
tggatattagccctttgtcagatg

SEQ ID NO: 65214 - DNA, 24 bp, Artificial Sequence
  Synthetic oligonucleotide; TTAGGATT chr11 5396757 5396780 5396760 -
tgcctccagctttgttcttttggc

SEQ ID NO: 65215 - DNA, 24 bp, Artificial Sequence
  Synthetic oligonucleotide; GTTGGATT chr11 5396495 5396518 5396498 -
agaggtccttcacatcccttgtaa

SEQ ID NO: 65216 - DNA, 24 bp, Artificial Sequence
  Synthetic oligonucleotide; TTGTGATT chr11 5396407 5396430 5396410 -
tctgttattggtgtataagaatgc

SEQ ID NO: 65217 - DNA, 24 bp, Artificial Sequence
  Synthetic oligonucleotide; CATTGATT chr11 5396393 5396416 5396396 -
ataagaatgcttgtgatttttgca

SEQ ID NO: 65218 - DNA, 24 bp, Artificial Sequence
  Synthetic oligonucleotide; AGGGGATT chr11 5396346 5396369 5396349 -
ttgctgaagttgcttatcagctta

SEQ ID NO: 65219 - DNA, 24 bp, Artificial Sequence
  Synthetic oligonucleotide; GCCCGATT chr11 5396231 5396254 5396234 -
gaatgccttttatttccttctcct

SEQ ID NO: 65220 - DNA, 24 bp, Artificial Sequence
  Synthetic oligonucleotide; CTATGATT chr11 5396060 5396083 5396063 -
tcataacttcaatagctcttcact

SEQ ID NO: 65221 - DNA, 24 bp, Artificial Sequence
  Synthetic oligonucleotide; ATCTGATT chr11 5396043 5396066 5396046 -
cttcactctatgattgtgcaaagt

SEQ ID NO: 65222 - DNA, 24 bp, Artificial Sequence
  Synthetic oligonucleotide; CATAGATT chr11 5395989 5396012 5395992 -
aaattgagacaattctacctactc

SEQ ID NO: 65223 - DNA, 24 bp, Artificial Sequence
  Synthetic oligonucleotide; AAAAGATT chr11 5395862 5395885 5395865 -
agcaatgttgcagtgagctctaag

SEQ ID NO: 65224 - DNA, 24 bp, Artificial Sequence
  Synthetic oligonucleotide; GAAAGATT chr11 5395713 5395736 5395716 -
aaaccttagcttttttactatgtt

SEQ ID NO: 65225 - DNA, 24 bp, Artificial Sequence
  Synthetic oligonucleotide; AAATGATT chr11 5395676 5395699 5395679 -
atgggccctgcctcttttcgagag

SEQ ID NO: 65226 - DNA, 24 bp, Artificial Sequence
  Synthetic oligonucleotide; CTGAGATT chr11 5395602 5395625 5395605 -
aagcttcatcaattggagcaattg

SEQ ID NO: 65227 - DNA, 24 bp, Artificial Sequence
  Synthetic oligonucleotide; AACAGATT chr11 5395473 5395496 5395476 -
atatgatagaacagcagccctaac

SEQ ID NO: 65228 - DNA, 24 bp, Artificial Sequence
  Synthetic oligonucleotide; GAGGGATT chr11 5395155 5395178 5395158 -
gacgcagacttgatgaatgtcaaa

SEQ ID NO: 65229 - DNA, 24 bp, Artificial Sequence
  Synthetic oligonucleotide; TAAAGATT chr11 5394513 5394536 5394516 -
ggatattaaataacgggatagttg

SEQ ID NO: 65230 - DNA, 24 bp, Artificial Sequence
  Synthetic oligonucleotide; AGATGATT chr11 5394465 5394488 5394468 -
taggcttgtgctgaggaatgggcc

SEQ ID NO: 65231 - DNA, 24 bp, Artificial Sequence
  Synthetic oligonucleotide; GGCTGATT chr11 5394417 5394440 5394420 -
attagcaggaatatgtacagcttt

SEQ ID NO: 65232 - DNA, 24 bp, Artificial Sequence
  Synthetic oligonucleotide; TAATGATT chr11 5393824 5393847 5393827 -
ttgaatttcagttctgacttacat

SEQ ID NO: 65233 - DNA, 24 bp, Artificial Sequence
  Synthetic oligonucleotide; TTTAGATT chr11 5393550 5393573 5393553 -
ttatagtcattgtaaaatgctctt

SEQ ID NO: 65234 - DNA, 24 bp, Artificial Sequence
  Synthetic oligonucleotide; ATAAGATT chr11 5393477 5393500 5393480 -
aagatagagaaatctatatagaaa

SEQ ID NO: 65235 - DNA, 24 bp, Artificial Sequence
  Synthetic oligonucleotide; TAGTGATT chr11 5393419 5393442 5393422 -
tacaaatatttatagccttttaca

SEQ ID NO: 65236 - DNA, 24 bp, Artificial Sequence
  Synthetic oligonucleotide; CTTTGATT chr11 5393313 5393336 5393316 -
ataatagtgtatcaaatgaatatg

SEQ ID NO: 65237 - DNA, 24 bp, Artificial Sequence
  Synthetic oligonucleotide; GATGGATT chr11 5393181 5393204 5393184 -
tatttattgatcactgacctagga

SEQ ID NO: 65238 - DNA, 24 bp, Artificial Sequence
  Synthetic oligonucleotide; GACAGATT chr11 5393095 5393118 5393098 -
atttttaatttatcatttatttag

SEQ ID NO: 65239 - DNA, 24 bp, Artificial Sequence
  Synthetic oligonucleotide; CTGGGATT chr11 5392665 5392688 5392668 -
cacccgcctcggcctcccagagtg

SEQ ID NO: 65240 - DNA, 24 bp, Artificial Sequence
  Synthetic oligonucleotide; TATTGATT chr11 5392628 5392651 5392631 -
cgtgagccaccgcgcccagccaga

SEQ ID NO: 65241 - DNA, 24 bp, Artificial Sequence
  Synthetic oligonucleotide; GTGTGATT chr11 5392028 5392051 5392031 -
tctcacttggtcacccaggcagta

SEQ ID NO: 65242 - DNA, 24 bp, Artificial Sequence
  Synthetic oligonucleotide; CTGGGATT chr11 5391778 5391801 5391781 -
ctcccaccttggtctcccaaagtg

SEQ ID NO: 65243 - DNA, 24 bp, Artificial Sequence
  Synthetic oligonucleotide; TCTTGATT chr11 5391439 5391462 5391442 -
agacatgcctaattcctccaggga

SEQ ID NO: 65244 - DNA, 24 bp, Artificial Sequence
  Synthetic oligonucleotide; CAAGGATT chr11 5391243 5391266 5391246 -
gcaatttcaaagctgagacccctg

SEQ ID NO: 65245 - DNA, 24 bp, Artificial Sequence
  Synthetic oligonucleotide; ATGGGATT chr11 5391173 5391196 5391176 -
gtaaagtttatttcctcctgagca

SEQ ID NO: 65246 - DNA, 24 bp, Artificial Sequence
  Synthetic oligonucleotide; ATATGATT chr11 5390309 5390332 5390312 -
ggatctccttggtcttaatgctgt

SEQ ID NO: 65247 - DNA, 24 bp, Artificial Sequence
  Synthetic oligonucleotide; TACAGATT chr11 5390028 5390051 5390031 -
gtgaaaactaccaccatcagtcca

SEQ ID NO: 65248 - DNA, 24 bp, Artificial Sequence
  Synthetic oligonucleotide; TCTGGATT chr11 5389736 5389759 5389739 -
aggaaaaagagtggatgcagaaca

SEQ ID NO: 65249 - DNA, 24 bp, Artificial Sequence
  Synthetic oligonucleotide; CGGGGATT chr11 5389395 5389418 5389398 -
agcgaatattggactgacattcct

SEQ ID NO: 65250 - DNA, 24 bp, Artificial Sequence
  Synthetic oligonucleotide; CCATGATT chr11 5389069 5389092 5389072 -
atttcttcttaatgtcatccacta

SEQ ID NO: 65251 - DNA, 24 bp, Artificial Sequence
  Synthetic oligonucleotide; TTTTGATT chr11 5388999 5389022 5389002 -
aattccagaacttgtctttctctc

SEQ ID NO: 65252 - DNA, 24 bp, Artificial Sequence
  Synthetic oligonucleotide; TAGGGATT chr11 5388227 5388250 5388230 -
cttttttaattttaatattagctc

SEQ ID NO: 65253 - DNA, 24 bp, Artificial Sequence
  Synthetic oligonucleotide; AATTGATT chr11 5388089 5388112 5388092 -
caattatttcaataattattcatt

SEQ ID NO: 65254 - DNA, 24 bp, Artificial Sequence
  Synthetic oligonucleotide; TATTGATT chr11 5387294 5387317 5387297 -
gagagtcttaatcatacctgcttt

SEQ ID NO: 65255 - DNA, 24 bp, Artificial Sequence
  Synthetic oligonucleotide; TTCTGATT chr11 5387198 5387221 5387201 -
taatgccaagatctgctggttctc

SEQ ID NO: 65256 - DNA, 24 bp, Artificial Sequence
  Synthetic oligonucleotide; ACCTGATT chr11 5386920 5386943 5386923 -
tgagcccagcatccatcttttcac

SEQ ID NO: 65257 - DNA, 24 bp, Artificial Sequence
  Synthetic oligonucleotide; CCGAGATT chr11 5386642 5386665 5386645 -
ttggtccatcctctactgcagcca

SEQ ID NO: 65258 - DNA, 24 bp, Artificial Sequence
  Synthetic oligonucleotide; ACATGATT chr11 5386511 5386534 5386514 -
gatagtccaatttattgaggccat

SEQ ID NO: 65259 - DNA, 24 bp, Artificial Sequence
  Synthetic oligonucleotide; TATAGATT chr11 5385885 5385908 5385888 -
ataagtttaaataacatataagtg

SEQ ID NO: 65260 - DNA, 24 bp, Artificial Sequence
  Synthetic oligonucleotide; TATAGATT chr11 5385814 5385837 5385817 -
acattatatattctttatatactt

SEQ ID NO: 65261 - DNA, 24 bp, Artificial Sequence
  Synthetic oligonucleotide; AGTTGATT chr11 5385584 5385607 5385587 -
accaacctaataattcatttttta

SEQ ID NO: 65262 - DNA, 24 bp, Artificial Sequence
  Synthetic oligonucleotide; TCCTGATT chr11 5385453 5385476 5385456 -
aataaataaagtactcacctctta

SEQ ID NO: 65263 - DNA, 24 bp, Artificial Sequence
  Synthetic oligonucleotide; CTGGGATT chr11 5385331 5385354 5385334 -
gtctatacagagacaatgacaggg

SEQ ID NO: 65264 - DNA, 24 bp, Artificial Sequence
  Synthetic oligonucleotide; AGGGGATT chr11 5385281 5385304 5385284 -
acttcctcttgggaagaaagcttt

SEQ ID NO: 65265 - DNA, 24 bp, Artificial Sequence
  Synthetic oligonucleotide; AGTAGATT chr11 5385139 5385162 5385142 -
acataattaaaatattcaaggcag

SEQ ID NO: 65266 - DNA, 24 bp, Artificial Sequence
  Synthetic oligonucleotide; AAGAGATT chr11 5385101 5385124 5385104 -
agatcacaggagaaaattcctgaa

SEQ ID NO: 65267 - DNA, 24 bp, Artificial Sequence
  Synthetic oligonucleotide; ACCAGATT chr11 5384927 5384950 5384930 -
ctgcacctaaacacaaggacttga

SEQ ID NO: 65268 - DNA, 24 bp, Artificial Sequence
  Synthetic oligonucleotide; GGAGGATT chr11 5384840 5384863 5384843 -
catgcctgtttttagtaggataga

SEQ ID NO: 65269 - DNA, 24 bp, Artificial Sequence
  Synthetic oligonucleotide; TTTGGATT chr11 5384782 5384805 5384785 -
tactggggaagttacaaggtgttg

SEQ ID NO: 65270 - DNA, 24 bp, Artificial Sequence
  Synthetic oligonucleotide; AGCAGATT chr11 5384768 5384791 5384771 -
caaggtgttgtttggattaaaata

SEQ ID NO: 65271 - DNA, 24 bp, Artificial Sequence
  Synthetic oligonucleotide; AAGAGATT chr11 5384404 5384427 5384407 -
gtgcatagactctgagaatatcag

SEQ ID NO: 65272 - DNA, 24 bp, Artificial Sequence
  Synthetic oligonucleotide; GGAGGATT chr11 5384283 5384306 5384286 -
ctggcaacttggaagaataaggtg

SEQ ID NO: 65273 - DNA, 24 bp, Artificial Sequence
  Synthetic oligonucleotide; CTATGATT chr11 5384246 5384269 5384249 -
aatccggtttgagtttacagtgag

SEQ ID NO: 65274 - DNA, 24 bp, Artificial Sequence
  Synthetic oligonucleotide; GAAGGATT chr11 5383804 5383827 5383807 -
aggcacaaggctgtggctgtcaca

SEQ ID NO: 65275 - DNA, 24 bp, Artificial Sequence
  Synthetic oligonucleotide; AGAGGATT chr11 5383474 5383497 5383477 -
agagaggtcggatgtagtatatga

SEQ ID NO: 65276 - DNA, 24 bp, Artificial Sequence
  Synthetic oligonucleotide; TCAAGATT chr11 5383398 5383421 5383401 -
tgaagcaccacaatcaccactact

SEQ ID NO: 65277 - DNA, 24 bp, Artificial Sequence
  Synthetic oligonucleotide; GGTTGATT chr11 5382921 5382944 5382924 -
tattacatcctttaaatagggcat

SEQ ID NO: 65278 - DNA, 24 bp, Artificial Sequence
  Synthetic oligonucleotide; ACATGATT chr11 5382580 5382603 5382583 -
cagaaaatcctgcatttattaaga

SEQ ID NO: 65279 - DNA, 24 bp, Artificial Sequence
  Synthetic oligonucleotide; ATAAGATT chr11 5382224 5382247 5382227 -
agttgtttatgtgttttgagaact

SEQ ID NO: 65280 - DNA, 24 bp, Artificial Sequence
  Synthetic oligonucleotide; GAAGGATT chr11 5382029 5382052 5382032 -
gagtacattgttaacaatatgcag

SEQ ID NO: 65281 - DNA, 24 bp, Artificial Sequence
  Synthetic oligonucleotide; AATAGATT chr11 5381806 5381829 5381809 -
taattgaaggaccagtttccaagc

SEQ ID NO: 65282 - DNA, 24 bp, Artificial Sequence
  Synthetic oligonucleotide; TTTTGATT chr11 5381767 5381790 5381770 -
aaaccaaatgaaagaactcagcat

SEQ ID NO: 65283 - DNA, 24 bp, Artificial Sequence
  Synthetic oligonucleotide; TTTAGATT chr11 5381739 5381762 5381742 -
gattctttattgctctaaatgacc

SEQ ID NO: 65284 - DNA, 24 bp, Artificial Sequence
  Synthetic oligonucleotide; GACAGATT chr11 5381603 5381626 5381606 -
actctgatcaagaacttgaagata

SEQ ID NO: 65285 - DNA, 24 bp, Artificial Sequence
  Synthetic oligonucleotide; GTTAGATT chr11 5381549 5381572 5381552 -
atgaagctcacattgagtaaagat

SEQ ID NO: 65286 - DNA, 24 bp, Artificial Sequence
  Synthetic oligonucleotide; AGGAGATT chr11 5381009 5381032 5381012 -
ccactgagccaggcttggtgaagt

SEQ ID NO: 65287 - DNA, 24 bp, Artificial Sequence
  Synthetic oligonucleotide; TTCAGATT chr11 5380674 5380697 5380677 -
agagagataggttttcttagcttt

SEQ ID NO: 65288 - DNA, 24 bp, Artificial Sequence
  Synthetic oligonucleotide; TTAGGATT chr11 5380374 5380397 5380377 -
tcagactggagagacccacagaag

SEQ ID NO: 65289 - DNA, 24 bp, Artificial Sequence
  Synthetic oligonucleotide; AACCGATT chr11 5380151 5380174 5380154 -
ctctcttcagtcattatgaaaggg

SEQ ID NO: 65290 - DNA, 24 bp, Artificial Sequence
  Synthetic oligonucleotide; TTTTGATT chr11 5380044 5380067 5380047 -
taaagttttagtgtattttgcata

SEQ ID NO: 65291 - DNA, 24 bp, Artificial Sequence
  Synthetic oligonucleotide; TCATGATT chr11 5379975 5379998 5379978 -
tttttttttaaagttttgtttggt

SEQ ID NO: 65292 - DNA, 24 bp, Artificial Sequence
  Synthetic oligonucleotide; AATGGATT chr11 5379753 5379776 5379756 -
ttagaattctaaaaggaaacaaaa

SEQ ID NO: 65293 - DNA, 24 bp, Artificial Sequence
  Synthetic oligonucleotide; TTAAGATT chr11 5379453 5379476 5379456 -
tttatttattattattattatact

SEQ ID NO: 65294 - DNA, 24 bp, Artificial Sequence
  Synthetic oligonucleotide; TGATGATT chr11 5379189 5379212 5379192 -
gtccttgcgatagtttactgagaa

SEQ ID NO: 65295 - DNA, 24 bp, Artificial Sequence
  Synthetic oligonucleotide; GCATGATT chr11 5378991 5379014 5378994 -
acgtgtgcatgtgtctttatagca

SEQ ID NO: 65296 - DNA, 24 bp, Artificial Sequence
  Synthetic oligonucleotide; TAATGATT chr11 5378797 5378820 5378800 -
agcacctgttgtttcctgactttt

SEQ ID NO: 65297 - DNA, 24 bp, Artificial Sequence
  Synthetic oligonucleotide; TTTTGATT chr11 5378752 5378775 5378755 -
gtatgagatggtatctcattgtgg

SEQ ID NO: 65298 - DNA, 24 bp, Artificial Sequence
  Synthetic oligonucleotide; TATAGATT chr11 5378593 5378616 5378596 -
tcttgtaaatttgtttgagttcat

SEQ ID NO: 65299 - DNA, 24 bp, Artificial Sequence
  Synthetic oligonucleotide; TTAGGATT chr11 5378014 5378037 5378017 -
tgcctccagctttgttcttttggc

SEQ ID NO: 65300 - DNA, 24 bp, Artificial Sequence
  Synthetic oligonucleotide; TATTGATT chr11 5377865 5377888 5377868 -
tgggcattatggccattttgatga

SEQ ID NO: 65301 - DNA, 24 bp, Artificial Sequence
  Synthetic oligonucleotide; GTTGGATT chr11 5377748 5377771 5377751 -
agaggtccttcacatcccttgtaa

SEQ ID NO: 65302 - DNA, 24 bp, Artificial Sequence
  Synthetic oligonucleotide; TCATGATT chr11 5377694 5377717 5377697 -
aagcaattgtgaatgggagttccc

SEQ ID NO: 65303 - DNA, 24 bp, Artificial Sequence
  Synthetic oligonucleotide; TTGTGATT chr11 5377648 5377671 5377651 -
tctgttattggtgtataagaatgc

SEQ ID NO: 65304 - DNA, 24 bp, Artificial Sequence
  Synthetic oligonucleotide; AGGAGATT chr11 5377587 5377610 5377590 -
ttgctgaagttgcttatcagctta

SEQ ID NO: 65305 - DNA, 24 bp, Artificial Sequence
  Synthetic oligonucleotide; GCTGGATT chr11 5377184 5377207 5377187 -
ttttgtctttggttctgtttatat

SEQ ID NO: 65306 - DNA, 24 bp, Artificial Sequence
  Synthetic oligonucleotide; TATTGATT chr11 5377171 5377194 5377174 -
tctgtttatatgctggattacatt

SEQ ID NO: 65307 - DNA, 24 bp, Artificial Sequence
  Synthetic oligonucleotide; GCTGGATT chr11 5377088 5377111 5377091 -
cgtggataagctttttgatgtgct

SEQ ID NO: 65308 - DNA, 24 bp, Artificial Sequence
  Synthetic oligonucleotide; TGAGGATT chr11 5377061 5377084 5377064 -
ggattcggtttgccagtattttat

SEQ ID NO: 65309 - DNA, 24 bp, Artificial Sequence
  Synthetic oligonucleotide; GGAGGATT chr11 5376947 5376970 5376950 -
tgctggcctcataaaatgagttag

SEQ ID NO: 65310 - DNA, 24 bp, Artificial Sequence
  Synthetic oligonucleotide; TGTTGATT chr11 5376928 5376951 5376931 -
gttagggaggattccttctttttc

SEQ ID NO: 65311 - DNA, 24 bp, Artificial Sequence
  Synthetic oligonucleotide; TATTGATT chr11 5376821 5376844 5376824 -
ctggactctttttggttggtaagc

SEQ ID NO: 65312 - DNA, 24 bp, Artificial Sequence
  Synthetic oligonucleotide; CAGAGATT chr11 5376778 5376801 5376781 -
ttcagatcctgttattggtctatt

SEQ ID NO: 65313 - DNA, 24 bp, Artificial Sequence
  Synthetic oligonucleotide; TCTAGATT chr11 5376711 5376734 5376714 -
gtgtccaggaatttatccatttct

SEQ ID NO: 65314 - DNA, 24 bp, Artificial Sequence
  Synthetic oligonucleotide; ATTTGATT chr11 5376599 5376622 5376602 -
ctttatcatttttttattgtgtct

SEQ ID NO: 65315 - DNA, 24 bp, Artificial Sequence
  Synthetic oligonucleotide; CCCAGATT chr11 5376523 5376546 5376526 -
gttgatcctttcaaaaaaccagct

SEQ ID NO: 65316 - DNA, 24 bp, Artificial Sequence
  Synthetic oligonucleotide; CTCTGATT chr11 5376467 5376490 5376470 -
gtgtctctgtttccttcagttctg

SEQ ID NO: 65317 - DNA, 24 bp, Artificial Sequence
  Synthetic oligonucleotide; CACTGATT chr11 5376316 5376339 5376319 -
tagtgctataaatttccccctaca

SEQ ID NO: 65318 - DNA, 24 bp, Artificial Sequence
  Synthetic oligonucleotide; CAGAGATT chr11 5376297 5376320 5376300 -
ctacacactgattcgaatgtgtcc

SEQ ID NO: 65319 - DNA, 24 bp, Artificial Sequence
  Synthetic oligonucleotide; GTTTGATT chr11 5376137 5376160 5376140 -
tgagtttcttaatcctgagttcta

SEQ ID NO: 65320 - DNA, 24 bp, Artificial Sequence
  Synthetic oligonucleotide; TGTTGATT chr11 5376000 5376023 5376003 -
ggtgctgaaaaaaaatgtatattc

SEQ ID NO: 65321 - DNA, 24 bp, Artificial Sequence
  Synthetic oligonucleotide; CTAGGATT chr11 5375665 5375688 5375668 -
gtttaaagcctgttttatcagaga

SEQ ID NO: 65322 - DNA, 24 bp, Artificial Sequence
  Synthetic oligonucleotide; GCCTGATT chr11 5375383 5375406 5375386 -
agtcttgatggtcttcacattttg

SEQ ID NO: 65323 - DNA, 24 bp, Artificial Sequence
  Synthetic oligonucleotide; GCTAGATT chr11 5374945 5374968 5374948 -
tgaatctgaatgttggcctgcctt

SEQ ID NO: 65324 - DNA, 24 bp, Artificial Sequence
  Synthetic oligonucleotide; GTTCGATT chr11 5374891 5374914 5374894 -
tcctgcagagtgttttccaacttg

SEQ ID NO: 65325 - DNA, 24 bp, Artificial Sequence
  Synthetic oligonucleotide; CCTAGATT chr11 5374852 5374875 5374855 -
tcactttcaggtacaccaatcaga

SEQ ID NO: 65326 - DNA, 24 bp, Artificial Sequence
  Synthetic oligonucleotide; CGCAGATT chr11 5374185 5374208 5374188 -
tatcagcagcggtgtctgcagaac

SEQ ID NO: 65327 - DNA, 24 bp, Artificial Sequence
  Synthetic oligonucleotide; TTGTGATT chr11 5373204 5373227 5373207 -
tctatacatgttcttccaggagtt

SEQ ID NO: 65328 - DNA, 24 bp, Artificial Sequence
  Synthetic oligonucleotide; TCAAGATT chr11 5372875 5372898 5372878 -
tgccatcaagttggtttttctttc

SEQ ID NO: 65329 - DNA, 24 bp, Artificial Sequence
  Synthetic oligonucleotide; GCTTGATT chr11 5371706 5371729 5371709 -
ttgtattgatggataggttaattt

SEQ ID NO: 65330 - DNA, 24 bp, Artificial Sequence
  Synthetic oligonucleotide; TGAAGATT chr11 5370436 5370459 5370439 -
gagacataccaacaaatgatcctc

SEQ ID NO: 65331 - DNA, 24 bp, Artificial Sequence
  Synthetic oligonucleotide; TTAGGATT chr11 5370238 5370261 5370241 -
cattaaacattcaaaccttcaact

SEQ ID NO: 65332 - DNA, 24 bp, Artificial Sequence
  Synthetic oligonucleotide; TGATGATT chr11 5370187 5370210 5370190 -
tgttaatgataataataaatacat

SEQ ID NO: 65333 - DNA, 24 bp, Artificial Sequence
  Synthetic oligonucleotide; TACAGATT chr11 5369999 5370022 5370002 -
agggaggtttgaagatcttgttga

SEQ ID NO: 65334 - DNA, 24 bp, Artificial Sequence
  Synthetic oligonucleotide; TTTGGATT chr11 5369860 5369883 5369863 -
cacttttaacaactgttgacttat

SEQ ID NO: 65335 - DNA, 24 bp, Artificial Sequence
  Synthetic oligonucleotide; CACTGATT chr11 5369811 5369834 5369814 -
taacacaaaaatgcagacaagcag

SEQ ID NO: 65336 - DNA, 24 bp, Artificial Sequence
  Synthetic oligonucleotide; GGCAGATT chr11 5369678 5369701 5369681 -
tagaaaagttgcagagaaatgtat

SEQ ID NO: 65337 - DNA, 24 bp, Artificial Sequence
  Synthetic oligonucleotide; ATCAGATT chr11 5369485 5369508 5369488 -
atacttttttaaatgtctcaaatt

SEQ ID NO: 65338 - DNA, 24 bp, Artificial Sequence
  Synthetic oligonucleotide; CTTAGATT chr11 5369127 5369150 5369130 -
cttcatcctttctgtatgtctaac

SEQ ID NO: 65339 - DNA, 24 bp, Artificial Sequence
  Synthetic oligonucleotide; CACAGATT chr11 5369077 5369100 5369080 -
ctctaggtggcccaaccaccctat

SEQ ID NO: 65340 - DNA, 24 bp, Artificial Sequence
  Synthetic oligonucleotide; TTACGATT chr11 5368593 5368616 5368596 -
gaatatcttgtgtaacttcaagta

SEQ ID NO: 65341 - DNA, 24 bp, Artificial Sequence
  Synthetic oligonucleotide; TGATGATT chr11 5368484 5368507 5368487 -
gtctcattttcacaaaattttcaa

SEQ ID NO: 65342 - DNA, 24 bp, Artificial Sequence
  Synthetic oligonucleotide; CAATGATT chr11 5368463 5368486 5368466 -
caatgatgattatagtaataatag

SEQ ID NO: 65343 - DNA, 24 bp, Artificial Sequence
  Synthetic oligonucleotide; GTGGGATT chr11 5368278 5368301 5368281 -
gggtacgcagccaataagtggaag

SEQ ID NO: 65344 - DNA, 24 bp, Artificial Sequence
  Synthetic oligonucleotide; ACAGGATT chr11 5368178 5368201 5368181 -
ttcaagaagcctacagaacactta

SEQ ID NO: 65345 - DNA, 24 bp, Artificial Sequence
  Synthetic oligonucleotide; GTCTGATT chr11 5367966 5367989 5367969 -
ggtagaagtgaaactttgaagaat

SEQ ID NO: 65346 - DNA, 24 bp, Artificial Sequence
  Synthetic oligonucleotide; TCAAGATT chr11 5367914 5367937 5367917 -
ggataggaaaatgcatagccttgg

SEQ ID NO: 65347 - DNA, 24 bp, Artificial Sequence
  Synthetic oligonucleotide; CCAAGATT chr11 5367573 5367596 5367576 -
agaagctggctgaaacccaccaaa

SEQ ID NO: 65348 - DNA, 24 bp, Artificial Sequence
  Synthetic oligonucleotide; TATGGATT chr11 5367305 5367328 5367308 -
aattaacttgctttcacttttctg

SEQ ID NO: 65349 - DNA, 24 bp, Artificial Sequence
  Synthetic oligonucleotide; TCTGGATT chr11 5367248 5367271 5367251 -
aaatccaagaaccctctcttaggg

SEQ ID NO: 65350 - DNA, 24 bp, Artificial Sequence
  Synthetic oligonucleotide; AAATGATT chr11 5367194 5367217 5367197 -
tttaacttcaaaaatctcctttca

SEQ ID NO: 65351 - DNA, 24 bp, Artificial Sequence
  Synthetic oligonucleotide; TTGGGATT chr11 5366836 5366859 5366839 -
cctgcattgcacagagacccgtgc

SEQ ID NO: 65352 - DNA, 24 bp, Artificial Sequence
  Synthetic oligonucleotide; CCCTGATT chr11 5366752 5366775 5366755 -
aagactttgaatctcaagtgaata

SEQ ID NO: 65353 - DNA, 24 bp, Artificial Sequence
  Synthetic oligonucleotide; AAGCGATT chr11 5366528 5366551 5366531 -
ctgcaacctccgcctcccaggttc

SEQ ID NO: 65354 - DNA, 24 bp, Artificial Sequence
  Synthetic oligonucleotide; CTGGGATT chr11 5366359 5366382 5366362 -
ctcctgcctcagccacccaaagtg

SEQ ID NO: 65355 - DNA, 24 bp, Artificial Sequence
  Synthetic oligonucleotide; TTCAGATT chr11 5366279 5366302 5366282 -
gaggaaccttcccttgagctcctt

SEQ ID NO: 65356 - DNA, 24 bp, Artificial Sequence
  Synthetic oligonucleotide; TACTGATT chr11 5366223 5366246 5366226 -
tctcctttgtcttctatactttcc

SEQ ID NO: 65357 - DNA, 24 bp, Artificial Sequence
  Synthetic oligonucleotide; TGCTGATT chr11 5366054 5366077 5366057 -
tcttccattaacagcccccaaaca

SEQ ID NO: 65358 - DNA, 24 bp, Artificial Sequence
  Synthetic oligonucleotide; CCTGGATT chr11 5365778 5365801 5365781 -
acaatgtgggtaatggaggtgatg

SEQ ID NO: 65359 - DNA, 24 bp, Artificial Sequence
  Synthetic oligonucleotide; GTCAGATT chr11 5365632 5365655 5365635 -
atttggaggtgtgttaagacagta

SEQ ID NO: 65360 - DNA, 24 bp, Artificial Sequence
  Synthetic oligonucleotide; CAGCGATT chr11 5365436 5365459 5365439 -
ttttcatctaaatgcatctctcca

SEQ ID NO: 65361 - DNA, 24 bp, Artificial Sequence
  Synthetic oligonucleotide; GCATGATT chr11 5365092 5365115 5365095 -
cacttgaattcaaggttattacaa

SEQ ID NO: 65362 - DNA, 24 bp, Artificial Sequence
  Synthetic oligonucleotide; CCAAGATT chr11 5365046 5365069 5365049 -
ttttattgagtgtcccttatttgc

SEQ ID NO: 65363 - DNA, 24 bp, Artificial Sequence
  Synthetic oligonucleotide; CAATGATT chr11 5364917 5364940 5364920 -
cttgtgtatccaccatagaagcta

SEQ ID NO: 65364 - DNA, 24 bp, Artificial Sequence
  Synthetic oligonucleotide; TCAAGATT chr11 5364305 5364328 5364308 -
ccaaattccaatggttttgtgaag

SEQ ID NO: 65365 - DNA, 24 bp, Artificial Sequence
  Synthetic oligonucleotide; ATAAGATT chr11 5363655 5363678 5363658 -
agagttgttctttttctgtgtcac

SEQ ID NO: 65366 - DNA, 24 bp, Artificial Sequence
  Synthetic oligonucleotide; TTATGATT chr11 5363498 5363521 5363501 -
gagctgagtggtggtgatgtgtgt

SEQ ID NO: 65367 - DNA, 24 bp, Artificial Sequence
  Synthetic oligonucleotide; TGGTGATT chr11 5363409 5363432 5363412 -
taagggcttaaaggaacaattaat

SEQ ID NO: 65368 - DNA, 24 bp, Artificial Sequence
  Synthetic oligonucleotide; AAATGATT chr11 5363189 5363212 5363192 -
cacttgagatcctgtattgatgaa

SEQ ID NO: 65369 - DNA, 24 bp, Artificial Sequence
  Synthetic oligonucleotide; CAGGGATT chr11 5362891 5362914 5362894 -
gaaagaaaacttaatttacaaaag

SEQ ID NO: 65370 - DNA, 24 bp, Artificial Sequence
  Synthetic oligonucleotide; TTCTGATT chr11 5362493 5362516 5362496 -
aattatatctaacaatgttatcta

SEQ ID NO: 65371 - DNA, 24 bp, Artificial Sequence
  Synthetic oligonucleotide; ACCTGATT chr11 5362470 5362493 5362473 -
attctgattcatagtatccagtag

SEQ ID NO: 65372 - DNA, 24 bp, Artificial Sequence
  Synthetic oligonucleotide; AGTTGATT chr11 5362353 5362376 5362356 -
cactaaattcctgaccatcttcgt

SEQ ID NO: 65373 - DNA, 24 bp, Artificial Sequence
  Synthetic oligonucleotide; TAAGGATT chr11 5362113 5362136 5362116 -
caagctctctctgactttggttta

SEQ ID NO: 65374 - DNA, 24 bp, Artificial Sequence
  Synthetic oligonucleotide; CGTGGATT chr11 5361786 5361809 5361789 -
accagagatatcattctgtattcc

SEQ ID NO: 65375 - DNA, 24 bp, Artificial Sequence
  Synthetic oligonucleotide; ACTTGATT chr11 5361774 5361797 5361777 -
attctgtattcccgtggattttca

SEQ ID NO: 65376 - DNA, 24 bp, Artificial Sequence
  Synthetic oligonucleotide; CTAGGATT chr11 5361723 5361746 5361726 -
ctgctagggaatgaaaaaggagat

SEQ ID NO: 65377 - DNA, 24 bp, Artificial Sequence
  Synthetic oligonucleotide; AAGAGATT chr11 5361692 5361715 5361695 -
tttccctcttctaggaatttgcaa

SEQ ID NO: 65378 - DNA, 24 bp, Artificial Sequence
  Synthetic oligonucleotide; TAAAGATT chr11 5361667 5361690 5361670 -
agagattattcagaagccaagttc

SEQ ID NO: 65379 - DNA, 24 bp, Artificial Sequence
  Synthetic oligonucleotide; GATAGATT chr11 5361641 5361664 5361644 -
aagattttagggagtctttgggat

SEQ ID NO: 65380 - DNA, 24 bp, Artificial Sequence
  Synthetic oligonucleotide; GAGGGATT chr11 5361315 5361338 5361318 -
cctccttctttattctcccagcct

SEQ ID NO: 65381 - DNA, 24 bp, Artificial Sequence
  Synthetic oligonucleotide; ATAAGATT chr11 5361235 5361258 5361238 -
agggaattagccacatctccagaa

SEQ ID NO: 65382 - DNA, 24 bp, Artificial Sequence
  Synthetic oligonucleotide; AGCAGATT chr11 5361170 5361193 5361173 -
atgtagggaggatggcctttttgc

SEQ ID NO: 65383 - DNA, 24 bp, Artificial Sequence
  Synthetic oligonucleotide; GCATGATT chr11 5360670 5360693 5360673 -
acatgtgcatgtgtctttatagca

SEQ ID NO: 65384 - DNA, 24 bp, Artificial Sequence
  Synthetic oligonucleotide; TTTTGATT chr11 5360431 5360454 5360434 -
gtgtgagatggtatctcactgtgg

SEQ ID NO: 65385 - DNA, 24 bp, Artificial Sequence
  Synthetic oligonucleotide; CATAGATT chr11 5360276 5360299 5360279 -
tcttgtaaatttgtttgagttcat

SEQ ID NO: 65386 - DNA, 24 bp, Artificial Sequence
  Synthetic oligonucleotide; AGTAGATT chr11 5360243 5360266 5360246 -
tggatattagccctttgtcggatg

SEQ ID NO: 65387 - DNA, 24 bp, Artificial Sequence
  Synthetic oligonucleotide; TTAGGATT chr11 5359697 5359720 5359700 -
tgcctccagctttgttcttttggc

SEQ ID NO: 65388 - DNA, 24 bp, Artificial Sequence
  Synthetic oligonucleotide; TATTGATT chr11 5359547 5359570 5359550 -
tgggctgtatggccattttcatga

SEQ ID NO: 65389 - DNA, 24 bp, Artificial Sequence
  Synthetic oligonucleotide; GTTGGATT chr11 5359430 5359453 5359433 -
agaggtccttcacctctcttgtaa

SEQ ID NO: 65390 - DNA, 24 bp, Artificial Sequence
  Synthetic oligonucleotide; TCATGATT chr11 5359376 5359399 5359379 -
aagcaattgtgaatgggagttccc

SEQ ID NO: 65391 - DNA, 24 bp, Artificial Sequence
  Synthetic oligonucleotide; TTGTGATT chr11 5359330 5359353 5359333 -
tctgttattggtgtataagaatgc

SEQ ID NO: 65392 - DNA, 24 bp, Artificial Sequence
  Synthetic oligonucleotide; CATTGATT chr11 5359316 5359339 5359319 -
ataagaatgcttgtgatttttgca

SEQ ID NO: 65393 - DNA, 24 bp, Artificial Sequence
  Synthetic oligonucleotide; GCTGGATT chr11 5358867 5358890 5358870 -
ttttgtctttggttctgtttatat

SEQ ID NO: 65394 - DNA, 24 bp, Artificial Sequence
  Synthetic oligonucleotide; TATTGATT chr11 5358854 5358877 5358857 -
tctgtttatatgctggattacatt

SEQ ID NO: 65395 - DNA, 24 bp, Artificial Sequence
  Synthetic oligonucleotide; GCTGGATT chr11 5358771 5358794 5358774 -
ggtggataagcttttggatgtgct

SEQ ID NO: 65396 - DNA, 24 bp, Artificial Sequence
  Synthetic oligonucleotide; GGAGGATT chr11 5358630 5358653 5358633 -
tgctggcctcataaaatgagttag

SEQ ID NO: 65397 - DNA, 24 bp, Artificial Sequence
  Synthetic oligonucleotide; TATTGATT chr11 5358611 5358634 5358614 -
gttagggaggattccctcttttac

SEQ ID NO: 65398 - DNA, 24 bp, Artificial Sequence
  Synthetic oligonucleotide; CAGAGATT chr11 5358461 5358484 5358464 -
ttcagatcctgttattggtctatt

SEQ ID NO: 65399 - DNA, 24 bp, Artificial Sequence
  Synthetic oligonucleotide; TCTAGATT chr11 5358394 5358417 5358397 -
gtgtcaaggaatttatccatttct

SEQ ID NO: 65400 - DNA, 24 bp, Artificial Sequence
  Synthetic oligonucleotide; ATTTGATT chr11 5358283 5358306 5358286 -
cctttatcattttttattgcatct

SEQ ID NO: 65401 - DNA, 24 bp, Artificial Sequence
  Synthetic oligonucleotide; TCTGGATT chr11 5358203 5358226 5358206 -
gttgatctttttgaaaaaccagct

SEQ ID NO: 65402 - DNA, 24 bp, Artificial Sequence
  Synthetic oligonucleotide; CATTGATT chr11 5358195 5358218 5358198 -
ttttgaaaaaccagcttctggatt

SEQ ID NO: 65403 - DNA, 24 bp, Artificial Sequence
  Synthetic oligonucleotide; CTCTGATT chr11 5358146 5358169 5358149 -
gtgtctctatttccttcagttctg

SEQ ID NO: 65404 - DNA, 24 bp, Artificial Sequence
  Synthetic oligonucleotide; CAGAGATT chr11 5357976 5357999 5357979 -
ctacacactgctttgaatgtgtcc

SEQ ID NO: 65405 - DNA, 24 bp, Artificial Sequence
  Synthetic oligonucleotide; GTTTGATT chr11 5357816 5357839 5357819 -
tgagtttcttaatcctgagttcta

SEQ ID NO: 65406 - DNA, 24 bp, Artificial Sequence
  Synthetic oligonucleotide; TGTTGATT chr11 5357680 5357703 5357683 -
tggtgctgaaaagaatgtatattc

SEQ ID NO: 65407 - DNA, 24 bp, Artificial Sequence
  Synthetic oligonucleotide; TGAGGATT chr11 5357330 5357353 5357333 -
gtttaaagcctgttttatcagaga

SEQ ID NO: 65408 - DNA, 24 bp, Artificial Sequence
  Synthetic oligonucleotide; GCTAGATT chr11 5356588 5356611 5356591 -
tgaatttgaatgttgacctgcctt

SEQ ID NO: 65409 - DNA, 24 bp, Artificial Sequence
  Synthetic oligonucleotide; TATAGATT chr11 5356495 5356518 5356498 -
tcactttcaggtacaccaatcaga

SEQ ID NO: 65410 - DNA, 24 bp, Artificial Sequence
  Synthetic oligonucleotide; CTCTGATT chr11 5356066 5356089 5356069 -
cattcctttggaggaggagaggca

SEQ ID NO: 65411 - DNA, 24 bp, Artificial Sequence
  Synthetic oligonucleotide; AGCAGATT chr11 5355907 5355930 5355910 -
cttctaacaggaccctcagcttgc

SEQ ID NO: 65412 - DNA, 24 bp, Artificial Sequence
  Synthetic oligonucleotide; AGATGATT chr11 5355688 5355711 5355691 -
caccactgaaaacataacttttac

SEQ ID NO: 65413 - DNA, 24 bp, Artificial Sequence
  Synthetic oligonucleotide; ATGTGATT chr11 5355089 5355112 5355092 -
gtaagcttcctgctgcacttggtg

SEQ ID NO: 65414 - DNA, 24 bp, Artificial Sequence
  Synthetic oligonucleotide; CTTTGATT chr11 5354894 5354917 5354897 -
gcttcgtcaaggtctcttgaatgc

SEQ ID NO: 65415 - DNA, 24 bp, Artificial Sequence
  Synthetic oligonucleotide; GAAAGATT chr11 5354290 5354313 5354293 -
cactggacctagagggtgagtcaa

SEQ ID NO: 65416 - DNA, 24 bp, Artificial Sequence
  Synthetic oligonucleotide; ACAGGATT chr11 5354223 5354246 5354226 -
cccaaaagcccaagggaagaaaga

SEQ ID NO: 65417 - DNA, 24 bp, Artificial Sequence
  Synthetic oligonucleotide; GAGGGATT chr11 5352588 5352611 5352591 -
ggtaaaataatgttctaagtagca

SEQ ID NO: 65418 - DNA, 24 bp, Artificial Sequence
  Synthetic oligonucleotide; GACTGATT chr11 5352580 5352603 5352583 -
aatgttctaagtagcagagggatt

SEQ ID NO: 65419 - DNA, 24 bp, Artificial Sequence
  Synthetic oligonucleotide; CAGGGATT chr11 5352558 5352581 5352561 -
ttgactgatttccactgaaatgct

SEQ ID NO: 65420 - DNA, 24 bp, Artificial Sequence
  Synthetic oligonucleotide; GATTGATT chr11 5352554 5352577 5352557 -
ctgatttccactgaaatgctcagg

SEQ ID NO: 65421 - DNA, 24 bp, Artificial Sequence
  Synthetic oligonucleotide; GTAAGATT chr11 5351294 5351317 5351297 -
gatattatttagggtttactctat

SEQ ID NO: 65422 - DNA, 24 bp, Artificial Sequence
  Synthetic oligonucleotide; TAAAGATT chr11 5351012 5351035 5351015 -
taagcactattggaaaagcagata

SEQ ID NO: 65423 - DNA, 24 bp, Artificial Sequence
  Synthetic oligonucleotide; CAGAGATT chr11 5350942 5350965 5350945 -
caaatacaataaaatagtaaattt

SEQ ID NO: 65424 - DNA, 24 bp, Artificial Sequence
  Synthetic oligonucleotide; TGTGGATT chr11 5350722 5350745 5350725 -
taaattgaagaataaacagtaaaa

SEQ ID NO: 65425 - DNA, 24 bp, Artificial Sequence
  Synthetic oligonucleotide; ATGGGATT chr11 5350575 5350598 5350578 -
ttttttttaaaactatggaatctg

SEQ ID NO: 65426 - DNA, 24 bp, Artificial Sequence
  Synthetic oligonucleotide; CTAAGATT chr11 5350530 5350553 5350533 -
aaggctctgtgactcattagaatt

SEQ ID NO: 65427 - DNA, 24 bp, Artificial Sequence
  Synthetic oligonucleotide; GCACGATT chr11 5350375 5350398 5350378 -
aagagcatattgatgtaaatttat

SEQ ID NO: 65428 - DNA, 24 bp, Artificial Sequence
  Synthetic oligonucleotide; CCAAGATT chr11 5350332 5350355 5350335 -
tttctgtccatgaaaagaatgcat

SEQ ID NO: 65429 - DNA, 24 bp, Artificial Sequence
  Synthetic oligonucleotide; TTGAGATT chr11 5350239 5350262 5350242 -
tgatcttgggaaagtaatttaatc

SEQ ID NO: 65430 - DNA, 24 bp, Artificial Sequence
  Synthetic oligonucleotide; TAGTGATT chr11 5350206 5350229 5350209 -
ggttacataacctgtaaagactac

SEQ ID NO: 65431 - DNA, 24 bp, Artificial Sequence
  Synthetic oligonucleotide; TCAGGATT chr11 5350064 5350087 5350067 -
ttctctttctctagtgagtacatg

SEQ ID NO: 65432 - DNA, 24 bp, Artificial Sequence
  Synthetic oligonucleotide; AAATGATT chr11 5350037 5350060 5350040 -
ggattattcacccagaggtgtgtc

SEQ ID NO: 65433 - DNA, 24 bp, Artificial Sequence
  Synthetic oligonucleotide; AAAAGATT chr11 5349878 5349901 5349881 -
gtctgggtgggaaagggaaaggag

SEQ ID NO: 65434 - DNA, 24 bp, Artificial Sequence
  Synthetic oligonucleotide; GCAGGATT chr11 5349701 5349724 5349704 -
aggttcagacaatactcagcttat

SEQ ID NO: 65435 - DNA, 24 bp, Artificial Sequence
  Synthetic oligonucleotide; AAATGATT chr11 5349620 5349643 5349623 -
gttttattataggtattcattgtt

SEQ ID NO: 65436 - DNA, 24 bp, Artificial Sequence
  Synthetic oligonucleotide; ACTTGATT chr11 5349220 5349243 5349223 -
tcatattgaaaactgagtgctttc

SEQ ID NO: 65437 - DNA, 24 bp, Artificial Sequence
  Synthetic oligonucleotide; ACTTGATT chr11 5348835 5348858 5348838 -
tgtgatggttaatattgagtgcaa

SEQ ID NO: 65438 - DNA, 24 bp, Artificial Sequence
  Synthetic oligonucleotide; ATTGGATT chr11 5348830 5348853 5348833 -
tggttaatattgagtgcaaacttg

SEQ ID NO: 65439 - DNA, 24 bp, Artificial Sequence
  Synthetic oligonucleotide; AGGAGATT chr11 5348774 5348797 5348777 -
ggtgtgctgtaagggtgttgccaa

SEQ ID NO: 65440 - DNA, 24 bp, Artificial Sequence
  Synthetic oligonucleotide; TGATGATT chr11 5348469 5348492 5348472 -
ttttctagaaagtatttgaacctc

SEQ ID NO: 65441 - DNA, 24 bp, Artificial Sequence
  Synthetic oligonucleotide; AGTTGATT chr11 5348430 5348453 5348433 -
tatacctcctcaagaatttggaag

SEQ ID NO: 65442 - DNA, 24 bp, Artificial Sequence
  Synthetic oligonucleotide; GAGAGATT chr11 5348338 5348361 5348341 -
ctctcagggttagaatggaagcca

SEQ ID NO: 65443 - DNA, 24 bp, Artificial Sequence
  Synthetic oligonucleotide; AGGAGATT chr11 5348021 5348044 5348024 -
ggttcctgcaatgagatcttacag

SEQ ID NO: 65444 - DNA, 24 bp, Artificial Sequence
  Synthetic oligonucleotide; GAAAGATT chr11 5347929 5347952 5347932 -
tgtatctcacatctttagccgtat

SEQ ID NO: 65445 - DNA, 24 bp, Artificial Sequence
  Synthetic oligonucleotide; TCCTGATT chr11 5347841 5347864 5347844 -
tagaagctcctccccagagaccat

SEQ ID NO: 65446 - DNA, 24 bp, Artificial Sequence
  Synthetic oligonucleotide; GAAAGATT chr11 5347231 5347254 5347234 -
aggctttctcttgagataaactgg

SEQ ID NO: 65447 - DNA, 24 bp, Artificial Sequence
  Synthetic oligonucleotide; GTCTGATT chr11 5347144 5347167 5347147 -
ctgctggggctatgaagacaggct

SEQ ID NO: 65448 - DNA, 24 bp, Artificial Sequence
  Synthetic oligonucleotide; GCTTGATT chr11 5347110 5347133 5347113 -
ccacacataaaggtcctaccagtg

SEQ ID NO: 65449 - DNA, 24 bp, Artificial Sequence
  Synthetic oligonucleotide; GAAAGATT chr11 5347078 5347101 5347081 -
cagccagtaacttatttgaaaaaa

SEQ ID NO: 65450 - DNA, 24 bp, Artificial Sequence
  Synthetic oligonucleotide; CACAGATT chr11 5346700 5346723 5346703 -
atagtccacagctttggatgtgtg

SEQ ID NO: 65451 - DNA, 24 bp, Artificial Sequence
  Synthetic oligonucleotide; ATATGATT chr11 5346608 5346631 5346611 -
gaccttctgtactcagtgatgtga

SEQ ID NO: 65452 - DNA, 24 bp, Artificial Sequence
  Synthetic oligonucleotide; ATCTGATT chr11 5346480 5346503 5346483 -
tatggctgtaaatgttagaagttt

SEQ ID NO: 65453 - DNA, 24 bp, Artificial Sequence
  Synthetic oligonucleotide; GAGTGATT chr11 5346301 5346324 5346304 -
caagaattttcacaaaacaaagta

SEQ ID NO: 65454 - DNA, 24 bp, Artificial Sequence
  Synthetic oligonucleotide; TAGTGATT chr11 5346155 5346178 5346158 -
ttacagtttggttagctttccctg

SEQ ID NO: 65455 - DNA, 24 bp, Artificial Sequence
  Synthetic oligonucleotide; GAAAGATT chr11 5346087 5346110 5346090 -
tttttcacaaagttgagatacagt

SEQ ID NO: 65456 - DNA, 24 bp, Artificial Sequence
  Synthetic oligonucleotide; AGGAGATT chr11 5346072 5346095 5346075 -
agatacagtgaaagattaggttaa

SEQ ID NO: 65457 - DNA, 24 bp, Artificial Sequence
  Synthetic oligonucleotide; GCTGGATT chr11 5345989 5346012 5345992 -
agaacacagaaggggaggagctaa

SEQ ID NO: 65458 - DNA, 24 bp, Artificial Sequence
  Synthetic oligonucleotide; AAATGATT chr11 5345874 5345897 5345877 -
ctaggacagaatatggatgctgaa

SEQ ID NO: 65459 - DNA, 24 bp, Artificial Sequence
  Synthetic oligonucleotide; TCTTGATT chr11 5345577 5345600 5345580 -
aattcagctatatttactaatgac

SEQ ID NO: 65460 - DNA, 24 bp, Artificial Sequence
  Synthetic oligonucleotide; ATTTGATT chr11 5345471 5345494 5345474 -
aaacagaaatctaggggaaacctc

SEQ ID NO: 65461 - DNA, 24 bp, Artificial Sequence
  Synthetic oligonucleotide; TATGGATT chr11 5345321 5345344 5345324 -
agtcaaggtcaccatgactcttca

SEQ ID NO: 65462 - DNA, 24 bp, Artificial Sequence
  Synthetic oligonucleotide; TTGTGATT chr11 5345195 5345218 5345198 -
aatatatcaccacactattttcca

SEQ ID NO: 65463 - DNA, 24 bp, Artificial Sequence
  Synthetic oligonucleotide; ACTTGATT chr11 5345096 5345119 5345099 -
tggtggtctgtaaggccctatgac

SEQ ID NO: 65464 - DNA, 24 bp, Artificial Sequence
  Synthetic oligonucleotide; TGCTGATT chr11 5345026 5345049 5345029 -
tgttttcttatcaaatgccagtca

SEQ ID NO: 65465 - DNA, 24 bp, Artificial Sequence
  Synthetic oligonucleotide; ATAAGATT chr11 5344781 5344804 5344784 -
atttttcaacttaatttatggttt

SEQ ID NO: 65466 - DNA, 24 bp, Artificial Sequence
  Synthetic oligonucleotide; AACAGATT chr11 5344484 5344507 5344487 -
tagctctcactcagtattggggag

SEQ ID NO: 65467 - DNA, 24 bp, Artificial Sequence
  Synthetic oligonucleotide; GTCAGATT chr11 5344393 5344416 5344396 -
aatggagaacttgaaatgagagag

SEQ ID NO: 65468 - DNA, 24 bp, Artificial Sequence
  Synthetic oligonucleotide; GAAGGATT chr11 5344182 5344205 5344185 -
ttgtcacaagtagtgagtagtact

SEQ ID NO: 65469 - DNA, 24 bp, Artificial Sequence
  Synthetic oligonucleotide; TGTGGATT chr11 5343972 5343995 5343975 -
ggtaagtctttacatgcaggaaaa

SEQ ID NO: 65470 - DNA, 24 bp, Artificial Sequence
  Synthetic oligonucleotide; ATTTGATT chr11 5343753 5343776 5343756 -
atataaacagttgaaactccaaga

SEQ ID NO: 65471 - DNA, 24 bp, Artificial Sequence
  Synthetic oligonucleotide; ACTGGATT chr11 5343458 5343481 5343461 -
ttccaggcttggaggaagctcatc

SEQ ID NO: 65472 - DNA, 24 bp, Artificial Sequence
  Synthetic oligonucleotide; GGGAGATT chr11 5343263 5343286 5343266 -
tgggagtcctctggctggatcaca

SEQ ID NO: 65473 - DNA, 24 bp, Artificial Sequence
  Synthetic oligonucleotide; TGAAGATT chr11 5343107 5343130 5343110 -
ctgtacttactaatactcgagtag

SEQ ID NO: 65474 - DNA, 24 bp, Artificial Sequence
  Synthetic oligonucleotide; AGGGGATT chr11 5343081 5343104 5343084 -
aagattgggctgggagttctgatg

SEQ ID NO: 65475 - DNA, 24 bp, Artificial Sequence
  Synthetic oligonucleotide; GCTGGATT chr11 5342908 5342931 5342911 -
tgtgcttgtagtctttatatttgt

SEQ ID NO: 65476 - DNA, 24 bp, Artificial Sequence
  Synthetic oligonucleotide; ATCTGATT chr11 5342900 5342923 5342903 -
tagtctttatatttgtgctggatt

SEQ ID NO: 65477 - DNA, 24 bp, Artificial Sequence
  Synthetic oligonucleotide; CAGTGATT chr11 5342771 5342794 5342774 -
gctgtgtcctggttttttatgtca

SEQ ID NO: 65478 - DNA, 24 bp, Artificial Sequence
  Synthetic oligonucleotide; ATTGGATT chr11 5342766 5342789 5342769 -
gtcctggttttttatgtcacagtg

SEQ ID NO: 65479 - DNA, 24 bp, Artificial Sequence
  Synthetic oligonucleotide; CTCTGATT chr11 5342756 5342779 5342759 -
tttatgtcacagtgattggattgt

SEQ ID NO: 65480 - DNA, 24 bp, Artificial Sequence
  Synthetic oligonucleotide; AGCAGATT chr11 5342642 5342665 5342645 -
ctataacatatagtgtcaagacca

SEQ ID NO: 65481 - DNA, 24 bp, Artificial Sequence
  Synthetic oligonucleotide; GAATGATT chr11 5341687 5341710 5341690 -
aataggtttctgcatttttttgaa

SEQ ID NO: 65482 - DNA, 24 bp, Artificial Sequence
  Synthetic oligonucleotide; TTCTGATT chr11 5341663 5341686 5341666 -
gaatgattgctttctgtacataca

SEQ ID NO: 65483 - DNA, 24 bp, Artificial Sequence
  Synthetic oligonucleotide; ATTTGATT chr11 5341607 5341630 5341610 -
aaagaatacaacaatgtcattctc

SEQ ID NO: 65484 - DNA, 24 bp, Artificial Sequence
  Synthetic oligonucleotide; TCATGATT chr11 5340747 5340770 5340750 -
gcataacatttttaattggtatag

SEQ ID NO: 65485 - DNA, 24 bp, Artificial Sequence
  Synthetic oligonucleotide; CTCTGATT chr11 5340324 5340347 5340327 -
aataaataaaaagaatcttcaaat

SEQ ID NO: 65486 - DNA, 24 bp, Artificial Sequence
  Synthetic oligonucleotide; TTTTGATT chr11 5340268 5340291 5340271 -
caaggaggacagtttgaatctttt

SEQ ID NO: 65487 - DNA, 24 bp, Artificial Sequence
  Synthetic oligonucleotide; GAATGATT chr11 5340029 5340052 5340032 -
tggcaggaaagttgaccatttggt

SEQ ID NO: 65488 - DNA, 24 bp, Artificial Sequence
  Synthetic oligonucleotide; AAATGATT chr11 5338978 5339001 5338981 -
ttctgtagactaagccaatcttag

SEQ ID NO: 65489 - DNA, 24 bp, Artificial Sequence
  Synthetic oligonucleotide; TGCAGATT chr11 5338805 5338828 5338808 -
attgctgggttccttcaccagaga

SEQ ID NO: 65490 - DNA, 24 bp, Artificial Sequence
  Synthetic oligonucleotide; ACTAGATT chr11 5338757 5338780 5338760 -
aaggtgatatatttaaagatactt

SEQ ID NO: 65491 - DNA, 24 bp, Artificial Sequence
  Synthetic oligonucleotide; GGATGATT chr11 5338724 5338747 5338727 -
tatgagtattaaattgggcagcaa

SEQ ID NO: 65492 - DNA, 24 bp, Artificial Sequence
  Synthetic oligonucleotide; AAATGATT chr11 5338714 5338737 5338717 -
aaattgggcagcaaggatgattag

SEQ ID NO: 65493 - DNA, 24 bp, Artificial Sequence
  Synthetic oligonucleotide; TTTTGATT chr11 5338661 5338684 5338664 -
tccaattaaagaatgtaaatctgt

SEQ ID NO: 65494 - DNA, 24 bp, Artificial Sequence
  Synthetic oligonucleotide; CCTAGATT chr11 5338566 5338589 5338569 -
atgggaaatttaggagtttatgtc

SEQ ID NO: 65495 - DNA, 24 bp, Artificial Sequence
  Synthetic oligonucleotide; CAGTGATT chr11 5338528 5338551 5338531 -
acatgccaccaaactgacagatga

SEQ ID NO: 65496 - DNA, 24 bp, Artificial Sequence
  Synthetic oligonucleotide; ACAGGATT chr11 5338454 5338477 5338457 -
tggttctccagaaaaatagaatca

SEQ ID NO: 65497 - DNA, 24 bp, Artificial Sequence
  Synthetic oligonucleotide; AAGGGATT chr11 5338277 5338300 5338280 -
acctggtaaaaacaagtaatgggg

SEQ ID NO: 65498 - DNA, 24 bp, Artificial Sequence
  Synthetic oligonucleotide; CAAAGATT chr11 5338085 5338108 5338088 -
taccattccggacatagacacagg

SEQ ID NO: 65499 - DNA, 24 bp, Artificial Sequence
  Synthetic oligonucleotide; CAAAGATT chr11 5337262 5337285 5337265 -
gtggaagacagtgtggcaattcct

SEQ ID NO: 65500 - DNA, 24 bp, Artificial Sequence
  Synthetic oligonucleotide; ATGTGATT chr11 5336576 5336599 5336579 -
caacctaatataaggaaatagcag

SEQ ID NO: 65501 - DNA, 24 bp, Artificial Sequence
  Synthetic oligonucleotide; GGAGGATT chr11 5336463 5336486 5336466 -
ccaagtctgaaggcctgggaaaca

SEQ ID NO: 65502 - DNA, 24 bp, Artificial Sequence
  Synthetic oligonucleotide; TCTAGATT chr11 5336368 5336391 5336371 -
tcaatctaaaggcagaaaaaaagg

SEQ ID NO: 65503 - DNA, 24 bp, Artificial Sequence
  Synthetic oligonucleotide; CTCTGATT chr11 5336327 5336350 5336330 -
aggccatcaataaggaataattct

SEQ ID NO: 65504 - DNA, 24 bp, Artificial Sequence
  Synthetic oligonucleotide; AACTGATT chr11 5336281 5336304 5336284 -
actttttgttctattcaggttttc

SEQ ID NO: 65505 - DNA, 24 bp, Artificial Sequence
  Synthetic oligonucleotide; TACCGATT chr11 5336227 5336250 5336230 -
aaggaccatctgctctacttggtc

SEQ ID NO: 65506 - DNA, 24 bp, Artificial Sequence
  Synthetic oligonucleotide; ATGTGATT chr11 5335715 5335738 5335718 -
agatattctaataaatattgtgtt

SEQ ID NO: 65507 - DNA, 24 bp, Artificial Sequence
  Synthetic oligonucleotide; CTGAGATT chr11 5335615 5335638 5335618 -
caggagatggaggtccttcccaat

SEQ ID NO: 65508 - DNA, 24 bp, Artificial Sequence
  Synthetic oligonucleotide; ATGAGATT chr11 5335362 5335385 5335365 -
cctccaccaacagtgtcacttcac

SEQ ID NO: 65509 - DNA, 24 bp, Artificial Sequence
  Synthetic oligonucleotide; AGAAGATT chr11 5335262 5335285 5335265 -
ggaatagagtcatatttatggggc

SEQ ID NO: 65510 - DNA, 24 bp, Artificial Sequence
  Synthetic oligonucleotide; TCATGATT chr11 5335043 5335066 5335046 -
ccatttccagagactgacttttaa

SEQ ID NO: 65511 - DNA, 24 bp, Artificial Sequence
  Synthetic oligonucleotide; TTAGGATT chr11 5334866 5334889 5334869 -
gttgggctaagttccaggataaat

SEQ ID NO: 65512 - DNA, 24 bp, Artificial Sequence
  Synthetic oligonucleotide; AGATGATT chr11 5334803 5334826 5334806 -
tccttatttctctgacagactatg

SEQ ID NO: 65513 - DNA, 24 bp, Artificial Sequence
  Synthetic oligonucleotide; CAGGGATT chr11 5334766 5334789 5334769 -
caagtacaaattgtcagacaaagc

SEQ ID NO: 65514 - DNA, 24 bp, Artificial Sequence
  Synthetic oligonucleotide; ACTTGATT chr11 5334693 5334716 5334696 -
ggacacttaaataaaattttttaa

SEQ ID NO: 65515 - DNA, 24 bp, Artificial Sequence
  Synthetic oligonucleotide; CTCTGATT chr11 5334663 5334686 5334666 -
tttatattgctccagaagcagtaa

SEQ ID NO: 65516 - DNA, 24 bp, Artificial Sequence
  Synthetic oligonucleotide; AAAAGATT chr11 5334546 5334569 5334549 -
caaacaatcttatttgaaaccaag

SEQ ID NO: 65517 - DNA, 24 bp, Artificial Sequence
  Synthetic oligonucleotide; GAGGGATT chr11 5334532 5334555 5334535 -
tgaaaccaagaaaagattaagtgt

SEQ ID NO: 65518 - DNA, 24 bp, Artificial Sequence
  Synthetic oligonucleotide; CTTGGATT chr11 5334049 5334072 5334052 -
gagaggaaaataaagactaatctt

SEQ ID NO: 65519 - DNA, 24 bp, Artificial Sequence
  Synthetic oligonucleotide; TACAGATT chr11 5333979 5334002 5333982 -
gaaaagaggcaagatatctgtatc

SEQ ID NO: 65520 - DNA, 24 bp, Artificial Sequence
  Synthetic oligonucleotide; TTCAGATT chr11 5332642 5332665 5332645 -
gggaagaattcgcttccacgttca

SEQ ID NO: 65521 - DNA, 24 bp, Artificial Sequence
  Synthetic oligonucleotide; CTGGGATT chr11 5332335 5332358 5332338 -
cgcccgccttggcctcccaaagtg

SEQ ID NO: 65522 - DNA, 24 bp, Artificial Sequence
  Synthetic oligonucleotide; ACTCGATT chr11 5331632 5331655 5331635 -
tcagaattttctgtaagtgtaaac

SEQ ID NO: 65523 - DNA, 24 bp, Artificial Sequence
  Synthetic oligonucleotide; ATATGATT chr11 5331581 5331604 5331584 -
aaaaaatcgtgggaactatctcat

SEQ ID NO: 65524 - DNA, 24 bp, Artificial Sequence
  Synthetic oligonucleotide; TGCTGATT chr11 5331569 5331592 5331572 -
gaactatctcatatatgattttta

SEQ ID NO: 65525 - DNA, 24 bp, Artificial Sequence
  Synthetic oligonucleotide; GAGAGATT chr11 5331307 5331330 5331310 -
ctcctcactggctttccaggtctg

SEQ ID NO: 65526 - DNA, 24 bp, Artificial Sequence
  Synthetic oligonucleotide; AGGGGATT chr11 5330917 5330940 5330920 -
aagatagatctgggggttcaaatg

SEQ ID NO: 65527 - DNA, 24 bp, Artificial Sequence
  Synthetic oligonucleotide; TCTGGATT chr11 5330875 5330898 5330878 -
attgtgcccataatcatcaccctc

SEQ ID NO: 65528 - DNA, 24 bp, Artificial Sequence
  Synthetic oligonucleotide; ACTTGATT chr11 5330606 5330629 5330609 -
agctgtgttctggtttttaatgtc

SEQ ID NO: 65529 - DNA, 24 bp, Artificial Sequence
  Synthetic oligonucleotide; TGGCGATT chr11 5330346 5330369 5330349 -
gttcaaccattgtggaagtcagtg

SEQ ID NO: 65530 - DNA, 24 bp, Artificial Sequence
  Synthetic oligonucleotide; AACGGATT chr11 5330275 5330298 5330278 -
catcccattactgggtatataccc

SEQ ID NO: 65531 - DNA, 24 bp, Artificial Sequence
  Synthetic oligonucleotide; TTTGGATT chr11 5329759 5329782 5329762 -
ataataataataaaaatacattat

SEQ ID NO: 65532 - DNA, 24 bp, Artificial Sequence
  Synthetic oligonucleotide; CACAGATT chr11 5329731 5329754 5329734 -
gattaacaaaaaccaacaggctac

SEQ ID NO: 65533 - DNA, 24 bp, Artificial Sequence
  Synthetic oligonucleotide; TCTTGATT chr11 5329669 5329692 5329672 -
gttattctggctctgctagaattc

SEQ ID NO: 65534 - DNA, 24 bp, Artificial Sequence
  Synthetic oligonucleotide; CTGAGATT chr11 5329068 5329091 5329071 -
ctgggaggtggagtttgcagtgag

SEQ ID NO: 65535 - DNA, 24 bp, Artificial Sequence
  Synthetic oligonucleotide; AGGTGATT chr11 5328584 5328607 5328587 -
tgctagaaagatgaaactcagggg

SEQ ID NO: 65536 - DNA, 24 bp, Artificial Sequence
  Synthetic oligonucleotide; GAATGATT chr11 5328434 5328457 5328437 -
gtgagtgccaggaacttgaatatg

SEQ ID NO: 65537 - DNA, 24 bp, Artificial Sequence
  Synthetic oligonucleotide; CACAGATT chr11 5328322 5328345 5328325 -
cagctgaggtgggatatcctacag

SEQ ID NO: 65538 - DNA, 24 bp, Artificial Sequence
  Synthetic oligonucleotide; GATAGATT chr11 5328276 5328299 5328279 -
ttgaaagagtatttaaggaactgt

SEQ ID NO: 65539 - DNA, 24 bp, Artificial Sequence
  Synthetic oligonucleotide; CTTGGATT chr11 5328247 5328270 5328250 -
atttaggttttctaatctgggacc

SEQ ID NO: 65540 - DNA, 24 bp, Artificial Sequence
  Synthetic oligonucleotide; TGTAGATT chr11 5327927 5327950 5327930 -
tttactggtgcttttgtcatttta

SEQ ID NO: 65541 - DNA, 24 bp, Artificial Sequence
  Synthetic oligonucleotide; AGAGGATT chr11 5327807 5327830 5327810 -
tttttattgataactttcctgttc

SEQ ID NO: 65542 - DNA, 24 bp, Artificial Sequence
  Synthetic oligonucleotide; ATTGGATT chr11 5327702 5327725 5327705 -
ccaaattaagatctaagaaagcaa

SEQ ID NO: 65543 - DNA, 24 bp, Artificial Sequence
  Synthetic oligonucleotide; TGAAGATT chr11 5327540 5327563 5327543 -
ggccaaatggaggactcacttttt

SEQ ID NO: 65544 - DNA, 24 bp, Artificial Sequence
  Synthetic oligonucleotide; AATAGATT chr11 5327154 5327177 5327157 -
ttcacttgtttatgtagactgtat

SEQ ID NO: 65545 - DNA, 24 bp, Artificial Sequence
  Synthetic oligonucleotide; CTATGATT chr11 5326859 5326882 5326862 -
gctagaatgaagcagggcttagat

SEQ ID NO: 65546 - DNA, 24 bp, Artificial Sequence
  Synthetic oligonucleotide; ACATGATT chr11 5326163 5326186 5326166 -
ttctttttattcccaaaatctcag

SEQ ID NO: 65547 - DNA, 24 bp, Artificial Sequence
  Synthetic oligonucleotide; CCCAGATT chr11 5325891 5325914 5325894 -
ttacacaattttttttaaaggaat

SEQ ID NO: 65548 - DNA, 24 bp, Artificial Sequence
  Synthetic oligonucleotide; ATGTGATT chr11 5325617 5325640 5325620 -
aattcagtcttctatatgaattca

SEQ ID NO: 65549 - DNA, 24 bp, Artificial Sequence
  Synthetic oligonucleotide; TAGGGATT chr11 5325603 5325626 5325606 -
tatgaattcaatgtgatttaattt

SEQ ID NO: 65550 - DNA, 24 bp, Artificial Sequence
  Synthetic oligonucleotide; TGGTGATT chr11 5325586 5325609 5325589 -
ttaattttagggattccctagtgt

SEQ ID NO: 65551 - DNA, 24 bp, Artificial Sequence
  Synthetic oligonucleotide; TTGTGATT chr11 5325492 5325515 5325495 -
tttccttatacaatatgaaatgct

SEQ ID NO: 65552 - DNA, 24 bp, Artificial Sequence
  Synthetic oligonucleotide; TTCTGATT chr11 5325482 5325505 5325485 -
caatatgaaatgctttgtgatttc

SEQ ID NO: 65553 - DNA, 24 bp, Artificial Sequence
  Synthetic oligonucleotide; TTCTGATT chr11 5325476 5325499 5325479 -
gaaatgctttgtgatttcttctga

SEQ ID NO: 65554 - DNA, 24 bp, Artificial Sequence
  Synthetic oligonucleotide; CCAGGATT chr11 5325410 5325433 5325413 -
ctgctaggtgctaaagacttgcct

SEQ ID NO: 65555 - DNA, 24 bp, Artificial Sequence
  Synthetic oligonucleotide; GATGGATT chr11 5325016 5325039 5325019 -
cattaaaaggtttctatctcgaaa

SEQ ID NO: 65556 - DNA, 24 bp, Artificial Sequence
  Synthetic oligonucleotide; ATTTGATT chr11 5324932 5324955 5324935 -
cacctgaggacctgaaaaaagcga

SEQ ID NO: 65557 - DNA, 24 bp, Artificial Sequence
  Synthetic oligonucleotide; GCCAGATT chr11 5324622 5324645 5324625 -
taatcacagcaagaagacaactaa

SEQ ID NO: 65558 - DNA, 24 bp, Artificial Sequence
  Synthetic oligonucleotide; GGAAGATT chr11 5324361 5324384 5324364 -
acaccagttaatcatctccaagca

SEQ ID NO: 65559 - DNA, 24 bp, Artificial Sequence
  Synthetic oligonucleotide; GGGAGATT chr11 5324036 5324059 5324039 -
tgggcatcctatgggtgaatcaca

SEQ ID NO: 65560 - DNA, 24 bp, Artificial Sequence
  Synthetic oligonucleotide; ATATGATT chr11 5323948 5323971 5323951 -
atcaggttccctcctggcaatggc

SEQ ID NO: 65561 - DNA, 24 bp, Artificial Sequence
  Synthetic oligonucleotide; TACAGATT chr11 5323521 5323544 5323524 -
acagtgatgggtttgacattcatt

SEQ ID NO: 65562 - DNA, 24 bp, Artificial Sequence
  Synthetic oligonucleotide; CCATGATT chr11 5322817 5322840 5322820 -
cctgagttagggtactctctaggg

SEQ ID NO: 65563 - DNA, 24 bp, Artificial Sequence
  Synthetic oligonucleotide; TCTGGATT chr11 5322718 5322741 5322721 -
tttcaatacattccttgcaggatg

SEQ ID NO: 65564 - DNA, 24 bp, Artificial Sequence
  Synthetic oligonucleotide; AGATGATT chr11 5322569 5322592 5322572 -
tttttaagagtatgtttgctcttc

SEQ ID NO: 65565 - DNA, 24 bp, Artificial Sequence
  Synthetic oligonucleotide; TGGTGATT chr11 5322410 5322433 5322413 -
atgttcagagggaaaaattagaaa

SEQ ID NO: 65566 - DNA, 24 bp, Artificial Sequence
  Synthetic oligonucleotide; AATGGATT chr11 5322329 5322352 5322332 -
aggaagaccaacaatgttgagaga

SEQ ID NO: 65567 - DNA, 24 bp, Artificial Sequence
  Synthetic oligonucleotide; GACTGATT chr11 5322248 5322271 5322251 -
actgtgtactaaaagcttctttta

SEQ ID NO: 65568 - DNA, 24 bp, Artificial Sequence
  Synthetic oligonucleotide; ACAGGATT chr11 5322230 5322253 5322233 -
cttttagactgatttaattgtgaa

SEQ ID NO: 65569 - DNA, 24 bp, Artificial Sequence
  Synthetic oligonucleotide; TCTTGATT chr11 5322031 5322054 5322034 -
aaatctcatttcggataattccca

SEQ ID NO: 65570 - DNA, 24 bp, Artificial Sequence
  Synthetic oligonucleotide; AATTGATT chr11 5321498 5321521 5321501 -
gttgtttaaagaaaatatttttca

SEQ ID NO: 65571 - DNA, 24 bp, Artificial Sequence
  Synthetic oligonucleotide; ACCTGATT chr11 5321224 5321247 5321227 -
tcagccttcccactttaccacatg

SEQ ID NO: 65572 - DNA, 24 bp, Artificial Sequence
  Synthetic oligonucleotide; AACTGATT chr11 5321084 5321107 5321087 -
cctttgtgcaaagcacttcattga

SEQ ID NO: 65573 - DNA, 24 bp, Artificial Sequence
  Synthetic oligonucleotide; TGTTGATT chr11 5321006 5321029 5321009 -
tacaatgaccaatcaataaataac

SEQ ID NO: 65574 - DNA, 24 bp, Artificial Sequence
  Synthetic oligonucleotide; ACTTGATT chr11 5320677 5320700 5320680 -
ccatagtaactttaaacaataact

SEQ ID NO: 65575 - DNA, 24 bp, Artificial Sequence
  Synthetic oligonucleotide; ACATGATT chr11 5320607 5320630 5320610 -
cttatggtaatgtcaaaatgtttt

SEQ ID NO: 65576 - DNA, 24 bp, Artificial Sequence
  Synthetic oligonucleotide; TACAGATT chr11 5320565 5320588 5320568 -
attgtgatcagaacctgctactac

SEQ ID NO: 65577 - DNA, 24 bp, Artificial Sequence
  Synthetic oligonucleotide; CAATGATT chr11 5320368 5320391 5320371 -
gtgtttgttcttttcacctgtacg

SEQ ID NO: 65578 - DNA, 24 bp, Artificial Sequence
  Synthetic oligonucleotide; ATGGGATT chr11 5320101 5320124 5320104 -
tcattttctttgtggctgttctta

SEQ ID NO: 65579 - DNA, 24 bp, Artificial Sequence
  Synthetic oligonucleotide; TCTCGATT chr11 5320089 5320112 5320092 -
tggctgttcttaatgggattgtgt

SEQ ID NO: 65580 - DNA, 24 bp, Artificial Sequence
  Synthetic oligonucleotide; TACTGATT chr11 5320043 5320066 5320046 -
ggccttattggtgtatggaaatgc

SEQ ID NO: 65581 - DNA, 24 bp, Artificial Sequence
  Synthetic oligonucleotide; ATGTGATT chr11 5320030 5320053 5320033 -
tatggaaatgctactgatttttgt

SEQ ID NO: 65582 - DNA, 24 bp, Artificial Sequence
  Synthetic oligonucleotide; GTAGGATT chr11 5319962 5319985 5319965 -
tctagcagccttttggaagaatct

SEQ ID NO: 65583 - DNA, 24 bp, Artificial Sequence
  Synthetic oligonucleotide; GCCTGATT chr11 5319871 5319894 5319874 -
tgatgccatttctttctttctctc

SEQ ID NO: 65584 - DNA, 24 bp, Artificial Sequence
  Synthetic oligonucleotide; CATGGATT chr11 5319511 5319534 5319514 -
aaataaataaaagctttccaggct

SEQ ID NO: 65585 - DNA, 24 bp, Artificial Sequence
  Synthetic oligonucleotide; AATGGATT chr11 5318521 5318544 5318524 -
aacccaaatgtccaacaatgatag

SEQ ID NO: 65586 - DNA, 24 bp, Artificial Sequence
  Synthetic oligonucleotide; AACAGATT chr11 5317799 5317822 5317802 -
atagctatttttaaaaagccaaaa

SEQ ID NO: 65587 - DNA, 24 bp, Artificial Sequence
  Synthetic oligonucleotide; CAGTGATT chr11 5317115 5317138 5317118 -
atcctgaacctggtatgaaatggg

SEQ ID NO: 65588 - DNA, 24 bp, Artificial Sequence
  Synthetic oligonucleotide; AACTGATT chr11 5317016 5317039 5317019 -
tccattgaggttcctgtggatcag

SEQ ID NO: 65589 - DNA, 24 bp, Artificial Sequence
  Synthetic oligonucleotide; AAGTGATT chr11 5316646 5316669 5316649 -
atttggaaagaggaaactctgggg

SEQ ID NO: 65590 - DNA, 24 bp, Artificial Sequence
  Synthetic oligonucleotide; GAATGATT chr11 5316493 5316516 5316496 -
gtgagtgccaggaacaggaataag

SEQ ID NO: 65591 - DNA, 24 bp, Artificial Sequence
  Synthetic oligonucleotide; GGAAGATT chr11 5316446 5316469 5316449 -
gttagatgcagcgaagagaagata

SEQ ID NO: 65592 - DNA, 24 bp, Artificial Sequence
  Synthetic oligonucleotide; CATGGATT chr11 5316323 5316346 5316326 -
gcttgaagtttcaaatgtggtgct

SEQ ID NO: 65593 - DNA, 24 bp, Artificial Sequence
  Synthetic oligonucleotide; TCATGATT chr11 5316147 5316170 5316150 -
ttctaacaaaacactatgtctata

SEQ ID NO: 65594 - DNA, 24 bp, Artificial Sequence
  Synthetic oligonucleotide; TTTAGATT chr11 5315954 5315977 5315957 -
tgatgcattttttaaaatgtgttt

SEQ ID NO: 65595 - DNA, 24 bp, Artificial Sequence
  Synthetic oligonucleotide; TTAGGATT chr11 5315799 5315822 5315802 -
ataaattattgctaaatatgaata

SEQ ID NO: 65596 - DNA, 24 bp, Artificial Sequence
  Synthetic oligonucleotide; CAGGGATT chr11 5315742 5315765 5315745 -
agaaggtagtaaaaactgataagg

SEQ ID NO: 65597 - DNA, 24 bp, Artificial Sequence
  Synthetic oligonucleotide; CTTTGATT chr11 5315104 5315127 5315107 -
acttatacccagctattctggttg

SEQ ID NO: 65598 - DNA, 24 bp, Artificial Sequence
  Synthetic oligonucleotide; TCATGATT chr11 5314746 5314769 5314749 -
ccttttttcagaattttgtgatct

SEQ ID NO: 65599 - DNA, 24 bp, Artificial Sequence
  Synthetic oligonucleotide; GGTAGATT chr11 5314227 5314250 5314230 -
aatctcaaaactactctatttcag

SEQ ID NO: 65600 - DNA, 24 bp, Artificial Sequence
  Synthetic oligonucleotide; AATAGATT chr11 5314195 5314218 5314198 -
ttccttttttttttttttttttaa

SEQ ID NO: 65601 - DNA, 24 bp, Artificial Sequence
  Synthetic oligonucleotide; GGTTGATT chr11 5313734 5313757 5313737 -
cactctatcattgatggacatttg

SEQ ID NO: 65602 - DNA, 24 bp, Artificial Sequence
  Synthetic oligonucleotide; AATAGATT chr11 5313667 5313690 5313670 -
acataagcatgcctgtatttttat

SEQ ID NO: 65603 - DNA, 24 bp, Artificial Sequence
  Synthetic oligonucleotide; GATTGATT chr11 5313663 5313686 5313666 -
aagcatgcctgtatttttataata

SEQ ID NO: 65604 - DNA, 24 bp, Artificial Sequence
  Synthetic oligonucleotide; ATGAGATT chr11 5313628 5313651 5313631 -
attcctttgggtatatacccagta

SEQ ID NO: 65605 - DNA, 24 bp, Artificial Sequence
  Synthetic oligonucleotide; TTTTGATT chr11 5313419 5313442 5313422 -
gtgtgagatggtatcccattgtgg

SEQ ID NO: 65606 - DNA, 24 bp, Artificial Sequence
  Synthetic oligonucleotide; CTAGGATT chr11 5312826 5312849 5312829 -
tgttgcagcaacttggaaatctca

SEQ ID NO: 65607 - DNA, 24 bp, Artificial Sequence
  Synthetic oligonucleotide; AATTGATT chr11 5312780 5312803 5312783 -
ttttgctaattttcatccttttat

SEQ ID NO: 65608 - DNA, 24 bp, Artificial Sequence
  Synthetic oligonucleotide; CTGTGATT chr11 5312301 5312324 5312304 -
agaaatccaaatttaaaacaagtg

SEQ ID NO: 65609 - DNA, 24 bp, Artificial Sequence
  Synthetic oligonucleotide; GTAAGATT chr11 5312215 5312238 5312218 -
ttgaggttatggcttgaaataagg

SEQ ID NO: 65610 - DNA, 24 bp, Artificial Sequence
  Synthetic oligonucleotide; AATGGATT chr11 5312173 5312196 5312176 -
gtgtcccttcagctgagacctgaa

SEQ ID NO: 65611 - DNA, 24 bp, Artificial Sequence
  Synthetic oligonucleotide; CACTGATT chr11 5311662 5311685 5311665 -
aggcagtgccaaaagaaaggcagt

SEQ ID NO: 65612 - DNA, 24 bp, Artificial Sequence
  Synthetic oligonucleotide; ATGTGATT chr11 5311576 5311599 5311579 -
tgagaatgagtcaaaataataaac

SEQ ID NO: 65613 - DNA, 24 bp, Artificial Sequence
  Synthetic oligonucleotide; GATGGATT chr11 5311142 5311165 5311145 -
atctgatacaaacataaataggaa

SEQ ID NO: 65614 - DNA, 24 bp, Artificial Sequence
  Synthetic oligonucleotide; CCTAGATT chr11 5311050 5311073 5311053 -
ttcatgagtgcttatgttagttac

SEQ ID NO: 65615 - DNA, 24 bp, Artificial Sequence
  Synthetic oligonucleotide; GCTTGATT chr11 5310971 5310994 5310974 -
catatggaactgaaaataatctat

SEQ ID NO: 65616 - DNA, 24 bp, Artificial Sequence
  Synthetic oligonucleotide; TATTGATT chr11 5310571 5310594 5310574 -
gtattacaccaaataaaaactcta

SEQ ID NO: 65617 - DNA, 24 bp, Artificial Sequence
  Synthetic oligonucleotide; CCCAGATT chr11 5310244 5310267 5310247 -
tattgatgtcttcccttcaatatg

SEQ ID NO: 65618 - DNA, 24 bp, Artificial Sequence
  Synthetic oligonucleotide; AAATGATT chr11 5310056 5310079 5310059 -
cctgggttcagttttcagttaaag

SEQ ID NO: 65619 - DNA, 24 bp, Artificial Sequence
  Synthetic oligonucleotide; TAGAGATT chr11 5310027 5310050 5310030 -
atttaacaaattttttcactcaac

SEQ ID NO: 65620 - DNA, 24 bp, Artificial Sequence
  Synthetic oligonucleotide; TGGTGATT chr11 5309915 5309938 5309918 -
attttcacggagaaagataagaac

SEQ ID NO: 65621 - DNA, 24 bp, Artificial Sequence
  Synthetic oligonucleotide; CTGGGATT chr11 5309589 5309612 5309592 -
cacccgcctcggcctcccaaagtg

SEQ ID NO: 65622 - DNA, 24 bp, Artificial Sequence
  Synthetic oligonucleotide; AACCGATT chr11 5309413 5309436 5309416 -
tttttcatactgaatcaattgtaa

SEQ ID NO: 65623 - DNA, 24 bp, Artificial Sequence
  Synthetic oligonucleotide; TCTTGATT chr11 5309212 5309235 5309215 -
aaatttcaaccccgatcatttcca

SEQ ID NO: 65624 - DNA, 24 bp, Artificial Sequence
  Synthetic oligonucleotide; GGAAGATT chr11 5308875 5308898 5308878 -
ctgcaatttacgtccaagaagaaa

SEQ ID NO: 65625 - DNA, 24 bp, Artificial Sequence
  Synthetic oligonucleotide; TGTGGATT chr11 5308816 5308839 5308819 -
cactgaacggttatctgggcctgt

SEQ ID NO: 65626 - DNA, 24 bp, Artificial Sequence
  Synthetic oligonucleotide; AAGAGATT chr11 5308718 5308741 5308721 -
cagggctgtttccatgatggagga

SEQ ID NO: 65627 - DNA, 24 bp, Artificial Sequence
  Synthetic oligonucleotide; TGTAGATT chr11 5308703 5308726 5308706 -
gatggaggaaagagattggaggaa

SEQ ID NO: 65628 - DNA, 24 bp, Artificial Sequence
  Synthetic oligonucleotide; ATTAGATT chr11 5308434 5308457 5308437 -
agttgtttcatcttctacaacctc

SEQ ID NO: 65629 - DNA, 24 bp, Artificial Sequence
  Synthetic oligonucleotide; CAGTGATT chr11 5308290 5308313 5308293 -
cttgcatagatgtgagatggtaca

SEQ ID NO: 65630 - DNA, 24 bp, Artificial Sequence
  Synthetic oligonucleotide; TATGGATT chr11 5307597 5307620 5307600 -
aaaaatctttcttcttgatgttgt

SEQ ID NO: 65631 - DNA, 24 bp, Artificial Sequence
  Synthetic oligonucleotide; CCATGATT chr11 5307579 5307602 5307582 -
tgttgttatggatttttctctgaa

SEQ ID NO: 65632 - DNA, 24 bp, Artificial Sequence
  Synthetic oligonucleotide; AAGAGATT chr11 5306922 5306945 5306925 -
actcagcacataatccaatgaaaa

SEQ ID NO: 65633 - DNA, 24 bp, Artificial Sequence
  Synthetic oligonucleotide; TCTGGATT chr11 5306889 5306912 5306892 -
cagaatgggactaatatgacaaca

SEQ ID NO: 65634 - DNA, 24 bp, Artificial Sequence
  Synthetic oligonucleotide; TCAGGATT chr11 5306844 5306867 5306847 -
aggtggagcatcataggaaataaa

SEQ ID NO: 65635 - DNA, 24 bp, Artificial Sequence
  Synthetic oligonucleotide; CAAGGATT chr11 5306393 5306416 5306396 -
agacgaaaaggtttggtggtggct

SEQ ID NO: 65636 - DNA, 24 bp, Artificial Sequence
  Synthetic oligonucleotide; CAAGGATT chr11 5305935 5305958 5305938 -
aactgtggctcaggtaagaaaagc

SEQ ID NO: 65637 - DNA, 24 bp, Artificial Sequence
  Synthetic oligonucleotide; AACAGATT chr11 5305683 5305706 5305686 -
cttttcttttctctctctctcttt

SEQ ID NO: 65638 - DNA, 24 bp, Artificial Sequence
  Synthetic oligonucleotide; AGGGGATT chr11 5305605 5305628 5305608 -
ctgcgacctcctccaccagggttc

SEQ ID NO: 65639 - DNA, 24 bp, Artificial Sequence
  Synthetic oligonucleotide; CTGGGATT chr11 5305573 5305596 5305576 -
ctcatgcctcagcctccagagtag

SEQ ID NO: 65640 - DNA, 24 bp, Artificial Sequence
  Synthetic oligonucleotide; CTGGGATT chr11 5305438 5305461 5305441 -
caccctcctcggcctcccaaagtg

SEQ ID NO: 65641 - DNA, 24 bp, Artificial Sequence
  Synthetic oligonucleotide; CTGGGATT chr11 5304943 5304966 5304946 -
ctcctgcctcagcctcccgagtag

SEQ ID NO: 65642 - DNA, 24 bp, Artificial Sequence
  Synthetic oligonucleotide; CTAGGATT chr11 5304814 5304837 5304817 -
gatccacctcagccttccaaagtg

SEQ ID NO: 65643 - DNA, 24 bp, Artificial Sequence
  Synthetic oligonucleotide; CTGAGATT chr11 5304725 5304748 5304728 -
agatataaaaaagtcacttaaaag

SEQ ID NO: 65644 - DNA, 24 bp, Artificial Sequence
  Synthetic oligonucleotide; AGTGGATT chr11 5304593 5304616 5304596 -
tggggcaatatgtggagatgaaaa

SEQ ID NO: 65645 - DNA, 24 bp, Artificial Sequence
  Synthetic oligonucleotide; CACTGATT chr11 5304578 5304601 5304581 -
agatgaaaaagtggattcagggga

SEQ ID NO: 65646 - DNA, 24 bp, Artificial Sequence
  Synthetic oligonucleotide; TGCAGATT chr11 5304558 5304581 5304561 -
gggacactgattgtacagggcact

SEQ ID NO: 65647 - DNA, 24 bp, Artificial Sequence
  Synthetic oligonucleotide; CAAAGATT chr11 5303449 5303472 5303452 -
ggtttttataaaataaaaaaggtg

SEQ ID NO: 65648 - DNA, 24 bp, Artificial Sequence
  Synthetic oligonucleotide; TACAGATT chr11 5303141 5303164 5303144 -
gtgaatttttctcaatacgagtct

SEQ ID NO: 65649 - DNA, 24 bp, Artificial Sequence
  Synthetic oligonucleotide; TAATGATT chr11 5303131 5303154 5303134 -
ctcaatacgagtcttacagattca

SEQ ID NO: 65650 - DNA, 24 bp, Artificial Sequence
  Synthetic oligonucleotide; GTAAGATT chr11 5303114 5303137 5303117 -
agattcataatgattagagggtct

SEQ ID NO: 65651 - DNA, 24 bp, Artificial Sequence
  Synthetic oligonucleotide; TTCAGATT chr11 5302737 5302760 5302740 -
taactttacccacttgttcaggtg

SEQ ID NO: 65652 - DNA, 24 bp, Artificial Sequence
  Synthetic oligonucleotide; CCATGATT chr11 5302160 5302183 5302163 -
agtgaattggaattattattctga

SEQ ID NO: 65653 - DNA, 24 bp, Artificial Sequence
  Synthetic oligonucleotide; AGAAGATT chr11 5302031 5302054 5302034 -
aaaatggcctgatgatgtgctaca

SEQ ID NO: 65654 - DNA, 24 bp, Artificial Sequence
  Synthetic oligonucleotide; GGGAGATT chr11 5301685 5301708 5301688 -
tgggtgtcctgctgctagaccaga

SEQ ID NO: 65655 - DNA, 24 bp, Artificial Sequence
  Synthetic oligonucleotide; AGCAGATT chr11 5301067 5301090 5301070 -
ctatcatttatagcatcaagacca

SEQ ID NO: 65656 - DNA, 24 bp, Artificial Sequence
  Synthetic oligonucleotide; CTAGGATT chr11 5300988 5301011 5300991 -
ccttatttcagaatctcaagatct

SEQ ID NO: 65657 - DNA, 24 bp, Artificial Sequence
  Synthetic oligonucleotide; GTTAGATT chr11 5300916 5300939 5300919 -
tatccacacttttttttcctcaga

SEQ ID NO: 65658 - DNA, 24 bp, Artificial Sequence
  Synthetic oligonucleotide; CTATGATT chr11 5300730 5300753 5300733 -
tataacaatccaaaagaagagtaa

SEQ ID NO: 65659 - DNA, 24 bp, Artificial Sequence
  Synthetic oligonucleotide; GCTTGATT chr11 5300549 5300572 5300552 -
actagttactctgaaaaggatctt

SEQ ID NO: 65660 - DNA, 24 bp, Artificial Sequence
  Synthetic oligonucleotide; TTCTGATT chr11 5299842 5299865 5299845 -
tgagcttgcttctaatattttctt

SEQ ID NO: 65661 - DNA, 24 bp, Artificial Sequence
  Synthetic oligonucleotide; CAGAGATT chr11 5299717 5299740 5299720 -
acagtgagcactctgaaaatattc

SEQ ID NO: 65662 - DNA, 24 bp, Artificial Sequence
  Synthetic oligonucleotide; GAAGGATT chr11 5299600 5299623 5299603 -
aaaaactaataaatgactactcct

SEQ ID NO: 65663 - DNA, 24 bp, Artificial Sequence
  Synthetic oligonucleotide; AGGGGATT chr11 5299258 5299281 5299261 -
aaaatggcaaatgtatttgtcagt

SEQ ID NO: 65664 - DNA, 24 bp, Artificial Sequence
  Synthetic oligonucleotide; TCTTGATT chr11 5299238 5299261 5299241 -
cagtaggggattgcgatgctgttt

SEQ ID NO: 65665 - DNA, 24 bp, Artificial Sequence
  Synthetic oligonucleotide; TACTGATT chr11 5297865 5297888 5297868 -
gcttcttattcattcctcttgctg

SEQ ID NO: 65666 - DNA, 24 bp, Artificial Sequence
  Synthetic oligonucleotide; AACTGATT chr11 5297520 5297543 5297523 -
cttaagaggttcacatttttatct

SEQ ID NO: 65667 - DNA, 24 bp, Artificial Sequence
  Synthetic oligonucleotide; AGCTGATT chr11 5297388 5297411 5297391 -
caaaaccacacaatgtagaaccta

SEQ ID NO: 65668 - DNA, 24 bp, Artificial Sequence
  Synthetic oligonucleotide; GAGGGATT chr11 5297343 5297366 5297346 -
acaatatgtggtataaatgagaca

SEQ ID NO: 65669 - DNA, 24 bp, Artificial Sequence
  Synthetic oligonucleotide; TGAAGATT chr11 5297245 5297268 5297248 -
acgggactttacatttctgtctgt

SEQ ID NO: 65670 - DNA, 24 bp, Artificial Sequence
  Synthetic oligonucleotide; ACTTGATT chr11 5296963 5296986 5296966 -
taatgtgtctgaatatctctattt

SEQ ID NO: 65671 - DNA, 24 bp, Artificial Sequence
  Synthetic oligonucleotide; AAGAGATT chr11 5296579 5296602 5296582 -
ctcctcatcatgttacaataacgg

SEQ ID NO: 65672 - DNA, 24 bp, Artificial Sequence
  Synthetic oligonucleotide; GATAGATT chr11 5296228 5296251 5296231 -
atctgctgtggtaagttacaaaga

SEQ ID NO: 65673 - DNA, 24 bp, Artificial Sequence
  Synthetic oligonucleotide; TTTTGATT chr11 5295893 5295916 5295896 -
gcttctttcagaaatagcctctat

SEQ ID NO: 65674 - DNA, 24 bp, Artificial Sequence
  Synthetic oligonucleotide; TCTGGATT chr11 5295723 5295746 5295726 -
atagttcccacagccccacttagc

SEQ ID NO: 65675 - DNA, 24 bp, Artificial Sequence
  Synthetic oligonucleotide; CATGGATT chr11 5295671 5295694 5295674 -
ttgcaactacatggacgtaaaatg

SEQ ID NO: 65676 - DNA, 24 bp, Artificial Sequence
  Synthetic oligonucleotide; CAATGATT chr11 5295436 5295459 5295439 -
atagtagtaatagtaataacaata

SEQ ID NO: 65677 - DNA, 24 bp, Artificial Sequence
  Synthetic oligonucleotide; CTTAGATT chr11 5295131 5295154 5295134 -
aagacataatttggggtgagaaag

SEQ ID NO: 65678 - DNA, 24 bp, Artificial Sequence
  Synthetic oligonucleotide; CTTTGATT chr11 5295033 5295056 5295036 -
aataaaacatatggttcagtatgc

SEQ ID NO: 65679 - DNA, 24 bp, Artificial Sequence
  Synthetic oligonucleotide; TAGTGATT chr11 5294968 5294991 5294971 -
agggtgtgggataatgctaattac

SEQ ID NO: 65680 - DNA, 24 bp, Artificial Sequence
  Synthetic oligonucleotide; AAGGGATT chr11 5294324 5294347 5294327 -
tgcgaagaacccttatgtctagat

SEQ ID NO: 65681 - DNA, 24 bp, Artificial Sequence
  Synthetic oligonucleotide; CAGGGATT chr11 5294166 5294189 5294169 -
cttggagaacctttatgtctagct

SEQ ID NO: 65682 - DNA, 24 bp, Artificial Sequence
  Synthetic oligonucleotide; CAGGGATT chr11 5294006 5294029 5294009 -
cgtggagaacctttatgtctagct

SEQ ID NO: 65683 - DNA, 24 bp, Artificial Sequence
  Synthetic oligonucleotide; CATGGATT chr11 5293796 5293819 5293799 -
cgtggagaacctttgtgtctagct

SEQ ID NO: 65684 - DNA, 24 bp, Artificial Sequence
  Synthetic oligonucleotide; AAAAGATT chr11 5293076 5293099 5293079 -
cccttcctctatgtggcagaaagt

SEQ ID NO: 65685 - DNA, 24 bp, Artificial Sequence
  Synthetic oligonucleotide; CCTCGATT chr11 5292718 5292741 5292721 -
aattttctcattttcataggtttt

SEQ ID NO: 65686 - DNA, 24 bp, Artificial Sequence
  Synthetic oligonucleotide; TCATGATT chr11 5292701 5292724 5292704 -
aggttttcctcgattgatcattat

SEQ ID NO: 65687 - DNA, 24 bp, Artificial Sequence
  Synthetic oligonucleotide; TCCAGATT chr11 5292624 5292647 5292627 -
acacatatgacattttaactatgt

SEQ ID NO: 65688 - DNA, 24 bp, Artificial Sequence
  Synthetic oligonucleotide; GGTGGATT chr11 5292558 5292581 5292561 -
ccacaaaaaataagtatgtgaagt

SEQ ID NO: 65689 - DNA, 24 bp, Artificial Sequence
  Synthetic oligonucleotide; ACTGGATT chr11 5291847 5291870 5291850 -
tgcttcacgtagtctgtgcttatg

SEQ ID NO: 65690 - DNA, 24 bp, Artificial Sequence
  Synthetic oligonucleotide; CTCTGATT chr11 5291648 5291671 5291651 -
tagtaagcatgaggatgcctcctt

SEQ ID NO: 65691 - DNA, 24 bp, Artificial Sequence
  Synthetic oligonucleotide; GAGTGATT chr11 5291608 5291631 5291611 -
agtctgttggtcacagaataacct

SEQ ID NO: 65692 - DNA, 24 bp, Artificial Sequence
  Synthetic oligonucleotide; AGTGGATT chr11 5291518 5291541 5291521 -
agtcaaaatgtttctctttttatt

SEQ ID NO: 65693 - DNA, 24 bp, Artificial Sequence
  Synthetic oligonucleotide; TTTTGATT chr11 5291369 5291392 5291372 -
agcaaggaagttgttaaggagccc

SEQ ID NO: 65694 - DNA, 24 bp, Artificial Sequence
  Synthetic oligonucleotide; CTTTGATT chr11 5291118 5291141 5291121 -
agagtccagaaatggcaacattac

SEQ ID NO: 65695 - DNA, 24 bp, Artificial Sequence
  Synthetic oligonucleotide; AAAGGATT chr11 5290965 5290988 5290968 -
ctcatttctcagaagtatattttg

SEQ ID NO: 65696 - DNA, 24 bp, Artificial Sequence
  Synthetic oligonucleotide; TAAGGATT chr11 5290712 5290735 5290715 -
aaatacctgcttcatagttattaa

SEQ ID NO: 65697 - DNA, 24 bp, Artificial Sequence
  Synthetic oligonucleotide; ATAAGATT chr11 5290688 5290711 5290691 -
taaggattaagtgagataatgccc

SEQ ID NO: 65698 - DNA, 24 bp, Artificial Sequence
  Synthetic oligonucleotide; AAAGGATT chr11 5290638 5290661 5290641 -
atacatacacacacacacacattg

SEQ ID NO: 65699 - DNA, 24 bp, Artificial Sequence
  Synthetic oligonucleotide; GCCTGATT chr11 5289464 5289487 5289467 -
acagttgaaaagacctaagcttgt

SEQ ID NO: 65700 - DNA, 24 bp, Artificial Sequence
  Synthetic oligonucleotide; GTTAGATT chr11 5288915 5288938 5288918 -
attatctcattgctgttcataatt

SEQ ID NO: 65701 - DNA, 24 bp, Artificial Sequence
  Synthetic oligonucleotide; ACAAGATT chr11 5288644 5288667 5288647 -
agccattgaaacaggaataacaga

SEQ ID NO: 65702 - DNA, 24 bp, Artificial Sequence
  Synthetic oligonucleotide; AAATGATT chr11 5287911 5287934 5287914 -
tttttataagtaggagtctggagt

SEQ ID NO: 65703 - DNA, 24 bp, Artificial Sequence
  Synthetic oligonucleotide; GTCAGATT chr11 5287736 5287759 5287739 -
caccttcacccaggcccactgagt

SEQ ID NO: 65704 - DNA, 24 bp, Artificial Sequence
  Synthetic oligonucleotide; CAGAGATT chr11 5287567 5287590 5287570 -
ataaaagtcttgggcagtatagag

SEQ ID NO: 65705 - DNA, 24 bp, Artificial Sequence
  Synthetic oligonucleotide; GAGTGATT chr11 5287529 5287552 5287532 -
acagatgctggagccagaccacct

SEQ ID NO: 65706 - DNA, 24 bp, Artificial Sequence
  Synthetic oligonucleotide; CTGGGATT chr11 5287192 5287215 5287195 -
tgcccacctcagccttccaaagtg

SEQ ID NO: 65707 - DNA, 24 bp, Artificial Sequence
  Synthetic oligonucleotide; GCATGATT chr11 5287180 5287203 5287183 -
ccttccaaagtgctgggattataa

SEQ ID NO: 65708 - DNA, 24 bp, Artificial Sequence
  Synthetic oligonucleotide; ATAAGATT chr11 5287152 5287175 5287155 -
gattacaggagttttaacaggctc

SEQ ID NO: 65709 - DNA, 24 bp, Artificial Sequence
  Synthetic oligonucleotide; CTTGGATT chr11 5286897 5286920 5286900 -
gcataattaatcatatttaatact

SEQ ID NO: 65710 - DNA, 24 bp, Artificial Sequence
  Synthetic oligonucleotide; TTGAGATT chr11 5286772 5286795 5286775 -
ataaactactagcaaatagtagaa

SEQ ID NO: 65711 - DNA, 24 bp, Artificial Sequence
  Synthetic oligonucleotide; TTTTGATT chr11 5286445 5286468 5286448 -
caccatgtggagaaggggtggtgg

SEQ ID NO: 65712 - DNA, 24 bp, Artificial Sequence
  Synthetic oligonucleotide; CCAGGATT chr11 5286264 5286287 5286267 -
gggaatcaagttatattatgtaac

SEQ ID NO: 65713 - DNA, 24 bp, Artificial Sequence
  Synthetic oligonucleotide; AGAAGATT chr11 5286256 5286279 5286259 -
agttatattatgtaacccaggatt

SEQ ID NO: 65714 - DNA, 24 bp, Artificial Sequence
  Synthetic oligonucleotide; AGGGGATT chr11 5286130 5286153 5286133 -
acccatcattgaataaatccctat

SEQ ID NO: 65715 - DNA, 24 bp, Artificial Sequence
  Synthetic oligonucleotide; TCTTGATT chr11 5286100 5286123 5286103 -
tttctaccctgagcaaaaggctgg

SEQ ID NO: 65716 - DNA, 24 bp, Artificial Sequence
  Synthetic oligonucleotide; ATCAGATT chr11 5285958 5285981 5285961 -
ctctcataattcttggttgcatga

SEQ ID NO: 65717 - DNA, 24 bp, Artificial Sequence
  Synthetic oligonucleotide; CTTAGATT chr11 5285584 5285607 5285587 -
cctcctagcatccagagactagtg

SEQ ID NO: 65718 - DNA, 24 bp, Artificial Sequence
  Synthetic oligonucleotide; GAAGGATT chr11 5285294 5285317 5285297 -
atgggatgagtaagagaggagagg

SEQ ID NO: 65719 - DNA, 24 bp, Artificial Sequence
  Synthetic oligonucleotide; CTTGGATT chr11 5284937 5284960 5284940 -
tttgggagcaggagtctctaagga

SEQ ID NO: 65720 - DNA, 24 bp, Artificial Sequence
  Synthetic oligonucleotide; TAAAGATT chr11 5284242 5284265 5284245 -
ttttaatgaaagcttagctttcat

SEQ ID NO: 65721 - DNA, 24 bp, Artificial Sequence
  Synthetic oligonucleotide; TGTAGATT chr11 5284045 5284068 5284048 -
cacatgagagacacgaggaaatag

SEQ ID NO: 65722 - DNA, 24 bp, Artificial Sequence
  Synthetic oligonucleotide; ATGGGATT chr11 5283802 5283825 5283805 -
gaggccgggcacggtggctcatat

SEQ ID NO: 65723 - DNA, 24 bp, Artificial Sequence
  Synthetic oligonucleotide; CTAAGATT chr11 5283579 5283602 5283582 -
ccaggaggtggaggttgcagtgag

SEQ ID NO: 65724 - DNA, 24 bp, Artificial Sequence
  Synthetic oligonucleotide; AGTAGATT chr11 5283464 5283487 5283467 -
gttttactcacaccaatactcaga

SEQ ID NO: 65725 - DNA, 24 bp, Artificial Sequence
  Synthetic oligonucleotide; TGTCGATT chr11 5283105 5283128 5283108 -
cccttgcttcttacttttacttct

SEQ ID NO: 65726 - DNA, 24 bp, Artificial Sequence
  Synthetic oligonucleotide; AAGAGATT chr11 5282980 5283003 5282983 -
aaatttagaaacaacttcagaata

SEQ ID NO: 65727 - DNA, 24 bp, Artificial Sequence
  Synthetic oligonucleotide; CAGAGATT chr11 5282959 5282982 5282962 -
ataaagagattttctcttgggtta

SEQ ID NO: 65728 - DNA, 24 bp, Artificial Sequence
  Synthetic oligonucleotide; TGCAGATT chr11 5282633 5282656 5282636 -
ggtacacaagaaatgagaagaaac

SEQ ID NO: 65729 - DNA, 24 bp, Artificial Sequence
  Synthetic oligonucleotide; TGTTGATT chr11 5281844 5281867 5281847 -
tcatggcaacatggctgcctaaag

SEQ ID NO: 65730 - DNA, 24 bp, Artificial Sequence
  Synthetic oligonucleotide; TTATGATT chr11 5281076 5281099 5281079 -
ataagatacatgttttattcttat

SEQ ID NO: 65731 - DNA, 24 bp, Artificial Sequence
  Synthetic oligonucleotide; GAATGATT chr11 5281015 5281038 5281018 -
gcaggtgcttcaaaaccatttgct

SEQ ID NO: 65732 - DNA, 24 bp, Artificial Sequence
  Synthetic oligonucleotide; CTCTGATT chr11 5280957 5280980 5280960 -
ctctatcccttccagcatcctcat

SEQ ID NO: 65733 - DNA, 24 bp, Artificial Sequence
  Synthetic oligonucleotide; GAATGATT chr11 5280478 5280501 5280481 -
tatttgttgttatcaattgccata

SEQ ID NO: 65734 - DNA, 24 bp, Artificial Sequence
  Synthetic oligonucleotide; TATAGATT chr11 5280389 5280412 5280392 -
aatcaggctttattaatacatgtg

SEQ ID NO: 65735 - DNA, 24 bp, Artificial Sequence
  Synthetic oligonucleotide; AGAAGATT chr11 5279617 5279640 5279620 -
cttggtttcgctaagagcacagag

SEQ ID NO: 65736 - DNA, 24 bp, Artificial Sequence
  Synthetic oligonucleotide; GTGTGATT chr11 5278919 5278942 5278922 -
aaggaaggcaggtgtggctctgca

SEQ ID NO: 65737 - DNA, 24 bp, Artificial Sequence
  Synthetic oligonucleotide; GTCTGATT chr11 5278481 5278504 5278484 -
aattccctgaccgaacagaattct

SEQ ID NO: 65738 - DNA, 24 bp, Artificial Sequence
  Synthetic oligonucleotide; ATGGGATT chr11 5277055 5277078 5277058 -
tagccctccgcaggcagagccttg

SEQ ID NO: 65739 - DNA, 24 bp, Artificial Sequence
  Synthetic oligonucleotide; CTGAGATT chr11 5277011 5277034 5277014 -
aattggactcatttgttttgtagg

SEQ ID NO: 65740 - DNA, 24 bp, Artificial Sequence
  Synthetic oligonucleotide; GTAAGATT chr11 5276609 5276632 5276612 -
acttctattcaatgagaatattct

SEQ ID NO: 65741 - DNA, 24 bp, Artificial Sequence
  Synthetic oligonucleotide; TGTTGATT chr11 5275878 5275901 5275881 -
aaaaataatgggtttgcccatctc

SEQ ID NO: 65742 - DNA, 24 bp, Artificial Sequence
  Synthetic oligonucleotide; ATAAGATT chr11 5275197 5275220 5275200 -
agaggtttttcaaaatttctagac

SEQ ID NO: 65743 - DNA, 24 bp, Artificial Sequence
  Synthetic oligonucleotide; GGCTGATT chr11 5274851 5274874 5274854 -
catgtaggaaagtgtggcataact

SEQ ID NO: 65744 - DNA, 24 bp, Artificial Sequence
  Synthetic oligonucleotide; GAGAGATT chr11 5274704 5274727 5274707 -
gtctgtgctccaagttgccagaga

SEQ ID NO: 65745 - DNA, 24 bp, Artificial Sequence
  Synthetic oligonucleotide; TATAGATT chr11 5274173 5274196 5274176 -
ttacatctatttttgttctgagaa

SEQ ID NO: 65746 - DNA, 24 bp, Artificial Sequence
  Synthetic oligonucleotide; GAAAGATT chr11 5273850 5273873 5273853 -
taaacatatgtcataaattagcca

SEQ ID NO: 65747 - DNA, 24 bp, Artificial Sequence
  Synthetic oligonucleotide; CATAGATT chr11 5273665 5273688 5273668 -
tatacttaaatgtcttaagacata

SEQ ID NO: 65748 - DNA, 24 bp, Artificial Sequence
  Synthetic oligonucleotide; TACTGATT chr11 5273613 5273636 5273616 -
atatagacaataaatgaatattct

SEQ ID NO: 65749 - DNA, 24 bp, Artificial Sequence
  Synthetic oligonucleotide; TCAGGATT chr11 5273376 5273399 5273379 -
cccgcagcctacctgacttctgag

SEQ ID NO: 65750 - DNA, 24 bp, Artificial Sequence
  Synthetic oligonucleotide; ATGGGATT chr11 5273110 5273133 5273113 -
tccatactctgaatgggaagaatg

SEQ ID NO: 65751 - DNA, 24 bp, Artificial Sequence
  Synthetic oligonucleotide; GCATGATT chr11 5272461 5272484 5272464 -
tattgcccaggctggagtgcagtg

SEQ ID NO: 65752 - DNA, 24 bp, Artificial Sequence
  Synthetic oligonucleotide; TGGGGATT chr11 5272388 5272411 5272391 -
tcctgccttggcctcctgagtagc

SEQ ID NO: 65753 - DNA, 24 bp, Artificial Sequence
  Synthetic oligonucleotide; CTGGGATT chr11 5272253 5272276 5272256 -
tgcccgccttggcctcctgaagtg

SEQ ID NO: 65754 - DNA, 24 bp, Artificial Sequence
  Synthetic oligonucleotide; ATGAGATT chr11 5271158 5271181 5271161 -
agaaggaggaactgggctggggca

SEQ ID NO: 65755 - DNA, 24 bp, Artificial Sequence
  Synthetic oligonucleotide; CCTTGATT chr11 5271028 5271051 5271031 -
ttaaataatttctgtgaatttatt

SEQ ID NO: 65756 - DNA, 24 bp, Artificial Sequence
  Synthetic oligonucleotide; GGCAGATT chr11 5270985 5271008 5270988 -
ggataatgacaatggtattataag

SEQ ID NO: 65757 - DNA, 24 bp, Artificial Sequence
  Synthetic oligonucleotide; GCCTGATT chr11 5270808 5270831 5270811 -
aggaataatataccctgactccta

SEQ ID NO: 65758 - DNA, 24 bp, Artificial Sequence
  Synthetic oligonucleotide; TATCGATT chr11 5270796 5270819 5270799 -
ccctgactcctagcctgattaata

SEQ ID NO: 65759 - DNA, 24 bp, Artificial Sequence
  Synthetic oligonucleotide; TTAGGATT chr11 5270744 5270767 5270747 -
gacaaattctggctttaaataatt

SEQ ID NO: 65760 - DNA, 24 bp, Artificial Sequence
  Synthetic oligonucleotide; AGAGGATT chr11 5270610 5270633 5270613 -
gtggtcatagagaaatgaaaagag

SEQ ID NO: 65761 - DNA, 24 bp, Artificial Sequence
  Synthetic oligonucleotide; TTGGGATT chr11 5270534 5270557 5270537 -
ggaatcaccccaaggtactgtact

SEQ ID NO: 65762 - DNA, 24 bp, Artificial Sequence
  Synthetic oligonucleotide; GTGAGATT chr11 5270388 5270411 5270391 -
actccttaagagagctagaactgg

SEQ ID NO: 65763 - DNA, 24 bp, Artificial Sequence
  Synthetic oligonucleotide; TTGAGATT chr11 5270275 5270298 5270278 -
ttggctgaaactttttttcctatt

SEQ ID NO: 65764 - DNA, 24 bp, Artificial Sequence
  Synthetic oligonucleotide; AGTTGATT chr11 5269747 5269770 5269750 -
tgaagggtgaatattaccctagca

SEQ ID NO: 65765 - DNA, 24 bp, Artificial Sequence
  Synthetic oligonucleotide; TCAAGATT chr11 5269729 5269752 5269732 -
ctagcaagttgattgggaaagtcc

SEQ ID NO: 65766 - DNA, 24 bp, Artificial Sequence
  Synthetic oligonucleotide; CAGAGATT chr11 5269652 5269675 5269655 -
ctcctcgttgtttacccctggacc

SEQ ID NO: 65767 - DNA, 24 bp, Artificial Sequence
  Synthetic oligonucleotide; ATGTGATT chr11 5269435 5269458 5269438 -
tcaaggtgagttcaggtgctggtg

SEQ ID NO: 65768 - DNA, 24 bp, Artificial Sequence
  Synthetic oligonucleotide; ACATGATT chr11 5269299 5269322 5269302 -
ttctagtgagcataaccaaaactt

SEQ ID NO: 65769 - DNA, 24 bp, Artificial Sequence
  Synthetic oligonucleotide; AAGAGATT chr11 5269076 5269099 5269079 -
gggtcatgataattgaggtttaga

SEQ ID NO: 65770 - DNA, 24 bp, Artificial Sequence
  Synthetic oligonucleotide; AAAAGATT chr11 5269054 5269077 5269057 -
gaaagagatttttgcaaaaaaaat

SEQ ID NO: 65771 - DNA, 24 bp, Artificial Sequence
  Synthetic oligonucleotide; TGGGGATT chr11 5268957 5268980 5268960 -
gtgaaggcttgtttccgaatttgt

SEQ ID NO: 65772 - DNA, 24 bp, Artificial Sequence
  Synthetic oligonucleotide; TGGTGATT chr11 5268582 5268605 5268585 -
cctaacagctcctgggtaacgtga

SEQ ID NO: 65773 - DNA, 24 bp, Artificial Sequence
  Synthetic oligonucleotide; CCAGGATT chr11 5268193 5268216 5268196 -
taatgtggatgttatgggagaatt

SEQ ID NO: 65774 - DNA, 24 bp, Artificial Sequence
  Synthetic oligonucleotide; AGCAGATT chr11 5268057 5268080 5268060 -
ggagctgttagtggtacctgagaa

SEQ ID NO: 65775 - DNA, 24 bp, Artificial Sequence
  Synthetic oligonucleotide; AATTGATT chr11 5267908 5267931 5267911 -
gctagcttgtcacatgttttatga

SEQ ID NO: 65776 - DNA, 24 bp, Artificial Sequence
  Synthetic oligonucleotide; GAAGGATT chr11 5267855 5267878 5267858 -
tcaacaatagcctgctctttccat

SEQ ID NO: 65777 - DNA, 24 bp, Artificial Sequence
  Synthetic oligonucleotide; ATAAGATT chr11 5267483 5267506 5267486 -
ttaggatgttaagtgactcaggaa

SEQ ID NO: 65778 - DNA, 24 bp, Artificial Sequence
  Synthetic oligonucleotide; AATGGATT chr11 5267444 5267467 5267447 -
aaagtaatctgcttatgtgcacaa

SEQ ID NO: 65779 - DNA, 24 bp, Artificial Sequence
  Synthetic oligonucleotide; TGATGATT chr11 5267408 5267431 5267411 -
tttgcagataaaataaaatatgga

SEQ ID NO: 65780 - DNA, 24 bp, Artificial Sequence
  Synthetic oligonucleotide; AACAGATT chr11 5267174 5267197 5267177 -
atgtgtgaagggtagagggatatt

SEQ ID NO: 65781 - DNA, 24 bp, Artificial Sequence
  Synthetic oligonucleotide; GCTAGATT chr11 5267151 5267174 5267154 -
taacagatttactttttaggaagt

SEQ ID NO: 65782 - DNA, 24 bp, Artificial Sequence
  Synthetic oligonucleotide; CAGGGATT chr11 5266866 5266889 5266869 -
caatatgcccataaacagagtaaa

SEQ ID NO: 65783 - DNA, 24 bp, Artificial Sequence
  Synthetic oligonucleotide; TGATGATT chr11 5266740 5266763 5266743 -
tgatacttacatgcctagaacatg

SEQ ID NO: 65784 - DNA, 24 bp, Artificial Sequence
  Synthetic oligonucleotide; ACAAGATT chr11 5266291 5266314 5266294 -
gttccatccatgttgctacaaatg

SEQ ID NO: 65785 - DNA, 24 bp, Artificial Sequence
  Synthetic oligonucleotide; TACTGATT chr11 5266137 5266160 5266140 -
tgagtgtaatgtgtccattggata

SEQ ID NO: 65786 - DNA, 24 bp, Artificial Sequence
  Synthetic oligonucleotide; GTGAGATT chr11 5266102 5266125 5266105 -
tttcttttggataaataaccacta

SEQ ID NO: 65787 - DNA, 24 bp, Artificial Sequence
  Synthetic oligonucleotide; GCTGGATT chr11 5266094 5266117 5266097 -
ggataaataaccactagtgagatt

SEQ ID NO: 65788 - DNA, 24 bp, Artificial Sequence
  Synthetic oligonucleotide; TTTTGATT chr11 5265893 5265916 5265896 -
gagtaagtagatatctcattgtag

SEQ ID NO: 65789 - DNA, 24 bp, Artificial Sequence
  Synthetic oligonucleotide; TTGGGATT chr11 5265777 5265800 5265780 -
ttcatgtccttagcctacttttta

SEQ ID NO: 65790 - DNA, 24 bp, Artificial Sequence
  Synthetic oligonucleotide; TATAGATT chr11 5265701 5265724 5265704 -
tggatattattcttttgtcagatg

SEQ ID NO: 65791 - DNA, 24 bp, Artificial Sequence
  Synthetic oligonucleotide; TGAAGATT chr11 5265692 5265715 5265695 -
ttcttttgtcagatgtatagattg

SEQ ID NO: 65792 - DNA, 24 bp, Artificial Sequence
  Synthetic oligonucleotide; CTTAGATT chr11 5265482 5265505 5265485 -
tctagaattgttacagtttcaggg

SEQ ID NO: 65793 - DNA, 24 bp, Artificial Sequence
  Synthetic oligonucleotide; AGTTGATT chr11 5265454 5265477 5265457 -
gatttaagtccttgatccatcttg

SEQ ID NO: 65794 - DNA, 24 bp, Artificial Sequence
  Synthetic oligonucleotide; TTCAGATT chr11 5265177 5265200 5265180 -
tttgaaatgaggtaatgtaatgcc

SEQ ID NO: 65795 - DNA, 24 bp, Artificial Sequence
  Synthetic oligonucleotide; TTAGGATT chr11 5265112 5265135 5265115 -
ctcttttttggttccataagaatt

SEQ ID NO: 65796 - DNA, 24 bp, Artificial Sequence
  Synthetic oligonucleotide; TATTGATT chr11 5265010 5265033 5265013 -
ctggcattatggccattttcacaa

SEQ ID NO: 65797 - DNA, 24 bp, Artificial Sequence
  Synthetic oligonucleotide; ATATGATT chr11 5264956 5264979 5264959 -
tgtgtttccatttgtttgtgtctt

SEQ ID NO: 65798 - DNA, 24 bp, Artificial Sequence
  Synthetic oligonucleotide; TCTTGATT chr11 5264825 5264848 5264828 -
cagctattgtaaaaggggttgagt

SEQ ID NO: 65799 - DNA, 24 bp, Artificial Sequence
  Synthetic oligonucleotide; GTCTGATT chr11 5264604 5264627 5264607 -
ggatgtgctttacttgtttctctt

SEQ ID NO: 65800 - DNA, 24 bp, Artificial Sequence
  Synthetic oligonucleotide; AACCGATT chr11 5264427 5264450 5264430 -
ttacattgaggtatgtcctttgta

SEQ ID NO: 65801 - DNA, 24 bp, Artificial Sequence
  Synthetic oligonucleotide; ACATGATT chr11 5264349 5264372 5264352 -
gtttctgtggctattgagataatc

SEQ ID NO: 65802 - DNA, 24 bp, Artificial Sequence
  Synthetic oligonucleotide; GAATGATT chr11 5264098 5264121 5264101 -
tattaaggtgatactggcttcata

SEQ ID NO: 65803 - DNA, 24 bp, Artificial Sequence
  Synthetic oligonucleotide; GGAGGATT chr11 5264087 5264110 5264090 -
tactggcttcatagaatgatttag

SEQ ID NO: 65804 - DNA, 24 bp, Artificial Sequence
  Synthetic oligonucleotide; ATAGGATT chr11 5264048 5264071 5264051 -
tctctatcttgtagaatactgtca

SEQ ID NO: 65805 - DNA, 24 bp, Artificial Sequence
  Synthetic oligonucleotide; GAATGATT chr11 5262903 5262926 5262906 -
acgtgtgcacgtgtctttatagta

SEQ ID NO: 65806 - DNA, 24 bp, Artificial Sequence
  Synthetic oligonucleotide; ATGGGATT chr11 5262868 5262891 5262871 -
aattctttgggtatatacccagta

SEQ ID NO: 65807 - DNA, 24 bp, Artificial Sequence
  Synthetic oligonucleotide; TTTTGATT chr11 5262664 5262687 5262667 -
gcatgagatggtatctcattgtgg

SEQ ID NO: 65808 - DNA, 24 bp, Artificial Sequence
  Synthetic oligonucleotide; TGTAGATT chr11 5262505 5262528 5262508 -
tcttgtaaatttgttgaagttctt

SEQ ID NO: 65809 - DNA, 24 bp, Artificial Sequence
  Synthetic oligonucleotide; GATAGATT chr11 5262472 5262495 5262475 -
tggatgttagccctttgtcagatg

SEQ ID NO: 65810 - DNA, 24 bp, Artificial Sequence
  Synthetic oligonucleotide; CTAGGATT chr11 5262277 5262300 5262280 -
gaatggtattgcctaggttatctt

SEQ ID NO: 65811 - DNA, 24 bp, Artificial Sequence
  Synthetic oligonucleotide; TTAGGATT chr11 5261933 5261956 5261936 -
tgcctccagctttgttctttttgt

SEQ ID NO: 65812 - DNA, 24 bp, Artificial Sequence
  Synthetic oligonucleotide; TTTTGATT chr11 5261904 5261927 5261907 -
attgtcttggctatatgggctctt

SEQ ID NO: 65813 - DNA, 24 bp, Artificial Sequence
  Synthetic oligonucleotide; TATTGATT chr11 5261783 5261806 5261786 -
tgggcagtatggccattttaaaga

SEQ ID NO: 65814 - DNA, 24 bp, Artificial Sequence
  Synthetic oligonucleotide; CCATGATT chr11 5261603 5261626 5261606 -
cagcaattgtgaatgggagttcac

SEQ ID NO: 65815 - DNA, 24 bp, Artificial Sequence
  Synthetic oligonucleotide; TTGTGATT chr11 5261557 5261580 5261560 -
tctattattggtgtataggaacgc

SEQ ID NO: 65816 - DNA, 24 bp, Artificial Sequence
  Synthetic oligonucleotide; CACTGATT chr11 5261543 5261566 5261546 -
ataggaacgcttgtgatttctgca

SEQ ID NO: 65817 - DNA, 24 bp, Artificial Sequence
  Synthetic oligonucleotide; TTAAGATT chr11 5261499 5261522 5261502 -
actttgctgaagctgtttatcagc

SEQ ID NO: 65818 - DNA, 24 bp, Artificial Sequence
  Synthetic oligonucleotide; GCCTGATT chr11 5261384 5261407 5261387 -
gaatatgctttatttctttctctt

SEQ ID NO: 65819 - DNA, 24 bp, Artificial Sequence
  Synthetic oligonucleotide; AAATGATT chr11 5261298 5261321 5261301 -
ttgtcttgtgccggttttcaaagc

SEQ ID NO: 65820 - DNA, 24 bp, Artificial Sequence
  Synthetic oligonucleotide; TCTTGATT chr11 5261278 5261301 5261281 -
aagcaaatgatttttaaatttcca

SEQ ID NO: 65821 - DNA, 24 bp, Artificial Sequence
  Synthetic oligonucleotide; AGTTGATT chr11 5261191 5261214 5261194 -
catggttttgaaggttccttttgt

SEQ ID NO: 65822 - DNA, 24 bp, Artificial Sequence
  Synthetic oligonucleotide; ATGGGATT chr11 5260448 5260471 5260451 -
ctgtatttttgttgtatatgtcct

SEQ ID NO: 65823 - DNA, 24 bp, Artificial Sequence
  Synthetic oligonucleotide; TCAAGATT chr11 5260395 5260418 5260398 -
tttgatgtgcttccagggtttatt

SEQ ID NO: 65824 - DNA, 24 bp, Artificial Sequence
  Synthetic oligonucleotide; TTAAGATT chr11 5260118 5260141 5260121 -
cctggtagtttcacctcacagctc

SEQ ID NO: 65825 - DNA, 24 bp, Artificial Sequence
  Synthetic oligonucleotide; CCTTGATT chr11 5259972 5259995 5259975 -
ctctagcaaggtgggggaagtttt

SEQ ID NO: 65826 - DNA, 24 bp, Artificial Sequence
  Synthetic oligonucleotide; TTTAGATT chr11 5259938 5259961 5259941 -
ttccctggataagttttccaaact

SEQ ID NO: 65827 - DNA, 24 bp, Artificial Sequence
  Synthetic oligonucleotide; TGCTGATT chr11 5259912 5259935 5259915 -
tagatttctcttctttctcaggaa

SEQ ID NO: 65828 - DNA, 24 bp, Artificial Sequence
  Synthetic oligonucleotide; GTTTGATT chr11 5259896 5259919 5259899 -
ctcaggaatgctgattattcttag

SEQ ID NO: 65829 - DNA, 24 bp, Artificial Sequence
  Synthetic oligonucleotide; CCCAGATT chr11 5259876 5259899 5259879 -
ttaggtttgattgtttaacataat

SEQ ID NO: 65830 - DNA, 24 bp, Artificial Sequence
  Synthetic oligonucleotide; GTTGGATT chr11 5259821 5259844 5259824 -
tcttattcttttttctttgtcttt

SEQ ID NO: 65831 - DNA, 24 bp, Artificial Sequence
  Synthetic oligonucleotide; CTTGGATT chr11 5259769 5259792 5259772 -
tcttcaagctctgaatttcttctg

SEQ ID NO: 65832 - DNA, 24 bp, Artificial Sequence
  Synthetic oligonucleotide; TGAAGATT chr11 5259656 5259679 5259659 -
ttttatttatgctatctctttaac

SEQ ID NO: 65833 - DNA, 24 bp, Artificial Sequence
  Synthetic oligonucleotide; CCTTGATT chr11 5259580 5259603 5259583 -
ggacttcaccttcctcggatgcct

SEQ ID NO: 65834 - DNA, 24 bp, Artificial Sequence
  Synthetic oligonucleotide; CAGGGATT chr11 5259532 5259555 5259535 -
ttctgaattatttttcaggtaaat

SEQ ID NO: 65835 - DNA, 24 bp, Artificial Sequence
  Synthetic oligonucleotide; GTATGATT chr11 5259491 5259514 5259494 -
tttggatgcattgctggtgagcta

SEQ ID NO: 65836 - DNA, 24 bp, Artificial Sequence
  Synthetic oligonucleotide; TAGTGATT chr11 5259292 5259315 5259295 -
tggggcttcctgagagccgaactg

SEQ ID NO: 65837 - DNA, 24 bp, Artificial Sequence
  Synthetic oligonucleotide; AATGGATT chr11 5258829 5258852 5258832 -
ggatgggggtgtagtttccaggtc

SEQ ID NO: 65838 - DNA, 24 bp, Artificial Sequence
  Synthetic oligonucleotide; TGGAGATT chr11 5258504 5258527 5258507 -
gcccagcccctagatctggccagg

SEQ ID NO: 65839 - DNA, 24 bp, Artificial Sequence
  Synthetic oligonucleotide; TCTTGATT chr11 5258144 5258167 5258147 -
agggtgtgtgcgttctctcagctt

SEQ ID NO: 65840 - DNA, 24 bp, Artificial Sequence
  Synthetic oligonucleotide; TCTAGATT chr11 5257862 5257885 5257865 -
ctctttaccccttagggagctata

SEQ ID NO: 65841 - DNA, 24 bp, Artificial Sequence
  Synthetic oligonucleotide; ACAAGATT chr11 5257776 5257799 5257779 -
cacacacacacacacatctgcatg

SEQ ID NO: 65842 - DNA, 24 bp, Artificial Sequence
  Synthetic oligonucleotide; TAGAGATT chr11 5257649 5257672 5257652 -
atccagccaatagtacaggttgct

SEQ ID NO: 65843 - DNA, 24 bp, Artificial Sequence
  Synthetic oligonucleotide; GGCAGATT chr11 5257401 5257424 5257404 -
ctttatttggcaatgccttcccat

SEQ ID NO: 65844 - DNA, 24 bp, Artificial Sequence
  Synthetic oligonucleotide; CCTAGATT chr11 5257280 5257303 5257283 -
attattaattttatgtatgttcta

SEQ ID NO: 65845 - DNA, 24 bp, Artificial Sequence
  Synthetic oligonucleotide; TTAGGATT chr11 5257100 5257123 5257103 -
tgtgtaaagaaacagttttatcag

SEQ ID NO: 65846 - DNA, 24 bp, Artificial Sequence
  Synthetic oligonucleotide; TTAAGATT chr11 5256872 5256895 5256875 -
attccttagtctgaggaggagcaa

SEQ ID NO: 65847 - DNA, 24 bp, Artificial Sequence
  Synthetic oligonucleotide; GAGAGATT chr11 5256559 5256582 5256562 -
agactctgtctcaaaaaaaaaaaa

SEQ ID NO: 65848 - DNA, 24 bp, Artificial Sequence
  Synthetic oligonucleotide; AAAAGATT chr11 5256550 5256573 5256553 -
ctcaaaaaaaaaaaagagagattc

SEQ ID NO: 65849 - DNA, 24 bp, Artificial Sequence
  Synthetic oligonucleotide; CTTAGATT chr11 5256327 5256350 5256330 -
caataaaaatctttctcacccatc

SEQ ID NO: 65850 - DNA, 24 bp, Artificial Sequence
  Synthetic oligonucleotide; ACAGGATT chr11 5256123 5256146 5256126 -
actttgagcagatataagccttac

SEQ ID NO: 65851 - DNA, 24 bp, Artificial Sequence
  Synthetic oligonucleotide; AAAGGATT chr11 5256105 5256128 5256108 -
ccttacacaggattatgaagtctg

SEQ ID NO: 65852 - DNA, 24 bp, Artificial Sequence
  Synthetic oligonucleotide; GCCAGATT chr11 5256030 5256053 5256033 -
gaaggtagagctctcctccaataa

SEQ ID NO: 65853 - DNA, 24 bp, Artificial Sequence
  Synthetic oligonucleotide; ATAAGATT chr11 5255722 5255745 5255725 -
caaatacatgtcttatgtcttaga

SEQ ID NO: 65854 - DNA, 24 bp, Artificial Sequence
  Synthetic oligonucleotide; GCGTGATT chr11 5255494 5255517 5255497 -
aatacttttgctgagatgaaacag

SEQ ID NO: 65855 - DNA, 24 bp, Artificial Sequence
  Synthetic oligonucleotide; TAAGGATT chr11 5255451 5255474 5255454 -
ggtacggataagtagatattgaag

SEQ ID NO: 65856 - DNA, 24 bp, Artificial Sequence
  Synthetic oligonucleotide; ATAGGATT chr11 5255386 5255409 5255389 -
ttcctgcactgaaactgttgcttt

SEQ ID NO: 65857 - DNA, 24 bp, Artificial Sequence
  Synthetic oligonucleotide; TCAGGATT chr11 5254567 5254590 5254570 -
cctggcaaaagtccaggtcgcttc

SEQ ID NO: 65858 - DNA, 24 bp, Artificial Sequence
  Synthetic oligonucleotide; ATTAGATT chr11 5254038 5254061 5254041 -
aaatgaggaaaatgacttttcttt

SEQ ID NO: 65859 - DNA, 24 bp, Artificial Sequence
  Synthetic oligonucleotide; AGTAGATT chr11 5253743 5253766 5253746 -
gaacaattgaaacatttgggctgg

SEQ ID NO: 65860 - DNA, 24 bp, Artificial Sequence
  Synthetic oligonucleotide; ACAAGATT chr11 5253610 5253633 5253613 -
agggttcatggtggcaagaagata

SEQ ID NO: 65861 - DNA, 24 bp, Artificial Sequence
  Synthetic oligonucleotide; GCTTGATT chr11 5253509 5253532 5253512 -
aggctttgagggaagttaacatag

SEQ ID NO: 65862 - DNA, 24 bp, Artificial Sequence
  Synthetic oligonucleotide; CCTGGATT chr11 5252852 5252875 5252855 -
agtgaagggggctgaacccccttc

SEQ ID NO: 65863 - DNA, 24 bp, Artificial Sequence
  Synthetic oligonucleotide; GGCAGATT chr11 5252354 5252377 5252357 -
aatttgtataacattaattgagaa

SEQ ID NO: 65864 - DNA, 24 bp, Artificial Sequence
  Synthetic oligonucleotide; GAGAGATT chr11 5252118 5252141 5252121 -
gaattattttcctcatcagaagca

SEQ ID NO: 65865 - DNA, 24 bp, Artificial Sequence
  Synthetic oligonucleotide; AGTGGATT chr11 5251911 5251934 5251914 -
agaaaaaaataagcttcggtgttc

SEQ ID NO: 65866 - DNA, 24 bp, Artificial Sequence
  Synthetic oligonucleotide; TGCCGATT chr11 5251438 5251461 5251441 -
agagtagacgcaagggctactggt

SEQ ID NO: 65867 - DNA, 24 bp, Artificial Sequence
  Synthetic oligonucleotide; GGTAGATT chr11 5251395 5251418 5251398 -
ttttcaatagtatgctaaacaagg

SEQ ID NO: 65868 - DNA, 24 bp, Artificial Sequence
  Synthetic oligonucleotide; GTAAGATT chr11 5250791 5250814 5250794 -
tacacgcacatcttatgtcttaga

SEQ ID NO: 65869 - DNA, 24 bp, Artificial Sequence
  Synthetic oligonucleotide; TCATGATT chr11 5250563 5250586 5250566 -
aaatatttttctaagatgaaacag

SEQ ID NO: 65870 - DNA, 24 bp, Artificial Sequence
  Synthetic oligonucleotide; CTAAGATT chr11 5250340 5250363 5250343 -
gaaaccactgctaactgaaagaga

SEQ ID NO: 65871 - DNA, 24 bp, Artificial Sequence
  Synthetic oligonucleotide; TCAGGATT chr11 5249643 5249666 5249646 -
cctggcaaaagtccaggtcgcttc

SEQ ID NO: 65872 - DNA, 24 bp, Artificial Sequence
  Synthetic oligonucleotide; ATTAGATT chr11 5249114 5249137 5249117 -
aaatgaggaaaatgacttttcttt

SEQ ID NO: 65873 - DNA, 24 bp, Artificial Sequence
  Synthetic oligonucleotide; AGTAGATT chr11 5248823 5248846 5248826 -
gaacaattgaaacatttgggctgg

SEQ ID NO: 65874 - DNA, 24 bp, Artificial Sequence
  Synthetic oligonucleotide; GCAAGATT chr11 5248692 5248715 5248695 -
agggttcatggtggcaagaagata

SEQ ID NO: 65875 - DNA, 24 bp, Artificial Sequence
  Synthetic oligonucleotide; GCTTGATT chr11 5248591 5248614 5248594 -
aggctttgagggaagttaacatag

SEQ ID NO: 65876 - DNA, 24 bp, Artificial Sequence
  Synthetic oligonucleotide; CCATGATT chr11 5248350 5248373 5248353 -
tccagataccactgagctcactgc

SEQ ID NO: 65877 - DNA, 24 bp, Artificial Sequence
  Synthetic oligonucleotide; ACATGATT chr11 5248272 5248295 5248275 -
aaatctattctgctgagagatcac

SEQ ID NO: 65878 - DNA, 24 bp, Artificial Sequence
  Synthetic oligonucleotide; GCTGGATT chr11 5247951 5247974 5247954 -
aaaaggttcagtgaagacctgggg

SEQ ID NO: 65879 - DNA, 24 bp, Artificial Sequence
  Synthetic oligonucleotide; GATTGATT chr11 5247947 5247970 5247950 -
ggttcagtgaagacctgggggctg

SEQ ID NO: 65880 - DNA, 24 bp, Artificial Sequence
  Synthetic oligonucleotide; TGCAGATT chr11 5247757 5247780 5247760 -
aaattaatcccatgccctcaagtg

SEQ ID NO: 65881 - DNA, 24 bp, Artificial Sequence
  Synthetic oligonucleotide; CTTTGATT chr11 5246997 5247020 5247000 -
ataagcctgcgcccttctctctaa

SEQ ID NO: 65882 - DNA, 24 bp, Artificial Sequence
  Synthetic oligonucleotide; TTTGGATT chr11 5246606 5246629 5246609 -
ttcttgatgatatgttaaacaagt

SEQ ID NO: 65883 - DNA, 24 bp, Artificial Sequence
  Synthetic oligonucleotide; AATAGATT chr11 5246374 5246397 5246377 -
tggatattaggcctttgtcagaag

SEQ ID NO: 65884 - DNA, 24 bp, Artificial Sequence
  Synthetic oligonucleotide; TGTAGATT chr11 5246346 5246369 5246349 -
gattggaaaatctttttcccattc

SEQ ID NO: 65885 - DNA, 24 bp, Artificial Sequence
  Synthetic oligonucleotide; ATTAGATT chr11 5246286 5246309 5246289 -
gctgagcaggagctctttagttta

SEQ ID NO: 65886 - DNA, 24 bp, Artificial Sequence
  Synthetic oligonucleotide; CCTTGATT chr11 5246190 5246213 5246193 -
gtgtttatatcatgaatagtattg

SEQ ID NO: 65887 - DNA, 24 bp, Artificial Sequence
  Synthetic oligonucleotide; GTAAGATT chr11 5245839 5245862 5245842 -
agagaatctgtctgtctagttcat

SEQ ID NO: 65888 - DNA, 24 bp, Artificial Sequence
  Synthetic oligonucleotide; GGGTGATT chr11 5245093 5245116 5245096 -
agagtctccttgaaatacacatgg

SEQ ID NO: 65889 - DNA, 24 bp, Artificial Sequence
  Synthetic oligonucleotide; TAAGGATT chr11 5245066 5245089 5245069 -
tgatttcctaaactttatttcttg

SEQ ID NO: 65890 - DNA, 24 bp, Artificial Sequence
  Synthetic oligonucleotide; GCCTGATT chr11 5244850 5244873 5244853 -
atattgtcagtgaagaatgtcttt

SEQ ID NO: 65891 - DNA, 24 bp, Artificial Sequence
  Synthetic oligonucleotide; GTAGGATT chr11 5244672 5244695 5244675 -
gttctggcataattttgtagatat

SEQ ID NO: 65892 - DNA, 24 bp, Artificial Sequence
  Synthetic oligonucleotide; CAATGATT chr11 5244647 5244670 5244650 -
taggatttgacatggactattgtt

SEQ ID NO: 65893 - DNA, 24 bp, Artificial Sequence
  Synthetic oligonucleotide; AATGGATT chr11 5244597 5244620 5244600 -
ttcagataagtacactgactacta

SEQ ID NO: 65894 - DNA, 24 bp, Artificial Sequence
  Synthetic oligonucleotide; CCTGGATT chr11 5243800 5243823 5243803 -
agcaaagttcccctgagaaggcca

SEQ ID NO: 65895 - DNA, 24 bp, Artificial Sequence
  Synthetic oligonucleotide; AATAGATT chr11 5243713 5243736 5243716 -
tggagtcacaacccacccttgacc

SEQ ID NO: 65896 - DNA, 24 bp, Artificial Sequence
  Synthetic oligonucleotide; AATAGATT chr11 5243675 5243698 5243678 -
actgagggaggcaaagggctggtc

SEQ ID NO: 65897 - DNA, 24 bp, Artificial Sequence
  Synthetic oligonucleotide; GTGAGATT chr11 5243466 5243489 5243469 -
aaggttaaggtgagaaggctggag

SEQ ID NO: 65898 - DNA, 24 bp, Artificial Sequence
  Synthetic oligonucleotide; GAGGGATT chr11 5243397 5243420 5243400 -
gaaaggcagaaagtgtttctgaaa

SEQ ID NO: 65899 - DNA, 24 bp, Artificial Sequence
  Synthetic oligonucleotide; CTGTGATT chr11 5243352 5243375 5243355 -
acatagtctgactttgcacctgct

SEQ ID NO: 65900 - DNA, 24 bp, Artificial Sequence
  Synthetic oligonucleotide; GTGGGATT chr11 5242982 5243005 5242985 -
gctatgggatatgatatttcagca

SEQ ID NO: 65901 - DNA, 24 bp, Artificial Sequence
  Synthetic oligonucleotide; AGAGGATT chr11 5242685 5242708 5242688 -
caaagtagtgggaagctgttaaaa

SEQ ID NO: 65902 - DNA, 24 bp, Artificial Sequence
  Synthetic oligonucleotide; ACAGGATT chr11 5242635 5242658 5242638 -
atggtatacttttgtacgcatggt

SEQ ID NO: 65903 - DNA, 24 bp, Artificial Sequence
  Synthetic oligonucleotide; TATTGATT chr11 5242232 5242255 5242235 -
ctccccagctcttaggcaacgtga

SEQ ID NO: 65904 - DNA, 24 bp, Artificial Sequence
  Synthetic oligonucleotide; CGAGGATT chr11 5242204 5242227 5242207 -
gattgttttggcaacccacttcag

SEQ ID NO: 65905 - DNA, 24 bp, Artificial Sequence
  Synthetic oligonucleotide; TGCTGATT chr11 5242011 5242034 5242014 -
tggggagaagagcagtatcctgcc

SEQ ID NO: 65906 - DNA, 24 bp, Artificial Sequence
  Synthetic oligonucleotide; CCCTGATT chr11 5241920 5241943 5241923 -
ctctttttctgtctttatatttta

SEQ ID NO: 65907 - DNA, 24 bp, Artificial Sequence
  Synthetic oligonucleotide; GGTGGATT chr11 5241802 5241825 5241805 -
ctgcaagaaaagagagaactcgtg

SEQ ID NO: 65908 - DNA, 24 bp, Artificial Sequence
  Synthetic oligonucleotide; AGAGGATT chr11 5241696 5241719 5241699 -
atggaggtactctttggaggtgta

SEQ ID NO: 65909 - DNA, 24 bp, Artificial Sequence
  Synthetic oligonucleotide; GATAGATT chr11 5241354 5241377 5241357 -
ataattccattaagctgtgcatat

SEQ ID NO: 65910 - DNA, 24 bp, Artificial Sequence
  Synthetic oligonucleotide; AAAGGATT chr11 5241327 5241350 5241330 -
agatttatcatatgtattttcctt

SEQ ID NO: 65911 - DNA, 24 bp, Artificial Sequence
  Synthetic oligonucleotide; TAGTGATT chr11 5241197 5241220 5241200 -
tacaagttttattgtttttagtgg

SEQ ID NO: 65912 - DNA, 24 bp, Artificial Sequence
  Synthetic oligonucleotide; CACTGATT chr11 5241093 5241116 5241096 -
ttattagcaatcaatattgaaaac

SEQ ID NO: 65913 - DNA, 24 bp, Artificial Sequence
  Synthetic oligonucleotide; AGCAGATT chr11 5241066 5241089 5241069 -
tgatttttgtttatgtgagcaaac

SEQ ID NO: 65914 - DNA, 24 bp, Artificial Sequence
  Synthetic oligonucleotide; CTGAGATT chr11 5241052 5241075 5241055 -
gtgagcaaacagcagattaaaagg

SEQ ID NO: 65915 - DNA, 24 bp, Artificial Sequence
  Synthetic oligonucleotide; AATTGATT chr11 5240856 5240879 5240859 -
cataataaatagggaaacgtagaa

SEQ ID NO: 65916 - DNA, 24 bp, Artificial Sequence
  Synthetic oligonucleotide; AACTGATT chr11 5240827 5240850 5240830 -
attcacatgtatatatatatatag

SEQ ID NO: 65917 - DNA, 24 bp, Artificial Sequence
  Synthetic oligonucleotide; CAGTGATT chr11 5240693 5240716 5240696 -
aaatcgagtaagagaccattgtgg

SEQ ID NO: 65918 - DNA, 24 bp, Artificial Sequence
  Synthetic oligonucleotide; TTTGGATT chr11 5239755 5239778 5239758 -
aattaccccagtcaatctagagaa

SEQ ID NO: 65919 - DNA, 24 bp, Artificial Sequence
  Synthetic oligonucleotide; AAAAGATT chr11 5239412 5239435 5239415 -
ttccctagtatttggagatgaaaa

SEQ ID NO: 65920 - DNA, 24 bp, Artificial Sequence
  Synthetic oligonucleotide; GTTTGATT chr11 5239242 5239265 5239245 -
gttccttcctctgcctctgctata

SEQ ID NO: 65921 - DNA, 24 bp, Artificial Sequence
  Synthetic oligonucleotide; ACTGGATT chr11 5238904 5238927 5238907 -
accagagcccataaccagaggtcc

SEQ ID NO: 65922 - DNA, 24 bp, Artificial Sequence
  Synthetic oligonucleotide; CAGTGATT chr11 5238557 5238580 5238560 -
cagtaaatgaataattacagtgtg

SEQ ID NO: 65923 - DNA, 24 bp, Artificial Sequence
  Synthetic oligonucleotide; CAATGATT chr11 5238545 5238568 5238548 -
aattacagtgtgcagtgattattg

SEQ ID NO: 65924 - DNA, 24 bp, Artificial Sequence
  Synthetic oligonucleotide; CTGAGATT chr11 5238488 5238511 5238491 -
acacagaattcaaacagcagtgaa

SEQ ID NO: 65925 - DNA, 24 bp, Artificial Sequence
  Synthetic oligonucleotide; AAGCGATT chr11 5238228 5238251 5238231 -
ctgcaacatctgcctcccaggttc

SEQ ID NO: 65926 - DNA, 24 bp, Artificial Sequence
  Synthetic oligonucleotide; CGGGGATT chr11 5237761 5237784 5237764 -
atcgatactgagttctaaaatcat

SEQ ID NO: 65927 - DNA, 24 bp, Artificial Sequence
  Synthetic oligonucleotide; TTGAGATT chr11 5237724 5237747 5237727 -
gactatgtcttacttcatacttcc

SEQ ID NO: 65928 - DNA, 24 bp, Artificial Sequence
  Synthetic oligonucleotide; CTTGGATT chr11 5237657 5237680 5237660 -
atttaactttgtattcatcacact

SEQ ID NO: 65929 - DNA, 24 bp, Artificial Sequence
  Synthetic oligonucleotide; CTCTGATT chr11 5237598 5237621 5237601 -
agcctgtataatcccaattcccaa

SEQ ID NO: 65930 - DNA, 24 bp, Artificial Sequence
  Synthetic oligonucleotide; CACAGATT chr11 5237403 5237426 5237406 -
agctacttgcccattcaccaaggt

SEQ ID NO: 65931 - DNA, 24 bp, Artificial Sequence
  Synthetic oligonucleotide; GTTCGATT chr11 5237367 5237390 5237370 -
tcatttccctacctctaatcaaca

SEQ ID NO: 65932 - DNA, 24 bp, Artificial Sequence
  Synthetic oligonucleotide; CCTAGATT chr11 5237021 5237044 5237024 -
ccaggaggcagaggttgcggtgag

SEQ ID NO: 65933 - DNA, 24 bp, Artificial Sequence
  Synthetic oligonucleotide; CTAAGATT chr11 5236703 5236726 5236706 -
taattcctccctcacaaacacatt

SEQ ID NO: 65934 - DNA, 24 bp, Artificial Sequence
  Synthetic oligonucleotide; TAGTGATT chr11 5236644 5236667 5236647 -
tctgtcatttttaacaggtagtgg

SEQ ID NO: 65935 - DNA, 24 bp, Artificial Sequence
  Synthetic oligonucleotide; TTCTGATT chr11 5236483 5236506 5236486 -
aatacaatgtatccaagactgtat

SEQ ID NO: 65936 - DNA, 24 bp, Artificial Sequence
  Synthetic oligonucleotide; AGTTGATT chr11 5236007 5236030 5236010 -
ttgtatcgctacgtgttaagcagt

SEQ ID NO: 65937 - DNA, 24 bp, Artificial Sequence
  Synthetic oligonucleotide; TTATGATT chr11 5235903 5235926 5235906 -
taagtggctaccggtttgaggttt

SEQ ID NO: 65938 - DNA, 24 bp, Artificial Sequence
  Synthetic oligonucleotide; ATTTGATT chr11 5235139 5235162 5235142 -
acattcaaaatatttgtatataat

SEQ ID NO: 65939 - DNA, 24 bp, Artificial Sequence
  Synthetic oligonucleotide; AATAGATT chr11 5234939 5234962 5234942 -
aagcaagcaagtttaaactgcagc

SEQ ID NO: 65940 - DNA, 24 bp, Artificial Sequence
  Synthetic oligonucleotide; CTCAGATT chr11 5234219 5234242 5234222 -
tgtcccttgggctgttttcctacc

SEQ ID NO: 65941 - DNA, 24 bp, Artificial Sequence
  Synthetic oligonucleotide; ATTTGATT chr11 5233534 5233557 5233537 -
aatggaatggaaaggaaagtgaat

SEQ ID NO: 65942 - DNA, 24 bp, Artificial Sequence
  Synthetic oligonucleotide; CACTGATT chr11 5233460 5233483 5233463 -
ttgctaggagacagcccatcatca

SEQ ID NO: 65943 - DNA, 24 bp, Artificial Sequence
  Synthetic oligonucleotide; CTAAGATT chr11 5233198 5233221 5233201 -
gaataacctggggatcagttttgt

SEQ ID NO: 65944 - DNA, 24 bp, Artificial Sequence
  Synthetic oligonucleotide; CCTAGATT chr11 5232921 5232944 5232924 -
ataaccataagaagaccctatttc

SEQ ID NO: 65945 - DNA, 24 bp, Artificial Sequence
  Synthetic oligonucleotide; TCCTGATT chr11 5232836 5232859 5232839 -
taataaagaatgttcagctcaact

SEQ ID NO: 65946 - DNA, 24 bp, Artificial Sequence
  Synthetic oligonucleotide; CTACGATT chr11 5232573 5232596 5232576 -
taagacatagcctcaagggtaatg

SEQ ID NO: 65947 - DNA, 24 bp, Artificial Sequence
  Synthetic oligonucleotide; TAATGATT chr11 5232520 5232543 5232523 -
aaataatgtgctcaattaaaggca

SEQ ID NO: 65948 - DNA, 24 bp, Artificial Sequence
  Synthetic oligonucleotide; TCAAGATT chr11 5232345 5232368 5232348 -
tcctcttatcttcccatatttcag

SEQ ID NO: 65949 - DNA, 24 bp, Artificial Sequence
  Synthetic oligonucleotide; GAATGATT chr11 5232045 5232068 5232048 -
gaatgagtaaatgagtaaatgaag

SEQ ID NO: 65950 - DNA, 24 bp, Artificial Sequence
  Synthetic oligonucleotide; GAAGGATT chr11 5231848 5231871 5231851 -
ccatttttgccataggtaaaatta

SEQ ID NO: 65951 - DNA, 24 bp, Artificial Sequence
  Synthetic oligonucleotide; TGTTGATT chr11 5231790 5231813 5231793 -
ttttaaaaatctgtattatatgca

SEQ ID NO: 65952 - DNA, 24 bp, Artificial Sequence
  Synthetic oligonucleotide; GAGAGATT chr11 5231402 5231425 5231405 -
tgtgtggtattcgaaagacagtaa

SEQ ID NO: 65953 - DNA, 24 bp, Artificial Sequence
  Synthetic oligonucleotide; TCAAGATT chr11 5230807 5230830 5230810 -
aagtataggaatggaattaattcc

SEQ ID NO: 65954 - DNA, 24 bp, Artificial Sequence
  Synthetic oligonucleotide; CCAAGATT chr11 5230496 5230519 5230499 -
ttgtaaagggtgttcagactgaag

SEQ ID NO: 65955 - DNA, 24 bp, Artificial Sequence
  Synthetic oligonucleotide; GAGAGATT chr11 5230101 5230124 5230104 -
gagagctgctgagttgtgtttact

SEQ ID NO: 65956 - DNA, 24 bp, Artificial Sequence
  Synthetic oligonucleotide; AGTAGATT chr11 5230031 5230054 5230034 -
tgtgcttgacctaggaacatatac

SEQ ID NO: 65957 - DNA, 24 bp, Artificial Sequence
  Synthetic oligonucleotide; TCATGATT chr11 5229908 5229931 5229911 -
aaaccacactcccatagatgagtg

SEQ ID NO: 65958 - DNA, 24 bp, Artificial Sequence
  Synthetic oligonucleotide; GAAAGATT chr11 5229823 5229846 5229826 -
ctgatataaaacattaggacttaa

SEQ ID NO: 65959 - DNA, 24 bp, Artificial Sequence
  Synthetic oligonucleotide; TGCTGATT chr11 5229591 5229614 5229594 -
gaatagtttttcaggaactttgaa

SEQ ID NO: 65960 - DNA, 24 bp, Artificial Sequence
  Synthetic oligonucleotide; TTTAGATT chr11 5229585 5229608 5229588 -
tttttcaggaactttgaatgctga

SEQ ID NO: 65961 - DNA, 24 bp, Artificial Sequence
  Synthetic oligonucleotide; TCAGGATT chr11 5229219 5229242 5229222 -
taagaaggtgacaatttctgccaa

SEQ ID NO: 65962 - DNA, 24 bp, Artificial Sequence
  Synthetic oligonucleotide; CCAGGATT chr11 5228900 5228923 5228903 -
aaaatattttaaagacgtcttttc

SEQ ID NO: 65963 - DNA, 24 bp, Artificial Sequence
  Synthetic oligonucleotide; GTGAGATT chr11 5228687 5228710 5228690 -
tctgcgtgtgtgagaataatcaga

SEQ ID NO: 65964 - DNA, 24 bp, Artificial Sequence
  Synthetic oligonucleotide; GCAGGATT chr11 5228349 5228372 5228352 -
accgacatgggtttccaggtaggg

SEQ ID NO: 65965 - DNA, 24 bp, Artificial Sequence
  Synthetic oligonucleotide; AAATGATT chr11 5228056 5228079 5228059 -
gagaaataggaacttgaatcaagg

SEQ ID NO: 65966 - DNA, 24 bp, Artificial Sequence
  Synthetic oligonucleotide; TGCAGATT chr11 5227927 5227950 5227930 -
gctttttgttcccccagacactct

SEQ ID NO: 65967 - DNA, 24 bp, Artificial Sequence
  Synthetic oligonucleotide; CACTGATT chr11 5227869 5227892 5227872 -
cccagttaacctcctatttgacac

SEQ ID NO: 65968 - DNA, 24 bp, Artificial Sequence
  Synthetic oligonucleotide; CATTGATT chr11 5227731 5227754 5227734 -
aataagtaactaatgcacagagca

SEQ ID NO: 65969 - DNA, 24 bp, Artificial Sequence
  Synthetic oligonucleotide; CTGTGATT chr11 5227356 5227379 5227359 -
acgatcttcaatatgcttaccaag

SEQ ID NO: 65970 - DNA, 24 bp, Artificial Sequence
  Synthetic oligonucleotide; GAATGATT chr11 5226468 5226491 5226471 -
tacagtttagaatgggaaacagac

SEQ ID NO: 65971 - DNA, 24 bp, Artificial Sequence
  Synthetic oligonucleotide; GCTGGATT chr11 5225798 5225821 5225801 -
cttttattttatggttgggataag

SEQ ID NO: 65972 - DNA, 24 bp, Artificial Sequence
  Synthetic oligonucleotide; TCTGGATT chr11 5225505 5225528 5225508 -
ggatattatgaagggccttgagca

SEQ ID NO: 65973 - DNA, 24 bp, Artificial Sequence
  Synthetic oligonucleotide; AAAGGATT chr11 5225260 5225283 5225263 -
catatgccttattcatccctcaga

SEQ ID NO: 65974 - DNA, 24 bp, Artificial Sequence
  Synthetic oligonucleotide; GCTTGATT chr11 5225243 5225266 5225246 -
cctcagaaaaggattcaagtagag

SEQ ID NO: 65975 - DNA, 24 bp, Artificial Sequence
  Synthetic oligonucleotide; TTAAGATT chr11 5224725 5224748 5224728 -
aagtcccattcttcctcaggatgt

SEQ ID NO: 65976 - DNA, 24 bp, Artificial Sequence
  Synthetic oligonucleotide; GCTAGATT chr11 5224577 5224600 5224580 -
tattcaatacctaggtaggtagat

SEQ ID NO: 65977 - DNA, 24 bp, Artificial Sequence
  Synthetic oligonucleotide; GCAAGATT chr11 5224502 5224525 5224505 -
ccagtcaaattctgaatctagttg

SEQ ID NO: 65978 - DNA, 24 bp, Artificial Sequence
  Synthetic oligonucleotide; AGATGATT chr11 5224076 5224099 5224079 -
atatccaaaatatataagaaacac

SEQ ID NO: 65979 - DNA, 24 bp, Artificial Sequence
  Synthetic oligonucleotide; AGTAGATT chr11 5223713 5223736 5223716 -
agtatatttaaaatttgcaaagag

SEQ ID NO: 65980 - DNA, 24 bp, Artificial Sequence
  Synthetic oligonucleotide; CTGGGATT chr11 5223579 5223602 5223582 -
ctcctgcctcagcctcccgagtag

SEQ ID NO: 65981 - DNA, 24 bp, Artificial Sequence
  Synthetic oligonucleotide; CTGGGATT chr11 5223469 5223492 5223472 -
cgcctgcctcggccacccaaaggg

SEQ ID NO: 65982 - DNA, 24 bp, Artificial Sequence
  Synthetic oligonucleotide; GCTTGATT chr11 5223366 5223389 5223369 -
gtgagataatgggtatgttaatta

SEQ ID NO: 65983 - DNA, 24 bp, Artificial Sequence
  Synthetic oligonucleotide; TGATGATT chr11 5223195 5223218 5223198 -
actaaaaaataaaaaaatgcatct

SEQ ID NO: 65984 - DNA, 24 bp, Artificial Sequence
  Synthetic oligonucleotide; TCTTGATT chr11 5223177 5223200 5223180 -
gcatcttgatgattagaattgcat

SEQ ID NO: 65985 - DNA, 24 bp, Artificial Sequence
  Synthetic oligonucleotide; CCTAGATT chr11 5223030 5223053 5223033 -
tagatattttgtatagttttactc

SEQ ID NO: 65986 - DNA, 24 bp, Artificial Sequence
  Synthetic oligonucleotide; TTCTGATT chr11 5222916 5222939 5222919 -
tctctctaagtttattctattttt

SEQ ID NO: 65987 - DNA, 24 bp, Artificial Sequence
  Synthetic oligonucleotide; AATCGATT chr11 5222623 5222646 5222626 -
gaaatgcttaactgcatataccac

SEQ ID NO: 65988 - DNA, 24 bp, Artificial Sequence
  Synthetic oligonucleotide; CCAAGATT chr11 5222213 5222236 5222216 -
ctgggaggcagaggttgcagtgag

SEQ ID NO: 65989 - DNA, 24 bp, Artificial Sequence
  Synthetic oligonucleotide; GGGTGATT chr11 5222057 5222080 5222060 -
cccatcgtgagtgacgcagaagac

SEQ ID NO: 65990 - DNA, 24 bp, Artificial Sequence
  Synthetic oligonucleotide; AGGAGATT chr11 5221801 5221824 5221804 -
aacaagcttaacaaatggcacacc

SEQ ID NO: 65991 - DNA, 24 bp, Artificial Sequence
  Synthetic oligonucleotide; GTCAGATT chr11 5220448 5220471 5220451 -
aaagcaactccaagacacataact

SEQ ID NO: 65992 - DNA, 24 bp, Artificial Sequence
  Synthetic oligonucleotide; GAGAGATT chr11 5220194 5220217 5220197 -
atcctttacagacaagcaaatgct

SEQ ID NO: 65993 - DNA, 24 bp, Artificial Sequence
  Synthetic oligonucleotide; AACAGATT chr11 5219784 5219807 5219787 -
ggttgcaatcctagtctctgataa

SEQ ID NO: 65994 - DNA, 24 bp, Artificial Sequence
  Synthetic oligonucleotide; CCCAGATT chr11 5219663 5219686 5219666 -
atatatgcacccaatacaggagca

SEQ ID NO: 65995 - DNA, 24 bp, Artificial Sequence
  Synthetic oligonucleotide; TCAGGATT chr11 5219317 5219340 5219320 -
accacagtgcaatcaaactagaac

SEQ ID NO: 65996 - DNA, 24 bp, Artificial Sequence
  Synthetic oligonucleotide; GTAGGATT chr11 5218608 5218631 5218611 -
tcaaccaaaaaaagtccgggacca

SEQ ID NO: 65997 - DNA, 24 bp, Artificial Sequence
  Synthetic oligonucleotide; ATATGATT chr11 5218272 5218295 5218275 -
taaacagaaccaaagacacaaacc

SEQ ID NO: 65998 - DNA, 24 bp, Artificial Sequence
  Synthetic oligonucleotide; ACATGATT chr11 5217945 5217968 5217948 -
tgaaattgtccctgtttgcagatg

SEQ ID NO: 65999 - DNA, 24 bp, Artificial Sequence
  Synthetic oligonucleotide; TATAGATT chr11 5217586 5217609 5217589 -
atggtcatactgcccaaggtaatt

SEQ ID NO: 66000 - DNA, 24 bp, Artificial Sequence
  Synthetic oligonucleotide; AAAGGATT chr11 5217272 5217295 5217275 -
acctgagagaaacaagcaatgggg

SEQ ID NO: 66001 - DNA, 24 bp, Artificial Sequence
  Synthetic oligonucleotide; GATGGATT chr11 5217168 5217191 5217171 -
caccttatacaaaaattaattcaa

SEQ ID NO: 66002 - DNA, 24 bp, Artificial Sequence
  Synthetic oligonucleotide; AAAGGATT chr11 5216510 5216533 5216513 -
catcccattactgggtacataccc

SEQ ID NO: 66003 - DNA, 24 bp, Artificial Sequence
  Synthetic oligonucleotide; ACTGGATT chr11 5216400 5216423 5216403 -
aacccaaatgtccaacaacgatag

SEQ ID NO: 66004 - DNA, 24 bp, Artificial Sequence
  Synthetic oligonucleotide; ACTAGATT chr11 5215901 5215924 5215904 -
tctcagtcagttaacattccttca

SEQ ID NO: 66005 - DNA, 24 bp, Artificial Sequence
  Synthetic oligonucleotide; AAATGATT chr11 5215610 5215633 5215613 -
ctgggaggtcaagtcagaggtgaa

SEQ ID NO: 66006 - DNA, 24 bp, Artificial Sequence
  Synthetic oligonucleotide; CCAGGATT chr11 5215475 5215498 5215478 -
ctgaagtgataggatcacttgagc

SEQ ID NO: 66007 - DNA, 24 bp, Artificial Sequence
  Synthetic oligonucleotide; AGTGGATT chr11 5215267 5215290 5215270 -
gcagtgcctcggggctgtttctcc

SEQ ID NO: 66008 - DNA, 24 bp, Artificial Sequence
  Synthetic oligonucleotide; CTTGGATT chr11 5215187 5215210 5215190 -
aggtctcacctgtcttattcagag

SEQ ID NO: 66009 - DNA, 24 bp, Artificial Sequence
  Synthetic oligonucleotide; TTGGGATT chr11 5215157 5215180 5215160 -
ttttggactagctttttctatttc

SEQ ID NO: 66010 - DNA, 24 bp, Artificial Sequence
  Synthetic oligonucleotide; TTTAGATT chr11 5214940 5214963 5214943 -
cagtccaggaagttatccatttct

SEQ ID NO: 66011 - DNA, 24 bp, Artificial Sequence
  Synthetic oligonucleotide; TGATGATT chr11 5214894 5214917 5214897 -
catagagatgttcatagtagtttt

SEQ ID NO: 66012 - DNA, 24 bp, Artificial Sequence
  Synthetic oligonucleotide; GCTAGATT chr11 5214670 5214693 5214673 -
gatcttgtttatttcttgtcttct

SEQ ID NO: 66013 - DNA, 24 bp, Artificial Sequence
  Synthetic oligonucleotide; CAGAGATT chr11 5214529 5214552 5214532 -
cttaacactgtctaagctgtgtcc

SEQ ID NO: 66014 - DNA, 24 bp, Artificial Sequence
  Synthetic oligonucleotide; GAGTGATT chr11 5214347 5214370 5214350 -
tatttttattcctctgtggtctga

SEQ ID NO: 66015 - DNA, 24 bp, Artificial Sequence
  Synthetic oligonucleotide; ATATGATT chr11 5214338 5214361 5214341 -
tcctctgtggtctgagagtgattg

SEQ ID NO: 66016 - DNA, 24 bp, Artificial Sequence
  Synthetic oligonucleotide; TGAGGATT chr11 5214314 5214337 5214317 -
atatgattttttttttgcatttgc

SEQ ID NO: 66017 - DNA, 24 bp, Artificial Sequence
  Synthetic oligonucleotide; AAATGATT chr11 5214237 5214260 5214240 -
gaagagatccatgatgagctctga

SEQ ID NO: 66018 - DNA, 24 bp, Artificial Sequence
  Synthetic oligonucleotide; ATATGATT chr11 5214189 5214212 5214192 -
atcaaacaaaaaaagccctggaca

SEQ ID NO: 66019 - DNA, 24 bp, Artificial Sequence
  Synthetic oligonucleotide; GAGGGATT chr11 5214105 5214128 5214108 -
aagctactccaaaaaattgagggg

SEQ ID NO: 66020 - DNA, 24 bp, Artificial Sequence
  Synthetic oligonucleotide; GCAAGATT chr11 5213911 5213934 5213914 -
tcaagtaggctttatccctgagaa

SEQ ID NO: 66021 - DNA, 24 bp, Artificial Sequence
  Synthetic oligonucleotide; ATGTGATT chr11 5213879 5213902 5213882 -
ggttcagcatatacaaattgataa

SEQ ID NO: 66022 - DNA, 24 bp, Artificial Sequence
  Synthetic oligonucleotide; AAAAGATT chr11 5213815 5213838 5213818 -
catgatcatttcaatatgtgcaaa

SEQ ID NO: 66023 - DNA, 24 bp, Artificial Sequence
  Synthetic oligonucleotide; ATGAGATT chr11 5213294 5213317 5213297 -
ccaagcagttgaaagatctctaca

SEQ ID NO: 66024 - DNA, 24 bp, Artificial Sequence
  Synthetic oligonucleotide; AGAAGATT chr11 5212578 5212601 5212581 -
tgggataactgactaaccgtatgt

SEQ ID NO: 66025 - DNA, 24 bp, Artificial Sequence
  Synthetic oligonucleotide; GATGGATT chr11 5212527 5212550 5212530 -
tatcatatacacaaataaactcaa

SEQ ID NO: 66026 - DNA, 24 bp, Artificial Sequence
  Synthetic oligonucleotide; CAAAGATT chr11 5212440 5212463 5212443 -
taccattccggacataagcagggg

SEQ ID NO: 66027 - DNA, 24 bp, Artificial Sequence
  Synthetic oligonucleotide; TAATGATT chr11 5211285 5211308 5211288 -
tttatgcgcattatgaaagtaatt

SEQ ID NO: 66028 - DNA, 24 bp, Artificial Sequence
  Synthetic oligonucleotide; ATTTGATT chr11 5211260 5211283 5211263 -
aatgattctctgtccttctttgta

SEQ ID NO: 66029 - DNA, 24 bp, Artificial Sequence
  Synthetic oligonucleotide; CTGTGATT chr11 5210805 5210828 5210808 -
aaatcgttctccctccggcctcgg

SEQ ID NO: 66030 - DNA, 24 bp, Artificial Sequence
  Synthetic oligonucleotide; ACGAGATT chr11 5210688 5210711 5210691 -
tgaaaactaattcaaaaggtacta

SEQ ID NO: 66031 - DNA, 24 bp, Artificial Sequence
  Synthetic oligonucleotide; GGCAGATT chr11 5210497 5210520 5210500 -
aacagagggcattaggtcagactt

SEQ ID NO: 66032 - DNA, 24 bp, Artificial Sequence
  Synthetic oligonucleotide; GCAGGATT chr11 5210439 5210462 5210442 -
ccatccacttgctcattctggatg

SEQ ID NO: 66033 - DNA, 24 bp, Artificial Sequence
  Synthetic oligonucleotide; GTTGGATT chr11 5210325 5210348 5210328 -
gtacatttagtggggtgtgggact

SEQ ID NO: 66034 - DNA, 24 bp, Artificial Sequence
  Synthetic oligonucleotide; CTAAGATT chr11 5209041 5209064 5209044 -
ctactcagctagtaagtagctgag

SEQ ID NO: 66035 - DNA, 24 bp, Artificial Sequence
  Synthetic oligonucleotide; CTCAGATT chr11 5208771 5208794 5208774 -
cttccaaacttgatgaatggttca

SEQ ID NO: 66036 - DNA, 24 bp, Artificial Sequence
  Synthetic oligonucleotide; CCAAGATT chr11 5208531 5208554 5208534 -
ttatatacctaagaaatgacaaaa

SEQ ID NO: 66037 - DNA, 24 bp, Artificial Sequence
  Synthetic oligonucleotide; ATATGATT chr11 5208002 5208025 5208005 -
ccacagtcagcttctcaaagacaa

SEQ ID NO: 66038 - DNA, 24 bp, Artificial Sequence
  Synthetic oligonucleotide; GAAGGATT chr11 5207848 5207871 5207851 -
gaaaaaaaacgatacaaagggtat

SEQ ID NO: 66039 - DNA, 24 bp, Artificial Sequence
  Synthetic oligonucleotide; TTCTGATT chr11 5207761 5207784 5207764 -
gccccattctaggacaatggttcc

SEQ ID NO: 66040 - DNA, 24 bp, Artificial Sequence
  Synthetic oligonucleotide; ACCTGATT chr11 5207715 5207738 5207718 -
gtctgagagacatgcctggctcac

SEQ ID NO: 66041 - DNA, 24 bp, Artificial Sequence
  Synthetic oligonucleotide; CACAGATT chr11 5207607 5207630 5207610 -
cacctctagagaattctaaaaatc

SEQ ID NO: 66042 - DNA, 24 bp, Artificial Sequence
  Synthetic oligonucleotide; CACTGATT chr11 5207379 5207402 5207382 -
agaaagcaaagtggtcatgttagt

SEQ ID NO: 66043 - DNA, 24 bp, Artificial Sequence
  Synthetic oligonucleotide; AGGAGATT chr11 5206991 5207014 5206994 -
ggacttgggtctctccggttgtat

SEQ ID NO: 66044 - DNA, 24 bp, Artificial Sequence
  Synthetic oligonucleotide; TGGTGATT chr11 5206515 5206538 5206518 -
agaaagtgagagatgttctggaga

SEQ ID NO: 66045 - DNA, 24 bp, Artificial Sequence
  Synthetic oligonucleotide; ACTCGATT chr11 5206431 5206454 5206434 -
gagtctagcagcctaggtatgggt

SEQ ID NO: 66046 - DNA, 24 bp, Artificial Sequence
  Synthetic oligonucleotide; AGTTGATT chr11 5206259 5206282 5206262 -
tatttaaggatgaattttttaaaa

SEQ ID NO: 66047 - DNA, 24 bp, Artificial Sequence
  Synthetic oligonucleotide; AGGTGATT chr11 5206034 5206057 5206037 -
gttctcaccacaaaaaaagttgga

SEQ ID NO: 66048 - DNA, 24 bp, Artificial Sequence
  Synthetic oligonucleotide; AGATGATT chr11 5205694 5205717 5205697 -
aaaacaaatacactatcttgcatg

SEQ ID NO: 66049 - DNA, 24 bp, Artificial Sequence
  Synthetic oligonucleotide; AATAGATT chr11 5205167 5205190 5205170 -
taagcctacttcaggtttgtggta

SEQ ID NO: 66050 - DNA, 24 bp, Artificial Sequence
  Synthetic oligonucleotide; AAGAGATT chr11 5204669 5204692 5204672 -
aaagacagaaaaaaaaaaaaaacc

SEQ ID NO: 66051 - DNA, 24 bp, Artificial Sequence
  Synthetic oligonucleotide; CACAGATT chr11 5204587 5204610 5204590 -
aaagaatgacctggttattataat

SEQ ID NO: 66052 - DNA, 24 bp, Artificial Sequence
  Synthetic oligonucleotide; AGTAGATT chr11 5204110 5204133 5204113 -
ctagtctgaagaagcctgaatgaa

SEQ ID NO: 66053 - DNA, 24 bp, Artificial Sequence
  Synthetic oligonucleotide; AATAGATT chr11 5204044 5204067 5204047 -
tcagtctgaagaaacctgcatgaa

SEQ ID NO: 66054 - DNA, 24 bp, Artificial Sequence
  Synthetic oligonucleotide; CTGGGATT chr11 5203910 5203933 5203913 -
ctcctgcctcagtctcccaagtaa

SEQ ID NO: 66055 - DNA, 24 bp, Artificial Sequence
  Synthetic oligonucleotide; CTAGGATT chr11 5203773 5203796 5203776 -
cacctgcctcggcctcccaaagtg

SEQ ID NO: 66056 - DNA, 24 bp, Artificial Sequence
  Synthetic oligonucleotide; AGATGATT chr11 5203498 5203521 5203501 -
ggtcagaaaagactaagtgtacac

SEQ ID NO: 66057 - DNA, 24 bp, Artificial Sequence
  Synthetic oligonucleotide; CTGTGATT chr11 5203441 5203464 5203444 -
cacattcatattatctttatatct

SEQ ID NO: 66058 - DNA, 24 bp, Artificial Sequence
  Synthetic oligonucleotide; GTGTGATT chr11 5202862 5202885 5202865 -
aaagagttttttcaacaaaggttt

SEQ ID NO: 66059 - DNA, 24 bp, Artificial Sequence
  Synthetic oligonucleotide; GAAAGATT chr11 5202629 5202652 5202632 -
ctggtagaaatggtagaaattgat

SEQ ID NO: 66060 - DNA, 24 bp, Artificial Sequence
  Synthetic oligonucleotide; AATAGATT chr11 5202497 5202520 5202500 -
aatattaggagaaaagggacagaa

SEQ ID NO: 66061 - DNA, 24 bp, Artificial Sequence
  Synthetic oligonucleotide; TTAAGATT chr11 5202448 5202471 5202451 -
tactttattggcatcattcttatt

SEQ ID NO: 66062 - DNA, 24 bp, Artificial Sequence
  Synthetic oligonucleotide; AAGTGATT chr11 5202144 5202167 5202147 -
atttgtcttaagaaacttcttgaa

SEQ ID NO: 66063 - DNA, 24 bp, Artificial Sequence
  Synthetic oligonucleotide; ATTCGATT chr11 5202028 5202051 5202031 -
gaaaaattttacgaaagaagagaa

SEQ ID NO: 66064 - DNA, 24 bp, Artificial Sequence
  Synthetic oligonucleotide; TGATGATT chr11 5201652 5201675 5201655 -
ttattagagctttaaaaaaactta

SEQ ID NO: 66065 - DNA, 24 bp, Artificial Sequence
  Synthetic oligonucleotide; AATTGATT chr11 5201598 5201621 5201601 -
ggcaaacaatgtaaagaagaagcc

SEQ ID NO: 66066 - DNA, 24 bp, Artificial Sequence
  Synthetic oligonucleotide; CAAAGATT chr11 5201109 5201132 5201112 -
aatagacttatgatatttaaagcc

SEQ ID NO: 66067 - DNA, 24 bp, Artificial Sequence
  Synthetic oligonucleotide; GAATGATT chr11 5200685 5200708 5200688 -
actctcacatgtttctcagttcca

SEQ ID NO: 66068 - DNA, 24 bp, Artificial Sequence
  Synthetic oligonucleotide; ACTGGATT chr11 5200632 5200655 5200635 -
agcacgaattcttcctttcttctc

SEQ ID NO: 66069 - DNA, 24 bp, Artificial Sequence
  Synthetic oligonucleotide; CTTGGATT chr11 5200396 5200419 5200399 -
gtgggggatcattcgagagatcag

SEQ ID NO: 66070 - DNA, 24 bp, Artificial Sequence
  Synthetic oligonucleotide; ATCCGATT chr11 5200101 5200124 5200104 -
cttctccgcttagcctgttcagac

SEQ ID NO: 66071 - DNA, 24 bp, Artificial Sequence
  Synthetic oligonucleotide; TCCTGATT chr11 5200019 5200042 5200022 -
ctatactcatccttttctcctaca

SEQ ID NO: 66072 - DNA, 24 bp, Artificial Sequence
  Synthetic oligonucleotide; AACAGATT chr11 5199785 5199808 5199788 -
ccatcatctacagtgtcaagaccc

SEQ ID NO: 66073 - DNA, 24 bp, Artificial Sequence
  Synthetic oligonucleotide; TGTAGATT chr11 5199640 5199663 5199643 -
taaaaaagaaaaaattattaaaat

SEQ ID NO: 66074 - DNA, 24 bp, Artificial Sequence
  Synthetic oligonucleotide; GCTGGATT chr11 5199442 5199465 5199445 -
gcatttcctttgctgtaaaacaaa

SEQ ID NO: 66075 - DNA, 24 bp, Artificial Sequence
  Synthetic oligonucleotide; TTTGGATT chr11 5199047 5199070 5199050 -
aaagaggacacaaagaaatatgac

SEQ ID NO: 66076 - DNA, 24 bp, Artificial Sequence
  Synthetic oligonucleotide; TTTAGATT chr11 5198999 5199022 5199002 -
taatttaaattagaatccttattt

SEQ ID NO: 66077 - DNA, 24 bp, Artificial Sequence
  Synthetic oligonucleotide; AGCAGATT chr11 5198959 5198982 5198962 -
ggactccactgctacaaggctgga

SEQ ID NO: 66078 - DNA, 24 bp, Artificial Sequence
  Synthetic oligonucleotide; ACCAGATT chr11 5198612 5198635 5198615 -
tatttttagatatcaactaaaaca

SEQ ID NO: 66079 - DNA, 24 bp, Artificial Sequence
  Synthetic oligonucleotide; ACAAGATT chr11 5197849 5197872 5197852 -
gccgactggaatgtggccaatctg

SEQ ID NO: 66080 - DNA, 24 bp, Artificial Sequence
  Synthetic oligonucleotide; CATAGATT chr11 5197773 5197796 5197776 -
tctgtagaggtcatgtgaatgtct

SEQ ID NO: 66081 - DNA, 24 bp, Artificial Sequence
  Synthetic oligonucleotide; TTCAGATT chr11 5197481 5197504 5197484 -
acttcatactatgagtgtttgtgc

SEQ ID NO: 66082 - DNA, 24 bp, Artificial Sequence
  Synthetic oligonucleotide; ATAAGATT chr11 5197344 5197367 5197347 -
gagctatataattgtactatgatg

SEQ ID NO: 66083 - DNA, 24 bp, Artificial Sequence
  Synthetic oligonucleotide; ATATGATT chr11 5197249 5197272 5197252 -
aaaaagccaatgaaagtaaacttt

SEQ ID NO: 66084 - DNA, 24 bp, Artificial Sequence
  Synthetic oligonucleotide; TTTAGATT chr11 5197198 5197221 5197201 -
gaaacaggtttagaacattagtag

SEQ ID NO: 66085 - DNA, 24 bp, Artificial Sequence
  Synthetic oligonucleotide; ATCAGATT chr11 5196889 5196912 5196892 -
ctgcagagccagtgagaagcagtt

SEQ ID NO: 66086 - DNA, 24 bp, Artificial Sequence
  Synthetic oligonucleotide; GTAAGATT chr11 5196673 5196696 5196676 -
attgccgagaacaaggtgacaaaa

SEQ ID NO: 66087 - DNA, 24 bp, Artificial Sequence
  Synthetic oligonucleotide; CAGTGATT chr11 5196584 5196607 5196587 -
aagctaaggtccagtgggagaaat

SEQ ID NO: 66088 - DNA, 24 bp, Artificial Sequence
  Synthetic oligonucleotide; ACATGATT chr11 5196561 5196584 5196564 -
tcagtgattcttagaagtgagagg

SEQ ID NO: 66089 - DNA, 24 bp, Artificial Sequence
  Synthetic oligonucleotide; TCAGGATT chr11 5196554 5196577 5196557 -
ttcttagaagtgagaggacatgat

SEQ ID NO: 66090 - DNA, 24 bp, Artificial Sequence
  Synthetic oligonucleotide; ATTAGATT chr11 5196376 5196399 5196379 -
ctgttccacctcagagcattaggc

SEQ ID NO: 66091 - DNA, 24 bp, Artificial Sequence
  Synthetic oligonucleotide; ATATGATT chr11 5195518 5195541 5195521 -
aaattgataagtatatacatttaa

SEQ ID NO: 66092 - DNA, 24 bp, Artificial Sequence
  Synthetic oligonucleotide; AAATGATT chr11 5195292 5195315 5195295 -
actcatttctctttagttctggca

SEQ ID NO: 66093 - DNA, 24 bp, Artificial Sequence
  Synthetic oligonucleotide; GAGAGATT chr11 5195195 5195218 5195198 -
gactaaggtgtaatatatgaaaca

SEQ ID NO: 66094 - DNA, 24 bp, Artificial Sequence
  Synthetic oligonucleotide; ACTGGATT chr11 5195106 5195129 5195109 -
atattggcatttgagtattcgctt

SEQ ID NO: 66095 - DNA, 24 bp, Artificial Sequence
  Synthetic oligonucleotide; TGATGATT chr11 5194714 5194737 5194717 -
gtccttgcgatagtttactgagaa

SEQ ID NO: 66096 - DNA, 24 bp, Artificial Sequence
  Synthetic oligonucleotide; AAAGGATT chr11 5194279 5194302 5194282 -
cttggagaacttttgtgtctagct

SEQ ID NO: 66097 - DNA, 24 bp, Artificial Sequence
  Synthetic oligonucleotide; CAAAGATT chr11 5193624 5193647 5193627 -
caattccggacacagaaggatgga

SEQ ID NO: 66098 - DNA, 24 bp, Artificial Sequence
  Synthetic oligonucleotide; AGTAGATT chr11 5193345 5193368 5193348 -
aagtagccaataagggggacagga

SEQ ID NO: 66099 - DNA, 24 bp, Artificial Sequence
  Synthetic oligonucleotide; TATAGATT chr11 5192921 5192944 5192924 -
acagacactttaccaaagaagata

SEQ ID NO: 66100 - DNA, 24 bp, Artificial Sequence
  Synthetic oligonucleotide; TTCTGATT chr11 5192326 5192349 5192329 -
cctatagtctttcatatccttctg

SEQ ID NO: 66101 - DNA, 24 bp, Artificial Sequence
  Synthetic oligonucleotide; AATAGATT chr11 5192217 5192240 5192220 -
tcagacagctattgcatagaatga

SEQ ID NO: 66102 - DNA, 24 bp, Artificial Sequence
  Synthetic oligonucleotide; TTATGATT chr11 5192188 5192211 5192191 -
attaatatttaataacaggtaatg

SEQ ID NO: 66103 - DNA, 24 bp, Artificial Sequence
  Synthetic oligonucleotide; AAAAGATT chr11 5192158 5192181 5192161 -
tttattaaaaataagatgataaat

SEQ ID NO: 66104 - DNA, 24 bp, Artificial Sequence
  Synthetic oligonucleotide; AAATGATT chr11 5192077 5192100 5192080 -
tttggacatgagtaaagaggagta

SEQ ID NO: 66105 - DNA, 24 bp, Artificial Sequence
  Synthetic oligonucleotide; CCATGATT chr11 5191655 5191678 5191658 -
aaatcgctgatgagaactctgcca

SEQ ID NO: 66106 - DNA, 24 bp, Artificial Sequence
  Synthetic oligonucleotide; TGGTGATT chr11 5191614 5191637 5191617 -
cccacaaggccccacctccaacgc

SEQ ID NO: 66107 - DNA, 24 bp, Artificial Sequence
  Synthetic oligonucleotide; CCATGATT chr11 5190994 5191017 5190997 -
actttgctcctccttcaccttcca

SEQ ID NO: 66108 - DNA, 24 bp, Artificial Sequence
  Synthetic oligonucleotide; AAGAGATT chr11 5190739 5190762 5190742 -
agtttagcccctgctgctgctctt

SEQ ID NO: 66109 - DNA, 24 bp, Artificial Sequence
  Synthetic oligonucleotide; CCCAGATT chr11 5190436 5190459 5190439 -
tcaactttttgacctttgcacact

SEQ ID NO: 66110 - DNA, 24 bp, Artificial Sequence
  Synthetic oligonucleotide; TTCTGATT chr11 5190019 5190042 5190022 -
ctctgcttcccttttaaatataag

SEQ ID NO: 66111 - DNA, 24 bp, Artificial Sequence
  Synthetic oligonucleotide; CACAGATT chr11 5189884 5189907 5189887 -
ataatattatcaacttcgaatttc

SEQ ID NO: 66112 - DNA, 24 bp, Artificial Sequence
  Synthetic oligonucleotide; CAGAGATT chr11 5189503 5189526 5189506 -
tgagactgggtaaatggtgaagaa

SEQ ID NO: 66113 - DNA, 24 bp, Artificial Sequence
  Synthetic oligonucleotide; TGGGGATT chr11 5189218 5189241 5189221 -
cccaccaggccccatcttcaacac

SEQ ID NO: 66114 - DNA, 24 bp, Artificial Sequence
  Synthetic oligonucleotide; ATGAGATT chr11 5189200 5189223 5189203 -
caacactggggattacagctgaac

SEQ ID NO: 66115 - DNA, 24 bp, Artificial Sequence
  Synthetic oligonucleotide; TTGTGATT chr11 5189148 5189171 5189151 -
aaccatatcaggcatgcattactc

SEQ ID NO: 66116 - DNA, 24 bp, Artificial Sequence
  Synthetic oligonucleotide; TATTGATT chr11 5188753 5188776 5188756 -
gaaaaagctacaagactctgcaaa

SEQ ID NO: 66117 - DNA, 24 bp, Artificial Sequence
  Synthetic oligonucleotide; CTTGGATT chr11 5188346 5188369 5188349 -
gaaaggatcatctggaattctttt

SEQ ID NO: 66118 - DNA, 24 bp, Artificial Sequence
  Synthetic oligonucleotide; ATATGATT chr11 5187898 5187921 5187901 -
ggtatattagataatcatatagat

SEQ ID NO: 66119 - DNA, 24 bp, Artificial Sequence
  Synthetic oligonucleotide; CCGAGATT chr11 5187878 5187901 5187881 -
agatatatgattattaagggcata

SEQ ID NO: 66120 - DNA, 24 bp, Artificial Sequence
  Synthetic oligonucleotide; CCCAGATT chr11 5187557 5187580 5187560 -
aaaaattcttcaagttttagagtc

SEQ ID NO: 66121 - DNA, 24 bp, Artificial Sequence
  Synthetic oligonucleotide; CTTGGATT chr11 5187512 5187535 5187515 -
ataagttatcagcagagtatacct

SEQ ID NO: 66122 - DNA, 24 bp, Artificial Sequence
  Synthetic oligonucleotide; CTTTGATT chr11 5187397 5187420 5187400 -
ctccatctctttttctataatatc

SEQ ID NO: 66123 - DNA, 24 bp, Artificial Sequence
  Synthetic oligonucleotide; GACTGATT chr11 5187159 5187182 5187162 -
cagtgagaactaagatgcctagat

SEQ ID NO: 66124 - DNA, 24 bp, Artificial Sequence
  Synthetic oligonucleotide; TAGGGATT chr11 5187016 5187039 5187019 -
actactataggtgaaaaaagcttc

SEQ ID NO: 66125 - DNA, 24 bp, Artificial Sequence
  Synthetic oligonucleotide; TTCAGATT chr11 5186786 5186809 5186789 -
gtagctaatataatttcttggccc

SEQ ID NO: 66126 - DNA, 24 bp, Artificial Sequence
  Synthetic oligonucleotide; TCCAGATT chr11 5186365 5186388 5186368 -
tgctttaaaagaagtataaatagt

SEQ ID NO: 66127 - DNA, 24 bp, Artificial Sequence
  Synthetic oligonucleotide; TCAGGATT chr11 5186307 5186330 5186310 -
ctcctctcaacctgctaaatatct

SEQ ID NO: 66128 - DNA, 24 bp, Artificial Sequence
  Synthetic oligonucleotide; CCTTGATT chr11 5186170 5186193 5186173 -
gataacttaatcatctaacatttt

SEQ ID NO: 66129 - DNA, 24 bp, Artificial Sequence
  Synthetic oligonucleotide; AGTTGATT chr11 5186126 5186149 5186129 -
aatactagacttggctttagctgg

SEQ ID NO: 66130 - DNA, 24 bp, Artificial Sequence
  Synthetic oligonucleotide; TGCAGATT chr11 5186011 5186034 5186014 -
aaataatgctcattttctttgata

SEQ ID NO: 66131 - DNA, 24 bp, Artificial Sequence
  Synthetic oligonucleotide; CAAAGATT chr11 5185992 5186015 5185995 -
tgatatgcagatttgaatgttgta

SEQ ID NO: 66132 - DNA, 24 bp, Artificial Sequence
  Synthetic oligonucleotide; CACAGATT chr11 5185858 5185881 5185861 -
ttactcatcaggtaatagtctagg

SEQ ID NO: 66133 - DNA, 24 bp, Artificial Sequence
  Synthetic oligonucleotide; TGAAGATT chr11 5185694 5185717 5185697 -
taaaagtaaatgacagatacaggg

SEQ ID NO: 66134 - DNA, 24 bp, Artificial Sequence
  Synthetic oligonucleotide; ATAAGATT chr11 5185331 5185354 5185334 -
cgtgtccagggtcatagagtcaga

SEQ ID NO: 66135 - DNA, 24 bp, Artificial Sequence
  Synthetic oligonucleotide; TCATGATT chr11 5185238 5185261 5185241 -
actatctttgctccgtggatacat

SEQ ID NO: 66136 - DNA, 24 bp, Artificial Sequence
  Synthetic oligonucleotide; CTTAGATT chr11 5185014 5185037 5185017 -
cttcattcctgtatttttttttca

SEQ ID NO: 66137 - DNA, 24 bp, Artificial Sequence
  Synthetic oligonucleotide; AAGAGATT chr11 5184039 5184062 5184042 -
ttcagagcctattatttgtctatt

SEQ ID NO: 66138 - DNA, 24 bp, Artificial Sequence
  Synthetic oligonucleotide; ACTAGATT chr11 5183972 5183995 5183975 -
gtgtcgaggaatttatccatttct

SEQ ID NO: 66139 - DNA, 24 bp, Artificial Sequence
  Synthetic oligonucleotide; GTGGGATT chr11 5183906 5183929 5183909 -
tctctgatggtagtttgtatgtct

SEQ ID NO: 66140 - DNA, 24 bp, Artificial Sequence
  Synthetic oligonucleotide; CCTGGATT chr11 5183781 5183804 5183784 -
gttgatcttttcaaaaaaccagct

SEQ ID NO: 66141 - DNA, 24 bp, Artificial Sequence
  Synthetic oligonucleotide; CATTGATT chr11 5183773 5183796 5183776 -
tttcaaaaaaccagctcctggatt

SEQ ID NO: 66142 - DNA, 24 bp, Artificial Sequence
  Synthetic oligonucleotide; CAGAGATT chr11 5183555 5183578 5183558 -
ctacacactgctttaaatgtgtcc

SEQ ID NO: 66143 - DNA, 24 bp, Artificial Sequence
  Synthetic oligonucleotide; GTTTGATT chr11 5183395 5183418 5183398 -
tgagtttcttaatcctgagttcta

SEQ ID NO: 66144 - DNA, 24 bp, Artificial Sequence
  Synthetic oligonucleotide; TATTGATT chr11 5183261 5183284 5183264 -
tggtgctgagaagaatgtatattc

SEQ ID NO: 66145 - DNA, 24 bp, Artificial Sequence
  Synthetic oligonucleotide; CTAAGATT chr11 5182926 5182949 5182929 -
gtttaaagtctgttttatcagaga

SEQ ID NO: 66146 - DNA, 24 bp, Artificial Sequence
  Synthetic oligonucleotide; ATGAGATT chr11 5182833 5182856 5182836 -
ttgagcctatgtgtgtctctccac

SEQ ID NO: 66147 - DNA, 24 bp, Artificial Sequence
  Synthetic oligonucleotide; GATGGATT chr11 5182449 5182472 5182452 -
ccaaccaaaaaaagtccaggacca

SEQ ID NO: 66148 - DNA, 24 bp, Artificial Sequence
  Synthetic oligonucleotide; ACATGATT chr11 5182088 5182111 5182091 -
taaacagaaccaaagacacaaacc

SEQ ID NO: 66149 - DNA, 24 bp, Artificial Sequence
  Synthetic oligonucleotide; ACGTGATT chr11 5181761 5181784 5181764 -
tgaaattgtccctgtttgcagatg

SEQ ID NO: 66150 - DNA, 24 bp, Artificial Sequence
  Synthetic oligonucleotide; TATAGATT chr11 5181402 5181425 5181405 -
atggccttactgcccaaggtaatt

SEQ ID NO: 66151 - DNA, 24 bp, Artificial Sequence
  Synthetic oligonucleotide; AAAGGATT chr11 5181089 5181112 5181092 -
acctgacaaaaacaagcaatgggg

SEQ ID NO: 66152 - DNA, 24 bp, Artificial Sequence
  Synthetic oligonucleotide; GATGGATT chr11 5180985 5181008 5180988 -
caccttatacaaaaattatttcaa

SEQ ID NO: 66153 - DNA, 24 bp, Artificial Sequence
  Synthetic oligonucleotide; ACTGGATT chr11 5180217 5180240 5180220 -
aacccaaatgtccaacaatgatag

SEQ ID NO: 66154 - DNA, 24 bp, Artificial Sequence
  Synthetic oligonucleotide; AAGCGATT chr11 5179642 5179665 5179645 -
ctgaaacttctgcctcccaggttc

SEQ ID NO: 66155 - DNA, 24 bp, Artificial Sequence
  Synthetic oligonucleotide; CTGGGATT chr11 5179610 5179633 5179613 -
ctcctgcctcagcctcttgagtag

SEQ ID NO: 66156 - DNA, 24 bp, Artificial Sequence
  Synthetic oligonucleotide; CTGGGATT chr11 5179477 5179500 5179480 -
tacccgcctcagcctctcaaagtg

SEQ ID NO: 66157 - DNA, 24 bp, Artificial Sequence
  Synthetic oligonucleotide; TATAGATT chr11 5179439 5179462 5179442 -
gtgagccaccgtgccaggctggca

SEQ ID NO: 66158 - DNA, 24 bp, Artificial Sequence
  Synthetic oligonucleotide; AATAGATT chr11 5179362 5179385 5179365 -
atgttttatcctatatttttgaga

SEQ ID NO: 66159 - DNA, 24 bp, Artificial Sequence
  Synthetic oligonucleotide; TTCAGATT chr11 5179077 5179100 5179080 -
tggatggtagtaaagatcaaagct

SEQ ID NO: 66160 - DNA, 24 bp, Artificial Sequence
  Synthetic oligonucleotide; TGAAGATT chr11 5178940 5178963 5178943 -
aaagggcttttcaataggttattg

SEQ ID NO: 66161 - DNA, 24 bp, Artificial Sequence
  Synthetic oligonucleotide; GGAAGATT chr11 5178232 5178255 5178235 -
ccattttaacctcatcagccgtca

SEQ ID NO: 66162 - DNA, 24 bp, Artificial Sequence
  Synthetic oligonucleotide; GCCAGATT chr11 5178110 5178133 5178113 -
cctcattcctactgtgagcacatt

SEQ ID NO: 66163 - DNA, 24 bp, Artificial Sequence
  Synthetic oligonucleotide; GAGTGATT chr11 5177755 5177778 5177758 -
tgaagaccaaacaaattaaagatc

SEQ ID NO: 66164 - DNA, 24 bp, Artificial Sequence
  Synthetic oligonucleotide; TTAAGATT chr11 5177718 5177741 5177721 -
tttctctcctatcagtgtatgctg

SEQ ID NO: 66165 - DNA, 24 bp, Artificial Sequence
  Synthetic oligonucleotide; TCCAGATT chr11 5177469 5177492 5177472 -
agagaaatatattttagggtttaa

SEQ ID NO: 66166 - DNA, 24 bp, Artificial Sequence
  Synthetic oligonucleotide; ATGAGATT chr11 5177148 5177171 5177151 -
ataaccaatattaaattaacaaat

SEQ ID NO: 66167 - DNA, 24 bp, Artificial Sequence
  Synthetic oligonucleotide; TGGAGATT chr11 5177099 5177122 5177102 -
tctgatacacatttccccctatag

SEQ ID NO: 66168 - DNA, 24 bp, Artificial Sequence
  Synthetic oligonucleotide; AAATGATT chr11 5177032 5177055 5177035 -
aacagaaacatcactgaagaagta

SEQ ID NO: 66169 - DNA, 24 bp, Artificial Sequence
  Synthetic oligonucleotide; AGAAGATT chr11 5176963 5176986 5176966 -
aataaacattttttaaaaagctag

SEQ ID NO: 66170 - DNA, 24 bp, Artificial Sequence
  Synthetic oligonucleotide; CTGTGATT chr11 5176678 5176701 5176681 -
tgcttggcttatgcttagcttttt

SEQ ID NO: 66171 - DNA, 24 bp, Artificial Sequence
  Synthetic oligonucleotide; CTTAGATT chr11 5176642 5176665 5176645 -
tagaaatttatacatgtattaaca

SEQ ID NO: 66172 - DNA, 24 bp, Artificial Sequence
  Synthetic oligonucleotide; GATAGATT chr11 5176216 5176239 5176219 -
aatatgatggaaaatgagggaata

SEQ ID NO: 66173 - DNA, 24 bp, Artificial Sequence
  Synthetic oligonucleotide; AGAGGATT chr11 5176195 5176218 5176198 -
atagatagattgcagtatgatgac

SEQ ID NO: 66174 - DNA, 24 bp, Artificial Sequence
  Synthetic oligonucleotide; GGAAGATT chr11 5176174 5176197 5176177 -
gacagaggatttgactgaaaggta

SEQ ID NO: 66175 - DNA, 24 bp, Artificial Sequence
  Synthetic oligonucleotide; ACTTGATT chr11 5176160 5176183 5176163 -
ctgaaaggtaggaagattttgtat

SEQ ID NO: 66176 - DNA, 24 bp, Artificial Sequence
  Synthetic oligonucleotide; AAATGATT chr11 5175996 5176019 5175999 -
tgacagttaaaatggtagaagtaa

SEQ ID NO: 66177 - DNA, 24 bp, Artificial Sequence
  Synthetic oligonucleotide; CTCAGATT chr11 5175952 5175975 5175955 -
tctaaataaactttcagttgagca

SEQ ID NO: 66178 - DNA, 24 bp, Artificial Sequence
  Synthetic oligonucleotide; AAAGGATT chr11 5175941 5175964 5175944 -
tttcagttgagcactcagattctg

SEQ ID NO: 66179 - DNA, 24 bp, Artificial Sequence
  Synthetic oligonucleotide; AAGTGATT chr11 5175569 5175592 5175572 -
aaaaaacaaaaggtacagggtgct

SEQ ID NO: 66180 - DNA, 24 bp, Artificial Sequence
  Synthetic oligonucleotide; TTTTGATT chr11 5175456 5175479 5175459 -
ttagttaatatcaatcaagcaaaa

SEQ ID NO: 66181 - DNA, 24 bp, Artificial Sequence
  Synthetic oligonucleotide; GAATGATT chr11 5175160 5175183 5175163 -
gctacatgggaggctgaggcagga

SEQ ID NO: 66182 - DNA, 24 bp, Artificial Sequence
  Synthetic oligonucleotide; AATAGATT chr11 5174588 5174611 5174591 -
agtctattttagataattcatata

SEQ ID NO: 66183 - DNA, 24 bp, Artificial Sequence
  Synthetic oligonucleotide; CATAGATT chr11 5174469 5174492 5174472 -
agtctttgcttaatgttgtccatt

SEQ ID NO: 66184 - DNA, 24 bp, Artificial Sequence
  Synthetic oligonucleotide; TGAGGATT chr11 5173996 5174019 5173999 -
cttaacatttttagcagcaatata

SEQ ID NO: 66185 - DNA, 24 bp, Artificial Sequence
  Synthetic oligonucleotide; TGAAGATT chr11 5173564 5173587 5173567 -
aatctattgtaaaatcaaagttca

SEQ ID NO: 66186 - DNA, 24 bp, Artificial Sequence
  Synthetic oligonucleotide; TCATGATT chr11 5173120 5173143 5173123 -
taacactattattacctgtcttta

SEQ ID NO: 66187 - DNA, 24 bp, Artificial Sequence
  Synthetic oligonucleotide; AAATGATT chr11 5172930 5172953 5172933 -
aacctgactacataaaagttttgt

SEQ ID NO: 66188 - DNA, 24 bp, Artificial Sequence
  Synthetic oligonucleotide; CATGGATT chr11 5172564 5172587 5172567 -
aagtaaacagtaacaaatagtatg

SEQ ID NO: 66189 - DNA, 24 bp, Artificial Sequence
  Synthetic oligonucleotide; AGCTGATT chr11 5172454 5172477 5172457 -
tgctggcttgcaccagcttaggaa

SEQ ID NO: 66190 - DNA, 24 bp, Artificial Sequence
  Synthetic oligonucleotide; CACTGATT chr11 5172309 5172332 5172312 -
atttggaaatatttattactatcc

SEQ ID NO: 66191 - DNA, 24 bp, Artificial Sequence
  Synthetic oligonucleotide; CCAAGATT chr11 5171746 5171769 5171749 -
atataaatcaactttaatataatc

SEQ ID NO: 66192 - DNA, 24 bp, Artificial Sequence
  Synthetic oligonucleotide; TTGAGATT chr11 5171559 5171582 5171562 -
tttcactgccatagatgacccaac

SEQ ID NO: 66193 - DNA, 24 bp, Artificial Sequence
  Synthetic oligonucleotide; TGCTGATT chr11 5170641 5170664 5170644 -
tattgttcattgtggtttcttatg

SEQ ID NO: 66194 - DNA, 24 bp, Artificial Sequence
  Synthetic oligonucleotide; CTAAGATT chr11 5169761 5169784 5169764 -
tgtcaatttgtcaaaacggtacag

SEQ ID NO: 66195 - DNA, 24 bp, Artificial Sequence
  Synthetic oligonucleotide; AGATGATT chr11 5169671 5169694 5169674 -
aaaggaaaatagtaataataatac

SEQ ID NO: 66196 - DNA, 24 bp, Artificial Sequence
  Synthetic oligonucleotide; ATTAGATT chr11 5169666 5169689 5169669 -
aaaatagtaataataatacagatg

SEQ ID NO: 66197 - DNA, 24 bp, Artificial Sequence
  Synthetic oligonucleotide; AAAAGATT chr11 5169528 5169551 5169531 -
gtgtagtttacaatttctgtaata

SEQ ID NO: 66198 - DNA, 24 bp, Artificial Sequence
  Synthetic oligonucleotide; CAGGGATT chr11 5169202 5169225 5169205 -
aagaattctagaaaatccctcaga

SEQ ID NO: 66199 - DNA, 24 bp, Artificial Sequence
  Synthetic oligonucleotide; GAGTGATT chr11 5169111 5169134 5169114 -
tatcctattaaaccacacagtctt

SEQ ID NO: 66200 - DNA, 24 bp, Artificial Sequence
  Synthetic oligonucleotide; ATGGGATT chr11 5168926 5168949 5168929 -
atgtagtgaagtcataaaaacaac

SEQ ID NO: 66201 - DNA, 24 bp, Artificial Sequence
  Synthetic oligonucleotide; TGAAGATT chr11 5168576 5168599 5168579 -
aataaaatccagcttttatgatct

SEQ ID NO: 66202 - DNA, 24 bp, Artificial Sequence
  Synthetic oligonucleotide; AAGTGATT chr11 5168339 5168362 5168342 -
tcacgagctatagtgtaccatact

SEQ ID NO: 66203 - DNA, 24 bp, Artificial Sequence
  Synthetic oligonucleotide; TATAGATT chr11 5168329 5168352 5168332 -
tagtgtaccatactaagtgattta

SEQ ID NO: 66204 - DNA, 24 bp, Artificial Sequence
  Synthetic oligonucleotide; ACCTGATT chr11 5168159 5168182 5168162 -
caaaaccagacaatccaactaaaa

SEQ ID NO: 66205 - DNA, 24 bp, Artificial Sequence
  Synthetic oligonucleotide; TTCAGATT chr11 5168111 5168134 5168114 -
tatcagtggtcccataacttaaaa

SEQ ID NO: 66206 - DNA, 24 bp, Artificial Sequence
  Synthetic oligonucleotide; TTGAGATT chr11 5168046 5168069 5168049 -
caattctgtaaaccattttctcct

SEQ ID NO: 66207 - DNA, 24 bp, Artificial Sequence
  Synthetic oligonucleotide; TACTGATT chr11 5167914 5167937 5167917 -
cccacattagtttaactgcttagg

SEQ ID NO: 66208 - DNA, 24 bp, Artificial Sequence
  Synthetic oligonucleotide; CTAAGATT chr11 5167867 5167890 5167870 -
aaccaacacttttagaactatcat

SEQ ID NO: 66209 - DNA, 24 bp, Artificial Sequence
  Synthetic oligonucleotide; AATAGATT chr11 5167014 5167037 5167017 -
ggtaaccacagcacaaaaatctat

SEQ ID NO: 66210 - DNA, 24 bp, Artificial Sequence
  Synthetic oligonucleotide; CTCAGATT chr11 5165691 5165714 5165694 -
cgcgcatgaaatttggtgccgtga

SEQ ID NO: 66211 - DNA, 24 bp, Artificial Sequence
  Synthetic oligonucleotide; CTCTGATT chr11 5165326 5165349 5165329 -
tgtttaatcattgcagggacacct

SEQ ID NO: 66212 - DNA, 24 bp, Artificial Sequence
  Synthetic oligonucleotide; CCAGGATT chr11 5163701 5163724 5163704 -
accaggccaaggaatgcccgcagc

SEQ ID NO: 66213 - DNA, 24 bp, Artificial Sequence
  Synthetic oligonucleotide; AAAGGATT chr11 5163004 5163027 5163007 -
tatcccatcccacagcatgctttg

SEQ ID NO: 66214 - DNA, 24 bp, Artificial Sequence
  Synthetic oligonucleotide; TGCTGATT chr11 5162550 5162573 5162553 -
tcataaaaacacacgtgctctccc

SEQ ID NO: 66215 - DNA, 24 bp, Artificial Sequence
  Synthetic oligonucleotide; GTCCGATT chr11 5162540 5162563 5162543 -
acacgtgctctccctgctgattgt

SEQ ID NO: 66216 - DNA, 24 bp, Artificial Sequence
  Synthetic oligonucleotide; CCATGATT chr11 5162126 5162149 5162129 -
tattcctgataccacacctgaccc

SEQ ID NO: 66217 - DNA, 24 bp, Artificial Sequence
  Synthetic oligonucleotide; ACTTGATT chr11 5162036 5162059 5162039 -
tttcctgttcctcaccctgatcac

SEQ ID NO: 66218 - DNA, 24 bp, Artificial Sequence
  Synthetic oligonucleotide; CAGGGATT chr11 5161858 5161881 5161861 -
tccatctgctattctgctactcct

SEQ ID NO: 66219 - DNA, 24 bp, Artificial Sequence
  Synthetic oligonucleotide; CGAGGATT chr11 5161816 5161839 5161819 -
cctcccttccctacacatcaagct

SEQ ID NO: 66220 - DNA, 24 bp, Artificial Sequence
  Synthetic oligonucleotide; ATTAGATT chr11 5161786 5161809 5161789 -
tttgcccccacccaggactggcaa

SEQ ID NO: 66221 - DNA, 24 bp, Artificial Sequence
  Synthetic oligonucleotide; TATAGATT chr11 5161353 5161376 5161356 -
gggtacagcccatttgagctcctg

SEQ ID NO: 66222 - DNA, 24 bp, Artificial Sequence
  Synthetic oligonucleotide; ACAAGATT chr11 5159723 5159746 5159726 -
acctcaatagaacaataatgaata

SEQ ID NO: 66223 - DNA, 24 bp, Artificial Sequence
  Synthetic oligonucleotide; AAACGATT chr11 5159200 5159223 5159203 -
taaaaacttcactaaatactatta

SEQ ID NO: 66224 - DNA, 24 bp, Artificial Sequence
  Synthetic oligonucleotide; TACAGATT chr11 5158894 5158917 5158897 -
atgacaatactacccaaagcaatg

SEQ ID NO: 66225 - DNA, 24 bp, Artificial Sequence
  Synthetic oligonucleotide; CCAAGATT chr11 5158350 5158373 5158353 -
ctgggaggcagaagttgcagtgat

SEQ ID NO: 66226 - DNA, 24 bp, Artificial Sequence
  Synthetic oligonucleotide; GATGGATT chr11 5158172 5158195 5158175 -
cactatatacaaaaatcaaatcaa

SEQ ID NO: 66227 - DNA, 24 bp, Artificial Sequence
  Synthetic oligonucleotide; CATTGATT chr11 5158092 5158115 5158095 -
agtggggaaaccctccagggcatt

SEQ ID NO: 66228 - DNA, 24 bp, Artificial Sequence
  Synthetic oligonucleotide; TTGGGATT chr11 5158025 5158048 5158028 -
aataaccaaaacaaaaatagacaa

SEQ ID NO: 66229 - DNA, 24 bp, Artificial Sequence
  Synthetic oligonucleotide; TGGAGATT chr11 5157607 5157630 5157610 -
gtacagcaattatgaaggacagta

SEQ ID NO: 66230 - DNA, 24 bp, Artificial Sequence
  Synthetic oligonucleotide; CCAAGATT chr11 5157466 5157489 5157469 -
ttattatagcactattcacaaacg

SEQ ID NO: 66231 - DNA, 24 bp, Artificial Sequence
  Synthetic oligonucleotide; AGTAGATT chr11 5157212 5157235 5157215 -
aacgtggatcttatgaagacagag

SEQ ID NO: 66232 - DNA, 24 bp, Artificial Sequence
  Synthetic oligonucleotide; ATTAGATT chr11 5155899 5155922 5155902 -
tagtgacaaaagaataacctgaat

SEQ ID NO: 66233 - DNA, 24 bp, Artificial Sequence
  Synthetic oligonucleotide; TACAGATT chr11 5155196 5155219 5155199 -
tgtgtggtaaaaagtagttatgaa

SEQ ID NO: 66234 - DNA, 24 bp, Artificial Sequence
  Synthetic oligonucleotide; AGGAGATT chr11 5154973 5154996 5154976 -
gtgggaaaagagaaaaagagagaa

SEQ ID NO: 66235 - DNA, 24 bp, Artificial Sequence
  Synthetic oligonucleotide; TCACGATT chr11 5154350 5154373 5154353 -
tcaataataattgaggagtaagtc

SEQ ID NO: 66236 - DNA, 24 bp, Artificial Sequence
  Synthetic oligonucleotide; TTGTGATT chr11 5154183 5154206 5154186 -
ctttggtcttgaataagtcagaca

SEQ ID NO: 66237 - DNA, 24 bp, Artificial Sequence
  Synthetic oligonucleotide; AAAGGATT chr11 5154169 5154192 5154172 -
aagtcagacattgtgattgccatt

SEQ ID NO: 66238 - DNA, 24 bp, Artificial Sequence
  Synthetic oligonucleotide; TTGTGATT chr11 5154151 5154174 5154154 -
gccattaaaggattcttattctaa

SEQ ID NO: 66239 - DNA, 24 bp, Artificial Sequence
  Synthetic oligonucleotide; TGCTGATT chr11 5153966 5153989 5153969 -
gcctccctgtcatgaaatgtcctc

SEQ ID NO: 66240 - DNA, 24 bp, Artificial Sequence
  Synthetic oligonucleotide; AGCTGATT chr11 5153750 5153773 5153753 -
attggtgacatgaagcatacggtt

SEQ ID NO: 66241 - DNA, 24 bp, Artificial Sequence
  Synthetic oligonucleotide; TACTGATT chr11 5153634 5153657 5153637 -
ttctctaatgtatagcttaaaatg

SEQ ID NO: 66242 - DNA, 24 bp, Artificial Sequence
  Synthetic oligonucleotide; AAATGATT chr11 5153244 5153267 5153247 -
aggaaactggactctattctggct

SEQ ID NO: 66243 - DNA, 24 bp, Artificial Sequence
  Synthetic oligonucleotide; CTCAGATT chr11 5153005 5153028 5153008 -
ataaaaagcaaccaggagctttgg

SEQ ID NO: 66244 - DNA, 24 bp, Artificial Sequence
  Synthetic oligonucleotide; TAAAGATT chr11 5152986 5153009 5152989 -
tttggctcagatttgtcaaaagta

SEQ ID NO: 66245 - DNA, 24 bp, Artificial Sequence
  Synthetic oligonucleotide; AGGTGATT chr11 5152645 5152668 5152648 -
ggccagtagtccaatcccctgtcc

SEQ ID NO: 66246 - DNA, 24 bp, Artificial Sequence
  Synthetic oligonucleotide; TTTGGATT chr11 5152620 5152643 5152623 -
ggtgattttgctggttctaatgta

SEQ ID NO: 66247 - DNA, 24 bp, Artificial Sequence
  Synthetic oligonucleotide; GGATGATT chr11 5152503 5152526 5152506 -
tcctttcaaaactgtgaataagat

SEQ ID NO: 66248 - DNA, 24 bp, Artificial Sequence
  Synthetic oligonucleotide; GCTGGATT chr11 5152291 5152314 5152294 -
tcccaggcctagaatctgtgcagt

SEQ ID NO: 66249 - DNA, 24 bp, Artificial Sequence
  Synthetic oligonucleotide; TTGGGATT chr11 5152285 5152308 5152288 -
gcctagaatctgtgcagtgctgga

SEQ ID NO: 66250 - DNA, 24 bp, Artificial Sequence
  Synthetic oligonucleotide; CTATGATT chr11 5152252 5152275 5152255 -
cattctgtgccatttatctcattg

SEQ ID NO: 66251 - DNA, 24 bp, Artificial Sequence
  Synthetic oligonucleotide; TTTTGATT chr11 5152086 5152109 5152089 -
ctggtttaatgtgcctgaaatcta

SEQ ID NO: 66252 - DNA, 24 bp, Artificial Sequence
  Synthetic oligonucleotide; GCAGGATT chr11 5151743 5151766 5151746 -
ggtttgtttgtggccttcactgta

SEQ ID NO: 66253 - DNA, 24 bp, Artificial Sequence
  Synthetic oligonucleotide; CACAGATT chr11 5151472 5151495 5151475 -
cacttgtctatggtgcaaagacca

SEQ ID NO: 66254 - DNA, 24 bp, Artificial Sequence
  Synthetic oligonucleotide; GTGGGATT chr11 5151281 5151304 5151284 -
gatcatcatggctcatatcaatca

SEQ ID NO: 66255 - DNA, 24 bp, Artificial Sequence
  Synthetic oligonucleotide; GGAGGATT chr11 5151150 5151173 5151153 -
tattcttctaagaatatttctcca

SEQ ID NO: 66256 - DNA, 24 bp, Artificial Sequence
  Synthetic oligonucleotide; CTCTGATT chr11 5150527 5150550 5150530 -
tttgttttttggttaggtagttac

SEQ ID NO: 66257 - DNA, 24 bp, Artificial Sequence
  Synthetic oligonucleotide; AGGAGATT chr11 5150457 5150480 5150460 -
cacatcatgccaggtagatagtag

SEQ ID NO: 66258 - DNA, 24 bp, Artificial Sequence
  Synthetic oligonucleotide; CTTTGATT chr11 5150014 5150037 5150017 -
ttcacatatgggcagatgtccata

SEQ ID NO: 66259 - DNA, 24 bp, Artificial Sequence
  Synthetic oligonucleotide; CAAGAAT chr11 5150491 5150514 5150511 +
cttggctactcatccatcattcct

SEQ ID NO: 66260 - DNA, 24 bp, Artificial Sequence
  Synthetic oligonucleotide; CCAGAAT chr11 5150673 5150696 5150693 +
tctcttcctttcagtctctctttt

SEQ ID NO: 66261 - DNA, 24 bp, Artificial Sequence
  Synthetic oligonucleotide; TGAGAAT chr11 5150698 5150721 5150718 +
cagaattacataggtacaaactca

SEQ ID NO: 66262 - DNA, 24 bp, Artificial Sequence
  Synthetic oligonucleotide; CAAGAAA chr11 5151015 5151038 5151035 +
ttttttttttaaggcagggatgat

SEQ ID NO: 66263 - DNA, 24 bp, Artificial Sequence
  Synthetic oligonucleotide; GGAGAAA chr11 5151127 5151150 5151147 +
aaggcataatttataaatcctcct

SEQ ID NO: 66264 - DNA, 24 bp, Artificial Sequence
  Synthetic oligonucleotide; GAAGAAT chr11 5151142 5151165 5151162 +
aatcctcctggagaaatattctta

SEQ ID NO: 66265 - DNA, 24 bp, Artificial Sequence
  Synthetic oligonucleotide; AAAGAAT chr11 5151165 5151188 5151185 +
agaagaataactcaaccaggggct

SEQ ID NO: 66266 - DNA, 24 bp, Artificial Sequence
  Synthetic oligonucleotide; AGAGAAA chr11 5151175 5151198 5151195 +
ctcaaccaggggctaaagaataaa

SEQ ID NO: 66267 - DNA, 24 bp, Artificial Sequence
  Synthetic oligonucleotide; GTAGAAT chr11 5151238 5151261 5151258 +
acacttctcactttcattagtcac

SEQ ID NO: 66268 - DNA, 24 bp, Artificial Sequence
  Synthetic oligonucleotide; AAAGAAA chr11 5151370 5151393 5151390 +
tgttttgatatggttactactgca

SEQ ID NO: 66269 - DNA, 24 bp, Artificial Sequence
  Synthetic oligonucleotide; TGAGAAA chr11 5151475 5151498 5151495 +
tctttgcaccatagacaagtggat

SEQ ID NO: 66270 - DNA, 24 bp, Artificial Sequence
  Synthetic oligonucleotide; CTAGAAA chr11 5151504 5151527 5151524 +
aatggagggaccagcaagtaaatg

SEQ ID NO: 66271 - DNA, 24 bp, Artificial Sequence
  Synthetic oligonucleotide; AGAGAAT chr11 5151511 5151534 5151531 +
ggaccagcaagtaaatgctagaaa

SEQ ID NO: 66272 - DNA, 24 bp, Artificial Sequence
  Synthetic oligonucleotide; CAAGAAT chr11 5151874 5151897 5151894 +
ttatcagtactaggcatggggcta

SEQ ID NO: 66273 - DNA, 24 bp, Artificial Sequence
  Synthetic oligonucleotide; CCAGAAT chr11 5152082 5152105 5152102 +
aaaatagatttcaggcacattaaa

SEQ ID NO: 66274 - DNA, 24 bp, Artificial Sequence
  Synthetic oligonucleotide; TAAGAAA chr11 5152151 5152174 5152171 +
aatgtctgtggctcctagcatgcc

SEQ ID NO: 66275 - DNA, 24 bp, Artificial Sequence
  Synthetic oligonucleotide; ACAGAAT chr11 5152244 5152267 5152264 +
aatcatagcaatgagataaatggc

SEQ ID NO: 66276 - DNA, 24 bp, Artificial Sequence
  Synthetic oligonucleotide; AGAGAAT chr11 5152859 5152882 5152879 +
ttggtgtaaaagattcccaatgaa

SEQ ID NO: 66277 - DNA, 24 bp, Artificial Sequence
  Synthetic oligonucleotide; GTAGAAA chr11 5152870 5152893 5152890 +
gattcccaatgaaagagaatagag

SEQ ID NO: 66278 - DNA, 24 bp, Artificial Sequence
  Synthetic oligonucleotide; TCAGAAT chr11 5152916 5152939 5152936 +
aacataatatatttctttttatat

SEQ ID NO: 66279 - DNA, 24 bp, Artificial Sequence
  Synthetic oligonucleotide; AGAGAAT chr11 5152930 5152953 5152950 +
ctttttatattcagaataatgtaa

SEQ ID NO: 66280 - DNA, 24 bp, Artificial Sequence
  Synthetic oligonucleotide; TTAGAAA chr11 5152940 5152963 5152960 +
tcagaataatgtaaagagaatgct

SEQ ID NO: 66281 - DNA, 24 bp, Artificial Sequence
  Synthetic oligonucleotide; CCAGAAT chr11 5153222 5153245 5153242 +
ataatgggcaaatgaatcatttag

SEQ ID NO: 66282 - DNA, 24 bp, Artificial Sequence
  Synthetic oligonucleotide; TAAGAAA chr11 5153353 5153376 5153373 +
tatataattttgtgagctctgaca

SEQ ID NO: 66283 - DNA, 24 bp, Artificial Sequence
  Synthetic oligonucleotide; AAAGAAA chr11 5153479 5153502 5153499 +
ttgaggaaagcactatgaataacc

SEQ ID NO: 66284 - DNA, 24 bp, Artificial Sequence
  Synthetic oligonucleotide; AGAGAAA chr11 5153628 5153651 5153648 +
tcagtacattttaagctatacatt

SEQ ID NO: 66285 - DNA, 24 bp, Artificial Sequence
  Synthetic oligonucleotide; AAAGAAA chr11 5153782 5153805 5153802 +
aattcaggaagtagctgttctttg

SEQ ID NO: 66286 - DNA, 24 bp, Artificial Sequence
  Synthetic oligonucleotide; AAAGAAA chr11 5153818 5153841 5153838 +
gctttttttttttttttttttttg

SEQ ID NO: 66287 - DNA, 24 bp, Artificial Sequence
  Synthetic oligonucleotide; GAAGAAA chr11 5153843 5153866 5153863 +
aagaaaaggaaggtaagtaacaag

SEQ ID NO: 66288 - DNA, 24 bp, Artificial Sequence
  Synthetic oligonucleotide; AGAGAAA chr11 5153849 5153872 5153869 +
aggaaggtaagtaacaaggaagaa

SEQ ID NO: 66289 - DNA, 24 bp, Artificial Sequence
  Synthetic oligonucleotide; TTAGAAT chr11 5154127 5154150 5154147 +
tttcttctccaaagataatcacaa

SEQ ID NO: 66290 - DNA, 24 bp, Artificial Sequence
  Synthetic oligonucleotide; TAAGAAT chr11 5154133 5154156 5154153 +
ctccaaagataatcacaattagaa

SEQ ID NO: 66291 - DNA, 24 bp, Artificial Sequence
  Synthetic oligonucleotide; GAAGAAT chr11 5154378 5154401 5154398 +
tggttttgctcttaccagatacct

SEQ ID NO: 66292 - DNA, 24 bp, Artificial Sequence
  Synthetic oligonucleotide; GGAGAAA chr11 5154749 5154772 5154769 +
ggatgaatttattgagctcaaatt

SEQ ID NO: 66293 - DNA, 24 bp, Artificial Sequence
  Synthetic oligonucleotide; GCAGAAA chr11 5154936 5154959 5154956 +
atccccgtaattatttctacactt

SEQ ID NO: 66294 - DNA, 24 bp, Artificial Sequence
  Synthetic oligonucleotide; GCAGAAT chr11 5154982 5155005 5155002 +
tttctcttttcccacaggctaaat

SEQ ID NO: 66295 - DNA, 24 bp, Artificial Sequence
  Synthetic oligonucleotide; TCAGAAA chr11 5155152 5155175 5155172 +
gaggcaaggtttttctctttttat

SEQ ID NO: 66296 - DNA, 24 bp, Artificial Sequence
  Synthetic oligonucleotide; AAAGAAA chr11 5155157 5155180 5155177 +
aaggtttttctctttttattcaga

SEQ ID NO: 66297 - DNA, 24 bp, Artificial Sequence
  Synthetic oligonucleotide; GGAGAAT chr11 5155709 5155732 5155729 +
aaatttaggaagcatactaatggt

SEQ ID NO: 66298 - DNA, 24 bp, Artificial Sequence
  Synthetic oligonucleotide; CCAGAAT chr11 5155783 5155806 5155803 +
ggcaaggaaccccatgtgctcttt

SEQ ID NO: 66299 - DNA, 24 bp, Artificial Sequence
  Synthetic oligonucleotide; TAAGAAA chr11 5155897 5155920 5155917 +
atattcaggttattcttttgtcac

SEQ ID NO: 66300 - DNA, 24 bp, Artificial Sequence
  Synthetic oligonucleotide; TGAGAAA chr11 5157805 5157828 5157825 +
ctgggccatttgtatggcttcttt

SEQ ID NO: 66301 - DNA, 24 bp, Artificial Sequence
  Synthetic oligonucleotide; ACAGAAA chr11 5158847 5158870 5158867 +
tctgtgaatgccattggtattttg

SEQ ID NO: 66302 - DNA, 24 bp, Artificial Sequence
  Synthetic oligonucleotide; ATAGAAT chr11 5159535 5159558 5159555 +
gtatattagagtaatgcttgcctc

SEQ ID NO: 66303 - DNA, 24 bp, Artificial Sequence
  Synthetic oligonucleotide; CAAGAAA chr11 5159939 5159962 5159959 +
ttttgttgattttgtttacctttc

SEQ ID NO: 66304 - DNA, 24 bp, Artificial Sequence
  Synthetic oligonucleotide; TAAGAAA chr11 5160704 5160727 5160724 +
gacattcctgtcttcttatattaa

SEQ ID NO: 66305 - DNA, 24 bp, Artificial Sequence
  Synthetic oligonucleotide; GAAGAAA chr11 5160895 5160918 5160915 +
aggggtgatattgtggggttgtta

SEQ ID NO: 66306 - DNA, 24 bp, Artificial Sequence
  Synthetic oligonucleotide; GTAGAAT chr11 5160912 5160935 5160932 +
gttgttagaagaaacatttgtcat

SEQ ID NO: 66307 - DNA, 24 bp, Artificial Sequence
  Synthetic oligonucleotide; GGAGAAA chr11 5160979 5161002 5160999 +
gaaaaaccaaatggaataagagaa

SEQ ID NO: 66308 - DNA, 24 bp, Artificial Sequence
  Synthetic oligonucleotide; TGAGAAT chr11 5161203 5161226 5161223 +
aagagcagggcatgtatgagtagt

SEQ ID NO: 66309 - DNA, 24 bp, Artificial Sequence
  Synthetic oligonucleotide; TGAGAAA chr11 5161382 5161405 5161402 +
cattctgaggacaggtctgacttc

SEQ ID NO: 66310 - DNA, 24 bp, Artificial Sequence
  Synthetic oligonucleotide; AAAGAAA chr11 5161386 5161409 5161406 +
ctgaggacaggtctgacttctgag

SEQ ID NO: 66311 - DNA, 24 bp, Artificial Sequence
  Synthetic oligonucleotide; GAAGAAA chr11 5161636 5161659 5161656 +
tgaggaattatgtctgacagaagg

SEQ ID NO: 66312 - DNA, 24 bp, Artificial Sequence
  Synthetic oligonucleotide; GCAGAAT chr11 5161841 5161864 5161861 +
ggcctgaataatccctgaggagta

SEQ ID NO: 66313 - DNA, 24 bp, Artificial Sequence
  Synthetic oligonucleotide; TCAGAAA chr11 5162214 5162237 5162234 +
gagtacagctgaaggagccgggga

SEQ ID NO: 66314 - DNA, 24 bp, Artificial Sequence
  Synthetic oligonucleotide; GAAGAAA chr11 5162241 5162264 5162261 +
gaaagtatatgcatcaggtatgag

SEQ ID NO: 66315 - DNA, 24 bp, Artificial Sequence
  Synthetic oligonucleotide; TGAGAAA chr11 5162265 5162288 5162285 +
gaagaaaatagattttagaagtta

SEQ ID NO: 66316 - DNA, 24 bp, Artificial Sequence
  Synthetic oligonucleotide; ACAGAAA chr11 5162392 5162415 5162412 +
aaacagtaaggtcaagttatttgg

SEQ ID NO: 66317 - DNA, 24 bp, Artificial Sequence
  Synthetic oligonucleotide; TAAGAAT chr11 5162428 5162451 5162448 +
cagggtgcagtcctggatcttgtg

SEQ ID NO: 66318 - DNA, 24 bp, Artificial Sequence
  Synthetic oligonucleotide; TGAGAAT chr11 5162547 5162570 5162567 +
gcagggagagcacgtgtgttttta

SEQ ID NO: 66319 - DNA, 24 bp, Artificial Sequence
  Synthetic oligonucleotide; AAAGAAA chr11 5162728 5162751 5162748 +
gaatgaagggtgcaaaggaatagt

SEQ ID NO: 66320 - DNA, 24 bp, Artificial Sequence
  Synthetic oligonucleotide; ACAGAAT chr11 5162753 5162776 5162773 +
aagaaagcatgtttgagatccaga

SEQ ID NO: 66321 - DNA, 24 bp, Artificial Sequence
  Synthetic oligonucleotide; TGAGAAT chr11 5163452 5163475 5163472 +
agggtacagacttaccctccactg

SEQ ID NO: 66322 - DNA, 24 bp, Artificial Sequence
  Synthetic oligonucleotide; CCAGAAT chr11 5163937 5163960 5163957 +
gagtcctgttgtggggtttgaggt

SEQ ID NO: 66323 - DNA, 24 bp, Artificial Sequence
  Synthetic oligonucleotide; TGAGAAT chr11 5164000 5164023 5164020 +
cagattgggtaataaaatgtatat

SEQ ID NO: 66324 - DNA, 24 bp, Artificial Sequence
  Synthetic oligonucleotide; AAAGAAA chr11 5164142 5164165 5164162 +
gctctgattcgggagaggtcggat

SEQ ID NO: 66325 - DNA, 24 bp, Artificial Sequence
  Synthetic oligonucleotide; GTAGAAA chr11 5164382 5164405 5164402 +
ggaggggagacgtcagatgggtct

SEQ ID NO: 66326 - DNA, 24 bp, Artificial Sequence
  Synthetic oligonucleotide; TTAGAAA chr11 5164396 5164419 5164416 +
agatgggtctgtagaaaaggaaga

SEQ ID NO: 66327 - DNA, 24 bp, Artificial Sequence
  Synthetic oligonucleotide; AAAGAAT chr11 5164509 5164532 5164529 +
agactagggagggaccaatgtgta

SEQ ID NO: 66328 - DNA, 24 bp, Artificial Sequence
  Synthetic oligonucleotide; GAAGAAT chr11 5164577 5164600 5164597 +
tacgacaaaaattatttagatctt

SEQ ID NO: 66329 - DNA, 24 bp, Artificial Sequence
  Synthetic oligonucleotide; GAAGAAA chr11 5164659 5164682 5164679 +
gtattggagtcaagcggccttgca

SEQ ID NO: 66330 - DNA, 24 bp, Artificial Sequence
  Synthetic oligonucleotide; AGAGAAA chr11 5164788 5164811 5164808 +
gcccctagtgaaggaggcaagccc

SEQ ID NO: 66331 - DNA, 24 bp, Artificial Sequence
  Synthetic oligonucleotide; AAAGAAA chr11 5164793 5164816 5164813 +
tagtgaaggaggcaagcccagaga

SEQ ID NO: 66332 - DNA, 24 bp, Artificial Sequence
  Synthetic oligonucleotide; CCAGAAA chr11 5164842 5164865 5164862 +
aaggggttcgggggttcttactca

SEQ ID NO: 66333 - DNA, 24 bp, Artificial Sequence
  Synthetic oligonucleotide; ACAGAAA chr11 5164911 5164934 5164931 +
ggtgcagagataagaggtcagggc

SEQ ID NO: 66334 - DNA, 24 bp, Artificial Sequence
  Synthetic oligonucleotide; ACAGAAA chr11 5164953 5164976 5164973 +
ggtgcagagataagaggttggggc

SEQ ID NO: 66335 - DNA, 24 bp, Artificial Sequence
  Synthetic oligonucleotide; GCAGAAA chr11 5164995 5165018 5165015 +
ggtgcagagataagaggttggggt

SEQ ID NO: 66336 - DNA, 24 bp, Artificial Sequence
  Synthetic oligonucleotide; GCAGAAA chr11 5165037 5165060 5165057 +
ggtgcagagataagaggtcggggt

SEQ ID NO: 66337 - DNA, 24 bp, Artificial Sequence
  Synthetic oligonucleotide; ACAGAAA chr11 5165120 5165143 5165140 +
ggtgctgagataagaggttggggc

SEQ ID NO: 66338 - DNA, 24 bp, Artificial Sequence
  Synthetic oligonucleotide; CCAGAAA chr11 5165149 5165172 5165169 +
aataagggattggggttcttgccc

SEQ ID NO: 66339 - DNA, 24 bp, Artificial Sequence
  Synthetic oligonucleotide; CCAGAAA chr11 5165209 5165232 5165229 +
aggggttggggtacttacccccct

SEQ ID NO: 66340 - DNA, 24 bp, Artificial Sequence
  Synthetic oligonucleotide; GGAGAAA chr11 5165440 5165463 5165460 +
gaaaggaattgaaattaagagaag

SEQ ID NO: 66341 - DNA, 24 bp, Artificial Sequence
  Synthetic oligonucleotide; GGAGAAA chr11 5165472 5165495 5165492 +
tgaagtgtggtgccaagattgaaa

SEQ ID NO: 66342 - DNA, 24 bp, Artificial Sequence
  Synthetic oligonucleotide; GCAGAAA chr11 5166016 5166039 5166036 +
tgtggtggaatgtcatcagttaag

SEQ ID NO: 66343 - DNA, 24 bp, Artificial Sequence
  Synthetic oligonucleotide; TCAGAAA chr11 5166181 5166204 5166201 +
atttctagttttattccactgtgg

SEQ ID NO: 66344 - DNA, 24 bp, Artificial Sequence
  Synthetic oligonucleotide; AAAGAAA chr11 5166287 5166310 5166307 +
ggaaaatgttgtacatgctgcttt

SEQ ID NO: 66345 - DNA, 24 bp, Artificial Sequence
  Synthetic oligonucleotide; CAAGAAA chr11 5167024 5167047 5167044 +
gtgctgtggttaccatggggctta

SEQ ID NO: 66346 - DNA, 24 bp, Artificial Sequence
  Synthetic oligonucleotide; TTAGAAT chr11 5167736 5167759 5167756 +
actctactatatctaggactacac

SEQ ID NO: 66347 - DNA, 24 bp, Artificial Sequence
  Synthetic oligonucleotide; TAAGAAA chr11 5167815 5167838 5167835 +
aaaagtatttatttattgtaagca

SEQ ID NO: 66348 - DNA, 24 bp, Artificial Sequence
  Synthetic oligonucleotide; AGAGAAT chr11 5167878 5167901 5167898 +
aaaagtgttggttgaggaagtaga

SEQ ID NO: 66349 - DNA, 24 bp, Artificial Sequence
  Synthetic oligonucleotide; TGAGAAA chr11 5167939 5167962 5167959 +
aggccccttttataaagatcctct

SEQ ID NO: 66350 - DNA, 24 bp, Artificial Sequence
  Synthetic oligonucleotide; GGAGAAA chr11 5168023 5168046 5168043 +
aattttgtcctcatgaatctcaaa

SEQ ID NO: 66351 - DNA, 24 bp, Artificial Sequence
  Synthetic oligonucleotide; ACAGAAT chr11 5168037 5168060 5168057 +
gaatctcaaaggagaaaatggttt

SEQ ID NO: 66352 - DNA, 24 bp, Artificial Sequence
  Synthetic oligonucleotide; AAAGAAT chr11 5168123 5168146 5168143 +
ggaccactgataatatggtgggct

SEQ ID NO: 66353 - DNA, 24 bp, Artificial Sequence
  Synthetic oligonucleotide; AGAGAAA chr11 5168340 5168363 5168360 +
gtatggtacactatagctcgtgac

SEQ ID NO: 66354 - DNA, 24 bp, Artificial Sequence
  Synthetic oligonucleotide; TAAGAAT chr11 5168798 5168821 5168818 +
ctcttagttttttcatgtatacca

SEQ ID NO: 66355 - DNA, 24 bp, Artificial Sequence
  Synthetic oligonucleotide; TGAGAAT chr11 5168878 5168901 5168898 +
ggcttctaaattactctgaaattt

SEQ ID NO: 66356 - DNA, 24 bp, Artificial Sequence
  Synthetic oligonucleotide; ACAGAAA chr11 5168992 5169015 5169012 +
gtccataaattaatttcgaggaaa

SEQ ID NO: 66357 - DNA, 24 bp, Artificial Sequence
  Synthetic oligonucleotide; GAAGAAA chr11 5169144 5169167 5169164 +
gttcatggaaattcaaaattatct

SEQ ID NO: 66358 - DNA, 24 bp, Artificial Sequence
  Synthetic oligonucleotide; CTAGAAT chr11 5169191 5169214 5169211 +
tgcaatccctgtctgagggatttt

SEQ ID NO: 66359 - DNA, 24 bp, Artificial Sequence
  Synthetic oligonucleotide; TAAGAAT chr11 5169492 5169515 5169512 +
ttagcacactgagtataatttttt

SEQ ID NO: 66360 - DNA, 24 bp, Artificial Sequence
  Synthetic oligonucleotide; ACAGAAA chr11 5169508 5169531 5169528 +
aatttttttaagaatctttttatt

SEQ ID NO: 66361 - DNA, 24 bp, Artificial Sequence
  Synthetic oligonucleotide; ACAGAAT chr11 5169535 5169558 5169555 +
gaaattgtaaactacacaaagtaa

SEQ ID NO: 66362 - DNA, 24 bp, Artificial Sequence
  Synthetic oligonucleotide; CTAGAAA chr11 5169716 5169739 5169736 +
agttttgatgtaaaattgatgtac

SEQ ID NO: 66363 - DNA, 24 bp, Artificial Sequence
  Synthetic oligonucleotide; CCAGAAA chr11 5169807 5169830 5169827 +
acacaacaaaatatttccatctcc

SEQ ID NO: 66364 - DNA, 24 bp, Artificial Sequence
  Synthetic oligonucleotide; CCAGAAA chr11 5169997 5170020 5170017 +
tatgtatcactaattttaatataa

SEQ ID NO: 66365 - DNA, 24 bp, Artificial Sequence
  Synthetic oligonucleotide; GAAGAAT chr11 5170605 5170628 5170625 +
cagaagctatttccagtactgtat

SEQ ID NO: 66366 - DNA, 24 bp, Artificial Sequence
  Synthetic oligonucleotide; TAAGAAA chr11 5170619 5170642 5170639 +
agtactgtatgaagaatcagcaca

SEQ ID NO: 66367 - DNA, 24 bp, Artificial Sequence
  Synthetic oligonucleotide; ACAGAAA chr11 5170765 5170788 5170785 +
agagtgtgtgagggtattgtggcc

SEQ ID NO: 66368 - DNA, 24 bp, Artificial Sequence
  Synthetic oligonucleotide; GGAGAAA chr11 5170785 5170808 5170805 +
ggccacagaaaggcagacgcctca

SEQ ID NO: 66369 - DNA, 24 bp, Artificial Sequence
  Synthetic oligonucleotide; CCAGAAA chr11 5170844 5170867 5170864 +
cgcaaggcaatggcggcacccgtc

SEQ ID NO: 66370 - DNA, 24 bp, Artificial Sequence
  Synthetic oligonucleotide; TCAGAAT chr11 5170863 5170886 5170883 +
ccgtcccagaaatgcaggcaattg

SEQ ID NO: 66371 - DNA, 24 bp, Artificial Sequence
  Synthetic oligonucleotide; ATAGAAA chr11 5170961 5170984 5170981 +
gactccataagagtgaaagagtgc

SEQ ID NO: 66372 - DNA, 24 bp, Artificial Sequence
  Synthetic oligonucleotide; CCAGAAA chr11 5171082 5171105 5171102 +
caagttcaacaaaggccggcatgg

SEQ ID NO: 66373 - DNA, 24 bp, Artificial Sequence
  Synthetic oligonucleotide; GAAGAAT chr11 5171133 5171156 5171153 +
aggaagagtcaattcggatgatgt

SEQ ID NO: 66374 - DNA, 24 bp, Artificial Sequence
  Synthetic oligonucleotide; TCAGAAA chr11 5171394 5171417 5171414 +
aacagtcatatctaagacatttcc

SEQ ID NO: 66375 - DNA, 24 bp, Artificial Sequence
  Synthetic oligonucleotide; AGAGAAA chr11 5171457 5171480 5171477 +
cacaggtaagccacagtgagtgga

SEQ ID NO: 66376 - DNA, 24 bp, Artificial Sequence
  Synthetic oligonucleotide; GCAGAAA chr11 5171477 5171500 5171497 +
tggaagagaaacctaatgggtcat

SEQ ID NO: 66377 - DNA, 24 bp, Artificial Sequence
  Synthetic oligonucleotide; ATAGAAA chr11 5171522 5171545 5171542 +
gcctatatgccagataaggcatta

SEQ ID NO: 66378 - DNA, 24 bp, Artificial Sequence
  Synthetic oligonucleotide; GAAGAAA chr11 5171609 5171632 5171629 +
cagattcacatggaaattatgact

SEQ ID NO: 66379 - DNA, 24 bp, Artificial Sequence
  Synthetic oligonucleotide; ATAGAAT chr11 5171856 5171879 5171876 +
tggaatatagtaaatattaaatgt

SEQ ID NO: 66380 - DNA, 24 bp, Artificial Sequence
  Synthetic oligonucleotide; CTAGAAT chr11 5171906 5171929 5171926 +
attagaacacaaggatagtttctc

SEQ ID NO: 66381 - DNA, 24 bp, Artificial Sequence
  Synthetic oligonucleotide; TTAGAAA chr11 5171977 5172000 5171997 +
ctttctccacctgctatccataga

SEQ ID NO: 66382 - DNA, 24 bp, Artificial Sequence
  Synthetic oligonucleotide; CCAGAAA chr11 5172183 5172206 5172203 +
agccttaggtattaacgttggagg

SEQ ID NO: 66383 - DNA, 24 bp, Artificial Sequence
  Synthetic oligonucleotide; TCAGAAA chr11 5172208 5172231 5172228 +
cagaaatggaattcaggatggggc

SEQ ID NO: 66384 - DNA, 24 bp, Artificial Sequence
  Synthetic oligonucleotide; TAAGAAT chr11 5172215 5172238 5172235 +
ggaattcaggatggggctcagaaa

SEQ ID NO: 66385 - DNA, 24 bp, Artificial Sequence
  Synthetic oligonucleotide; ACAGAAT chr11 5172631 5172654 5172651 +
cttagttgactggaggacatagag

SEQ ID NO: 66386 - DNA, 24 bp, Artificial Sequence
  Synthetic oligonucleotide; CAAGAAT chr11 5172667 5172690 5172687 +
agtatccctcaagaagcaattaac

SEQ ID NO: 66387 - DNA, 24 bp, Artificial Sequence
  Synthetic oligonucleotide; CCAGAAA chr11 5172682 5172705 5172702 +
gcaattaaccaagaataattattc

SEQ ID NO: 66388 - DNA, 24 bp, Artificial Sequence
  Synthetic oligonucleotide; AGAGAAA chr11 5172704 5172727 5172724 +
tcccagaaacttcgggtgtattag

SEQ ID NO: 66389 - DNA, 24 bp, Artificial Sequence
  Synthetic oligonucleotide; TTAGAAT chr11 5173165 5173188 5173185 +
aatttgtttgggggacttgggtaa

SEQ ID NO: 66390 - DNA, 24 bp, Artificial Sequence
  Synthetic oligonucleotide; TAAGAAA chr11 5173650 5173673 5173670 +
aaaagttcatgcaacaaacgactt

SEQ ID NO: 66391 - DNA, 24 bp, Artificial Sequence
  Synthetic oligonucleotide; CCAGAAT chr11 5173722 5173745 5173742 +
ttatgtatttcataagtttaatat

SEQ ID NO: 66392 - DNA, 24 bp, Artificial Sequence
  Synthetic oligonucleotide; CTAGAAA chr11 5173811 5173834 5173831 +
gcaaatgatgggaatgagtaattt

SEQ ID NO: 66393 - DNA, 24 bp, Artificial Sequence
  Synthetic oligonucleotide; CTAGAAT chr11 5173889 5173912 5173909 +
caataagacactacttcaaactta

SEQ ID NO: 66394 - DNA, 24 bp, Artificial Sequence
  Synthetic oligonucleotide; AGAGAAA chr11 5173908 5173931 5173928 +
acttactagaatgtctatacttta

SEQ ID NO: 66395 - DNA, 24 bp, Artificial Sequence
  Synthetic oligonucleotide; TAAGAAA chr11 5173952 5173975 5173972 +
aagtaacaagtgttgacaaagata

SEQ ID NO: 66396 - DNA, 24 bp, Artificial Sequence
  Synthetic oligonucleotide; GTAGAAA chr11 5174009 5174032 5174029 +
aaaatgttaagtggtgcaacttct

SEQ ID NO: 66397 - DNA, 24 bp, Artificial Sequence
  Synthetic oligonucleotide; CCAGAAT chr11 5174176 5174199 5174196 +
acaatagccaaaaggtggaaacaa

SEQ ID NO: 66398 - DNA, 24 bp, Artificial Sequence
  Synthetic oligonucleotide; AAAGAAT chr11 5174252 5174275 5174272 +
aatggaatattatgtagcaataaa

SEQ ID NO: 66399 - DNA, 24 bp, Artificial Sequence
  Synthetic oligonucleotide; TGAGAAA chr11 5174380 5174403 5174400 +
actgttttagccaacactgttaga

SEQ ID NO: 66400 - DNA, 24 bp, Artificial Sequence
  Synthetic oligonucleotide; CAAGAAT chr11 5174433 5174456 5174453 +
cacttggcttaaagtttcagtttc

SEQ ID NO: 66401 - DNA, 24 bp, Artificial Sequence
  Synthetic oligonucleotide; AGAGAAA chr11 5174593 5174616 5174613 +
gaattatctaaaatagactgattt

SEQ ID NO: 66402 - DNA, 24 bp, Artificial Sequence
  Synthetic oligonucleotide; AAAGAAA chr11 5174838 5174861 5174858 +
taaactttatcacaataaaaatgg

SEQ ID NO: 66403 - DNA, 24 bp, Artificial Sequence
  Synthetic oligonucleotide; AGAGAAT chr11 5174909 5174932 5174929 +
tgaatttattatgagttgtttctg

SEQ ID NO: 66404 - DNA, 24 bp, Artificial Sequence
  Synthetic oligonucleotide; CCAGAAT chr11 5175118 5175141 5175138 +
ctcggctcactgcaacctccgcct

SEQ ID NO: 66405 - DNA, 24 bp, Artificial Sequence
  Synthetic oligonucleotide; AAAGAAA chr11 5175342 5175365 5175362 +
acttaaatgatcatatcatataca

SEQ ID NO: 66406 - DNA, 24 bp, Artificial Sequence
  Synthetic oligonucleotide; AAAGAAA chr11 5175377 5175400 5175397 +
aaaaataaaggcaaagatgtaaat

SEQ ID NO: 66407 - DNA, 24 bp, Artificial Sequence
  Synthetic oligonucleotide; TCAGAAT chr11 5175916 5175939 5175936 +
gcaacagccatttcctaaatcctt

SEQ ID NO: 66408 - DNA, 24 bp, Artificial Sequence
  Synthetic oligonucleotide; GGAGAAA chr11 5176227 5176250 5176247 +
tttccatcatattattacttttat

SEQ ID NO: 66409 - DNA, 24 bp, Artificial Sequence
  Synthetic oligonucleotide; TTAGAAT chr11 5176259 5176282 5176279 +
gcaacgctgagtgtaaatttcaca

SEQ ID NO: 66410 - DNA, 24 bp, Artificial Sequence
  Synthetic oligonucleotide; GTAGAAA chr11 5176285 5176308 5176305 +
agaatgtccaaaacattgtgtaga

SEQ ID NO: 66411 - DNA, 24 bp, Artificial Sequence
  Synthetic oligonucleotide; TGAGAAA chr11 5176322 5176345 5176342 +
ctatatgaagtttaacagatgtac

SEQ ID NO: 66412 - DNA, 24 bp, Artificial Sequence
  Synthetic oligonucleotide; GCAGAAA chr11 5176384 5176407 5176404 +
acttaaatatttagtgtagtacta

SEQ ID NO: 66413 - DNA, 24 bp, Artificial Sequence
  Synthetic oligonucleotide; TTAGAAT chr11 5176408 5176431 5176428 +
gcagaaacaaattaattagatttt

SEQ ID NO: 66414 - DNA, 24 bp, Artificial Sequence
  Synthetic oligonucleotide; ACAGAAA chr11 5176650 5176673 5176670 +
catgtataaatttctataaaaatc

SEQ ID NO: 66415 - DNA, 24 bp, Artificial Sequence
  Synthetic oligonucleotide; ATAGAAA chr11 5176988 5177011 5177008 +
taaaaatttatttatcacccaggt

SEQ ID NO: 66416 - DNA, 24 bp, Artificial Sequence
  Synthetic oligonucleotide; TTAGAAA chr11 5177238 5177261 5177258 +
gagactttgtgagatgtcagtgag

SEQ ID NO: 66417 - DNA, 24 bp, Artificial Sequence
  Synthetic oligonucleotide; GCAGAAT chr11 5177360 5177383 5177380 +
acagcgggagtgttgtacatttca

SEQ ID NO: 66418 - DNA, 24 bp, Artificial Sequence
  Synthetic oligonucleotide; GGAGAAT chr11 5177532 5177555 5177552 +
tgaaaatagtatttctgaaaaaat

SEQ ID NO: 66419 - DNA, 24 bp, Artificial Sequence
  Synthetic oligonucleotide; AGAGAAA chr11 5177711 5177734 5177731 +
atcttaacagcatacactgatagg

SEQ ID NO: 66420 - DNA, 24 bp, Artificial Sequence
  Synthetic oligonucleotide; CAAGAAA chr11 5177857 5177880 5177877 +
tggttttacctccaaagcgatggg

SEQ ID NO: 66421 - DNA, 24 bp, Artificial Sequence
  Synthetic oligonucleotide; AAAGAAT chr11 5177867 5177890 5177887 +
tccaaagcgatgggcaagaaatga

SEQ ID NO: 66422 - DNA, 24 bp, Artificial Sequence
  Synthetic oligonucleotide; GGAGAAT chr11 5178283 5178306 5178303 +
catagcggtcaaatgccattgcca

SEQ ID NO: 66423 - DNA, 24 bp, Artificial Sequence
  Synthetic oligonucleotide; AAAGAAA chr11 5178531 5178554 5178551 +
cctgcaacagccacaatgtacata

SEQ ID NO: 66424 - DNA, 24 bp, Artificial Sequence
  Synthetic oligonucleotide; AAAGAAA chr11 5178626 5178649 5178646 +
atcctgggaattagtgtgattgcg

SEQ ID NO: 66425 - DNA, 24 bp, Artificial Sequence
  Synthetic oligonucleotide; TTAGAAA chr11 5178697 5178720 5178717 +
gtgaaagactacaaagttgaggat

SEQ ID NO: 66426 - DNA, 24 bp, Artificial Sequence
  Synthetic oligonucleotide; ACAGAAA chr11 5179182 5179205 5179202 +
ttatgaaatttagttgtgctgctt

SEQ ID NO: 66427 - DNA, 24 bp, Artificial Sequence
  Synthetic oligonucleotide; GGAGAAT chr11 5179606 5179629 5179626 +
ccagctactcaagaggctgaggca

SEQ ID NO: 66428 - DNA, 24 bp, Artificial Sequence
  Synthetic oligonucleotide; AAAGAAT chr11 5179729 5179752 5179749 +
aaaagtatatgcctcataggtggt

SEQ ID NO: 66429 - DNA, 24 bp, Artificial Sequence
  Synthetic oligonucleotide; TGAGAAT chr11 5180035 5180058 5180055 +
cattgttcaactcccacctatgag

SEQ ID NO: 66430 - DNA, 24 bp, Artificial Sequence
  Synthetic oligonucleotide; TCAGAAT chr11 5180079 5180102 5180099 +
tttttcgtccttgcgatactttgc

SEQ ID NO: 66431 - DNA, 24 bp, Artificial Sequence
  Synthetic oligonucleotide; GAAGAAA chr11 5181333 5181356 5181353 +
taaagtagttttttccaattctgt

SEQ ID NO: 66432 - DNA, 24 bp, Artificial Sequence
  Synthetic oligonucleotide; GTAGAAT chr11 5182401 5182424 5182421 +
taccagctcctccttgtacctctg

SEQ ID NO: 66433 - DNA, 24 bp, Artificial Sequence
  Synthetic oligonucleotide; GGAGAAA chr11 5182466 5182489 5182486 +
tggttggtaagcttcataagtgaa

SEQ ID NO: 66434 - DNA, 24 bp, Artificial Sequence
  Synthetic oligonucleotide; AAAGAAA chr11 5182559 5182582 5182579 +
tcctgaaggaagcagtaaacatgg

SEQ ID NO: 66435 - DNA, 24 bp, Artificial Sequence
  Synthetic oligonucleotide; GGAGAAA chr11 5182622 5182645 5182642 +
aattgtaaagaccatcaaggctag

SEQ ID NO: 66436 - DNA, 24 bp, Artificial Sequence
  Synthetic oligonucleotide; ACAGAAA chr11 5183143 5183166 5183163 +
gtcaacattagacagatcaacgag

SEQ ID NO: 66437 - DNA, 24 bp, Artificial Sequence
  Synthetic oligonucleotide; ATAGAAT chr11 5183234 5183257 5183254 +
tacagaactctccatcccaaatca

SEQ ID NO: 66438 - DNA, 24 bp, Artificial Sequence
  Synthetic oligonucleotide; ACAGAAA chr11 5183325 5183348 5183345 +
gcactcctcagcaaacgtaaaaga

SEQ ID NO: 66439 - DNA, 24 bp, Artificial Sequence
  Synthetic oligonucleotide; TAAGAAA chr11 5183384 5183407 5183404 +
tgcaatcaaactagaactcaggat

SEQ ID NO: 66440 - DNA, 24 bp, Artificial Sequence
  Synthetic oligonucleotide; GCAGAAA chr11 5183469 5183492 5183489 +
tactgggtacataacaaaatgaag

SEQ ID NO: 66441 - DNA, 24 bp, Artificial Sequence
  Synthetic oligonucleotide; CGAGAAT chr11 5183498 5183521 5183518 +
aataaagatgttctttgaaaccaa

SEQ ID NO: 66442 - DNA, 24 bp, Artificial Sequence
  Synthetic oligonucleotide; ACAGAAT chr11 5183519 5183542 5183539 +
caacgagaataaagatacaacaaa

SEQ ID NO: 66443 - DNA, 24 bp, Artificial Sequence
  Synthetic oligonucleotide; AAAGAAA chr11 5183584 5183607 5183604 +
aatttatagcactaaatgcccaca

SEQ ID NO: 66444 - DNA, 24 bp, Artificial Sequence
  Synthetic oligonucleotide; CAAGAAA chr11 5183679 5183702 5183699 +
acactttcaaaagctagcggaagg

SEQ ID NO: 66445 - DNA, 24 bp, Artificial Sequence
  Synthetic oligonucleotide; GAAGAAA chr11 5183813 5183836 5183833 +
tagactgctagcaagactaataaa

SEQ ID NO: 66446 - DNA, 24 bp, Artificial Sequence
  Synthetic oligonucleotide; TAAGAAA chr11 5183845 5183868 5183865 +
gagagaagactcaaatagatgcaa

SEQ ID NO: 66447 - DNA, 24 bp, Artificial Sequence
  Synthetic oligonucleotide; AGAGAAT chr11 5183901 5183924 5183921 +
cccacagacatacaaactaccatc

SEQ ID NO: 66448 - DNA, 24 bp, Artificial Sequence
  Synthetic oligonucleotide; CTAGAAA chr11 5183934 5183957 5183954 +
tataaacacctctacgcaaataaa

SEQ ID NO: 66449 - DNA, 24 bp, Artificial Sequence
  Synthetic oligonucleotide; GTAGAAA chr11 5183946 5183969 5183966 +
tacgcaaataaactagaaaatcta

SEQ ID NO: 66450 - DNA, 24 bp, Artificial Sequence
  Synthetic oligonucleotide; GGAGAAA chr11 5183997 5184020 5184017 +
tacaccctcccaagactaaaccag

SEQ ID NO: 66451 - DNA, 24 bp, Artificial Sequence
  Synthetic oligonucleotide; CTAGAAA chr11 5184307 5184330 5184327 +
ctagctagctagctagctagctag

SEQ ID NO: 66452 - DNA, 24 bp, Artificial Sequence
  Synthetic oligonucleotide; TAAGAAA chr11 5184484 5184507 5184504 +
gttttttgaggtggcacaggggct

SEQ ID NO: 66453 - DNA, 24 bp, Artificial Sequence
  Synthetic oligonucleotide; TTAGAAT chr11 5184650 5184673 5184670 +
gggtcccattttttgagttacagt

SEQ ID NO: 66454 - DNA, 24 bp, Artificial Sequence
  Synthetic oligonucleotide; TTAGAAT chr11 5184813 5184836 5184833 +
ctatttaatatatatctcacattg

SEQ ID NO: 66455 - DNA, 24 bp, Artificial Sequence
  Synthetic oligonucleotide; AGAGAAA chr11 5184845 5184868 5184865 +
ttttaagtaaactgttgatgtttc

SEQ ID NO: 66456 - DNA, 24 bp, Artificial Sequence
  Synthetic oligonucleotide; AAAGAAT chr11 5184854 5184877 5184874 +
aactgttgatgtttcagagaaagg

SEQ ID NO: 66457 - DNA, 24 bp, Artificial Sequence
  Synthetic oligonucleotide; GAAGAAT chr11 5184978 5185001 5184998 +
catcaggacattagggatgggaga

SEQ ID NO: 66458 - DNA, 24 bp, Artificial Sequence
  Synthetic oligonucleotide; AAAGAAA chr11 5185023 5185046 5185043 +
aatacaggaatgaagataaggggg

SEQ ID NO: 66459 - DNA, 24 bp, Artificial Sequence
  Synthetic oligonucleotide; ATAGAAA chr11 5185246 5185269 5185266 +
acggagcaaagatagtgtggtgta

SEQ ID NO: 66460 - DNA, 24 bp, Artificial Sequence
  Synthetic oligonucleotide; CTAGAAT chr11 5185941 5185964 5185961 +
tattactgagccttgttttaacta

SEQ ID NO: 66461 - DNA, 24 bp, Artificial Sequence
  Synthetic oligonucleotide; AAAGAAA chr11 5185991 5186014 5186011 +
gtacaacattcaaatctgcatatc

SEQ ID NO: 66462 - DNA, 24 bp, Artificial Sequence
  Synthetic oligonucleotide; AGAGAAA chr11 5186023 5186046 5186043 +
tgagcattatttaaacatattcta

SEQ ID NO: 66463 - DNA, 24 bp, Artificial Sequence
  Synthetic oligonucleotide; GAAGAAT chr11 5186171 5186194 5186191 +
aaatgttagatgattaagttatcg

SEQ ID NO: 66464 - DNA, 24 bp, Artificial Sequence
  Synthetic oligonucleotide; CTAGAAT chr11 5186271 5186294 5186291 +
actcagtttacttacttgcatttt

SEQ ID NO: 66465 - DNA, 24 bp, Artificial Sequence
  Synthetic oligonucleotide; GGAGAAA chr11 5186460 5186483 5186480 +
ctgcttctggtacatagtccacag

SEQ ID NO: 66466 - DNA, 24 bp, Artificial Sequence
  Synthetic oligonucleotide; TCAGAAT chr11 5186750 5186773 5186770 +
tttcttggtcacatggtaaatggg

SEQ ID NO: 66467 - DNA, 24 bp, Artificial Sequence
  Synthetic oligonucleotide; CAAGAAA chr11 5186766 5186789 5186786 +
taaatgggtcagaatctgaagggc

SEQ ID NO: 66468 - DNA, 24 bp, Artificial Sequence
  Synthetic oligonucleotide; ATAGAAA chr11 5186846 5186869 5186866 +
aggaatacagatgaagataaaaag

SEQ ID NO: 66469 - DNA, 24 bp, Artificial Sequence
  Synthetic oligonucleotide; AAAGAAT chr11 5186980 5187003 5187000 +
atctgtgattttctgatatttttc

SEQ ID NO: 66470 - DNA, 24 bp, Artificial Sequence
  Synthetic oligonucleotide; TAAGAAT chr11 5187214 5187237 5187234 +
gtgagtgctatatggtgggagata

SEQ ID NO: 66471 - DNA, 24 bp, Artificial Sequence
  Synthetic oligonucleotide; AAAGAAA chr11 5187312 5187335 5187332 +
cttcaccttgcttttttagacatt

SEQ ID NO: 66472 - DNA, 24 bp, Artificial Sequence
  Synthetic oligonucleotide; AAAGAAA chr11 5187351 5187374 5187371 +
cttatcttcccacctatccttgga

SEQ ID NO: 66473 - DNA, 24 bp, Artificial Sequence
  Synthetic oligonucleotide; ATAGAAA chr11 5187379 5187402 5187399 +
aaattaaaggaatcaaaggatatt

SEQ ID NO: 66474 - DNA, 24 bp, Artificial Sequence
  Synthetic oligonucleotide; GGAGAAA chr11 5187393 5187416 5187413 +
aaaggatattatagaaaaagagat

SEQ ID NO: 66475 - DNA, 24 bp, Artificial Sequence
  Synthetic oligonucleotide; GGAGAAT chr11 5187406 5187429 5187426 +
gaaaaagagatggagaaaggacaa

SEQ ID NO: 66476 - DNA, 24 bp, Artificial Sequence
  Synthetic oligonucleotide; ACAGAAA chr11 5187423 5187446 5187443 +
aggacaaggagaatttaggggaca

SEQ ID NO: 66477 - DNA, 24 bp, Artificial Sequence
  Synthetic oligonucleotide; AAAGAAT chr11 5187471 5187494 5187491 +
ctacctgatagtgacaggaagaac

SEQ ID NO: 66478 - DNA, 24 bp, Artificial Sequence
  Synthetic oligonucleotide; ATAGAAT chr11 5187476 5187499 5187496 +
tgatagtgacaggaagaacaaaga

SEQ ID NO: 66479 - DNA, 24 bp, Artificial Sequence
  Synthetic oligonucleotide; GAAGAAT chr11 5187546 5187569 5187566 +
ttaaatctggggactctaaaactt

SEQ ID NO: 66480 - DNA, 24 bp, Artificial Sequence
  Synthetic oligonucleotide; TTAGAAA chr11 5187775 5187798 5187795 +
tctacagtctttgagccacatgct

SEQ ID NO: 66481 - DNA, 24 bp, Artificial Sequence
  Synthetic oligonucleotide; GTAGAAT chr11 5187931 5187954 5187951 +
ttgcagggaacatgtaagtattat

SEQ ID NO: 66482 - DNA, 24 bp, Artificial Sequence
  Synthetic oligonucleotide; TCAGAAA chr11 5187974 5187997 5187994 +
taaaaattctcacataagttcatg

SEQ ID NO: 66483 - DNA, 24 bp, Artificial Sequence
  Synthetic oligonucleotide; CAAGAAA chr11 5188318 5188341 5188338 +
tatgggacttgagtggaggaaatc

SEQ ID NO: 66484 - DNA, 24 bp, Artificial Sequence
  Synthetic oligonucleotide; AAAGAAT chr11 5188323 5188346 5188343 +
gacttgagtggaggaaatccaaga

SEQ ID NO: 66485 - DNA, 24 bp, Artificial Sequence
  Synthetic oligonucleotide; CCAGAAA chr11 5188443 5188466 5188463 +
tgctagtaaagctgggagttggtg

SEQ ID NO: 66486 - DNA, 24 bp, Artificial Sequence
  Synthetic oligonucleotide; ACAGAAA chr11 5188455 5188478 5188475 +
tgggagttggtgccagaaaagaga

SEQ ID NO: 66487 - DNA, 24 bp, Artificial Sequence
  Synthetic oligonucleotide; GAAGAAT chr11 5188776 5188799 5188796 +
caaagatttttcccctgccacatt

SEQ ID NO: 66488 - DNA, 24 bp, Artificial Sequence
  Synthetic oligonucleotide; GAAGAAT chr11 5188853 5188876 5188873 +
actttagagatgatctttatctgg

SEQ ID NO: 66489 - DNA, 24 bp, Artificial Sequence
  Synthetic oligonucleotide; AAAGAAA chr11 5189041 5189064 5189061 +
gaagccaatacgactgcttgtatt

SEQ ID NO: 66490 - DNA, 24 bp, Artificial Sequence
  Synthetic oligonucleotide; TGAGAAT chr11 5189523 5189546 5189543 +
ctcaggtatttccttatagcaaga

SEQ ID NO: 66491 - DNA, 24 bp, Artificial Sequence
  Synthetic oligonucleotide; ACAGAAA chr11 5189538 5189561 5189558 +
atagcaagatgagaatggaccagt

SEQ ID NO: 66492 - DNA, 24 bp, Artificial Sequence
  Synthetic oligonucleotide; GGAGAAT chr11 5189667 5189690 5189687 +
ctcagaagaagacagggagatgag

SEQ ID NO: 66493 - DNA, 24 bp, Artificial Sequence
  Synthetic oligonucleotide; AGAGAAT chr11 5189848 5189871 5189868 +
ttgactgcactgtgcctctacctt

SEQ ID NO: 66494 - DNA, 24 bp, Artificial Sequence
  Synthetic oligonucleotide; AAAGAAA chr11 5189972 5189995 5189992 +
caacctatgctcatatgtgtgagc

SEQ ID NO: 66495 - DNA, 24 bp, Artificial Sequence
  Synthetic oligonucleotide; GTAGAAA chr11 5190055 5190078 5190075 +
gaaaattatctgctcggccatgtg

SEQ ID NO: 66496 - DNA, 24 bp, Artificial Sequence
  Synthetic oligonucleotide; GTAGAAA chr11 5190100 5190123 5190120 +
tcaaaggagcaattcaagcaggct

SEQ ID NO: 66497 - DNA, 24 bp, Artificial Sequence
  Synthetic oligonucleotide; GGAGAAT chr11 5190153 5190176 5190173 +
gagttctaatagccaaaataaagg

SEQ ID NO: 66498 - DNA, 24 bp, Artificial Sequence
  Synthetic oligonucleotide; GTAGAAA chr11 5190471 5190494 5190491 +
ctccacctagatttcagaggatgt

SEQ ID NO: 66499 - DNA, 24 bp, Artificial Sequence
  Synthetic oligonucleotide; TGAGAAA chr11 5190615 5190638 5190635 +
ctggggcactgcctagcagagcta

SEQ ID NO: 66500 - DNA, 24 bp, Artificial Sequence
  Synthetic oligonucleotide; CCAGAAT chr11 5190643 5190666 5190663 +
aaaagggccaccgtcctccagacc

SEQ ID NO: 66501 - DNA, 24 bp, Artificial Sequence
  Synthetic oligonucleotide; CTAGAAA chr11 5190681 5190704 5190701 +
ccactgacagtttgcaccgtgcac

SEQ ID NO: 66502 - DNA, 24 bp, Artificial Sequence
  Synthetic oligonucleotide; GAAGAAA chr11 5190879 5190902 5190899 +
tatttgtccgttttaaactgctat

SEQ ID NO: 66503 - DNA, 24 bp, Artificial Sequence
  Synthetic oligonucleotide; AAAGAAA chr11 5190908 5190931 5190928 +
aatacccgagactgggtaatttat

SEQ ID NO: 66504 - DNA, 24 bp, Artificial Sequence
  Synthetic oligonucleotide; GAAGAAA chr11 5191179 5191202 5191199 +
gggattatgggacctactattcaa

SEQ ID NO: 66505 - DNA, 24 bp, Artificial Sequence
  Synthetic oligonucleotide; AAAGAAT chr11 5192226 5192249 5192246 +
gcaatagctgtctgaaactaagtc

SEQ ID NO: 66506 - DNA, 24 bp, Artificial Sequence
  Synthetic oligonucleotide; AGAGAAT chr11 5192376 5192399 5192396 +
aaataggttaatggagtaatatgt

SEQ ID NO: 66507 - DNA, 24 bp, Artificial Sequence
  Synthetic oligonucleotide; AAAGAAA chr11 5192396 5192419 5192416 +
atgtagagaatgatgactataatt

SEQ ID NO: 66508 - DNA, 24 bp, Artificial Sequence
  Synthetic oligonucleotide; TAAGAAA chr11 5192667 5192690 5192687 +
ggtcacatgaaaagactagttttg

SEQ ID NO: 66509 - DNA, 24 bp, Artificial Sequence
  Synthetic oligonucleotide; GTAGAAT chr11 5192966 5192989 5192986 +
caattggattgtttgttttttatt

SEQ ID NO: 66510 - DNA, 24 bp, Artificial Sequence
  Synthetic oligonucleotide; TCAGAAA chr11 5193151 5193174 5193171 +
atttcaactgctgtgttcttttgt

SEQ ID NO: 66511 - DNA, 24 bp, Artificial Sequence
  Synthetic oligonucleotide; TAAGAAT chr11 5193450 5193473 5193470 +
atctaaaatgagtggttatttaat

SEQ ID NO: 66512 - DNA, 24 bp, Artificial Sequence
  Synthetic oligonucleotide; AAAGAAT chr11 5193648 5193671 5193668 +
gtgggttcttggtctcgctgactt

SEQ ID NO: 66513 - DNA, 24 bp, Artificial Sequence
  Synthetic oligonucleotide; GAAGAAT chr11 5194005 5194028 5194025 +
gtgagcagcagtaagatttattgt

SEQ ID NO: 66514 - DNA, 24 bp, Artificial Sequence
  Synthetic oligonucleotide; AAAGAAT chr11 5194420 5194443 5194440 +
gttccatatttcatggtgaggaac

SEQ ID NO: 66515 - DNA, 24 bp, Artificial Sequence
  Synthetic oligonucleotide; TAAGAAA chr11 5194589 5194612 5194609 +
atgtccaacaatgatagactggat

SEQ ID NO: 66516 - DNA, 24 bp, Artificial Sequence
  Synthetic oligonucleotide; TCAGAAA chr11 5195056 5195079 5195076 +
ctggccagttactttgaaggctga

SEQ ID NO: 66517 - DNA, 24 bp, Artificial Sequence
  Synthetic oligonucleotide; AGAGAAA chr11 5195280 5195303 5195300 +
cactaatcattttgccagaactaa

SEQ ID NO: 66518 - DNA, 24 bp, Artificial Sequence
  Synthetic oligonucleotide; CCAGAAA chr11 5195392 5195415 5195412 +
tttataagtaatttctgtgttttt

SEQ ID NO: 66519 - DNA, 24 bp, Artificial Sequence
  Synthetic oligonucleotide; AGAGAAA chr11 5195582 5195605 5195602 +
gtacatctatagctttagtggatt

SEQ ID NO: 66520 - DNA, 24 bp, Artificial Sequence
  Synthetic oligonucleotide; GCAGAAA chr11 5195592 5195615 5195612 +
agctttagtggattagagaaagta

SEQ ID NO: 66521 - DNA, 24 bp, Artificial Sequence
  Synthetic oligonucleotide; ACAGAAA chr11 5195682 5195705 5195702 +
taaatttatattttattattcagt

SEQ ID NO: 66522 - DNA, 24 bp, Artificial Sequence
  Synthetic oligonucleotide; CAAGAAA chr11 5195760 5195783 5195780 +
aaagcttttaacaaacactcagac

SEQ ID NO: 66523 - DNA, 24 bp, Artificial Sequence
  Synthetic oligonucleotide; GCAGAAA chr11 5195879 5195902 5195899 +
ttacatggtgccaagactgcaggg

SEQ ID NO: 66524 - DNA, 24 bp, Artificial Sequence
  Synthetic oligonucleotide; TGAGAAT chr11 5196340 5196363 5196360 +
agggatctaggttgcggcttctta

SEQ ID NO: 66525 - DNA, 24 bp, Artificial Sequence
  Synthetic oligonucleotide; TAAGAAT chr11 5196548 5196571 5196568 +
tcctgaatcatgtcctctcacttc

SEQ ID NO: 66526 - DNA, 24 bp, Artificial Sequence
  Synthetic oligonucleotide; GAAGAAT chr11 5197634 5197657 5197654 +
gtggaaaacatattgtcagttgtt

SEQ ID NO: 66527 - DNA, 24 bp, Artificial Sequence
  Synthetic oligonucleotide; TGAGAAA chr11 5197736 5197759 5197756 +
ttagaaggaagcttctttggccat

SEQ ID NO: 66528 - DNA, 24 bp, Artificial Sequence
  Synthetic oligonucleotide; CCAGAAA chr11 5198430 5198453 5198450 +
ttctaaccagatactttactctgt

SEQ ID NO: 66529 - DNA, 24 bp, Artificial Sequence
  Synthetic oligonucleotide; TTAGAAA chr11 5198465 5198488 5198485 +
ttcctcactttgaggcttaagcta

SEQ ID NO: 66530 - DNA, 24 bp, Artificial Sequence
  Synthetic oligonucleotide; ATAGAAT chr11 5198695 5198718 5198715 +
aacacttaccttcttagataccta

SEQ ID NO: 66531 - DNA, 24 bp, Artificial Sequence
  Synthetic oligonucleotide; TTAGAAA chr11 5198801 5198824 5198821 +
ctttggaaagctgcactagcttac

SEQ ID NO: 66532 - DNA, 24 bp, Artificial Sequence
  Synthetic oligonucleotide; TCAGAAT chr11 5198847 5198870 5198867 +
tcttttatcttttttcttttaaac

SEQ ID NO: 66533 - DNA, 24 bp, Artificial Sequence
  Synthetic oligonucleotide; TTAGAAA chr11 5199254 5199277 5199274 +
attttatagaacatcgccatcagt

SEQ ID NO: 66534 - DNA, 24 bp, Artificial Sequence
  Synthetic oligonucleotide; AGAGAAT chr11 5199354 5199377 5199374 +
ttgaaggttaattaagtaaacctc

SEQ ID NO: 66535 - DNA, 24 bp, Artificial Sequence
  Synthetic oligonucleotide; AAAGAAA chr11 5199362 5199385 5199382 +
taattaagtaaacctcagagaatg

SEQ ID NO: 66536 - DNA, 24 bp, Artificial Sequence
  Synthetic oligonucleotide; AGAGAAA chr11 5199724 5199747 5199744 +
ctcaatatctctcaatatcttttc

SEQ ID NO: 66537 - DNA, 24 bp, Artificial Sequence
  Synthetic oligonucleotide; TAAGAAT chr11 5199983 5200006 5200003 +
gagaggcaactgccaggactgact

SEQ ID NO: 66538 - DNA, 24 bp, Artificial Sequence
  Synthetic oligonucleotide; GGAGAAA chr11 5199999 5200022 5200019 +
gactgacttaagaatcaggatgta

SEQ ID NO: 66539 - DNA, 24 bp, Artificial Sequence
  Synthetic oligonucleotide; GCAGAAA chr11 5200113 5200136 5200133 +
taagcggagaagatcctggtgcag

SEQ ID NO: 66540 - DNA, 24 bp, Artificial Sequence
  Synthetic oligonucleotide; TGAGAAA chr11 5200123 5200146 5200143 +
agatcctggtgcaggcagaaagag

SEQ ID NO: 66541 - DNA, 24 bp, Artificial Sequence
  Synthetic oligonucleotide; AAAGAAA chr11 5200185 5200208 5200205 +
cagacagatgatggggggtgtaat

SEQ ID NO: 66542 - DNA, 24 bp, Artificial Sequence
  Synthetic oligonucleotide; CCAGAAA chr11 5200594 5200617 5200614 +
agccaggggtattgctgctccatg

SEQ ID NO: 66543 - DNA, 24 bp, Artificial Sequence
  Synthetic oligonucleotide; GAAGAAA chr11 5200610 5200633 5200630 +
gctccatgccagaaaatccagtga

SEQ ID NO: 66544 - DNA, 24 bp, Artificial Sequence
  Synthetic oligonucleotide; GAAGAAT chr11 5200618 5200641 5200638 +
ccagaaaatccagtgagaagaaag

SEQ ID NO: 66545 - DNA, 24 bp, Artificial Sequence
  Synthetic oligonucleotide; TGAGAAA chr11 5200667 5200690 5200687 +
ttactgaagtaatcattctggaac

SEQ ID NO: 66546 - DNA, 24 bp, Artificial Sequence
  Synthetic oligonucleotide; TGAGAAA chr11 5200780 5200803 5200800 +
acttactgacttaaaaaaaacagc

SEQ ID NO: 66547 - DNA, 24 bp, Artificial Sequence
  Synthetic oligonucleotide; TGAGAAA chr11 5200821 5200844 5200841 +
ttgagacatagtatccattgcctt

SEQ ID NO: 66548 - DNA, 24 bp, Artificial Sequence
  Synthetic oligonucleotide; AGAGAAT chr11 5201349 5201372 5201369 +
aactcatttgtgcctttgtgatgt

SEQ ID NO: 66549 - DNA, 24 bp, Artificial Sequence
  Synthetic oligonucleotide; GCAGAAT chr11 5201562 5201585 5201582 +
tataatttcaaaagcctcatggta

SEQ ID NO: 66550 - DNA, 24 bp, Artificial Sequence
  Synthetic oligonucleotide; TGAGAAT chr11 5201616 5201639 5201636 +
tttgcctgctttaagttccagacc

SEQ ID NO: 66551 - DNA, 24 bp, Artificial Sequence
  Synthetic oligonucleotide; ATAGAAT chr11 5201918 5201941 5201938 +
actatttttaatacttttttctcc

SEQ ID NO: 66552 - DNA, 24 bp, Artificial Sequence
  Synthetic oligonucleotide; TAAGAAT chr11 5202426 5202449 5202446 +
tcatctgagtgtttaatcttaaaa

SEQ ID NO: 66553 - DNA, 24 bp, Artificial Sequence
  Synthetic oligonucleotide; CCAGAAA chr11 5202625 5202648 5202645 +
tttcatcaatttctaccatttcta

SEQ ID NO: 66554 - DNA, 24 bp, Artificial Sequence
  Synthetic oligonucleotide; CAAGAAT chr11 5203323 5203346 5203343 +
taggaaccatatctgttttttgct

SEQ ID NO: 66555 - DNA, 24 bp, Artificial Sequence
  Synthetic oligonucleotide; ATAGAAT chr11 5203349 5203372 5203369 +
agaatatgaaaaataagggttagc

SEQ ID NO: 66556 - DNA, 24 bp, Artificial Sequence
  Synthetic oligonucleotide; GGAGAAT chr11 5203906 5203929 5203926 +
ccagttacttgggagactgaggca

SEQ ID NO: 66557 - DNA, 24 bp, Artificial Sequence
  Synthetic oligonucleotide; GAAGAAA chr11 5204115 5204138 5204135 +
tcaggcttcttcagactagataca

SEQ ID NO: 66558 - DNA, 24 bp, Artificial Sequence
  Synthetic oligonucleotide; AAAGAAA chr11 5204287 5204310 5204307 +
gataaggtaaataaatgaagattt

SEQ ID NO: 66559 - DNA, 24 bp, Artificial Sequence
  Synthetic oligonucleotide; GGAGAAA chr11 5204492 5204515 5204512 +
acaaatagcagtgaatttgagtct

SEQ ID NO: 66560 - DNA, 24 bp, Artificial Sequence
  Synthetic oligonucleotide; GCAGAAA chr11 5204632 5204655 5204652 +
tctgattaaaactgacctacatat

SEQ ID NO: 66561 - DNA, 24 bp, Artificial Sequence
  Synthetic oligonucleotide; TCAGAAT chr11 5204669 5204692 5204689 +
ggttttttttttttttctgtcttt

SEQ ID NO: 66562 - DNA, 24 bp, Artificial Sequence
  Synthetic oligonucleotide; AGAGAAA chr11 5204745 5204768 5204765 +
caatagtcattgttccaaagacat

SEQ ID NO: 66563 - DNA, 24 bp, Artificial Sequence
  Synthetic oligonucleotide; AGAGAAT chr11 5205131 5205154 5205151 +
atgattctgaatatgctagttcag

SEQ ID NO: 66564 - DNA, 24 bp, Artificial Sequence
  Synthetic oligonucleotide; TCAGAAA chr11 5205720 5205743 5205740 +
tggctttaatatgttcccttttct

SEQ ID NO: 66565 - DNA, 24 bp, Artificial Sequence
  Synthetic oligonucleotide; TAAGAAA chr11 5205757 5205780 5205777 +
gacagcttaaaataaaattaacta

SEQ ID NO: 66566 - DNA, 24 bp, Artificial Sequence
  Synthetic oligonucleotide; GAAGAAA chr11 5205784 5205807 5205804 +
gaaactggtaaacactgaatgaaa

SEQ ID NO: 66567 - DNA, 24 bp, Artificial Sequence
  Synthetic oligonucleotide; GCAGAAA chr11 5205796 5205819 5205816 +
cactgaatgaaagaagaaaaccaa

SEQ ID NO: 66568 - DNA, 24 bp, Artificial Sequence
  Synthetic oligonucleotide; CTAGAAT chr11 5206337 5206360 5206357 +
attttaagttgtcctctgaaaatt

SEQ ID NO: 66569 - DNA, 24 bp, Artificial Sequence
  Synthetic oligonucleotide; TAAGAAA chr11 5206394 5206417 5206414 +
ataaaggaaattgtaaaggctttc

SEQ ID NO: 66570 - DNA, 24 bp, Artificial Sequence
  Synthetic oligonucleotide; TAAGAAT chr11 5206533 5206556 5206553 +
ctttctcatcaccacacagtggaa

SEQ ID NO: 66571 - DNA, 24 bp, Artificial Sequence
  Synthetic oligonucleotide; TCAGAAA chr11 5206589 5206612 5206609 +
tgccatatcaaattagtaaagcct

SEQ ID NO: 66572 - DNA, 24 bp, Artificial Sequence
  Synthetic oligonucleotide; CAAGAAA chr11 5206750 5206773 5206770 +
aatttccagttctatctttctgtt

SEQ ID NO: 66573 - DNA, 24 bp, Artificial Sequence
  Synthetic oligonucleotide; AAAGAAT chr11 5206755 5206778 5206775 +
ccagttctatctttctgttcaaga

SEQ ID NO: 66574 - DNA, 24 bp, Artificial Sequence
  Synthetic oligonucleotide; ATAGAAA chr11 5207246 5207269 5207266 +
ttaggaggggagtttttttttttt

SEQ ID NO: 66575 - DNA, 24 bp, Artificial Sequence
  Synthetic oligonucleotide; CTAGAAT chr11 5207563 5207586 5207583 +
ctaaaattgtaatttcttggattc

SEQ ID NO: 66576 - DNA, 24 bp, Artificial Sequence
  Synthetic oligonucleotide; TTAGAAT chr11 5207588 5207611 5207608 +
tagaatttctaaatctgtggattt

SEQ ID NO: 66577 - DNA, 24 bp, Artificial Sequence
  Synthetic oligonucleotide; CTAGAAT chr11 5207749 5207772 5207769 +
aactaatcagaaggaaccattgtc

SEQ ID NO: 66578 - DNA, 24 bp, Artificial Sequence
  Synthetic oligonucleotide; CCAGAAA chr11 5207774 5207797 5207794 +
tagaatggggcaagtgtacaatac

SEQ ID NO: 66579 - DNA, 24 bp, Artificial Sequence
  Synthetic oligonucleotide; GGAGAAA chr11 5207929 5207952 5207949 +
aggttctgtggtaaacgtcagcgt

SEQ ID NO: 66580 - DNA, 24 bp, Artificial Sequence
  Synthetic oligonucleotide; GAAGAAA chr11 5208010 5208033 5208030 +
gagaagctgactgtggctataggt

SEQ ID NO: 66581 - DNA, 24 bp, Artificial Sequence
  Synthetic oligonucleotide; TAAGAAA chr11 5208139 5208162 5208159 +
gaatttatgttaatttactcacta

SEQ ID NO: 66582 - DNA, 24 bp, Artificial Sequence
  Synthetic oligonucleotide; CAAGAAA chr11 5208383 5208406 5208403 +
tttgaaatttgagtagagtaggac

SEQ ID NO: 66583 - DNA, 24 bp, Artificial Sequence
  Synthetic oligonucleotide; AAAGAAT chr11 5208463 5208486 5208483 +
acgcagtaattagctccttagctg

SEQ ID NO: 66584 - DNA, 24 bp, Artificial Sequence
  Synthetic oligonucleotide; TGAGAAA chr11 5208654 5208677 5208674 +
tatttatgataataattctagttg

SEQ ID NO: 66585 - DNA, 24 bp, Artificial Sequence
  Synthetic oligonucleotide; AAAGAAT chr11 5209005 5209028 5209025 +
aagacactgctgactttggaattg

SEQ ID NO: 66586 - DNA, 24 bp, Artificial Sequence
  Synthetic oligonucleotide; TAAGAAT chr11 5209304 5209327 5209324 +
aaagcctaattgactaaagccatt

SEQ ID NO: 66587 - DNA, 24 bp, Artificial Sequence
  Synthetic oligonucleotide; AAAGAAA chr11 5209346 5209369 5209366 +
gttagtatgcacttcttgaaatgc

SEQ ID NO: 66588 - DNA, 24 bp, Artificial Sequence
  Synthetic oligonucleotide; GAAGAAA chr11 5210111 5210134 5210131 +
ttattattattctcatttgtagtt

SEQ ID NO: 66589 - DNA, 24 bp, Artificial Sequence
  Synthetic oligonucleotide; CCAGAAA chr11 5210156 5210179 5210176 +
gtttaaattgctcctggctacatc

SEQ ID NO: 66590 - DNA, 24 bp, Artificial Sequence
  Synthetic oligonucleotide; ACAGAAT chr11 5210263 5210286 5210283 +
ggaagcaagctggcctcaactgga

SEQ ID NO: 66591 - DNA, 24 bp, Artificial Sequence
  Synthetic oligonucleotide; AGAGAAA chr11 5210271 5210294 5210291 +
gctggcctcaactggaacagaatg

SEQ ID NO: 66592 - DNA, 24 bp, Artificial Sequence
  Synthetic oligonucleotide; CCAGAAT chr11 5210418 5210441 5210438 +
aaatataaagcctaatcctgccat

SEQ ID NO: 66593 - DNA, 24 bp, Artificial Sequence
  Synthetic oligonucleotide; GCAGAAT chr11 5210461 5210484 5210481 +
ggggaaaagggaagggaaaaagga

SEQ ID NO: 66594 - DNA, 24 bp, Artificial Sequence
  Synthetic oligonucleotide; TTAGAAA chr11 5210714 5210737 5210734 +
ataggacttgagttcctcgaagga

SEQ ID NO: 66595 - DNA, 24 bp, Artificial Sequence
  Synthetic oligonucleotide; GGAGAAA chr11 5210839 5210862 5210859 +
gttggagaccagcttgggcaacat

SEQ ID NO: 66596 - DNA, 24 bp, Artificial Sequence
  Synthetic oligonucleotide; CTAGAAA chr11 5211038 5211061 5211058 +
ctgtcaaaaaaaaaaaaaagagag

SEQ ID NO: 66597 - DNA, 24 bp, Artificial Sequence
  Synthetic oligonucleotide; AAAGAAA chr11 5211042 5211065 5211062 +
caaaaaaaaaaaaaagagagctag

SEQ ID NO: 66598 - DNA, 24 bp, Artificial Sequence
  Synthetic oligonucleotide; AAAGAAA chr11 5211046 5211069 5211066 +
aaaaaaaaaaagagagctagaaag

SEQ ID NO: 66599 - DNA, 24 bp, Artificial Sequence
  Synthetic oligonucleotide; AGAGAAT chr11 5211249 5211272 5211269 +
taaaatcaaattacaaagaaggac

SEQ ID NO: 66600 - DNA, 24 bp, Artificial Sequence
  Synthetic oligonucleotide; GAAGAAT chr11 5211365 5211388 5211385 +
ctaataggtggaaagaggagcaag

SEQ ID NO: 66601 - DNA, 24 bp, Artificial Sequence
  Synthetic oligonucleotide; ATAGAAT chr11 5211832 5211855 5211852 +
cacaggtgtgcatgtgtctttgtg

SEQ ID NO: 66602 - DNA, 24 bp, Artificial Sequence
  Synthetic oligonucleotide; GCAGAAA chr11 5212330 5212353 5212350 +
tcagttgatagtttcttttgctgt

SEQ ID NO: 66603 - DNA, 24 bp, Artificial Sequence
  Synthetic oligonucleotide; GAAGAAT chr11 5213103 5213126 5213123 +
taaagtgtatttttctagttctgt

SEQ ID NO: 66604 - DNA, 24 bp, Artificial Sequence
  Synthetic oligonucleotide; ACAGAAA chr11 5213491 5213514 5213511 +
ccttgactatggtgttttctagat

SEQ ID NO: 66605 - DNA, 24 bp, Artificial Sequence
  Synthetic oligonucleotide; GAAGAAT chr11 5213640 5213663 5213660 +
tccttgtcttgtgccagttttcaa

SEQ ID NO: 66606 - DNA, 24 bp, Artificial Sequence
  Synthetic oligonucleotide; ATAGAAT chr11 5214141 5214164 5214161 +
ttccaactcttctttgtgcatctg

SEQ ID NO: 66607 - DNA, 24 bp, Artificial Sequence
  Synthetic oligonucleotide; AGAGAAA chr11 5214529 5214552 5214549 +
ggacacagcttagacagtgttaag

SEQ ID NO: 66608 - DNA, 24 bp, Artificial Sequence
  Synthetic oligonucleotide; CAAGAAA chr11 5214652 5214675 5214672 +
accaaccctaaatctagcagaaga

SEQ ID NO: 66609 - DNA, 24 bp, Artificial Sequence
  Synthetic oligonucleotide; TTAGAAA chr11 5214813 5214836 5214833 +
gagagaagatccaaataagcacag

SEQ ID NO: 66610 - DNA, 24 bp, Artificial Sequence
  Synthetic oligonucleotide; ACAGAAA chr11 5214848 5214871 5214868 +
aaagggaatattatcactcacccc

SEQ ID NO: 66611 - DNA, 24 bp, Artificial Sequence
  Synthetic oligonucleotide; CTAGAAA chr11 5214902 5214925 5214922 +
tatgaacatctctatgtacataaa

SEQ ID NO: 66612 - DNA, 24 bp, Artificial Sequence
  Synthetic oligonucleotide; AAAGAAA chr11 5214914 5214937 5214934 +
tatgtacataaactagaaaatcta

SEQ ID NO: 66613 - DNA, 24 bp, Artificial Sequence
  Synthetic oligonucleotide; CCAGAAT chr11 5215042 5215065 5215062 +
tctctcaactctatgtccccctcc

SEQ ID NO: 66614 - DNA, 24 bp, Artificial Sequence
  Synthetic oligonucleotide; AGAGAAT chr11 5215121 5215144 5215141 +
tgttatatctgaatatatggctct

SEQ ID NO: 66615 - DNA, 24 bp, Artificial Sequence
  Synthetic oligonucleotide; CAAGAAA chr11 5215130 5215153 5215150 +
tgaatatatggctctagagaatcc

SEQ ID NO: 66616 - DNA, 24 bp, Artificial Sequence
  Synthetic oligonucleotide; ATAGAAA chr11 5215136 5215159 5215156 +
tatggctctagagaatcccaagaa

SEQ ID NO: 66617 - DNA, 24 bp, Artificial Sequence
  Synthetic oligonucleotide; CAAGAAT chr11 5215231 5215254 5215251 +
aaagttgagaagatgtgaagaacc

SEQ ID NO: 66618 - DNA, 24 bp, Artificial Sequence
  Synthetic oligonucleotide; GGAGAAA chr11 5215243 5215266 5215263 +
atgtgaagaacccaagaatccact

SEQ ID NO: 66619 - DNA, 24 bp, Artificial Sequence
  Synthetic oligonucleotide; GGAGAAT chr11 5215287 5215310 5215307 +
ctgcaaggggttcagacctgtgtt

SEQ ID NO: 66620 - DNA, 24 bp, Artificial Sequence
  Synthetic oligonucleotide; CCAGAAA chr11 5215658 5215681 5215678 +
agactttcccctagcttgttgatt

SEQ ID NO: 66621 - DNA, 24 bp, Artificial Sequence
  Synthetic oligonucleotide; TCAGAAA chr11 5215808 5215831 5215828 +
ataaacaaataagaaggaagactc

SEQ ID NO: 66622 - DNA, 24 bp, Artificial Sequence
  Synthetic oligonucleotide; TGAGAAA chr11 5215896 5215919 5215916 +
ctagttgaaggaatgttaactgac

SEQ ID NO: 66623 - DNA, 24 bp, Artificial Sequence
  Synthetic oligonucleotide; AGAGAAA chr11 5215927 5215950 5215947 +
acactaaatttctgtctatttcaa

SEQ ID NO: 66624 - DNA, 24 bp, Artificial Sequence
  Synthetic oligonucleotide; TGAGAAT chr11 5216262 5216285 5216282 +
tttattctccttgtgatagtttgc

SEQ ID NO: 66625 - DNA, 24 bp, Artificial Sequence
  Synthetic oligonucleotide; GAAGAAA chr11 5217517 5217540 5217537 +
taaagtagttttttccagttctgt

SEQ ID NO: 66626 - DNA, 24 bp, Artificial Sequence
  Synthetic oligonucleotide; GTAGAAT chr11 5218560 5218583 5218580 +
taccagctcctccttgtacctctg

SEQ ID NO: 66627 - DNA, 24 bp, Artificial Sequence
  Synthetic oligonucleotide; AAAGAAT chr11 5219420 5219443 5219440 +
ggaataggtgtggtgtggtgctga

SEQ ID NO: 66628 - DNA, 24 bp, Artificial Sequence
  Synthetic oligonucleotide; GCAGAAA chr11 5222020 5222043 5222040 +
gaacctggtacctcagttggaaat

SEQ ID NO: 66629 - DNA, 24 bp, Artificial Sequence
  Synthetic oligonucleotide; CTAGAAT chr11 5222416 5222439 5222436 +
caggtgtgagccaccgctcccagc

SEQ ID NO: 66630 - DNA, 24 bp, Artificial Sequence
  Synthetic oligonucleotide; TTAGAAT chr11 5222802 5222825 5222822 +
gagtggtattaatttaacatgatt

SEQ ID NO: 66631 - DNA, 24 bp, Artificial Sequence
  Synthetic oligonucleotide; GAAGAAA chr11 5222809 5222832 5222829 +
attaatttaacatgattttagaat

SEQ ID NO: 66632 - DNA, 24 bp, Artificial Sequence
  Synthetic oligonucleotide; GCAGAAA chr11 5222860 5222883 5222880 +
accaaaagtaacaatgtatttcca

SEQ ID NO: 66633 - DNA, 24 bp, Artificial Sequence
  Synthetic oligonucleotide; TCAGAAA chr11 5222886 5222909 5222906 +
agaaagagataatattaaggataa

SEQ ID NO: 66634 - DNA, 24 bp, Artificial Sequence
  Synthetic oligonucleotide; ATAGAAT chr11 5222896 5222919 5222916 +
aatattaaggataatcagaaaaaa

SEQ ID NO: 66635 - DNA, 24 bp, Artificial Sequence
  Synthetic oligonucleotide; AGAGAAT chr11 5222911 5222934 5222931 +
cagaaaaaaatagaataaacttag

SEQ ID NO: 66636 - DNA, 24 bp, Artificial Sequence
  Synthetic oligonucleotide; TTAGAAA chr11 5222919 5222942 5222939 +
aatagaataaacttagagagaatg

SEQ ID NO: 66637 - DNA, 24 bp, Artificial Sequence
  Synthetic oligonucleotide; GAAGAAA chr11 5222927 5222950 5222947 +
aaacttagagagaatgttagaaat

SEQ ID NO: 66638 - DNA, 24 bp, Artificial Sequence
  Synthetic oligonucleotide; CTAGAAA chr11 5222992 5223015 5223012 +
tttcttcactatttaataataaca

SEQ ID NO: 66639 - DNA, 24 bp, Artificial Sequence
  Synthetic oligonucleotide; CAAGAAT chr11 5223148 5223171 5223168 +
aatggatatttgtatctgaaaaat

SEQ ID NO: 66640 - DNA, 24 bp, Artificial Sequence
  Synthetic oligonucleotide; GGAGAAA chr11 5223487 5223510 5223507 +
caggcggatcagcctgaccaacat

SEQ ID NO: 66641 - DNA, 24 bp, Artificial Sequence
  Synthetic oligonucleotide; CTAGAAT chr11 5223756 5223779 5223776 +
gtcacgatgctgtacattagatat

SEQ ID NO: 66642 - DNA, 24 bp, Artificial Sequence
  Synthetic oligonucleotide; TAAGAAA chr11 5224089 5224112 5224109 +
attttggatattaaccaaaatatt

SEQ ID NO: 66643 - DNA, 24 bp, Artificial Sequence
  Synthetic oligonucleotide; TTAGAAT chr11 5224260 5224283 5224280 +
caaaaaacggctgcaacgtgaata

SEQ ID NO: 66644 - DNA, 24 bp, Artificial Sequence
  Synthetic oligonucleotide; TCAGAAT chr11 5224466 5224489 5224486 +
tattactgattatatgccttgatt

SEQ ID NO: 66645 - DNA, 24 bp, Artificial Sequence
  Synthetic oligonucleotide; TCAGAAT chr11 5224487 5224510 5224507 +
atttcagaatcttgccaactagat

SEQ ID NO: 66646 - DNA, 24 bp, Artificial Sequence
  Synthetic oligonucleotide; CCAGAAT chr11 5224541 5224564 5224561 +
ccacttgagactcatattttattt

SEQ ID NO: 66647 - DNA, 24 bp, Artificial Sequence
  Synthetic oligonucleotide; TAAGAAA chr11 5224575 5224598 5224595 +
gcatctacctacctaggtattgaa

SEQ ID NO: 66648 - DNA, 24 bp, Artificial Sequence
  Synthetic oligonucleotide; GAAGAAT chr11 5224711 5224734 5224731 +
aatgctaatcttaaacatcctgag

SEQ ID NO: 66649 - DNA, 24 bp, Artificial Sequence
  Synthetic oligonucleotide; GGAGAAA chr11 5225021 5225044 5225041 +
aactaaggctgagtggccaggcga

SEQ ID NO: 66650 - DNA, 24 bp, Artificial Sequence
  Synthetic oligonucleotide; TCAGAAA chr11 5225417 5225440 5225437 +
cacattccctttttagtaaaatat

SEQ ID NO: 66651 - DNA, 24 bp, Artificial Sequence
  Synthetic oligonucleotide; GCAGAAT chr11 5225469 5225492 5225489 +
atgaaaataaatgttttttattag

SEQ ID NO: 66652 - DNA, 24 bp, Artificial Sequence
  Synthetic oligonucleotide; ATAGAAA chr11 5225546 5225569 5225566 +
acttagggaacaaaggaaccttta

SEQ ID NO: 66653 - DNA, 24 bp, Artificial Sequence
  Synthetic oligonucleotide; CAAGAAA chr11 5225561 5225584 5225581 +
gaacctttaatagaaattggacag

SEQ ID NO: 66654 - DNA, 24 bp, Artificial Sequence
  Synthetic oligonucleotide; TCAGAAT chr11 5225759 5225782 5225779 +
ttagcaaaagggcctagcttggac

SEQ ID NO: 66655 - DNA, 24 bp, Artificial Sequence
  Synthetic oligonucleotide; GCAGAAT chr11 5225797 5225820 5225817 +
ccttatcccaaccataaaataaaa

SEQ ID NO: 66656 - DNA, 24 bp, Artificial Sequence
  Synthetic oligonucleotide; GCAGAAA chr11 5225866 5225889 5225886 +
tcttacatcagttacaatttatat

SEQ ID NO: 66657 - DNA, 24 bp, Artificial Sequence
  Synthetic oligonucleotide; CCAGAAA chr11 5225907 5225930 5225927 +
cagagatattgctattgccttaac

SEQ ID NO: 66658 - DNA, 24 bp, Artificial Sequence
  Synthetic oligonucleotide; TTAGAAT chr11 5225930 5225953 5225950 +
cccagaaattatcactgttattct

SEQ ID NO: 66659 - DNA, 24 bp, Artificial Sequence
  Synthetic oligonucleotide; AAAGAAA chr11 5225977 5226000 5225997 +
atacattgtatcattattgccctg

SEQ ID NO: 66660 - DNA, 24 bp, Artificial Sequence
  Synthetic oligonucleotide; TTAGAAA chr11 5226000 5226023 5226020 +
gaaagaaagagattagggaaagta

SEQ ID NO: 66661 - DNA, 24 bp, Artificial Sequence
  Synthetic oligonucleotide; GAAGAAA chr11 5226034 5226057 5226054 +
gataaacaaaaaagtatattaaaa

SEQ ID NO: 66662 - DNA, 24 bp, Artificial Sequence
  Synthetic oligonucleotide; AAAGAAA chr11 5226159 5226182 5226179 +
atgattatgtatcaattaaaaata

SEQ ID NO: 66663 - DNA, 24 bp, Artificial Sequence
  Synthetic oligonucleotide; GAAGAAA chr11 5226336 5226359 5226356 +
aagtataatagtaaaaattgcgga

SEQ ID NO: 66664 - DNA, 24 bp, Artificial Sequence
  Synthetic oligonucleotide; AAAGAAA chr11 5226346 5226369 5226366 +
gtaaaaattgcggagaagaaaaaa

SEQ ID NO: 66665 - DNA, 24 bp, Artificial Sequence
  Synthetic oligonucleotide; CAAGAAT chr11 5226354 5226377 5226374 +
tgcggagaagaaaaaaaaagaaag

SEQ ID NO: 66666 - DNA, 24 bp, Artificial Sequence
  Synthetic oligonucleotide; AAAGAAA chr11 5226367 5226390 5226387 +
aaaaaagaaagcaagaattaaaca

SEQ ID NO: 66667 - DNA, 24 bp, Artificial Sequence
  Synthetic oligonucleotide; AAAGAAA chr11 5226397 5226420 5226417 +
aacaattgttatgaacagcaaata

SEQ ID NO: 66668 - DNA, 24 bp, Artificial Sequence
  Synthetic oligonucleotide; ATAGAAA chr11 5226507 5226530 5226527 +
ccttcctatgacatgaacttaacc

SEQ ID NO: 66669 - DNA, 24 bp, Artificial Sequence
  Synthetic oligonucleotide; AAAGAAA chr11 5226522 5226545 5226542 +
aacttaaccatagaaaagaagggg

SEQ ID NO: 66670 - DNA, 24 bp, Artificial Sequence
  Synthetic oligonucleotide; TCAGAAA chr11 5226822 5226845 5226842 +
ataggcagagagagtcagtgccta

SEQ ID NO: 66671 - DNA, 24 bp, Artificial Sequence
  Synthetic oligonucleotide; CCAGAAT chr11 5227466 5227489 5227486 +
gtagatggatctcttcctgcgtct

SEQ ID NO: 66672 - DNA, 24 bp, Artificial Sequence
  Synthetic oligonucleotide; ACAGAAT chr11 5227491 5227514 5227511 +
cagaatatgcaaaatacttacagg

SEQ ID NO: 66673 - DNA, 24 bp, Artificial Sequence
  Synthetic oligonucleotide; TAAGAAA chr11 5227560 5227583 5227580 +
cttatttggattaaaaccttctgg

SEQ ID NO: 66674 - DNA, 24 bp, Artificial Sequence
  Synthetic oligonucleotide; AAAGAAA chr11 5227565 5227588 5227585 +
ttggattaaaaccttctggtaaga

SEQ ID NO: 66675 - DNA, 24 bp, Artificial Sequence
  Synthetic oligonucleotide; ATAGAAT chr11 5227685 5227708 5227705 +
catgctaataaattatgtctaaaa

SEQ ID NO: 66676 - DNA, 24 bp, Artificial Sequence
  Synthetic oligonucleotide; TTAGAAA chr11 5227936 5227959 5227956 +
gggggaacaaaaagcctctgtgac

SEQ ID NO: 66677 - DNA, 24 bp, Artificial Sequence
  Synthetic oligonucleotide; TAAGAAT chr11 5228005 5228028 5228025 +
gattatttttttcctctagtccac

SEQ ID NO: 66678 - DNA, 24 bp, Artificial Sequence
  Synthetic oligonucleotide; AAAGAAA chr11 5228495 5228518 5228515 +
atgaaataaaatttaggttaacca

SEQ ID NO: 66679 - DNA, 24 bp, Artificial Sequence
  Synthetic oligonucleotide; GCAGAAA chr11 5228682 5228705 5228702 +
ctcactctgattattctcacacac

SEQ ID NO: 66680 - DNA, 24 bp, Artificial Sequence
  Synthetic oligonucleotide; TGAGAAA chr11 5228846 5228869 5228866 +
aggatctaggcacacgtgtatccc

SEQ ID NO: 66681 - DNA, 24 bp, Artificial Sequence
  Synthetic oligonucleotide; AAAGAAA chr11 5229098 5229121 5229118 +
tgtcttttgcaaatatcctgggtc

SEQ ID NO: 66682 - DNA, 24 bp, Artificial Sequence
  Synthetic oligonucleotide; GCAGAAA chr11 5229198 5229221 5229218 +
gcaagagctttgaaatcctgattg

SEQ ID NO: 66683 - DNA, 24 bp, Artificial Sequence
  Synthetic oligonucleotide; TCAGAAA chr11 5229245 5229268 5229265 +
gacttaccctacaacttcttatgc

SEQ ID NO: 66684 - DNA, 24 bp, Artificial Sequence
  Synthetic oligonucleotide; TCAGAAT chr11 5229819 5229842 5229839 +
tttcttaagtcctaatgttttata

SEQ ID NO: 66685 - DNA, 24 bp, Artificial Sequence
  Synthetic oligonucleotide; TCAGAAT chr11 5230099 5230122 5230119 +
tcagtaaacacaactcagcagctc

SEQ ID NO: 66686 - DNA, 24 bp, Artificial Sequence
  Synthetic oligonucleotide; CAAGAAA chr11 5230135 5230158 5230155 +
aattaaaatgaaataaaaatgctc

SEQ ID NO: 66687 - DNA, 24 bp, Artificial Sequence
  Synthetic oligonucleotide; ATAGAAA chr11 5230152 5230175 5230172 +
aatgctccaagaaaaccagaaccc

SEQ ID NO: 66688 - DNA, 24 bp, Artificial Sequence
  Synthetic oligonucleotide; ACAGAAA chr11 5230287 5230310 5230307 +
tgctaaagtatatgcataattatt

SEQ ID NO: 66689 - DNA, 24 bp, Artificial Sequence
  Synthetic oligonucleotide; TCAGAAT chr11 5230356 5230379 5230376 +
cctccactgggctcagattttcat

SEQ ID NO: 66690 - DNA, 24 bp, Artificial Sequence
  Synthetic oligonucleotide; GTAGAAT chr11 5230460 5230483 5230480 +
atttgagattgcatctctttagag

SEQ ID NO: 66691 - DNA, 24 bp, Artificial Sequence
  Synthetic oligonucleotide; TGAGAAA chr11 5230724 5230747 5230744 +
atagtttataaagcaacgccatag

SEQ ID NO: 66692 - DNA, 24 bp, Artificial Sequence
  Synthetic oligonucleotide; AAAGAAA chr11 5230729 5230752 5230749 +
ttataaagcaacgccatagtgaga

SEQ ID NO: 66693 - DNA, 24 bp, Artificial Sequence
  Synthetic oligonucleotide; GGAGAAA chr11 5231322 5231345 5231342 +
atttgctctttttttttgactttt

SEQ ID NO: 66694 - DNA, 24 bp, Artificial Sequence
  Synthetic oligonucleotide; TGAGAAA chr11 5231801 5231824 5231821 +
cagatttttaaaaatgtatacaac

SEQ ID NO: 66695 - DNA, 24 bp, Artificial Sequence
  Synthetic oligonucleotide; TCAGAAA chr11 5231878 5231901 5231898 +
aggaaaaaaatattactcctatga

SEQ ID NO: 66696 - DNA, 24 bp, Artificial Sequence
  Synthetic oligonucleotide; AAAGAAA chr11 5231946 5231969 5231966 +
tttgtatgttgtagcattaacaac

SEQ ID NO: 66697 - DNA, 24 bp, Artificial Sequence
  Synthetic oligonucleotide; AGAGAAT chr11 5232134 5232157 5232154 +
ggcacagtaggcatgtaagaaggt

SEQ ID NO: 66698 - DNA, 24 bp, Artificial Sequence
  Synthetic oligonucleotide; GCAGAAT chr11 5232143 5232166 5232163 +
ggcatgtaagaaggtagagaatag

SEQ ID NO: 66699 - DNA, 24 bp, Artificial Sequence
  Synthetic oligonucleotide; TAAGAAA chr11 5232191 5232214 5232211 +
gtgtgtgtgtgtgcatgaaataaa

SEQ ID NO: 66700 - DNA, 24 bp, Artificial Sequence
  Synthetic oligonucleotide; GAAGAAA chr11 5232458 5232481 5232478 +
acaatgtgcaggcaaaggaaggag

SEQ ID NO: 66701 - DNA, 24 bp, Artificial Sequence
  Synthetic oligonucleotide; TCAGAAA chr11 5232878 5232901 5232898 +
gaagtaggcattgtgttcccaagt

SEQ ID NO: 66702 - DNA, 24 bp, Artificial Sequence
  Synthetic oligonucleotide; ATAGAAT chr11 5232885 5232908 5232905 +
gcattgtgttcccaagttcagaaa

SEQ ID NO: 66703 - DNA, 24 bp, Artificial Sequence
  Synthetic oligonucleotide; AGAGAAA chr11 5233109 5233132 5233129 +
ggcagatacatgcatatggttaac

SEQ ID NO: 66704 - DNA, 24 bp, Artificial Sequence
  Synthetic oligonucleotide; TGAGAAA chr11 5233130 5233153 5233150 +
aacagagaaataaagactggcttc

SEQ ID NO: 66705 - DNA, 24 bp, Artificial Sequence
  Synthetic oligonucleotide; ACAGAAT chr11 5233538 5233561 5233558 +
actttcctttccattccatttact

SEQ ID NO: 66706 - DNA, 24 bp, Artificial Sequence
  Synthetic oligonucleotide; GCAGAAT chr11 5233673 5233696 5233693 +
agagacaaaaggattattctaagt

SEQ ID NO: 66707 - DNA, 24 bp, Artificial Sequence
  Synthetic oligonucleotide; AGAGAAA chr11 5233751 5233774 5233771 +
gaaaaatgaagggagggggttggg

SEQ ID NO: 66708 - DNA, 24 bp, Artificial Sequence
  Synthetic oligonucleotide; GCAGAAT chr11 5233809 5233832 5233829 +
caagattgtgaggaaggaaaaaat

SEQ ID NO: 66709 - DNA, 24 bp, Artificial Sequence
  Synthetic oligonucleotide; TTAGAAA chr11 5233924 5233947 5233944 +
aggtaaaagaaccaaaatgtaaga

SEQ ID NO: 66710 - DNA, 24 bp, Artificial Sequence
  Synthetic oligonucleotide; AGAGAAA chr11 5233937 5233960 5233957 +
aaaatgtaagattagaaagtaaaa

SEQ ID NO: 66711 - DNA, 24 bp, Artificial Sequence
  Synthetic oligonucleotide; TGAGAAA chr11 5234019 5234042 5234039 +
ttgtcacagtgcagctcactcagc

SEQ ID NO: 66712 - DNA, 24 bp, Artificial Sequence
  Synthetic oligonucleotide; TCAGAAA chr11 5234234 5234257 5234254 +
caagggacagagagtcagtgccta

SEQ ID NO: 66713 - DNA, 24 bp, Artificial Sequence
  Synthetic oligonucleotide; GAAGAAA chr11 5234449 5234472 5234469 +
ttgctagtgaacactgttatgtca

SEQ ID NO: 66714 - DNA, 24 bp, Artificial Sequence
  Synthetic oligonucleotide; TGAGAAT chr11 5234557 5234580 5234577 +
gataagcagggtttcattagtttg

SEQ ID NO: 66715 - DNA, 24 bp, Artificial Sequence
  Synthetic oligonucleotide; TCAGAAA chr11 5234637 5234660 5234657 +
ctgttctgtcatgtgtgtcttgac

SEQ ID NO: 66716 - DNA, 24 bp, Artificial Sequence
  Synthetic oligonucleotide; TAAGAAA chr11 5234795 5234818 5234815 +
ttatttgtttctgtcactttatac

SEQ ID NO: 66717 - DNA, 24 bp, Artificial Sequence
  Synthetic oligonucleotide; AAAGAAT chr11 5235011 5235034 5235031 +
ttatattgaaataaatatccatta

SEQ ID NO: 66718 - DNA, 24 bp, Artificial Sequence
  Synthetic oligonucleotide; AAAGAAA chr11 5235158 5235181 5235178 +
aatgtttaaaattatggtatgact

SEQ ID NO: 66719 - DNA, 24 bp, Artificial Sequence
  Synthetic oligonucleotide; AAAGAAT chr11 5235162 5235185 5235182 +
tttaaaattatggtatgactaaag

SEQ ID NO: 66720 - DNA, 24 bp, Artificial Sequence
  Synthetic oligonucleotide; GAAGAAA chr11 5235405 5235428 5235425 +
aggaaggattgaaggaaagaggag

SEQ ID NO: 66721 - DNA, 24 bp, Artificial Sequence
  Synthetic oligonucleotide; GGAGAAA chr11 5235413 5235436 5235433 +
ttgaaggaaagaggaggaagaaat

SEQ ID NO: 66722 - DNA, 24 bp, Artificial Sequence
  Synthetic oligonucleotide; GGAGAAA chr11 5235496 5235519 5235516 +
gaaaaataaataatggagaggaga

SEQ ID NO: 66723 - DNA, 24 bp, Artificial Sequence
  Synthetic oligonucleotide; AGAGAAA chr11 5235537 5235560 5235557 +
agaggagaggagaagggataggga

SEQ ID NO: 66724 - DNA, 24 bp, Artificial Sequence
  Synthetic oligonucleotide; AGAGAAA chr11 5235543 5235566 5235563 +
gaggagaagggatagggaagagaa

SEQ ID NO: 66725 - DNA, 24 bp, Artificial Sequence
  Synthetic oligonucleotide; AGAGAAA chr11 5235581 5235604 5235601 +
gaagagaggaaagaagagaagagg

SEQ ID NO: 66726 - DNA, 24 bp, Artificial Sequence
  Synthetic oligonucleotide; AAAGAAA chr11 5235586 5235609 5235606 +
gaggaaagaagagaagaggagaga

SEQ ID NO: 66727 - DNA, 24 bp, Artificial Sequence
  Synthetic oligonucleotide; ATAGAAA chr11 5235687 5235710 5235707 +
aaattttggtggtgatatggatca

SEQ ID NO: 66728 - DNA, 24 bp, Artificial Sequence
  Synthetic oligonucleotide; TCAGAAA chr11 5235812 5235835 5235832 +
cctagcaattacatttttagatat

SEQ ID NO: 66729 - DNA, 24 bp, Artificial Sequence
  Synthetic oligonucleotide; ATAGAAA chr11 5235848 5235871 5235868 +
gcatgtgtgtatccaaagacatgt

SEQ ID NO: 66730 - DNA, 24 bp, Artificial Sequence
  Synthetic oligonucleotide; GTAGAAT chr11 5235917 5235940 5235937 +
tagccacttaaatgcttaccaaca

SEQ ID NO: 66731 - DNA, 24 bp, Artificial Sequence
  Synthetic oligonucleotide; AAAGAAT chr11 5235944 5235967 5235964 +
gaattgataaattacggtatagtc

SEQ ID NO: 66732 - DNA, 24 bp, Artificial Sequence
  Synthetic oligonucleotide; ATAGAAT chr11 5235949 5235972 5235969 +
gataaattacggtatagtcaaaga

SEQ ID NO: 66733 - DNA, 24 bp, Artificial Sequence
  Synthetic oligonucleotide; ACAGAAA chr11 5235961 5235984 5235981 +
tatagtcaaagaatagaatattac

SEQ ID NO: 66734 - DNA, 24 bp, Artificial Sequence
  Synthetic oligonucleotide; AAAGAAT chr11 5235971 5235994 5235991 +
gaatagaatattacacagaaatga

SEQ ID NO: 66735 - DNA, 24 bp, Artificial Sequence
  Synthetic oligonucleotide; ATAGAAA chr11 5236078 5236101 5236098 +
caaactatatgactttatttgtat

SEQ ID NO: 66736 - DNA, 24 bp, Artificial Sequence
  Synthetic oligonucleotide; CAAGAAA chr11 5236224 5236247 5236244 +
gccaacgaaagatattgaataatt

SEQ ID NO: 66737 - DNA, 24 bp, Artificial Sequence
  Synthetic oligonucleotide; GAAGAAA chr11 5236281 5236304 5236301 +
tttaaaagattattctcacttagt

SEQ ID NO: 66738 - DNA, 24 bp, Artificial Sequence
  Synthetic oligonucleotide; AGAGAAA chr11 5236302 5236325 5236322 +
agtgaagaaatgtattttagaagt

SEQ ID NO: 66739 - DNA, 24 bp, Artificial Sequence
  Synthetic oligonucleotide; GAAGAAA chr11 5236345 5236368 5236365 +
tagctgggcttctgttgcagtagg

SEQ ID NO: 66740 - DNA, 24 bp, Artificial Sequence
  Synthetic oligonucleotide; CAAGAAT chr11 5236411 5236434 5236431 +
tgacggtgatgtcagtcgtgaaca

SEQ ID NO: 66741 - DNA, 24 bp, Artificial Sequence
  Synthetic oligonucleotide; TCAGAAA chr11 5236453 5236476 5236473 +
tgtgagtttagtggtacgataaaa

SEQ ID NO: 66742 - DNA, 24 bp, Artificial Sequence
  Synthetic oligonucleotide; TCAGAAA chr11 5236537 5236560 5236557 +
tacttagatatgtggatctggagc

SEQ ID NO: 66743 - DNA, 24 bp, Artificial Sequence
  Synthetic oligonucleotide; AAAGAAT chr11 5236541 5236564 5236561 +
tagatatgtggatctggagctcag

SEQ ID NO: 66744 - DNA, 24 bp, Artificial Sequence
  Synthetic oligonucleotide; CAAGAAT chr11 5236558 5236581 5236578 +
agctcagaaagaatacaaccaggt

SEQ ID NO: 66745 - DNA, 24 bp, Artificial Sequence
  Synthetic oligonucleotide; ACAGAAT chr11 5236565 5236588 5236585 +
aaagaatacaaccaggtcaagaat

SEQ ID NO: 66746 - DNA, 24 bp, Artificial Sequence
  Synthetic oligonucleotide; TTAGAAT chr11 5236675 5236698 5236695 +
cttcatcaatatctccttaaaatc

SEQ ID NO: 66747 - DNA, 24 bp, Artificial Sequence
  Synthetic oligonucleotide; TAAGAAA chr11 5236720 5236743 5236740 +
ggaattatgtttccaattcatata

SEQ ID NO: 66748 - DNA, 24 bp, Artificial Sequence
  Synthetic oligonucleotide; ACAGAAT chr11 5236911 5236934 5236931 +
gattgcattgagaggatttgtata

SEQ ID NO: 66749 - DNA, 24 bp, Artificial Sequence
  Synthetic oligonucleotide; AAAGAAT chr11 5237244 5237267 5237264 +
agccaggataaggtctaaaagtgg

SEQ ID NO: 66750 - DNA, 24 bp, Artificial Sequence
  Synthetic oligonucleotide; GCAGAAT chr11 5237331 5237354 5237351 +
attaatagatagggacaaattgaa

SEQ ID NO: 66751 - DNA, 24 bp, Artificial Sequence
  Synthetic oligonucleotide; AGAGAAA chr11 5237432 5237455 5237452 +
atgactaaaatggaaaacactgga

SEQ ID NO: 66752 - DNA, 24 bp, Artificial Sequence
  Synthetic oligonucleotide; TTAGAAA chr11 5237561 5237584 5237581 +
ggcactgaggttggaggtcagagg

SEQ ID NO: 66753 - DNA, 24 bp, Artificial Sequence
  Synthetic oligonucleotide; TTAGAAT chr11 5237787 5237810 5237807 +
taattagtgtaatgccaatgtggg

SEQ ID NO: 66754 - DNA, 24 bp, Artificial Sequence
  Synthetic oligonucleotide; AGAGAAA chr11 5237959 5237982 5237979 +
aggtatactaaggactctagggtc

SEQ ID NO: 66755 - DNA, 24 bp, Artificial Sequence
  Synthetic oligonucleotide; ATAGAAA chr11 5238125 5238148 5238145 +
ggtgaaaccccctatctactaaaa

SEQ ID NO: 66756 - DNA, 24 bp, Artificial Sequence
  Synthetic oligonucleotide; GGAGAAT chr11 5238192 5238215 5238212 +
ccagctacttgggaggctgaggca

SEQ ID NO: 66757 - DNA, 24 bp, Artificial Sequence
  Synthetic oligonucleotide; TCAGAAA chr11 5238284 5238307 5238304 +
gggcaaccatagcaatgctctatc

SEQ ID NO: 66758 - DNA, 24 bp, Artificial Sequence
  Synthetic oligonucleotide; GTAGAAA chr11 5239348 5239371 5239368 +
tatggatagtgtaatactcataat

SEQ ID NO: 66759 - DNA, 24 bp, Artificial Sequence
  Synthetic oligonucleotide; TAAGAAA chr11 5239520 5239543 5239540 +
tagtaggaaaaacactaaatatta

SEQ ID NO: 66760 - DNA, 24 bp, Artificial Sequence
  Synthetic oligonucleotide; GCAGAAA chr11 5239718 5239741 5239738 +
tgtacaaagctaacagagtcaaat

SEQ ID NO: 66761 - DNA, 24 bp, Artificial Sequence
  Synthetic oligonucleotide; TAAGAAA chr11 5239830 5239853 5239850 +
catggaatgtttgttcatggagca

SEQ ID NO: 66762 - DNA, 24 bp, Artificial Sequence
  Synthetic oligonucleotide; AGAGAAT chr11 5239874 5239897 5239894 +
tagacacatctgtatgtgtatatc

SEQ ID NO: 66763 - DNA, 24 bp, Artificial Sequence
  Synthetic oligonucleotide; CGAGAAA chr11 5240012 5240035 5240032 +
aaggtgaatgtgaaaactcctcat

SEQ ID NO: 66764 - DNA, 24 bp, Artificial Sequence
  Synthetic oligonucleotide; AAAGAAT chr11 5240149 5240172 5240169 +
attgtttggacacagtaattattc

SEQ ID NO: 66765 - DNA, 24 bp, Artificial Sequence
  Synthetic oligonucleotide; TGAGAAA chr11 5240372 5240395 5240392 +
ggtggacacatagaggaaatactt

SEQ ID NO: 66766 - DNA, 24 bp, Artificial Sequence
  Synthetic oligonucleotide; GAAGAAA chr11 5240405 5240428 5240425 +
ggttttgggattaatgaaactgga

SEQ ID NO: 66767 - DNA, 24 bp, Artificial Sequence
  Synthetic oligonucleotide; ACAGAAT chr11 5240512 5240535 5240532 +
gtacaggagtttgaagtgattgcc

SEQ ID NO: 66768 - DNA, 24 bp, Artificial Sequence
  Synthetic oligonucleotide; CAAGAAA chr11 5240869 5240892 5240889 +
tatttattatgtcactctcatatg

SEQ ID NO: 66769 - DNA, 24 bp, Artificial Sequence
  Synthetic oligonucleotide; ATAGAAA chr11 5241150 5241173 5241170 +
atgcacacatgtgtgtgtatatat

SEQ ID NO: 66770 - DNA, 24 bp, Artificial Sequence
  Synthetic oligonucleotide; AGAGAAT chr11 5241156 5241179 5241176 +
acatgtgtgtgtatatatatagaa

SEQ ID NO: 66771 - DNA, 24 bp, Artificial Sequence
  Synthetic oligonucleotide; ATAGAAA chr11 5241204 5241227 5241224 +
aaacaataaaacttgtacatattt

SEQ ID NO: 66772 - DNA, 24 bp, Artificial Sequence
  Synthetic oligonucleotide; AGAGAAA chr11 5241462 5241485 5241482 +
ctattaataccattgaagacgtta

SEQ ID NO: 66773 - DNA, 24 bp, Artificial Sequence
  Synthetic oligonucleotide; CAAGAAA chr11 5241807 5241830 5241827 +
gttctctcttttcttgcaggattg

SEQ ID NO: 66774 - DNA, 24 bp, Artificial Sequence
  Synthetic oligonucleotide; TCAGAAA chr11 5241862 5241885 5241882 +
cattctccaacattctcatttcca

SEQ ID NO: 66775 - DNA, 24 bp, Artificial Sequence
  Synthetic oligonucleotide; ACAGAAA chr11 5241908 5241931 5241928 +
gctgaatcagggtaaaatataaag

SEQ ID NO: 66776 - DNA, 24 bp, Artificial Sequence
  Synthetic oligonucleotide; AAAGAAA chr11 5242246 5242269 5242266 +
agctggggagggagtgaagataaa

SEQ ID NO: 66777 - DNA, 24 bp, Artificial Sequence
  Synthetic oligonucleotide; AAAGAAT chr11 5242599 5242622 5242619 +
acaattttcccaaacactcataac

SEQ ID NO: 66778 - DNA, 24 bp, Artificial Sequence
  Synthetic oligonucleotide; GCAGAAA chr11 5242718 5242741 5242738 +
tctttttctaacctccaggactat

SEQ ID NO: 66779 - DNA, 24 bp, Artificial Sequence
  Synthetic oligonucleotide; ATAGAAA chr11 5242742 5242765 5242762 +
gcagaaaagtgactattaattttt

SEQ ID NO: 66780 - DNA, 24 bp, Artificial Sequence
  Synthetic oligonucleotide; CCAGAAT chr11 5242831 5242854 5242851 +
caaaaacactcagtttgattttgg

SEQ ID NO: 66781 - DNA, 24 bp, Artificial Sequence
  Synthetic oligonucleotide; AGAGAAA chr11 5242996 5243019 5243016 +
atcccatagctgactcataacaca

SEQ ID NO: 66782 - DNA, 24 bp, Artificial Sequence
  Synthetic oligonucleotide; GAAGAAA chr11 5243052 5243075 5243072 +
atagtgcaaatatctaagggtaaa

SEQ ID NO: 66783 - DNA, 24 bp, Artificial Sequence
  Synthetic oligonucleotide; TCAGAAA chr11 5243375 5243398 5243395 +
taagacaacgggctaatccctctt

SEQ ID NO: 66784 - DNA, 24 bp, Artificial Sequence
  Synthetic oligonucleotide; CCAGAAT chr11 5243430 5243453 5243450 +
tcccggcttccagtacctacctgc

SEQ ID NO: 66785 - DNA, 24 bp, Artificial Sequence
  Synthetic oligonucleotide; ATAGAAT chr11 5243764 5243787 5243784 +
gcaagatggacattcgagtttctg

SEQ ID NO: 66786 - DNA, 24 bp, Artificial Sequence
  Synthetic oligonucleotide; TAAGAAT chr11 5243952 5243975 5243972 +
ggaataagttacaactgaaaagga

SEQ ID NO: 66787 - DNA, 24 bp, Artificial Sequence
  Synthetic oligonucleotide; TTAGAAT chr11 5244458 5244481 5244478 +
gcgcccggccaatttcatcacttt

SEQ ID NO: 66788 - DNA, 24 bp, Artificial Sequence
  Synthetic oligonucleotide; ATAGAAA chr11 5244463 5244486 5244483 +
cggccaatttcatcactttttaga

SEQ ID NO: 66789 - DNA, 24 bp, Artificial Sequence
  Synthetic oligonucleotide; GAAGAAA chr11 5244497 5244520 5244517 +
acacctctatccagcatcaacttg

SEQ ID NO: 66790 - DNA, 24 bp, Artificial Sequence
  Synthetic oligonucleotide; GCAGAAT chr11 5244504 5244527 5244524 +
tatccagcatcaacttggaagaaa

SEQ ID NO: 66791 - DNA, 24 bp, Artificial Sequence
  Synthetic oligonucleotide; TAAGAAA chr11 5244510 5244533 5244530 +
gcatcaacttggaagaaagcagaa

SEQ ID NO: 66792 - DNA, 24 bp, Artificial Sequence
  Synthetic oligonucleotide; CAAGAAA chr11 5245042 5245065 5245062 +
tgttacccctgagataaatcctta

SEQ ID NO: 66793 - DNA, 24 bp, Artificial Sequence
  Synthetic oligonucleotide; GAAGAAA chr11 5245280 5245303 5245300 +
tttaagagcagagatcgatgatat

SEQ ID NO: 66794 - DNA, 24 bp, Artificial Sequence
  Synthetic oligonucleotide; AAAGAAT chr11 5245400 5245423 5245420 +
taatggccctaaaactcattccca

SEQ ID NO: 66795 - DNA, 24 bp, Artificial Sequence
  Synthetic oligonucleotide; TGAGAAT chr11 5245803 5245826 5245823 +
tatgccatccatttttcttaattc

SEQ ID NO: 66796 - DNA, 24 bp, Artificial Sequence
  Synthetic oligonucleotide; AAAGAAA chr11 5245890 5245913 5245910 +
cagaggagaccagcatacatacta

SEQ ID NO: 66797 - DNA, 24 bp, Artificial Sequence
  Synthetic oligonucleotide; GAAGAAA chr11 5245935 5245958 5245955 +
atttcagatggtattatatgactt

SEQ ID NO: 66798 - DNA, 24 bp, Artificial Sequence
  Synthetic oligonucleotide; TTAGAAA chr11 5245973 5245996 5245993 +
ttgtacctacaaccatctggtctt

SEQ ID NO: 66799 - DNA, 24 bp, Artificial Sequence
  Synthetic oligonucleotide; CTAGAAA chr11 5246149 5246172 5246169 +
gaaaaaccccaaactataaaaagc

SEQ ID NO: 66800 - DNA, 24 bp, Artificial Sequence
  Synthetic oligonucleotide; AAAGAAA chr11 5246287 5246310 5246307 +
aaactaaagagctcctgctcagca

SEQ ID NO: 66801 - DNA, 24 bp, Artificial Sequence
  Synthetic oligonucleotide; ACAGAAT chr11 5246319 5246342 5246339 +
taccatcagagcgaaagacaatct

SEQ ID NO: 66802 - DNA, 24 bp, Artificial Sequence
  Synthetic oligonucleotide; CAAGAAA chr11 5246381 5246404 5246401 +
caaaggcctaatatccagagtaaa

SEQ ID NO: 66803 - DNA, 24 bp, Artificial Sequence
  Synthetic oligonucleotide; CAAGAAA chr11 5246402 5246425 5246422 +
aaacaagaaacttaaacaacttta

SEQ ID NO: 66804 - DNA, 24 bp, Artificial Sequence
  Synthetic oligonucleotide; AAAGAAA chr11 5246509 5246532 5246529 +
ttaaggtaacagtaaattaaatta

SEQ ID NO: 66805 - DNA, 24 bp, Artificial Sequence
  Synthetic oligonucleotide; TCAGAAA chr11 5246531 5246554 5246551 +
taaaagaaaaatgccatggcaatg

SEQ ID NO: 66806 - DNA, 24 bp, Artificial Sequence
  Synthetic oligonucleotide; CAAGAAA chr11 5246600 5246623 5246620 +
tccaaaacttgtttaacatatcat

SEQ ID NO: 66807 - DNA, 24 bp, Artificial Sequence
  Synthetic oligonucleotide; CAAGAAA chr11 5246686 5246709 5246706 +
cattcgtttatttctttactctct

SEQ ID NO: 66808 - DNA, 24 bp, Artificial Sequence
  Synthetic oligonucleotide; AAAGAAA chr11 5246725 5246748 5246745 +
gacttaaaaaaaacaaaaaacaaa

SEQ ID NO: 66809 - DNA, 24 bp, Artificial Sequence
  Synthetic oligonucleotide; AAAGAAA chr11 5246729 5246752 5246749 +
taaaaaaaacaaaaaacaaaaaag

SEQ ID NO: 66810 - DNA, 24 bp, Artificial Sequence
  Synthetic oligonucleotide; GGAGAAA chr11 5246860 5246883 5246880 +
gcatgtgccaaattctgaggctga

SEQ ID NO: 66811 - DNA, 24 bp, Artificial Sequence
  Synthetic oligonucleotide; AAAGAAA chr11 5246867 5246890 5246887 +
ccaaattctgaggctgaggagaaa

SEQ ID NO: 66812 - DNA, 24 bp, Artificial Sequence
  Synthetic oligonucleotide; AAAGAAA chr11 5246871 5246894 5246891 +
attctgaggctgaggagaaaaaag

SEQ ID NO: 66813 - DNA, 24 bp, Artificial Sequence
  Synthetic oligonucleotide; AAAGAAA chr11 5246875 5246898 5246895 +
tgaggctgaggagaaaaaagaaag

SEQ ID NO: 66814 - DNA, 24 bp, Artificial Sequence
  Synthetic oligonucleotide; AAAGAAT chr11 5246883 5246906 5246903 +
aggagaaaaaagaaagaaagaaaa

SEQ ID NO: 66815 - DNA, 24 bp, Artificial Sequence
  Synthetic oligonucleotide; GGAGAAA chr11 5246960 5246983 5246980 +
gtaaagcatgttgaagtaaaaata

SEQ ID NO: 66816 - DNA, 24 bp, Artificial Sequence
  Synthetic oligonucleotide; AGAGAAA chr11 5247295 5247318 5247315 +
tcactgtgtcctcaccgggaggaa

SEQ ID NO: 66817 - DNA, 24 bp, Artificial Sequence
  Synthetic oligonucleotide; TTAGAAA chr11 5247801 5247824 5247821 +
agggctgtgaaaagctaagtgcca

SEQ ID NO: 66818 - DNA, 24 bp, Artificial Sequence
  Synthetic oligonucleotide; ATAGAAT chr11 5247827 5247850 5247847 +
agaaatagtattcctcctaataaa

SEQ ID NO: 66819 - DNA, 24 bp, Artificial Sequence
  Synthetic oligonucleotide; GCAGAAA chr11 5248155 5248178 5248175 +
cacaccacaaacacaaacaggcat

SEQ ID NO: 66820 - DNA, 24 bp, Artificial Sequence
  Synthetic oligonucleotide; GAAGAAA chr11 5248234 5248257 5248254 +
taaaaagatgtaaaaaaaagagct

SEQ ID NO: 66821 - DNA, 24 bp, Artificial Sequence
  Synthetic oligonucleotide; GCAGAAT chr11 5248259 5248282 5248279 +
aagaaaatcatgtgtgatctctca

SEQ ID NO: 66822 - DNA, 24 bp, Artificial Sequence
  Synthetic oligonucleotide; GCAGAAT chr11 5248288 5248311 5248308 +
atagatttattatttgtattgctt

SEQ ID NO: 66823 - DNA, 24 bp, Artificial Sequence
  Synthetic oligonucleotide; CCAGAAT chr11 5248555 5248578 5248575 +
gataactacacaccaagcttccac

SEQ ID NO: 66824 - DNA, 24 bp, Artificial Sequence
  Synthetic oligonucleotide; AAAGAAA chr11 5248716 5248739 5248736 +
gtatgttgtaggctgaagacgtta

SEQ ID NO: 66825 - DNA, 24 bp, Artificial Sequence
  Synthetic oligonucleotide; AAAGAAA chr11 5249090 5249113 5249110 +
aagttctttctactggaatctaat

SEQ ID NO: 66826 - DNA, 24 bp, Artificial Sequence
  Synthetic oligonucleotide; TTAGAAA chr11 5250549 5250572 5250569 +
gaaataaatcatgactgtttcatc

SEQ ID NO: 66827 - DNA, 24 bp, Artificial Sequence
  Synthetic oligonucleotide; GTAGAAT chr11 5250685 5250708 5250705 +
cttctatgctcagtaaagatgatg

SEQ ID NO: 66828 - DNA, 24 bp, Artificial Sequence
  Synthetic oligonucleotide; TTAGAAT chr11 5250714 5250737 5250734 +
atgttctttggcaggtactgtgga

SEQ ID NO: 66829 - DNA, 24 bp, Artificial Sequence
  Synthetic oligonucleotide; CCAGAAA chr11 5251209 5251232 5251229 +
tcattgatacagatggctaaaagg

SEQ ID NO: 66830 - DNA, 24 bp, Artificial Sequence
  Synthetic oligonucleotide; AAAGAAA chr11 5251508 5251531 5251528 +
tgttttactaaaaaaaaaaaggac

SEQ ID NO: 66831 - DNA, 24 bp, Artificial Sequence
  Synthetic oligonucleotide; AAAGAAA chr11 5251512 5251535 5251532 +
ttactaaaaaaaaaaaggacaaag

SEQ ID NO: 66832 - DNA, 24 bp, Artificial Sequence
  Synthetic oligonucleotide; GGAGAAA chr11 5251600 5251623 5251620 +
gatggagccaggcagaagacgttt

SEQ ID NO: 66833 - DNA, 24 bp, Artificial Sequence
  Synthetic oligonucleotide; AAAGAAA chr11 5251660 5251683 5251680 +
gaaaactctgaggctgaggaaaaa

SEQ ID NO: 66834 - DNA, 24 bp, Artificial Sequence
  Synthetic oligonucleotide; AAAGAAA chr11 5251664 5251687 5251684 +
actctgaggctgaggaaaaaaaag

SEQ ID NO: 66835 - DNA, 24 bp, Artificial Sequence
  Synthetic oligonucleotide; AAAGAAA chr11 5251668 5251691 5251688 +
tgaggctgaggaaaaaaaagaaag

SEQ ID NO: 66836 - DNA, 24 bp, Artificial Sequence
  Synthetic oligonucleotide; AAAGAAA chr11 5251678 5251701 5251698 +
gaaaaaaaagaaagaaagaaatat

SEQ ID NO: 66837 - DNA, 24 bp, Artificial Sequence
  Synthetic oligonucleotide; GAAGAAA chr11 5251735 5251758 5251755 +
cacattacaagcctaaagtacgtt

SEQ ID NO: 66838 - DNA, 24 bp, Artificial Sequence
  Synthetic oligonucleotide; ATAGAAT chr11 5251744 5251767 5251764 +
agcctaaagtacgttgaagaaaaa

SEQ ID NO: 66839 - DNA, 24 bp, Artificial Sequence
  Synthetic oligonucleotide; AGAGAAA chr11 5252074 5252097 5252094 +
cccactgtgtcctcaccagaagga

SEQ ID NO: 66840 - DNA, 24 bp, Artificial Sequence
  Synthetic oligonucleotide; AAAGAAA chr11 5252621 5252644 5252641 +
atcacttcattgtagttaccgtgg

SEQ ID NO: 66841 - DNA, 24 bp, Artificial Sequence
  Synthetic oligonucleotide; TGAGAAA chr11 5252687 5252710 5252707 +
ctccctgtagagcctcacaagggc

SEQ ID NO: 66842 - DNA, 24 bp, Artificial Sequence
  Synthetic oligonucleotide; ATAGAAT chr11 5252732 5252755 5252752 +
ggaaatagtattgcccctaataaa

SEQ ID NO: 66843 - DNA, 24 bp, Artificial Sequence
  Synthetic oligonucleotide; GCAGAAT chr11 5253178 5253201 5253198 +
aagacaaccatgtgtgatctctta

SEQ ID NO: 66844 - DNA, 24 bp, Artificial Sequence
  Synthetic oligonucleotide; GCAGAAT chr11 5253206 5253229 5253226 +
aatagatttattatttgattgctt

SEQ ID NO: 66845 - DNA, 24 bp, Artificial Sequence
  Synthetic oligonucleotide; CCAGAAT chr11 5253473 5253496 5253493 +
gataactacacaccaagcttccac

SEQ ID NO: 66846 - DNA, 24 bp, Artificial Sequence
  Synthetic oligonucleotide; AAAGAAA chr11 5253634 5253657 5253654 +
gtatgctgtaggctgaaaacgtta

SEQ ID NO: 66847 - DNA, 24 bp, Artificial Sequence
  Synthetic oligonucleotide; AAAGAAA chr11 5254014 5254037 5254034 +
aagttctttctaccgaaatctaat

SEQ ID NO: 66848 - DNA, 24 bp, Artificial Sequence
  Synthetic oligonucleotide; GTAGAAT chr11 5255616 5255639 5255636 +
cttctatgctcggtaaagatgatg

SEQ ID NO: 66849 - DNA, 24 bp, Artificial Sequence
  Synthetic oligonucleotide; TTAGAAT chr11 5255645 5255668 5255665 +
atgctctttaccagatactatgga

SEQ ID NO: 66850 - DNA, 24 bp, Artificial Sequence
  Synthetic oligonucleotide; TCAGAAA chr11 5255984 5256007 5256004 +
ccatgaccttggtagattatgacg

SEQ ID NO: 66851 - DNA, 24 bp, Artificial Sequence
  Synthetic oligonucleotide; CCAGAAA chr11 5256140 5256163 5256160 +
tcaaagtgttaggcggctaaaaga

SEQ ID NO: 66852 - DNA, 24 bp, Artificial Sequence
  Synthetic oligonucleotide; TAAGAAA chr11 5256219 5256242 5256239 +
ttggaagttaaaataaaagttgaa

SEQ ID NO: 66853 - DNA, 24 bp, Artificial Sequence
  Synthetic oligonucleotide; AAAGAAA chr11 5256228 5256251 5256248 +
aaaataaaagttgaataagaaagg

SEQ ID NO: 66854 - DNA, 24 bp, Artificial Sequence
  Synthetic oligonucleotide; TGAGAAA chr11 5256309 5256332 5256329 +
gacttctctcaatctaaggatggg

SEQ ID NO: 66855 - DNA, 24 bp, Artificial Sequence
  Synthetic oligonucleotide; TAAGAAT chr11 5256467 5256490 5256487 +
gttccatttgtagagcctgacctt

SEQ ID NO: 66856 - DNA, 24 bp, Artificial Sequence
  Synthetic oligonucleotide; AGAGAAT chr11 5257219 5257242 5257239 +
gtgggcatttaagttaaataagtc

SEQ ID NO: 66857 - DNA, 24 bp, Artificial Sequence
  Synthetic oligonucleotide; TAAGAAT chr11 5257317 5257340 5257337 +
aaaataatttcagatattattaac

SEQ ID NO: 66858 - DNA, 24 bp, Artificial Sequence
  Synthetic oligonucleotide; GGAGAAA chr11 5257332 5257355 5257352 +
attattaactaagaatgaaattaa

SEQ ID NO: 66859 - DNA, 24 bp, Artificial Sequence
  Synthetic oligonucleotide; GAAGAAA chr11 5257439 5257462 5257459 +
tagtaaattcaaagctctgaagca

SEQ ID NO: 66860 - DNA, 24 bp, Artificial Sequence
  Synthetic oligonucleotide; GGAGAAT chr11 5257505 5257528 5257525 +
accagtgccgttgatatgtaaagt

SEQ ID NO: 66861 - DNA, 24 bp, Artificial Sequence
  Synthetic oligonucleotide; ATAGAAT chr11 5257590 5257613 5257610 +
agtggtagggagtgagaagccatt

SEQ ID NO: 66862 - DNA, 24 bp, Artificial Sequence
  Synthetic oligonucleotide; TAAGAAT chr11 5257657 5257680 5257677 +
gtactattggctggattactattc

SEQ ID NO: 66863 - DNA, 24 bp, Artificial Sequence
  Synthetic oligonucleotide; GAAGAAA chr11 5257935 5257958 5257955 +
aaagggcagtatagttttggggga

SEQ ID NO: 66864 - DNA, 24 bp, Artificial Sequence
  Synthetic oligonucleotide; AGAGAAA chr11 5257951 5257974 5257971 +
ttgggggagaagaaaaagagagag

SEQ ID NO: 66865 - DNA, 24 bp, Artificial Sequence
  Synthetic oligonucleotide; GCAGAAA chr11 5258103 5258126 5258123 +
ggaattttttttgcagaaccacct

SEQ ID NO: 66866 - DNA, 24 bp, Artificial Sequence
  Synthetic oligonucleotide; CAAGAAA chr11 5258115 5258138 5258135 +
gcagaaccacctgcagaaataaat

SEQ ID NO: 66867 - DNA, 24 bp, Artificial Sequence
  Synthetic oligonucleotide; AAAGAAA chr11 5258466 5258489 5258486 +
ggaactgggaaaagatgacaggaa

SEQ ID NO: 66868 - DNA, 24 bp, Artificial Sequence
  Synthetic oligonucleotide; ACAGAAA chr11 5258842 5258865 5258862 +
cacccccatcctcccacagtagcc

SEQ ID NO: 66869 - DNA, 24 bp, Artificial Sequence
  Synthetic oligonucleotide; CTAGAAA chr11 5259017 5259040 5259037 +
cctgactgcctctgctgatgcttt

SEQ ID NO: 66870 - DNA, 24 bp, Artificial Sequence
  Synthetic oligonucleotide; CCAGAAA chr11 5259404 5259427 5259424 +
agagcctacccaagtgagaaggaa

SEQ ID NO: 66871 - DNA, 24 bp, Artificial Sequence
  Synthetic oligonucleotide; GAAGAAA chr11 5259495 5259518 5259515 +
tcaccagcaatgcatccaaaccaa

SEQ ID NO: 66872 - DNA, 24 bp, Artificial Sequence
  Synthetic oligonucleotide; CAAGAAA chr11 5259607 5259630 5259627 +
tttaaaaaaaccaaaaatatgata

SEQ ID NO: 66873 - DNA, 24 bp, Artificial Sequence
  Synthetic oligonucleotide; GGAGAAA chr11 5259619 5259642 5259639 +
aaaaatatgatacaagaaatgagg

SEQ ID NO: 66874 - DNA, 24 bp, Artificial Sequence
  Synthetic oligonucleotide; ATAGAAA chr11 5259699 5259722 5259719 +
aacaatggatgaatggatgcactt

SEQ ID NO: 66875 - DNA, 24 bp, Artificial Sequence
  Synthetic oligonucleotide; CTAGAAA chr11 5259717 5259740 5259737 +
gcacttatagaaatgcaaaatgct

SEQ ID NO: 66876 - DNA, 24 bp, Artificial Sequence
  Synthetic oligonucleotide; ATAGAAT chr11 5259733 5259756 5259753 +
aaaatgctctagaaagtctcagca

SEQ ID NO: 66877 - DNA, 24 bp, Artificial Sequence
  Synthetic oligonucleotide; GAAGAAA chr11 5259747 5259770 5259767 +
agtctcagcaatagaatccaagca

SEQ ID NO: 66878 - DNA, 24 bp, Artificial Sequence
  Synthetic oligonucleotide; AAAGAAA chr11 5259803 5259826 5259823 +
gaattaacccaatccaacaaagac

SEQ ID NO: 66879 - DNA, 24 bp, Artificial Sequence
  Synthetic oligonucleotide; AAAGAAT chr11 5259810 5259833 5259830 +
cccaatccaacaaagacaaagaaa

SEQ ID NO: 66880 - DNA, 24 bp, Artificial Sequence
  Synthetic oligonucleotide; TAAGAAA chr11 5259816 5259839 5259836 +
ccaacaaagacaaagaaaaaagaa

SEQ ID NO: 66881 - DNA, 24 bp, Artificial Sequence
  Synthetic oligonucleotide; CAAGAAA chr11 5259839 5259862 5259859 +
ataagaaaatatgaacaaagcctc

SEQ ID NO: 66882 - DNA, 24 bp, Artificial Sequence
  Synthetic oligonucleotide; TAAGAAT chr11 5259873 5259896 5259893 +
gggattatgttaaacaatcaaacc

SEQ ID NO: 66883 - DNA, 24 bp, Artificial Sequence
  Synthetic oligonucleotide; TGAGAAA chr11 5259892 5259915 5259912 +
aaacctaagaataatcagcattcc

SEQ ID NO: 66884 - DNA, 24 bp, Artificial Sequence
  Synthetic oligonucleotide; AGAGAAA chr11 5259901 5259924 5259921 +
aataatcagcattcctgagaaaga

SEQ ID NO: 66885 - DNA, 24 bp, Artificial Sequence
  Synthetic oligonucleotide; AGAGAAT chr11 5260082 5260105 5260102 +
gtatccaaagttatctaaagacaa

SEQ ID NO: 66886 - DNA, 24 bp, Artificial Sequence
  Synthetic oligonucleotide; AAAGAAA chr11 5260127 5260150 5260147 +
ggtgaaactaccaggtaacctatg

SEQ ID NO: 66887 - DNA, 24 bp, Artificial Sequence
  Synthetic oligonucleotide; GCAGAAA chr11 5260162 5260185 5260182 +
atcagattaacagcagatttctca

SEQ ID NO: 66888 - DNA, 24 bp, Artificial Sequence
  Synthetic oligonucleotide; CAAGAAT chr11 5260232 5260255 5260252 +
ttcttaaacaaaacaattatcagc

SEQ ID NO: 66889 - DNA, 24 bp, Artificial Sequence
  Synthetic oligonucleotide; GAAGAAA chr11 5260270 5260293 5260290 +
ccagtgaaactaagcttcacaaat

SEQ ID NO: 66890 - DNA, 24 bp, Artificial Sequence
  Synthetic oligonucleotide; TCAGAAA chr11 5260291 5260314 5260311 +
aatgaagaaaatacacagtgtttt

SEQ ID NO: 66891 - DNA, 24 bp, Artificial Sequence
  Synthetic oligonucleotide; AGAGAAT chr11 5260309 5260332 5260329 +
tgtttttcagaaaaacaaatgctg

SEQ ID NO: 66892 - DNA, 24 bp, Artificial Sequence
  Synthetic oligonucleotide; GAAGAAT chr11 5260478 5260501 5260498 +
agatacacaggcaacaaataccac

SEQ ID NO: 66893 - DNA, 24 bp, Artificial Sequence
  Synthetic oligonucleotide; ACAGAAT chr11 5260552 5260575 5260572 +
gactaaatgctccacttaaaagat

SEQ ID NO: 66894 - DNA, 24 bp, Artificial Sequence
  Synthetic oligonucleotide; GCAGAAT chr11 5260560 5260583 5260580 +
gctccacttaaaagatacagaatt

SEQ ID NO: 66895 - DNA, 24 bp, Artificial Sequence
  Synthetic oligonucleotide; TAAGAAT chr11 5260570 5260593 5260590 +
aaagatacagaattgcagaatgaa

SEQ ID NO: 66896 - DNA, 24 bp, Artificial Sequence
  Synthetic oligonucleotide; AAAGAAA chr11 5260731 5260754 5260751 +
cttatgtcagacaaaacaaacttt

SEQ ID NO: 66897 - DNA, 24 bp, Artificial Sequence
  Synthetic oligonucleotide; GGAGAAT chr11 5260796 5260819 5260816 +
aatgataaaagcccttgtccaatg

SEQ ID NO: 66898 - DNA, 24 bp, Artificial Sequence
  Synthetic oligonucleotide; AAAGAAA chr11 5260948 5260971 5260968 +
aggcaggtcatcaagacagtctac

SEQ ID NO: 66899 - DNA, 24 bp, Artificial Sequence
  Synthetic oligonucleotide; GCAGAAT chr11 5261016 5261039 5261036 +
tacaggacattctacccaacaact

SEQ ID NO: 66900 - DNA, 24 bp, Artificial Sequence
  Synthetic oligonucleotide; GTAGAAT chr11 5261143 5261166 5261163 +
tatcaagcactctctcagaccaca

SEQ ID NO: 66901 - DNA, 24 bp, Artificial Sequence
  Synthetic oligonucleotide; AGAGAAA chr11 5261361 5261384 5261381 +
agttctcgccaggacaatcaggca

SEQ ID NO: 66902 - DNA, 24 bp, Artificial Sequence
  Synthetic oligonucleotide; AAAGAAA chr11 5261365 5261388 5261385 +
ctcgccaggacaatcaggcaagag

SEQ ID NO: 66903 - DNA, 24 bp, Artificial Sequence
  Synthetic oligonucleotide; GCAGAAA chr11 5261520 5261543 5261540 +
agtctcaagatacaaaatcagtgt

SEQ ID NO: 66904 - DNA, 24 bp, Artificial Sequence
  Synthetic oligonucleotide; AGAGAAT chr11 5261606 5261629 5261626 +
aactcccattcacaattgctgcaa

SEQ ID NO: 66905 - DNA, 24 bp, Artificial Sequence
  Synthetic oligonucleotide; CTAGAAA chr11 5261625 5261648 5261645 +
tgcaaagagaataaaataaaatac

SEQ ID NO: 66906 - DNA, 24 bp, Artificial Sequence
  Synthetic oligonucleotide; ATAGAAA chr11 5261743 5261766 5261763 +
tggaaaaacattccatgctcatag

SEQ ID NO: 66907 - DNA, 24 bp, Artificial Sequence
  Synthetic oligonucleotide; AAAGAAT chr11 5261747 5261770 5261767 +
aaaacattccatgctcatagatag

SEQ ID NO: 66908 - DNA, 24 bp, Artificial Sequence
  Synthetic oligonucleotide; AAAGAAT chr11 5261836 5261859 5261856 +
atcaagctaccactgacttttttc

SEQ ID NO: 66909 - DNA, 24 bp, Artificial Sequence
  Synthetic oligonucleotide; TTAGAAA chr11 5261842 5261865 5261862 +
ctaccactgacttttttcaaagaa

SEQ ID NO: 66910 - DNA, 24 bp, Artificial Sequence
  Synthetic oligonucleotide; TCAGAAA chr11 5262037 5262060 5262057 +
gaccagtggaacagaacagaagcc

SEQ ID NO: 66911 - DNA, 24 bp, Artificial Sequence
  Synthetic oligonucleotide; GGAGAAA chr11 5262097 5262120 5262117 +
tttgacaaacatcacaaaagcaat

SEQ ID NO: 66912 - DNA, 24 bp, Artificial Sequence
  Synthetic oligonucleotide; AAAGAAT chr11 5262101 5262124 5262121 +
acaaacatcacaaaagcaatggag

SEQ ID NO: 66913 - DNA, 24 bp, Artificial Sequence
  Synthetic oligonucleotide; ACAGAAT chr11 5262417 5262440 5262437 +
atcatcagagtgaacaggcaacct

SEQ ID NO: 66914 - DNA, 24 bp, Artificial Sequence
  Synthetic oligonucleotide; GGAGAAA chr11 5262425 5262448 5262445 +
agtgaacaggcaacctacagaatg

SEQ ID NO: 66915 - DNA, 24 bp, Artificial Sequence
  Synthetic oligonucleotide; CAAGAAA chr11 5262500 5262523 5262520 +
ctacaaagaacttcaacaaattta

SEQ ID NO: 66916 - DNA, 24 bp, Artificial Sequence
  Synthetic oligonucleotide; CAAGAAA chr11 5262581 5262604 5262601 +
ctctaaagaagtcatttatgtggc

SEQ ID NO: 66917 - DNA, 24 bp, Artificial Sequence
  Synthetic oligonucleotide; AGAGAAA chr11 5262621 5262644 5262641 +
agaagctcatcatcactggtcatt

SEQ ID NO: 66918 - DNA, 24 bp, Artificial Sequence
  Synthetic oligonucleotide; TTAGAAT chr11 5262667 5262690 5262687 +
caatgagataccatctcatgccag

SEQ ID NO: 66919 - DNA, 24 bp, Artificial Sequence
  Synthetic oligonucleotide; GAAGAAT chr11 5262721 5262744 5262741 +
acaaaaggtgctggagaggatgtg

SEQ ID NO: 66920 - DNA, 24 bp, Artificial Sequence
  Synthetic oligonucleotide; CCAGAAA chr11 5262813 5262836 5262833 +
tggcgattcctcaaggatctagaa

SEQ ID NO: 66921 - DNA, 24 bp, Artificial Sequence
  Synthetic oligonucleotide; AAAGAAT chr11 5262860 5262883 5262880 +
aatcccattactgggtatataccc

SEQ ID NO: 66922 - DNA, 24 bp, Artificial Sequence
  Synthetic oligonucleotide; TTAGAAA chr11 5262866 5262889 5262886 +
attactgggtatatacccaaagaa

SEQ ID NO: 66923 - DNA, 24 bp, Artificial Sequence
  Synthetic oligonucleotide; AAAGAAA chr11 5262977 5263000 5262997 +
atggccatcagcgatataatggat

SEQ ID NO: 66924 - DNA, 24 bp, Artificial Sequence
  Synthetic oligonucleotide; AGAGAAA chr11 5263100 5263123 5263120 +
ttctgagcaaactaacacaggaac

SEQ ID NO: 66925 - DNA, 24 bp, Artificial Sequence
  Synthetic oligonucleotide; AAAGAAA chr11 5263232 5263255 5263252 +
ggggttaggagagggataacatta

SEQ ID NO: 66926 - DNA, 24 bp, Artificial Sequence
  Synthetic oligonucleotide; CAAGAAA chr11 5263509 5263532 5263529 +
gacagacaatataaggtcacacca

SEQ ID NO: 66927 - DNA, 24 bp, Artificial Sequence
  Synthetic oligonucleotide; AGAGAAA chr11 5263518 5263541 5263538 +
tataaggtcacaccacaagaaact

SEQ ID NO: 66928 - DNA, 24 bp, Artificial Sequence
  Synthetic oligonucleotide; AAAGAAA chr11 5263553 5263576 5263573 +
aacaaacagaaccaaaacccagca

SEQ ID NO: 66929 - DNA, 24 bp, Artificial Sequence
  Synthetic oligonucleotide; CAAGAAA chr11 5263691 5263714 5263711 +
tgatagaccattagcaagattaac

SEQ ID NO: 66930 - DNA, 24 bp, Artificial Sequence
  Synthetic oligonucleotide; TTAGAAA chr11 5263725 5263748 5263745 +
ggagagaagtgcaaataaactcaa

SEQ ID NO: 66931 - DNA, 24 bp, Artificial Sequence
  Synthetic oligonucleotide; ACAGAAA chr11 5263760 5263783 5263780 +
acaggagatactattactgatacc

SEQ ID NO: 66932 - DNA, 24 bp, Artificial Sequence
  Synthetic oligonucleotide; CTAGAAA chr11 5263814 5263837 5263834 +
tatgaacacctttacatgcataaa

SEQ ID NO: 66933 - DNA, 24 bp, Artificial Sequence
  Synthetic oligonucleotide; GAAGAAT chr11 5263876 5263899 5263896 +
atacagggctctagcttaagtcag

SEQ ID NO: 66934 - DNA, 24 bp, Artificial Sequence
  Synthetic oligonucleotide; GAAGAAT chr11 5264002 5264025 5264022 +
gctgaattctaccagacattcaaa

SEQ ID NO: 66935 - DNA, 24 bp, Artificial Sequence
  Synthetic oligonucleotide; AGAGAAA chr11 5264043 5264066 5264063 +
cctattgacagtattctacaagat

SEQ ID NO: 66936 - DNA, 24 bp, Artificial Sequence
  Synthetic oligonucleotide; AGAGAAT chr11 5264051 5264074 5264071 +
cagtattctacaagatagagaaag

SEQ ID NO: 66937 - DNA, 24 bp, Artificial Sequence
  Synthetic oligonucleotide; AGAGAAT chr11 5264300 5264323 5264320 +
caataagtgtgatacacaacataa

SEQ ID NO: 66938 - DNA, 24 bp, Artificial Sequence
  Synthetic oligonucleotide; ACAGAAA chr11 5264341 5264364 5264361 +
aatcatgtgattatctcaatagcc

SEQ ID NO: 66939 - DNA, 24 bp, Artificial Sequence
  Synthetic oligonucleotide; AGAGAAA chr11 5264581 5264604 5264601 +
agtcctagcaagagcaatcagaca

SEQ ID NO: 66940 - DNA, 24 bp, Artificial Sequence
  Synthetic oligonucleotide; AGAGAAA chr11 5264614 5264637 5264634 +
agtaaagcacatccaaattgttaa

SEQ ID NO: 66941 - DNA, 24 bp, Artificial Sequence
  Synthetic oligonucleotide; GTAGAAA chr11 5264660 5264683 5264680 +
tttgctgatgatatgattgtgtat

SEQ ID NO: 66942 - DNA, 24 bp, Artificial Sequence
  Synthetic oligonucleotide; TGAGAAT chr11 5264784 5264807 5264804 +
cttacataccagcaatgaccaagc

SEQ ID NO: 66943 - DNA, 24 bp, Artificial Sequence
  Synthetic oligonucleotide; GTAGAAT chr11 5264974 5264997 5264994 +
aacacatgccattctcatagatgg

SEQ ID NO: 66944 - DNA, 24 bp, Artificial Sequence
  Synthetic oligonucleotide; CTAGAAA chr11 5265069 5265092 5265089 +
ataccaccattagtcttcacagaa

SEQ ID NO: 66945 - DNA, 24 bp, Artificial Sequence
  Synthetic oligonucleotide; ACAGAAT chr11 5265247 5265270 5265267 +
caaataggcacatcgaccaatgga

SEQ ID NO: 66946 - DNA, 24 bp, Artificial Sequence
  Synthetic oligonucleotide; CCAGAAA chr11 5265261 5265284 5265281 +
gaccaatggaacagaatagagaac

SEQ ID NO: 66947 - DNA, 24 bp, Artificial Sequence
  Synthetic oligonucleotide; GGAGAAT chr11 5265382 5265405 5265402 +
gggatagctggcaagctacatgta

SEQ ID NO: 66948 - DNA, 24 bp, Artificial Sequence
  Synthetic oligonucleotide; CTAGAAA chr11 5265477 5265500 5265497 +
ctaagccctgaaactgtaacaatt

SEQ ID NO: 66949 - DNA, 24 bp, Artificial Sequence
  Synthetic oligonucleotide; AAAGAAA chr11 5265565 5265588 5265585 +
acacaaatgcaaatacataaaaac

SEQ ID NO: 66950 - DNA, 24 bp, Artificial Sequence
  Synthetic oligonucleotide; GCAGAAT chr11 5265626 5265649 5265646 +
tttgcatggcaaaaggaagagtct

SEQ ID NO: 66951 - DNA, 24 bp, Artificial Sequence
  Synthetic oligonucleotide; GGAGAAA chr11 5265654 5265677 5265674 +
aataaacagacaacccacagagtg

SEQ ID NO: 66952 - DNA, 24 bp, Artificial Sequence
  Synthetic oligonucleotide; AAAGAAT chr11 5265686 5265709 5265706 +
tcttcacaatctatacatctgaca

SEQ ID NO: 66953 - DNA, 24 bp, Artificial Sequence
  Synthetic oligonucleotide; CAAGAAA chr11 5265729 5265752 5265749 +
ctaaaatgaacacaaatagattat

SEQ ID NO: 66954 - DNA, 24 bp, Artificial Sequence
  Synthetic oligonucleotide; TCAGAAA chr11 5265787 5265810 5265807 +
gctaaggacatgaacagacaattc

SEQ ID NO: 66955 - DNA, 24 bp, Artificial Sequence
  Synthetic oligonucleotide; GGAGAAA chr11 5265950 5265973 5265970 +
aataacagatccttgtgaggatat

SEQ ID NO: 66956 - DNA, 24 bp, Artificial Sequence
  Synthetic oligonucleotide; AAAGAAA chr11 5266095 5266118 5266115 +
atctcactagtggttatttatcca

SEQ ID NO: 66957 - DNA, 24 bp, Artificial Sequence
  Synthetic oligonucleotide; AAAGAAT chr11 5266250 5266273 5266270 +
tgcacagtactattttgccatgaa

SEQ ID NO: 66958 - DNA, 24 bp, Artificial Sequence
  Synthetic oligonucleotide; ACAGAAA chr11 5266381 5266404 5266401 +
gatagataataaaataagccagat

SEQ ID NO: 66959 - DNA, 24 bp, Artificial Sequence
  Synthetic oligonucleotide; GTAGAAT chr11 5266453 5266476 5266473 +
aagtgggtctcatggtggtagaga

SEQ ID NO: 66960 - DNA, 24 bp, Artificial Sequence
  Synthetic oligonucleotide; CTAGAAA chr11 5266626 5266649 5266646 +
tatttattatatatttcaaaatgg

SEQ ID NO: 66961 - DNA, 24 bp, Artificial Sequence
  Synthetic oligonucleotide; ATAGAAA chr11 5266658 5266681 5266678 +
gaggatttgaaattttctcaatac

SEQ ID NO: 66962 - DNA, 24 bp, Artificial Sequence
  Synthetic oligonucleotide; TTAGAAT chr11 5267644 5267667 5267664 +
tcacgaagccctagcttgctggtt

SEQ ID NO: 66963 - DNA, 24 bp, Artificial Sequence
  Synthetic oligonucleotide; GAAGAAA chr11 5268333 5268356 5268353 +
ataaaattgcaatttttgattact

SEQ ID NO: 66964 - DNA, 24 bp, Artificial Sequence
  Synthetic oligonucleotide; CCAGAAT chr11 5268543 5268566 5268563 +
tgaactccttgccaaagtgagtag

SEQ ID NO: 66965 - DNA, 24 bp, Artificial Sequence
  Synthetic oligonucleotide; GTAGAAT chr11 5268884 5268907 5268904 +
agcaattgtctaatttttgtaaat

SEQ ID NO: 66966 - DNA, 24 bp, Artificial Sequence
  Synthetic oligonucleotide; TTAGAAA chr11 5268991 5269014 5269011 +
tactgatgggaaatttaacatatt

SEQ ID NO: 66967 - DNA, 24 bp, Artificial Sequence
  Synthetic oligonucleotide; CAAGAAA chr11 5270218 5270241 5270238 +
tccatctctcccattctccttttc

SEQ ID NO: 66968 - DNA, 24 bp, Artificial Sequence
  Synthetic oligonucleotide; AAAGAAA chr11 5270331 5270354 5270351 +
cagtgacaaaaacagggccaagga

SEQ ID NO: 66969 - DNA, 24 bp, Artificial Sequence
  Synthetic oligonucleotide; ACAGAAT chr11 5270352 5270375 5270372 +
ggaaaagaaaataaagctgttaaa

SEQ ID NO: 66970 - DNA, 24 bp, Artificial Sequence
  Synthetic oligonucleotide; CTAGAAA chr11 5270453 5270476 5270473 +
gacaaaaaccgtacatagttcctt

SEQ ID NO: 66971 - DNA, 24 bp, Artificial Sequence
  Synthetic oligonucleotide; ACAGAAT chr11 5270464 5270487 5270484 +
tacatagttccttctagaaactga

SEQ ID NO: 66972 - DNA, 24 bp, Artificial Sequence
  Synthetic oligonucleotide; ACAGAAA chr11 5270547 5270570 5270567 +
ggggtgattccctagagaggacag

SEQ ID NO: 66973 - DNA, 24 bp, Artificial Sequence
  Synthetic oligonucleotide; AGAGAAT chr11 5270574 5270597 5270594 +
gaaaagattacatccagtgcttcc

SEQ ID NO: 66974 - DNA, 24 bp, Artificial Sequence
  Synthetic oligonucleotide; CCAGAAT chr11 5270732 5270755 5270752 +
ctaaaatcctaaaattatttaaag

SEQ ID NO: 66975 - DNA, 24 bp, Artificial Sequence
  Synthetic oligonucleotide; AGAGAAA chr11 5270751 5270774 5270771 +
taaagccagaatttgtcatcaaac

SEQ ID NO: 66976 - DNA, 24 bp, Artificial Sequence
  Synthetic oligonucleotide; GAAGAAT chr11 5270925 5270948 5270945 +
gtattcaattcgatccatgtgcct

SEQ ID NO: 66977 - DNA, 24 bp, Artificial Sequence
  Synthetic oligonucleotide; TTAGAAT chr11 5270992 5271015 5271012 +
taccattgtcattatcctcatatt

SEQ ID NO: 66978 - DNA, 24 bp, Artificial Sequence
  Synthetic oligonucleotide; ACAGAAA chr11 5271013 5271036 5271033 +
attttagaatcaaggaataaattc

SEQ ID NO: 66979 - DNA, 24 bp, Artificial Sequence
  Synthetic oligonucleotide; TAAGAAT chr11 5271748 5271771 5271768 +
aaaaaaaaaaacacttgtggcaag

SEQ ID NO: 66980 - DNA, 24 bp, Artificial Sequence
  Synthetic oligonucleotide; GGAGAAT chr11 5272385 5272408 5272405 +
ccagctactcaggaggccaaggca

SEQ ID NO: 66981 - DNA, 24 bp, Artificial Sequence
  Synthetic oligonucleotide; GAAGAAA chr11 5272607 5272630 5272627 +
agtttgtcctttgcattcaaagta

SEQ ID NO: 66982 - DNA, 24 bp, Artificial Sequence
  Synthetic oligonucleotide; CAAGAAA chr11 5273287 5273310 5273307 +
gctaaaggtggtagggaggagctt

SEQ ID NO: 66983 - DNA, 24 bp, Artificial Sequence
  Synthetic oligonucleotide; TCAGAAA chr11 5273553 5273576 5273573 +
agtgttatggccatccaggataga

SEQ ID NO: 66984 - DNA, 24 bp, Artificial Sequence
  Synthetic oligonucleotide; TCAGAAA chr11 5273570 5273593 5273590 +
ggatagatcagaaagattagacag

SEQ ID NO: 66985 - DNA, 24 bp, Artificial Sequence
  Synthetic oligonucleotide; TAAGAAT chr11 5273587 5273610 5273607 +
tagacagtcagaaaaagtaatcag

SEQ ID NO: 66986 - DNA, 24 bp, Artificial Sequence
  Synthetic oligonucleotide; TTAGAAA chr11 5273673 5273696 5273693 +
aagacatttaagtataaaggactt

SEQ ID NO: 66987 - DNA, 24 bp, Artificial Sequence
  Synthetic oligonucleotide; AAAGAAA chr11 5273677 5273700 5273697 +
catttaagtataaaggacttttag

SEQ ID NO: 66988 - DNA, 24 bp, Artificial Sequence
  Synthetic oligonucleotide; TAAGAAA chr11 5273971 5273994 5273991 +
ctgaatgtttttcatggtattatc

SEQ ID NO: 66989 - DNA, 24 bp, Artificial Sequence
  Synthetic oligonucleotide; AAAGAAT chr11 5274296 5274319 5274316 +
gtggctattttctagtgtaattgt

SEQ ID NO: 66990 - DNA, 24 bp, Artificial Sequence
  Synthetic oligonucleotide; AGAGAAT chr11 5274304 5274327 5274324 +
tttctagtgtaattgtaaagaatg

SEQ ID NO: 66991 - DNA, 24 bp, Artificial Sequence
  Synthetic oligonucleotide; GTAGAAA chr11 5274807 5274830 5274827 +
agggatctttaatgggaaaaagga

SEQ ID NO: 66992 - DNA, 24 bp, Artificial Sequence
  Synthetic oligonucleotide; CCAGAAT chr11 5274815 5274838 5274835 +
ttaatgggaaaaaggagtagaaag

SEQ ID NO: 66993 - DNA, 24 bp, Artificial Sequence
  Synthetic oligonucleotide; TTAGAAA chr11 5274886 5274909 5274906 +
aggttaaaacttgagtctgtcaac

SEQ ID NO: 66994 - DNA, 24 bp, Artificial Sequence
  Synthetic oligonucleotide; TAAGAAA chr11 5275007 5275030 5275027 +
catttattttcatgattaaaattc

SEQ ID NO: 66995 - DNA, 24 bp, Artificial Sequence
  Synthetic oligonucleotide; ATAGAAA chr11 5275069 5275092 5275089 +
ctaatgtatttatgaactaagaac

SEQ ID NO: 66996 - DNA, 24 bp, Artificial Sequence
  Synthetic oligonucleotide; TCAGAAT chr11 5275098 5275121 5275118 +
aataaaacaatactctgaagtagt

SEQ ID NO: 66997 - DNA, 24 bp, Artificial Sequence
  Synthetic oligonucleotide; CTAGAAA chr11 5275175 5275198 5275195 +
agtgcagggctttgaatcttatgt

SEQ ID NO: 66998 - DNA, 24 bp, Artificial Sequence
  Synthetic oligonucleotide; AAAGAAA chr11 5275671 5275694 5275691 +
ttgaggctaaggcatctgtgaagg

SEQ ID NO: 66999 - DNA, 24 bp, Artificial Sequence
  Synthetic oligonucleotide; TCAGAAA chr11 5275913 5275936 5275933 +
tgggatggtgatagctgggcagcg

SEQ ID NO: 67000 - DNA, 24 bp, Artificial Sequence
  Synthetic oligonucleotide; TCAGAAT chr11 5275998 5276021 5276018 +
gggcctagctaaaggcagtgagag

SEQ ID NO: 67001 - DNA, 24 bp, Artificial Sequence
  Synthetic oligonucleotide; ATAGAAA chr11 5276059 5276082 5276079 +
cttggtttctacacaagtagatac

SEQ ID NO: 67002 - DNA, 24 bp, Artificial Sequence
  Synthetic oligonucleotide; TCAGAAA chr11 5276108 5276131 5276128 +
tgagagtcctgcatgattagttgc

SEQ ID NO: 67003 - DNA, 24 bp, Artificial Sequence
  Synthetic oligonucleotide; GGAGAAA chr11 5276421 5276444 5276441 +
ggggctaggggaaggatagcatta

SEQ ID NO: 67004 - DNA, 24 bp, Artificial Sequence
  Synthetic oligonucleotide; ACAGAAT chr11 5276583 5276606 5276603 +
cccacaattcttaactataatctt

SEQ ID NO: 67005 - DNA, 24 bp, Artificial Sequence
  Synthetic oligonucleotide; ACAGAAA chr11 5276645 5276668 5276665 +
agagatttggacagccaggaaagc

SEQ ID NO: 67006 - DNA, 24 bp, Artificial Sequence
  Synthetic oligonucleotide; TAAGAAT chr11 5277204 5277227 5277224 +
attcattcaaaattgtaaaattgc

SEQ ID NO: 67007 - DNA, 24 bp, Artificial Sequence
  Synthetic oligonucleotide; ACAGAAT chr11 5277222 5277245 5277242 +
aattgctaagaatacagcacaaaa

SEQ ID NO: 67008 - DNA, 24 bp, Artificial Sequence
  Synthetic oligonucleotide; GGAGAAA chr11 5277330 5277353 5277350 +
tataccaatgagattaggtgctat

SEQ ID NO: 67009 - DNA, 24 bp, Artificial Sequence
  Synthetic oligonucleotide; TTAGAAT chr11 5277547 5277570 5277567 +
aaataccctaaagatgtaagatgc

SEQ ID NO: 67010 - DNA, 24 bp, Artificial Sequence
  Synthetic oligonucleotide; GGAGAAT chr11 5277602 5277625 5277622 +
atgtaggatgagattcggtgaagg

SEQ ID NO: 67011 - DNA, 24 bp, Artificial Sequence
  Synthetic oligonucleotide; TAAGAAA chr11 5277679 5277702 5277699 +
aataatacctacatcatagagttg

SEQ ID NO: 67012 - DNA, 24 bp, Artificial Sequence
  Synthetic oligonucleotide; AGAGAAT chr11 5277787 5277810 5277807 +
aatatatgcatgaacaactattgt

SEQ ID NO: 67013 - DNA, 24 bp, Artificial Sequence
  Synthetic oligonucleotide; GAAGAAA chr11 5277908 5277931 5277928 +
agactaatttggatagtatattgg

SEQ ID NO: 67014 - DNA, 24 bp, Artificial Sequence
  Synthetic oligonucleotide; AGAGAAT chr11 5278079 5278102 5278099 +
gaaaaaccaacaggattttctgac

SEQ ID NO: 67015 - DNA, 24 bp, Artificial Sequence
  Synthetic oligonucleotide; TCAGAAT chr11 5278241 5278264 5278261 +
tgtttgttcatcacagtctctacc

SEQ ID NO: 67016 - DNA, 24 bp, Artificial Sequence
  Synthetic oligonucleotide; TGAGAAA chr11 5278288 5278311 5278308 +
aagctgggtgggtggatatggaaa

SEQ ID NO: 67017 - DNA, 24 bp, Artificial Sequence
  Synthetic oligonucleotide; ACAGAAT chr11 5278455 5278478 5278475 +
gtagataagtcagagaacaatcag

SEQ ID NO: 67018 - DNA, 24 bp, Artificial Sequence
  Synthetic oligonucleotide; GTAGAAT chr11 5278959 5278982 5278979 +
ccctgatgagtttttcctccatgt

SEQ ID NO: 67019 - DNA, 24 bp, Artificial Sequence
  Synthetic oligonucleotide; ATAGAAT chr11 5278978 5279001 5278998 +
catgtgtagaattgaataagaagg

SEQ ID NO: 67020 - DNA, 24 bp, Artificial Sequence
  Synthetic oligonucleotide; AGAGAAA chr11 5279048 5279071 5279068 +
attgtgctgacaactatgttagag

SEQ ID NO: 67021 - DNA, 24 bp, Artificial Sequence
  Synthetic oligonucleotide; CTAGAAT chr11 5280542 5280565 5280562 +
tatatattcaggaaataatatatt

SEQ ID NO: 67022 - DNA, 24 bp, Artificial Sequence
  Synthetic oligonucleotide; ACAGAAA chr11 5280883 5280906 5280903 +
atgggaggtcactaatggagacac

SEQ ID NO: 67023 - DNA, 24 bp, Artificial Sequence
  Synthetic oligonucleotide; TAAGAAT chr11 5281053 5281076 5281073 +
tattttcagtgcttgaatcataaa

SEQ ID NO: 67024 - DNA, 24 bp, Artificial Sequence
  Synthetic oligonucleotide; AAAGAAT chr11 5281427 5281450 5281447 +
tagaggtatttatgggatggggga

SEQ ID NO: 67025 - DNA, 24 bp, Artificial Sequence
  Synthetic oligonucleotide; GGAGAAT chr11 5281465 5281488 5281485 +
tcactgtggattattttagagagt

SEQ ID NO: 67026 - DNA, 24 bp, Artificial Sequence
  Synthetic oligonucleotide; TAAGAAA chr11 5281493 5281516 5281513 +
aatggtcaagatttttttaaaaat

SEQ ID NO: 67027 - DNA, 24 bp, Artificial Sequence
  Synthetic oligonucleotide; TGAGAAA chr11 5281515 5281538 5281535 +
attaagaaaacataagttggacct

SEQ ID NO: 67028 - DNA, 24 bp, Artificial Sequence
  Synthetic oligonucleotide; TCAGAAA chr11 5281708 5281731 5281728 +
gcctttctcctctctcctttctca

SEQ ID NO: 67029 - DNA, 24 bp, Artificial Sequence
  Synthetic oligonucleotide; TAAGAAA chr11 5281748 5281771 5281768 +
tctactagggtcaggcagatcaca

SEQ ID NO: 67030 - DNA, 24 bp, Artificial Sequence
  Synthetic oligonucleotide; CCAGAAA chr11 5281868 5281891 5281888 +
gagattaggaggggccaaatgagc

SEQ ID NO: 67031 - DNA, 24 bp, Artificial Sequence
  Synthetic oligonucleotide; ATAGAAT chr11 5281960 5281983 5281980 +
taggatgataatatgtattagcta

SEQ ID NO: 67032 - DNA, 24 bp, Artificial Sequence
  Synthetic oligonucleotide; AAAGAAT chr11 5282090 5282113 5282110 +
actattacagttgcatgctacctt

SEQ ID NO: 67033 - DNA, 24 bp, Artificial Sequence
  Synthetic oligonucleotide; TGAGAAA chr11 5282404 5282427 5282424 +
ggaaatacaataatggctaatttt

SEQ ID NO: 67034 - DNA, 24 bp, Artificial Sequence
  Synthetic oligonucleotide; TGAGAAA chr11 5282482 5282505 5282502 +
gagttcttccattctttttacaga

SEQ ID NO: 67035 - DNA, 24 bp, Artificial Sequence
  Synthetic oligonucleotide; GGAGAAA chr11 5282531 5282554 5282551 +
atgattttaaagtagttagcatat

SEQ ID NO: 67036 - DNA, 24 bp, Artificial Sequence
  Synthetic oligonucleotide; AGAGAAT chr11 5282597 5282620 5282617 +
gtcagacccggcaaagggagatgc

SEQ ID NO: 67037 - DNA, 24 bp, Artificial Sequence
  Synthetic oligonucleotide; TTAGAAT chr11 5282693 5282716 5282713 +
agggccctcagttcttgacgctag

SEQ ID NO: 67038 - DNA, 24 bp, Artificial Sequence
  Synthetic oligonucleotide; AGAGAAA chr11 5282942 5282965 5282962 +
tcatatgacaatctctgtaaccca

SEQ ID NO: 67039 - DNA, 24 bp, Artificial Sequence
  Synthetic oligonucleotide; GAAGAAA chr11 5283011 5283034 5283031 +
cctttttctccctcaaactttcct

SEQ ID NO: 67040 - DNA, 24 bp, Artificial Sequence
  Synthetic oligonucleotide; ACAGAAT chr11 5283901 5283924 5283921 +
agtatgttcaataatacatatctc

SEQ ID NO: 67041 - DNA, 24 bp, Artificial Sequence
  Synthetic oligonucleotide; ATAGAAA chr11 5283956 5283979 5283976 +
atatcataaaatggcacctgacat

SEQ ID NO: 67042 - DNA, 24 bp, Artificial Sequence
  Synthetic oligonucleotide; GTAGAAT chr11 5284614 5284637 5284634 +
ataggggagcagtcccatgtagta

SEQ ID NO: 67043 - DNA, 24 bp, Artificial Sequence
  Synthetic oligonucleotide; ACAGAAT chr11 5284977 5285000 5284997 +
tcttcatggctgtctcctttatcc

SEQ ID NO: 67044 - DNA, 24 bp, Artificial Sequence
  Synthetic oligonucleotide; GGAGAAA chr11 5285629 5285652 5285649 +
tcaactagccaggggctggactgt

SEQ ID NO: 67045 - DNA, 24 bp, Artificial Sequence
  Synthetic oligonucleotide; CAAGAAT chr11 5285943 5285966 5285963 +
tgttgataatctgattcatgcaac

SEQ ID NO: 67046 - DNA, 24 bp, Artificial Sequence
  Synthetic oligonucleotide; CAAGAAA chr11 5286015 5286038 5286035 +
ttgtgcatatgatggggtagcaga

SEQ ID NO: 67047 - DNA, 24 bp, Artificial Sequence
  Synthetic oligonucleotide; GTAGAAA chr11 5286093 5286116 5286113 +
atcaagaccagccttttgctcagg

SEQ ID NO: 67048 - DNA, 24 bp, Artificial Sequence
  Synthetic oligonucleotide; GAAGAAT chr11 5286220 5286243 5286240 +
atgtttatgaaattcttacacaca

SEQ ID NO: 67049 - DNA, 24 bp, Artificial Sequence
  Synthetic oligonucleotide; AAAGAAT chr11 5286861 5286884 5286881 +
ggggataataatagtatctacctg

SEQ ID NO: 67050 - DNA, 24 bp, Artificial Sequence
  Synthetic oligonucleotide; CAAGAAT chr11 5287006 5287029 5287026 +
cagaacactagttttcacctgcag

SEQ ID NO: 67051 - DNA, 24 bp, Artificial Sequence
  Synthetic oligonucleotide; GAAGAAA chr11 5287454 5287477 5287474 +
taaaaaaccctccattttacagat

SEQ ID NO: 67052 - DNA, 24 bp, Artificial Sequence
  Synthetic oligonucleotide; AGAGAAA chr11 5287480 5287503 5287500 +
agaaactgagtcatacaactacta

SEQ ID NO: 67053 - DNA, 24 bp, Artificial Sequence
  Synthetic oligonucleotide; TGAGAAT chr11 5287647 5287670 5287667 +
gctaagttctttcctaaaggtatg

SEQ ID NO: 67054 - DNA, 24 bp, Artificial Sequence
  Synthetic oligonucleotide; TGAGAAT chr11 5287734 5287757 5287754 +
acactcagtgggcctgggtgaagg

SEQ ID NO: 67055 - DNA, 24 bp, Artificial Sequence
  Synthetic oligonucleotide; AGAGAAA chr11 5287910 5287933 5287930 +
tactccagactcctacttataaaa

SEQ ID NO: 67056 - DNA, 24 bp, Artificial Sequence
  Synthetic oligonucleotide; AGAGAAA chr11 5288329 5288352 5288349 +
catctcatagctgctgagtgggag

SEQ ID NO: 67057 - DNA, 24 bp, Artificial Sequence
  Synthetic oligonucleotide; TAAGAAA chr11 5288385 5288408 5288405 +
tcatggctattcttattctcacac

SEQ ID NO: 67058 - DNA, 24 bp, Artificial Sequence
  Synthetic oligonucleotide; AAAGAAT chr11 5288391 5288414 5288411 +
ctattcttattctcacactaagaa

SEQ ID NO: 67059 - DNA, 24 bp, Artificial Sequence
  Synthetic oligonucleotide; GTAGAAA chr11 5288646 5288669 5288666 +
tgttattcctgtttcaatggctta

SEQ ID NO: 67060 - DNA, 24 bp, Artificial Sequence
  Synthetic oligonucleotide; TAAGAAA chr11 5288771 5288794 5288791 +
aataactttatattgttactactc

SEQ ID NO: 67061 - DNA, 24 bp, Artificial Sequence
  Synthetic oligonucleotide; AGAGAAA chr11 5288798 5288821 5288818 +
gaaagttacaacatggtgaataca

SEQ ID NO: 67062 - DNA, 24 bp, Artificial Sequence
  Synthetic oligonucleotide; CCAGAAA chr11 5288817 5288840 5288837 +
atacaagagaaagctattacaagt

SEQ ID NO: 67063 - DNA, 24 bp, Artificial Sequence
  Synthetic oligonucleotide; TTAGAAT chr11 5289398 5289421 5289418 +
gtgactgtagggttgagagggaga

SEQ ID NO: 67064 - DNA, 24 bp, Artificial Sequence
  Synthetic oligonucleotide; CCAGAAA chr11 5289587 5289610 5289607 +
actacctggggataaatatttcct

SEQ ID NO: 67065 - DNA, 24 bp, Artificial Sequence
  Synthetic oligonucleotide; AAAGAAA chr11 5289662 5289685 5289682 +
ttgtctattttccctgaagttctc

SEQ ID NO: 67066 - DNA, 24 bp, Artificial Sequence
  Synthetic oligonucleotide; TGAGAAT chr11 5289805 5289828 5289825 +
ttccaaggtctgttgcatcaagag

SEQ ID NO: 67067 - DNA, 24 bp, Artificial Sequence
  Synthetic oligonucleotide; TCAGAAA chr11 5289931 5289954 5289951 +
catctacaaagcatgagttgtggg

SEQ ID NO: 67068 - DNA, 24 bp, Artificial Sequence
  Synthetic oligonucleotide; TCAGAAT chr11 5289970 5289993 5289990 +
cacatcttttgacttcctttgaca

SEQ ID NO: 67069 - DNA, 24 bp, Artificial Sequence
  Synthetic oligonucleotide; TGAGAAT chr11 5290361 5290384 5290381 +
tctttcaacatcctcataataact

SEQ ID NO: 67070 - DNA, 24 bp, Artificial Sequence
  Synthetic oligonucleotide; TAAGAAT chr11 5290602 5290625 5290622 +
cttattatagttcctagcacaaag

SEQ ID NO: 67071 - DNA, 24 bp, Artificial Sequence
  Synthetic oligonucleotide; TGAGAAA chr11 5290791 5290814 5290811 +
caggttacatagctagtatataac

SEQ ID NO: 67072 - DNA, 24 bp, Artificial Sequence
  Synthetic oligonucleotide; TTAGAAA chr11 5290901 5290924 5290921 +
accttctcaatatcacttcttcac

SEQ ID NO: 67073 - DNA, 24 bp, Artificial Sequence
  Synthetic oligonucleotide; TGAGAAA chr11 5290954 5290977 5290974 +
atgaatcctttcaaaatatacttc

SEQ ID NO: 67074 - DNA, 24 bp, Artificial Sequence
  Synthetic oligonucleotide; AGAGAAA chr11 5290967 5290990 5290987 +
aaatatacttctgagaaatgagag

SEQ ID NO: 67075 - DNA, 24 bp, Artificial Sequence
  Synthetic oligonucleotide; AAAGAAA chr11 5291029 5291052 5291049 +
agagacagggaaggaggtgtgggg

SEQ ID NO: 67076 - DNA, 24 bp, Artificial Sequence
  Synthetic oligonucleotide; AAAGAAA chr11 5291124 5291147 5291144 +
ttgccatttctggactcttgaaat

SEQ ID NO: 67077 - DNA, 24 bp, Artificial Sequence
  Synthetic oligonucleotide; TTAGAAA chr11 5291215 5291238 5291235 +
tactaactagcctttgctttatta

SEQ ID NO: 67078 - DNA, 24 bp, Artificial Sequence
  Synthetic oligonucleotide; GGAGAAA chr11 5291277 5291300 5291297 +
gatatattaggaaaaagggaaact

SEQ ID NO: 67079 - DNA, 24 bp, Artificial Sequence
  Synthetic oligonucleotide; AGAGAAA chr11 5291501 5291524 5291521 +
aggaaatataatccactaataaaa

SEQ ID NO: 67080 - DNA, 24 bp, Artificial Sequence
  Synthetic oligonucleotide; GGAGAAA chr11 5291863 5291886 5291883 +
gtgaagcacgtccaagtgaaggca

SEQ ID NO: 67081 - DNA, 24 bp, Artificial Sequence
  Synthetic oligonucleotide; CAAGAAA chr11 5291879 5291902 5291899 +
tgaaggcaggagaaatgagaggag

SEQ ID NO: 67082 - DNA, 24 bp, Artificial Sequence
  Synthetic oligonucleotide; CAAGAAT chr11 5291901 5291924 5291921 +
agcaagaaagaggagccatttgat

SEQ ID NO: 67083 - DNA, 24 bp, Artificial Sequence
  Synthetic oligonucleotide; GCAGAAA chr11 5291909 5291932 5291929 +
agaggagccatttgatcaagaata

SEQ ID NO: 67084 - DNA, 24 bp, Artificial Sequence
  Synthetic oligonucleotide; GAAGAAT chr11 5292078 5292101 5292098 +
ttccataaaggagaacctaaagag

SEQ ID NO: 67085 - DNA, 24 bp, Artificial Sequence
  Synthetic oligonucleotide; AGAGAAA chr11 5292270 5292293 5292290 +
tgatgatacccatataaataacgt

SEQ ID NO: 67086 - DNA, 24 bp, Artificial Sequence
  Synthetic oligonucleotide; TTAGAAA chr11 5292642 5292665 5292662 +
atgtgtcaggatgcagtaatagat

SEQ ID NO: 67087 - DNA, 24 bp, Artificial Sequence
  Synthetic oligonucleotide; TGAGAAA chr11 5292708 5292731 5292728 +
tcaatcgaggaaaacctatgaaaa

SEQ ID NO: 67088 - DNA, 24 bp, Artificial Sequence
  Synthetic oligonucleotide; GCAGAAT chr11 5292813 5292836 5292833 +
taaagaacttgaaattgcattata

SEQ ID NO: 67089 - DNA, 24 bp, Artificial Sequence
  Synthetic oligonucleotide; TCAGAAT chr11 5293040 5293063 5293060 +
cttcctgtgattgactttatcatt

SEQ ID NO: 67090 - DNA, 24 bp, Artificial Sequence
  Synthetic oligonucleotide; AGAGAAT chr11 5293078 5293101 5293098 +
tttctgccacatagaggaagggaa

SEQ ID NO: 67091 - DNA, 24 bp, Artificial Sequence
  Synthetic oligonucleotide; CAAGAAT chr11 5293274 5293297 5293294 +
gtgggttcttggtttcactgactt

SEQ ID NO: 67092 - DNA, 24 bp, Artificial Sequence
  Synthetic oligonucleotide; CCAGAAA chr11 5294798 5294821 5294818 +
gagccggctctggccttggccagc

SEQ ID NO: 67093 - DNA, 24 bp, Artificial Sequence
  Synthetic oligonucleotide; GCAGAAA chr11 5295618 5295641 5295638 +
tagtctctttcagagaacatcatg

SEQ ID NO: 67094 - DNA, 24 bp, Artificial Sequence
  Synthetic oligonucleotide; AGAGAAT chr11 5295635 5295658 5295655 +
catcatggcagaaacattttttca

SEQ ID NO: 67095 - DNA, 24 bp, Artificial Sequence
  Synthetic oligonucleotide; ACAGAAA chr11 5295912 5295935 5295932 +
gaagcaactagaaccaagttacac

SEQ ID NO: 67096 - DNA, 24 bp, Artificial Sequence
  Synthetic oligonucleotide; TGAGAAT chr11 5296124 5296147 5296144 +
ttctgagatgtttatagtgataag

SEQ ID NO: 67097 - DNA, 24 bp, Artificial Sequence
  Synthetic oligonucleotide; GAAGAAA chr11 5296244 5296267 5296264 +
cagcagatttgtattattttatgt

SEQ ID NO: 67098 - DNA, 24 bp, Artificial Sequence
  Synthetic oligonucleotide; TCAGAAT chr11 5296252 5296275 5296272 +
ttgtattattttatgtgaagaaac

SEQ ID NO: 67099 - DNA, 24 bp, Artificial Sequence
  Synthetic oligonucleotide; AAAGAAA chr11 5296585 5296608 5296605 +
ttgtaacatgatgaggagacatgg

SEQ ID NO: 67100 - DNA, 24 bp, Artificial Sequence
  Synthetic oligonucleotide; TGAGAAT chr11 5296927 5296950 5296947 +
atgttcactatgatacctacttat

SEQ ID NO: 67101 - DNA, 24 bp, Artificial Sequence
  Synthetic oligonucleotide; GCAGAAA chr11 5297078 5297101 5297098 +
tattcataaacattgccaatgcat

SEQ ID NO: 67102 - DNA, 24 bp, Artificial Sequence
  Synthetic oligonucleotide; ACAGAAA chr11 5297225 5297248 5297245 +
tccccacacccaaatcttcaacag

SEQ ID NO: 67103 - DNA, 24 bp, Artificial Sequence
  Synthetic oligonucleotide; AGAGAAA chr11 5297306 5297329 5297326 +
tattcatctgacagcataggaagg

SEQ ID NO: 67104 - DNA, 24 bp, Artificial Sequence
  Synthetic oligonucleotide; AGAGAAA chr11 5297624 5297647 5297644 +
tatctaggcttttcaaactacctt

SEQ ID NO: 67105 - DNA, 24 bp, Artificial Sequence
  Synthetic oligonucleotide; AGAGAAT chr11 5297922 5297945 5297942 +
tgagggaatattcatgagacaaac

SEQ ID NO: 67106 - DNA, 24 bp, Artificial Sequence
  Synthetic oligonucleotide; AAAGAAA chr11 5297929 5297952 5297949 +
atattcatgagacaaacagagaat

SEQ ID NO: 67107 - DNA, 24 bp, Artificial Sequence
  Synthetic oligonucleotide; CTAGAAA chr11 5297984 5298007 5298004 +
ggcatgttaatatacaagtgattt

SEQ ID NO: 67108 - DNA, 24 bp, Artificial Sequence
  Synthetic oligonucleotide; CTAGAAA chr11 5298008 5298031 5298028 +
ctagaaagtgcatgaataagacag

SEQ ID NO: 67109 - DNA, 24 bp, Artificial Sequence
  Synthetic oligonucleotide; ATAGAAA chr11 5298016 5298039 5298036 +
tgcatgaataagacagctagaaag

SEQ ID NO: 67110 - DNA, 24 bp, Artificial Sequence
  Synthetic oligonucleotide; AGAGAAA chr11 5298064 5298087 5298084 +
gtgaatgtgaaacagttctggctg

SEQ ID NO: 67111 - DNA, 24 bp, Artificial Sequence
  Synthetic oligonucleotide; ACAGAAT chr11 5298510 5298533 5298530 +
ctgcattaataaatttgggggttt

SEQ ID NO: 67112 - DNA, 24 bp, Artificial Sequence
  Synthetic oligonucleotide; AGAGAAT chr11 5298595 5298618 5298615 +
ccctgactaaactcacagtatgac

SEQ ID NO: 67113 - DNA, 24 bp, Artificial Sequence
  Synthetic oligonucleotide; TAAGAAA chr11 5298930 5298953 5298950 +
aaaacgcataaatatacatttact

SEQ ID NO: 67114 - DNA, 24 bp, Artificial Sequence
  Synthetic oligonucleotide; CAAGAAA chr11 5299209 5299232 5299229 +
tgtaggctgtcttcttataacaat

SEQ ID NO: 67115 - DNA, 24 bp, Artificial Sequence
  Synthetic oligonucleotide; CCAGAAA chr11 5299409 5299432 5299429 +
ttttagaccaaacaacaaaggcaa

SEQ ID NO: 67116 - DNA, 24 bp, Artificial Sequence
  Synthetic oligonucleotide; ATAGAAT chr11 5299429 5299452 5299449 +
gcaaccagaaaacgacgtttctaa

SEQ ID NO: 67117 - DNA, 24 bp, Artificial Sequence
  Synthetic oligonucleotide; AGAGAAT chr11 5299483 5299506 5299503 +
aaaacaaataaataaattttacac

SEQ ID NO: 67118 - DNA, 24 bp, Artificial Sequence
  Synthetic oligonucleotide; GGAGAAA chr11 5299633 5299656 5299653 +
gcatccaaatgggccttctaattt

SEQ ID NO: 67119 - DNA, 24 bp, Artificial Sequence
  Synthetic oligonucleotide; AGAGAAT chr11 5299759 5299782 5299779 +
tgaaagatttcttaagtgaagcag

SEQ ID NO: 67120 - DNA, 24 bp, Artificial Sequence
  Synthetic oligonucleotide; TTAGAAT chr11 5299766 5299789 5299786 +
tttcttaagtgaagcagagagaat

SEQ ID NO: 67121 - DNA, 24 bp, Artificial Sequence
  Synthetic oligonucleotide; TCAGAAA chr11 5299812 5299835 5299832 +
tgggttctgaacatggactttcaa

SEQ ID NO: 67122 - DNA, 24 bp, Artificial Sequence
  Synthetic oligonucleotide; AAAGAAA chr11 5299817 5299840 5299837 +
tctgaacatggactttcaatcaga

SEQ ID NO: 67123 - DNA, 24 bp, Artificial Sequence
  Synthetic oligonucleotide; GAAGAAA chr11 5299860 5299883 5299880 +
agctcaacgagaacttaaaaattg

SEQ ID NO: 67124 - DNA, 24 bp, Artificial Sequence
  Synthetic oligonucleotide; GAAGAAA chr11 5299960 5299983 5299980 +
actagcgcagaactagcagtagat

SEQ ID NO: 67125 - DNA, 24 bp, Artificial Sequence
  Synthetic oligonucleotide; GAAGAAA chr11 5300063 5300086 5300083 +
caaacactttgaagaagattgaag

SEQ ID NO: 67126 - DNA, 24 bp, Artificial Sequence
  Synthetic oligonucleotide; ATAGAAA chr11 5300196 5300219 5300216 +
tttatgtgagaagcaagaggggaa

SEQ ID NO: 67127 - DNA, 24 bp, Artificial Sequence
  Synthetic oligonucleotide; GAAGAAA chr11 5300244 5300267 5300264 +
atttatagttggttatttttttca

SEQ ID NO: 67128 - DNA, 24 bp, Artificial Sequence
  Synthetic oligonucleotide; ATAGAAA chr11 5300267 5300290 5300287 +
agaagaaaaatgtcaggagacaaa

SEQ ID NO: 67129 - DNA, 24 bp, Artificial Sequence
  Synthetic oligonucleotide; GAAGAAA chr11 5300282 5300305 5300302 +
ggagacaaaatagaaagctggaaa

SEQ ID NO: 67130 - DNA, 24 bp, Artificial Sequence
  Synthetic oligonucleotide; TAAGAAA chr11 5300363 5300386 5300383 +
ggatatctggcttccacgagatga

SEQ ID NO: 67131 - DNA, 24 bp, Artificial Sequence
  Synthetic oligonucleotide; CCAGAAA chr11 5300951 5300974 5300971 +
ttccttttcagtaatgggagaggc

SEQ ID NO: 67132 - DNA, 24 bp, Artificial Sequence
  Synthetic oligonucleotide; CCAGAAA chr11 5301006 5301029 5301026 +
ataagggctcaagccctactctgc

SEQ ID NO: 67133 - DNA, 24 bp, Artificial Sequence
  Synthetic oligonucleotide; AGAGAAA chr11 5301085 5301108 5301105 +
tgataggattcacgaatggaggaa

SEQ ID NO: 67134 - DNA, 24 bp, Artificial Sequence
  Synthetic oligonucleotide; TAAGAAA chr11 5301279 5301302 5301299 +
atcactgtcttgaggattagtata

SEQ ID NO: 67135 - DNA, 24 bp, Artificial Sequence
  Synthetic oligonucleotide; AAAGAAT chr11 5301448 5301471 5301468 +
cacaatatgggtagcagtagagtg

SEQ ID NO: 67136 - DNA, 24 bp, Artificial Sequence
  Synthetic oligonucleotide; TAAGAAT chr11 5301523 5301546 5301543 +
ctatgttcatcactcgggaattgg

SEQ ID NO: 67137 - DNA, 24 bp, Artificial Sequence
  Synthetic oligonucleotide; CTAGAAT chr11 5302108 5302131 5302128 +
agcctgtactcacaaggcctttcc

SEQ ID NO: 67138 - DNA, 24 bp, Artificial Sequence
  Synthetic oligonucleotide; TCAGAAT chr11 5302136 5302159 5302156 +
aataacaaataacaaaaatcatgg

SEQ ID NO: 67139 - DNA, 24 bp, Artificial Sequence
  Synthetic oligonucleotide; ATAGAAA chr11 5302406 5302429 5302426 +
accactgaggaaaatgcttattca

SEQ ID NO: 67140 - DNA, 24 bp, Artificial Sequence
  Synthetic oligonucleotide; TGAGAAA chr11 5302417 5302440 5302437 +
aaatgcttattcaatagaaatgac

SEQ ID NO: 67141 - DNA, 24 bp, Artificial Sequence
  Synthetic oligonucleotide; AAAGAAA chr11 5302517 5302540 5302537 +
tagaccctgcctccaccaaaaaaa

SEQ ID NO: 67142 - DNA, 24 bp, Artificial Sequence
  Synthetic oligonucleotide; AAAGAAA chr11 5302669 5302692 5302689 +
taaaaaataaaataaaataaaacg

SEQ ID NO: 67143 - DNA, 24 bp, Artificial Sequence
  Synthetic oligonucleotide; ACAGAAA chr11 5302700 5302723 5302720 +
ataactcatctattgtgagtttcc

SEQ ID NO: 67144 - DNA, 24 bp, Artificial Sequence
  Synthetic oligonucleotide; TTAGAAA chr11 5302748 5302771 5302768 +
gtgggtaaagttagtaaactcatt

SEQ ID NO: 67145 - DNA, 24 bp, Artificial Sequence
  Synthetic oligonucleotide; AGAGAAA chr11 5303047 5303070 5303067 +
tagggaaaagataagcactcccag

SEQ ID NO: 67146 - DNA, 24 bp, Artificial Sequence
  Synthetic oligonucleotide; TGAGAAA chr11 5303127 5303150 5303147 +
attatgaatctgtaagactcgtat

SEQ ID NO: 67147 - DNA, 24 bp, Artificial Sequence
  Synthetic oligonucleotide; CAAGAAA chr11 5303241 5303264 5303261 +
tcaagatttttgttgttgtgatac

SEQ ID NO: 67148 - DNA, 24 bp, Artificial Sequence
  Synthetic oligonucleotide; ATAGAAA chr11 5303450 5303473 5303470 +
accttttttattttataaaaacct

SEQ ID NO: 67149 - DNA, 24 bp, Artificial Sequence
  Synthetic oligonucleotide; TCAGAAT chr11 5303475 5303498 5303495 +
tagaaacaataataattatatgtt

SEQ ID NO: 67150 - DNA, 24 bp, Artificial Sequence
  Synthetic oligonucleotide; AGAGAAT chr11 5303783 5303806 5303803 +
ttaaccttccaatgttgccttata

SEQ ID NO: 67151 - DNA, 24 bp, Artificial Sequence
  Synthetic oligonucleotide; CCAGAAA chr11 5304110 5304133 5304130 +
ttaattgtggcaaatttggtagta

SEQ ID NO: 67152 - DNA, 24 bp, Artificial Sequence
  Synthetic oligonucleotide; GGAGAAT chr11 5304142 5304165 5304162 +
tgtccacatacccaaatattccag

SEQ ID NO: 67153 - DNA, 24 bp, Artificial Sequence
  Synthetic oligonucleotide; CTAGAAT chr11 5304176 5304199 5304196 +
tgccctaatagtttagggagtctc

SEQ ID NO: 67154 - DNA, 24 bp, Artificial Sequence
  Synthetic oligonucleotide; AGAGAAT chr11 5304473 5304496 5304493 +
ataaactaaaatgagaagacaaaa

SEQ ID NO: 67155 - DNA, 24 bp, Artificial Sequence
  Synthetic oligonucleotide; GAAGAAA chr11 5304609 5304632 5304629 +
ttgccccaaaattgtgttcctata

SEQ ID NO: 67156 - DNA, 24 bp, Artificial Sequence
  Synthetic oligonucleotide; GGAGAAT chr11 5304939 5304962 5304959 +
ccagctactcgggaggctgaggca

SEQ ID NO: 67157 - DNA, 24 bp, Artificial Sequence
  Synthetic oligonucleotide; AGAGAAA chr11 5305064 5305087 5305084 +
aaaaaaaaaaaaaaaaaggtttgg

SEQ ID NO: 67158 - DNA, 24 bp, Artificial Sequence
  Synthetic oligonucleotide; AAAGAAA chr11 5305106 5305129 5305126 +
taggacaaattttgctctcagtaa

SEQ ID NO: 67159 - DNA, 24 bp, Artificial Sequence
  Synthetic oligonucleotide; ATAGAAT chr11 5305245 5305268 5305265 +
tatggtaggttaatagtgaaaaat

SEQ ID NO: 67160 - DNA, 24 bp, Artificial Sequence
  Synthetic oligonucleotide; GCAGAAA chr11 5305332 5305355 5305352 +
aatattgacaatttcaacataatg

SEQ ID NO: 67161 - DNA, 24 bp, Artificial Sequence
  Synthetic oligonucleotide; TGAGAAT chr11 5305569 5305592 5305589 +
ccagctactctggaggctgaggca

SEQ ID NO: 67162 - DNA, 24 bp, Artificial Sequence
  Synthetic oligonucleotide; AGAGAAA chr11 5305644 5305667 5305664 +
ccactgcactctagcctgggcaac

SEQ ID NO: 67163 - DNA, 24 bp, Artificial Sequence
  Synthetic oligonucleotide; AGAGAAA chr11 5305669 5305692 5305689 +
gagaaaaatctgttaaagagagag

SEQ ID NO: 67164 - DNA, 24 bp, Artificial Sequence
  Synthetic oligonucleotide; AAAGAAA chr11 5305674 5305697 5305694 +
aaatctgttaaagagagagagaga

SEQ ID NO: 67165 - DNA, 24 bp, Artificial Sequence
  Synthetic oligonucleotide; CAAGAAA chr11 5305694 5305717 5305714 +
gagaaaagaaaagtgagtaaaaaa

SEQ ID NO: 67166 - DNA, 24 bp, Artificial Sequence
  Synthetic oligonucleotide; CCAGAAT chr11 5306659 5306682 5306679 +
actccttatatttaggtctgatct

SEQ ID NO: 67167 - DNA, 24 bp, Artificial Sequence
  Synthetic oligonucleotide; CCAGAAT chr11 5307182 5307205 5307202 +
aggtcatacagcaataaatgcatt

SEQ ID NO: 67168 - DNA, 24 bp, Artificial Sequence
  Synthetic oligonucleotide; AGAGAAA chr11 5307558 5307581 5307578 +
taatttttacatcaatcatggttc

SEQ ID NO: 67169 - DNA, 24 bp, Artificial Sequence
  Synthetic oligonucleotide; GAAGAAA chr11 5307583 5307606 5307603 +
gagaaaaatccataacaacatcaa

SEQ ID NO: 67170 - DNA, 24 bp, Artificial Sequence
  Synthetic oligonucleotide; AAAGAAA chr11 5308127 5308150 5308147 +
ctaaatagctagaccaatacatga

SEQ ID NO: 67171 - DNA, 24 bp, Artificial Sequence
  Synthetic oligonucleotide; AGAGAAA chr11 5308236 5308259 5308256 +
tatcagttatgttaccatatagga

SEQ ID NO: 67172 - DNA, 24 bp, Artificial Sequence
  Synthetic oligonucleotide; AAAGAAA chr11 5308240 5308263 5308260 +
agttatgttaccatataggaagag

SEQ ID NO: 67173 - DNA, 24 bp, Artificial Sequence
  Synthetic oligonucleotide; GCAGAAA chr11 5308908 5308931 5308928 +
aaaactataacttgaagtttcata

SEQ ID NO: 67174 - DNA, 24 bp, Artificial Sequence
  Synthetic oligonucleotide; TGAGAAA chr11 5308938 5308961 5308958 +
agttggcatctttctcactaagca

SEQ ID NO: 67175 - DNA, 24 bp, Artificial Sequence
  Synthetic oligonucleotide; TGAGAAA chr11 5309257 5309280 5309277 +
attaggaacttactgggcacatta

SEQ ID NO: 67176 - DNA, 24 bp, Artificial Sequence
  Synthetic oligonucleotide; ACAGAAA chr11 5309431 5309454 5309451 +
gaaaaagttttaatacaaggacat

SEQ ID NO: 67177 - DNA, 24 bp, Artificial Sequence
  Synthetic oligonucleotide; GGAGAAT chr11 5309720 5309743 5309740 +
ccagctactcgggaggctgaggca

SEQ ID NO: 67178 - DNA, 24 bp, Artificial Sequence
  Synthetic oligonucleotide; CCAGAAA chr11 5310106 5310129 5310126 +
caaggcactgaaaacttcctttct

SEQ ID NO: 67179 - DNA, 24 bp, Artificial Sequence
  Synthetic oligonucleotide; GCAGAAT chr11 5310166 5310189 5310186 +
attccaaggaatattctttgaaaa

SEQ ID NO: 67180 - DNA, 24 bp, Artificial Sequence
  Synthetic oligonucleotide; GTAGAAT chr11 5310208 5310231 5310228 +
gaggaagtagagagatatatttag

SEQ ID NO: 67181 - DNA, 24 bp, Artificial Sequence
  Synthetic oligonucleotide; ATAGAAA chr11 5310262 5310285 5310282 +
tcaataattcacagtagccaagga

SEQ ID NO: 67182 - DNA, 24 bp, Artificial Sequence
  Synthetic oligonucleotide; ATAGAAT chr11 5310324 5310347 5310344 +
tcaacaaaatgtcttatatatgtg

SEQ ID NO: 67183 - DNA, 24 bp, Artificial Sequence
  Synthetic oligonucleotide; CTAGAAT chr11 5310454 5310477 5310474 +
tctgatttcacttacatgagctat

SEQ ID NO: 67184 - DNA, 24 bp, Artificial Sequence
  Synthetic oligonucleotide; TTAGAAA chr11 5310577 5310600 5310597 +
ttttatttggtgtaatacaaaatt

SEQ ID NO: 67185 - DNA, 24 bp, Artificial Sequence
  Synthetic oligonucleotide; ATAGAAT chr11 5310896 5310919 5310916 +
agaccatttatttgattttaataa

SEQ ID NO: 67186 - DNA, 24 bp, Artificial Sequence
  Synthetic oligonucleotide; AGAGAAA chr11 5310931 5310954 5310951 +
tggttgactcaacaatttcacttg

SEQ ID NO: 67187 - DNA, 24 bp, Artificial Sequence
  Synthetic oligonucleotide; AAAGAAT chr11 5310935 5310958 5310955 +
tgactcaacaatttcacttgagag

SEQ ID NO: 67188 - DNA, 24 bp, Artificial Sequence
  Synthetic oligonucleotide; TCAGAAT chr11 5311097 5311120 5311117 +
cttgttatttactcatctggtaat

SEQ ID NO: 67189 - DNA, 24 bp, Artificial Sequence
  Synthetic oligonucleotide; CAAGAAA chr11 5311249 5311272 5311269 +
gggtctacttcagtgaatgacacc

SEQ ID NO: 67190 - DNA, 24 bp, Artificial Sequence
  Synthetic oligonucleotide; AAAGAAA chr11 5311428 5311451 5311448 +
ctatgactcttcatgatcaggcaa

SEQ ID NO: 67191 - DNA, 24 bp, Artificial Sequence
  Synthetic oligonucleotide; TCAGAAA chr11 5311678 5311701 5311698 +
cactgcctttcttccaagaacatg

SEQ ID NO: 67192 - DNA, 24 bp, Artificial Sequence
  Synthetic oligonucleotide; TTAGAAT chr11 5312102 5312125 5312122 +
gtctccacacacactccttcagtc

SEQ ID NO: 67193 - DNA, 24 bp, Artificial Sequence
  Synthetic oligonucleotide; GAAGAAA chr11 5312338 5312361 5312358 +
tccccacttatttgaagactttaa

SEQ ID NO: 67194 - DNA, 24 bp, Artificial Sequence
  Synthetic oligonucleotide; TAAGAAA chr11 5312550 5312573 5312570 +
gtacaaataaattaggcaaaagta

SEQ ID NO: 67195 - DNA, 24 bp, Artificial Sequence
  Synthetic oligonucleotide; ACAGAAA chr11 5312680 5312703 5312700 +
taaattgtgtatatagcaagacaa

SEQ ID NO: 67196 - DNA, 24 bp, Artificial Sequence
  Synthetic oligonucleotide; TTAGAAT chr11 5312848 5312871 5312868 +
caaattgagatcacttgtgattta

SEQ ID NO: 67197 - DNA, 24 bp, Artificial Sequence
  Synthetic oligonucleotide; TCAGAAA chr11 5312916 5312939 5312936 +
attatatttcatctattggacata

SEQ ID NO: 67198 - DNA, 24 bp, Artificial Sequence
  Synthetic oligonucleotide; AAAGAAA chr11 5312959 5312982 5312979 +
gcatttagagagaacacaagatca

SEQ ID NO: 67199 - DNA, 24 bp, Artificial Sequence
  Synthetic oligonucleotide; AAAGAAA chr11 5313056 5313079 5313076 +
tatagatgacattgtatcattttg

SEQ ID NO: 67200 - DNA, 24 bp, Artificial Sequence
  Synthetic oligonucleotide; AAAGAAA chr11 5313140 5313163 5313160 +
aaattaaagagcttctgcacagca

SEQ ID NO: 67201 - DNA, 24 bp, Artificial Sequence
  Synthetic oligonucleotide; ACAGAAT chr11 5313173 5313196 5313193 +
atcatcagagataacagacaacct

SEQ ID NO: 67202 - DNA, 24 bp, Artificial Sequence
  Synthetic oligonucleotide; GAAGAAA chr11 5313181 5313204 5313201 +
agataacagacaacctacagaata

SEQ ID NO: 67203 - DNA, 24 bp, Artificial Sequence
  Synthetic oligonucleotide; CAAGAAA chr11 5313256 5313279 5313276 +
ctatgaggaactaaaacaaattta

SEQ ID NO: 67204 - DNA, 24 bp, Artificial Sequence
  Synthetic oligonucleotide; TTAGAAA chr11 5313374 5313397 5313394 +
aaaaaagctcaaccttactggtca

SEQ ID NO: 67205 - DNA, 24 bp, Artificial Sequence
  Synthetic oligonucleotide; TCAGAAT chr11 5313422 5313445 5313442 +
caatgggataccatctcacaccag

SEQ ID NO: 67206 - DNA, 24 bp, Artificial Sequence
  Synthetic oligonucleotide; CAAGAAA chr11 5313446 5313469 5313466 +
tcagaatggcaattattaaaaagt

SEQ ID NO: 67207 - DNA, 24 bp, Artificial Sequence
  Synthetic oligonucleotide; AGAGAAA chr11 5313477 5313500 5313497 +
caacagttgctggcaaggttgcag

SEQ ID NO: 67208 - DNA, 24 bp, Artificial Sequence
  Synthetic oligonucleotide; GCAGAAA chr11 5313573 5313596 5313593 +
tagcctttcctcaaagatgtagaa

SEQ ID NO: 67209 - DNA, 24 bp, Artificial Sequence
  Synthetic oligonucleotide; AAAGAAA chr11 5313737 5313760 5313757 +
atgtccatcaatgatagagtggat

SEQ ID NO: 67210 - DNA, 24 bp, Artificial Sequence
  Synthetic oligonucleotide; ACAGAAA chr11 5313860 5313883 5313880 +
tatcctcatcaaactaacacagga

SEQ ID NO: 67211 - DNA, 24 bp, Artificial Sequence
  Synthetic oligonucleotide; ACAGAAA chr11 5313888 5313911 5313908 +
aaaaccaaacacacatgttctcac

SEQ ID NO: 67212 - DNA, 24 bp, Artificial Sequence
  Synthetic oligonucleotide; GAAGAAT chr11 5313991 5314014 5314011 +
tggggaggagagggagagcaccag

SEQ ID NO: 67213 - DNA, 24 bp, Artificial Sequence
  Synthetic oligonucleotide; CCAGAAA chr11 5314709 5314732 5314729 +
ctcctttccaattactcaaaaggc

SEQ ID NO: 67214 - DNA, 24 bp, Artificial Sequence
  Synthetic oligonucleotide; CCAGAAA chr11 5314764 5314787 5314784 +
aaaagggctcaagccattctgtgc

SEQ ID NO: 67215 - DNA, 24 bp, Artificial Sequence
  Synthetic oligonucleotide; AAAGAAA chr11 5314842 5314865 5314862 +
taatagggttcatgaatggaggaa

SEQ ID NO: 67216 - DNA, 24 bp, Artificial Sequence
  Synthetic oligonucleotide; TAAGAAA chr11 5315037 5315060 5315057 +
ttaactgttttaaggatcaggata

SEQ ID NO: 67217 - DNA, 24 bp, Artificial Sequence
  Synthetic oligonucleotide; GAAGAAA chr11 5315066 5315089 5315086 +
aaagacaatgatcagagcgtctag

SEQ ID NO: 67218 - DNA, 24 bp, Artificial Sequence
  Synthetic oligonucleotide; CCAGAAT chr11 5315083 5315106 5315103 +
cgtctaggaagaaaatcaaagcaa

SEQ ID NO: 67219 - DNA, 24 bp, Artificial Sequence
  Synthetic oligonucleotide; GGAGAAA chr11 5315149 5315172 5315169 +
aggcaagtttcaggacatcttgat

SEQ ID NO: 67220 - DNA, 24 bp, Artificial Sequence
  Synthetic oligonucleotide; GCAGAAT chr11 5315206 5315229 5315226 +
gacaatatgggaagcaatggagtg

SEQ ID NO: 67221 - DNA, 24 bp, Artificial Sequence
  Synthetic oligonucleotide; GTAGAAA chr11 5315277 5315300 5315297 +
agttctatcttcacccaagattta

SEQ ID NO: 67222 - DNA, 24 bp, Artificial Sequence
  Synthetic oligonucleotide; GGAGAAT chr11 5315339 5315362 5315359 +
tgaaacggtcataggccattgaca

SEQ ID NO: 67223 - DNA, 24 bp, Artificial Sequence
  Synthetic oligonucleotide; ATAGAAA chr11 5315691 5315714 5315711 +
tgttcacaagtggcaagtagcttt

SEQ ID NO: 67224 - DNA, 24 bp, Artificial Sequence
  Synthetic oligonucleotide; TTAGAAA chr11 5316141 5316164 5316161 +
tcatgatatagacatagtgttttg

SEQ ID NO: 67225 - DNA, 24 bp, Artificial Sequence
  Synthetic oligonucleotide; ATAGAAT chr11 5316171 5316194 5316191 +
aacttttctttgtttagttttgaa

SEQ ID NO: 67226 - DNA, 24 bp, Artificial Sequence
  Synthetic oligonucleotide; GGAGAAA chr11 5316222 5316245 5316242 +
taacaaaagccatgagccctctgt

SEQ ID NO: 67227 - DNA, 24 bp, Artificial Sequence
  Synthetic oligonucleotide; TGAGAAA chr11 5316747 5316770 5316767 +
ttcaggtatttctccaaggatgga

SEQ ID NO: 67228 - DNA, 24 bp, Artificial Sequence
  Synthetic oligonucleotide; TGAGAAT chr11 5317350 5317373 5317370 +
caatgtttagcttccacttataaa

SEQ ID NO: 67229 - DNA, 24 bp, Artificial Sequence
  Synthetic oligonucleotide; TGAGAAT chr11 5317763 5317786 5317783 +
tgttcccttttctccatagcctca

SEQ ID NO: 67230 - DNA, 24 bp, Artificial Sequence
  Synthetic oligonucleotide; TGAGAAT chr11 5318383 5318406 5318403 +
ttttttgtccttgtgatagtttgc

SEQ ID NO: 67231 - DNA, 24 bp, Artificial Sequence
  Synthetic oligonucleotide; GAAGAAT chr11 5319388 5319411 5319408 +
ttaaactagtttttctaatactgt

SEQ ID NO: 67232 - DNA, 24 bp, Artificial Sequence
  Synthetic oligonucleotide; ATAGAAA chr11 5319410 5319433 5319430 +
gtgaagaatgacattggtaattgg

SEQ ID NO: 67233 - DNA, 24 bp, Artificial Sequence
  Synthetic oligonucleotide; TGAGAAA chr11 5319606 5319629 5319626 +
aaccatatgatcatctcaatagac

SEQ ID NO: 67234 - DNA, 24 bp, Artificial Sequence
  Synthetic oligonucleotide; AAAGAAT chr11 5319688 5319711 5319708 +
taggcatcaaaggaacatacctca

SEQ ID NO: 67235 - DNA, 24 bp, Artificial Sequence
  Synthetic oligonucleotide; AGAGAAA chr11 5319848 5319871 5319868 +
agtcctaaccagggcaatcaggcg

SEQ ID NO: 67236 - DNA, 24 bp, Artificial Sequence
  Synthetic oligonucleotide; AAAGAAA chr11 5319852 5319875 5319872 +
ctaaccagggcaatcaggcgagag

SEQ ID NO: 67237 - DNA, 24 bp, Artificial Sequence
  Synthetic oligonucleotide; AAAGAAA chr11 5319856 5319879 5319876 +
ccagggcaatcaggcgagagaaag

SEQ ID NO: 67238 - DNA, 24 bp, Artificial Sequence
  Synthetic oligonucleotide; TTAGAAA chr11 5319924 5319947 5319944 +
tttgctgatgatatgactctatac

SEQ ID NO: 67239 - DNA, 24 bp, Artificial Sequence
  Synthetic oligonucleotide; AAAGAAA chr11 5320090 5320113 5320110 +
cacaatcccattaagaacagccac

SEQ ID NO: 67240 - DNA, 24 bp, Artificial Sequence
  Synthetic oligonucleotide; CTAGAAA chr11 5320150 5320173 5320170 +
tgaaatttaaaacccaagcaggca

SEQ ID NO: 67241 - DNA, 24 bp, Artificial Sequence
  Synthetic oligonucleotide; AAAGAAA chr11 5320154 5320177 5320174 +
atttaaaacccaagcaggcactag

SEQ ID NO: 67242 - DNA, 24 bp, Artificial Sequence
  Synthetic oligonucleotide; GAAGAAA chr11 5320263 5320286 5320283 +
tctgggatcagggaacattttcca

SEQ ID NO: 67243 - DNA, 24 bp, Artificial Sequence
  Synthetic oligonucleotide; TGAGAAT chr11 5320282 5320305 5320302 +
ttccagaagaaatgctacttaagc

SEQ ID NO: 67244 - DNA, 24 bp, Artificial Sequence
  Synthetic oligonucleotide; AGAGAAA chr11 5320523 5320546 5320543 +
caacaatacatgaaaaaaagcttg

SEQ ID NO: 67245 - DNA, 24 bp, Artificial Sequence
  Synthetic oligonucleotide; TGAGAAA chr11 5320685 5320708 5320705 +
tttaaagttactatggctacagta

SEQ ID NO: 67246 - DNA, 24 bp, Artificial Sequence
  Synthetic oligonucleotide; TTAGAAA chr11 5320794 5320817 5320814 +
tttgactagttgttatcagtagca

SEQ ID NO: 67247 - DNA, 24 bp, Artificial Sequence
  Synthetic oligonucleotide; TTAGAAT chr11 5320829 5320852 5320849 +
tgaatagaagagagattctatgac

SEQ ID NO: 67248 - DNA, 24 bp, Artificial Sequence
  Synthetic oligonucleotide; AGAGAAA chr11 5320866 5320889 5320886 +
gagtgattgaaggtagtagattaa

SEQ ID NO: 67249 - DNA, 24 bp, Artificial Sequence
  Synthetic oligonucleotide; GTAGAAA chr11 5321035 5321058 5321055 +
atgagtgttttacatgctgacttt

SEQ ID NO: 67250 - DNA, 24 bp, Artificial Sequence
  Synthetic oligonucleotide; AGAGAAT chr11 5321048 5321071 5321068 +
atgctgactttgtagaaaagatga

SEQ ID NO: 67251 - DNA, 24 bp, Artificial Sequence
  Synthetic oligonucleotide; GGAGAAA chr11 5321091 5321114 5321111 +
agtgctttgcacaaaggataccct

SEQ ID NO: 67252 - DNA, 24 bp, Artificial Sequence
  Synthetic oligonucleotide; AGAGAAT chr11 5321246 5321269 5321266 +
gaataaggatattattttgttttt

SEQ ID NO: 67253 - DNA, 24 bp, Artificial Sequence
  Synthetic oligonucleotide; TTAGAAT chr11 5321462 5321485 5321482 +
tgctagtggattcagatcaccctc

SEQ ID NO: 67254 - DNA, 24 bp, Artificial Sequence
  Synthetic oligonucleotide; AGAGAAT chr11 5321516 5321539 5321536 +
aacaaccatgaaggcaccaagaac

SEQ ID NO: 67255 - DNA, 24 bp, Artificial Sequence
  Synthetic oligonucleotide; AGAGAAA chr11 5322084 5322107 5322104 +
acctcatggtcacatataaggaac

SEQ ID NO: 67256 - DNA, 24 bp, Artificial Sequence
  Synthetic oligonucleotide; AGAGAAA chr11 5322355 5322378 5322375 +
tatagagagtttacagtagatgtc

SEQ ID NO: 67257 - DNA, 24 bp, Artificial Sequence
  Synthetic oligonucleotide; AAAGAAT chr11 5322374 5322397 5322394 +
atgtcagagaaagtatttatggca

SEQ ID NO: 67258 - DNA, 24 bp, Artificial Sequence
  Synthetic oligonucleotide; CTAGAAT chr11 5322460 5322483 5322480 +
taatgatgtctcatatttttcatt

SEQ ID NO: 67259 - DNA, 24 bp, Artificial Sequence
  Synthetic oligonucleotide; AAAGAAT chr11 5322640 5322663 5322660 +
ttccttctaagatttttttgggca

SEQ ID NO: 67260 - DNA, 24 bp, Artificial Sequence
  Synthetic oligonucleotide; GAAGAAT chr11 5322654 5322677 5322674 +
tttttgggcaaaagaatatttata

SEQ ID NO: 67261 - DNA, 24 bp, Artificial Sequence
  Synthetic oligonucleotide; AAAGAAA chr11 5322666 5322689 5322686 +
agaatatttatagaagaatgaggt

SEQ ID NO: 67262 - DNA, 24 bp, Artificial Sequence
  Synthetic oligonucleotide; TTAGAAA chr11 5322766 5322789 5322786 +
tctgtaagtgacttacgactgtat

SEQ ID NO: 67263 - DNA, 24 bp, Artificial Sequence
  Synthetic oligonucleotide; TGAGAAT chr11 5322900 5322923 5322920 +
agtttcttatcactatatttgcca

SEQ ID NO: 67264 - DNA, 24 bp, Artificial Sequence
  Synthetic oligonucleotide; TAAGAAT chr11 5322922 5322945 5322942 +
catgagaataatgaaaattttaaa

SEQ ID NO: 67265 - DNA, 24 bp, Artificial Sequence
  Synthetic oligonucleotide; AGAGAAT chr11 5322937 5322960 5322957 +
aattttaaataagaatttatttct

SEQ ID NO: 67266 - DNA, 24 bp, Artificial Sequence
  Synthetic oligonucleotide; GAAGAAT chr11 5323107 5323130 5323127 +
ggctaatttcaggtgcatttgaaa

SEQ ID NO: 67267 - DNA, 24 bp, Artificial Sequence
  Synthetic oligonucleotide; TAAGAAA chr11 5323259 5323282 5323279 +
ttccagtatacccttgctctttgc

SEQ ID NO: 67268 - DNA, 24 bp, Artificial Sequence
  Synthetic oligonucleotide; TAAGAAT chr11 5323613 5323636 5323633 +
cagaagcaatgcctatgacagtat

SEQ ID NO: 67269 - DNA, 24 bp, Artificial Sequence
  Synthetic oligonucleotide; TTAGAAT chr11 5323619 5323642 5323639 +
caatgcctatgacagtattaagaa

SEQ ID NO: 67270 - DNA, 24 bp, Artificial Sequence
  Synthetic oligonucleotide; GCAGAAA chr11 5323743 5323766 5323763 +
cagtctcatgatttcttggtggag

SEQ ID NO: 67271 - DNA, 24 bp, Artificial Sequence
  Synthetic oligonucleotide; TTAGAAA chr11 5323829 5323852 5323849 +
caggcaggatggatacaaaacccc

SEQ ID NO: 67272 - DNA, 24 bp, Artificial Sequence
  Synthetic oligonucleotide; TGAGAAT chr11 5323871 5323894 5323891 +
ctaacgctatgactctagtattgg

SEQ ID NO: 67273 - DNA, 24 bp, Artificial Sequence
  Synthetic oligonucleotide; ACAGAAA chr11 5323954 5323977 5323974 +
gccaggagggaacctgattccaca

SEQ ID NO: 67274 - DNA, 24 bp, Artificial Sequence
  Synthetic oligonucleotide; GAAGAAT chr11 5324393 5324416 5324413 +
tgactctgcaactattttcctgaa

SEQ ID NO: 67275 - DNA, 24 bp, Artificial Sequence
  Synthetic oligonucleotide; TTAGAAA chr11 5324430 5324453 5324450 +
tacagactatggttttttccctaa

SEQ ID NO: 67276 - DNA, 24 bp, Artificial Sequence
  Synthetic oligonucleotide; ATAGAAA chr11 5324999 5325022 5325019 +
ttcatacctaatccatctttcgag

SEQ ID NO: 67277 - DNA, 24 bp, Artificial Sequence
  Synthetic oligonucleotide; GGAGAAA chr11 5325320 5325343 5325340 +
ttgccacgatccaagaggggtatg

SEQ ID NO: 67278 - DNA, 24 bp, Artificial Sequence
  Synthetic oligonucleotide; CGAGAAA chr11 5325366 5325389 5325386 +
cagctctgctgcagtcttatttaa

SEQ ID NO: 67279 - DNA, 24 bp, Artificial Sequence
  Synthetic oligonucleotide; TCAGAAT chr11 5325374 5325397 5325394 +
ctgcagtcttatttaacgagaaat

SEQ ID NO: 67280 - DNA, 24 bp, Artificial Sequence
  Synthetic oligonucleotide; TCAGAAT chr11 5325446 5325469 5325466 +
aatggcctcagtatcaaaaataaa

SEQ ID NO: 67281 - DNA, 24 bp, Artificial Sequence
  Synthetic oligonucleotide; GAAGAAA chr11 5325455 5325478 5325475 +
agtatcaaaaataaatcagaatca

SEQ ID NO: 67282 - DNA, 24 bp, Artificial Sequence
  Synthetic oligonucleotide; AGAGAAT chr11 5325717 5325740 5325737 +
tgtacggaatgaggtataggagga

SEQ ID NO: 67283 - DNA, 24 bp, Artificial Sequence
  Synthetic oligonucleotide; AGAGAAA chr11 5325732 5325755 5325752 +
ataggaggaagagaatggcagatt

SEQ ID NO: 67284 - DNA, 24 bp, Artificial Sequence
  Synthetic oligonucleotide; GAAGAAA chr11 5325777 5325800 5325797 +
cacatattctgaagggtaaacata

SEQ ID NO: 67285 - DNA, 24 bp, Artificial Sequence
  Synthetic oligonucleotide; AAAGAAA chr11 5325845 5325868 5325865 +
attttaaaaataaaaaatttttaa

SEQ ID NO: 67286 - DNA, 24 bp, Artificial Sequence
  Synthetic oligonucleotide; AGAGAAA chr11 5325969 5325992 5325989 +
tccttaaaaaacaataacgtcttt

SEQ ID NO: 67287 - DNA, 24 bp, Artificial Sequence
  Synthetic oligonucleotide; AAAGAAA chr11 5326002 5326025 5326022 +
ggccataaaacacttgaaaccaaa

SEQ ID NO: 67288 - DNA, 24 bp, Artificial Sequence
  Synthetic oligonucleotide; GCAGAAA chr11 5326029 5326052 5326049 +
gaaagttttttattatatttatga

SEQ ID NO: 67289 - DNA, 24 bp, Artificial Sequence
  Synthetic oligonucleotide; AAAGAAA chr11 5326114 5326137 5326134 +
agacagggaaggttatggtacctc

SEQ ID NO: 67290 - DNA, 24 bp, Artificial Sequence
  Synthetic oligonucleotide; AAAGAAA chr11 5326157 5326180 5326177 +
tcatgtctgagattttgggaataa

SEQ ID NO: 67291 - DNA, 24 bp, Artificial Sequence
  Synthetic oligonucleotide; TAAGAAA chr11 5326371 5326394 5326391 +
gatggcttagctattaacaagtgt

SEQ ID NO: 67292 - DNA, 24 bp, Artificial Sequence
  Synthetic oligonucleotide; ACAGAAT chr11 5326628 5326651 5326648 +
ggaaaatgactattttgagtcagc

SEQ ID NO: 67293 - DNA, 24 bp, Artificial Sequence
  Synthetic oligonucleotide; GCAGAAT chr11 5326770 5326793 5326790 +
ttaatattctcccttcaattttat

SEQ ID NO: 67294 - DNA, 24 bp, Artificial Sequence
  Synthetic oligonucleotide; TGAGAAA chr11 5326820 5326843 5326840 +
acaggatccataatgctgaaaact

SEQ ID NO: 67295 - DNA, 24 bp, Artificial Sequence
  Synthetic oligonucleotide; CAAGAAA chr11 5327100 5327123 5327120 +
cagacaggaaagatctgttagcct

SEQ ID NO: 67296 - DNA, 24 bp, Artificial Sequence
  Synthetic oligonucleotide; CTAGAAT chr11 5327269 5327292 5327289 +
ttcctaaggagatgggccctgtct

SEQ ID NO: 67297 - DNA, 24 bp, Artificial Sequence
  Synthetic oligonucleotide; TCAGAAT chr11 5327731 5327754 5327751 +
cttttctaagcctttcaactcgat

SEQ ID NO: 67298 - DNA, 24 bp, Artificial Sequence
  Synthetic oligonucleotide; AGAGAAA chr11 5327754 5327777 5327774 +
ttcagaattttttgtctactcttc

SEQ ID NO: 67299 - DNA, 24 bp, Artificial Sequence
  Synthetic oligonucleotide; ATAGAAT chr11 5328012 5328035 5328032 +
aaaatgaatgtattacaataaaaa

SEQ ID NO: 67300 - DNA, 24 bp, Artificial Sequence
  Synthetic oligonucleotide; GAAGAAA chr11 5328109 5328132 5328129 +
gtgataacaaagctgttttggaat

SEQ ID NO: 67301 - DNA, 24 bp, Artificial Sequence
  Synthetic oligonucleotide; ATAGAAA chr11 5328148 5328171 5328168 +
gaaaaaaaagctataaacatctac

SEQ ID NO: 67302 - DNA, 24 bp, Artificial Sequence
  Synthetic oligonucleotide; TAAGAAT chr11 5328161 5328184 5328181 +
taaacatctacatagaaaaatgag

SEQ ID NO: 67303 - DNA, 24 bp, Artificial Sequence
  Synthetic oligonucleotide; TTAGAAA chr11 5328232 5328255 5328252 +
ttatgccaatccaagggtcccaga

SEQ ID NO: 67304 - DNA, 24 bp, Artificial Sequence
  Synthetic oligonucleotide; AAAGAAA chr11 5328277 5328300 5328297 +
cagttccttaaatactctttcaaa

SEQ ID NO: 67305 - DNA, 24 bp, Artificial Sequence
  Synthetic oligonucleotide; GAAGAAT chr11 5328679 5328702 5328699 +
cctcgggattttcaggtgtttcct

SEQ ID NO: 67306 - DNA, 24 bp, Artificial Sequence
  Synthetic oligonucleotide; ACAGAAT chr11 5329369 5329392 5329389 +
caatgaggagcatagtctttattc

SEQ ID NO: 67307 - DNA, 24 bp, Artificial Sequence
  Synthetic oligonucleotide; AAAGAAA chr11 5329394 5329417 5329414 +
cagaatgtaaatagtgtgtaatat

SEQ ID NO: 67308 - DNA, 24 bp, Artificial Sequence
  Synthetic oligonucleotide; ACAGAAA chr11 5329467 5329490 5329487 +
atggtagcatgctaaagggagccc

SEQ ID NO: 67309 - DNA, 24 bp, Artificial Sequence
  Synthetic oligonucleotide; AAAGAAA chr11 5329503 5329526 5329523 +
tttggggcaggggaaaatttctca

SEQ ID NO: 67310 - DNA, 24 bp, Artificial Sequence
  Synthetic oligonucleotide; GAAGAAA chr11 5329588 5329611 5329608 +
ataagtggggtacagtttataaag

SEQ ID NO: 67311 - DNA, 24 bp, Artificial Sequence
  Synthetic oligonucleotide; AGAGAAA chr11 5329616 5329639 5329636 +
aaaaaatacacaggctatggggaa

SEQ ID NO: 67312 - DNA, 24 bp, Artificial Sequence
  Synthetic oligonucleotide; AGAGAAT chr11 5329642 5329665 5329662 +
agaaaatatgacaaactcaaatca

SEQ ID NO: 67313 - DNA, 24 bp, Artificial Sequence
  Synthetic oligonucleotide; CCAGAAT chr11 5329659 5329682 5329679 +
caaatcaagagaattctagcagag

SEQ ID NO: 67314 - DNA, 24 bp, Artificial Sequence
  Synthetic oligonucleotide; TGAGAAA chr11 5329677 5329700 5329697 +
gcagagccagaataacaaaacatg

SEQ ID NO: 67315 - DNA, 24 bp, Artificial Sequence
  Synthetic oligonucleotide; AGAGAAT chr11 5329695 5329718 5329715 +
aacatgtgagaaaattgaacacaa

SEQ ID NO: 67316 - DNA, 24 bp, Artificial Sequence
  Synthetic oligonucleotide; TGAGAAT chr11 5330027 5330050 5330047 +
ttttttgtccttgcgatagtttgc

SEQ ID NO: 67317 - DNA, 24 bp, Artificial Sequence
  Synthetic oligonucleotide; TGAGAAA chr11 5330610 5330633 5330630 +
ttaaaaaccagaacacagctaatg

SEQ ID NO: 67318 - DNA, 24 bp, Artificial Sequence
  Synthetic oligonucleotide; TCAGAAT chr11 5330680 5330703 5330700 +
caattcccatgaccttcttaagga

SEQ ID NO: 67319 - DNA, 24 bp, Artificial Sequence
  Synthetic oligonucleotide; CAAGAAA chr11 5330714 5330737 5330734 +
agagataaggataagcacaaagtc

SEQ ID NO: 67320 - DNA, 24 bp, Artificial Sequence
  Synthetic oligonucleotide; GCAGAAA chr11 5330803 5330826 5330823 +
ccagtttgatcacatctggtgcag

SEQ ID NO: 67321 - DNA, 24 bp, Artificial Sequence
  Synthetic oligonucleotide; TGAGAAT chr11 5330934 5330957 5330954 +
ctatcttcaccaccttagcattgg

SEQ ID NO: 67322 - DNA, 24 bp, Artificial Sequence
  Synthetic oligonucleotide; GGAGAAA chr11 5331303 5331326 5331323 +
tctccagacctggaaagccagtga

SEQ ID NO: 67323 - DNA, 24 bp, Artificial Sequence
  Synthetic oligonucleotide; GGAGAAA chr11 5331350 5331373 5331370 +
gtgggtgacatggtggatacctga

SEQ ID NO: 67324 - DNA, 24 bp, Artificial Sequence
  Synthetic oligonucleotide; AAAGAAA chr11 5331461 5331484 5331481 +
tggtagtcacattaaaaggagtaa

SEQ ID NO: 67325 - DNA, 24 bp, Artificial Sequence
  Synthetic oligonucleotide; ACAGAAA chr11 5331618 5331641 5331638 +
cttcaaaatcgagtgtttacactt

SEQ ID NO: 67326 - DNA, 24 bp, Artificial Sequence
  Synthetic oligonucleotide; TAAGAAT chr11 5331756 5331779 5331776 +
cattgtgcttcatcaaaaaaatgt

SEQ ID NO: 67327 - DNA, 24 bp, Artificial Sequence
  Synthetic oligonucleotide; AAAGAAA chr11 5331807 5331830 5331827 +
tttaaaactaacacatatattgga

SEQ ID NO: 67328 - DNA, 24 bp, Artificial Sequence
  Synthetic oligonucleotide; GGAGAAT chr11 5332059 5332082 5332079 +
aagcagagttttcaccaagtagta

SEQ ID NO: 67329 - DNA, 24 bp, Artificial Sequence
  Synthetic oligonucleotide; TGAGAAA chr11 5332090 5332113 5332110 +
aggaagccagacatattcaaaatt

SEQ ID NO: 67330 - DNA, 24 bp, Artificial Sequence
  Synthetic oligonucleotide; GGAGAAT chr11 5332467 5332490 5332487 +
ccagctacttgggaaactgaggca

SEQ ID NO: 67331 - DNA, 24 bp, Artificial Sequence
  Synthetic oligonucleotide; AAAGAAA chr11 5332578 5332601 5332598 +
ccatctcaaaaaaaaaaaaaaaaa

SEQ ID NO: 67332 - DNA, 24 bp, Artificial Sequence
  Synthetic oligonucleotide; AAAGAAA chr11 5332588 5332611 5332608 +
aaaaaaaaaaaaaaaaagaaaaaa

SEQ ID NO: 67333 - DNA, 24 bp, Artificial Sequence
  Synthetic oligonucleotide; ATAGAAA chr11 5332742 5332765 5332762 +
ttaagcctatgagagtgcagacct

SEQ ID NO: 67334 - DNA, 24 bp, Artificial Sequence
  Synthetic oligonucleotide; ATAGAAA chr11 5332810 5332833 5332830 +
agttgcagtaatttatgtataaca

SEQ ID NO: 67335 - DNA, 24 bp, Artificial Sequence
  Synthetic oligonucleotide; ACAGAAT chr11 5332928 5332951 5332948 +
ttattgtatcatttatctattatc

SEQ ID NO: 67336 - DNA, 24 bp, Artificial Sequence
  Synthetic oligonucleotide; GCAGAAA chr11 5333600 5333623 5333620 +
gctacaaagtagaggaggaagaag

SEQ ID NO: 67337 - DNA, 24 bp, Artificial Sequence
  Synthetic oligonucleotide; AGAGAAA chr11 5333630 5333653 5333650 +
agggaacataggtggatgtaagat

SEQ ID NO: 67338 - DNA, 24 bp, Artificial Sequence
  Synthetic oligonucleotide; AAAGAAA chr11 5333761 5333784 5333781 +
tctctttcctctcctgcctcttcc

SEQ ID NO: 67339 - DNA, 24 bp, Artificial Sequence
  Synthetic oligonucleotide; GCAGAAT chr11 5333943 5333966 5333963 +
ttatgttggaggttgatacacccg

SEQ ID NO: 67340 - DNA, 24 bp, Artificial Sequence
  Synthetic oligonucleotide; AGAGAAT chr11 5334013 5334036 5334033 +
ctcttgcaacaactatgtggtgga

SEQ ID NO: 67341 - DNA, 24 bp, Artificial Sequence
  Synthetic oligonucleotide; TCAGAAA chr11 5334099 5334122 5334119 +
gtcactagagcctgacctggggta

SEQ ID NO: 67342 - DNA, 24 bp, Artificial Sequence
  Synthetic oligonucleotide; GTAGAAA chr11 5334137 5334160 5334157 +
gagaggtaattgctgagtcctggt

SEQ ID NO: 67343 - DNA, 24 bp, Artificial Sequence
  Synthetic oligonucleotide; AAAGAAA chr11 5334335 5334358 5334355 +
taaagccccatattttctttgcaa

SEQ ID NO: 67344 - DNA, 24 bp, Artificial Sequence
  Synthetic oligonucleotide; ACAGAAT chr11 5334342 5334365 5334362 +
ccatattttctttgcaaaaagaaa

SEQ ID NO: 67345 - DNA, 24 bp, Artificial Sequence
  Synthetic oligonucleotide; CAAGAAT chr11 5334627 5334650 5334647 +
ttctgtctcttggtaagtcttgcc

SEQ ID NO: 67346 - DNA, 24 bp, Artificial Sequence
  Synthetic oligonucleotide; AGAGAAA chr11 5334790 5334813 5334810 +
aatacaatcatctcatagtctgtc

SEQ ID NO: 67347 - DNA, 24 bp, Artificial Sequence
  Synthetic oligonucleotide; TGAGAAT chr11 5334805 5334828 5334825 +
tagtctgtcagagaaataaggatc

SEQ ID NO: 67348 - DNA, 24 bp, Artificial Sequence
  Synthetic oligonucleotide; GCAGAAT chr11 5334994 5335017 5335014 +
gctcataggtcttcctaaatgtaa

SEQ ID NO: 67349 - DNA, 24 bp, Artificial Sequence
  Synthetic oligonucleotide; AGAGAAT chr11 5335372 5335395 5335392 +
actgttggtggaggataagcctcc

SEQ ID NO: 67350 - DNA, 24 bp, Artificial Sequence
  Synthetic oligonucleotide; TTAGAAT chr11 5335704 5335727 5335724 +
ctaaatcacataacacaatattta

SEQ ID NO: 67351 - DNA, 24 bp, Artificial Sequence
  Synthetic oligonucleotide; TTAGAAA chr11 5335744 5335767 5335764 +
gaaaatactcaggcagccacatta

SEQ ID NO: 67352 - DNA, 24 bp, Artificial Sequence
  Synthetic oligonucleotide; AGAGAAT chr11 5336301 5336324 5336321 +
aagtctgacccttccccaaatcag

SEQ ID NO: 67353 - DNA, 24 bp, Artificial Sequence
  Synthetic oligonucleotide; ATAGAAT chr11 5337156 5337179 5337176 +
catacatgtgcatgtatcttagta

SEQ ID NO: 67354 - DNA, 24 bp, Artificial Sequence
  Synthetic oligonucleotide; GCAGAAA chr11 5337598 5337621 5337618 +
agacctttgtcagatgggtagatt

SEQ ID NO: 67355 - DNA, 24 bp, Artificial Sequence
  Synthetic oligonucleotide; ACAGAAA chr11 5338972 5338995 5338992 +
tcatttctaagattggcttagtct

SEQ ID NO: 67356 - DNA, 24 bp, Artificial Sequence
  Synthetic oligonucleotide; AAAGAAA chr11 5339075 5339098 5339095 +
tacacaagtatattattatttgaa

SEQ ID NO: 67357 - DNA, 24 bp, Artificial Sequence
  Synthetic oligonucleotide; ACAGAAA chr11 5339732 5339755 5339752 +
ccacaggaagacttgtaggagatc

SEQ ID NO: 67358 - DNA, 24 bp, Artificial Sequence
  Synthetic oligonucleotide; ATAGAAA chr11 5339802 5339825 5339822 +
gttgattgttacaatgggttttga

SEQ ID NO: 67359 - DNA, 24 bp, Artificial Sequence
  Synthetic oligonucleotide; TCAGAAA chr11 5339958 5339981 5339978 +
tttagtttcacacttactttcaag

SEQ ID NO: 67360 - DNA, 24 bp, Artificial Sequence
  Synthetic oligonucleotide; TTAGAAA chr11 5340053 5340076 5340073 +
tttttaggttccatttcctgtatt

SEQ ID NO: 67361 - DNA, 24 bp, Artificial Sequence
  Synthetic oligonucleotide; GGAGAAA chr11 5340579 5340602 5340599 +
aacaatatttttggagtagaagga

SEQ ID NO: 67362 - DNA, 24 bp, Artificial Sequence
  Synthetic oligonucleotide; TCAGAAA chr11 5340589 5340612 5340609 +
ttggagtagaaggaggagaaattt

SEQ ID NO: 67363 - DNA, 24 bp, Artificial Sequence
  Synthetic oligonucleotide; AAAGAAA chr11 5340595 5340618 5340615 +
tagaaggaggagaaattttcagaa

SEQ ID NO: 67364 - DNA, 24 bp, Artificial Sequence
  Synthetic oligonucleotide; CAAGAAA chr11 5340790 5340813 5340810 +
cttttttatattaaatttccccat

SEQ ID NO: 67365 - DNA, 24 bp, Artificial Sequence
  Synthetic oligonucleotide; ACAGAAT chr11 5341058 5341081 5341078 +
ttcacaattacatctcttaatgaa

SEQ ID NO: 67366 - DNA, 24 bp, Artificial Sequence
  Synthetic oligonucleotide; GCAGAAA chr11 5341341 5341364 5341361 +
ctgctgagttgagaacaacaacct

SEQ ID NO: 67367 - DNA, 24 bp, Artificial Sequence
  Synthetic oligonucleotide; GCAGAAA chr11 5341348 5341371 5341368 +
gttgagaacaacaacctgcagaaa

SEQ ID NO: 67368 - DNA, 24 bp, Artificial Sequence
  Synthetic oligonucleotide; TGAGAAT chr11 5341582 5341605 5341602 +
actcatcagacaattttaatcaaa

SEQ ID NO: 67369 - DNA, 24 bp, Artificial Sequence
  Synthetic oligonucleotide; TCAGAAT chr11 5341633 5341656 5341653 +
gaaatttacacttattacatggaa

SEQ ID NO: 67370 - DNA, 24 bp, Artificial Sequence
  Synthetic oligonucleotide; ACAGAAA chr11 5341646 5341669 5341666 +
attacatggaatcagaatgtatgt

SEQ ID NO: 67371 - DNA, 24 bp, Artificial Sequence
  Synthetic oligonucleotide; GCAGAAA chr11 5341674 5341697 5341694 +
aaagcaatcattcttcaaaaaaat

SEQ ID NO: 67372 - DNA, 24 bp, Artificial Sequence
  Synthetic oligonucleotide; GTAGAAT chr11 5341818 5341841 5341838 +
acattggagctagcaactagggta

SEQ ID NO: 67373 - DNA, 24 bp, Artificial Sequence
  Synthetic oligonucleotide; TAAGAAT chr11 5341824 5341847 5341844 +
gagctagcaactagggtagtagaa

SEQ ID NO: 67374 - DNA, 24 bp, Artificial Sequence
  Synthetic oligonucleotide; AGAGAAA chr11 5342132 5342155 5342152 +
cccattgtttgtatggacacctgc

SEQ ID NO: 67375 - DNA, 24 bp, Artificial Sequence
  Synthetic oligonucleotide; AGAGAAA chr11 5342341 5342364 5342361 +
tcacaataatttagtggaaagctt

SEQ ID NO: 67376 - DNA, 24 bp, Artificial Sequence
  Synthetic oligonucleotide; GAAGAAT chr11 5342594 5342617 5342614 +
caattctatgggtagtaaaaaggt

SEQ ID NO: 67377 - DNA, 24 bp, Artificial Sequence
  Synthetic oligonucleotide; ACAGAAA chr11 5342660 5342683 5342680 +
ttataggattcattagtggaggga

SEQ ID NO: 67378 - DNA, 24 bp, Artificial Sequence
  Synthetic oligonucleotide; GCAGAAT chr11 5342970 5342993 5342990 +
gagtttaatgacatcctggtgaag

SEQ ID NO: 67379 - DNA, 24 bp, Artificial Sequence
  Synthetic oligonucleotide; ACAGAAA chr11 5343005 5343028 5343025 +
gtgaaagaacatgggagtgacaat

SEQ ID NO: 67380 - DNA, 24 bp, Artificial Sequence
  Synthetic oligonucleotide; GCAGAAT chr11 5343161 5343184 5343181 +
taaaacggtcataggccatggcaa

SEQ ID NO: 67381 - DNA, 24 bp, Artificial Sequence
  Synthetic oligonucleotide; CGAGAAA chr11 5343176 5343199 5343196 +
ccatggcaagcagaatgccagact

SEQ ID NO: 67382 - DNA, 24 bp, Artificial Sequence
  Synthetic oligonucleotide; CCAGAAA chr11 5343317 5343340 5343337 +
ccaggtctgtggcagccagcatgg

SEQ ID NO: 67383 - DNA, 24 bp, Artificial Sequence
  Synthetic oligonucleotide; CAAGAAA chr11 5343411 5343434 5343431 +
aaaaaggatggatatatacatgaa

SEQ ID NO: 67384 - DNA, 24 bp, Artificial Sequence
  Synthetic oligonucleotide; GAAGAAA chr11 5343515 5343538 5343535 +
tggacgacatcctgggtttatata

SEQ ID NO: 67385 - DNA, 24 bp, Artificial Sequence
  Synthetic oligonucleotide; TCAGAAT chr11 5343593 5343616 5343613 +
ggtatcacttcgactatatcattc

SEQ ID NO: 67386 - DNA, 24 bp, Artificial Sequence
  Synthetic oligonucleotide; TCAGAAA chr11 5343770 5343793 5343790 +
tttatatgcatttaagcattctct

SEQ ID NO: 67387 - DNA, 24 bp, Artificial Sequence
  Synthetic oligonucleotide; AAAGAAT chr11 5343831 5343854 5343851 +
gttacccttaactatgcagatttt

SEQ ID NO: 67388 - DNA, 24 bp, Artificial Sequence
  Synthetic oligonucleotide; CCAGAAA chr11 5343868 5343891 5343888 +
tctatggggcattcaaggggattt

SEQ ID NO: 67389 - DNA, 24 bp, Artificial Sequence
  Synthetic oligonucleotide; TAAGAAA chr11 5344000 5344023 5344020 +
ttatcagctaaagtctcaacagcc

SEQ ID NO: 67390 - DNA, 24 bp, Artificial Sequence
  Synthetic oligonucleotide; AAAGAAA chr11 5344004 5344027 5344024 +
cagctaaagtctcaacagcctaag

SEQ ID NO: 67391 - DNA, 24 bp, Artificial Sequence
  Synthetic oligonucleotide; AGAGAAA chr11 5344020 5344043 5344040 +
agcctaagaaagaaaagtgtggga

SEQ ID NO: 67392 - DNA, 24 bp, Artificial Sequence
  Synthetic oligonucleotide; TGAGAAA chr11 5344064 5344087 5344084 +
actgtagctaaggagcagtcagat

SEQ ID NO: 67393 - DNA, 24 bp, Artificial Sequence
  Synthetic oligonucleotide; GTAGAAT chr11 5344146 5344169 5344166 +
acgattagtgtgaattaccctctt

SEQ ID NO: 67394 - DNA, 24 bp, Artificial Sequence
  Synthetic oligonucleotide; CTAGAAT chr11 5344357 5344380 5344377 +
ctataggcctactgaagtaattcc

SEQ ID NO: 67395 - DNA, 24 bp, Artificial Sequence
  Synthetic oligonucleotide; AAAGAAA chr11 5344943 5344966 5344963 +
catttgaactgagacctcaataca

SEQ ID NO: 67396 - DNA, 24 bp, Artificial Sequence
  Synthetic oligonucleotide; TAAGAAA chr11 5345016 5345039 5345036 +
aaaatcagcatgactggcatttga

SEQ ID NO: 67397 - DNA, 24 bp, Artificial Sequence
  Synthetic oligonucleotide; CAAGAAA chr11 5345255 5345278 5345275 +
atgtgaagaagactaagcaagaga

SEQ ID NO: 67398 - DNA, 24 bp, Artificial Sequence
  Synthetic oligonucleotide; TTAGAAA chr11 5345271 5345294 5345291 +
gcaagagacaagaaaagagatgag

SEQ ID NO: 67399 - DNA, 24 bp, Artificial Sequence
  Synthetic oligonucleotide; AGAGAAA chr11 5345348 5345371 5345368 +
agagaagcaggggaaatgaaaaaa

SEQ ID NO: 67400 - DNA, 24 bp, Artificial Sequence
  Synthetic oligonucleotide; ATAGAAA chr11 5345356 5345379 5345376 +
aggggaaatgaaaaaaagagaaaa

SEQ ID NO: 67401 - DNA, 24 bp, Artificial Sequence
  Synthetic oligonucleotide; AAAGAAT chr11 5345480 5345503 5345500 +
cctagatttctgtttgaacaaatg

SEQ ID NO: 67402 - DNA, 24 bp, Artificial Sequence
  Synthetic oligonucleotide; AAAGAAT chr11 5345838 5345861 5345858 +
gtgaggcaacaactcagcactttg

SEQ ID NO: 67403 - DNA, 24 bp, Artificial Sequence
  Synthetic oligonucleotide; CCAGAAT chr11 5345890 5345913 5345910 +
tgtcctaggactgagagacataaa

SEQ ID NO: 67404 - DNA, 24 bp, Artificial Sequence
  Synthetic oligonucleotide; AGAGAAT chr11 5346099 5346122 5346119 +
ctttgtgaaaaattccttcttatc

SEQ ID NO: 67405 - DNA, 24 bp, Artificial Sequence
  Synthetic oligonucleotide; CAAGAAT chr11 5346216 5346239 5346236 +
taaagtttcctccttctccattcc

SEQ ID NO: 67406 - DNA, 24 bp, Artificial Sequence
  Synthetic oligonucleotide; GAAGAAA chr11 5346334 5346357 5346354 +
ctagtcgtggctcttggtttctga

SEQ ID NO: 67407 - DNA, 24 bp, Artificial Sequence
  Synthetic oligonucleotide; CTAGAAA chr11 5346442 5346465 5346462 +
caagaagattctataatggaacac

SEQ ID NO: 67408 - DNA, 24 bp, Artificial Sequence
  Synthetic oligonucleotide; GTAGAAT chr11 5346514 5346537 5346534 +
gctttgtttaaaaagtaaaatgta

SEQ ID NO: 67409 - DNA, 24 bp, Artificial Sequence
  Synthetic oligonucleotide; TTAGAAA chr11 5346545 5346568 5346565 +
aagaggtgccttcctgttcatctt

SEQ ID NO: 67410 - DNA, 24 bp, Artificial Sequence
  Synthetic oligonucleotide; TAAGAAA chr11 5346969 5346992 5346989 +
cccttttatagccaacttggatct

SEQ ID NO: 67411 - DNA, 24 bp, Artificial Sequence
  Synthetic oligonucleotide; AGAGAAA chr11 5347220 5347243 5347240 +
tcaaatctttcccagtttatctca

SEQ ID NO: 67412 - DNA, 24 bp, Artificial Sequence
  Synthetic oligonucleotide; AGAGAAA chr11 5347291 5347314 5347311 +
tatatttcctgcttggtttagatc

SEQ ID NO: 67413 - DNA, 24 bp, Artificial Sequence
  Synthetic oligonucleotide; AGAGAAA chr11 5347721 5347744 5347741 +
cacaaggctgagggcacaaataat

SEQ ID NO: 67414 - DNA, 24 bp, Artificial Sequence
  Synthetic oligonucleotide; GAAGAAT chr11 5347942 5347965 5347962 +
tgtgagatacatgactatggaact

SEQ ID NO: 67415 - DNA, 24 bp, Artificial Sequence
  Synthetic oligonucleotide; AGAGAAA chr11 5348064 5348087 5348084 +
gagatcgaagctgatttcttagca

SEQ ID NO: 67416 - DNA, 24 bp, Artificial Sequence
  Synthetic oligonucleotide; ATAGAAT chr11 5348394 5348417 5348414 +
tagaagtccagataagtgccaaat

SEQ ID NO: 67417 - DNA, 24 bp, Artificial Sequence
  Synthetic oligonucleotide; CTAGAAA chr11 5348461 5348484 5348481 +
aatcatcagaggttcaaatacttt

SEQ ID NO: 67418 - DNA, 24 bp, Artificial Sequence
  Synthetic oligonucleotide; ACAGAAA chr11 5348832 5348855 5348852 +
agtttgcactcaatattaaccatc

SEQ ID NO: 67419 - DNA, 24 bp, Artificial Sequence
  Synthetic oligonucleotide; ACAGAAA chr11 5348895 5348918 5348915 +
ggatggagatactaagtgcttgag

SEQ ID NO: 67420 - DNA, 24 bp, Artificial Sequence
  Synthetic oligonucleotide; AGAGAAT chr11 5348945 5348968 5348965 +
aggaaaaaagccaaagggaaggtg

SEQ ID NO: 67421 - DNA, 24 bp, Artificial Sequence
  Synthetic oligonucleotide; TGAGAAT chr11 5349033 5349056 5349053 +
tttatgcggcagagtttgagactt

SEQ ID NO: 67422 - DNA, 24 bp, Artificial Sequence
  Synthetic oligonucleotide; GTAGAAA chr11 5349305 5349328 5349325 +
ccccagtccaatacttgacacacg

SEQ ID NO: 67423 - DNA, 24 bp, Artificial Sequence
  Synthetic oligonucleotide; TAAGAAA chr11 5349499 5349522 5349519 +
tatttaggtatatttaaaatttgc

SEQ ID NO: 67424 - DNA, 24 bp, Artificial Sequence
  Synthetic oligonucleotide; AGAGAAA chr11 5349901 5349924 5349921 +
catatcacattttatctgctgatt

SEQ ID NO: 67425 - DNA, 24 bp, Artificial Sequence
  Synthetic oligonucleotide; ACAGAAA chr11 5349991 5350014 5350011 +
cttatatctgttcccaaggcttcc

SEQ ID NO: 67426 - DNA, 24 bp, Artificial Sequence
  Synthetic oligonucleotide; AGAGAAA chr11 5350052 5350075 5350072 +
gaataatcctgacatgtactcact

SEQ ID NO: 67427 - DNA, 24 bp, Artificial Sequence
  Synthetic oligonucleotide; AGAGAAA chr11 5350058 5350081 5350078 +
tcctgacatgtactcactagagaa

SEQ ID NO: 67428 - DNA, 24 bp, Artificial Sequence
  Synthetic oligonucleotide; AGAGAAT chr11 5350152 5350175 5350172 +
aacatttccccttactttgtgtca

SEQ ID NO: 67429 - DNA, 24 bp, Artificial Sequence
  Synthetic oligonucleotide; ACAGAAA chr11 5350169 5350192 5350189 +
tgtgtcaagagaatgactgagaag

SEQ ID NO: 67430 - DNA, 24 bp, Artificial Sequence
  Synthetic oligonucleotide; TTAGAAA chr11 5350245 5350268 5350265 +
attactttcccaagatcattattg

SEQ ID NO: 67431 - DNA, 24 bp, Artificial Sequence
  Synthetic oligonucleotide; ACAGAAA chr11 5350325 5350348 5350345 +
atcttggatgcattcttttcatgg

SEQ ID NO: 67432 - DNA, 24 bp, Artificial Sequence
  Synthetic oligonucleotide; TTAGAAT chr11 5350502 5350525 5350522 +
tggctgcctgcaccagctgaaatc

SEQ ID NO: 67433 - DNA, 24 bp, Artificial Sequence
  Synthetic oligonucleotide; GAAGAAA chr11 5350899 5350922 5350919 +
ttgaattttccctccaggaatatt

SEQ ID NO: 67434 - DNA, 24 bp, Artificial Sequence
  Synthetic oligonucleotide; GTAGAAT chr11 5351399 5351422 5351419 +
gactggtgaacatcttatgaacag

SEQ ID NO: 67435 - DNA, 24 bp, Artificial Sequence
  Synthetic oligonucleotide; GGAGAAA chr11 5352171 5352194 5352191 +
actgtcatgggcattggttctgga

SEQ ID NO: 67436 - DNA, 24 bp, Artificial Sequence
  Synthetic oligonucleotide; CTAGAAA chr11 5353063 5353086 5353083 +
catatatggagctggctgctgttt

SEQ ID NO: 67437 - DNA, 24 bp, Artificial Sequence
  Synthetic oligonucleotide; GAAGAAA chr11 5353079 5353102 5353099 +
tgctgtttctagaaaattgcacgt

SEQ ID NO: 67438 - DNA, 24 bp, Artificial Sequence
  Synthetic oligonucleotide; TGAGAAA chr11 5353193 5353216 5353213 +
atgagtctagggaaagtatctcta

SEQ ID NO: 67439 - DNA, 24 bp, Artificial Sequence
  Synthetic oligonucleotide; AAAGAAA chr11 5353637 5353660 5353657 +
atgataagttttaaattaatttta

SEQ ID NO: 67440 - DNA, 24 bp, Artificial Sequence
  Synthetic oligonucleotide; ACAGAAA chr11 5353789 5353812 5353809 +
atggctgcccacctactcttcatc

SEQ ID NO: 67441 - DNA, 24 bp, Artificial Sequence
  Synthetic oligonucleotide; AGAGAAA chr11 5353837 5353860 5353857 +
attcttgggatgtataaataacac

SEQ ID NO: 67442 - DNA, 24 bp, Artificial Sequence
  Synthetic oligonucleotide; AAAGAAA chr11 5354252 5354275 5354272 +
attcagggggatctaagccacatc

SEQ ID NO: 67443 - DNA, 24 bp, Artificial Sequence
  Synthetic oligonucleotide; CAAGAAT chr11 5354696 5354719 5354716 +
ccaacatcaagagggcatctttgc

SEQ ID NO: 67444 - DNA, 24 bp, Artificial Sequence
  Synthetic oligonucleotide; GAAGAAT chr11 5354784 5354807 5354804 +
gctgagacaaaagacaaacagttt

SEQ ID NO: 67445 - DNA, 24 bp, Artificial Sequence
  Synthetic oligonucleotide; TGAGAAA chr11 5354957 5354980 5354977 +
gcaggaaggtgtgaaaatggttgg

SEQ ID NO: 67446 - DNA, 24 bp, Artificial Sequence
  Synthetic oligonucleotide; GAAGAAT chr11 5355053 5355076 5355073 +
ctacctggaccaatttcctgactt

SEQ ID NO: 67447 - DNA, 24 bp, Artificial Sequence
  Synthetic oligonucleotide; GTAGAAT chr11 5355171 5355194 5355191 +
taggagcctctgtctaaggcagaa

SEQ ID NO: 67448 - DNA, 24 bp, Artificial Sequence
  Synthetic oligonucleotide; TCAGAAA chr11 5355179 5355202 5355199 +
tctgtctaaggcagaagtagaatt

SEQ ID NO: 67449 - DNA, 24 bp, Artificial Sequence
  Synthetic oligonucleotide; AGAGAAA chr11 5355190 5355213 5355210 +
cagaagtagaatttcagaaagcat

SEQ ID NO: 67450 - DNA, 24 bp, Artificial Sequence
  Synthetic oligonucleotide; CAAGAAA chr11 5355222 5355245 5355242 +
tttgaagagtttaatggtgactta

SEQ ID NO: 67451 - DNA, 24 bp, Artificial Sequence
  Synthetic oligonucleotide; ACAGAAA chr11 5355919 5355942 5355939 +
tcctgttagaaggaaaactaacaa

SEQ ID NO: 67452 - DNA, 24 bp, Artificial Sequence
  Synthetic oligonucleotide; GCAGAAA chr11 5356011 5356034 5356031 +
accacaaagatggggaaaaacaga

SEQ ID NO: 67453 - DNA, 24 bp, Artificial Sequence
  Synthetic oligonucleotide; AGAGAAT chr11 5356099 5356122 5356119 +
accagcaacggtacaaagctggac

SEQ ID NO: 67454 - DNA, 24 bp, Artificial Sequence
  Synthetic oligonucleotide; CTAGAAT chr11 5356227 5356250 5356247 +
aaaataaattagactaatggctaa

SEQ ID NO: 67455 - DNA, 24 bp, Artificial Sequence
  Synthetic oligonucleotide; GAAGAAA chr11 5356337 5356360 5356357 +
ctcagtagctgattcgatcaactg

SEQ ID NO: 67456 - DNA, 24 bp, Artificial Sequence
  Synthetic oligonucleotide; AGAGAAA chr11 5356397 5356420 5356417 +
gaaatgaagcaagaagagaagttt

SEQ ID NO: 67457 - DNA, 24 bp, Artificial Sequence
  Synthetic oligonucleotide; AAAGAAT chr11 5356404 5356427 5356424 +
agcaagaagagaagtttagagaaa

SEQ ID NO: 67458 - DNA, 24 bp, Artificial Sequence
  Synthetic oligonucleotide; AAAGAAA chr11 5356413 5356436 5356433 +
agaagtttagagaaaaaagaataa

SEQ ID NO: 67459 - DNA, 24 bp, Artificial Sequence
  Synthetic oligonucleotide; CAAGAAA chr11 5356433 5356456 5356453 +
ataaaaagaaatgaacaaagcctc

SEQ ID NO: 67460 - DNA, 24 bp, Artificial Sequence
  Synthetic oligonucleotide; GCAGAAT chr11 5356498 5356521 5356518 +
gattggtgtacctgaaagtgacgg

SEQ ID NO: 67461 - DNA, 24 bp, Artificial Sequence
  Synthetic oligonucleotide; AGAGAAA chr11 5356699 5356722 5356719 +
gggaaaaatgttaagggtagccag

SEQ ID NO: 67462 - DNA, 24 bp, Artificial Sequence
  Synthetic oligonucleotide; TCAGAAT chr11 5356734 5356757 5356754 +
gggttacccacaaagggaagccca

SEQ ID NO: 67463 - DNA, 24 bp, Artificial Sequence
  Synthetic oligonucleotide; GCAGAAA chr11 5356757 5356780 5356777 +
atcagaataacagcagatctctca

SEQ ID NO: 67464 - DNA, 24 bp, Artificial Sequence
  Synthetic oligonucleotide; AAAGAAT chr11 5356813 5356836 5356833 +
gccaatattcaacatccttaaagg

SEQ ID NO: 67465 - DNA, 24 bp, Artificial Sequence
  Synthetic oligonucleotide; ACAGAAT chr11 5356827 5356850 5356847 +
tccttaaaggaaagaattttcaac

SEQ ID NO: 67466 - DNA, 24 bp, Artificial Sequence
  Synthetic oligonucleotide; GGAGAAA chr11 5356868 5356891 5356888 +
gccaaactaagcttcataagtgaa

SEQ ID NO: 67467 - DNA, 24 bp, Artificial Sequence
  Synthetic oligonucleotide; GAAGAAA chr11 5357028 5357051 5357048 +
aattgtaaagaccattgaggctag

SEQ ID NO: 67468 - DNA, 24 bp, Artificial Sequence
  Synthetic oligonucleotide; CAAGAAA chr11 5357263 5357286 5357283 +
ataaagggatggaggaagatctac

SEQ ID NO: 67469 - DNA, 24 bp, Artificial Sequence
  Synthetic oligonucleotide; ACAGAAA chr11 5357562 5357585 5357582 +
atcaacattagacagatcaacgag

SEQ ID NO: 67470 - DNA, 24 bp, Artificial Sequence
  Synthetic oligonucleotide; ACAGAAT chr11 5357653 5357676 5357673 +
tacagaactctccaccccaaatca

SEQ ID NO: 67471 - DNA, 24 bp, Artificial Sequence
  Synthetic oligonucleotide; ACAGAAA chr11 5357746 5357769 5357766 +
gcactcctcagcaaatgtaaaaga

SEQ ID NO: 67472 - DNA, 24 bp, Artificial Sequence
  Synthetic oligonucleotide; TAAGAAA chr11 5357805 5357828 5357825 +
tgcaatcaaactagaactcaggat

SEQ ID NO: 67473 - DNA, 24 bp, Artificial Sequence
  Synthetic oligonucleotide; GCAGAAA chr11 5357890 5357913 5357910 +
tactgggttcataacaaaatgaag

SEQ ID NO: 67474 - DNA, 24 bp, Artificial Sequence
  Synthetic oligonucleotide; CCAGAAT chr11 5357940 5357963 5357960 +
caaagagaacaaagacacaacata

SEQ ID NO: 67475 - DNA, 24 bp, Artificial Sequence
  Synthetic oligonucleotide; AGAGAAA chr11 5358005 5358028 5358025 +
aatttatagcactaaacgcccaga

SEQ ID NO: 67476 - DNA, 24 bp, Artificial Sequence
  Synthetic oligonucleotide; CAAGAAA chr11 5358100 5358123 5358120 +
acacattcaaatgctagcagaagg

SEQ ID NO: 67477 - DNA, 24 bp, Artificial Sequence
  Synthetic oligonucleotide; GAAGAAA chr11 5358235 5358258 5358255 +
tagactgctagcaagactaataaa

SEQ ID NO: 67478 - DNA, 24 bp, Artificial Sequence
  Synthetic oligonucleotide; GAAGAAT chr11 5358247 5358270 5358267 +
aagactaataaagaagaaaagaga

SEQ ID NO: 67479 - DNA, 24 bp, Artificial Sequence
  Synthetic oligonucleotide; ACAGAAA chr11 5358302 5358325 5358322 +
aaagggtatatcaccaccgatccc

SEQ ID NO: 67480 - DNA, 24 bp, Artificial Sequence
  Synthetic oligonucleotide; AGAGAAT chr11 5358323 5358346 5358343 +
cccacagaaatacaaaccaccatc

SEQ ID NO: 67481 - DNA, 24 bp, Artificial Sequence
  Synthetic oligonucleotide; CTAGAAA chr11 5358356 5358379 5358376 +
tataaacacctctacacaaataaa

SEQ ID NO: 67482 - DNA, 24 bp, Artificial Sequence
  Synthetic oligonucleotide; GAAGAAA chr11 5358368 5358391 5358388 +
tacacaaataaactagaaaatcta

SEQ ID NO: 67483 - DNA, 24 bp, Artificial Sequence
  Synthetic oligonucleotide; AGAGAAT chr11 5358670 5358693 5358690 +
gccgggcagagacacaacaaaaaa

SEQ ID NO: 67484 - DNA, 24 bp, Artificial Sequence
  Synthetic oligonucleotide; GCAGAAA chr11 5358890 5358913 5358910 +
aaccacatgattatctcaatagat

SEQ ID NO: 67485 - DNA, 24 bp, Artificial Sequence
  Synthetic oligonucleotide; CTAGAAA chr11 5359210 5359233 5359230 +
tttgcagatgacacgattgtatat

SEQ ID NO: 67486 - DNA, 24 bp, Artificial Sequence
  Synthetic oligonucleotide; AGAGAAT chr11 5359379 5359402 5359399 +
aactcccattcacaattgcttcaa

SEQ ID NO: 67487 - DNA, 24 bp, Artificial Sequence
  Synthetic oligonucleotide; GAAGAAT chr11 5359511 5359534 5359531 +
agaacattccatgctcatgggtag

SEQ ID NO: 67488 - DNA, 24 bp, Artificial Sequence
  Synthetic oligonucleotide; ACAGAAT chr11 5359600 5359623 5359620 +
atcaagctaccaatgactttcttc

SEQ ID NO: 67489 - DNA, 24 bp, Artificial Sequence
  Synthetic oligonucleotide; TCAGAAA chr11 5359801 5359824 5359821 +
gaccaatggaacagaacagaggcc

SEQ ID NO: 67490 - DNA, 24 bp, Artificial Sequence
  Synthetic oligonucleotide; GCAGAAA chr11 5359919 5359942 5359939 +
gctgggaaaactggctaaccatac

SEQ ID NO: 67491 - DNA, 24 bp, Artificial Sequence
  Synthetic oligonucleotide; GAAGAAA chr11 5360020 5360043 5360040 +
agactgaaaaccataaaaactctg

SEQ ID NO: 67492 - DNA, 24 bp, Artificial Sequence
  Synthetic oligonucleotide; AAAGAAA chr11 5360155 5360178 5360175 +
aaactaaagagcttctgcacagca

SEQ ID NO: 67493 - DNA, 24 bp, Artificial Sequence
  Synthetic oligonucleotide; ACAGAAT chr11 5360188 5360211 5360208 +
accatcagagtgaacaggcaacat

SEQ ID NO: 67494 - DNA, 24 bp, Artificial Sequence
  Synthetic oligonucleotide; GGAGAAA chr11 5360196 5360219 5360216 +
agtgaacaggcaacatacagaatg

SEQ ID NO: 67495 - DNA, 24 bp, Artificial Sequence
  Synthetic oligonucleotide; CCAGAAT chr11 5360240 5360263 5360260 +
actcatccgacaaagggctaatat

SEQ ID NO: 67496 - DNA, 24 bp, Artificial Sequence
  Synthetic oligonucleotide; CAAGAAA chr11 5360271 5360294 5360291 +
ctatgatgaactcaaacaaattta

SEQ ID NO: 67497 - DNA, 24 bp, Artificial Sequence
  Synthetic oligonucleotide; AGAGAAA chr11 5360388 5360411 5360408 +
aaatgctcatcatcactggccatc

SEQ ID NO: 67498 - DNA, 24 bp, Artificial Sequence
  Synthetic oligonucleotide; TTAGAAT chr11 5360434 5360457 5360454 +
cagtgagataccatctcacaccag

SEQ ID NO: 67499 - DNA, 24 bp, Artificial Sequence
  Synthetic oligonucleotide; CTAGAAA chr11 5360580 5360603 5360600 +
tggcgattcctcagggatctagaa

SEQ ID NO: 67500 - DNA, 24 bp, Artificial Sequence
  Synthetic oligonucleotide; TAAGAAA chr11 5360744 5360767 5360764 +
atgtccaacaatgatagactggat

SEQ ID NO: 67501 - DNA, 24 bp, Artificial Sequence
  Synthetic oligonucleotide; AAAGAAA chr11 5361121 5361144 5361141 +
cctaaaacttaaagtataataata

SEQ ID NO: 67502 - DNA, 24 bp, Artificial Sequence
  Synthetic oligonucleotide; AAAGAAA chr11 5361125 5361148 5361145 +
aaacttaaagtataataataaaag

SEQ ID NO: 67503 - DNA, 24 bp, Artificial Sequence
  Synthetic oligonucleotide; AAAGAAA chr11 5361129 5361152 5361149 +
ttaaagtataataataaaagaaag

SEQ ID NO: 67504 - DNA, 24 bp, Artificial Sequence
  Synthetic oligonucleotide; AAAGAAA chr11 5361133 5361156 5361153 +
agtataataataaaagaaagaaag

SEQ ID NO: 67505 - DNA, 24 bp, Artificial Sequence
  Synthetic oligonucleotide; GAAGAAA chr11 5361248 5361271 5361268 +
gctaattccctaacctagatgcag

SEQ ID NO: 67506 - DNA, 24 bp, Artificial Sequence
  Synthetic oligonucleotide; GGAGAAT chr11 5361297 5361320 5361317 +
caaagttctaaatccctcaggctg

SEQ ID NO: 67507 - DNA, 24 bp, Artificial Sequence
  Synthetic oligonucleotide; TAAGAAT chr11 5361605 5361628 5361625 +
tatcagtcaagatgtgatggggta

SEQ ID NO: 67508 - DNA, 24 bp, Artificial Sequence
  Synthetic oligonucleotide; ACAGAAT chr11 5361767 5361790 5361787 +
atcaagttgaaaatccacgggaat

SEQ ID NO: 67509 - DNA, 24 bp, Artificial Sequence
  Synthetic oligonucleotide; ACAGAAA chr11 5361952 5361975 5361972 +
ctgtaatgacaagggtatagacta

SEQ ID NO: 67510 - DNA, 24 bp, Artificial Sequence
  Synthetic oligonucleotide; AAAGAAA chr11 5361956 5361979 5361976 +
aatgacaagggtatagactaacag

SEQ ID NO: 67511 - DNA, 24 bp, Artificial Sequence
  Synthetic oligonucleotide; CCAGAAA chr11 5362043 5362066 5362063 +
aatgctttaaattgctgcatattc

SEQ ID NO: 67512 - DNA, 24 bp, Artificial Sequence
  Synthetic oligonucleotide; TCAGAAA chr11 5362065 5362088 5362085 +
tcccagaaatgagcctagtatcca

SEQ ID NO: 67513 - DNA, 24 bp, Artificial Sequence
  Synthetic oligonucleotide; TGAGAAT chr11 5362421 5362444 5362441 +
aacattagttgttgagccttataa

SEQ ID NO: 67514 - DNA, 24 bp, Artificial Sequence
  Synthetic oligonucleotide; TCAGAAT chr11 5362463 5362486 5362483 +
atcaggtctactggatactatgaa

SEQ ID NO: 67515 - DNA, 24 bp, Artificial Sequence
  Synthetic oligonucleotide; TAAGAAA chr11 5362534 5362557 5362554 +
agatgaagtcaggaaagcaaaaga

SEQ ID NO: 67516 - DNA, 24 bp, Artificial Sequence
  Synthetic oligonucleotide; AAAGAAA chr11 5362954 5362977 5362974 +
cagatgtatggcattaaaaaaaaa

SEQ ID NO: 67517 - DNA, 24 bp, Artificial Sequence
  Synthetic oligonucleotide; AGAGAAA chr11 5363077 5363100 5363097 +
atgtctgagtggcattcctccatg

SEQ ID NO: 67518 - DNA, 24 bp, Artificial Sequence
  Synthetic oligonucleotide; GAAGAAA chr11 5363092 5363115 5363112 +
tcctccatgagagaaagcttaagg

SEQ ID NO: 67519 - DNA, 24 bp, Artificial Sequence
  Synthetic oligonucleotide; ACAGAAT chr11 5363136 5363159 5363156 +
tcttcaaaactcaaagttttacga

SEQ ID NO: 67520 - DNA, 24 bp, Artificial Sequence
  Synthetic oligonucleotide; GGAGAAA chr11 5363152 5363175 5363172 +
ttttacgaacagaatgattagtct

SEQ ID NO: 67521 - DNA, 24 bp, Artificial Sequence
  Synthetic oligonucleotide; GCAGAAA chr11 5363560 5363583 5363580 +
gataccaagtttttgagtgtgaat

SEQ ID NO: 67522 - DNA, 24 bp, Artificial Sequence
  Synthetic oligonucleotide; ACAGAAA chr11 5363636 5363659 5363656 +
atattgtctggaatcttatgtgac

SEQ ID NO: 67523 - DNA, 24 bp, Artificial Sequence
  Synthetic oligonucleotide; ATAGAAA chr11 5363800 5363823 5363820 +
catccagactatatttagtgtaca

SEQ ID NO: 67524 - DNA, 24 bp, Artificial Sequence
  Synthetic oligonucleotide; GAAGAAT chr11 5363947 5363970 5363967 +
gaggagaagcttgtgttaggaatg

SEQ ID NO: 67525 - DNA, 24 bp, Artificial Sequence
  Synthetic oligonucleotide; AAAGAAA chr11 5364107 5364130 5364127 +
taaaggaagaggtatctcaacact

SEQ ID NO: 67526 - DNA, 24 bp, Artificial Sequence
  Synthetic oligonucleotide; GCAGAAA chr11 5364328 5364351 5364348 +
gggtgatatggaggcaagccaaat

SEQ ID NO: 67527 - DNA, 24 bp, Artificial Sequence
  Synthetic oligonucleotide; TTAGAAA chr11 5364425 5364448 5364445 +
tatgagagctgcacatctttctgt

SEQ ID NO: 67528 - DNA, 24 bp, Artificial Sequence
  Synthetic oligonucleotide; TTAGAAT chr11 5365257 5365280 5365277 +
gggctggtggtgagaacagtgtta

SEQ ID NO: 67529 - DNA, 24 bp, Artificial Sequence
  Synthetic oligonucleotide; GTAGAAA chr11 5365399 5365422 5365419 +
atgagagacaagatcaagcatact

SEQ ID NO: 67530 - DNA, 24 bp, Artificial Sequence
  Synthetic oligonucleotide; TGAGAAA chr11 5365647 5365670 5365667 +
cctccaaatgtgttgaggccctaa

SEQ ID NO: 67531 - DNA, 24 bp, Artificial Sequence
  Synthetic oligonucleotide; TAAGAAA chr11 5366119 5366142 5366139 +
tagaggtgaacccagtgggcaaaa

SEQ ID NO: 67532 - DNA, 24 bp, Artificial Sequence
  Synthetic oligonucleotide; GGAGAAA chr11 5366218 5366241 5366238 +
cagtaggaaagtatagaagacaaa

SEQ ID NO: 67533 - DNA, 24 bp, Artificial Sequence
  Synthetic oligonucleotide; AGAGAAA chr11 5366230 5366253 5366250 +
atagaagacaaaggagaaagggcc

SEQ ID NO: 67534 - DNA, 24 bp, Artificial Sequence
  Synthetic oligonucleotide; GAAGAAT chr11 5366243 5366266 5366263 +
gagaaagggccagagaaacagaag

SEQ ID NO: 67535 - DNA, 24 bp, Artificial Sequence
  Synthetic oligonucleotide; AAAGAAA chr11 5366294 5366317 5366314 +
aggttcctctgtgggtagcctgtt

SEQ ID NO: 67536 - DNA, 24 bp, Artificial Sequence
  Synthetic oligonucleotide; GGAGAAT chr11 5366492 5366515 5366512 +
gcagctacacaggaggctgaggta

SEQ ID NO: 67537 - DNA, 24 bp, Artificial Sequence
  Synthetic oligonucleotide; TGAGAAA chr11 5366580 5366603 5366600 +
gcagcctggaaggcaaaagcaaga

SEQ ID NO: 67538 - DNA, 24 bp, Artificial Sequence
  Synthetic oligonucleotide; AAAGAAA chr11 5366584 5366607 5366604 +
cctggaaggcaaaagcaagatgag

SEQ ID NO: 67539 - DNA, 24 bp, Artificial Sequence
  Synthetic oligonucleotide; AGAGAAA chr11 5366592 5366615 5366612 +
gcaaaagcaagatgagaaagaaat

SEQ ID NO: 67540 - DNA, 24 bp, Artificial Sequence
  Synthetic oligonucleotide; GAAGAAA chr11 5366671 5366694 5366691 +
gaagaagaagaagaaggagaagga

SEQ ID NO: 67541 - DNA, 24 bp, Artificial Sequence
  Synthetic oligonucleotide; TTAGAAT chr11 5366751 5366774 5366771 +
gtattcacttgagattcaaagtct

SEQ ID NO: 67542 - DNA, 24 bp, Artificial Sequence
  Synthetic oligonucleotide; CCAGAAA chr11 5367201 5367224 5367221 +
agatttttgaagttaaaagcattg

SEQ ID NO: 67543 - DNA, 24 bp, Artificial Sequence
  Synthetic oligonucleotide; CAAGAAA chr11 5367254 5367277 5367274 +
gagagggttcttggatttcgtgcc

SEQ ID NO: 67544 - DNA, 24 bp, Artificial Sequence
  Synthetic oligonucleotide; AAAGAAT chr11 5367258 5367281 5367278 +
gggttcttggatttcgtgcccaag

SEQ ID NO: 67545 - DNA, 24 bp, Artificial Sequence
  Synthetic oligonucleotide; ACAGAAA chr11 5367280 5367303 5367300 +
agaaagaatttggggcaaatccat

SEQ ID NO: 67546 - DNA, 24 bp, Artificial Sequence
  Synthetic oligonucleotide; TAAGAAA chr11 5367304 5367327 5367324 +
acagaaaagtgaaagcaagttaat

SEQ ID NO: 67547 - DNA, 24 bp, Artificial Sequence
  Synthetic oligonucleotide; TGAGAAT chr11 5367647 5367670 5367667 +
caacctcttatctcatcctgtgac

SEQ ID NO: 67548 - DNA, 24 bp, Artificial Sequence
  Synthetic oligonucleotide; CCAGAAT chr11 5367786 5367809 5367806 +
atgttgtttctggtatgctagcac

SEQ ID NO: 67549 - DNA, 24 bp, Artificial Sequence
  Synthetic oligonucleotide; ATAGAAA chr11 5368426 5368449 5368446 +
agtgcctggtccattgtaagtatt

SEQ ID NO: 67550 - DNA, 24 bp, Artificial Sequence
  Synthetic oligonucleotide; AAAGAAA chr11 5368527 5368550 5368547 +
gaagatactctgtctagctctgac

SEQ ID NO: 67551 - DNA, 24 bp, Artificial Sequence
  Synthetic oligonucleotide; TGAGAAA chr11 5368633 5368656 5368653 +
tgttttattctcacatgcatcctg

SEQ ID NO: 67552 - DNA, 24 bp, Artificial Sequence
  Synthetic oligonucleotide; GCAGAAT chr11 5369041 5369064 5369061 +
ttcaccaagatgagtgcctttgaa

SEQ ID NO: 67553 - DNA, 24 bp, Artificial Sequence
  Synthetic oligonucleotide; CTAGAAT chr11 5369091 5369114 5369111 +
ccacctagagacatatggccatga

SEQ ID NO: 67554 - DNA, 24 bp, Artificial Sequence
  Synthetic oligonucleotide; ACAGAAA chr11 5369112 5369135 5369132 +
tgactagaatctaaggttagacat

SEQ ID NO: 67555 - DNA, 24 bp, Artificial Sequence
  Synthetic oligonucleotide; GTAGAAA chr11 5369261 5369284 5369281 +
atgtatgcccatgtgtgtggggta

SEQ ID NO: 67556 - DNA, 24 bp, Artificial Sequence
  Synthetic oligonucleotide; GGAGAAT chr11 5369376 5369399 5369396 +
tatttgcaaaatataacactttta

SEQ ID NO: 67557 - DNA, 24 bp, Artificial Sequence
  Synthetic oligonucleotide; ATAGAAA chr11 5369886 5369909 5369906 +
gacctcattggttttgctatcaac

SEQ ID NO: 67558 - DNA, 24 bp, Artificial Sequence
  Synthetic oligonucleotide; AAAGAAA chr11 5369890 5369913 5369910 +
tcattggttttgctatcaacatag

SEQ ID NO: 67559 - DNA, 24 bp, Artificial Sequence
  Synthetic oligonucleotide; ATAGAAA chr11 5370080 5370103 5370100 +
gtacagcatgtgcaagctgcttct

SEQ ID NO: 67560 - DNA, 24 bp, Artificial Sequence
  Synthetic oligonucleotide; ATAGAAA chr11 5370092 5370115 5370112 +
caagctgcttctatagaaatgcat

SEQ ID NO: 67561 - DNA, 24 bp, Artificial Sequence
  Synthetic oligonucleotide; CCAGAAA chr11 5370464 5370487 5370484 +
caatttgagggcaataatttaatg

SEQ ID NO: 67562 - DNA, 24 bp, Artificial Sequence
  Synthetic oligonucleotide; TTAGAAA chr11 5370546 5370569 5370566 +
ctccctttctcactctttctgtgt

SEQ ID NO: 67563 - DNA, 24 bp, Artificial Sequence
  Synthetic oligonucleotide; ATAGAAT chr11 5370559 5370582 5370579 +
tctttctgtgtttagaaatgaata

SEQ ID NO: 67564 - DNA, 24 bp, Artificial Sequence
  Synthetic oligonucleotide; AAAGAAA chr11 5370764 5370787 5370784 +
ttacaacctcatatagctgctatg

SEQ ID NO: 67565 - DNA, 24 bp, Artificial Sequence
  Synthetic oligonucleotide; AAAGAAA chr11 5370768 5370791 5370788 +
aacctcatatagctgctatgaaag

SEQ ID NO: 67566 - DNA, 24 bp, Artificial Sequence
  Synthetic oligonucleotide; AGAGAAT chr11 5370789 5370812 5370809 +
aagaaagaaaaaatttgatgcaat

SEQ ID NO: 67567 - DNA, 24 bp, Artificial Sequence
  Synthetic oligonucleotide; CTAGAAA chr11 5371168 5371191 5371188 +
gatatacaagggcactgaaatatt

SEQ ID NO: 67568 - DNA, 24 bp, Artificial Sequence
  Synthetic oligonucleotide; AAAGAAT chr11 5371395 5371418 5371415 +
gccggagatataaaatttcaacat

SEQ ID NO: 67569 - DNA, 24 bp, Artificial Sequence
  Synthetic oligonucleotide; AGAGAAA chr11 5371477 5371500 5371497 +
ctaaagagtactgatattaaaaat

SEQ ID NO: 67570 - DNA, 24 bp, Artificial Sequence
  Synthetic oligonucleotide; ACAGAAA chr11 5371564 5371587 5371584 +
tgaaggaccctaaacaattaggaa

SEQ ID NO: 67571 - DNA, 24 bp, Artificial Sequence
  Synthetic oligonucleotide; CTAGAAA chr11 5372223 5372246 5372243 +
attaacatgagagtgcagatagct

SEQ ID NO: 67572 - DNA, 24 bp, Artificial Sequence
  Synthetic oligonucleotide; AGAGAAA chr11 5372265 5372288 5372285 +
atttattttggatacatatacagc

SEQ ID NO: 67573 - DNA, 24 bp, Artificial Sequence
  Synthetic oligonucleotide; TGAGAAA chr11 5372308 5372331 5372328 +
acaataactctatttttagttgtt

SEQ ID NO: 67574 - DNA, 24 bp, Artificial Sequence
  Synthetic oligonucleotide; AGAGAAA chr11 5372538 5372561 5372558 +
cctgctgaccatttgcatgtcttc

SEQ ID NO: 67575 - DNA, 24 bp, Artificial Sequence
  Synthetic oligonucleotide; GCAGAAA chr11 5372712 5372735 5372732 +
tttgatgattgttttctttgctgt

SEQ ID NO: 67576 - DNA, 24 bp, Artificial Sequence
  Synthetic oligonucleotide; ACAGAAA chr11 5372785 5372808 5372805 +
gttacctgagctctggcacatttt

SEQ ID NO: 67577 - DNA, 24 bp, Artificial Sequence
  Synthetic oligonucleotide; TGAGAAA chr11 5372848 5372871 5372868 +
acccccaaatggccaaaacaatct

SEQ ID NO: 67578 - DNA, 24 bp, Artificial Sequence
  Synthetic oligonucleotide; AAAGAAA chr11 5372852 5372875 5372872 +
ccaaatggccaaaacaatcttgag

SEQ ID NO: 67579 - DNA, 24 bp, Artificial Sequence
  Synthetic oligonucleotide; ACAGAAT chr11 5372966 5372989 5372986 +
aaatagacacatagaccaaattga

SEQ ID NO: 67580 - DNA, 24 bp, Artificial Sequence
  Synthetic oligonucleotide; CCAGAAA chr11 5372980 5373003 5373000 +
accaaattgaacagaataaagagc

SEQ ID NO: 67581 - DNA, 24 bp, Artificial Sequence
  Synthetic oligonucleotide; AAAGAAT chr11 5373096 5373119 5373116 +
gggaaaactggatatccaaatgca

SEQ ID NO: 67582 - DNA, 24 bp, Artificial Sequence
  Synthetic oligonucleotide; GAAGAAA chr11 5373255 5373278 5373275 +
attttttagatattgtcttgattt

SEQ ID NO: 67583 - DNA, 24 bp, Artificial Sequence
  Synthetic oligonucleotide; ACAGAAA chr11 5374274 5374297 5374294 +
gtctgttagaaggaaaactaacaa

SEQ ID NO: 67584 - DNA, 24 bp, Artificial Sequence
  Synthetic oligonucleotide; GCAGAAA chr11 5374367 5374390 5374387 +
ccacaaagttggggaaaaaacaga

SEQ ID NO: 67585 - DNA, 24 bp, Artificial Sequence
  Synthetic oligonucleotide; GGAGAAT chr11 5374455 5374478 5374475 +
accagcaacggaacaaagctggat

SEQ ID NO: 67586 - DNA, 24 bp, Artificial Sequence
  Synthetic oligonucleotide; CTAGAAT chr11 5374584 5374607 5374604 +
aaaaaaatttagatgaatgtataa

SEQ ID NO: 67587 - DNA, 24 bp, Artificial Sequence
  Synthetic oligonucleotide; CGAGAAT chr11 5374643 5374666 5374663 +
ctgatggagctgaaagccaaggct

SEQ ID NO: 67588 - DNA, 24 bp, Artificial Sequence
  Synthetic oligonucleotide; GAAGAAT chr11 5374655 5374678 5374675 +
aaagccaaggctcgagaatgacgt

SEQ ID NO: 67589 - DNA, 24 bp, Artificial Sequence
  Synthetic oligonucleotide; GAAGAAA chr11 5374694 5374717 5374714 +
ctcaggagctgatgcgatcaactg

SEQ ID NO: 67590 - DNA, 24 bp, Artificial Sequence
  Synthetic oligonucleotide; AGAGAAA chr11 5374754 5374777 5374774 +
gaaatgaagcgagaagggaagttt

SEQ ID NO: 67591 - DNA, 24 bp, Artificial Sequence
  Synthetic oligonucleotide; AAAGAAT chr11 5374761 5374784 5374781 +
agcgagaagggaagtttagagaaa

SEQ ID NO: 67592 - DNA, 24 bp, Artificial Sequence
  Synthetic oligonucleotide; AAAGAAA chr11 5374770 5374793 5374790 +
ggaagtttagagaaaaaagaataa

SEQ ID NO: 67593 - DNA, 24 bp, Artificial Sequence
  Synthetic oligonucleotide; CAAGAAA chr11 5374790 5374813 5374810 +
ataaaaagaaatgaacaaagcctc

SEQ ID NO: 67594 - DNA, 24 bp, Artificial Sequence
  Synthetic oligonucleotide; GGAGAAT chr11 5374855 5374878 5374875 +
gattggtgtacctgaaagtgacgg

SEQ ID NO: 67595 - DNA, 24 bp, Artificial Sequence
  Synthetic oligonucleotide; AGAGAAA chr11 5375056 5375079 5375076 +
ggaaaaaatgttaagggcagccag

SEQ ID NO: 67596 - DNA, 24 bp, Artificial Sequence
  Synthetic oligonucleotide; GCAGAAA chr11 5375114 5375137 5375134 +
atcagactaacagcagctctcttg

SEQ ID NO: 67597 - DNA, 24 bp, Artificial Sequence
  Synthetic oligonucleotide; AAAGAAT chr11 5375170 5375193 5375190 +
gccaatattcaacatccttaaagg

SEQ ID NO: 67598 - DNA, 24 bp, Artificial Sequence
  Synthetic oligonucleotide; ACAGAAT chr11 5375184 5375207 5375204 +
tccttaaaggaaagaattttcaac

SEQ ID NO: 67599 - DNA, 24 bp, Artificial Sequence
  Synthetic oligonucleotide; GGAGAAA chr11 5375225 5375248 5375245 +
gccaaactaagcttcataagtgaa

SEQ ID NO: 67600 - DNA, 24 bp, Artificial Sequence
  Synthetic oligonucleotide; GAAGAAA chr11 5375385 5375408 5375405 +
aaatgtgaagaccatcaagactag

SEQ ID NO: 67601 - DNA, 24 bp, Artificial Sequence
  Synthetic oligonucleotide; ACAGAAA chr11 5375882 5375905 5375902 +
gtcaacattagacagatcaacgag

SEQ ID NO: 67602 - DNA, 24 bp, Artificial Sequence
  Synthetic oligonucleotide; ACAGAAT chr11 5375973 5375996 5375993 +
tacagaactctccaccccaaatca

SEQ ID NO: 67603 - DNA, 24 bp, Artificial Sequence
  Synthetic oligonucleotide; ACAGAAA chr11 5376067 5376090 5376087 +
gctctcctcagcaaatataaaaga

SEQ ID NO: 67604 - DNA, 24 bp, Artificial Sequence
  Synthetic oligonucleotide; TAAGAAA chr11 5376126 5376149 5376146 +
tgcaatcaaactagaactcaggat

SEQ ID NO: 67605 - DNA, 24 bp, Artificial Sequence
  Synthetic oligonucleotide; GCAGAAA chr11 5376211 5376234 5376231 +
tactgggtacataacgaaatgaag

SEQ ID NO: 67606 - DNA, 24 bp, Artificial Sequence
  Synthetic oligonucleotide; CCAGAAT chr11 5376261 5376284 5376281 +
caatgagaacaaagacacaacata

SEQ ID NO: 67607 - DNA, 24 bp, Artificial Sequence
  Synthetic oligonucleotide; AGAGAAA chr11 5376326 5376349 5376346 +
aatttatagcactaaacgcccaca

SEQ ID NO: 67608 - DNA, 24 bp, Artificial Sequence
  Synthetic oligonucleotide; CAAGAAA chr11 5376334 5376357 5376354 +
gcactaaacgcccacaagagaaag

SEQ ID NO: 67609 - DNA, 24 bp, Artificial Sequence
  Synthetic oligonucleotide; CAAGAAA chr11 5376421 5376444 5376441 +
acacattcaaaagctagcagaagt

SEQ ID NO: 67610 - DNA, 24 bp, Artificial Sequence
  Synthetic oligonucleotide; TAAGAAA chr11 5376551 5376574 5376571 +
ctgatagaccgctagcaagactaa

SEQ ID NO: 67611 - DNA, 24 bp, Artificial Sequence
  Synthetic oligonucleotide; GAAGAAT chr11 5376563 5376586 5376583 +
tagcaagactaataagaaaagaga

SEQ ID NO: 67612 - DNA, 24 bp, Artificial Sequence
  Synthetic oligonucleotide; ACAGAAA chr11 5376619 5376642 5376639 +
aaaggggatatcaccaccgatccc

SEQ ID NO: 67613 - DNA, 24 bp, Artificial Sequence
  Synthetic oligonucleotide; AGAGAAT chr11 5376640 5376663 5376660 +
cccacagaaatacaaactgccatc

SEQ ID NO: 67614 - DNA, 24 bp, Artificial Sequence
  Synthetic oligonucleotide; CTAGAAA chr11 5376673 5376696 5376693 +
tacaaacacctctacgcaaataaa

SEQ ID NO: 67615 - DNA, 24 bp, Artificial Sequence
  Synthetic oligonucleotide; GAAGAAA chr11 5376685 5376708 5376705 +
tacgcaaataaactagaaaatcta

SEQ ID NO: 67616 - DNA, 24 bp, Artificial Sequence
  Synthetic oligonucleotide; ACAGAAA chr11 5376901 5376924 5376921 +
ttccttctgaaactattccaatca

SEQ ID NO: 67617 - DNA, 24 bp, Artificial Sequence
  Synthetic oligonucleotide; CCAGAAA chr11 5376964 5376987 5376984 +
gccagcatcatcctaataccaaag

SEQ ID NO: 67618 - DNA, 24 bp, Artificial Sequence
  Synthetic oligonucleotide; AGAGAAT chr11 5376987 5377010 5377007 +
gccagaaagagacacaaccaaaaa

SEQ ID NO: 67619 - DNA, 24 bp, Artificial Sequence
  Synthetic oligonucleotide; GCAGAAA chr11 5377207 5377230 5377227 +
aaccacatgattatctcaatagat

SEQ ID NO: 67620 - DNA, 24 bp, Artificial Sequence
  Synthetic oligonucleotide; TAAGAAA chr11 5377475 5377498 5377495 +
agacaggaaaaaagggtattcaat

SEQ ID NO: 67621 - DNA, 24 bp, Artificial Sequence
  Synthetic oligonucleotide; CTAGAAA chr11 5377528 5377551 5377548 +
tttgcagacgacatgattgtatat

SEQ ID NO: 67622 - DNA, 24 bp, Artificial Sequence
  Synthetic oligonucleotide; AGAGAAT chr11 5377697 5377720 5377717 +
aactcccattcacaattgcttcaa

SEQ ID NO: 67623 - DNA, 24 bp, Artificial Sequence
  Synthetic oligonucleotide; GAAGAAT chr11 5377829 5377852 5377849 +
agaacattccatgcttatgggtag

SEQ ID NO: 67624 - DNA, 24 bp, Artificial Sequence
  Synthetic oligonucleotide; ACAGAAT chr11 5377918 5377941 5377938 +
atcaagctaccaatgattttcttc

SEQ ID NO: 67625 - DNA, 24 bp, Artificial Sequence
  Synthetic oligonucleotide; TCAGAAA chr11 5378118 5378141 5378138 +
gatcaatggaacagaacagagccc

SEQ ID NO: 67626 - DNA, 24 bp, Artificial Sequence
  Synthetic oligonucleotide; TGAGAAA chr11 5378165 5378188 5378185 +
caactatctgatctttgaaaaacc

SEQ ID NO: 67627 - DNA, 24 bp, Artificial Sequence
  Synthetic oligonucleotide; CAAGAAA chr11 5378174 5378197 5378194 +
gatctttgaaaaacctgagaaaaa

SEQ ID NO: 67628 - DNA, 24 bp, Artificial Sequence
  Synthetic oligonucleotide; GTAGAAT chr11 5378236 5378259 5378256 +
gctgggagaactggctagccatat

SEQ ID NO: 67629 - DNA, 24 bp, Artificial Sequence
  Synthetic oligonucleotide; GAAGAAA chr11 5378337 5378360 5378357 +
agacctaaaaccataaaaacccta

SEQ ID NO: 67630 - DNA, 24 bp, Artificial Sequence
  Synthetic oligonucleotide; AAAGAAA chr11 5378472 5378495 5378492 +
aaactaaagagcttctgcacagct

SEQ ID NO: 67631 - DNA, 24 bp, Artificial Sequence
  Synthetic oligonucleotide; GGAGAAA chr11 5378513 5378536 5378533 +
agtgaacaggcaacctacacaatg

SEQ ID NO: 67632 - DNA, 24 bp, Artificial Sequence
  Synthetic oligonucleotide; CCAGAAT chr11 5378557 5378580 5378577 +
actcatctgacaaagggctaatat

SEQ ID NO: 67633 - DNA, 24 bp, Artificial Sequence
  Synthetic oligonucleotide; CAAGAAA chr11 5378588 5378611 5378608 +
ctataatgaactcaaacaaattta

SEQ ID NO: 67634 - DNA, 24 bp, Artificial Sequence
  Synthetic oligonucleotide; AAAGAAA chr11 5378649 5378672 5378669 +
aaggatatgaacagacacttctca

SEQ ID NO: 67635 - DNA, 24 bp, Artificial Sequence
  Synthetic oligonucleotide; AGAGAAA chr11 5378709 5378732 5378729 +
aaatgctcatcatcactggccatc

SEQ ID NO: 67636 - DNA, 24 bp, Artificial Sequence
  Synthetic oligonucleotide; TTAGAAT chr11 5378755 5378778 5378775 +
caatgagataccatctcataccag

SEQ ID NO: 67637 - DNA, 24 bp, Artificial Sequence
  Synthetic oligonucleotide; GGAGAAA chr11 5378808 5378831 5378828 +
aacaacaggtgctggagaggatgt

SEQ ID NO: 67638 - DNA, 24 bp, Artificial Sequence
  Synthetic oligonucleotide; CTAGAAA chr11 5378901 5378924 5378921 +
tggcgattcctcagggatctagaa

SEQ ID NO: 67639 - DNA, 24 bp, Artificial Sequence
  Synthetic oligonucleotide; TAAGAAA chr11 5379065 5379088 5379085 +
atgtccaacaatgatagactggat

SEQ ID NO: 67640 - DNA, 24 bp, Artificial Sequence
  Synthetic oligonucleotide; TTAGAAT chr11 5379741 5379764 5379761 +
gtttaatccattttttgtttcctt

SEQ ID NO: 67641 - DNA, 24 bp, Artificial Sequence
  Synthetic oligonucleotide; CCAGAAT chr11 5379939 5379962 5379959 +
gcccgatcttggacttttaagtca

SEQ ID NO: 67642 - DNA, 24 bp, Artificial Sequence
  Synthetic oligonucleotide; TAAGAAA chr11 5380655 5380678 5380675 +
ccatctgtaaaaatctgaaaaagc

SEQ ID NO: 67643 - DNA, 24 bp, Artificial Sequence
  Synthetic oligonucleotide; GAAGAAT chr11 5380756 5380779 5380776 +
gagagaggaagatcatcctcaaag

SEQ ID NO: 67644 - DNA, 24 bp, Artificial Sequence
  Synthetic oligonucleotide; GAAGAAA chr11 5380823 5380846 5380843 +
tgaggacacgggaaggtggtgctg

SEQ ID NO: 67645 - DNA, 24 bp, Artificial Sequence
  Synthetic oligonucleotide; TCAGAAT chr11 5380876 5380899 5380896 +
gggatagtagggccttggtgctgg

SEQ ID NO: 67646 - DNA, 24 bp, Artificial Sequence
  Synthetic oligonucleotide; TCAGAAA chr11 5381454 5381477 5381474 +
catcctcctcttggcctccaggct

SEQ ID NO: 67647 - DNA, 24 bp, Artificial Sequence
  Synthetic oligonucleotide; TGAGAAT chr11 5381643 5381666 5381663 +
ttaatgcacgtcaatgaaaattga

SEQ ID NO: 67648 - DNA, 24 bp, Artificial Sequence
  Synthetic oligonucleotide; AAAGAAT chr11 5381731 5381754 5381751 +
aatctaaaggtcatttagagcaat

SEQ ID NO: 67649 - DNA, 24 bp, Artificial Sequence
  Synthetic oligonucleotide; AGAGAAA chr11 5381814 5381837 5381834 +
actggtccttcaattatataattc

SEQ ID NO: 67650 - DNA, 24 bp, Artificial Sequence
  Synthetic oligonucleotide; ATAGAAT chr11 5381820 5381843 5381840 +
ccttcaattatataattcagagaa

SEQ ID NO: 67651 - DNA, 24 bp, Artificial Sequence
  Synthetic oligonucleotide; AAAGAAA chr11 5382988 5383011 5383008 +
tggagaggttgtgtgtgagttttg

SEQ ID NO: 67652 - DNA, 24 bp, Artificial Sequence
  Synthetic oligonucleotide; AGAGAAA chr11 5382995 5383018 5383015 +
gttgtgtgtgagttttgaaagaaa

SEQ ID NO: 67653 - DNA, 24 bp, Artificial Sequence
  Synthetic oligonucleotide; CCAGAAA chr11 5383103 5383126 5383123 +
tctaaatgttgatggcatttgcta

SEQ ID NO: 67654 - DNA, 24 bp, Artificial Sequence
  Synthetic oligonucleotide; AGAGAAT chr11 5383362 5383385 5383382 +
gacaggaaaatgagtgcaggagtg

SEQ ID NO: 67655 - DNA, 24 bp, Artificial Sequence
  Synthetic oligonucleotide; AAAGAAA chr11 5383678 5383701 5383698 +
gcttcaggagacaggggtggagat

SEQ ID NO: 67656 - DNA, 24 bp, Artificial Sequence
  Synthetic oligonucleotide; GGAGAAA chr11 5383963 5383986 5383983 +
ttagggggacatgggagagaggag

SEQ ID NO: 67657 - DNA, 24 bp, Artificial Sequence
  Synthetic oligonucleotide; TTAGAAA chr11 5384166 5384189 5384186 +
ttgttgtttctttgtttgttgttt

SEQ ID NO: 67658 - DNA, 24 bp, Artificial Sequence
  Synthetic oligonucleotide; TTAGAAA chr11 5384350 5384373 5384370 +
atttttcacttggaaaatgaagtc

SEQ ID NO: 67659 - DNA, 24 bp, Artificial Sequence
  Synthetic oligonucleotide; ACAGAAT chr11 5384368 5384391 5384388 +
gaagtcttagaaaccagggttctc

SEQ ID NO: 67660 - DNA, 24 bp, Artificial Sequence
  Synthetic oligonucleotide; AGAGAAA chr11 5384416 5384439 5384436 +
gagtctatgcacagaaccagagcc

SEQ ID NO: 67661 - DNA, 24 bp, Artificial Sequence
  Synthetic oligonucleotide; ACAGAAA chr11 5384425 5384448 5384445 +
cacagaaccagagccagagaaaga

SEQ ID NO: 67662 - DNA, 24 bp, Artificial Sequence
  Synthetic oligonucleotide; TCAGAAA chr11 5384649 5384672 5384669 +
atacacaccctctccttactctca

SEQ ID NO: 67663 - DNA, 24 bp, Artificial Sequence
  Synthetic oligonucleotide; ATAGAAA chr11 5384716 5384739 5384736 +
attttatatgctggtccagttaac

SEQ ID NO: 67664 - DNA, 24 bp, Artificial Sequence
  Synthetic oligonucleotide; CAAGAAA chr11 5384952 5384975 5384972 +
gtcttttgcatattctcctattta

SEQ ID NO: 67665 - DNA, 24 bp, Artificial Sequence
  Synthetic oligonucleotide; AAAGAAT chr11 5385014 5385037 5385034 +
aataactaatattaaattcaaaca

SEQ ID NO: 67666 - DNA, 24 bp, Artificial Sequence
  Synthetic oligonucleotide; GGAGAAA chr11 5385244 5385267 5385264 +
catggataattatctctcttgcta

SEQ ID NO: 67667 - DNA, 24 bp, Artificial Sequence
  Synthetic oligonucleotide; AGAGAAA chr11 5385291 5385314 5385311 +
tcccaagaggaagtatactttcca

SEQ ID NO: 67668 - DNA, 24 bp, Artificial Sequence
  Synthetic oligonucleotide; AAAGAAT chr11 5385417 5385440 5385437 +
agctgacaacagaaccccaggcac

SEQ ID NO: 67669 - DNA, 24 bp, Artificial Sequence
  Synthetic oligonucleotide; AGAGAAT chr11 5385537 5385560 5385557 +
cactgtcaggctccaggggccttt

SEQ ID NO: 67670 - DNA, 24 bp, Artificial Sequence
  Synthetic oligonucleotide; AAAGAAT chr11 5385639 5385662 5385659 +
atttatgttctaaacatgtataat

SEQ ID NO: 67671 - DNA, 24 bp, Artificial Sequence
  Synthetic oligonucleotide; AAAGAAT chr11 5385798 5385821 5385818 +
atataaaaaatctataaagtatat

SEQ ID NO: 67672 - DNA, 24 bp, Artificial Sequence
  Synthetic oligonucleotide; AAAGAAT chr11 5385960 5385983 5385980 +
aagtatatataaatataaaaatat

SEQ ID NO: 67673 - DNA, 24 bp, Artificial Sequence
  Synthetic oligonucleotide; AGAGAAA chr11 5386018 5386041 5386038 +
acattacaggtactacgtgagaac

SEQ ID NO: 67674 - DNA, 24 bp, Artificial Sequence
  Synthetic oligonucleotide; CAAGAAA chr11 5386144 5386167 5386164 +
tggaaaaacaggggtggtttttgc

SEQ ID NO: 67675 - DNA, 24 bp, Artificial Sequence
  Synthetic oligonucleotide; GAAGAAT chr11 5386163 5386186 5386183 +
tttgccaagaaagcaataaatata

SEQ ID NO: 67676 - DNA, 24 bp, Artificial Sequence
  Synthetic oligonucleotide; CAAGAAA chr11 5386175 5386198 5386195 +
gcaataaatatagaagaataaaaa

SEQ ID NO: 67677 - DNA, 24 bp, Artificial Sequence
  Synthetic oligonucleotide; GAAGAAA chr11 5386199 5386222 5386219 +
caagaaaagtatgtgtagggaatt

SEQ ID NO: 67678 - DNA, 24 bp, Artificial Sequence
  Synthetic oligonucleotide; ACAGAAA chr11 5386785 5386808 5386805 +
aaagaacttagttaaaaattagat

SEQ ID NO: 67679 - DNA, 24 bp, Artificial Sequence
  Synthetic oligonucleotide; GAAGAAT chr11 5386884 5386907 5386904 +
attataaaaaatgcataaatatga

SEQ ID NO: 67680 - DNA, 24 bp, Artificial Sequence
  Synthetic oligonucleotide; GCAGAAA chr11 5386974 5386997 5386994 +
cttttggaaacacctagtgagaag

SEQ ID NO: 67681 - DNA, 24 bp, Artificial Sequence
  Synthetic oligonucleotide; TAAGAAT chr11 5387196 5387219 5387216 +
aagagaaccagcagatcttggcat

SEQ ID NO: 67682 - DNA, 24 bp, Artificial Sequence
  Synthetic oligonucleotide; AAAGAAA chr11 5387406 5387429 5387426 +
tggttgagtagtaaactgagaagt

SEQ ID NO: 67683 - DNA, 24 bp, Artificial Sequence
  Synthetic oligonucleotide; ATAGAAT chr11 5388010 5388033 5388030 +
cacaattacttttgcaccaaccta

SEQ ID NO: 67684 - DNA, 24 bp, Artificial Sequence
  Synthetic oligonucleotide; ACAGAAA chr11 5388275 5388298 5388295 +
aggaattcacattatagaagcaat

SEQ ID NO: 67685 - DNA, 24 bp, Artificial Sequence
  Synthetic oligonucleotide; GAAGAAT chr11 5388490 5388513 5388510 +
caggaaaaaatgtttttattccag

SEQ ID NO: 67686 - DNA, 24 bp, Artificial Sequence
  Synthetic oligonucleotide; GAAGAAT chr11 5388542 5388565 5388562 +
tgagcaagcatactagataaactg

SEQ ID NO: 67687 - DNA, 24 bp, Artificial Sequence
  Synthetic oligonucleotide; TAAGAAA chr11 5388597 5388620 5388617 +
atatacagaggaaattaggataga

SEQ ID NO: 67688 - DNA, 24 bp, Artificial Sequence
  Synthetic oligonucleotide; AGAGAAA chr11 5388619 5388642 5388639 +
gataagaaaataggatatacacgg

SEQ ID NO: 67689 - DNA, 24 bp, Artificial Sequence
  Synthetic oligonucleotide; TTAGAAT chr11 5388775 5388798 5388795 +
atagtcctgaaagagtgatctgaa

SEQ ID NO: 67690 - DNA, 24 bp, Artificial Sequence
  Synthetic oligonucleotide; ACAGAAA chr11 5388831 5388854 5388851 +
aaacagacttgaggtattcagtaa

SEQ ID NO: 67691 - DNA, 24 bp, Artificial Sequence
  Synthetic oligonucleotide; AGAGAAA chr11 5388976 5388999 5388996 +
ttgctagagtctggaaatcaaaag

SEQ ID NO: 67692 - DNA, 24 bp, Artificial Sequence
  Synthetic oligonucleotide; GAAGAAA chr11 5389061 5389084 5389081 +
aatcatggtagtggatgacattaa

SEQ ID NO: 67693 - DNA, 24 bp, Artificial Sequence
  Synthetic oligonucleotide; ATAGAAT chr11 5389070 5389093 5389090 +
agtggatgacattaagaagaaata

SEQ ID NO: 67694 - DNA, 24 bp, Artificial Sequence
  Synthetic oligonucleotide; AAAGAAA chr11 5389208 5389231 5389228 +
aaaactggtgagggcgaggttatc

SEQ ID NO: 67695 - DNA, 24 bp, Artificial Sequence
  Synthetic oligonucleotide; GCAGAAT chr11 5389237 5389260 5389257 +
aagttcaataaagtagtgagattg

SEQ ID NO: 67696 - DNA, 24 bp, Artificial Sequence
  Synthetic oligonucleotide; GAAGAAT chr11 5389323 5389346 5389343 +
gatgttgtgaatgttagtgaagct

SEQ ID NO: 67697 - DNA, 24 bp, Artificial Sequence
  Synthetic oligonucleotide; CCAGAAA chr11 5389336 5389359 5389356 +
ttagtgaagctgaagaattaataa

SEQ ID NO: 67698 - DNA, 24 bp, Artificial Sequence
  Synthetic oligonucleotide; TCAGAAA chr11 5390856 5390879 5390876 +
taactttcagacccccaagtcaca

SEQ ID NO: 67699 - DNA, 24 bp, Artificial Sequence
  Synthetic oligonucleotide; TGAGAAA chr11 5391094 5391117 5391114 +
gatattgaacaatgacatgtaacg

SEQ ID NO: 67700 - DNA, 24 bp, Artificial Sequence
  Synthetic oligonucleotide; TTAGAAT chr11 5391395 5391418 5391415 +
tatgaaggtgtgtgcatgtgtcca

SEQ ID NO: 67701 - DNA, 24 bp, Artificial Sequence
  Synthetic oligonucleotide; GAAGAAT chr11 5391953 5391976 5391973 +
cagctacctgggaggctgaggtgg

SEQ ID NO: 67702 - DNA, 24 bp, Artificial Sequence
  Synthetic oligonucleotide; TTAGAAT chr11 5392317 5392340 5392337 +
attactcaatagcagttccgagac

SEQ ID NO: 67703 - DNA, 24 bp, Artificial Sequence
  Synthetic oligonucleotide; GTAGAAT chr11 5392372 5392395 5392392 +
ttcctattctatagatctcatttg

SEQ ID NO: 67704 - DNA, 24 bp, Artificial Sequence
  Synthetic oligonucleotide; GAAGAAT chr11 5392580 5392603 5392600 +
ttaatttgttactaaacgaatatt

SEQ ID NO: 67705 - DNA, 24 bp, Artificial Sequence
  Synthetic oligonucleotide; GCAGAAT chr11 5392795 5392818 5392815 +
ccagctactcaggaggctggggca

SEQ ID NO: 67706 - DNA, 24 bp, Artificial Sequence
  Synthetic oligonucleotide; AAAGAAA chr11 5392900 5392923 5392920 +
agactccttctcaaaaacaaaaaa

SEQ ID NO: 67707 - DNA, 24 bp, Artificial Sequence
  Synthetic oligonucleotide; CCAGAAT chr11 5392961 5392984 5392981 +
tggtaaaagaggtattttcacata

SEQ ID NO: 67708 - DNA, 24 bp, Artificial Sequence
  Synthetic oligonucleotide; TCAGAAA chr11 5393043 5393066 5393063 +
ttgaaaatattcatgctctgtgtc

SEQ ID NO: 67709 - DNA, 24 bp, Artificial Sequence
  Synthetic oligonucleotide; TAAGAAT chr11 5393236 5393259 5393256 +
aatttgtgttattgttcataattt

SEQ ID NO: 67710 - DNA, 24 bp, Artificial Sequence
  Synthetic oligonucleotide; CTAGAAT chr11 5393260 5393283 5393280 +
taagaatgtaagcatacaaaatgt

SEQ ID NO: 67711 - DNA, 24 bp, Artificial Sequence
  Synthetic oligonucleotide; AAAGAAA chr11 5393422 5393445 5393442 +
aaaaggctataaatatttgtatca

SEQ ID NO: 67712 - DNA, 24 bp, Artificial Sequence
  Synthetic oligonucleotide; CTAGAAT chr11 5393963 5393986 5393983 +
ctccctaactttttgttccctttc

SEQ ID NO: 67713 - DNA, 24 bp, Artificial Sequence
  Synthetic oligonucleotide; ACAGAAA chr11 5394011 5394034 5394031 +
atttagtatcaggaaaagatagca

SEQ ID NO: 67714 - DNA, 24 bp, Artificial Sequence
  Synthetic oligonucleotide; ACAGAAA chr11 5394083 5394106 5394103 +
cttgattttaagagttatagattc

SEQ ID NO: 67715 - DNA, 24 bp, Artificial Sequence
  Synthetic oligonucleotide; ACAGAAT chr11 5394584 5394607 5394604 +
agatggctcatgtaattgaagttc

SEQ ID NO: 67716 - DNA, 24 bp, Artificial Sequence
  Synthetic oligonucleotide; AAAGAAA chr11 5394933 5394956 5394953 +
tctcaaggggacttttgtctggga

SEQ ID NO: 67717 - DNA, 24 bp, Artificial Sequence
  Synthetic oligonucleotide; AAAGAAA chr11 5394938 5394961 5394958 +
aggggacttttgtctgggaaaaga

SEQ ID NO: 67718 - DNA, 24 bp, Artificial Sequence
  Synthetic oligonucleotide; TGAGAAA chr11 5395285 5395308 5395305 +
ctggcatggagtggaagggctgca

SEQ ID NO: 67719 - DNA, 24 bp, Artificial Sequence
  Synthetic oligonucleotide; GAAGAAA chr11 5395303 5395326 5395323 +
gctgcatgagaaagaagctacaga

SEQ ID NO: 67720 - DNA, 24 bp, Artificial Sequence
  Synthetic oligonucleotide; AGAGAAT chr11 5395533 5395556 5395553 +
acttgttactgggctatgccttgt

SEQ ID NO: 67721 - DNA, 24 bp, Artificial Sequence
  Synthetic oligonucleotide; TTAGAAA chr11 5395711 5395734 5395731 +
tcaacatagtaaaaaagctaaggt

SEQ ID NO: 67722 - DNA, 24 bp, Artificial Sequence
  Synthetic oligonucleotide; GTAGAAT chr11 5395971 5395994 5395991 +
atggctctctaatctatggagtag

SEQ ID NO: 67723 - DNA, 24 bp, Artificial Sequence
  Synthetic oligonucleotide; GAAGAAA chr11 5395996 5396019 5396016 +
tagaattgtctcaatttttcagat

SEQ ID NO: 67724 - DNA, 24 bp, Artificial Sequence
  Synthetic oligonucleotide; AGAGAAA chr11 5396241 5396264 5396261 +
aataaaaggcattcaattatgtaa

SEQ ID NO: 67725 - DNA, 24 bp, Artificial Sequence
  Synthetic oligonucleotide; CTAGAAA chr11 5396287 5396310 5396307 +
tttgcagatgacgtgattgcatat

SEQ ID NO: 67726 - DNA, 24 bp, Artificial Sequence
  Synthetic oligonucleotide; AGAGAAT chr11 5396444 5396467 5396464 +
aactcccattcacaattgcttcag

SEQ ID NO: 67727 - DNA, 24 bp, Artificial Sequence
  Synthetic oligonucleotide; GAAGAAA chr11 5396571 5396594 5396591 +
agaacattccatgctcatggatag

SEQ ID NO: 67728 - DNA, 24 bp, Artificial Sequence
  Synthetic oligonucleotide; ACAGAAT chr11 5396660 5396683 5396680 +
atcaagctaccaatgactttcttc

SEQ ID NO: 67729 - DNA, 24 bp, Artificial Sequence
  Synthetic oligonucleotide; TCAGAAA chr11 5396861 5396884 5396881 +
gaccaatggaacaaaacagagccc

SEQ ID NO: 67730 - DNA, 24 bp, Artificial Sequence
  Synthetic oligonucleotide; TGAGAAA chr11 5396908 5396931 5396928 +
caactatctgatctttgacaaacc

SEQ ID NO: 67731 - DNA, 24 bp, Artificial Sequence
  Synthetic oligonucleotide; CAAGAAA chr11 5396917 5396940 5396937 +
gatctttgacaaacctgagaaaaa

SEQ ID NO: 67732 - DNA, 24 bp, Artificial Sequence
  Synthetic oligonucleotide; GAAGAAA chr11 5397080 5397103 5397100 +
agacctaaaaccataaaaactcta

SEQ ID NO: 67733 - DNA, 24 bp, Artificial Sequence
  Synthetic oligonucleotide; AAAGAAA chr11 5397215 5397238 5397235 +
aaactaaagatcttctgcacagca

SEQ ID NO: 67734 - DNA, 24 bp, Artificial Sequence
  Synthetic oligonucleotide; GGAGAAA chr11 5397256 5397279 5397276 +
agtgaacaggcaacctacacaatg

SEQ ID NO: 67735 - DNA, 24 bp, Artificial Sequence
  Synthetic oligonucleotide; CCAGAAT chr11 5397300 5397323 5397320 +
actcatctgacaaagggctaatat

SEQ ID NO: 67736 - DNA, 24 bp, Artificial Sequence
  Synthetic oligonucleotide; AGAGAAA chr11 5397333 5397356 5397353 +
acaatgaactcaaacaaatttaca

SEQ ID NO: 67737 - DNA, 24 bp, Artificial Sequence
  Synthetic oligonucleotide; AGAGAAA chr11 5397448 5397471 5397468 +
aaatgctcatcatcactggccatc

SEQ ID NO: 67738 - DNA, 24 bp, Artificial Sequence
  Synthetic oligonucleotide; TTAGAAT chr11 5397494 5397517 5397514 +
caatgagataccatctcacaccag

SEQ ID NO: 67739 - DNA, 24 bp, Artificial Sequence
  Synthetic oligonucleotide; GGAGAAA chr11 5397547 5397570 5397567 +
aacaacaggtgctggagaggatgt

SEQ ID NO: 67740 - DNA, 24 bp, Artificial Sequence
  Synthetic oligonucleotide; CTAGAAA chr11 5397640 5397663 5397660 +
tggtgattcctcagggatctagaa

SEQ ID NO: 67741 - DNA, 24 bp, Artificial Sequence
  Synthetic oligonucleotide; TAAGAAA chr11 5397804 5397827 5397824 +
atgtccaacaatgatagactggat

SEQ ID NO: 67742 - DNA, 24 bp, Artificial Sequence
  Synthetic oligonucleotide; TTAGAAA chr11 5398189 5398212 5398209 +
cttaaaagtataacaaaaaataag

SEQ ID NO: 67743 - DNA, 24 bp, Artificial Sequence
  Synthetic oligonucleotide; AAAGAAA chr11 5398196 5398219 5398216 +
gtataacaaaaaataagttagaaa

SEQ ID NO: 67744 - DNA, 24 bp, Artificial Sequence
  Synthetic oligonucleotide; TGAGAAT chr11 5398902 5398925 5398922 +
tcaggtagtatctttagagcagtg

SEQ ID NO: 67745 - DNA, 24 bp, Artificial Sequence
  Synthetic oligonucleotide; TGAGAAT chr11 5399313 5399336 5399333 +
aataagctgactgtgattgactcc

SEQ ID NO: 67746 - DNA, 24 bp, Artificial Sequence
  Synthetic oligonucleotide; AGAGAAT chr11 5399342 5399365 5399362 +
attcctgaaagagatatagagtgg

SEQ ID NO: 67747 - DNA, 24 bp, Artificial Sequence
  Synthetic oligonucleotide; GGAGAAT chr11 5399652 5399675 5399672 +
cttgtcaaacaaatcctaaactca

SEQ ID NO: 67748 - DNA, 24 bp, Artificial Sequence
  Synthetic oligonucleotide; CAAGAAA chr11 5399757 5399780 5399777 +
gaaggatgcaaaaaaaaaaaaatg

SEQ ID NO: 67749 - DNA, 24 bp, Artificial Sequence
  Synthetic oligonucleotide; AAAGAAA chr11 5399761 5399784 5399781 +
gatgcaaaaaaaaaaaaatgcaag

SEQ ID NO: 67750 - DNA, 24 bp, Artificial Sequence
  Synthetic oligonucleotide; GAAGAAA chr11 5399775 5399798 5399795 +
aaaatgcaagaaagaaaaaaaaag

SEQ ID NO: 67751 - DNA, 24 bp, Artificial Sequence
  Synthetic oligonucleotide; GAAGAAA chr11 5399886 5399909 5399889 -
cacacctcaaataaccggatattg

SEQ ID NO: 67752 - DNA, 24 bp, Artificial Sequence
  Synthetic oligonucleotide; TCAGAAA chr11 5399582 5399605 5399585 -
cccagtataataggacacaacaaa

SEQ ID NO: 67753 - DNA, 24 bp, Artificial Sequence
  Synthetic oligonucleotide; GTAGAAT chr11 5399571 5399594 5399574 -
aggacacaacaaatcagaaaaaaa

SEQ ID NO: 67754 - DNA, 24 bp, Artificial Sequence
  Synthetic oligonucleotide; ACAGAAT chr11 5399531 5399554 5399534 -
tgatgactgtacccctggagctgg

SEQ ID NO: 67755 - DNA, 24 bp, Artificial Sequence
  Synthetic oligonucleotide; CAAGAAT chr11 5399232 5399255 5399235 -
acatctgtgaggtaaacaaggaga

SEQ ID NO: 67756 - DNA, 24 bp, Artificial Sequence
  Synthetic oligonucleotide; CAAGAAT chr11 5399144 5399167 5399147 -
gataatatgatggcaaaactattt

SEQ ID NO: 67757 - DNA, 24 bp, Artificial Sequence
  Synthetic oligonucleotide; GGAGAAA chr11 5398392 5398415 5398395 -
gagtctctaggagtagagtaatgg

SEQ ID NO: 67758 - DNA, 24 bp, Artificial Sequence
  Synthetic oligonucleotide; TGAGAAT chr11 5397935 5397958 5397938 -
ctttttgtccttgtgatagtttgc

SEQ ID NO: 67759 - DNA, 24 bp, Artificial Sequence
  Synthetic oligonucleotide; GAAGAAA chr11 5396684 5396707 5396687 -
taaagtagttttttccaattctgt

SEQ ID NO: 67760 - DNA, 24 bp, Artificial Sequence
  Synthetic oligonucleotide; TAAGAAT chr11 5396416 5396439 5396419 -
cactgtttgtctgttattggtgta

SEQ ID NO: 67761 - DNA, 24 bp, Artificial Sequence
  Synthetic oligonucleotide; TAAGAAA chr11 5395866 5395889 5395869 -
agtgagcaatgttgcagtgagctc

SEQ ID NO: 67762 - DNA, 24 bp, Artificial Sequence
  Synthetic oligonucleotide; AGAGAAA chr11 5395680 5395703 5395683 -
ccacatgggccctgcctcttttcg

SEQ ID NO: 67763 - DNA, 24 bp, Artificial Sequence
  Synthetic oligonucleotide; TAAGAAA chr11 5395010 5395033 5395013 -
ttctctccccagctgccaacttca

SEQ ID NO: 67764 - DNA, 24 bp, Artificial Sequence
  Synthetic oligonucleotide; TCAGAAA chr11 5394818 5394841 5394821 -
ttaataagacacaaactctgtctt

SEQ ID NO: 67765 - DNA, 24 bp, Artificial Sequence
  Synthetic oligonucleotide; TTAGAAT chr11 5394197 5394220 5394200 -
agtgacttatagtgtattatgccc

SEQ ID NO: 67766 - DNA, 24 bp, Artificial Sequence
  Synthetic oligonucleotide; TAAGAAA chr11 5393872 5393895 5393875 -
ggagaggagtccagcataatggtt

SEQ ID NO: 67767 - DNA, 24 bp, Artificial Sequence
  Synthetic oligonucleotide; TGAGAAA chr11 5393725 5393748 5393728 -
tacctccctacttcacaggtttgg

SEQ ID NO: 67768 - DNA, 24 bp, Artificial Sequence
  Synthetic oligonucleotide; TCAGAAA chr11 5393522 5393545 5393525 -
gattataaaaccgaaatgtcttct

SEQ ID NO: 67769 - DNA, 24 bp, Artificial Sequence
  Synthetic oligonucleotide; AGAGAAA chr11 5393496 5393519 5393499 -
agaaaatttgtatacggcaaagat

SEQ ID NO: 67770 - DNA, 24 bp, Artificial Sequence
  Synthetic oligonucleotide; ATAGAAA chr11 5393484 5393507 5393487 -
tacggcaaagatagagaaatctat

SEQ ID NO: 67771 - DNA, 24 bp, Artificial Sequence
  Synthetic oligonucleotide; ATAGAAT chr11 5392384 5392407 5392387 -
accccattctaccaaatgagatct

SEQ ID NO: 67772 - DNA, 24 bp, Artificial Sequence
  Synthetic oligonucleotide; GAAGAAT chr11 5392355 5392378 5392358 -
ataggaatttcctctcaacatgga

SEQ ID NO: 67773 - DNA, 24 bp, Artificial Sequence
  Synthetic oligonucleotide; TTAGAAT chr11 5392287 5392310 5392290 -
tactatgtggatgtaaattaaagt

SEQ ID NO: 67774 - DNA, 24 bp, Artificial Sequence
  Synthetic oligonucleotide; GCAGAAA chr11 5392244 5392267 5392247 -
taaggagtgccagcctgtaaggct

SEQ ID NO: 67775 - DNA, 24 bp, Artificial Sequence
  Synthetic oligonucleotide; CAAGAAA chr11 5392154 5392177 5392157 -
catgagataccacacaaacataca

SEQ ID NO: 67776 - DNA, 24 bp, Artificial Sequence
  Synthetic oligonucleotide; GGAGAAT chr11 5391724 5391747 5391727 -
gcctcatggtaattttaacctgta

SEQ ID NO: 67777 - DNA, 24 bp, Artificial Sequence
  Synthetic oligonucleotide; GCAGAAA chr11 5391644 5391667 5391647 -
gatataccaccttgatggatgcca

SEQ ID NO: 67778 - DNA, 24 bp, Artificial Sequence
  Synthetic oligonucleotide; TTAGAAA chr11 5390949 5390972 5390952 -
atatggtcaggagagagcacaacc

SEQ ID NO: 67779 - DNA, 24 bp, Artificial Sequence
  Synthetic oligonucleotide; GAAGAAT chr11 5390909 5390932 5390912 -
gtgttgcttgaaacaggtgttgag

SEQ ID NO: 67780 - DNA, 24 bp, Artificial Sequence
  Synthetic oligonucleotide; ATAGAAA chr11 5390844 5390867 5390847 -
gtctgaaagttactgctgaccagg

SEQ ID NO: 67781 - DNA, 24 bp, Artificial Sequence
  Synthetic oligonucleotide; GAAGAAA chr11 5390830 5390853 5390833 -
gctgaccaggatagaaaaagatga

SEQ ID NO: 67782 - DNA, 24 bp, Artificial Sequence
  Synthetic oligonucleotide; AAAGAAT chr11 5390191 5390214 5390194 -
cagggacagccccatcatgggcac

SEQ ID NO: 67783 - DNA, 24 bp, Artificial Sequence
  Synthetic oligonucleotide; TCAGAAT chr11 5389574 5389597 5389577 -
gacgagggttggtcttaataatga

SEQ ID NO: 67784 - DNA, 24 bp, Artificial Sequence
  Synthetic oligonucleotide; AAAGAAA chr11 5389534 5389557 5389537 -
gcctgagatggcaaccatgtacat

SEQ ID NO: 67785 - DNA, 24 bp, Artificial Sequence
  Synthetic oligonucleotide; ATAGAAT chr11 5389474 5389497 5389477 -
ttccaatccaggaaagctggtgag

SEQ ID NO: 67786 - DNA, 24 bp, Artificial Sequence
  Synthetic oligonucleotide; ACAGAAA chr11 5387941 5387964 5387944 -
acctaggtactgaaaatacaatga

SEQ ID NO: 67787 - DNA, 24 bp, Artificial Sequence
  Synthetic oligonucleotide; GAAGAAA chr11 5387783 5387806 5387786 -
cctctctgagtaggtaattttaga

SEQ ID NO: 67788 - DNA, 24 bp, Artificial Sequence
  Synthetic oligonucleotide; CTAGAAA chr11 5387233 5387256 5387236 -
atgccttcctttttagagctctct

SEQ ID NO: 67789 - DNA, 24 bp, Artificial Sequence
  Synthetic oligonucleotide; GCAGAAA chr11 5386632 5386655 5386635 -
ctctactgcagccaccgagattat

SEQ ID NO: 67790 - DNA, 24 bp, Artificial Sequence
  Synthetic oligonucleotide; TTAGAAT chr11 5386571 5386594 5386574 -
tcagtacttcagtagctcctatca

SEQ ID NO: 67791 - DNA, 24 bp, Artificial Sequence
  Synthetic oligonucleotide; GGAGAAA chr11 5386429 5386452 5386432 -
aaacattttattactacttcacaa

SEQ ID NO: 67792 - DNA, 24 bp, Artificial Sequence
  Synthetic oligonucleotide; ATAGAAT chr11 5385861 5385884 5385864 -
tatagatttactcataaatacttt

SEQ ID NO: 67793 - DNA, 24 bp, Artificial Sequence
  Synthetic oligonucleotide; GTAGAAA chr11 5385368 5385391 5385371 -
gagatggacagggagaaggatctg

SEQ ID NO: 67794 - DNA, 24 bp, Artificial Sequence
  Synthetic oligonucleotide; GAAGAAA chr11 5385293 5385316 5385296 -
cttggaaagtatacttcctcttgg

SEQ ID NO: 67795 - DNA, 24 bp, Artificial Sequence
  Synthetic oligonucleotide; GGAGAAA chr11 5385117 5385140 5385120 -
agagtagattcatcttagatcaca

SEQ ID NO: 67796 - DNA, 24 bp, Artificial Sequence
  Synthetic oligonucleotide; GGAGAAT chr11 5384970 5384993 5384973 -
ggaggatactgtttcttgtaaata

SEQ ID NO: 67797 - DNA, 24 bp, Artificial Sequence
  Synthetic oligonucleotide; ACAGAAT chr11 5384507 5384530 5384510 -
cagccctgcctcctggccttccta

SEQ ID NO: 67798 - DNA, 24 bp, Artificial Sequence
  Synthetic oligonucleotide; TGAGAAT chr11 5384416 5384439 5384419 -
ggctctggttctgtgcatagactc

SEQ ID NO: 67799 - DNA, 24 bp, Artificial Sequence
  Synthetic oligonucleotide; GAAGAAT chr11 5384296 5384319 5384299 -
cacacttataatcctggcaacttg

SEQ ID NO: 67800 - DNA, 24 bp, Artificial Sequence
  Synthetic oligonucleotide; AAAGAAA chr11 5384179 5384202 5384182 -
acctcatttctaaaaacaacaaac

SEQ ID NO: 67801 - DNA, 24 bp, Artificial Sequence
  Synthetic oligonucleotide; AAAGAAA chr11 5384164 5384187 5384167 -
acaacaaacaaagaaacaacaaca

SEQ ID NO: 67802 - DNA, 24 bp, Artificial Sequence
  Synthetic oligonucleotide; AAAGAAA chr11 5384155 5384178 5384158 -
aaagaaacaacaacaaaagaaaac

SEQ ID NO: 67803 - DNA, 24 bp, Artificial Sequence
  Synthetic oligonucleotide; GAAGAAA chr11 5383872 5383895 5383875 -
gaagccaatgagtaggttccaaag

SEQ ID NO: 67804 - DNA, 24 bp, Artificial Sequence
  Synthetic oligonucleotide; TTAGAAA chr11 5383108 5383131 5383111 -
tctggtagcaaatgccatcaacat

SEQ ID NO: 67805 - DNA, 24 bp, Artificial Sequence
  Synthetic oligonucleotide; CCAGAAA chr11 5382616 5382639 5382619 -
ggcttgtaggagagggcaccacta

SEQ ID NO: 67806 - DNA, 24 bp, Artificial Sequence
  Synthetic oligonucleotide; TCAGAAA chr11 5382605 5382628 5382608 -
gagggcaccactaccagaaaaatt

SEQ ID NO: 67807 - DNA, 24 bp, Artificial Sequence
  Synthetic oligonucleotide; TAAGAAT chr11 5382333 5382356 5382336 -
ccaacctgagctatgaagactaat

SEQ ID NO: 67808 - DNA, 24 bp, Artificial Sequence
  Synthetic oligonucleotide; ATAGAAA chr11 5382307 5382330 5382310 -
agaatcaaccacagatagggcttt

SEQ ID NO: 67809 - DNA, 24 bp, Artificial Sequence
  Synthetic oligonucleotide; TGAGAAA chr11 5381633 5381656 5381636 -
ttgacgtgcattaagtgcgtcctg

SEQ ID NO: 67810 - DNA, 24 bp, Artificial Sequence
  Synthetic oligonucleotide; TTAGAAT chr11 5381299 5381322 5381302 -
attcaggccttaacctttaaggta

SEQ ID NO: 67811 - DNA, 24 bp, Artificial Sequence
  Synthetic oligonucleotide; AAAGAAT chr11 5381284 5381307 5381287 -
tttaaggtattagaattcattatt

SEQ ID NO: 67812 - DNA, 24 bp, Artificial Sequence
  Synthetic oligonucleotide; AGAGAAA chr11 5381165 5381188 5381168 -
tttgtgtgtgtgtgagagagagag

SEQ ID NO: 67813 - DNA, 24 bp, Artificial Sequence
  Synthetic oligonucleotide; CCAGAAT chr11 5381055 5381078 5381058 -
aagttttatttaaggaacctctat

SEQ ID NO: 67814 - DNA, 24 bp, Artificial Sequence
  Synthetic oligonucleotide; CAAGAAA chr11 5380869 5380892 5380872 -
caaggccctactatccccagggca

SEQ ID NO: 67815 - DNA, 24 bp, Artificial Sequence
  Synthetic oligonucleotide; CCAGAAA chr11 5380582 5380605 5380585 -
ccaagccttaaatccccactctga

SEQ ID NO: 67816 - DNA, 24 bp, Artificial Sequence
  Synthetic oligonucleotide; ACAGAAA chr11 5380496 5380519 5380499 -
agactctttttaggtgtctctgtc

SEQ ID NO: 67817 - DNA, 24 bp, Artificial Sequence
  Synthetic oligonucleotide; TAAGAAA chr11 5380332 5380355 5380335 -
tcttctggactggtccacagcccc

SEQ ID NO: 67818 - DNA, 24 bp, Artificial Sequence
  Synthetic oligonucleotide; TCAGAAA chr11 5380205 5380228 5380208 -
ccacatcttcccacagcaactctt

SEQ ID NO: 67819 - DNA, 24 bp, Artificial Sequence
  Synthetic oligonucleotide; GCAGAAA chr11 5379899 5379922 5379902 -
ggtctcatgctggttccaaacatg

SEQ ID NO: 67820 - DNA, 24 bp, Artificial Sequence
  Synthetic oligonucleotide; AGAGAAA chr11 5379836 5379859 5379839 -
acatgatgagagaggacgccaggg

SEQ ID NO: 67821 - DNA, 24 bp, Artificial Sequence
  Synthetic oligonucleotide; CCAGAAA chr11 5379828 5379851 5379831 -
agagaggacgccagggagagaaac

SEQ ID NO: 67822 - DNA, 24 bp, Artificial Sequence
  Synthetic oligonucleotide; TTAGAAT chr11 5379777 5379800 5379780 -
tcaagctgtccaccatatgtgaaa

SEQ ID NO: 67823 - DNA, 24 bp, Artificial Sequence
  Synthetic oligonucleotide; ATAGAAA chr11 5379574 5379597 5379577 -
tgtatgccaatcttaaaagcagac

SEQ ID NO: 67824 - DNA, 24 bp, Artificial Sequence
  Synthetic oligonucleotide; CAAGAAA chr11 5379552 5379575 5379555 -
acatagaaaaagacacattgcata

SEQ ID NO: 67825 - DNA, 24 bp, Artificial Sequence
  Synthetic oligonucleotide; TGAGAAT chr11 5379239 5379262 5379242 -
cattgttcagttcccatctatgag

SEQ ID NO: 67826 - DNA, 24 bp, Artificial Sequence
  Synthetic oligonucleotide; TGAGAAT chr11 5379195 5379218 5379198 -
ttttttgtccttgcgatagtttac

SEQ ID NO: 67827 - DNA, 24 bp, Artificial Sequence
  Synthetic oligonucleotide; GAAGAAA chr11 5377942 5377965 5377945 -
ttaaagtcgtttttccaattctgt

SEQ ID NO: 67828 - DNA, 24 bp, Artificial Sequence
  Synthetic oligonucleotide; TAAGAAT chr11 5377657 5377680 5377660 -
ctctgtttgtctgttattggtgta

SEQ ID NO: 67829 - DNA, 24 bp, Artificial Sequence
  Synthetic oligonucleotide; TTAGAAT chr11 5376874 5376897 5376877 -
taccaattcctccttgtacctctg

SEQ ID NO: 67830 - DNA, 24 bp, Artificial Sequence
  Synthetic oligonucleotide; TCAGAAA chr11 5373645 5373668 5373648 -
ctggtgcgccatttcctaagcctg

SEQ ID NO: 67831 - DNA, 24 bp, Artificial Sequence
  Synthetic oligonucleotide; GCAGAAA chr11 5373424 5373447 5373427 -
gaaccccatacctcagatggaaat

SEQ ID NO: 67832 - DNA, 24 bp, Artificial Sequence
  Synthetic oligonucleotide; AAAGAAA chr11 5373324 5373347 5373327 -
tcaaaaactggaactttatttgtg

SEQ ID NO: 67833 - DNA, 24 bp, Artificial Sequence
  Synthetic oligonucleotide; TGAGAAT chr11 5373044 5373067 5373047 -
cccctattgtgttggtggccttgt

SEQ ID NO: 67834 - DNA, 24 bp, Artificial Sequence
  Synthetic oligonucleotide; AAAGAAA chr11 5372731 5372754 5372734 -
caaactaaatattttctgcacagc

SEQ ID NO: 67835 - DNA, 24 bp, Artificial Sequence
  Synthetic oligonucleotide; GGAGAAA chr11 5372700 5372723 5372703 -
acaatcatcaaaaggaacagtttg

SEQ ID NO: 67836 - DNA, 24 bp, Artificial Sequence
  Synthetic oligonucleotide; GGAGAAA chr11 5372413 5372436 5372416 -
agagataggggttggagaggctgt

SEQ ID NO: 67837 - DNA, 24 bp, Artificial Sequence
  Synthetic oligonucleotide; ATAGAAA chr11 5372357 5372380 5372360 -
ggaatgtaagttaacatagccatt

SEQ ID NO: 67838 - DNA, 24 bp, Artificial Sequence
  Synthetic oligonucleotide; GAAGAAA chr11 5372303 5372326 5372306 -
ctaaaaatagagttattgtatgat

SEQ ID NO: 67839 - DNA, 24 bp, Artificial Sequence
  Synthetic oligonucleotide; ACAGAAA chr11 5372010 5372033 5372013 -
tttgctaagtgaaataaaccagac

SEQ ID NO: 67840 - DNA, 24 bp, Artificial Sequence
  Synthetic oligonucleotide; AAAGAAA chr11 5371965 5371988 5371968 -
atattacttatatgtggaatctca

SEQ ID NO: 67841 - DNA, 24 bp, Artificial Sequence
  Synthetic oligonucleotide; ATAGAAA chr11 5371943 5371966 5371946 -
caaaagaaaaataaggtcaaatgc

SEQ ID NO: 67842 - DNA, 24 bp, Artificial Sequence
  Synthetic oligonucleotide; GAAGAAA chr11 5371922 5371945 5371925 -
tgcatagaaacagtgtaaaaaggg

SEQ ID NO: 67843 - DNA, 24 bp, Artificial Sequence
  Synthetic oligonucleotide; AAAGAAA chr11 5371918 5371941 5371921 -
tagaaacagtgtaaaaaggggaag

SEQ ID NO: 67844 - DNA, 24 bp, Artificial Sequence
  Synthetic oligonucleotide; AGAGAAA chr11 5371912 5371935 5371915 -
cagtgtaaaaaggggaagaaagaa

SEQ ID NO: 67845 - DNA, 24 bp, Artificial Sequence
  Synthetic oligonucleotide; AAAGAAA chr11 5371762 5371785 5371765 -
agtagatgttagatgcccttacac

SEQ ID NO: 67846 - DNA, 24 bp, Artificial Sequence
  Synthetic oligonucleotide; AGAGAAT chr11 5371338 5371361 5371341 -
ctctattaaatgtttatgagccac

SEQ ID NO: 67847 - DNA, 24 bp, Artificial Sequence
  Synthetic oligonucleotide; TGAGAAT chr11 5371332 5371355 5371335 -
taaatgtttatgagccacagagaa

SEQ ID NO: 67848 - DNA, 24 bp, Artificial Sequence
  Synthetic oligonucleotide; TCAGAAT chr11 5371217 5371240 5371220 -
gctgtgtggcttagagtataaaca

SEQ ID NO: 67849 - DNA, 24 bp, Artificial Sequence
  Synthetic oligonucleotide; CTAGAAT chr11 5371196 5371219 5371199 -
acatcagaatgtgctatggacttt

SEQ ID NO: 67850 - DNA, 24 bp, Artificial Sequence
  Synthetic oligonucleotide; TCAGAAT chr11 5371167 5371190 5371170 -
atatttcagtgcccttgtatatcc

SEQ ID NO: 67851 - DNA, 24 bp, Artificial Sequence
  Synthetic oligonucleotide; AGAGAAT chr11 5370706 5370729 5370709 -
ttaaaatacaagcttcataggaac

SEQ ID NO: 67852 - DNA, 24 bp, Artificial Sequence
  Synthetic oligonucleotide; ACAGAAA chr11 5370568 5370591 5370571 -
ttattctattattcatttctaaac

SEQ ID NO: 67853 - DNA, 24 bp, Artificial Sequence
  Synthetic oligonucleotide; TGAGAAA chr11 5370558 5370581 5370561 -
attcatttctaaacacagaaagag

SEQ ID NO: 67854 - DNA, 24 bp, Artificial Sequence
  Synthetic oligonucleotide; GGAGAAA chr11 5370550 5370573 5370553 -
ctaaacacagaaagagtgagaaag

SEQ ID NO: 67855 - DNA, 24 bp, Artificial Sequence
  Synthetic oligonucleotide; ACAGAAA chr11 5370542 5370565 5370545 -
agaaagagtgagaaagggagaaag

SEQ ID NO: 67856 - DNA, 24 bp, Artificial Sequence
  Synthetic oligonucleotide; TAAGAAT chr11 5370534 5370557 5370537 -
tgagaaagggagaaagacagaaag

SEQ ID NO: 67857 - DNA, 24 bp, Artificial Sequence
  Synthetic oligonucleotide; AAAGAAA chr11 5370526 5370549 5370529 -
ggagaaagacagaaagtaagaatg

SEQ ID NO: 67858 - DNA, 24 bp, Artificial Sequence
  Synthetic oligonucleotide; AAAGAAT chr11 5370508 5370531 5370511 -
agaatgaaagaaagagagtgagat

SEQ ID NO: 67859 - DNA, 24 bp, Artificial Sequence
  Synthetic oligonucleotide; ACAGAAT chr11 5369988 5370011 5369991 -
aagatcttgttgatacagattgac

SEQ ID NO: 67860 - DNA, 24 bp, Artificial Sequence
  Synthetic oligonucleotide; TGAGAAA chr11 5369938 5369961 5369941 -
ctgcctttccttgagtaaaaatcc

SEQ ID NO: 67861 - DNA, 24 bp, Artificial Sequence
  Synthetic oligonucleotide; GTAGAAA chr11 5369703 5369726 5369706 -
gttcatatatgtatatataaatgt

SEQ ID NO: 67862 - DNA, 24 bp, Artificial Sequence
  Synthetic oligonucleotide; AGAGAAA chr11 5369690 5369713 5369693 -
tatataaatgtgtagaaaagttgc

SEQ ID NO: 67863 - DNA, 24 bp, Artificial Sequence
  Synthetic oligonucleotide; ATAGAAA chr11 5369644 5369667 5369647 -
aaagggaaattatctccagggagg

SEQ ID NO: 67864 - DNA, 24 bp, Artificial Sequence
  Synthetic oligonucleotide; CCAGAAA chr11 5369466 5369489 5369469 -
aaattatcagattttattttttat

SEQ ID NO: 67865 - DNA, 24 bp, Artificial Sequence
  Synthetic oligonucleotide; CTAGAAA chr11 5369224 5369247 5369227 -
atgttggcctcattcagtacagta

SEQ ID NO: 67866 - DNA, 24 bp, Artificial Sequence
  Synthetic oligonucleotide; AAAGAAA chr11 5368933 5368956 5368936 -
atcagatctgtaagcatgatccgg

SEQ ID NO: 67867 - DNA, 24 bp, Artificial Sequence
  Synthetic oligonucleotide; TAAGAAT chr11 5368870 5368893 5368873 -
gaaggaaacctctcttaatccaca

SEQ ID NO: 67868 - DNA, 24 bp, Artificial Sequence
  Synthetic oligonucleotide; AAAGAAA chr11 5368812 5368835 5368815 -
agaacactttgccctgggggaaaa

SEQ ID NO: 67869 - DNA, 24 bp, Artificial Sequence
  Synthetic oligonucleotide; TTAGAAA chr11 5368722 5368745 5368725 -
ataatattttgagtaactcaatgt

SEQ ID NO: 67870 - DNA, 24 bp, Artificial Sequence
  Synthetic oligonucleotide; TGAGAAT chr11 5368646 5368669 5368649 -
ctctgctttctcacaggatgcatg

SEQ ID NO: 67871 - DNA, 24 bp, Artificial Sequence
  Synthetic oligonucleotide; TTAGAAT chr11 5368620 5368643 5368623 -
agaataaaacacaaagtctttatg

SEQ ID NO: 67872 - DNA, 24 bp, Artificial Sequence
  Synthetic oligonucleotide; ACAGAAA chr11 5368328 5368351 5368331 -
acttaaagatgagtggaccaaaac

SEQ ID NO: 67873 - DNA, 24 bp, Artificial Sequence
  Synthetic oligonucleotide; AAAGAAA chr11 5368102 5368125 5368105 -
aatctgaatggcagaggaaaaaac

SEQ ID NO: 67874 - DNA, 24 bp, Artificial Sequence
  Synthetic oligonucleotide; GAAGAAT chr11 5367973 5367996 5367976 -
ctactctggtagaagtgaaacttt

SEQ ID NO: 67875 - DNA, 24 bp, Artificial Sequence
  Synthetic oligonucleotide; GCAGAAA chr11 5367877 5367900 5367880 -
atgaggacataaaaatagatatag

SEQ ID NO: 67876 - DNA, 24 bp, Artificial Sequence
  Synthetic oligonucleotide; CCAGAAA chr11 5367799 5367822 5367802 -
gcctctattctgggtgctagcata

SEQ ID NO: 67877 - DNA, 24 bp, Artificial Sequence
  Synthetic oligonucleotide; CCAGAAA chr11 5367692 5367715 5367695 -
gctgagacctactgggctgtattc

SEQ ID NO: 67878 - DNA, 24 bp, Artificial Sequence
  Synthetic oligonucleotide; TTAGAAA chr11 5367506 5367529 5367509 -
ctctcccaccagcactatgactgt

SEQ ID NO: 67879 - DNA, 24 bp, Artificial Sequence
  Synthetic oligonucleotide; AGAGAAT chr11 5367070 5367093 5367073 -
tcagaaccacattcctgagacttg

SEQ ID NO: 67880 - DNA, 24 bp, Artificial Sequence
  Synthetic oligonucleotide; AGAGAAT chr11 5367044 5367067 5367047 -
agaatgtctttggtctctgctgct

SEQ ID NO: 67881 - DNA, 24 bp, Artificial Sequence
  Synthetic oligonucleotide; TAAGAAT chr11 5365874 5365897 5365877 -
cccaagaggtaagcagagttcctc

SEQ ID NO: 67882 - DNA, 24 bp, Artificial Sequence
  Synthetic oligonucleotide; CCAGAAT chr11 5365476 5365499 5365479 -
ggaaaatggttgctgactggcaga

SEQ ID NO: 67883 - DNA, 24 bp, Artificial Sequence
  Synthetic oligonucleotide; GAAGAAA chr11 5365150 5365173 5365153 -
tgtctacagaactcaccagacaaa

SEQ ID NO: 67884 - DNA, 24 bp, Artificial Sequence
  Synthetic oligonucleotide; CAAGAAT chr11 5365027 5365050 5365030 -
tttgcccaagattcattgctgtga

SEQ ID NO: 67885 - DNA, 24 bp, Artificial Sequence
  Synthetic oligonucleotide; TGAGAAA chr11 5365000 5365023 5365003 -
gaatgacaagaagaagcagttact

SEQ ID NO: 67886 - DNA, 24 bp, Artificial Sequence
  Synthetic oligonucleotide; ATAGAAA chr11 5364855 5364878 5364858 -
actatattaaatggaaattcacca

SEQ ID NO: 67887 - DNA, 24 bp, Artificial Sequence
  Synthetic oligonucleotide; ACAGAAT chr11 5364573 5364596 5364576 -
gcttagtttattttttcatttaat

SEQ ID NO: 67888 - DNA, 24 bp, Artificial Sequence
  Synthetic oligonucleotide; TGAGAAT chr11 5364480 5364503 5364483 -
tagtccagcaaggagactgaccat

SEQ ID NO: 67889 - DNA, 24 bp, Artificial Sequence
  Synthetic oligonucleotide; ACAGAAA chr11 5364449 5364472 5364452 -
tacaaatatggcaggaatttctaa

SEQ ID NO: 67890 - DNA, 24 bp, Artificial Sequence
  Synthetic oligonucleotide; ACAGAAA chr11 5364418 5364441 5364421 -
gatgtgcagctctcatatcctgtc

SEQ ID NO: 67891 - DNA, 24 bp, Artificial Sequence
  Synthetic oligonucleotide; GGAGAAT chr11 5364076 5364099 5364079 -
tataatcgaccttattgcaaccat

SEQ ID NO: 67892 - DNA, 24 bp, Artificial Sequence
  Synthetic oligonucleotide; ACAGAAA chr11 5363943 5363966 5363946 -
cctaacacaagcttctcctccttt

SEQ ID NO: 67893 - DNA, 24 bp, Artificial Sequence
  Synthetic oligonucleotide; ATAGAAT chr11 5363775 5363798 5363778 -
attgcatatggtccctagttttta

SEQ ID NO: 67894 - DNA, 24 bp, Artificial Sequence
  Synthetic oligonucleotide; ACAGAAT chr11 5363734 5363757 5363737 -
atgctactttcccgctttccaata

SEQ ID NO: 67895 - DNA, 24 bp, Artificial Sequence
  Synthetic oligonucleotide; TGAGAAA chr11 5363619 5363642 5363622 -
acaatataatcttagtagtatcta

SEQ ID NO: 67896 - DNA, 24 bp, Artificial Sequence
  Synthetic oligonucleotide; ATAGAAA chr11 5362918 5362941 5362921 -
gcaacaggcgggacacttccagca

SEQ ID NO: 67897 - DNA, 24 bp, Artificial Sequence
  Synthetic oligonucleotide; AAAGAAA chr11 5362914 5362937 5362917 -
caggcgggacacttccagcaatag

SEQ ID NO: 67898 - DNA, 24 bp, Artificial Sequence
  Synthetic oligonucleotide; ACAGAAA chr11 5362235 5362258 5362238 -
ttccttatctactcccatcccccg

SEQ ID NO: 67899 - DNA, 24 bp, Artificial Sequence
  Synthetic oligonucleotide; AAAGAAA chr11 5361390 5361413 5361393 -
gactatactcagaagccaagctgc

SEQ ID NO: 67900 - DNA, 24 bp, Artificial Sequence
  Synthetic oligonucleotide; TCAGAAA chr11 5361376 5361399 5361379 -
gccaagctgcaaagaaaattagtt

SEQ ID NO: 67901 - DNA, 24 bp, Artificial Sequence
  Synthetic oligonucleotide; CCAGAAA chr11 5361241 5361264 5361244 -
taggttagggaattagccacatct

SEQ ID NO: 67902 - DNA, 24 bp, Artificial Sequence
  Synthetic oligonucleotide; GTAGAAA chr11 5361206 5361229 5361209 -
atttattttaagcatcacataggg

SEQ ID NO: 67903 - DNA, 24 bp, Artificial Sequence
  Synthetic oligonucleotide; AAAGAAA chr11 5361201 5361224 5361204 -
ttttaagcatcacataggggtaga

SEQ ID NO: 67904 - DNA, 24 bp, Artificial Sequence
  Synthetic oligonucleotide; TGAGAAT chr11 5360875 5360898 5360878 -
gtttttgtccttgcgatagtttgc

SEQ ID NO: 67905 - DNA, 24 bp, Artificial Sequence
  Synthetic oligonucleotide; TAAGAAA chr11 5359973 5359996 5359976 -
ttgaattaatttttgtataaggtg

SEQ ID NO: 67906 - DNA, 24 bp, Artificial Sequence
  Synthetic oligonucleotide; GAAGAAA chr11 5359624 5359647 5359627 -
taaagtagttttttccaattctgt

SEQ ID NO: 67907 - DNA, 24 bp, Artificial Sequence
  Synthetic oligonucleotide; TAAGAAT chr11 5359339 5359362 5359342 -
ctctgtttgtctgttattggtgta

SEQ ID NO: 67908 - DNA, 24 bp, Artificial Sequence
  Synthetic oligonucleotide; CCAGAAA chr11 5359140 5359163 5359143 -
ccttctcctgcctaattgccctgg

SEQ ID NO: 67909 - DNA, 24 bp, Artificial Sequence
  Synthetic oligonucleotide; GTAGAAT chr11 5358557 5358580 5358560 -
taccagctcctccttgtacctctg

SEQ ID NO: 67910 - DNA, 24 bp, Artificial Sequence
  Synthetic oligonucleotide; AAAGAAT chr11 5357695 5357718 5357698 -
ggaataggtgtggtgtggtgctga

SEQ ID NO: 67911 - DNA, 24 bp, Artificial Sequence
  Synthetic oligonucleotide; TAAGAAA chr11 5355816 5355839 5355819 -
gagcagggcattacattgatcctt

SEQ ID NO: 67912 - DNA, 24 bp, Artificial Sequence
  Synthetic oligonucleotide; TTAGAAA chr11 5355745 5355768 5355748 -
ttttttaatttttaaaggtaattg

SEQ ID NO: 67913 - DNA, 24 bp, Artificial Sequence
  Synthetic oligonucleotide; ACAGAAA chr11 5354433 5354456 5354436 -
cacatctcttcagtataaggaaga

SEQ ID NO: 67914 - DNA, 24 bp, Artificial Sequence
  Synthetic oligonucleotide; AGAGAAA chr11 5354420 5354443 5354423 -
tataaggaagaacagaaagggagg

SEQ ID NO: 67915 - DNA, 24 bp, Artificial Sequence
  Synthetic oligonucleotide; ACAGAAT chr11 5354383 5354406 5354386 -
gttgtcagtcaaatgtgtccattt

SEQ ID NO: 67916 - DNA, 24 bp, Artificial Sequence
  Synthetic oligonucleotide; CAAGAAA chr11 5354293 5354316 5354296 -
gatcactggacctagagggtgagt

SEQ ID NO: 67917 - DNA, 24 bp, Artificial Sequence
  Synthetic oligonucleotide; GAAGAAA chr11 5354232 5354255 5354235 -
gaattcattcccaaaagcccaagg

SEQ ID NO: 67918 - DNA, 24 bp, Artificial Sequence
  Synthetic oligonucleotide; ACAGAAA chr11 5354146 5354169 5354149 -
acagacagaagaactagcagacac

SEQ ID NO: 67919 - DNA, 24 bp, Artificial Sequence
  Synthetic oligonucleotide; AGAGAAA chr11 5353989 5354012 5353992 -
agcacacagtcaagaagctacaaa

SEQ ID NO: 67920 - DNA, 24 bp, Artificial Sequence
  Synthetic oligonucleotide; CAAGAAT chr11 5353844 5353867 5353847 -
tttctctgtgttatttatacatcc

SEQ ID NO: 67921 - DNA, 24 bp, Artificial Sequence
  Synthetic oligonucleotide; AAAGAAT chr11 5353678 5353701 5353681 -
acatcataccctgtattttggtca

SEQ ID NO: 67922 - DNA, 24 bp, Artificial Sequence
  Synthetic oligonucleotide; AAAGAAT chr11 5353565 5353588 5353568 -
cctcttctcatgcctagactctga

SEQ ID NO: 67923 - DNA, 24 bp, Artificial Sequence
  Synthetic oligonucleotide; CCAGAAA chr11 5353543 5353566 5353546 -
gaaaagaatcaaaagtatttggag

SEQ ID NO: 67924 - DNA, 24 bp, Artificial Sequence
  Synthetic oligonucleotide; TTAGAAA chr11 5353301 5353324 5353304 -
ctatcaagacaatggtcatctgaa

SEQ ID NO: 67925 - DNA, 24 bp, Artificial Sequence
  Synthetic oligonucleotide; GAAGAAA chr11 5353159 5353182 5353162 -
tgagggaaatggtttaccctcatt

SEQ ID NO: 67926 - DNA, 24 bp, Artificial Sequence
  Synthetic oligonucleotide; GAAGAAA chr11 5353123 5353146 5353126 -
tgagggaaatggcttactctcatt

SEQ ID NO: 67927 - DNA, 24 bp, Artificial Sequence
  Synthetic oligonucleotide; CTAGAAA chr11 5353091 5353114 5353094 -
tctcatttcttcacgtgcaatttt

SEQ ID NO: 67928 - DNA, 24 bp, Artificial Sequence
  Synthetic oligonucleotide; CAAGAAT chr11 5352936 5352959 5352939 -
tgccggtgacccaaatcatagacc

SEQ ID NO: 67929 - DNA, 24 bp, Artificial Sequence
  Synthetic oligonucleotide; TGAGAAA chr11 5352695 5352718 5352698 -
tcaaacaatgtgagttaaattacc

SEQ ID NO: 67930 - DNA, 24 bp, Artificial Sequence
  Synthetic oligonucleotide; AGAGAAT chr11 5352426 5352449 5352429 -
atgtcatgctctagagtgaggcag

SEQ ID NO: 67931 - DNA, 24 bp, Artificial Sequence
  Synthetic oligonucleotide; TGAGAAT chr11 5352169 5352192 5352172 -
cagaaccaatgcccatgacagtct

SEQ ID NO: 67932 - DNA, 24 bp, Artificial Sequence
  Synthetic oligonucleotide; GGAGAAA chr11 5352153 5352176 5352156 -
gacagtcttgagaatcaaaatgta

SEQ ID NO: 67933 - DNA, 24 bp, Artificial Sequence
  Synthetic oligonucleotide; TGAGAAA chr11 5352139 5352162 5352142 -
tcaaaatgtaggagaaaaagatga

SEQ ID NO: 67934 - DNA, 24 bp, Artificial Sequence
  Synthetic oligonucleotide; ACAGAAA chr11 5352039 5352062 5352042 -
tagcttgatgacatcttggtgtag

SEQ ID NO: 67935 - DNA, 24 bp, Artificial Sequence
  Synthetic oligonucleotide; ACAGAAA chr11 5351828 5351851 5351831 -
gcaagcaagacacctgactccatg

SEQ ID NO: 67936 - DNA, 24 bp, Artificial Sequence
  Synthetic oligonucleotide; TAAGAAA chr11 5351691 5351714 5351694 -
gaggtctgtagctgccaacatagc

SEQ ID NO: 67937 - DNA, 24 bp, Artificial Sequence
  Synthetic oligonucleotide; TGAGAAA chr11 5351647 5351670 5351650 -
catggaggttatgatcattcctga

SEQ ID NO: 67938 - DNA, 24 bp, Artificial Sequence
  Synthetic oligonucleotide; TGAGAAT chr11 5351435 5351458 5351438 -
atcagttgtataaaagttgctcct

SEQ ID NO: 67939 - DNA, 24 bp, Artificial Sequence
  Synthetic oligonucleotide; ATAGAAT chr11 5351335 5351358 5351338 -
ctgggagatcctaggtatgggaaa

SEQ ID NO: 67940 - DNA, 24 bp, Artificial Sequence
  Synthetic oligonucleotide; GCAGAAT chr11 5351253 5351276 5351256 -
tacgttggggatacagctattcat

SEQ ID NO: 67941 - DNA, 24 bp, Artificial Sequence
  Synthetic oligonucleotide; CCAGAAA chr11 5351213 5351236 5351216 -
tgaattcattgtaaatcatataac

SEQ ID NO: 67942 - DNA, 24 bp, Artificial Sequence
  Synthetic oligonucleotide; GAAGAAA chr11 5351189 5351212 5351192 -
ccagaaaataaaaacaaaatgaaa

SEQ ID NO: 67943 - DNA, 24 bp, Artificial Sequence
  Synthetic oligonucleotide; GTAGAAA chr11 5351051 5351074 5351054 -
ggctatgtgagacctaaaagatca

SEQ ID NO: 67944 - DNA, 24 bp, Artificial Sequence
  Synthetic oligonucleotide; TAAGAAA chr11 5350981 5351004 5350984 -
tatatggaaaaacaaatacacaag

SEQ ID NO: 67945 - DNA, 24 bp, Artificial Sequence
  Synthetic oligonucleotide; TTAGAAA chr11 5350870 5350893 5350873 -
gaagctccagagacttttgggtag

SEQ ID NO: 67946 - DNA, 24 bp, Artificial Sequence
  Synthetic oligonucleotide; AAAGAAT chr11 5350769 5350792 5350772 -
ccctagttattgatacactgcttc

SEQ ID NO: 67947 - DNA, 24 bp, Artificial Sequence
  Synthetic oligonucleotide; GAAGAAT chr11 5350740 5350763 5350743 -
attcaaattttcataatataaatt

SEQ ID NO: 67948 - DNA, 24 bp, Artificial Sequence
  Synthetic oligonucleotide; GGAGAAT chr11 5350607 5350630 5350610 -
aattggtaatttaggcaagatcaa

SEQ ID NO: 67949 - DNA, 24 bp, Artificial Sequence
  Synthetic oligonucleotide; TTAGAAT chr11 5350538 5350561 5350541 -
aaagtgagaaggctctgtgactca

SEQ ID NO: 67950 - DNA, 24 bp, Artificial Sequence
  Synthetic oligonucleotide; TGAGAAT chr11 5350497 5350520 5350500 -
cagctggtgcaggcagccaacctc

SEQ ID NO: 67951 - DNA, 24 bp, Artificial Sequence
  Synthetic oligonucleotide; AGAGAAA chr11 5350461 5350484 5350464 -
aattgtgtgttggtggcatgagcc

SEQ ID NO: 67952 - DNA, 24 bp, Artificial Sequence
  Synthetic oligonucleotide; AAAGAAT chr11 5350343 5350366 5350346 -
tacaagacctctttctgtccatga

SEQ ID NO: 67953 - DNA, 24 bp, Artificial Sequence
  Synthetic oligonucleotide; GAAGAAT chr11 5350306 5350329 5350309 -
aagattactggactttcattttca

SEQ ID NO: 67954 - DNA, 24 bp, Artificial Sequence
  Synthetic oligonucleotide; GGAGAAA chr11 5349882 5349905 5349885 -
atatgtctgggtgggaaagggaaa

SEQ ID NO: 67955 - DNA, 24 bp, Artificial Sequence
  Synthetic oligonucleotide; TGAGAAA chr11 5349767 5349790 5349770 -
gaaagcaactctgtcctcaaaaag
